United States Patent Application Publication US 2014/0259212 A1 - sequence listing, part 33

SEQ ID NO: 114842 - DNA, 1239 bp, Shewanella hanedai
  CDS (1)..(1239): transl_table=11
atgtctaaacgtcgtgtcgtcgtaactggccttggcctgatcacaccagtcggaaatactgtcgattcaagctgggaagcgttgcttgctggcaagagtggtattgcgggaattcgattatttgatgctagcgagtttgcaactcgctttagtggctcagtcaaagattttgatgttgagcaatacatgtctcgtaaagatgccagaaaaatggatctcttcattcaatatggcatggctgctggcatacaagcgatgactgattcgggtctggatatggattgtatcgatccatctagagtgggtgtagctgtcggtgctggtatgggcggtatgccattgatagagaatggccataatgcacttatcaaaggtggaccgagaaagatatctccattctttgttccaagcaccattattaatatgatctcgggtcatctctccattaaatatggtatgacagggcctaactttgcagtaacgacagcctgtactactggcgtgcataatatcggcttagcggcccgtacaatcgcttatggtgatgcggacgtgatggtggcaggcggcgctgaagatgtgacttgtccacttgccgttggcggatttagttcggctaaagccttatcgacacgaaatgacgatccacaggcggcgtctcgcccttgggataaagaccgtgatgggtttgttattggtgacggtgctggtgtattggtacttgaggagtatgagcacgctatagcacgtggtgcgaccatttatggcgagcttgttggttttggcatgagtggagatgcatttcacatgacgtcaccaccagcggatggcgcaggtgctgcagcggcgatggttaatgccatcaacgatgcaaaacttgctcgagagcaaattggttatatcaatgcacatggcacgtccacaccagcgggtgataaagctgaagtggcggcagttaaatctgtgttcggtgatcgtgcctatgagctgctagtgagttcgactaaatcgatgacgggtcacttattgggggccgcgggttcagtagaagccattattactttattggctttaagggatcagatcatccctccaacgttgaacttagacaacccagatgaaggctgtgatttagattttgtccctcacacagctcgtgagcataaatttgagtatgctttatgtaactcatttggctttggtggcactaacggctctcttttatttaagaaagtttga

SEQ ID NO: 114843 - protein, 412 aa, Shewanella hanedai
MSKRRVVVTGLGLITPVGNTVDSSWEALLAGKSGIAGIRLFDASEFATRFSGSVKDFDVEQYMSRKDARKMDLFIQYGMAAGIQAMTDSGLDMDCIDPSRVGVAVGAGMGGMPLIENGHNALIKGGPRKISPFFVPSTIINMISGHLSIKYGMTGPNFAVTTACTTGVHNIGLAARTIAYGDADVMVAGGAEDVTCPLAVGGFSSAKALSTRNDDPQAASRPWDKDRDGFVIGDGAGVLVLEEYEHAIARGATIYGELVGFGMSGDAFHMTSPPADGAGAAAAMVNAINDAKLAREQIGYINAHGTSTPAGDKAEVAAVKSVFGDRAYELLVSSTKSMTGHLLGAAGSVEAIITLLALRDQIIPPTLNLDNPDEGCDLDFVPHTAREHKFEYALCNSFGFGGTNGSLLFKKV

SEQ ID NO: 114844 - DNA, 1308 bp, Neurospora crassa
  CDS (1)..(1308)
  misc_feature (251)..(251): n is a, g, c or t
  misc_feature (463)..(463): n is a, g, c or t
  misc_feature (522)..(522): n is a, g, c or t
  misc_feature (669)..(669): n is a, g, c or t
  misc_feature (677)..(677): n is a, g, c or t
  misc_feature (908)..(908): n is a, g, c or t
  misc_feature (982)..(982): n is a, g, c or t
  misc_feature (996)..(996): n is a, g, c or t
  misc_feature (1033)..(1033): n is a, g, c or t
  misc_feature (1036)..(1036): n is a, g, c or t
  misc_feature (1047)..(1047): n is a, g, c or t
  misc_feature (1067)..(1067): n is a, g, c or t
  misc_feature (1150)..(1150): n is a, g, c or t
  misc_feature (1263)..(1263): n is a, g, c or t
  misc_feature (1266)..(1266): n is a, g, c or t
  misc_feature (1302)..(1302): n is a, g, c or t
atgagacgcgtggtagtgacaggcctcggtgccatcacgcccttggccgtcggcatccgtcccacctggcgccggctcttggactctcattcgggcatcgtcagcgtcgctgacctcgagccccaggacaaatggaaggagctcaccagcaccgtgggcggccttgttcctacgcctgcgaggaacaagcagaatgttgacgaacagcacacttggaaggctgcggactggttggagccttcggaccaganacgcatgtctctcttcgcccagtattctgtcgctgctactgaaatggccctgcaagatgctgggtggaagcccacgaggcaggaagaccttgaagccacaggtgtctgcatgggaagcggaatcggtaacttggatgacttttataacaccagcgtcacgtatgacaaagagggctacaagagggtctcccctctctttgttcccaagattnttatcaacctcggggctggccacatcgccatgcgctacggtttccgtgggcccaaccantctgccaccaccgcttgtaccaccggcgctcactccatcggtgatgcctcccgcttcattgcctttggcgacgctgatgttatggtcgccggcggctccgagtcctgcattcaccctttaacttttgctggctttggccggtctcgntcgctgtntaccgcgtacaaccacgatccgacatctgcctgccgaccctttgacaaggaccgcgccggcttcgtggtatccgagggtgctgctgtcctcattctagaggagctggagcacgccaagaggcgcggcgctaggatcttggccgagctgacggggtatggatgcagtggtgatgcacatcacatgacggcgccaagggatgatgggtcaggggcattcctgtctatgaacanggcgctcaaaaatgccgggtgtcaaccgggggacgtggactatatcaatgcccatgccacggggacggctgtangagatgcggctgangcgattgccattcggtcgctgatgatgggtgaagaangantggacgacgantccaggattacggtgaacancaccaagggagcgattggtcatcttcttggtgcggcgggggccattgaatctgtgttttcgattctggccattgctgaggganccataccccccactctcaacttgaccagtcccaatgtcggcgttggattcaactttgtccctgttcaggcgcagcaaaaggaagtcaaggtggccatgtccaacagctttggnttngggggcaccaatgcctccttggtattttcaaagttngagtag

SEQ ID NO: 114845 - protein, 435 aa, Neurospora crassa
  misc_feature (84)..(84): The Xaa at location 84 stands for Arg, Ile, Lys, or Thr.
  misc_feature (155)..(155): The Xaa at location 155 stands for Ile, Leu, Phe, or Val.
  misc_feature (174)..(174): The Xaa at location 174 stands for Gln, or His.
  misc_feature (226)..(226): The Xaa at location 226 stands for Cys, Phe, Ser, or Tyr.
  misc_feature (303)..(303): The Xaa at location 303 stands for Arg, Lys, Met, or Thr.
  misc_feature (328)..(328): The Xaa at location 328 stands for Stop, Arg, or Gly.
  misc_feature (332)..(332): The Xaa at location 332 stands for Asp, or Glu.
  misc_feature (345)..(345): The Xaa at location 345 stands for Stop, Arg, or Gly.
  misc_feature (346)..(346): The Xaa at location 346 stands for Leu, Met, or Val.
  misc_feature (349)..(349): The Xaa at location 349 stands for Asp, or Glu.
  misc_feature (356)..(356): The Xaa at location 356 stands for Asn, Ile, Ser, or Thr.
  misc_feature (384)..(384): The Xaa at location 384 stands for Ala, Pro, Ser, or Thr.
  misc_feature (422)..(422): The Xaa at location 422 stands for Leu, or Phe.
  misc_feature (434)..(434): The Xaa at location 434 stands for Leu, or Phe.
MRRVVVTGLGAITPLAVGIRPTWRRLLDSHSGIVSVADLEPQDKWKELTSTVGGLVPTPARNKQNVDEQHTWKAADWLEPSDQXRMSLFAQYSVAATEMALQDAGWKPTRQEDLEATGVCMGSGIGNLDDFYNTSVTYDKEGYKRVSPLFVPKIXINLGAGHIAMRYGFRGPNXSATTACTTGAHSIGDASRFIAFGDADVMVAGGSESCIHPLTFAGFGRSRSLXTAYNHDPTSACRPFDKDRAGFVVSEGAAVLILEELEHAKRRGARILAELTGYGCSGDAHHMTAPRDDGSGAFLSMNXALKNAGCQPGDVDYINAHATGTAVXDAAXAIAIRSLMMGEEXXDDXSRITVNXTKGAIGHLLGAAGAIESVFSILAIAEGXIPPTLNLTSPNVGVGFNFVPVQAQQKEVKVAMSNSFGXGGTNASLVFSKXE

SEQ ID NO: 114846 - DNA, 1425 bp, Perilla frutescens
  CDS (1)..(1425)
atgcaatccctccactccaccggtctccgcccatctccgctcgacccacttctcaaaccccaccgctcctccgccgcggctctgccgggaagcaatgccaggccccccgcaaagaagctcccattcagagtctccgccgcagccgccgtggcggcggcgcccaagcgcgagaccgacccgaagaagcgcgtggtgatcacggggatggggttggtgtccgttttcggaaacgacgtcgacgcctactacgagaagctgctgagcggggagagcggcatcactctcattgatagattcgatgcgtcgaagttcccgacccgcttcggcgggcagattcgcgggttcaaggcggagggatacattgatgggaagaatgatcggagattggatgattgcttgaggtactgcattgtcgccggaaagaaggcgctcgagggtgcagatcttggtggagagaagctcaataagattgataagatccgagctggtgttctggttgggacgggaatgggcggtcttacagttttctctgatggtgttaaggctctaatagagaaaggtcacaggaaaataactccgtttttcataccttatgctataacaaacatggcctcggctttgcttgcgattgatcttggcttgatgggacccaattattcgatatcaactgcttgtgccacctcaaattattgtttctatgctgctgccaatcacatccgtcggggtgaagctgatctgatgattgctggtggaactgaagccgcgatgattcctattggtttgggtggttttgtcgcttgcagagcattgtcacagagaaatgatgatccacaaactgcttctaggccctgggacaaggatcgagatggttttgttatgggtgaaggttctggagtcttggtgatggagagtttggaacatgcaatgaaacgaggggcgccaatcattgctgaatacttgggaggtgcagtaaattgtgatgcttatcacatgacagatcccagagctgatggactcggtgtctcgtcatgtattcaaagtgcccttgaagattctggcgtttcacctgaggaggttaactacataaatgctcatgccacttccaccattgttggtgatttagcagacgtaaatgctattaagaaggtattcaagaacacctcagggatcaaaataaatgcaaccaagtcgatgatagggcattgtcttggtgctgctggtggtttagaagctattgcatcagtaaaagcaattacaactggatggcttcatcccaccataaatcaatttaatccggagccttccataggctttgataccgttgcaaacgaaaaacagcagcatgaagtcaatgttgcaatctcaaattcctttggattcgggggccacaactctgttgtcgcgttttctgcattcaaaccgtga

SEQ ID NO: 114847 - protein, 474 aa, Perilla frutescens
MQSLHSTGLRPSPLDPLLKPHRSSAAALPGSNARPPAKKLPFRVSAAAAVAAAPKRETDPKKRVVITGMGLVSVFGNDVDAYYEKLLSGESGITLIDRFDASKFPTRFGGQIRGFKAEGYIDGKNDRRLDDCLRYCIVAGKKALEGADLGGEKLNKIDKIRAGVLVGTGMGGLTVFSDGVKALIEKGHRKITPFFIPYAITNMASALLAIDLGLMGPNYSISTACATSNYCFYAAANHIRRGEADLMIAGGTEAAMIPIGLGGFVACRALSQRNDDPQTASRPWDKDRDGFVMGEGSGVLVMESLEHAMKRGAPIIAEYLGGAVNCDAYHMTDPRADGLGVSSCIQSALEDSGVSPEEVNYINAHATSTIVGDLADVNAIKKVFKNTSGIKINATKSMIGHCLGAAGGLEAIASVKAITTGWLHPTINQFNPEPSIGFDTVANEKQQHEVNVAISNSFGFGGHNSVVAFSAFKP

SEQ ID NO: 114848 - DNA, 1593 bp, Perilla frutescens
  CDS (1)..(1593)
atggccgcatgcatgtccgtcacgtgtgagagagaatccggcgtttctgcgctgtcgacgacgtcgtctaattcacgccgcctcaccaaatgggccgcccaccgccgcaagagggttctcgccaaatgtgcgccgcgcattcggaatctagtggattcttctctctcccttgagccccgccaccacttgcataaatctcacgaatgtttcttcggcttcgaatcgagaaatgctccgatgcagcgcggccgccagaaactcctccacccctccgcctattctggagaaatgatggcagtagctgtaaatccagccatggaagtttcacccaagaagaaacctccaaccaagcaccgacgagtggtcgtgacaggtatgggtgtggagacaccacttggtagtgatccagatgtcttctataataatctgctagaaggagtcagtggaattagtgagatagaggcttttgattgctcgcagtttccaaccagaattgctggagaaatcaagtcattctcaacagatggctgggttgtacctaaactttccaagagaatggacaagttcatgctttacatgttgacagcgggcaagaaggctttggctgatggaggaattacagtagatgccatggatgaactaaataaagcaaaatgtggtgtgctaattggctctgctatgggtggaatgaaagttttttatgatgcgattgaagcattgcgggtctcatataggaagatgaatccattttgtgttccttttgcaactaccaacatgggttctgccatgcttgcaatggatctgggatggatgggcccaaactactcaatatctactgcttgtgcaacaagtaacttttgtatactgaatgctgctaaccacatcatcagaggtgaagctgacttgatgctttgtggtggctcagatgcagcaattataccaattggattgggaggctttgttgcatgcagagcactgtcacaaagaaacagtgatccaactaaagcctcacgtccctgggatagtaatcgtgatggatttgttatgggagaaggtgctggagtactgctcttggaggaactagaacatgcaaagagtagaggtgcaactatctatgctgagtttcttggaggaagcttcactagtgatgcttatcacatgacagagcctcatccacaaggaactggtgtcattttatgcttagagaaggctttggctcaatcaggagtatctaaagaagatgtgaattatataaatgcacacgcaacttctactccagctggtgatcttaaggagtatcaggctcttcttcattgttttggcaagaatccggagttgagagtgaactccacaaaatccatgattgggcacctacttggagcagctggtgctgtcgaggcggttgcaactgtgcaggcaatcaggactggctgggttcatccaaatattaatcttgaaaatccagatggtggtgtggatgcaaatgtgttagtgggaccaacaaaagaaagactcgacattaaggtggcattgtctaattcgtttgggtttggtggtcataactcatcgattttgtttgctccatacaagtag

SEQ ID NO: 114849 - protein, 530 aa, Perilla frutescens
MAACMSVTCERESGVSALSTTSSNSRRLTKWAAHRRKRVLAKCAPRIRNLVDSSLSLEPRHHLHKSHECFFGFESRNAPMQRGRQKLLHPSAYSGEMMAVAVNPAMEVSPKKKPPTKHRRVVVTGMGVETPLGSDPDVFYNNLLEGVSGISEIEAFDCSQFPTRIAGEIKSFSTDGWVVPKLSKRMDKFMLYMLTAGKKALADGGITVDAMDELNKAKCGVLIGSAMGGMKVFYDAIEALRVSYRKMNPFCVPFATTNMGSAMLAMDLGWMGPNYSISTACATSNFCILNAANHIIRGEADLMLCGGSDAAIIPIGLGGFVACRALSQRNSDPTKASRPWDSNRDGFVMGEGAGVLLLEELEHAKSRGATIYAEFLGGSFTSDAYHMTEPHPQGTGVILCLEKALAQSGVSKEDVNYINAHATSTPAGDLKEYQALLHCFGKNPELRVNSTKSMIGHLLGAAGAVEAVATVQAIRTGWVHPNINLENPDGGVDANVLVGPTKERLDIKVALSNSFGFGGHNSSILFAPYK

SEQ ID NO: 114850 - DNA, 1278 bp, Streptomyces roseofulvus
  CDS (1)..(1278): transl_table=11
gtgaaccgacaagtcgccgtcaccggcatcggcgtggtggctccgggagggatcgggcgcaagccgtactgggagcagctcacctccggacgcaccgccacgcgcgccatctccttcttcgacgcctcgcccttccgctcgcggatcgccgccgaggtcgacttcgaccccgcggcggcgggcctgagcccgcgcgaggtccgccgcatggaccgggccgcgcagttcgccgtcgtgagcgccagggagagcctcgccgacagcggactcgacgtcgccgacctcgacccccaccggatcggggtgagcatcggcagcgccgtgggcgggaccacctcgctggaacgcgagtacctcgccctcagcgacagcgggcgacagtgggaactcgacctctcctacctctcgccgcacctctacgacgccttcacccccagctcgctcgcccgcgaggtggccggggtgatcggcgcggaggggcccgcggcagtcgtctccaccggctgcacctccggcatcgactcgctcggccacgcccgcgacctcatcgccgagggcagcgccgacgtcgtgctcgcgggcggcaccgacacccccatctcgccgatcgccgtcgcctgcttcgacgccatcaaggccacctcgcccagcaacgacgacccggcgcacgcctcgcgccccttcgacagggaacgcaacggcttcgtcctcgcggagggcgccgccgtcctcgtgctggaggagctggggcacgcgcgggcccgcgacgcccacgtctacgctctcgtgtccggctacgccacgcgctgcaacgcgtaccacatgaccgggctcaccccgcacggcagggagatggccgaggcgatccggcacgcgctcgccgagagcgggaccgaccccgccgccgtggactacgtcaacgcccacggctccggcaccaagcagaacgaccggcacgagaccgccgccttcaaggccacgctcggcgagcgggccaggagcgtgccggtcagctccatcaagtcgatgatcggccactcgctcggtgccatcggttcgctggagatcgcggcctgggcgctcgccatggagtacggcgtggtgccgcccaccgccaacctcgacacgcccgaccccgagtgcgacctcgactacgtgccccacgaggcgcgcgagacgcgggtggacagggtcctgagcgtcggcagcggcttcggcggtttccagagcgccatggtcctcacccgggacacgggcgcccgcctcccgacggcctga

SEQ ID NO: 114851 - protein, 425 aa, Streptomyces roseofulvus
MNRQVAVTGIGVVAPGGIGRKPYWEQLTSGRTATRAISFFDASPFRSRIAAEVDFDPAAAGLSPREVRRMDRAAQFAVVSARESLADSGLDVADLDPHRIGVSIGSAVGGTTSLEREYLALSDSGRQWELDLSYLSPHLYDAFTPSSLAREVAGVIGAEGPAAVVSTGCTSGIDSLGHARDLIAEGSADVVLAGGTDTPISPIAVACFDAIKATSPSNDDPAHASRPFDRERNGFVLAEGAAVLVLEELGHARARDAHVYALVSGYATRCNAYHMTGLTPHGREMAEAIRHALAESGTDPAAVDYVNAHGSGTKQNDRHETAAFKATLGERARSVPVSSIKSMIGHSLGAIGSLEIAAWALAMEYGVVPPTANLDTPDPECDLDYVPHEARETRVDRVLSVGSGFGGFQSAMVLTRDTGARLPTA

SEQ ID NO: 114852 - DNA, 2102 bp, Jatropha curcas
  CDS (21)..(1685)
cgtggctggtggctgcgtgcatgtcggtcacgtgcgccaaggagaacaggaccgctccacacgcgttccattcatcgcaacctagtaacagactcagtcgctgggctcgcagaagaaagacacttcacgctcaatataatagcgacagtagtaatagtattgcagctggtggtggtggtggtggtggtggtggttacagtacggaattcctttccaatagtttggtctctaccttgtgtggatccagttttcaaggattgatgtcttcttgcttagcgtttgagccttgtagtcaatactatagctctaatggcctctttcgatccagaaatcttaatcgcaagcagcgaagactcaatcggctcgctctttctggagaagccatggcaatagctgtgcaacctgaaaaggaagttgcaacaaagaagaaaccagctacgaagcaaaggcgagtggttgtcactggaatgggtgttgtgtcaccccttggtcatgaaccagatgtcttctacaacaatcttcttgaaggagttagtggcataagtcagatagaggcttttgaatgtgcccaatttccaacgaggattgctggagagatcaagtctttctcaactgatggatggattgcaccaaaactttccaagagaatggataagttcatgctatacatgcttactgctggaaagaaagccttggctgatggtggtatcactgaagatataatggatgaattggataaagctaaatgtggagttttgattggctctgcaatgggtggcatgaaggtcttcaatgatgcaattgaagcactaagggtatcatacaggaagatgaatcctttctgtgtaccttttgcaactacaaatatgggttccgccatgcttgcaatggacctgggttggatggggccaaactattcaatctccactgcctgtgctaccagcaatttttgtatattaaatgcagcaaaccacattattagaggcgaagccgatatcatgctttgtggaggctcagatgcggcaattatacctattggtttgggaggttttgtggcatgcagagcactttcgcagaggaatgatgatccagcaaaagcttcacgaccttgggatatgaatagggatggattcgtcatgggagaaggagctggcgttctgcttttagaagaactagaacatgctaagaaaagaggtgcaaatatctatgcagaatttcttggaggaagctttacttgtgatgcatatcacatgactgaaccacgtcctggtggaattggtgtcattctctgtgtagaaaaggcattagcacaatctggggtatccagggaggatgtgaactacataaatgcgcatgctacatccaccccagctggtgatattaaagagtttggggctctcatgcattgtttcgggcaaaatcccgggctgagggtgaactccacaaagtctatgattggtcatttattgggagcagccggtgctgtggaagctattgctgcaatacaggcgatacggacaggatgggttcatccaaacattaacctggaaaatccagacgaaggcgtggatacaaatgtcctggttggcccaaagaaagagaggttggatgttaaggttgccttgtcaaattcatttggatttgggggccacaactcatcaatcgtttttgcgccgcacaagtgaagtagagctacttcaacctcactgtattaatgttgaagataatcttgagaggataagtaaatttcgttcattggttggaaagaagaatattcagactcaatcaagagggaaatactcacatatattgtcttcagatttgtctcgtgggtagggcttgatcaacttttgaaccattgaatcaccaccagtaacagtcaccttgtttttgttccatataaaagtagatgggtaaccccttgttttaatagtcaattgtaatgaattttgagttagcagttgactaggttatactaatgtaatggttatttatgagcatatttctgttttctttagcatgttcttatctgtacaattcctgtatccttatcagggtaaattagcataaactgtgttcttttttaaaaaaaaaaaaaaaaa

SEQ ID NO: 114853 - protein, 554 aa, Jatropha curcas
MSVTCAKENRTAPHAFHSSQPSNRLSRWARRRKTLHAQYNSDSSNSIAAGGGGGGGGGYSTEFLSNSLVSTLCGSSFQGLMSSCLAFEPCSQYYSSNGLFRSRNLNRKQRRLNRLALSGEAMAIAVQPEKEVATKKKPATKQRRVVVTGMGVVSPLGHEPDVFYNNLLEGVSGISQIEAFECAQFPTRIAGEIKSFSTDGWIAPKLSKRMDKFMLYMLTAGKKALADGGITEDIMDELDKAKCGVLIGSAMGGMKVFNDAIEALRVSYRKMNPFCVPFATTNMGSAMLAMDLGWMGPNYSISTACATSNFCILNAANHIIRGEADIMLCGGSDAAIIPIGLGGFVACRALSQRNDDPAKASRPWDMNRDGFVMGEGAGVLLLEELEHAKKRGANIYAEFLGGSFTCDAYHMTEPRPGGIGVILCVEKALAQSGVSREDVNYINAHATSTPAGDIKEFGALMHCFGQNPGLRVNSTKSMIGHLLGAAGAVEAIAAIQAIRTGWVHPNINLENPDEGVDTNVLVGPKKERLDVKVALSNSFGFGGHNSSIVFAPHK

SEQ ID NO: 114854 - DNA, 1329 bp, Oryza sativa
  CDS (1)..(1329)
atgcaggcgcacgcccacacgctcgggctccgcatctccccgccgccgcctgcgccgccgcggcgccgcacggacccgaggaagcgggtggtgatcacggggatggggctggtgtccgtgttcgggaacgaggtagacgccttctacgagcggctgctcgccggggagagcggggtcggcgccatcgaccgcttcgacgccggcggcttccccacgaggttcgccggccagatacgcgggttctcctcggaggggtacatcgacggcaagaacgaccggaggctcgacgactgcctccgctactgcatcgtcagcggcaagaaggcgctcgagaacgccggcctcggcaagggctccgatggccacaccaagcttgacaaagtccgagctggtgttcttgtgggaactggcatgggtggcctcactgtgttttccgatggtgttcaaaaccttattgagaagggatacaagaaaatttcgcctttctttatcccatacgctataactaacatgggctcagcattgctagcaatggatgctggttttatgggtccaaactactcaatttcaacagcttgtgcgacctccaactactgcttctatgctgctgccaaccatatacgtcggggtgaggctgatgttatcgttgctggtggtactgaagctgcaattattccaattggccttggaggttttgtggcctgtagagcactatcgcagaggaacgatgacccagaaactgcatctaggccatgggacaaagagcgagatggttttgttatgggcgaaggtgctggtgtactggtcatggagagcctggagcatgcgatgaagcgggatgcaccaataattgctgaatatttgggaggtgcagtaaactgtgatgcttaccatatgactgatcctaggtcagatggactgggtgtatcgtcctgtattactcagagccttgaagatgcaggtgttgcgccagaggaggtaaattacatcaatgcacatgcaacttcaactcttgctggtgacttggctgaagtaagagccattaagcaagtcttcaagaatccatctgatattaaaatcaattcaacgaagtctatgataggccattgcctaggtgccgctggtgggttagaagctattgccgctatcaaagccataactactggatgggtgcatcctactattaaccaatttaaccccgagcctgaagttgattttgatacagtagccaacgagaagcagcagcacgaagtgaatgttgctatctctaattcatttggatttggaggtcacaattcagtggtagtatttgcgccattcaagccatga

SEQ ID NO: 114855 - protein, 442 aa, Oryza sativa
MQAHAHTLGLRISPPPPAPPRRRTDPRKRVVITGMGLVSVFGNEVDAFYERLLAGESGVGAIDRFDAGGFPTRFAGQIRGFSSEGYIDGKNDRRLDDCLRYCIVSGKKALENAGLGKGSDGHTKLDKVRAGVLVGTGMGGLTVFSDGVQNLIEKGYKKISPFFIPYAITNMGSALLAMDAGFMGPNYSISTACATSNYCFYAAANHIRRGEADVIVAGGTEAAIIPIGLGGFVACRALSQRNDDPETASRPWDKERDGFVMGEGAGVLVMESLEHAMKRDAPIIAEYLGGAVNCDAYHMTDPRSDGLGVSSCITQSLEDAGVAPEEVNYINAHATSTLAGDLAEVRAIKQVFKNPSDIKINSTKSMIGHCLGAAGGLEAIAAIKAITTGWVHPTINQFNPEPEVDFDTVANEKQQHEVNVAISNSFGFGGHNSVVVFAPFKP

SEQ ID NO: 114856 - DNA, 1476 bp, Helianthus annuus
  CDS (1)..(1476)
atggcggcatctatggtgtgcacatggatagtagccgcctgcatgtccgtctcttcttcttcctcttccaattctctcttctcttccaaacgcaaacgcaggctcgatcgattttcactttcctccagatgcaggcgaggaggtcgcgtagcaatggctatagccattcaaccttcttcaattgaaatggaggaggagacgaccctcaccaaaaggaagcagccgcctacaaaacaaaggcgagttgttgtgacaggcatgggtgtggagaccccaatcggcaacaatcccgaccagttctacaacaatctgctccagggggttagcggcattactcaaatcgaggccttcgattgctccagctatccaacaagaattgctggagaaataaaaaatttctccacagatggatgggtggccccaaagctgtccaaaaggatggacaggtttatgctctacatgctgactgccggcaagaaggctcttgcagatgctgggatctccccatctgattctgatgagattgataagtccagatgtggagtcctcattggctctgctatgggtggtatgaaggttttcaatgatgccatagaagctttgagggtctcatataggaagatgaatcctttctgcgtaccctttgccactactaatatgggatctgccatgttggccatggatctgggttggatgggtcctaactattccatctctacagcctgtgccacaagcaacttctgcatactcaatgcagccaatcacatcatcagaggtgaagctgacatgatgctttgtggtggctccgatgctgtcattatacctataggattgggaggatttgtcgcatgcagagctctgtccgagagaaacaccgaccctgccaaagcttctcgcccatgggattcgggccgtgatgggtttgttatgggagaaggagcaggagtcctattgctggaagaacttgagcatgctaagaaaaggggtgcgaaaatctatgcggagtttctgggtggaagcttcacttgtgatgcttatcatatgacagaacctcatcctgaaggtgctggtgtcattttatgcatagagaaagccttgtctcaggctggggtgaggagggaggatgtcaactatataaatgcacatgctacatcaacaccagctggtgacctcaaggaataccatgctcttcttcattgttttggcaacaaccaagagttgcgagtcaactctacaaaatcaatgatcggtcaccttttaggagcagccggtgctgtagaagccgttgcaactgtacaggcaatacggacgggttggattcatccaaatattaatcttgaaaatccagaccaaggcgtagacaccaaagtgttagtgggctcaaagaaagaaagactgaatgtcaaggttgggttgtctaattcatttggatttgggggtcacaactcatcaatattatttgcgcctttccaatag

SEQ ID NO: 114857 - protein, 491 aa, Helianthus annuus
MAASMVCTWIVAACMSVSSSSSSNSLFSSKRKRRLDRFSLSSRCRRGGRVAMAIAIQPSSIEMEEETTLTKRKQPPTKQRRVVVTGMGVETPIGNNPDQFYNNLLQGVSGITQIEAFDCSSYPTRIAGEIKNFSTDGWVAPKLSKRMDRFMLYMLTAGKKALADAGISPSDSDEIDKSRCGVLIGSAMGGMKVFNDAIEALRVSYRKMNPFCVPFATTNMGSAMLAMDLGWMGPNYSISTACATSNFCILNAANHIIRGEADMMLCGGSDAVIIPIGLGGFVACRALSERNTDPAKASRPWDSGRDGFVMGEGAGVLLLEELEHAKKRGAKIYAEFLGGSFTCDAYHMTEPHPEGAGVILCIEKALSQAGVRREDVNYINAHATSTPAGDLKEYHALLHCFGNNQELRVNSTKSMIGHLLGAAGAVEAVATVQAIRTGWIHPNINLENPDQGVDTKVLVGSKKERLNVKVGLSNSFGFGGHNSSILFAPFQ

SEQ ID NO: 114858 - DNA, 1413 bp, Medicago truncatula
  CDS (1)..(1413)
atgcaatcacttcagcatcaactacccttcactcttcgcccttcaccactcgaaccacttcgcaaaaaaccctccaatgcggccaccaccgccgccagaaccccaaagagactctccgtcgtctcttcctccgtcaccaccgccgctcctcaaagagagaaggatcccaagaagcgtgtcgtgatcactggcatgggtggcgtcactgtacatggcaacgatgtcgacattttctacgaaaagcttctcgccggtgatagtgggatcacattgattgataggtttgatgcttccaaattccctactcggttcgctggtcagatccgtgggtttagctccgagggttacatcgacgggaagaatgaccggaggcaggatgattgtctccggtactgcaatgtcgccgggaagaaagcacttgaagatgctggtctcggtgccgaaaatcttgataagattgataaagaacgtgctggtgttttggttgggtcaggaatgggtggtttaacggtgttttctgatggagttaagaatctgattgaaaagggacatagaaagatatcacctttttttattccctatgctattaccaatatggcttcagctttacttgggattgatttaggtttcagaggtccaaattattctatttcaactgcttgtgctacttcaaattattgctttgttgctgctgccaatcacattcgtaggggtgaagctgatttgatgattgcgggtggtactgaagctgctattattcctattggtttggggggttttgttgcttgcagggcactttctcagagaaatgatgaccctaaaacggcttctaggccttgggataaagaccgtgatggatttgttatgggtgaaggtgctggagttttggtgatggaaagcctggaacatgccatgaagcgaggtgcgcctatcattgctgaatacttgggaggtgctgtaaactgtgatgcttatcatatgactgatccaagatctgatgggcttggcgtgtcttcatgcatccagagcagtcttgtagatgccggtgtgtcacccgaggaggtcaattacataaatgcacatgcaacttccactcttgttggtgacttggcagagatcaatgctatcaaaaaggttttcaagaacccatctggcatcaaaattaatgccaccaagtctatgatagggcactgccttggcgcagctgggggtttggaagctattgccacaataaaagccataacaacaggatggctgcatccatcaatcaatcaattcaatccagaacctgcagttgattttgatacggtggcaaatgtcaagcagcagcatgaaatcaatgttggcatttcaaattcatttggatttggtggacacaactctgtcgtggctttttccgctttcagaccctga

SEQ ID NO: 114859 - protein, 470 aa, Medicago truncatula
MQSLQHQLPFTLRPSPLEPLRKKPSNAATTAARTPKRLSVVSSSVTTAAPQREKDPKKRVVITGMGGVTVHGNDVDIFYEKLLAGDSGITLIDRFDASKFPTRFAGQIRGFSSEGYIDGKNDRRQDDCLRYCNVAGKKALEDAGLGAENLDKIDKERAGVLVGSGMGGLTVFSDGVKNLIEKGHRKISPFFIPYAITNMASALLGIDLGFRGPNYSISTACATSNYCFVAAANHIRRGEADLMIAGGTEAAIIPIGLGGFVACRALSQRNDDPKTASRPWDKDRDGFVMGEGAGVLVMESLEHAMKRGAPIIAEYLGGAVNCDAYHMTDPRSDGLGVSSCIQSSLVDAGVSPEEVNYINAHATSTLVGDLAEINAIKKVFKNPSGIKINATKSMIGHCLGAAGGLEAIATIKAITTGWLHPSINQFNPEPAVDFDTVANVKQQHEINVGISNSFGFGGHNSVVAFSAFRP

SEQ ID NO: 114860 - DNA, 1251 bp, Rhodococcus erythropolis
  CDS (1)..(1251): transl_table=11
gtgacttccgcttctacccgcaaagggaaattccccgacatcgtcgtcacgagcctcgcgacgtcgacctcggtggctggtgatgtggatggcacgtggaaggcgctactcgccggcgaaagcggcatcggaatcctcgatgacccgttcatcgacgagttcgaccttcccattcgcatcggcgggcacctgaaggtttcaccagacgagggcttgtcccgcgtcgaaattcgacggatgagctgggtggaacgccttgccctcacgttgagtcgcacggtctggagcaacgccggcagccccgaagtcgatcaggaccgcctcgcggttgtcatcggcaccggactcggcggcggcgacacgctcatcgacgccgtcgacaaactccgtggcggcggataccgcaaggtgtccccgttctcggtgcagatggtcatgcccaacggaccggccgcaacggtcgggctcgaactcggggcccgcggtggagtcatcaccccggtctcggcatgttcgtcgggatccgaggcaattgctcacgctcaccgcatgcttgtcatgggtgacgcggacatggttgtggctggtggagtcgagagcttcatcgacgcggttccgatcgcgagcttcgccatgatgcgtgcaatgagcaccaacaacgacaatccgaccgcagcttcacgtcctttcgacaaggaccgtgacggatttgtcttcggcgaagccggcgcactgatgatcctcgaaaccgaggaacacgcaaaggcacgcggggccaccattcatgcccgcctgctcggttccggaatcacttcggacgggtaccacatcgtggcaccgcatccggaaggcctgggcgcggcgcgagccatgacccgagcaatcgagatggccggactgacgaagtccgacatcaagcacatcaacgcccacgccactgcgacgccgatcggtgacatcgcagaggcaaaggcaatcaacgcagcggtcggcaatcacgctgcggtgtacggcccgaaatccgcgctgggacactcgatcggcgctgtcggcgccctcgaatcagtcctcacggttctggcggtgcgtgacgggatcatcccgcccacgctcaatgttgacagccaggatccagaaatcgatctcgatgtcgtcaagggtgaaccccgaaccggctctttcgatttcgcactgaacaactcgttcggtttcggtgggcacaatgtcgcgctcgccttcggtcgggcctag

SEQ ID NO: 114861 - protein, 416 aa, Rhodococcus erythropolis
MTSASTRKGKFPDIVVTSLATSTSVAGDVDGTWKALLAGESGIGILDDPFIDEFDLPIRIGGHLKVSPDEGLSRVEIRRMSWVERLALTLSRTVWSNAGSPEVDQDRLAVVIGTGLGGGDTLIDAVDKLRGGGYRKVSPFSVQMVMPNGPAATVGLELGARGGVITPVSACSSGSEAIAHAHRMLVMGDADMVVAGGVESFIDAVPIASFAMMRAMSTNNDNPTAASRPFDKDRDGFVFGEAGALMILETEEHAKARGATIHARLLGSGITSDGYHIVAPHPEGLGAARAMTRAIEMAGLTKSDIKHINAHATATPIGDIAEAKAINAAVGNHAAVYGPKSALGHSIGAVGALESVLTVLAVRDGIIPPTLNVDSQDPEIDLDVVKGEPRTGSFDFALNNSFGFGGHNVALAFGRA

SEQ ID NO: 114862 - DNA, 1269 bp, Mycobacterium aurum
  CDS (1)..(1269): transl_table=11
atggcaggggtcaagggactctcgacggggaacgggtttcccaacgtcgtcgtcacgggatacaccatgacgacggcgctggcgaccgacgctgacaccacctggaggaaactgctcgacggggagagcggcatccgcacgctcaccgatcccttcgtcgaggaatacgacctcccggtgcgcatcggtggtcgccttctggaggatttcgacgacgagctgacgcgggtggaactgcgtcggctgtcgtacctgcagaagatgtcgacggtgctcagccggcgggtctgggagcacgccggcaatcccgacgtcgaccccaaacgcctgatggtgtccatcggtaccgggatgggctccaccgagcagctcctgttcgcctgcgagggcatgaaggccaaaggcctgcgcgcggtgtccccgttggcggtccagatgtacatgcccaacgccgccgcggcggcggtgggtctggagcgcaaggcccgggccggggtgatcaccccggtctcggcctgcgcctcgggctccgaaggcgtggcgcaggcatggcgcaacatcgttctcggtgaggctgatgtcgcgatctgcggcggcgtcgagacccggatcgaagcagtgccgatcgccggcttcgcccagatgcgcatcgtgttgtcgaccaccaacgacgaccccccgggtgcctgcaagccgttcgacaaggaccgcaacggcttcgtcttcggtgaaggcggcgcgctgatggtcatcgagactgaggagcacgccaaggcccgcggcgccaccatcatgccaaggctgatgggcgcctccatcacctccgacggctaccacatcgtggctcccgaccccaacggcgagcaggccggctacgcgatgacgcgggccatccagctcgccgggctgcagccgtcggacatcgaccacatcaacgcccacgccaccgggacctctgtcggcgatgtcgccgagagcaaggcgatccgcaatgccatcggcgaccaccagcccgcggtctacgcacccaaggcgccactgggtcactccgtcggcgccgtgggcgcggtggaagtccaatcctcaccgtcctcgccattcgcgagggcatcaattccgccgacccggaaccttgaagaacctcgacccggagatcgaacctcgacggtcgtggccgggtcgcctcgcccgggcaattacgagtacgcgatcaacaattccttcggattcggcgggcacaacgtcgcactcgccttcggcaagtactga

SEQ ID NO: 114863 - protein, 422 aa, Mycobacterium aurum
MAGVKGLSTGNGFPNVVVTGYTMTTALATDADTTWRKLLDGESGIRTLTDPFVEEYDLPVRIGGRLLEDFDDELTRVELRRLSYLQKMSTVLSRRVWEHAGNPDVDPKRLMVSIGTGMGSTEQLLFACEGMKAKGLRAVSPLAVQMYMPNAAAAAVGLERKARAGVITPVSACASGSEGVAQAWRNIVLGEADVAICGGVETRIEAVPIAGFAQMRIVLSTTNDDPPGACKPFDKDRNGFVFGEGGALMVIETEEHAKARGATIMPRLMGASITSDGYHIVAPDPNGEQAGYAMTRAIQLAGLQPSDIDHINAHATGTSVGDVAESKAIRNAIGDHQPAVYAPKAPLGHSVGAVGAVEVQSSPSSPFARASIPPTRNLEEPRPGDRTSTVVAGSPRPGNYEYAINNSFGFGGHNVALAFGKY

SEQ ID NO: 114864 - DNA, 1254 bp, Mycobacterium aurum
  CDS (1)..(1254): transl_table=11
atgagccggccttccactgctaacggcggtttccccaatgtcgtggttaccgctgtagaagccacgacctcggttgcggccgacgccgagggcacgtggaaggcactgctcaccggccagagcggtatccgcgagctcaccgacgacttcgtcacgaagtgggacctgccggttcgcatcggcggtcacctggtcgacggtgtcgacgagcacatgacccgcctggacatgcgccgcatgtcgtacgtccagcgcatgggcaaactgctgggcaaccggctctgggagaacgcgggcaagcccgaggtcgacccagaccggttcgccgtggtgatcggcacgggcatcggcggcggcgagaagatcgtcgagacctacgactcgatgaacgagggcggcatccgcaggtgtcaccgctcgcccgaggtcgaccttgatcatgcccaatggcgctgcgcggtcgtcggcctggaagctcggggcgcgcgccggggtcatcacccggtctccgcctgttcgtcgggttcggaagccattgcccacgcgtggcgccagatcgtcatgggtgacgcggacttcgccgtctgcggcggcgtcgaaggcgggatcgaggcactgcccatcgcggcgttctcgatgatgcgcgcgatgtcgacccgtaacgacaacccggaaggcgcgtcgcgcccgttcgacaagaacagggacggcttcgtcttcggtgaagccggcgcgctgatgatcatcgagaccgaagaacatgccctggcccgtggcgccaagccgctggcccggatcatgggcgcgggcatcacgtcggacgcctaccacatggtggcgccggccgcggacggcctgcgggccggccaggcgatgaagcgggcgatggagacggcgggcttggcccccgaggacatcaaccacgtcaacgcccaccccacctcgacgtcgatcggcgacaccgccgaggccaacgctatccgggtcgccggggtggggcacgccgcggtgtacgcgccgaagtcggcgctgggtcactcgatcggcgcggtgggtgcgctggaatcgatcctgaccgtgctggcgctgcgtgacgacgtgattcccccgacactgaactacgagacgcccgaccccgagatcgatctcgatgtcgttgcgggtgagcctcggtatggcgactaccagtacgccatcaacaactcgttcggcttcggtggacacaatgtcgccctggcgttcggtcgctattaa

SEQ ID NO: 114865 - protein, 417 aa, Mycobacterium aurum
MSRPSTANGGFPNVVVTAVEATTSVAADAEGTWKALLTGQSGIRELTDDFVTKWDLPVRIGGHLVDGVDEHMTRLDMRRMSYVQRMGKLLGNRLWENAGKPEVDPDRFAVVIGTGIGGGEKIVETYDSMNEGGIRRCHRSPEVDLDHAQWRCAVVGLEARGARRGHHPVSACSSGSEAIAHAWRQIVMGDADFAVCGGVEGGIEALPIAAFSMMRAMSTRNDNPEGASRPFDKNRDGFVFGEAGALMIIETEEHALARGAKPLARIMGAGITSDAYHMVAPAADGLRAGQAMKRAMETAGLAPEDINHVNAHPTSTSIGDTAEANAIRVAGVGHAAVYAPKSALGHSIGAVGALESILTVLALRDDVIPPTLNYETPDPEIDLDVVAGEPRYGDYQYAINNSFGFGGHNVALAFGRY

SEQ ID NO: 114866 - DNA, 1488 bp, Hordeum vulgare
  CDS (1)..(1488)
atggcggcagcggcgccaccgctctgcgcgtggctcgtcgccgcgggcgcgcacgcggactgcggggcggacgagcaccagcatcgccggacgcagtgcctcgacgccggctccggcgcgatgttcggcctcgaccgccgccccctcggggcgcggcgccgtgggcccgcgcgctctggaatggccatgtctgttgccttgcagcctgaaaggataactgtcgagaagaagagacctgatgttaaacaaaggagagtcgttgtcactggcatgggtgtagtgacgccactgggtcatgatcctgatgtgttttacaccaaccttcttgacggtcatagtggaataagcgagattgaaacgtttgactgctccaagttccccacgagaattgcaggagagataaaatccttctctacagaaggttgggttgtacccaagctatctaagcgaatggacaagttcatgctgtatttgataactgctggtaagaaagcattggaaaatggtggactcaccgaagaagtaaggaacgagttggataaaaccagatgtggggttctcattggctctgcgatgggcggcatgaaggtatttaatgatgcaattgaagcgttaagggtttcttacaggaaaatgaacccgttttgtgttccctttgctactactaatatgggttctgcaatacttgcaatggatctgggctggatgggaccaaattactctatttccactgcatgtgccaccagtaacttttgtatcctcaacgcagcaaaccatatcagaagaggggaagctgatgtcatgctttgtggtggttctgatgcgccactcatcccaattgggttgggaggttttgttgcctgcagagctctttcacagaggaacagtgacccaacaaaagcttcccggccctgggatatggaccgtgatggttttgttatgggagaaggggcaggtgtgctagtattggaagaacttgagcatgctaagcaaagaggtgcaacaatatatgctgaatttcttggtggaagcttcacatgcgatgcttaccatatgactgagccgcatcctgaaggaacggggatcactctctgcattgagaaggcactggctgattcaggggtagcaagggaagaaatcaactatgtgaatgcgcatgcaacatccacacaatcaggcgatttgaaggagtatgaagccattgttcgttgctttggccagaaccctcagctgagggtgaactcaacaaaatcaatgactgggcatcttataggagcagctggtggaatagaagctgttgcttgtgtacaagctataagaactggttgggtccatccaaatctgaatttggagaacccagaaaaagtagtggacgtgggcgtgttggtgggatcagagaaggagagatgcgaagtaaaggtggcgctgtcaaactcatttggatttggtgggcataactcatcaattctgtttgcccccttcaagtaa

SEQ ID NO: 114867 - protein, 495 aa, Hordeum vulgare
MAAAAPPLCAWLVAAGAHADCGADEHQHRRTQCLDAGSGAMFGLDRRPLGARRRGPARSGMAMSVALQPERITVEKKRPDVKQRRVVVTGMGVVTPLGHDPDVFYTNLLDGHSGISEIETFDCSKFPTRIAGEIKSFSTEGWVVPKLSKRMDKFMLYLITAGKKALENGGLTEEVRNELDKTRCGVLIGSAMGGMKVFNDAIEALRVSYRKMNPFCVPFATTNMGSAILAMDLGWMGPNYSISTACATSNFCILNAANHIRRGEADVMLCGGSDAPLIPIGLGGFVACRALSQRNSDPTKASRPWDMDRDGFVMGEGAGVLVLEELEHAKQRGATIYAEFLGGSFTCDAYHMTEPHPEGTGITLCIEKALADSGVAREEINYVNAHATSTQSGDLKEYEAIVRCFGQNPQLRVNSTKSMTGHLIGAAGGIEAVACVQAIRTGWVHPNLNLENPEKVVDVGVLVGSEKERCEVKVALSNSFGFGGHNSSILFAPFK

SEQ ID NO: 114868 - DNA, 1470 bp, Hordeum vulgare
  CDS (1)..(1470)
atgtcggcggtggcgccaccgctgtgcacttggatcgtcgccgcctgcttgtctgcaacctgcgtcgcagacgatgaggggaagcagcgcaactacatcggcggcgggcttttctgcacgcgccgccaccttgctgcgcgccgccgaggcggggcacgctctggagtgcccattgctgtttcctttcatcctgaaagaggagctgtggaaaacaacaaatctgaaaccaaacaacggagggtagttgtcactggcatgggtgtcgtgactccgttaggccatgagcctgatgagttttacaacaaccttctacagggtgtcagtggagtaagtgagatagaagcatttgactgttccagctatcccacgagaattgcaggagaaatcaaatccttctcaacagatggttgggttgcaccaaagttagctaagcgaatggataagttcatgcaatatttgatagttgctggtaagaaagcattggacaatggtggagtcactgaagatatcatgaacgagttggacaaatcgagatgtggagttctaattggatctggtatgggtggcatgaaggtttttagtgatgcaattgaagcattgagggtctcctacaggaagatgaacccattttgtgtaccttttgcaactacaaacatgggctctgcagtacttgcgatggatttgggctggatgggcccaaactactccatctctactgcttgcgccactagtaacttctgcattctgagtgcagctaatcatatcatgaggggggaaactgatttgatgctttgtggtggttctgatgctcccattataccaattggattgggaggttttgtggcatgtagagctctttcacagagaaatagtgatccaacaaaagcttctcggccttgggatgtggatcgtgatgggtttgtcatgggagaaggggctggtgtgcttcttttggaagaacttgagcatgcaaagcaaagaggtgcagaaatatatgccgaatttctgggtggaaactttacgtgcgatgcatatcatatgacggaaccacatcctgaagggaagggggttattctttgtgtcgaaaatgcactagctgatgcaggagtaacaaggcaagacattaactacgtaaatgcccatgctacatctacacagttgggcgatttgaaggaattcgaagctcttcgccgctgttttggccagaatcctcagctaagagtaaactcaacaaagtcgatgactggccacttgctaggtgctgcaggtggaatagaagctgtagctgctatacaagctataagaactggttggatccatccgaatatcaatctaaacaatccggagaaaaatgtggatgtcagcttgctggtgggatcacaaaaggagagatgtgacgtgaaagttgcgttgtcgaattcatttggattcggtgggcacaattcatcaattttatttgcacccttttga

SEQ ID NO: 114869 - protein, 489 aa, Hordeum vulgare
MSAVAPPLCTWIVAACLSATCVADDEGKQRNYIGGGLFCTRRHLAARRRGGARSGVPIAVSFHPERGAVENNKSETKQRRVVVTGMGVVTPLGHEPDEFYNNLLQGVSGVSEIEAFDCSSYPTRIAGEIKSFSTDGWVAPKLAKRMDKFMQYLIVAGKKALDNGGVTEDIMNELDKSRCGVLIGSGMGGMKVFSDAIEALRVSYRKMNPFCVPFATTNMGSAVLAMDLGWMGPNYSISTACATSNFCILSAANHIMRGETDLMLCGGSDAPIIPIGLGGFVACRALSQRNSDPTKASRPWDVDRDGFVMGEGAGVLLLEELEHAKQRGAEIYAEFLGGNFTCDAYHMTEPHPEGKGVILCVENALADAGVTRQDINYVNAHATSTQLGDLKEFEALRRCFGQNPQLRVNSTKSMTGHLLGAAGGIEAVAAIQAIRTGWIHPNINLNNPEKNVDVSLLVGSQKERCDVKVALSNSFGFGGHNSSILFAPF

SEQ ID NO: 114870 - DNA, 1958 bp, Ricinus communis
  CDS (13)..(1620)
gtggcggcgtgcatgtcggtcacgtgctcaaaggagaacagacacgcgttcttctcttcatcgacaccgggcaccaccagcagtcacagtcgtacaagaaggaggcctaaatataatagtatcagcacccctgcctctcaatctttctttaattctttatcatcttctggatcgagttttcaacaattaatgtcttcttgcttggccttcgagccttgtagtcattactacagctctaatggcctctttcctaacactcctcttcttcctaagcgccatcctagacttcatcatcgccttcctcgttctggggaagcaatggcagtggctgtgcaacctgaaaaggaggttgcaacaaataagaaacctcttatgaagcaaaggagagtagttgttactgggatgggtgttgtttcaccccttggtcatgatatagacgtctattacaataatcttcttgacggttctagtggtattagtcagattgattcctttgactgtgcccaatttcctacgaggattgctggagagatcaagtctttctcaactgatggatgggttgcaccaaaactttccaagagaatggataaattcatgctttacatgcttactgctggcaaaaaagccttggcagatggtggtattacagaggatatgatggatgaattggataaagctagatgtggagttttaattggttctgcaatgggtggcatgaaggttttcaatgatgcaattgaagcattaaggatctcgtataggaagatgaatcctttctgcgtaccttttgcgactacaaatatgggctctgccatgcttgcaatggaccttggttggatggggccaaactattcaatatctactgcttgtgctactagcaatttttgtatattgaatgccgcaaaccacatcattagaggcgaagctgatattatgctttgtggtggctcagatgcagcaattatacctattggcttgggaggttttgtggcatgcagagcgctctcacagaggaatgatgatcctacaaaagcttcacgaccttgggatatgaatcgggatggatttgtgatgggggaaggagctggtgttcttcttttagaagaactagaacatgctaagaaaagaggtgcaaatatttatgcggaatttcttggaggaagctttacatgtgatgcttatcacatgactgaaccgcgtccagatggagttggtgtcattctctgtatagaaaaggcattagcgcgatctggtgtatccaaggaggaagtaaactacataaatgcacatgctacgtctaccccagctggagaccttaaagaatatgaagctcttatgcgctgtttcagccaaaatcctgatttgagagtgaactctacgaagtctatgattggccatttactaggagcagctggtgctgtggaagctatagcaacaatacaggcgatacggacaggatgggttcatccaaacatcaacctggaaaacccagaagaaggcgtggacacaaaggtgctggttggcccaaagaaggagagattggacattaaggttgctctgtccaactcttttgggttcggtgggcacaactcatcgatcatttttgctccgtacaagtgaaataaggggtacttcaactttggtgtattaacgtgaaagatgatctaaaatggaacaagattagataactctatgggtagggaaaggagaatatgccgagttcacagagaggaaacttcccgtgaagattcctgtgccttctaccattttcagtattctctccgcatcattgtggcttgatccatgttgatccatcgaataccagtaacagtggccttatttaatttttgttccatgtataagcagacggctgatcgttgctttaacagtcaattgtaatgaatttttgagctggacagttggctaggttacactaatgtaatggtggttttatgagc

SEQ ID NO: 114871 - protein, 535 aa, Ricinus communis
MSVTCSKENRHAFFSSSTPGTTSSHSRTRRRPKYNSISTPASQSFFNSLSSSGSSFQQLMSSCLAFEPCSHYYSSNGLFPNTPLLPKRHPRLHHRLPRSGEAMAVAVQPEKEVATNKKPLMKQRRVVVTGMGVVSPLGHDIDVYYNNLLDGSSGISQIDSFDCAQFPTRIAGEIKSFSTDGWVAPKLSKRMDKFMLYMLTAGKKALADGGITEDMMDELDKARCGVLIGSAMGGMKVFNDAIEALRISYRKMNPFCVPFATTNMGSAMLAMDLGWMGPNYSISTACATSNFCILNAANHIIRGEADIMLCGGSDAAIIPIGLGGFVACRALSQRNDDPTKASRPWDMNRDGFVMGEGAGVLLLEELEHAKKRGANIYAEFLGGSFTCDAYHMTEPRPDGVGVILCIEKALARSGVSKEEVNYINAHATSTPAGDLKEYEALMRCFSQNPDLRVNSTKSMIGHLLGAAGAVEAIATIQAIRTGWVHPNINLENPEEGVDTKVLVGPKKERLDIKVALSNSFGFGGHNSSIIFAPYK

SEQ ID NO: 114872 - DNA, 1835 bp, Ricinus communis
  CDS (57)..(1466)
ggcttctcccaattcatcgttgttatcgctaccacttccgccaccaccccaccaccatgcaagccctgcagtccccgtctctccgaccatcccctctaaccccgctccataaaaatactcacaatgcagcaaaacgcccaactaaaaaggtctcctttatcaccgcatcatcaacaaataacaacacgacgatttcagctccaaagcgagagaaagaccccagaaaaagggtagtcataactggtacgggtttggtatctgtgtttgggaatgatgtcgatacttactacgataaattgcttgctggagaaagtgggatcggacttattgataggttcgatgcgtctaagtttcctactagatttggtggacagatcagggggtttaattcacaaggttatattgatgggaaaaatgatagaaggcttgatgattgtttgaggtattgcattgttgctggtaaaaaagctcttgagcatgctgatcttggtggtgataagttgtctaagattgataaagagcgagctggtgtgcttgttggaacagggatgggtggtcttacagtcttttcagatggtgttcaggccctaattgaaaaaggacacaggaaaattaccccattctttattccttatgctataacaaacatgggatctgccttgttagctattgaacttggtctcatgggtcctaattattcaatttcaactgcttgtgctacctccaattattgcttctatgctgctgccaatcatattcgcagaggtgaggctgaattgatgattgctggtggaactgaagccgccatcattccaatcggtttgggaggttttgtagcatgtagggccttatcacaaaggaatgatgatccacaaactgcctcaaggccatgggacaaagatcgagatggctttgttatgggtgaaggtgctggagtgttggtaatggagagtttggaacatgcaatgaaaaggggtgcaccaataattgctgagtacttgggaggtgctgttaattgtgatgcttatcacatgactgatccaagggctgatggacttggggtctcttcctgcattgagagaagtcttgaagatgccggtgtgtcacctgaggaggttaactatataaatgcacatgcaacttccactcttgctggtgaccttgctgagataaatgctattaaaaaagtattcaagaatacgtctgacatcaaaatcaatgcaaccaagtctatgataggacattgccttggtgctgctggaggtctggaagcaattgcctgtgtgaaggccattaccacaggatggttgcatcctacaattaatcaatttaacccagagccatcagttgaatttgacactgttgccaataagaagcagcagcacgaagtgaatgttgccatttcaaattcctttggattcggtggacacaactctgtggtagccttttctgcatttaaaccctgagagcatggccttcttctgcattcgggccgcggtcatttacatttaccatggcctgcatttcttgtaggaaccactggagagttgcttgcttatagacagagtcatcgacatcacttcccccttttagctttttgagctgctgatagtagtcagtttctcatttcagtatcaagtctatcttaagaaggtcttgcttaatttttcttttcaaattaccatttcattgtcattttccttggaacttttagcttaagatctgctgtgatcatgtggttttgatttcaaattaattatgtagcggatacgaacaagcaatcataaaaagtctttttgaattatgtaattacgataactgttattttctttttc

SEQ ID NO: 114873 - protein, 469 aa, Ricinus communis
MQALQSPSLRPSPLTPLHKNTHNAAKRPTKKVSFITASSTNNNTTISAPKREKDPRKRVVITGTGLVSVFGNDVDTYYDKLLAGESGIGLIDRFDASKFPTRFGGQIRGFNSQGYIDGKNDRRLDDCLRYCIVAGKKALEHADLGGDKLSKIDKERAGVLVGTGMGGLTVFSDGVQALIEKGHRKITPFFIPYAITNMGSALLAIELGLMGPNYSISTACATSNYCFYAAANHIRRGEAELMIAGGTEAAIIPIGLGGFVACRALSQRNDDPQTASRPWDKDRDGFVMGEGAGVLVMESLEHAMKRGAPIIAEYLGGAVNCDAYHMTDPRADGLGVSSCIERSLEDAGVSPEEVNYINAHATSTLAGDLAEINAIKKVFKNTSDIKINATKSMIGHCLGAAGGLEAIACVKAITTGWLHPTINQFNPEPSVEFDTVANKKQQHEVNVAISNSFGFGGHNSVVAFSAFKP

SEQ ID NO: 114874 - DNA, 1281 bp, Streptomyces fradiae
  CDS (1)..(1281): transl_table=11
gtgagcggcgcgcacagccgacgcgtcgtgatcaccggcatcggtgtcaccgcgcccggcggggtgggcagcaagaacttctggagcctgctgtccgacgggcgcacggccactcggcgcatcagcttcttcgacccgtccccgttccgttcccaggtcgccgcggaggccgatttcgacgccgaactgctgggcctgagcccacaggagatccggcgaatggaccgggccgcgcagtttgccgtggtcactgcccgggaggcggtggcggacagcggcctggagttcgcctctctcgacccgcaccgcaccggcgtgaccgtcggcagcgcggtcggcgcgaccatggggctcgaccaggagtatcgcaccgtcagcgacagcgggcggctcgatctcgtcgatcacgagtacgcggtcccgcacctgtacaactacctggtgcccagctccttcgccgccgaggtggcctgggccgtcggcgccgagggcccggcgacggtggtctccaccgggtgtacgtccggcctcgacgccgtgggttacgccactgagctgatccgcgagggctccgccgacgtcatggtggccggagcggccgacgccccgatctcgcccatcaccgtggcctgcttcgatgcgatcaaggcgaccacaccgcgcaacgaggacccggaacacgcctcgcgcccgttcgacggcacccgcaacgggttcgtcctgggcgagggatcggccgtgttcgtcctggaagaactggacagtgccctgcggcgaggcgctcatgtgtacgcggagatcgccgggtatgcgacgcgcagcaacgccttccacatgaccggcctgcgccccgatggccgtgagatggccgaggccatccgcatcgccctggacgaggcccggctcaaccccgaggacatcgactacgtcaacgcgcacggctcgggtaccaagcagaacgaccggcacgagacagccgccttcaagcgcagcctcggcgaccacgcgtatgccgtgcccgtcagctccatcaaatcgatggtcggccactcgctgggtgccatcggctcgatcgaaatcgcagcgagcgcactggcgatggagcacggtgtcgttccccccaccgccaacctgcacacacccgaccccgagtgcgacctcgactatgtgccgcggaccgcacgggactggaagaccgacgccgtactctccgtgggcagcggcttcggcgggttccagagtgccatcgtgctggcccgccccgatcggaggaccgcgtga

SEQ ID NO: 114875 - protein, 426 aa, Streptomyces fradiae
MSGAHSRRVVITGIGVTAPGGVGSKNFWSLLSDGRTATRRISFFDPSPFRSQVAAEADFDAELLGLSPQEIRRMDRAAQFAVVTAREAVADSGLEFASLDPHRTGVTVGSAVGATMGLDQEYRTVSDSGRLDLVDHEYAVPHLYNYLVPSSFAAEVAWAVGAEGPATVVSTGCTSGLDAVGYATELIREGSADVMVAGAADAPISPITVACFDAIKATTPRNEDPEHASRPFDGTRNGFVLGEGSAVFVLEELDSALRRGAHVYAEIAGYATRSNAFHMTGLRPDGREMAEAIRIALDEARLNPEDIDYVNAHGSGTKQNDRHETAAFKRSLGDHAYAVPVSSIKSMVGHSLGAIGSIEIAASALAMEHGVVPPTANLHTPDPECDLDYVPRTARDWKTDAVLSVGSGFGGFQSAIVLARPDRRTA

SEQ ID NO: 114876 - DNA, 1269 bp, Streptomyces griseus
  CDS (1)..(1269): transl_table=11
gtggaacgccgggcagtgatcacgggaatcggtgtgtgcgcaccgggcggaaccggtgtggacagcttctgggagctgatgtgcgacggccggacggccacccgcggcatcaccctcttcgacccgtctccgtaccgctccagggtcgccgccgagatcgacttcgacccgcgggcgcacgggctgacgccgcaggagatccggcggatggaccgggccgcgcagttcggcgtggtgacggcacgggaggccttcgccgacagcgggctcgacggcgccgcgctcgatccgttccgtacgggagtcagcctcggcaccgcgatcggcgcggccggcggcctggacgcggagtaccgcgtggtcagcgacgacggccggctggagctggtcgaccaccggtacgcgaccccgcatctgtacgacctgttcgtgccgagctccttcgcgaccgaagtggcctgggccgtcggcgcggaaggaccggcgacggtggtgtccaccggctgcaccgccgggatcgacgcggtgggccacgcggtggaggcgatccgcgacggcagcgccgatgtgatggtcaccggcgcggtggacgcgccgatcaccccgctcacgatggcggccttcgacgcgatccgcgccaccacgtccctcaacgacgaggcggacaccgcctcccgccccttcgacgcgtcacgcaagggcttcgtcctcggtgagggggcggcggtgttcgtcctggaggaggcggagcacgcacggcgcagaggcgcgtacgtgtacgcggagatcgccggatacgcctcgcgcggcaacgccttccacatgaccggactgcggtccgacggagcggagctggccgccgcgatccgggcggcgctggacgaggcccggctcgacgcgtcggcggtggactacgtcaacgcgcacggttccggcacccgccagaacgaccggcacgagacggtcgcgctcaagtcggctctgggacagcacgcccaccgggtgccggtcagcgcgatcaagtcgatggtcgggcactcgctcggggcgatcggctccatcgagatcgccgcctgcgcactggccatgcggcaccacgtcatccctccgaccgccaatctgcacaccccggatcccgagtgcgatctcgactatgtcccgctgacggcccgcgcgcagcgcaccgatgccgtcctcaccatcggcagcggattcggcggcttccagagcgcgatggtgctggcccgtcccgacaggagcgccgcgtga

SEQ ID NO: 114877 - protein, 422 aa, Streptomyces griseus
MERRAVITGIGVCAPGGTGVDSFWELMCDGRTATRGITLFDPSPYRSRVAAEIDFDPRAHGLTPQEIRRMDRAAQFGVVTAREAFADSGLDGAALDPFRTGVSLGTAIGAAGGLDAEYRVVSDDGRLELVDHRYATPHLYDLFVPSSFATEVAWAVGAEGPATVVSTGCTAGIDAVGHAVEAIRDGSADVMVTGAVDAPITPLTMAAFDAIRATTSLNDEADTASRPFDASRKGFVLGEGAAVFVLEEAEHARRRGAYVYAEIAGYASRGNAFHMTGLRSDGAELAAAIRAALDEARLDASAVDYVNAHGSGTRQNDRHETVALKSALGQHAHRVPVSAIKSMVGHSLGAIGSIEIAACALAMRHHVIPPTANLHTPDPECDLDYVPLTARAQRTDAVLTIGSGFGGFQSAMVLARPDRSAA

SEQ ID NO: 114878 - DNA, 1293 bp, Streptomyces nogalater
  CDS (1)..(1293): transl_table=11
atgaaggaatccatcaaccgtcgcgtggtcatcaccggaatagggatcgtcgcgcccgatgccaccggggtgaaaccgttctgggatctgctgacggccggtcgcaccgcgacccggaccatcaccgccttcgatccctctccgttccgttcccgcatcgccgcggaatgcgatttcgacccgcttgccgaagggctgaccccccagcagatccggcgtatggaccgggccacgcagttcgcggtcgtcagcgcccgggaaagcctggaggacagcggactcgacctcggcgccctggacgcctcccgcaccggcgtggtcgtcggcagcgcggtcggctgcaccacgagcctggaagaggagtacgcggtcgtcagcgacagcggccggaactggctggtcgacgacggctacgccgtaccgcacctattcgactacttcgtgcccagctccatcgccgccgaggtggcacacgaccgcatcggcgcggagggccccgtcagcctcgtgtcgaccgggtgcacctcgggcctggacgccgtgggccgcgcggccgacctgatcgccgagggagcggcggatgtgatgctggccggtgcgaccgaggcgcccatctcccccatcaccgtggcgtgcttcgatgccatcaaggcgaccaccccccgcaacgacacgcccgccgaggcgtcccgtccgttcgaccgcaccaggaacgggttcgtactcggcgagggcgctgccgtgttcgtcctggaggagttcgaacacgcgcgccgccggggcgcgctcgtgtacgcggagatcgccgggttcgccactcgctgcaacgccttccacatgaccggtctgcgcccggacgggcgggagatggcggaggccatcggggtggcgctcgcccaggcgggcaaggcgccggctgacgtcgactacgtcaacgcccacggttccggcacccggcagaatgaccgtcacgagacggcggccttcaagcgcagtctcggcgaccacgcctaccgggtcccggtcagcagcatcaaatccatgatcgggcactcgctgggcgcgatcggctccctggagatcgccgcctccgtgctggccatcacacacgacgtggtgccgcccaccgccaatctgcacgagccggatcccgagtgcgatctggactacgtgccgctgcgggcgcgtgcgtgcccggtggacacggtgctcacggtgggcagcgggttcggcggtttccagagcgccatggtgctgtgcggtccgggctcgcggggaaggtcggccgcgtga

SEQ ID NO: 114879 - protein, 430 aa, Streptomyces nogalater
MKESINRRVVITGIGIVAPDATGVKPFWDLLTAGRTATRTITAFDPSPFRSRIAAECDFDPLAEGLTPQQIRRMDRATQFAVVSARESLEDSGLDLGALDASRTGVVVGSAVGCTTSLEEEYAVVSDSGRNWLVDDGYAVPHLFDYFVPSSIAAEVAHDRIGAEGPVSLVSTGCTSGLDAVGRAADLIAEGAADVMLAGATEAPISPITVACFDAIKATTPRNDTPAEASRPFDRTRNGFVLGEGAAVFVLEEFEHARRRGALVYAEIAGFATRCNAFHMTGLRPDGREMAEAIGVALAQAGKAPADVDYVNAHGSGTRQNDRHETAAFKRSLGDHAYRVPVSSIKSMIGHSLGAIGSLEIAASVLAITHDVVPPTANLHEPDPECDLDYVPLRARACPVDTVLTVGSGFGGFQSAMVLCGPGSRGRSAA

SEQ ID NO: 114880 - DNA, 1260 bp, Streptomyces peucetius
  CDS (1)..(1260): transl_table=11
gtgaaccggcggatcgtcatcaccgggatcggcgtggtggctcccggcgccgtcgggaccaagccgttctgggagctgctgctgtccggaaccaccgccacccgcgccatcagcactttcgacgccacgcccttccgttcccgtatcgccgccgagtgcgacttcgatccggtggcggcggggctgtccgcggagcaggcccggcgcctcgaccgggccgggcagttcgcgctggtcgccggtcaggaggcgctcgccgacagcgggctgcgaatcgatgaggactccgcgcaccgggtcggggtgtgcgtgggcaccgccgtcggctgcacgcagaaactggagtccgagtacgtcgctctcagcgcgggcggagcgcactgggtcgtggaccccggccgggggtcgcccgagctgtacgactacttcgtgccgagttccctcgccgccgaagtggcctggctcgccggggcggaggggcccgtgaacatcgtctcggccgggtgcacctcggggatcgactccatcgggtacgcctgcgagctcatccgcgaggggacggtggacgccatggtcgcgggaggcgtggacgcacccatcgcgccgatcacggtggcctgcttcgacgccatcagggcgacctccgaccacaacgacacccccgagaccgcctcgcgtcccttcagccgcagccgcaacggctttgtgctgggcgagggcggtgcgatcgtggtcctggaagaggcggaggcggccgtgcgcaggggcgcgcggatctacgccgagatcggcgggtacgcctcacgcggcaacgcgtaccacatgaccgggctgcgcgcagacggcgccgagatggcggcggcgatcaccgcggccctcgacgaggcccgccgcgacccctcggacgtggactacgtcaacgcccacggaacggcgacgaagcagaacgaccggcacgagacctccgcgttcaagcgctccctgggggagcacgcgtaccgggtgcccatcagctccatcaagtcgatgatcggtcactccctgggcgctgtcggctcgctcgaagtggcggcgaccgcactggccgtggagtacggggtgatcccgccgaccgcgaatctgcacgacccggatccggaactcgacctggactacgtgccgctgacggcacgagaaaagcgggtgcggcacgcgctgacggtgggcagcggcttcggcggcttccagagcgccatgctgctgagccgtctcgagaggtga

SEQ ID NO: 114881 - protein, 419 aa, Streptomyces peucetius
MNRRIVITGIGVVAPGAVGTKPFWELLLSGTTATRAISTFDATPFRSRIAAECDFDPVAAGLSAEQARRLDRAGQFALVAGQEALADSGLRIDEDSAHRVGVCVGTAVGCTQKLESEYVALSAGGAHWVVDPGRGSPELYDYFVPSSLAAEVAWLAGAEGPVNIVSAGCTSGIDSIGYACELIREGTVDAMVAGGVDAPIAPITVACFDAIRATSDHNDTPETASRPFSRSRNGFVLGEGGAIVVLEEAEAAVRRGARIYAEIGGYASRGNAYHMTGLRADGAEMAAAITAALDEARRDPSDVDYVNAHGTATKQNDRHETSAFKRSLGEHAYRVPISSIKSMIGHSLGAVGSLEVAATALAVEYGVIPPTANLHDPDPELDLDYVPLTAREKRVRHALTVGSGFGGFQSAMLLSRLER

SEQ ID NO: 114882 - DNA, 1257 bp, Streptomyces sp
  CDS (1)..(1257): transl_table=11
gtgaaccgacgggtcgtcatcaccgggatgggtgtggtggccccgggagccatcggcatcaagtcgttctgggagctgctgctgtccgggaccaccgccacccgggccatcaccacgttcgacgccacgcccttccgttcccggatcgccgccgagtgcgacttcgatccggtcgcggcagggctgtccgcggagcaggcccggcgcctcgaccgggccgggcagttcgcgctggtcgccggtcaggaggcgctcactgacagcgggctgcgcatcggggaggactccgcccaccgggtcggggtgtgcgtgggtaccgctgtcggctgcacgcagaaactggagtccgagtacgtggctctcagcgcgggcggtgcgaactgggtcgtggacccccaccggggggcgcccgagctgtacgactacttcgtgccgagttccctcgccgccgaagtggcttggctcgccggggcggaagggcccgtgaacatcgtctcggccgggtgcacctcggggatcgactccatcgggtacgcctgcgaactcatccgcgaggggacggtggacgtcatgctcgcgggaggcgtggacgcccccatcgcaccgatcactgtggcctgcttcgacgccatcagggtgacctccgaccacaacgacacacccgagacgctcgcgcccttcagccgcagccgcaacggcttcgtgctgggcgagggtggtgcgatcgtggttctggaagaggcagaggcggccgtgcgcaggggcgcacgaatctacgccgagatcggcgggtacgcctcacgcggcaacgcataccacatgacggggctgcgcgcagacggcgccgagatggctgcggcgattaccgcggccctcgacgaagcccgccgcgacccctcggacgtggactatgtcaacgcccacggaacagcgacgcgacagaacgaccggcacgaaacctccgcgttcaagcgctcgctgggggatcacgcgtaccgggttcccatcagctccgtgaagtcgatgatcggtcactccctgggggccgccggctcgctcgaagtggcggcgaccgcactggcggtggagtacggggcgatcccgccgaccgcgaatctgcacgacccggatcccgaactcgacctggactacgtgccgttgacggcgcgagaaaagcgggtgcggcatgcgctgacggtgggcagcggcttcggcggcttccagagcgccatgctgttgagccgtcccgagaggtga

SEQ ID NO: 114883 - protein, 418 aa, Streptomyces sp
MNRRVVITGMGVVAPGAIGIKSFWELLLSGTTATRAITTFDATPFRSRIAAECDFDPVAAGLSAEQARRLDRAGQFALVAGQEALTDSGLRIGEDSAHRVGVCVGTAVGCTQKLESEYVALSAGGANWVVDPHRGAPELYDYFVPSSLAAEVAWLAGAEGPVNIVSAGCTSGIDSIGYACELIREGTVDVMLAGGVDAPIAPITVACFDAIRVTSDHNDTPETLAPFSRSRNGFVLGEGGAIVVLEEAEAAVRRGARIYAEIGGYASRGNAYHMTGLRADGAEMAAAITAALDEARRDPSDVDYVNAHGTATRQNDRHETSAFKRSLGDHAYRVPISSVKSMIGHSLGAAGSLEVAATALAVEYGAIPPTANLHDPDPELDLDYVPLTAREKRVRHALTVGSGFGGFQSAMLLSRPER

SEQ ID NO: 114884 - DNA, 1467 bp, Glycine max
  CDS (1)..(1467)
atggcttcgaccaccacctcctccctctgcacgtggctcgttgctgcttgcatgtcagtcacgtgccacgccgaccgcaccaaaacccctcacgcaatgttccgctcctccaaaaagtctcgctactctcaattcaacgtttgtcgatccactcattctggtaaaacaatggctgtagctttgcaacctacccaagagatcacgacaataaaaaaacctcccacgaagcaaaggcgagtggttgtgacaggattgggtgtggttacaccacttgggcatgagccagatatcttctacaataatttgcttgatggtgctagtggcataagcgagattgaaacatttgattgtgcagaatatccaacaaggattgctggtgaaatcaagtctttctcaactgatggctgggtagcaccaaaactttctaagagaatggataaatttatgctctatatgctgacagctggcaaaaaagccttggttgatggtggaattactgatgatgtaatggatgagttaaataaagaaaagtgtggagttctgattgggtcagcaatgggtggcatgaaggttttcaatgatgccatcgaagctttacgaatctcatataagaagatgaatcctttttgtgtaccttttgcaacaacaaatatgggttctgccatgcttgcaatggatctgggatggatgggccctaattattctatctctacagcttgtgctacaagtaacttttgtatattgaatgcagcaaaccatatcattagaggtgaagctgatgtgatgctttgtggaggctcagatgctgctattataccaattggtttgggaggctttgtggcatgcagggcactctcacaaaggaatactgatcctaccaaagcttcacgcccttgggacattaaccgtgatggatttgtcatgggtgaaggggctggagttttgcttttagaggaactggagcatgctaaggaaagaggtgcaaccatatatgctgaattccttggtggaagtttcacctgtgatgcatatcatgtgactgagccgcgtcctgatggggctggtgttatactgtgcattgaaaaggcattagctcagtctggagtatcaaaagaggatgtgaattacataaatgcacatgccacatccacaccagctggagatcttaaggagtaccaagctctaatgcattgttttggtcaaaaccccgagttaagagtgaattctacaaaatctatgattggtcatctactaggggcagctggcggtgtggaagctgtggccacaatacaggcaattaggacagggtgggttcatcccaatatcaacctagaaaacccagataacggagtggatgctaaagtgcttgttggctcaaagaaagagagactggatgtcaaggcagccttgtcgaattcatttggttttgggggtcacaattcttcaatcatatttgcaccatactag

SEQ ID NO: 114885 - protein, 488 aa, Glycine max
MASTTTSSLCTWLVAACMSVTCHADRTKTPHAMFRSSKKSRYSQFNVCRSTHSGKTMAVALQPTQEITTIKKPPTKQRRVVVTGLGVVTPLGHEPDIFYNNLLDGASGISEIETFDCAEYPTRIAGEIKSFSTDGWVAPKLSKRMDKFMLYMLTAGKKALVDGGITDDVMDELNKEKCGVLIGSAMGGMKVFNDAIEALRISYKKMNPFCVPFATTNMGSAMLAMDLGWMGPNYSISTACATSNFCILNAANHIIRGEADVMLCGGSDAAIIPIGLGGFVACRALSQRNTDPTKASRPWDINRDGFVMGEGAGVLLLEELEHAKERGATIYAEFLGGSFTCDAYHVTEPRPDGAGVILCIEKALAQSGVSKEDVNYINAHATSTPAGDLKEYQALMHCFGQNPELRVNSTKSMIGHLLGAAGGVEAVATIQAIRTGWVHPNINLENPDNGVDAKVLVGSKKERLDVKAALSNSFGFGGHNSSIIFAPY

SEQ ID NO: 114886 - DNA, 1470 bp, Glycine max
  CDS (1)..(1470)
atggcttcgaccaccacctcctccctctgcacgtggctcgtcgctgcttgcatgtcagtcacgtgcgacgccgaccgcaccagaacccctcacgcaatcttccgctcctccaaaaagtctcgcaagtctcaattcaacgtctctcgatccactcattctggtaaaacaatggctgtagctttgcaacctacccaagaggtcacaacaataaaaaaacctcctacaaagcaaaggcgagtagttgtgacaggattgggtgtggttacaccacttgggcatgagccagatatcttctacaataatttgcttgatggtgttagtggcataagtgagattgaaacatttgactgtgcagaatatccaacaaggattgctggtgaaatcaagtctttctcaactgatggctgggtagcaccaaaactttctaagagaatggataaatttatgctctatatgctgacagctggcaaaaaagccttggttgatggtggaattactgatgatgtaatggatgagttaaataaagataagtgtggagttctgattggctcagcaatgggtggcatgaaggttttcaatgatgccattgaagctttacgaatctcatataagaagatgaatcctttttgtgtaccttttgcaacaacaaatatgggttctgccatgcttgcaatggatctgggatggatgggccctaattattctatctctacagcttgtgctacaagtaacttttgtatattgaatgcagcaaaccatatcattagaggtgaagctgatgtgatgctttgtggtggctcagatgctgctattataccaattggtttgggaggctttgtggcatgcagggcactctcacaaaggaatactgatcctaccaaagcttcacgcccttgggacattaaccgtgatggatttgtcatgggagaaggggctggagttttgcttttagaagaactggagcatgctaagaaaagaggtgcaaccatatatgctgaattccttggtggaagtttcacctgtgatgcatatcatgtgactgagccgcgtcctgatggggctggtgttattctttgcattgaaaaggcattagctcagtctggagtatcaaaagaggatgtgaattacataaatgcacatgccacatccacaccagctggagatcttaaggagtaccaagctctaatgcattgttttggtcaaaaccccaagttacgagtgaattctacaaaatctatgattggtcatctactaggggcagctggcgctgtggaagctgtggccacaatacaggcaattaggacagggtgggttcatcccaatatcaacctagaaaagccagataatggagtggatgctaaagtgcttgttggctcaaagaaagagagactggatgtcaaggcagccttgtcgaattcatttggttttgggggtcacaattcttcaatcatatttgcaccttacaagtga

SEQ ID NO: 114887 - protein, 489 aa, Glycine max
MASTTTSSLCTWLVAACMSVTCDADRTRTPHAIFRSSKKSRKSQFNVSRSTHSGKTMAVALQPTQEVTTIKKPPTKQRRVVVTGLGVVTPLGHEPDIFYNNLLDGVSGISEIETFDCAEYPTRIAGEIKSFSTDGWVAPKLSKRMDKFMLYMLTAGKKALVDGGITDDVMDELNKDKCGVLIGSAMGGMKVFNDAIEALRISYKKMNPFCVPFATTNMGSAMLAMDLGWMGPNYSISTACATSNFCILNAANHIIRGEADVMLCGGSDAAIIPIGLGGFVACRALSQRNTDPTKASRPWDINRDGFVMGEGAGVLLLEELEHAKKRGATIYAEFLGGSFTCDAYHVTEPRPDGAGVILCIEKALAQSGVSKEDVNYINAHATSTPAGDLKEYQALMHCFGQNPKLRVNSTKSMIGHLLGAAGAVEAVATIQAIRTGWVHPNINLEKPDNGVDAKVLVGSKKERLDVKAALSNSFGFGGHNSSIIFAPYK

SEQ ID NO: 114888 - DNA, 1254 bp, Treponema hyodysenteriae
  CDS (1)..(1254): transl_table=11
atgagtgaacgtagagttgtaattacggggcttggaatagtaagttcgctaggaaatgatgtaaaaacattttgggataatttgcttaatggtgtttcaggtatcaaaacattaagtaaatatttcgatcctgaaaaagagcagcttattaccaaaatcggtgctgaagctttaccagttgagggcgactattattctgataaaaaaatgttaagaagattagacccttttattaattttggaatatatgccgctcatcatgcatttaagcaggctggtatagaaccgaaaacaggctttgatcctttaagagccggttgtgttcttggtagcggtattggcggtatgactactcttttatctaaccatcaagttttacttaatgacggacctggcagagtatcacctttctttgtacctatgcaaataatcaatatgacacctggtttaatatctatggaatatggtatgaacggacctaactacagtacagttactgcatgtgcttcttcaaaccactctataggtttaggttataaacatattaaagataatgaagctgatattatggtagttggaggttctgaagctactataaatcctcttactatagctggtttcaataatgctagagctttatctactagaaatgatgatcctgctaaagcatcaagaccttttgataaaggaagagacggatttgttatagctgaaggtgctggtatattaatacttgaagagtatgaacatgctaagaaaagaaatgctaatatacttgctgaagtttgcggttatggatttactgcagatgctaatcatatcactgcacctttagaggatggtgctatgggagcaagagctatgtctttagctattgaaagtgctaagatttcacctgataaaatcagctatgttaatactcatggtacttctactcctgttggagatattgctgaaatcaaagctattaaaaaggctttaggcgaagatcatgctaaaaaaataaaaattaattcaacaaaatctatgacaggacatgctttaggagctgcaggcggtatagaagctattgccactattatgagtatgattgaaggtaaagttcaccctactatcaatgtagaagaacaagatcctcaatgtgatttagatgttgttgctaacactgctcaggattataaaatagaatatgctataagcaattcttttggattcggcggtcataatgcttctatagtattcaaaagaatataa

SEQ ID NO: 114889 - protein, 417 aa, Treponema hyodysenteriae
MSERRVVITGLGIVSSLGNDVKTFWDNLLNGVSGIKTLSKYFDPEKEQLITKIGAEALPVEGDYYSDKKMLRRLDPFINFGIYAAHHAFKQAGIEPKTGFDPLRAGCVLGSGIGGMTTLLSNHQVLLNDGPGRVSPFFVPMQIINMTPGLISMEYGMNGPNYSTVTACASSNHSIGLGYKHIKDNEADIMVVGGSEATINPLTIAGFNNARALSTRNDDPAKASRPFDKGRDGFVIAEGAGILILEEYEHAKKRNANILAEVCGYGFTADANHITAPLEDGAMGARAMSLAIESAKISPDKISYVNTHGTSTPVGDIAEIKAIKKALGEDHAKKIKINSTKSMTGHALGAAGGIEAIATIMSMIEGKVHPTINVEEQDPQCDLDVVANTAQDYKIEYAISNSFGFGGHNASIVFKRI

SEQ ID NO: 114890 - DNA, 1167 bp, Streptomyces capreolus
  CDS (1)..(1167): transl_table=11
ttgacgcgcggcgggaccgccgtcgcggtcaccggccgcggcgcgtgcacccccgcgggggacggcgtcgcggcgctgtggtcggggctgcgccgggcgaccgcgaccatgcggaggatcacacacttctccaccgaggccgcggccctcggctcggccggattcgtgcccggcccgggcgaggagcccgacgcgcccgaacggaccctggacctggccacccgcagcgtcgccgaggcctcccgggacgccggctccccgccgacgcaccgcaccgcgctggtgctggggaccaccgagccgggcgaggtcgggctgcccaccggcgacggagcccagccgcccccggaccgcttcttcgccgggctgctcgccgcccgctgcgccgcccggttccccgcgttcggcgaggccctcacggtcgcctccgcctcggcgtcgggcgcggtcggcatcgccgtcgggcgggacatggtgctggcgggcgacgccgacacggtgttcgtcggcggcgcggacgccctcgtggagaccgccttccacggcctcagctcgctgcgcaccctcagccccgagggctgccggcccttcacccgggtccgccgcggcatcggcgtctccgagggggcgggcatgctccacctcgagccgctggaccgtgccagacggcgcggcgcgtacgtccacgccctgctggccggagccgccgtcaccaacgccaccgaccacctggccaccccgcgcgccgccgggatccggctggccgtcgaacaagccctggccgacgcggggctcgatcccgacgcggtcgacctgatcaacgtgcacgggcccggacccggcagggcgaccgagtggaggtcgacgcgctgcgccaggtgttcgggccccgccttgccccggatcccgatcgtcagcaccaagtcggtgctgtggcacctccagggcgcggcgggcgccgtggaggccctggcctgcgtgctgtcgctggagcacgcgacgctcacgcccacccgtgtgaccggcgagcccgacccggcgttcgcggacctggacctggtcccggccgcgcgccccgcccccgggctgcgcaccgcactgtcgatctcctgcggtctcggcgggctcaacgccgctctcgtgttcacgaaggggtcgcatgcctga

SEQ ID NO: 114891 - protein, 388 aa, Streptomyces capreolus
MTRGGTAVAVTGRGACTPAGDGVAALWSGLRRATATMRRITHFSTEAAALGSAGFVPGPGEEPDAPERTLDLATRSVAEASRDAGSPPTHRTALVLGTTEPGEVGLPTGDGAQPPPDRFFAGLLAARCAARFPAFGEALTVASASASGAVGIAVGRDMVLAGDADTVFVGGADALVETAFHGLSSLRTLSPEGCRPFTRVRRGIGVSEGAGMLHLEPLDRARRRGAYVHALLAGAAVTNATDHLATPRAAGIRLAVEQALADAGLDPDAVDLINVHGPGPGRATEWRSTRCARCSGPALPRIPIVSTKSVLWHLQGAAGAVEALACVLSLEHATLTPTRVTGEPDPAFADLDLVPAARPAPGLRTALSISCGLGGLNAALVFTKGSHA

SEQ ID NO: 114892 - DNA, 1626 bp, Arabidopsis thaliana
  CDS (1)..(1626)
atggtgggtgcgtcttcctcttacgcatctccgttatgtacctggtttgttgctgcttgcatgtccgtctctcacggtggaggagatagccgtcaggctgttgctcttcaatctggtgggcggagtcggcgaaggaggcagcttagcaaatgctctgtcgcttctggatccgctagcattcaggctctcgtgacttcttgtttggattttggtccttgtactcactacaacaacaacaatgcattgtcttctctctttggatcgaatagtgtttctttgaatcgaaaccagaggagattgaatcgtgctgctagctccggtggagccatggcagtgatggagatggaaaaggaagctgcggttaacaagaaaccacctacggagcagcgtcgagttgtagtgacaggcatgggagttgaaacatcattgggtcatgacccacataccttctatgagaatttgctacaaggcaacagtggtattagccagattgaaaattttgattgttctgaatttcctacgcgaattgcgggagagatcaaaagcttctcgactgaaggatgggttgctccaaaactttctaaaaggatggacaaattcatgctctatcttctcacagctggtaagaaagctttggctgatggtggggttactgatgaagtaatggcagagtttgacaaaaccaaatgtggagttttgattggctcggcaatgggaggaatgaaggtcttttacgatgctattgaagctctgagaatctcttacaagaagatgaatcctttttgtgtaccttttgcgacaacaaacatgggttctgctatgcttgccatggatctgggatggatggggccaaactattctatttcaactgcttgtgccacaagcaacttttgcattctgaattcagcaaaccacattattaaaggtgaagctgatgtaatgctctgtggtggctcagatgcagttattattccaatagggttgggaggttttgttgcatgccgggctctttcacaaaggaataatgatcccacaaaagcttcacgtccttgggataccaatcgagatggtttcgtgatgggagagggagctggagttctacttttggaagaactcgagcatgctaagaaaagaggtgcaactatctacgcagagttcctcggtgggagtttcacatgtgatgcctatcacatgaccgagcctcaccctgatggggctggtgttattctctgtattgagagagcgttagctagtgctgggatttccaaggaacaaataaattacataaatgcacatgcaacctcaacgcatgctggagatattaaggaataccaagcccttgctcactgttttggccaaaatcctgagcttaaggtaaattccacaaaatctatgattggacacttgctgggagttgctggggccgtggaggctgttgcaactgtgcaggcgatacggaccggatgggttcatccaaatatcaacctcgagaatccagacagtggagtggatacaaagctgctggtgggtcctaagaaggagagactggacattaaagcagccttgtcaaattcattcgggtttggtggtcataactccagcatcatttttgctccttacaagtga

SEQ ID NO: 114893 - protein, 541 aa, Arabidopsis thaliana
MVGASSSYASPLCTWFVAACMSVSHGGGDSRQAVALQSGGRSRRRRQLSKCSVASGSASIQALVTSCLDFGPCTHYNNNNALSSLFGSNSVSLNRNQRRLNRAASSGGAMAVMEMEKEAAVNKKPPTEQRRVVVTGMGVETSLGHDPHTFYENLLQGNSGISQIENFDCSEFPTRIAGEIKSFSTEGWVAPKLSKRMDKFMLYLLTAGKKALADGGVTDEVMAEFDKTKCGVLIGSAMGGMKVFYDAIEALRISYKKMNPFCVPFATTNMGSAMLAMDLGWMGPNYSISTACATSNFCILNSANHIIKGEADVMLCGGSDAVIIPIGLGGFVACRALSQRNNDPTKASRPWDTNRDGFVMGEGAGVLLLEELEHAKKRGATIYAEFLGGSFTCDAYHMTEPHPDGAGVILCIERALASAGISKEQINYINAHATSTHAGDIKEYQALAHCFGQNPELKVNSTKSMIGHLLGVAGAVEAVATVQAIRTGWVHPNINLENPDSGVDTKLLVGPKKERLDIKAALSNSFGFGGHNSSIIFAPYK

SEQ ID NO: 114894 - DNA, 1272 bp, Streptomyces galilaeus
  CDS (1)..(1272): transl_table=11
atgaccgcccgccgggtggtgatcaccgggctgggagtgatcgctccgggcggcatcggcaccaaggccttctgggaacgcatcgtctccggtgtctccgcgaccaggaccatcacggccttcgacgcctccgagttccgctcccggatggccgcggagtgcgacttcgacggcgtccgctcgggcctgaccgtccgtgacaccgcacggctggaccgtgccacccagttcgcggtggtcgccgcgcgcgaggcgctcgccgacagcggtatcgagatcgacgagaggaacgcccaccgcaccggggtcagcctcggctccgccgtggggtgcacccagaagctggaggaggagtacgtcgcgcgcagtgacggcgggcagcggtggctggtcgatcacgccgcgggcaccccgtacctgtacgactacttcgtaccgagttcgatggcggccgaagtggcgtgggaggccggcgccgagggccccgcggcgctcgtctcggcgggctgcacctccggtctcgactccctcgggcacgcgctcgacctcatcagggagggcgccgtcgacatcatgatcgccggtggcagcgacgcgcccatcgcacccatcaccgtggcctgtttcgacgccatcaaggcgacctcgccgcgcaacgacaccccggagcacgcctcgcggcccttcgacaggacccgcagcggcttcgtgctcggcgagggcgcggccgtactcgtcctggaggagcgggagtcggccctgcggcgcggagcacagatctacgccgagatcgcgggctacgccggtcgggccaacgcccaccacatgaccggactgcgccccgacggactggagatgtccgccgccatcaccggcgccctcgacgacgcccgcatcgaccgcgaagccgtcggttacgtcaacgcccacggcacggcgacccggcagaacgacatccacgagacggccgcgatcaagcacagcctgggcgagcacgcccgccgggtcccggtcagctccatcaaggcggtcatcggtcactcgctgggcgccgtcggctccatcgaggccgtcgcctccgccctggtgatccggcacggagtggtgccgcccacggcgggactgcacgagcccgatccccagctcgacctcgactacgttccgctgatcgcgcgcgaccaggccaccgacaccgtgctgacggtgggcagcggtttcggcggattccagagcgcgatggtgctcaccagcgccgaagggggccgctcatga

SEQ ID NO: 114895 - protein, 423 aa, Streptomyces galilaeus
MTARRVVITGLGVIAPGGIGTKAFWERIVSGVSATRTITAFDASEFRSRMAAECDFDGVRSGLTVRDTARLDRATQFAVVAAREALADSGIEIDERNAHRTGVSLGSAVGCTQKLEEEYVARSDGGQRWLVDHAAGTPYLYDYFVPSSMAAEVAWEAGAEGPAALVSAGCTSGLDSLGHALDLIREGAVDIMIAGGSDAPIAPITVACFDAIKATSPRNDTPEHASRPFDRTRSGFVLGEGAAVLVLEERESALRRGAQIYAEIAGYAGRANAHHMTGLRPDGLEMSAAITGALDDARIDREAVGYVNAHGTATRQNDIHETAAIKHSLGEHARRVPVSSIKAVIGHSLGAVGSIEAVASALVIRHGVVPPTAGLHEPDPQLDLDYVPLIARDQATDTVLTVGSGFGGFQSAMVLTSAEGGRS

SEQ ID NO: 114896 - DNA, 1272 bp, Streptomyces aureofaciens
  CDS (1)..(1272): transl_table=11
atgagccgacgcgtcgtcatcaccggaatcggcgtggtcgcgcccgggggggtgggcaccaaggagttctggtccctgctcaccgccgggaagaccgcgacccgcgcgatcagcctgttcgacgcctccccgttccgctcccgcatcgccgcagaggccgacttcaaccccctcgaccacggattcaccgccgaagaggccatgcgcctcgaccgggcggcccagttcgcgatcgtcagcgcgagcgaggccgtccgcgacagcggcatcgacaccgccgagctggaccccacccgtaccggtgtcaccctcggcagcgcggtcggctgcaccacgggcctggacgtcgagtacaacgctgtgagccgcggcggatccacctggcaggtggaccacaccctcgccgtcccgcacctgttcgactacttcgtcccgagctccatggcggccgaagtggcctggcgtgtgaacgcccagggccccgtctccatggtctccaccggatgcacctccggcctcgactccataggccacgccgtcgagctgatccgcgagggcagcgcagacgtgatgatcaccggtgccaccgaggccccgatctcccccatcaccgtcgcctgcttcgacgcgatcaaggccacctccccgcgcaacgacgaccccgggaccgcctcccgccccttcgacgccacccgcaacggcttcgtcctcggcgagggctcggccgtcctggtcctggaggacctggagagcgcccgcaagcgcggcgcccacgtctacgccgagatctccggcttcgccagccgctgcaacgcgtaccacatgaccggactgcgcgccgacggcgtggagatggccgaggcgatcaccgtcgccctcgacgaggcccgcctcgacccctccgccgtcgactacatcaacgcccacggttccggcaccaagcagaacgaccgccacgagaccgccgccttcaagcgcagcctcggacagcgcgcctacgaggtccccgtcagctccatcaagtcgatgatcggccactcgctcggcgcgatcggctcctcgaaagtcgcggccagcgccctggccatcgagtacaacacggtgccgcccaccgccaacctgcacacccccgaccccctctgcgatctggactacaccccgctcaccgcgcgcgagcagcgcaccgacgccgtcctcagcgtgggcagcgggttcggcggatttcagagcgccatgatcctgacccgcccgcgtctgggagatgccgcatga

SEQ ID NO: 114897 - protein, 423 aa, Streptomyces aureofaciens
MSRRVVITGIGVVAPGGVGTKEFWSLLTAGKTATRAISLFDASPFRSRIAAEADFNPLDHGFTAEEAMRLDRAAQFAIVSASEAVRDSGIDTAELDPTRTGVTLGSAVGCTTGLDVEYNAVSRGGSTWQVDHTLAVPHLFDYFVPSSMAAEVAWRVNAQGPVSMVSTGCTSGLDSIGHAVELIREGSADVMITGATEAPISPITVACFDAIKATSPRNDDPGTASRPFDATRNGFVLGEGSAVLVLEDLESARKRGAHVYAEISGFASRCNAYHMTGLRADGVEMAEAITVALDEARLDPSAVDYINAHGSGTKQNDRHETAAFKRSLGQRAYEVPVSSIKSMIGHSLGAIGSSKVAASALAIEYNTVPPTANLHTPDPLCDLDYTPLTAREQRTDAVLSVGSGFGGFQSAMILTRPRLGDAA

SEQ ID NO: 114898 - DNA, 1371 bp, Coriandrum sativum
  CDS (1)..(1371)
atgcaatctcttcttcaatcttccttcactccaacattccgcctcccgaaaccctgccatcacatccctagaccacctcgaaagttgtcggttttcgcaacctcagcctctccgaaacgcgaaaaagatcctaagaaacgagttgtcgtaaccggtctcggtgtggtttcggtgtttggaaatgacgtggatacttattatgacaagcttcttgcaggcgaatccggtgtggattttattgatagatttgatgcatccgaatttccgacacgattcgcagcacagatccgagcattttcatccgaagggtacatagatagcaagaatgatcggagacttgacaattgtttgcgttacaacatcgttgctggtaaaaaagcacttgaaaatgctggtcttggtgaagacatgcggtccaagattgacaaggagcgtgctggtgtgctcgttggaagtggtatggggggtattactgcattttgtgatggtgtggagaatctgatcacaaaaggttacaagaaaatatctccatttttcataccgtatactataaccaacatgggctctgcattgcttgctattgatcttggcttcatgggaccaaactattctattgttgctgcttgtgccacctcaaattatgcgttttatgctgctgcgaatcacattcgtagtggtgaggctgatttgatgcttgctggtggagccgaagctgctattgtccctgttggactgggcgggttcacttcgtgcagagcaatgtctcagagaaatgataatcccaaggcggcttctaggccttgggacaaagatagagatggtttagttatgggtgaaggcgctggagtcttggtgatggagagtttggttcatgcaatgaagcgaggtgcaccgataattgctgaatacttagggggtgcagtcacctgtgatgctcatcatatgactgatcccagacctgatgggggaggggtttcgatgtgcattcaaagtggccttcaagaagctggggtggtttcgcctgaggaggtcaattacatcaatgcacatgcaacttcaactttagctggagatcttaaagaggttactgctatcaaacaagttttgggccagattaaagcaaatgcaaccaagtctatgaatgcccactgcttgggggctgcttctggcttggaagccgtggcaacagtgaaggccatagctacagggtggctgcaccctactatcaatcaagtgaaccttgaacctgaagttgattttgacacagttgcaaataagaaacagcagcatgaagtgaatgttggcatctcaaattcatttggatttggtggacacaactcagtggtggtattttctgcattcaacccatga

SEQ ID NO: 114899 - protein, 456 aa, Coriandrum sativum
MQSLLQSSFTPTFRLPKPCHHIPRPPRKLSVFATSASPKREKDPKKRVVVTGLGVVSVFGNDVDTYYDKLLAGESGVDFIDRFDASEFPTRFAAQIRAFSSEGYIDSKNDRRLDNCLRYNIVAGKKALENAGLGEDMRSKIDKERAGVLVGSGMGGITAFCDGVENLITKGYKKISPFFIPYTITNMGSALLAIDLGFMGPNYSIVAACATSNYAFYAAANHIRSGEADLMLAGGAEAAIVPVGLGGFTSCRAMSQRNDNPKAASRPWDKDRDGLVMGEGAGVLVMESLVHAMKRGAPIIAEYLGGAVTCDAHHMTDPRPDGGGVSMCIQSGLQEAGVVSPEEVNYINAHATSTLAGDLKEVTAIKQVLGQIKANATKSMNAHCLGAASGLEAVATVKAIATGWLHPTINQVNLEPEVDFDTVANKKQQHEVNVGISNSFGFGGHNSVVVFSAFNP

SEQ ID NO: 114900 - DNA, 1269 bp, Streptomyces antibioticus
  CDS (1)..(1269): transl_table=11
atgacccggcgcgtcgtgatcaccggtgtcggtgtacgcgctcccggcggcaacggaacgaaggcgttctgggacctgttgtcggcgggccgcaccgccacccggagcatctccttcttcgacgcgtcgccgttccgttcgcggatcgccggcgaggtcgacttcgacgcggcggccgagggcttcggcccgcgcgagatccgccgcatggaccgggccacgcagttcgcggtggcctgcacccgcgaggcggtcgcggacagcgggctggacctgtccgcgctggatccgcaccgcatcggggtcagcctgggcagcgcggtcgcctcggcgaccagcctggagaacgagtacctcgtgatgtcggacgcgggcaaggagtgggaggtcgacccggcctacctgtccccgcacatgttcgactatctgtcccccggcgtgatgccggccgaggtggcctgggaagtgggcgcggaaggcccggtgaccatggtgtccgacggctgcacctcggggctcgactcggtgcgctacgccgtccagctgatccgcgagggcacggtcgacaccgtcgtcgccggcgccgcggacaccccgatctccccgatcgtggtcgcctgcttcgacgccatcaaggcgacgacgacccgcaacgacgacccggcgcacgcctcgcgccccttcgacggcacccgcaacggattcgtgctcgccgagggcgccgccatgttcgtgctggaggagtacgaggcggccaagaaccgcggcgcgcacatctacgcggaggtcggcgggtacgccacccgctgcaacgcccaccacatgacgggcctgcgcaaggacggccgcgagatggccgaggccatccgtgtctcgctggacgaggcacgcctggacggcaccaagatcgactacatcaacgcgcacggctcgggcaccaagcagaacgaccgccacgagaccgccgctcttaagcgctccctgggccagcacgcctacgacgtgccggtctcctccatcaagtcgatggtcggccactccctgggggccatcggctccgtcgagatcgccgcgtcactgctggcgatcgagcacaacgtcgtgccgccgacggccaacctgcacacccccgaccccgagtgcgacctcgactacgtacccctgaccgcccgcgaacagcgcgtggacacggtgctcacggtcggctccggcttcggaggcttccagagcgcgatgatcctgcaccgtccggaggtggccgcggcatga

SEQ ID NO: 114901 - protein, 422 aa, Streptomyces antibioticus
MTRRVVITGVGVRAPGGNGTKAFWDLLSAGRTATRSISFFDASPFRSRIAGEVDFDAAAEGFGPREIRRMDRATQFAVACTREAVADSGLDLSALDPHRIGVSLGSAVASATSLENEYLVMSDAGKEWEVDPAYLSPHMFDYLSPGVMPAEVAWEVGAEGPVTMVSDGCTSGLDSVRYAVQLIREGTVDTVVAGAADTPISPIVVACFDAIKATTTRNDDPAHASRPFDGTRNGFVLAEGAAMFVLEEYEAAKNRGAHIYAEVGGYATRCNAHHMTGLRKDGREMAEAIRVSLDEARLDGTKIDYINAHGSGTKQNDRHETAALKRSLGQHAYDVPVSSIKSMVGHSLGAIGSVEIAASLLAIEHNVVPPTANLHTPDPECDLDYVPLTAREQRVDTVLTVGSGFGGFQSAMILHRPEVAAA

SEQ ID NO: 114902 - DNA, 1287 bp, Streptomyces collinus
  CDS (1)..(1287): transl_table=11
atgacagccggacaccgacgcgcggtgatcaccggggtgggggccgtcgcgcccggcgggatcgggcgggacgcctactgggacctgctcaccgccggacgcaccgccacccgccgcatcagcctgttcgacccggccggcttccgctcccaggtcgccgccgagtgcgacttcgatccgctcgccgcggggctcaccccccaggaggcccgccggatggaccgggccggtcagttcgcggtcgtcgccgcccgtgaggccgtcgcggacagcggagtcgagctgcccggcaccgacccggagcgggtcggcatcagcatcggcagcgccgtcggctgcaccatgggcctggaggaggagtacgcggtcctctccgacggcggacgcgactggctggtcgaccacagctacggcgtcccccacctctacggctacatggtgcccagcaccctcgccgtcgaggtggcccgccaggcgggagccgaggggccggtcgcgctgatctccaccggctgcacctcgggactggacgccatcggacacggcgtccagctgatcgaggagggcagcgccgacatcgtgctcgccggcgccaccgacgccccgctgtcgccgatcacctccgcctgcttcgacgccatcaaggccaccaccgccaacaacgacgatcccgaacacgcctcccggcccttcgacgggcagcgcgacggcttcgtcctgggcgagggctccgccgtcatggtgatagaggagctggagtcggccagacgccgcggcgccaccgtgtacgccgagatcctcggtttcgcgggccgcagcaacgccttccacatgaccggactcaagcccgacggccgggagatggcggaggccgtccgggtcgccctgcaccgggcgcggctcgacccgggcgccatcgactacatcaacgcccacggctcgggcacgaagcagaacgaccggcacgagaccgccgcgttcaagcgcagcctgggacagcgggcccacgaggtgccggtcagctccatcaagtcgatgatcgggcactcgctcggcgccatcggctccctggagatcgccgcctgcgctctcgccctgcgccaccaggtcgtcccgccgacggccaacctgtccacgcccgaccccgagtgcgacctcgactacgtgccggtgacggcccgcgagcaccgtatggaccgggtgctcagcgtcggcagcggcttcggcggcttccagacggcgatggtcctgggccggccccacctcgcgcacggggaggcggcatga

SEQ ID NO: 114903 - protein, 428 aa, Streptomyces collinus
MTAGHRRAVITGVGAVAPGGIGRDAYWDLLTAGRTATRRISLFDPAGFRSQVAAECDFDPLAAGLTPQEARRMDRAGQFAVVAAREAVADSGVELPGTDPERVGISIGSAVGCTMGLEEEYAVLSDGGRDWLVDHSYGVPHLYGYMVPSTLAVEVARQAGAEGPVALISTGCTSGLDAIGHGVQLIEEGSADIVLAGATDAPLSPITSACFDAIKATTANNDDPEHASRPFDGQRDGFVLGEGSAVMVIEELESARRRGATVYAEILGFAGRSNAFHMTGLKPDGREMAEAVRVALHRARLDPGAIDYINAHGSGTKQNDRHETAAFKRSLGQRAHEVPVSSIKSMIGHSLGAIGSLEIAACALALRHQVVPPTANLSTPDPECDLDYVPVTAREHRMDRVLSVGSGFGGFQTAMVLGRPHLAHGEAA

SEQ ID NO: 114904 - DNA, 1272 bp, Streptomyces maritimus
  CDS (1)..(1272): transl_table=11
gtgagccgacacgtagtcataactggcctgagcgtcctcgcacccggttcgacggatacagagggcttctggaagatgatcacagcggggcgcagcgcgatccgcaggatcacggcattcgaccccacgccgttccgttcccaggtggcgggagaggtcgatctcgatccgctggcctgtgggttcagccgccgcgaggtccggcgtctggaccgggccagcctgctggccgtggcctgcgccagacgggcggtggcggaagccgggatcacctccggtacgagtatcgaccctggccgcatcggtgtgagcgtgggcaacgcggtgggatccgccacaagtatcgagaacgagtacgtcgtgctgtccgacgagggacgccagtggctggtcgaccagaagtaccagtccccccacctgttcgactacttcgtcccgggttccctcgcccgcgagaccgcctgggcggccggtgccgaaggaccggtgtcggtcatctcggccggctgcacctctggcatcgacgccctcggccatgcctgccagctcatccaggagggcagtgccgacgtgatggtcgccggcgccaccgatgctcccgtcaccccgatcgcggtggcctgcttcgatgcgatcaaggccaccacgcgccgtaacgacgatcccgaacacgcgccgcggcccttcgaccgcacccgggacggattcgccatcgccgagggcgcggccatgctggtcctggaggacagcgaacacgcccggcggcgcggagccgacatttacggcaccatcaccggatacgccgcgcactcgaacgcgtaccacatgacgggcctgtcccgggacggcaatgagatggcccgcgccatcacgaccgccctggacgaggcccgcaccgaccccacggccgtcgggtacatcaacgcccacggctctggcacgaaacagaacgacctgcatgaaaccgaggcgttcaagaaggccctgggcgagcacgcttacaacgtcccggtcagctccatcaagtcgatgatcgggcattccctgggcgcgatcggcgcgatcgaggttgcaacctgcgcgctggccatccgcaacggagtggtgccccccaccgcgaacctccatgagcccgacccggactgcgacctggactacgtcccccttgaggcgcgtgatgtggaccttgacgtcgtcctgaccgtgggcagcgggttcggggggttccagagcgccatgatcgtggagaagtggcgaggaggccacgtatga

SEQ ID NO: 114905 - protein, 423 aa, Streptomyces maritimus
MSRHVVITGLSVLAPGSTDTEGFWKMITAGRSAIRRITAFDPTPFRSQVAGEVDLDPLACGFSRREVRRLDRASLLAVACARRAVAEAGITSGTSIDPGRIGVSVGNAVGSATSIENEYVVLSDEGRQWLVDQKYQSPHLFDYFVPGSLARETAWAAGAEGPVSVISAGCTSGIDALGHACQLIQEGSADVMVAGATDAPVTPIAVACFDAIKATTRRNDDPEHAPRPFDRTRDGFAIAEGAAMLVLEDSEHARRRGADIYGTITGYAAHSNAYHMTGLSRDGNEMARAITTALDEARTDPTAVGYINAHGSGTKQNDLHETEAFKKALGEHAYNVPVSSIKSMIGHSLGAIGAIEVATCALAIRNGVVPPTANLHEPDPDCDLDYVPLEARDVDLDVVLTVGSGFGGFQSAMIVEKWRGGHV

SEQ ID NO: 114906 - DNA, 1693 bp, Brassica napus
  CDS (36)..(1337)
ctcgagctgctactgctagttccggtggaggagccatggctgttgcgatggatatggaaaaggaagccaaggttgacaacaaacctcctacggagcagcgccgggttgttgtgacaggcatgggagttgaaacatcactaggtcatgaccctgacaccttttatgagaatctcctacaaggcaacagtggtattagccagattgagaattttgattgttctgcttttcctacgagaattgctggagagatcaagtcattctcgactgaagggtgggttgctccaaaactctcaaagaggatggacaagttcatgctctatcttctcactgctggcaagaaggctttggttgatggtggggtaaccgaagaagtcatggcagagtttgacaaagccaaatgcggagtcttgattggctctgcaatgggaggcatgaaggtctttcaagatgctattgaagctatgaagatctcttacaagaagatgaatcctttctgtgtgcctttcgcgacaacgaacatgggttctgctatgcttgctttggatctgggatggatggggccaaactattctatctcaactgcttgtgcaacaagcaacttttgcattctcaattcagcaaaccacattatcaaaggagaagctgatgtaatgctctgtggtggctcggattcagttattattccaatagggttgggaggttttgttgcatgccgtgctctttctcaaaggaataatgatcccacaaaagcttcacgcccttgggatagcaaccgagatggtttcgtgatgggagagggagctggagttttgcttttggaagagcttgaacatgctaagaaaagaggagcaacaatctatgcagagttccttggtgggagtttcacatgtgatgcctatcacatgaccgagcctcgccctgatggtgctggtgtgattctgtgtattgagagagcattggctgatgctgggatttccaaagaacagataaactatataaatgcacatgcaacctctacaccagctggagaccttaaggagtaccaagcccttgctcactgctttggccaaaatcctgagataaaagttaattccacaaaatctatgattggacacttgctgggagctgctggggccgttgaagctgtcgcaactgtgcaggccataaggaccggatgggttcatccaaatatcaaccttgagagtccagacaatggagtggatacaaatttgctggtgggtcctgagaaggagagattggacattaaagcagccttgtcaaattcattcgggtttggtggccacaactccagcatcatttttgctccttacaagtgaaagcactcattgcctgtactccaaacctggttgtgtaacttgctgtaagtgtttacaagaactccccatgttatgttgttgcgggaatcaacacagtttgttaaactaccaagagctaagctaagtttccttaggatcaagatccgtttgtgccagagaacttggacaaagagcaaacgtagcagagtttggatttagcttccgtgtgataccttttgagtggaatctttgtagccttttcttttttgtagtgtttcatttctatttgttaatcattacaatctgaaaattgccaaaccaattctccgttaaatttagtaactctacacaaaaaaaaaaaaaaaaaaaaaaaaaaa

SEQ ID NO: 114907 - protein, 433 aa, Brassica napus
MAVAMDMEKEAKVDNKPPTEQRRVVVTGMGVETSLGHDPDTFYENLLQGNSGISQIENFDCSAFPTRIAGEIKSFSTEGWVAPKLSKRMDKFMLYLLTAGKKALVDGGVTEEVMAEFDKAKCGVLIGSAMGGMKVFQDAIEAMKISYKKMNPFCVPFATTNMGSAMLALDLGWMGPNYSISTACATSNFCILNSANHIIKGEADVMLCGGSDSVIIPIGLGGFVACRALSQRNNDPTKASRPWDSNRDGFVMGEGAGVLLLEELEHAKKRGATIYAEFLGGSFTCDAYHMTEPRPDGAGVILCIERALADAGISKEQINYINAHATSTPAGDLKEYQALAHCFGQNPEIKVNSTKSMIGHLLGAAGAVEAVATVQAIRTGWVHPNINLESPDNGVDTNLLVGPEKERLDIKAALSNSFGFGGHNSSIIFAPYK

SEQ ID NO: 114908 - DNA, 1467 bp, Glycine max
  CDS (1)..(1467)
atggcttcgaccaccacctcctccctctgcacgtggctcgttgctgcttgcatgtcagtcacgtgccacgccgaccgcaccaaaacccctcacgcaatgttccgctcctccaaaaagtctcgctactctcaattcaacgtttgtcgatccactcattctggtaaaacaatggctgtagctttgcaacctacccaagggatcacgacaataaaaaaacctcccacgaagcaaaggcgagtggttgtgacaggattgggtgtggttacaccacttgggcatgagccagatatcttctacaataatttgcttgatggtgctagtggcataagcgagattgaaacatttgattgtgcagatatcccaacaaggattgctggtgaaatcaagtctttctcaactgatggctgggtagcaccaaaactttctaagagaatggataaatttatgctctatatgctgacagctggcaaaaaagccttggttgatggtggaattactgatgatgtaatggatgagttatataaagacaagcgtggagttctgattgggtcagcaatgggtggcatgaaggttttcaatgatgccatcgaagctttacgaatctcatataagaagatgaatcctttttgtgtaccttttgcaacaacacatatgggttctgccatgcttgcaatggatctgggatggatgggccctaattattctatctctacagcttgtgctacaagtaacttttgtatattgaatgcagcaaaccatatcattagaggtgaagctgatgtgatgctttgtggaggctcagatgctgctattataccaattggtttgggaggctttgtggcatgcagggcactctcacaaaggaatactgatcctaccaaagcttcacgcccttgggacattaaccgtgatggatttgtcatgggtgaaggggctggagttttgcttttagaggaactggagcatgctaaggaaagaggtgcaacaatattggctgaattccttggtggaagtttcacctgtgatgcatatgatgtgactgagccgcgtcctgatggggctggtgttatactgtgcattgaaaaggcattagctcagtctggagtatcaaaagaggatgtgaattacataaatgcacatgccacatccacaccagctggagatcttaaggagtaccaagctctaatgcattgttttggtcaaaaccccgagttaagagtgaatctaacaaaatctatgattggtcatctactaggggcagctggcggtgtggaagctgtggccacaatacaggcaattaggacagggtgggttcatcccaatatcaacctagaaaacccagataacggagtggatgctaaagtgcttgttggctcaaagaaagagagactggatgtcaaggcagccttgtcgaattcatttggttttgggggtcacaattcttcaatcatatttgcaccatactag

SEQ ID NO: 114909 - protein, 488 aa, Glycine max
MASTTTSSLCTWLVAACMSVTCHADRTKTPHAMFRSSKKSRYSQFNVCRSTHSGKTMAVALQPTQGITTIKKPPTKQRRVVVTGLGVVTPLGHEPDIFYNNLLDGASGISEIETFDCADIPTRIAGEIKSFSTDGWVAPKLSKRMDKFMLYMLTAGKKALVDGGITDDVMDELYKDKRGVLIGSAMGGMKVFNDAIEALRISYKKMNPFCVPFATTHMGSAMLAMDLGWMGPNYSISTACATSNFCILNAANHIIRGEADVMLCGGSDAAIIPIGLGGFVACRALSQRNTDPTKASRPWDINRDGFVMGEGAGVLLLEELEHAKERGATILAEFLGGSFTCDAYDVTEPRPDGAGVILCIEKALAQSGVSKEDVNYINAHATSTPAGDLKEYQALMHCFGQNPELRVNLTKSMIGHLLGAAGGVEAVATIQAIRTGWVHPNINLENPDNGVDAKVLVGSKKERLDVKAALSNSFGFGGHNSSIIFAPY

SEQ ID NO: 114910 - DNA, 1410 bp, Glycine max
  CDS (1)..(1410)
atgcaagcgcttcattcccccaccctccgcacttctcccttggaccctcttcggggccccaacaatgccgccgccaagcgacgcgcctcctctgccaagcgcgtgttcttcgtgtccgccacggtggcgccgaaggtgtccgccccgcagcggcagaaggactcgaagaagcgcgtggttatcacgggaatggggctcgcgtcggtgttcgggaacgacgtggaggggtactacgagaagcttctcgccggcgagagcggcatcacccccatcgaccgcttcgacgcctccaagtttcccacgcgcttcggcggccagatccgcggcttctccgccgagggctacatcgacggcaagaacgaccgccgcctcgacgactgcctccgctactgcattgtcgccggcaaaaaggccctcgaaaacgccgaccttgccccagacaaccactccaagattgataaggagcgtgctggtgttcttgtaggctccggaatgggaggtttaacggtgttttctgacggtgttcaggctctgattgagaaggggcacaggaagataacgccgttttttattccgtatgccattactaacatgggttcggctttgcttgggatagaccttgggttcatgggtcccaactattctatatccacggcttgtgctacctccaactattgcttttatgctgcggcgaaccatattcggagaggggaggctgatttgatgattgcgggtgggactgaggctgccattattccaattgggttagggggtttcgttgcttgcagggcgctttcgcagaggaatgatgaccccaaaactgcttccaggccgtgggataaggaccgtgatggctttgttatgggcgaaggtgctggagttttggtaatggagagcttggaacatgccatgaagcgaggcgcacctattattgctgaatacttgggaggtgctgttaactgtgatgcttatcacatgactgatccaaggtctgatggacttggtgtgtctacatgcattcagagcagccttgaagatgcgggtgtgtcaccagaggaggtcaactacataaatgcacatgcaacttccactcttgctggagacttggcagagatcaatgctattaaaaaggttttcaaggacacttctggaatcaaaattaatgcaaccaagtctatgatagggcactgccttggtgcagctgggggtttggaagccattgccacagtgaaagccataacaacaggatggctgcatccaacaatcaatcaatttaacccagaacctgcagttgattttgatacagtggcaaatgtcaagcagcagcatgaaatcaacgttgccatttcaaattcatttggattcggtggacacaactctgtggtagcattttctgctttcaggccttga

SEQ ID NO: 114911 - protein, 469 aa, Glycine max
MQALHSPTLRTSPLDPLRGPNNAAAKRRASSAKRVFFVSATVAPKVSAPQRQKDSKKRVVITGMGLASVFGNDVEGYYEKLLAGESGITPIDRFDASKFPTRFGGQIRGFSAEGYIDGKNDRRLDDCLRYCIVAGKKALENADLAPDNHSKIDKERAGVLVGSGMGGLTVFSDGVQALIEKGHRKITPFFIPYAITNMGSALLGIDLGFMGPNYSISTACATSNYCFYAAANHIRRGEADLMIAGGTEAAIIPIGLGGFVACRALSQRNDDPKTASRPWDKDRDGFVMGEGAGVLVMESLEHAMKRGAPIIAEYLGGAVNCDAYHMTDPRSDGLGVSTCIQSSLEDAGVSPEEVNYINAHATSTLAGDLAEINAIKKVFKDTSGIKINATKSMIGHCLGAAGGLEAIATVKAITTGWLHPTINQFNPEPAVDFDTVANVKQQHEINVAISNSFGFGGHNSVVAFSAFRP

SEQ ID NO: 114912 - DNA, 1578 bp, Glycine max
  CDS (93)..(1502)
gaattccagaaaataaataagacccacttgttagattggttacactagcagcacgcagggttctgttctgctttgcattctccgccatcatcatgcaagcgcttcactctcccaccctccgcgcttctcccttggaccctcttcgtggccccaacaatgccgccgccaaccgccgctcctccagcgccaagcgcgtgttcttcgtctccgccacggtggcgccgaaggtgtccgccccgcagcgacagaaggaccccaagaagcgcgttgtgatcaccggaatgggcctcgcgtcggtgttcggtaacgacgtggagggttactacgagaagctcctcgccggcgagagcggcatcaccgccatcgaccgcttcgacgcctccaagttccccacgcgtttcggcggccagatccgcggcttctctgccgagggctacatcgacggcaagaacgaccgccgcctcgacgactgcctccgctactgcattgtcgccggcaaaaaggccctcgaaaacgccgaccttgcccccgacaaccactccaagattgataaggagcgtgctggtgttcttgtaggctctggaatgggaggcttaacggtgttttctgacggtgttcaggctctgattgagaaggggcacaggaagataacgccgtttttcattccttatgcaattactaacatgggttcggctttgcttgggatagaccttggattcatgggtcccaactactctatatccacggcttgtgctacttccaattattgcttttatgctgcggcgaaccatattcggagaggggaggctgatttgatgatagccggtgggactgaggctgccattattcctattgggttagggggttttgttgcttgcagagcgctttctcagaggaacgacgaccctaaaaccgcttccaggccatgggataaggaacgtgatggctttgttatgggtgaaggtgctggagttttggtaatggagagcttggagcatgctatgaagcgaggcgcacctattattgctgaatatttgggaggagctgttaactgtgatgcttatcacatgactgatccaaggtctgatggacttggtgtgtctacatgcattcagagcagccttgaagatgccggtgtgtcaccagaggaggtcaactacataaatgcacatgcaacttccactcttgctggagacttggcagaaattaatgctattaaaaaggttttcaaggacacttctggcatcaaaattaatgccaccaagtctatgatagggcactgccttggtgcagctgggggtttagaagccattgccacagtgaaagccataacaacaggatggctgcatccaacaatcaatcaatttaacccagaacctgcagttgattttgatacagtggcaaatgtcaagcagcagcatgaaatcaacgttgccatttcaaattcatttggattcggtggacacaactctgtggtggcattttctgctttcaagccttgattgcccagcttagcttgtctgcactttatgtagaacacgggtttaagttaattgaaattttgttccctctacatca

SEQ ID NO: 114913 - protein, 469 aa, Glycine max
MQALHSPTLRASPLDPLRGPNNAAANRRSSSAKRVFFVSATVAPKVSAPQRQKDPKKRVVITGMGLASVFGNDVEGYYEKLLAGESGITAIDRFDASKFPTRFGGQIRGFSAEGYIDGKNDRRLDDCLRYCIVAGKKALENADLAPDNHSKIDKERAGVLVGSGMGGLTVFSDGVQALIEKGHRKITPFFIPYAITNMGSALLGIDLGFMGPNYSISTACATSNYCFYAAANHIRRGEADLMIAGGTEAAIIPIGLGGFVACRALSQRNDDPKTASRPWDKERDGFVMGEGAGVLVMESLEHAMKRGAPIIAEYLGGAVNCDAYHMTDPRSDGLGVSTCIQSSLEDAGVSPEEVNYINAHATSTLAGDLAEINAIKKVFKDTSGIKINATKSMIGHCLGAAGGLEAIATVKAITTGWLHPTINQFNPEPAVDFDTVANVKQQHEINVAISNSFGFGGHNSVVAFSAFKP

SEQ ID NO: 114914 - DNA, 1605 bp, Cuphea hookeriana
  CDS (1)..(1605)
atggcgaccgcttcttgcatggttgcgtcccctttctgtacgtggctcgtagctgcatgcatgcccacttcatccgacaacgacccacgttccctttcccacaagcggctccgcctctcccgtcgccggaggactctctcctcccattgctccctccgcggatccaccttccaatgcctcgatccttgcaaccagcaacgcttcctcggggataacggattcgcttccctcttcggatccaagcctcttcgttcaaatcgcggccacctgaggctcggccgcacttcccattccggggaggtcatggctgtggctatgcaacctgcacaggaagtctccacaaataagaaacctgctaccaagcaaaggcgagtagttgtgacaggtatgggcgtggtgactcctctaggccatgaccccgatgtttactacaacaatctcctagacggaataagtggcataagtgagatagagaacttcgactgctctcagtttcccacgagaattgccggagagatcaagtctttttccacagatggctgggtggccccaaagttctccgagaggatggacaagttcatgctttacatgctgactgcaggcaagaaagcattagcagatggtggaatcactgaagatgcgatgaaagagctcaataaaagaaagtgtggagttctcattggctccggattgggcggtatgaaggtattcagcgattccattgaagctctgaggacttcatataagaagatcagtcccttttgtgtacctttttctaccacaaatatgggatccgctattcttgcaatggacttgggatggatgggccctaactattcgatatcaactgcctgtgcaacaagtaacttctgtatactgaatgctgcgaaccacataatcaaaggcgaagcagacatgatgctttgtggtggctcggatgcggccgttttacctgttggtttgggaggtttcgtagcatgccgagctttgtcacagaggaataatgaccctaccaaagcttcgagaccatgggacagtaatcgtgatggatttgtgatgggagaaggagctggagttttacttcttgaggagttagagcatgcaaagaaaagaggtgcaaccatttatgcggaatttctaggtgggagtttcacttgcgacgcctaccacatgaccgagcctcaccctgaaggagctggtgtgatcctctgcatagagaaggccttggctcagtccggagtctcgagggaagacgtaaattacataaatgcgcatgcaacttccactcctgctggagatatcaaggaataccaagctctcgcccactgtttcggccaaaacagtgagctgagagtgaattccaccaaatcgatgatcggtcaccttcttggaggagctggtggcgtagaagcagttgcagtagttcaggcaataaggacaggatggatccatccaaatattaatttggaagacccggacgaaggcgtggatgcaaaactgctcgtcggccctaagaaggagaaactgaaggtcaaggtcggtttgtccaattcatttgggttcggcggccataactcatccatactatttgccccctgcaactag

SEQ ID NO: 114915 - protein, 534 aa, Cuphea hookeriana
MATASCMVASPFCTWLVAACMPTSSDNDPRSLSHKRLRLSRRRRTLSSHCSLRGSTFQCLDPCNQQRFLGDNGFASLFGSKPLRSNRGHLRLGRTSHSGEVMAVAMQPAQEVSTNKKPATKQRRVVVTGMGVVTPLGHDPDVYYNNLLDGISGISEIENFDCSQFPTRIAGEIKSFSTDGWVAPKFSERMDKFMLYMLTAGKKALADGGITEDAMKELNKRKCGVLIGSGLGGMKVFSDSIEALRTSYKKISPFCVPFSTTNMGSAILAMDLGWMGPNYSISTACATSNFCILNAANHIIKGEADMMLCGGSDAAVLPVGLGGFVACRALSQRNNDPTKASRPWDSNRDGFVMGEGAGVLLLEELEHAKKRGATIYAEFLGGSFTCDAYHMTEPHPEGAGVILCIEKALAQSGVSREDVNYINAHATSTPAGDIKEYQALAHCFGQNSELRVNSTKSMIGHLLGGAGGVEAVAVVQAIRTGWIHPNINLEDPDEGVDAKLLVGPKKEKLKVKVGLSNSFGFGGHNSSILFAPCN

SEQ ID NO: 114916 - DNA, 1329 bp, Saccharomyces cerevisiae
  CDS (1)..(1329)
atgtcaagaagagtggttatcacaggattgggctgtgtaacgccgttgggaagatcattaagtgagtcatgggggaatctgctctcttccaaaaatggactcacaccaatcacatctttgcccaactataatgaggactacaaactcagagaaaaaagtatcccatcaacgataacagtggggaagattccagagaattttcaaaacgaaaattcagccatcaataaactgctgttcactagccaggatgagagaagaacctcaagctttatcaagctagcactacgtacaacttatgaagcgcttcacaatgctggtctcttgaacccaaatgatataaccatcaatacatctctgtgcaatctggatcactttggttgcctgataggttctggtataggatccattcaagacatataccaaacttctctacaattccataacgacaataaaagaataaatccatatttcgtccctaaaatccttacaaatatggcagctggtaatgtttccatcaagtttaaccttagaggattatcccatagtgtttccacagcatgcgcaacaggtaataactccattggcgatgcattcaattttattcggttaggcatgcaagacatctgtgtcgccggtgcaagtgaaacgagtttgcatccgttaagtttagcaggtttcatcagagcaaagtcgattactacaaacgggatctctagaccctttgatacacaacgttctggattcgtacttggtgaaggatgcggaatgattgtcatggaatcgctagaacatgctcaaaagagaaatgcaaacataatttctgagctcgtgggctatggtttaagcagtgatgcctgccatattacctcccctcctgctgatggaaatggtgccaaaagagcaatagagatggctctaaaaatggctagattagaaccaactgatgttgactacgtcaatgcacatgctacatcaactttactaggcgataaagcagagtgtctggcagtagcctcagcactcttaccaggaagatccaaaagcaagccactgtacatatccagtaacaaaggtgcaattggccatcttttaggtgcagctggcgccgtagaaagtatatttacaatttgttccttgaaggatgataagatgccgcataccttaaacctggacaatgttctgactctagaaaataacgaggccgataagctacatttcataagagacaaacctattgtgggagctaatccgaagtacgcattatgcaacagcttcggatttggaggagttaacacatctcttctcttcaagaaatgggaagggagttaa

SEQ ID NO: 114917 - protein, 442 aa, Saccharomyces cerevisiae
MSRRVVITGLGCVTPLGRSLSESWGNLLSSKNGLTPITSLPNYNEDYKLREKSIPSTITVGKIPENFQNENSAINKLLFTSQDERRTSSFIKLALRTTYEALHNAGLLNPNDITINTSLCNLDHFGCLIGSGIGSIQDIYQTSLQFHNDNKRINPYFVPKILTNMAAGNVSIKFNLRGLSHSVSTACATGNNSIGDAFNFIRLGMQDICVAGASETSLHPLSLAGFIRAKSITTNGISRPFDTQRSGFVLGEGCGMIVMESLEHAQKRNANIISELVGYGLSSDACHITSPPADGNGAKRAIEMALKMARLEPTDVDYVNAHATSTLLGDKAECLAVASALLPGRSKSKPLYISSNKGAIGHLLGAAGAVESIFTICSLKDDKMPHTLNLDNVLTLENNEADKLHFIRDKPIVGANPKYALCNSFGFGGVNTSLLFKKWEGS

SEQ ID NO: 114918 - DNA, 1266 bp, Rhizobium meliloti
  CDS (1)..(1266): transl_table=11
atgagacgtgtcgttatcaccggtaccggcatggtatctcctctgggttgcggaaccgaagtcagctgggcgcgtcttctgaccggcgacaacgcggcccgcaaggtcaccgagttcgaggtcgaggaccttcccgccaagattgcctgccgcattcccttcggcgatggcagcgacggcacgttcaatgccgacgactggatggagcccaaggaacagcgcaaggtcgatcctttcatcgtctatgcgatggccgctgccgacatggcgctggcggatgccggctggaaacccgaaagcgacgaagaccagatttcgaccggcgtcctgatcggctccggcatcggcgggctggaaggtatcgtcgatgcgggttacaccctgcgcgacaagggcccgcggcgtatttccccgttcttcattcccggccggctgatcaatctcgcagccggtcaggtttccatccgccacaagctgcggggtcccaaccattccgtcgtgacggcctgctcgaccggcgcgcatgcgatcggcgacgccagccggctgatcgcgctcggggatgcggacgtgatggtggccggtggtacggaatctccgatctgccggatatcgctcgcaggattcgccgcctgcaaggcgctctcgacacagcacaacgacaatcccgagaaggcctcgcggccctatgacgccgatcgtgacggcttcgtcatgggcgagggtgcgggcatcgtcgttctggaagaactggagcacgcaagggcgcgcggtgccaagatctacgcagaagtgatcggttacggcctgtccggcgacgccttccacatcactgctccgtccgaagacggcgaaggcgcttaccgctgcatgcagatggcgctgaagcgcgcgggcgtcacggctgcggacatcgactatatcaacgctcacggaacatcgacgatggccgacacgatcgagctcggcgcggtcgaacggctggtcggcgacagcgcgtcgaggatctccatgtcctcgacgaagtcggccatcggacatttgctcggcgcagccggcgcggtcgaagccatcttctcggcgctcgcaattcgcgacaatatagccccgccgacgctcaacctggacaacccttccgtcgagacgaagatcgatctcgtgccgcatgtcgcgcgcaagcgcgagatcaatgtggccctgtcgaactcgttcggtttcggcggcaccaacgcgtcgttgattctgcgccgttacaccggccattga

SEQ ID NO: 114919 - protein, 421 aa, Rhizobium meliloti
MRRVVITGTGMVSPLGCGTEVSWARLLTGDNAARKVTEFEVEDLPAKIACRIPFGDGSDGTFNADDWMEPKEQRKVDPFIVYAMAAADMALADAGWKPESDEDQISTGVLIGSGIGGLEGIVDAGYTLRDKGPRRISPFFIPGRLINLAAGQVSIRHKLRGPNHSVVTACSTGAHAIGDASRLIALGDADVMVAGGTESPICRISLAGFAACKALSTQHNDNPEKASRPYDADRDGFVMGEGAGIVVLEELEHARARGAKIYAEVIGYGLSGDAFHITAPSEDGEGAYRCMQMALKRAGVTAADIDYINAHGTSTMADTIELGAVERLVGDSASRISMSSTKSAIGHLLGAAGAVEAIFSALAIRDNIAPPTLNLDNPSVETKIDLVPHVARKREINVALSNSFGFGGTNASLILRRYTGH

SEQ ID NO: 114920 - DNA, 1245 bp, Streptomyces halstedii
  CDS (1)..(1245): transl_table=11
atgagcgcaccccggcgagccgtcgtcaccggactcggagtggtggcaccccacggcatcggtgccgagacgttctggaagacggccgtggacggcaccagcagcctggcccggatcgaccgggagggctgcggccacctgcccctgaagatcgccggccaggtccccgacttcgacccggccgccctgatcgaggacacctacctcgtccagaccgaccgcttcacccacttcgcgatggcggccacccagctcgccctcgacgacgcccggctctcccgcgccgacatcgactcgccgtactcggtgggcgtggtgacggccgcgggctccggcggcggcgagttcggccagcgcgagctgcagaaactgtggggccagggctcgaagtacgtcggcccctaccagtcgatcgcctggttctacgcggcgagcaccggccagatctccatccgcggcggcttcaagggcccctgcggcgtggtggccgccgacgaggccggcggcctggacgccctcgcgcacgccgcgctggcggtacggcgcggcaccgccaccgtcgtcgccggcgcgaccgaggccccgctggccccgtactcgatggtctgccagctgggttacccggagctcagccgcagcgccgacccgggccgggcctaccgtcccttcacctccgccgcctgcgggttcgtgcccgccgagggcggggcgatgttcgtcctggaggaggagggcgcggcacgcgagcgcggcgccgacgcgcgggcgacggtggccggccacgcggccacgttcaccggcgcctcccgctgggaggagtccagggccggcctggcgcacgcgatcggcacggcgctggcgcgggccggctgccgtccgcaggacgtggacgtcgtgttcgccgacgccctcggcgtgccggaggccgaccgggccgaggccctggccctggccgacgcgctcggcccgcacgcgcggcgggtccccgtcaccgccccgaaggcgggcatcggccgggcgttctgcgcggccgcggtgctcgacgtggcgaccgcgctgctcgccatggagcacgagctgatcccgcccaccccccatgtgctcgacgtctgccacgacctggacctggtggtcggccgggcgcgtcccgcccggccgcgcaccgcgctggtgctcagccgcggactcatgggcaacaactcggcgctcgtcctgcgcaggggcgccgcgccgttccccgagtaa

SEQ ID NO: 114921 - protein, 414 aa, Streptomyces halstedii
MSAPRRAVVTGLGVVAPHGIGAETFWKTAVDGTSSLARIDREGCGHLPLKIAGQVPDFDPAALIEDTYLVQTDRFTHFAMAATQLALDDARLSRADIDSPYSVGVVTAAGSGGGEFGQRELQKLWGQGSKYVGPYQSIAWFYAASTGQISIRGGFKGPCGVVAADEAGGLDALAHAALAVRRGTATVVAGATEAPLAPYSMVCQLGYPELSRSADPGRAYRPFTSAACGFVPAEGGAMFVLEEEGAARERGADARATVAGHAATFTGASRWEESRAGLAHAIGTALARAGCRPQDVDVVFADALGVPEADRAEALALADALGPHARRVPVTAPKAGIGRAFCAAAVLDVATALLAMEHELIPPTPHVLDVCHDLDLVVGRARPARPRTALVLSRGLMGNNSALVLRRGAAPFPE

SEQ ID NO: 114922 - DNA, 1422 bp, Arabidopsis thaliana
  CDS (1)..(1422)
atgcaagctcttcaatcttcatctctccgtgcttctcctccaaacccacttcgcttaccatcaaatcgtcaatcacatcagctaattaccaatgcgagacctttgcgaagacaacaacgttccttcatctccgcatcagcatccactgtctccgctcctaaacgcgaaacagatccgaagaaacgagttgtcattactggtatgggtctcgtctctgtgtttggtaacgatgttgatgcttactacgagaaattgttgtctggtgagagtggaatcagtttgattgatcgtttcgatgcttccaagttccctactcgattcggtggtcagatccgtgggtttagctctgaaggttatattgatggcaagaatgagcgtaggcttgatgattgtttgaaatattgcattgttgctggtaaaaaagctcttgaaagtgccaatcttggtggtgataagcttaacacgattgataagaggaaagctggagtactagttgggactggaatgggaggtttaactgtgttttcagaaggtgttcagaatttgattgagaagggtcataggaggattagtccattttttataccttatgctataacaaatatgggttctgctttgttggcgattgatcttggtcttatgggtcctaactattcgatttcaactgcttgtgctacttcgaattactgcttttacgctgctgcgaatcacattcgtcgtggtgaagctgatatgatgattgctggtgggactgaggctgctattattcctattgggttgggaggttttgttgcttgtagggcattgtcccagagaaatgatgaccctcaaactgcttccaggccgtgggataaagcaagagatgggtttgttatgggtgaaggagctggtgttctggtgatggaaagcttggaacatgcaatgaaacgtggtgctccaattgtagcagaatatcttggaggtgctgttaattgtgatgctcaccatatgactgatccaagagctgatggtcttggggtttcttcatgcattgaaagatgcctggaagatgctggtgtatcacctgaggaggtaaattacatcaatgcacatgcaacttccactcttgctggtgatcttgctgagattaatgccattaaaaaggtattcaagagcacttcagggatcaaaatcaacgccaccaagtctatgataggtcactgcctcggtgcagctggaggtctagaagccatcgccaccgtgaaggctatcaacactggatggctgcatccttccatcaaccaatttaacccagaacaagctgtggactttgacacggtcccaaacgagaagaagcaacacgaggttgatgttgccatatcaaactcgttcgggttcggtggacacaactcggtagtcgccttctctgccttcaaaccctga

SEQ ID NO: 114923 - protein, 473 aa, Arabidopsis thaliana
MQALQSSSLRASPPNPLRLPSNRQSHQLITNARPLRRQQRSFISASASTVSAPKRETDPKKRVVITGMGLVSVFGNDVDAYYEKLLSGESGISLIDRFDASKFPTRFGGQIRGFSSEGYIDGKNERRLDDCLKYCIVAGKKALESANLGGDKLNTIDKRKAGVLVGTGMGGLTVFSEGVQNLIEKGHRRISPFFIPYAITNMGSALLAIDLGLMGPNYSISTACATSNYCFYAAANHIRRGEADMMIAGGTEAAIIPIGLGGFVACRALSQRNDDPQTASRPWDKARDGFVMGEGAGVLVMESLEHAMKRGAPIVAEYLGGAVNCDAHHMTDPRADGLGVSSCIERCLEDAGVSPEEVNYINAHATSTLAGDLAEINAIKKVFKSTSGIKINATKSMIGHCLGAAGGLEAIATVKAINTGWLHPSINQFNPEQAVDFDTVPNEKKQHEVDVAISNSFGFGGHNSVVAFSAFKP

SEQ ID NO: 114924 - DNA, 1432 bp, Arabidopsis thaliana
  CDS (1)..(1386)
atggcgacatctaatctccgtagacacttgagcgcaagtcgcctccgcttaaaccgcttcatctctacttcttcttcttatcattcacatcgccgtgttgttgtcactggtctaggcatggtgactccacttggtagaggcgttgaaacaacgtggaggcgtttaattgatggagaatgtgggattagaggattgactcttgatgatctcaagatgaagtcttttgatgaagagacaaagttatatacttttgatcagctttcttctaaagttgctgcttttgtgccttatggatcaaaccctggtgaatttgatgaagccctttggctaaactctaaggcagttgcgaattttatcggatatgctgtatgtgctgccgatgaagctttgagagatgcagagtggttaccaactgaagaagaagaaaaagagagaacaggagtctctattggtggtggaattggaagtatatgtgatattgtggaggcagcgcagctgatttgtgaaaagaggctgcggcggcttagtccgtttttcattccaaaaatattggtaaacatggcatctggtcatgtgagcatgaagtatggatttcaggggccaaatcatgctgctgtgacagcttgcgcaactggtgcacattctataggcgatgccactaggatgattcaatttggagatgcagatgttatggtggctggtggaactgagtctagcattgatgctctgtccgtagctggattctctagatcaagggctttgtcaactaaattcaattcttctccacaagaagcttcacggccttttgattgtgaccgggatggttttgtgataggggaaggttcaggggttatagtattagaggaatatgagcatgcaaaaagacgaggagcaaaaatttatgctgagctttgtggatatgggatgtcaggcgatgcacaccatattactcaacctcctgaagatggaaaaggagctgttttggccatgacgcgtgccttaagacagtctggtctgtgtccaaaccaaattgattatgtaaacgcacatgcaacatcaaccccaataggcgatgccgtggaagcgagagctatcaagacggtattctctgaacatgctacttcaggcaccttggcattctcctccaccaagggggctactggtcatcttcttggagcagctggagcagtggaagctattttcagtatccttgctatacatcacggggttgctcctatgacgctgaatgtcaagaatccagatcccatcttcgacaagaggttcatgcctttaaccacttcgaaaaagatgttagttaggacagcaatgtcgaattcgtttggctttggaggaacaaatgcatctttgctctttgcctctatctaaacttgtgtaaacagcatagcaaaagttttgaactgatcttgctttg

SEQ ID NO: 114925 - protein, 461 aa, Arabidopsis thaliana
MATSNLRRHLSASRLRLNRFISTSSSYHSHRRVVVTGLGMVTPLGRGVETTWRRLIDGECGIRGLTLDDLKMKSFDEETKLYTFDQLSSKVAAFVPYGSNPGEFDEALWLNSKAVANFIGYAVCAADEALRDAEWLPTEEEEKERTGVSIGGGIGSICDIVEAAQLICEKRLRRLSPFFIPKILVNMASGHVSMKYGFQGPNHAAVTACATGAHSIGDATRMIQFGDADVMVAGGTESSIDALSVAGFSRSRALSTKFNSSPQEASRPFDCDRDGFVIGEGSGVIVLEEYEHAKRRGAKIYAELCGYGMSGDAHHITQPPEDGKGAVLAMTRALRQSGLCPNQIDYVNAHATSTPIGDAVEARAIKTVFSEHATSGTLAFSSTKGATGHLLGAAGAVEAIFSILAIHHGVAPMTLNVKNPDPIFDKRFMPLTTSKKMLVRTAMSNSFGFGGTNASLLFASI

SEQ ID NO: 114926 - DNA, 1206 bp, Rhizobium leguminosarum bv
  CDS (1)..(1206): transl_table=11
atggacaggcgcgtcgtaatcacggggattggcggactatgcggattaggaacgaatgccgcatctatttggaaagaaatgcgcgaaggcccgtccgcaatcagcccgatcatcacgacagatctttatgatctggagggcaccgttggcctggagatcaaggcgataccggaacacgacatcccgcgcaaacagcttgtctctatggaccgcttcagccttctcgcggtgattgctgcaaccgaagccatgaagcaggccggactttcctgcgatgagcaaaatgcccaccgcttcggcgccgcgatggggctcggcggacccggctgggatacgatcgaagaaacctaccgtagtatccttttagatggagtgacccgggcgcgcatcttcactgcaccgaagggaatgccaagtgcggctgccggccacgtcagcatttttttggggctacgcggccccgtcttcggcgtcacctctgcctgcgctgccggaaatcatgccatcgcttccgcggtagatcagatcaggctgggccgtgcagacgtcatgcttgccgggggaagcgatgcgccgctcacatggggagtcctgaaatcatgggaagcactgcgcgtgcttgcccctgatacctgtcgcccgttctccgccgacagaaaaggtgttgtccttggcgagggtgccggaatggctgtcctggaaagctacgagcacgccgctgcccgcggtgcgactatgcttgccgaggttgccggaatcggactctccggcgatgcctacgacatcgtcatgccgtccatcgagggaccggaggccgcaatgcgcagctgcctcgccgatgccgagctaaacccggacgatgtagattacctgaacgcgcacggcaccggcaccgttgcgaatgacgagatggagacggcggcgatcaagcgcgttttcggagaccacgcttttcagatgtccgtctcctccaccaagtccatgcacgcccattgcctgggtgccgccagcgcacttgaaatgattgcctgcgtcatggcgatccaagaaggtgtcataccgcccaccgccaactatcgtgagcctgacccccagtgcgatctcgacgtcacgcccaatgtcccgcgtgagcaacggtgcggtagcatgagcaatgcgttcgccatgggaggcactaacgccgtcctggcattcagacaagtgtga

SEQ ID NO: 114927 - protein, 401 aa, Rhizobium leguminosarum bv
MDRRVVITGIGGLCGLGTNAASIWKEMREGPSAISPIITTDLYDLEGTVGLEIKAIPEHDIPRKQLVSMDRFSLLAVIAATEAMKQAGLSCDEQNAHRFGAAMGLGGPGWDTIEETYRSILLDGVTRARIFTAPKGMPSAAAGHVSIFLGLRGPVFGVTSACAAGNHAIASAVDQIRLGRADVMLAGGSDAPLTWGVLKSWEALRVLAPDTCRPFSADRKGVVLGEGAGMAVLESYEHAAARGATMLAEVAGIGLSGDAYDIVMPSIEGPEAAMRSCLADAELNPDDVDYLNAHGTGTVANDEMETAAIKRVFGDHAFQMSVSSTKSMHAHCLGAASALEMIACVMAIQEGVIPPTANYREPDPQCDLDVTPNVPREQRCGSMSNAFAMGGTNAVLAFRQV

SEQ ID NO: 114928 - DNA, 1209 bp, Rhizobium meliloti
  CDS (1)..(1209): transl_table=11
atggacaggcgcgttgtcatcaccggaatgggcggcctatgcggactgggcaccgacaccacctccatctggaaatggatgcgcgaaggccgctccgccatcgggccgcttctcaatacagagcttcacggcctgaagggcatagtgggcgctgaggtcaaggcgctgcctgaccacaacatcgaccgcaagcagctcgtatcgatggatcgcattagcgtgcttgccgtgattgcagcgcacgaagccatgcgccaggccgggctttcctgcaatgaaggaaatgcccttcggttcggcgcgaccgtgggcgtcggcttgggaggatgggacgctaccgaaaaagcataccgtaccctccttgtcgacggggggacccgtactgaaatcttcactggtgtaaaggctatgccgagtgccgccgcctgccaggtcagcatgagcctcggcctgcggggcccggtcttcggcgtcacctccgcctgttcctcggccaaccatgcgatcgcttcggcggtagaccagatcaagtgcggccgggccgacgtcatgctcgcggggggcagcgacgcgccactagtctggattgtgctgaaggcatgggaagctatgcgcgcactcgctccggatacttgccgacccttctccgccggcaggaaaggcgtggtactgggcgagggtgcaggcatggccgtgctggaaagctatgaacatgccaccgctcgcggtgcaacaatactcgcggaggtcgccggcgtcggcctttccgccgatgcgttccatatcacagcgccggctgtccatgggccggagtcggcgatgcgcgcttgccttgccgatgcaggactgaatgccgaggacgtcgactacctcaacgcgcacggcaccggcaccaaggccaacgatcaaaacgaaactacggctatcaagcgcgtcttcggagaccatgcttattcgatgtccatatcttccaccaagtccacccacgcgcactgtatcggcgcagcgagtgcgcttgaaatgatcgcctgtgtgatggcgatccaagaaggagtcgtgccgccgaccgccaactatcgtgagccagatcccgattgcgatctagacgtgacgccaaacgtgccgcgtgagcgtaaggtgcgcgttgccatgagcaacgccttcgccatgggtggcacgaacgcagttctggcattcaagcaggtatga

SEQ ID NO: 114929 - protein, 402 aa, Rhizobium meliloti
MDRRVVITGMGGLCGLGTDTTSIWKWMREGRSAIGPLLNTELHGLKGIVGAEVKALPDHNIDRKQLVSMDRISVLAVIAAHEAMRQAGLSCNEGNALRFGATVGVGLGGWDATEKAYRTLLVDGGTRTEIFTGVKAMPSAAACQVSMSLGLRGPVFGVTSACSSANHAIASAVDQIKCGRADVMLAGGSDAPLVWIVLKAWEAMRALAPDTCRPFSAGRKGVVLGEGAGMAVLESYEHATARGATILAEVAGVGLSADAFHITAPAVHGPESAMRACLADAGLNAEDVDYLNAHGTGTKANDQNETTAIKRVFGDHAYSMSISSTKSTHAHCIGAASALEMIACVMAIQEGVVPPTANYREPDPDCDLDVTPNVPRERKVRVAMSNAFAMGGTNAVLAFKQV

SEQ ID NO: 114930 - DNA, 1206 bp, Rhizobium meliloti
  CDS (1)..(1206): transl_table=11
atggacaggcgcgttgtcatcaccggaatgggcggcctatgcggactgggcaccgacaccacctccatctggaaatggtctgcgcgaaggcgctccgccatcgggccggttctcaatacagagcttcacggcctgaagggcatagtgggcgctgagatcaaggcgctgcctgaccacaacatcgaccgcaagcagctcgtatcgatggatcgcattagcgtgcttgccgtgattgcagcgcacgaagccatgcgccaggccgggctttcctgcaatgaaggaaatgcccttcggttcggcgcgaccgtgggcgtcggcttgggaggatgggacgctaccgaaaaagcataccgaccctccttgtcgacggggggacgtactgaaatcttcactggtgtaaaggctatgccgagtgccgccgcctgccaggtcagcatgagcctcggcctgcggggcccggtcttcggcgtcacctccgcctgttcctcggccaaccatgcgatcgcttcggcggtagaccagatcaagtgcggccgggccgacgtcatgctcgcggggggcagcgacgcgccactagtctggattgtgctgaaggcatgggaagctatgcgcgcactcgctccggatacttgccgacccttctccgccggcaggaaaggcgtggtactgggcgagggtgcaggcatggccgtgctggaaagctatgaacatgccaccgctcgcggtgcaacaatactcgcggaggtcgccggcgtcggcctttccgccgatgcgttccatatcacagcgccggctgtccatgggccggagtcggcgatgcgcgcttgccttgccgatgcaggactgaatgccgaggacgtcgactacctcaacgcgcacggcaccggcaccaaggccaacgatcaaaacgaaactacggctatcaagcgcgtcttcggagaccatgcttattcgatgtccatatcttccaccaagtccacccacgcgcactgtatcggcgcagcgagtgcgcttgaaatgatcgcctgtgtgatggcgatccaagaaggagtcgtgccgccgaccgccaactatcgtgagccagatcccgattgcgatctagacgtgacgccaaacgtgccgcgtgagcgtaaggtgcgcgttgccatgagcaacgccttcgccatgggtggcacgaacgcagttctggcattcaagcaggtatga

SEQ ID NO: 114931 - protein, 401 aa, Rhizobium meliloti
MDRRVVITGMGGLCGLGTDTTSIWKWSARRRSAIGPVLNTELHGLKGIVGAEIKALPDHNIDRKQLVSMDRISVLAVIAAHEAMRQAGLSCNEGNALRFGATVGVGLGGWDATEKAYRPSLSTGGRTEIFTGVKAMPSAAACQVSMSLGLRGPVFGVTSACSSANHAIASAVDQIKCGRADVMLAGGSDAPLVWIVLKAWEAMRALAPDTCRPFSAGRKGVVLGEGAGMAVLESYEHATARGATILAEVAGVGLSADAFHITAPAVHGPESAMRACLADAGLNAEDVDYLNAHGTGTKANDQNETTAIKRVFGDHAYSMSISSTKSTHAHCIGAASALEMIACVMAIQEGVVPPTANYREPDPDCDLDVTPNVPRERKVRVAMSNAFAMGGTNAVLAFKQV

SEQ ID NO: 114932 - DNA, 1251 bp, Bacillus subtilis
  CDS (1)..(1251): transl_table=11
atgacaaagtgcaatctgcctgaggtggtggtgaccggtgtaggcgttacggcctctatcggtcaagggaaagaggactttgcttcctcgctgctgtccggcagacatgcctttgatgtcatgaagcgttcaggcagacaaaaagacagccggtttatcggagccgaaattgcgtcattgtcttatcctgaccgactctctaaaaaaatgttgcgaaaagcatcattctccagccgcgctgcattggtaactctcacagaggcttgggaggaggctgaattggacgatgcagattcctcacgtatcggactggttgttggcggatcaaattttcaacagagagaaaactttgaagtttatgaaaggtatcaagaccgctccggttttatttctccggcgtatggtctgtctttcatggacagcgatctttgcgggatatgtacagatcagtttggcatcacgggattagcatatacggtgggaggagcttcggccagcggccagcagttagcagtcattcatgcgattcagcaagtcctgtcaggcgaagttgatacttgcatagcacttggtgctttaatggatctttcttatatggaatgcgaggcgctaagggctttaggcgctatggggacggacaaatatgctgatgaacctgaaaatgcgtgccgtcccttcgatcaaaacagagacgggtttatctatggagaatcgtgcggtgcattggtaatagaacgaaaggagacggctttacgaagaggtctaaaaccttatgcagcattgtctggctggtcaatcaaactggacggaaaccggaatcctgatccttcattagaaggagagattcatgtcatccagaaggcactggagcgtgccaggcttttaccagaagatattgattatattaatcctcatggaacaggctcttttattggagatgaaatagaattaaaggcgctccgtgcatgccggctttcccatgcttatatcaatgcaacaaaatcgataaccggacacgggcttagtgcggcgggcatcgtagagattatttctgttttgctgcaaatgaaaaaatctgccctgcatccgagcaggaatttggatcatccaatcgatgattcctttcattgggtaaatgagaaatcgatttcataccgcatcaaaaatgcgctgagcttaagcatggggtttggcggaatgaacaccgcggtttgtatacaaaacattgagaaatgtggaggcgaatcataa

SEQ ID NO: 114933 - protein, 416 aa, Bacillus subtilis
MTKCNLPEVVVTGVGVTASIGQGKEDFASSLLSGRHAFDVMKRSGRQKDSRFIGAEIASLSYPDRLSKKMLRKASFSSRAALVTLTEAWEEAELDDADSSRIGLVVGGSNFQQRENFEVYERYQDRSGFISPAYGLSFMDSDLCGICTDQFGITGLAYTVGGASASGQQLAVIHAIQQVLSGEVDTCIALGALMDLSYMECEALRALGAMGTDKYADEPENACRPFDQNRDGFIYGESCGALVIERKETALRRGLKPYAALSGWSIKLDGNRNPDPSLEGEIHVIQKALERARLLPEDIDYINPHGTGSFIGDEIELKALRACRLSHAYINATKSITGHGLSAAGIVEIISVLLQMKKSALHPSRNLDHPIDDSFHWVNEKSISYRIKNALSLSMGFGGMNTAVCIQNIEKCGGES

SEQ ID NO: 114934 - DNA, 1389 bp, Oryza sativa
  CDS (1)..(1389)
atgcaggcgcacgcccacacgctcgggctccgcatctccccgccgccgcctgcgccgccgcggcgccgcgctcgcccgcgccggcgcgcagtccgtgtcgccgcggcggcgtcggcgccgcggcgggagacggacccgaggaagcgggtggtgatcacggggatggggctggtgtccgtgttcgggaacgaggtggacgccttctacgagcggctgctcgccggggagagcggggtcggcgccatcgaccgcttcgacgccggcggcttccccacgaggttcgccggccagatacgcgggttctcctcggaggggtacatcgacggcaagaacgaccggaggctcgacgactgcctccgctactgcatcgtcagcggcaagaaggcgctcgagaacgccggcctcggcaagggctccgatggccacaccaagcttgacaaagtccgggctggtgttcttgtgggaactggcatgggtggcctcactgtgttttccgatggtgttcaaaaccttattgagaagggatacaagaaaatttcgcctttctttatcccatacgctataactaacatgggctcggcattgctagcaatggatgctggttttatgggtccaaactactcaatttcaacagcttgtgcgacctccaactactgcttctatgctgctgccaaccatatacgtcggggtgaggctgatgttatcgttgctggtggtactgaagctgcaattattccaattggccttggaggttttgtggcctgtagagcactatcgcagaggaacgatgacccagaaactgcatctaggccatgggacaaagagcgagatggttttgttatgggcgaaggtgctggtgtactggtcatggagagcctggagcatgcgatgaagcgggatgcaccaataattgctgaatatttgggaggtgcagtaaactgtgatgcttaccatatgactgatcctaggtcagatggactgggtgtatcgtcctgtattactcagagccttgaagatgcaggtgttgcgccagaggaggtaaattacatcaatgcacatgcaacttcaactcttgctggtgacttggctgaagtaagagccattaagcaagtcttcaagaatccatctgatattaaaatcaattcaacgaagtctatgataggccattgcctaggtgccgctggtgggttagaagctattgccgttgtcaaagccataactactggatgggtgcatcctactattaaccaatttaaccccgagcctgaagttgattttgatacagtagccaacgagaagcagcagcacgaagtgaatgttgctatctctaattcatttggatttggaggtcacaattcagtggtagtatttgcgccattcaagccatga

SEQ ID NO: 114935 - protein, 462 aa, Oryza sativa
MQAHAHTLGLRISPPPPAPPRRRARPRRRAVRVAAAASAPRRETDPRKRVVITGMGLVSVFGNEVDAFYERLLAGESGVGAIDRFDAGGFPTRFAGQIRGFSSEGYIDGKNDRRLDDCLRYCIVSGKKALENAGLGKGSDGHTKLDKVRAGVLVGTGMGGLTVFSDGVQNLIEKGYKKISPFFIPYAITNMGSALLAMDAGFMGPNYSISTACATSNYCFYAAANHIRRGEADVIVAGGTEAAIIPIGLGGFVACRALSQRNDDPETASRPWDKERDGFVMGEGAGVLVMESLEHAMKRDAPIIAEYLGGAVNCDAYHMTDPRSDGLGVSSCITQSLEDAGVAPEEVNYINAHATSTLAGDLAEVRAIKQVFKNPSDIKINSTKSMIGHCLGAAGGLEAIAVVKAITTGWVHPTINQFNPEPEVDFDTVANEKQQHEVNVAISNSFGFGGHNSVVVFAPFKP

SEQ ID NO: 114936 - DNA, 1410 bp, Brassica napus
  CDS (1)..(1410)
atgcaatctcttcaatcctcctccctccgcgcttctccgccgaacccacttcgaacaccttcgaaccgccaatcccatcagatcaccaatgcgagacccaccatgagacgctccttcatctccgcatcagcctccgtctccgctcccaaacgcgagacggatccgaagaaacgcgtcgtgattaccggaatgggcctcgtctccgtcttcggcaacgacgtcgatgcttactacgagaagctcctctccggcgagagtggaatcagcttgatcgatcgattcgacgcctccaagttcccgactcgattcggtggccagatccgtgggttcagctccgaagggtacatcgatgggaagaacgagcggaggcttgacgattgcttgaagtactgcattgtcgctgggaagaaggctcttgaaagtgccaatcttggtggtgataagctcaacacgattgataagcagagagctggagtactagttgggactggtatgggtggtttgactgtgttttcagacggtgttcaagctctagttgagaaaggtcacaggaggatctctcccttctttattccttatgctatcacgaacatgggttctgctttgttggcgattgatcttggtcttatgggaccgaactactctatttcaaccgcttgtgctacttctaactactgcttttacgcggctgcgaaccacattcgccgtggtgaagctgatatgatggttgctggtgggactgaggctgctattatacctattgggttgggaggttttgttgcttgcagggcactgtcgcagagaaatgatgaccctcaaactgcgtcaaggccgtgggataaacagagagatggttttgtcatgggtgaaggtgctggtgtgctggtgatggaaagcttggaacatgcaatgaaacgtggtgctccaattgtagcagagtatcttggaggtgctgttaactgtgatgcacatcatatgactgatccaagagctgatgggcttggtgtctcttcatgcattgagagctgccttgaagatgctggtgtatcccccgaggaggtaaactacatcaatgcccatgcaacttcaactcttgctggtgatcttgctgagatcaatgccgttaaaaaggtgttcaaaagcacttcagggatcaaaatcaatgccactaagtctatgataggtcactgcctcggtgcagctggaggtcttgaagccattgccactgtgaaggctatcaacactggatggcttcatccctctatcaaccaatttaacccagaaccagcagtggactttgacacggtcgcaaacgagaagaagcagcacgaggtgaatgttgccatatcaaactcgtttgggttcggtggacataactcagtcgtggcattctctgcattcaaaccctga

SEQ ID NO: 114937 - protein, 469 aa, Brassica napus
MQSLQSSSLRASPPNPLRTPSNRQSHQITNARPTMRRSFISASASVSAPKRETDPKKRVVITGMGLVSVFGNDVDAYYEKLLSGESGISLIDRFDASKFPTRFGGQIRGFSSEGYIDGKNERRLDDCLKYCIVAGKKALESANLGGDKLNTIDKQRAGVLVGTGMGGLTVFSDGVQALVEKGHRRISPFFIPYAITNMGSALLAIDLGLMGPNYSISTACATSNYCFYAAANHIRRGEADMMVAGGTEAAIIPIGLGGFVACRALSQRNDDPQTASRPWDKQRDGFVMGEGAGVLVMESLEHAMKRGAPIVAEYLGGAVNCDAHHMTDPRADGLGVSSCIESCLEDAGVSPEEVNYINAHATSTLAGDLAEINAVKKVFKSTSGIKINATKSMIGHCLGAAGGLEAIATVKAINTGWLHPSINQFNPEPAVDFDTVANEKKQHEVNVAISNSFGFGGHNSVVAFSAFKP

SEQ ID NO: 114938 - DNA, 1404 bp, Helianthus annuus
  CDS (1)..(1404)
atgcaagctcaagctcttcttcaatcaaccccacttcgggtctccccaatcgacccgattcacaaacccatcaatctcaaaccaccctcactctcttccacgcgccgccgcgccgttatctccgccgtctccgccgcccccaagcgggaaaaggatccgaagaaacgggtcgtcattacgggtatggggttggtgtctgttttcgggaatgatgtggatacgtactatgagaagctgttggctggtgagagtggaatcgggttgattgaccggttcgatgcgtccaagtttccgacccggtttggtgggcagattcgtgggtttaaagctgatgggtatattgatgggaagaatgaccggagacttgatgattgtttgagatattgcattgttgctggtaaaaaggcccttgaacatgctgatcttgctgctgataatcgctccaagattgataaagagcgtgccggtgtgcttgttggaacaggaatgggaggtctaacggtattttccgacggagttcagtctctaatagaaaaaggttacagaaaaatcacacctttctttatcccgtacgcaataacaaacatggcgtctgcattattagctattgatttgggctttatgggccctaactactcaatttcaaccgcttgtgctacctcaaactactgctttcatgctgctgcaaatcacatccgtagaggcgaagctgatatgatgattgctggcggtacggaagctgccattattccaatcggattgggtggttttgttgcgtgtagagcgttgtctcagagaaacgatgatccgcaaactgcttcaaggccttgggaccaagatagagacgggttcgtcatgggtgaaggtgccggtgttttggtgatggagagcttggaacatgcaatgaaaagagatgcacccatacttgctgaatacttaggtggtgctattaattgtgatgcgtatcacatgacggacccgcgttcagatggactcggtgtttcttcttgtattcaaagctgtctagatgatgctggcgtgtcagcagaggaggttaactacatcaacgcacacgccacttcaacattggttggtgatctagctgaagtaaatgcggtgaagaaggtattcaagaacaccgcaggaatcaaaatgaatgcaaccaagtcgatgatagggcactgtttaggtgcagctggaggtctggaagccattgctacagttaaagccatccaaacagggtggctacatccctccataaatcaatttaacccggagcctgcagttgaattcgacactgttgctaatgtaaagcagcagcatgaaattaacgtcgggatttcaaattcatttggttttggtggacacaactctgttgtagcattctctgctttcaagccttga

SEQ ID NO: 114939 - protein, 467 aa, Helianthus annuus
MQAQALLQSTPLRVSPIDPIHKPINLKPPSLSSTRRRAVISAVSAAPKREKDPKKRVVITGMGLVSVFGNDVDTYYEKLLAGESGIGLIDRFDASKFPTRFGGQIRGFKADGYIDGKNDRRLDDCLRYCIVAGKKALEHADLAADNRSKIDKERAGVLVGTGMGGLTVFSDGVQSLIEKGYRKITPFFIPYAITNMASALLAIDLGFMGPNYSISTACATSNYCFHAAANHIRRGEADMMIAGGTEAAIIPIGLGGFVACRALSQRNDDPQTASRPWDQDRDGFVMGEGAGVLVMESLEHAMKRDAPILAEYLGGAINCDAYHMTDPRSDGLGVSSCIQSCLDDAGVSAEEVNYINAHATSTLVGDLAEVNAVKKVFKNTAGIKMNATKSMIGHCLGAAGGLEAIATVKAIQTGWLHPSINQFNPEPAVEFDTVANVKQQHEINVGISNSFGFGGHNSVVAFSAFKP

SEQ ID NO: 114940 - DNA, 1410 bp, Brassica napus
  CDS (1)..(1410)
atgcaatctcttcaatcctcctccctccgcgcttctccgccgaacccacttcgaacaccttcgaaccgccaatcccatcagatcaccaatgcgagacccaccatgagacgctccttcatctccgcatcagcctccgtctccgctcccaaacgcgagacggatccgaagaaacgcgtcgtgattaccggaatgggcctcgtctccgtcttcggcaacgacgtcgatgcttactacgagaagctcctctccggcgagagtggaatcagcttgatcgatcgattcgacgcctccaagttcccgactcgattcggtggccagatccgtgggttcagctccgaagggtacatcgatgggaagaacgagcggaggcttgatgattgcttgaagtactgcattgtcgctgggaagaaggctcttgaaagtgccaatcttggtggtgataagcttaacacgattgataagcagagagctggagtactagttgggactggtatgggtggtttgactgtgttttcagacggtgttcaagctctaattgagaaaggtcacaggaggatatctcccttctttattccttatgctatcacaaacatgggttctgctttgttggcgattgatcttggtcttatgggaccgaactactcgatctctaccgcttgtgctacctctaactactgcttttacgctgctgcgaaccacattcgccgtggtgaagctgatatgatggttgctggtggaaccgaggctgctattatacctattgggttgggaggttttgttgcttgcagggcattgtcgcagagaaatgatgaccctaaaacggcttcaaggccatgggataaacagagagatggctttgtcatgagtgaaggagctggtgttctggtgatggaaagcttggaacatgcaatgaaacgtggtgctccaattgtagcagaatatcttggaggtgctgtcaactgtgatgctcatcatatgactgatccaagagctgatgggcttggtgtctcttcatgcattgagagctgccttgaagatcccggtgtatcacccgaggaggtaaactacatcaatgcccatgcaacttcaactcttgctggtgatcttgctgagatcaatgccgttaaaaaggtgttcaaaagcacttcagggatcaaaatcaatgccaccaagtctatgataggtcactgcctcggtgcagctggaggtcttgaagccattgccaccataaaggctatcaacacgggatggctgcatccctcaatcaaccaatttaacccagaaccagcagtggactttgacacggtcgcaaacgagaagaagcagcacgaggtgaacgttgccatatcaaactcgtttgggttcggtggacataactcagtggtcgccttctctgccttcaaaccctga

SEQ ID NO: 114941 - protein, 469 aa, Brassica napus
MQSLQSSSLRASPPNPLRTPSNRQSHQITNARPTMRRSFISASASVSAPKRETDPKKRVVITGMGLVSVFGNDVDAYYEKLLSGESGISLIDRFDASKFPTRFGGQIRGFSSEGYIDGKNERRLDDCLKYCIVAGKKALESANLGGDKLNTIDKQRAGVLVGTGMGGLTVFSDGVQALIEKGHRRISPFFIPYAITNMGSALLAIDLGLMGPNYSISTACATSNYCFYAAANHIRRGEADMMVAGGTEAAIIPIGLGGFVACRALSQRNDDPKTASRPWDKQRDGFVMSEGAGVLVMESLEHAMKRGAPIVAEYLGGAVNCDAHHMTDPRADGLGVSSCIESCLEDPGVSPEEVNYINAHATSTLAGDLAEINAVKKVFKSTSGIKINATKSMIGHCLGAAGGLEAIATIKAINTGWLHPSINQFNPEPAVDFDTVANEKKQHEVNVAISNSFGFGGHNSVVAFSAFKP

SEQ ID NO: 114942 - DNA, 1611 bp, Brassica napus
  CDS (1)..(1611)
atggtgggtgctgctgcgtcttcctgttacgcatctccgctatgcacctggttcgtcgccgcctgcatgtccgtctcccacggcggcggagattcccgacaagccgtcgctctcaaatctaccgggcggagtcgtcgaagcagacaacagctcaccaaatgctctggatccggtagcagcactacttcctttgggccttgcaatcactacaatgccttgtcttctctcttcggatcgaactctgtttctctcaatcgaaaccagaggaggttgactcgagctgctactgctagttccggtggaggagccatggctgttgcgatggatatggaaaaggaagccaaggttgacaacaaacctcctacggagcagcgccgggttgttgtgacaggcatgggagttgaaacatcactaggtcatgaccctgacaccttttatgagaatctcctacaaggcaacagtggtattagccagattgagaattttgattgttctgcttttcctacgagaattgctggagagatcaagtcattctcgactgaagggtgggttgctccaaaactctcaaagaggatggacaagttcatgctctatcttctcactgctggcaagaaggctttggttgatggtggggtaaccgaaaaagtcatggcagagtttgacaaagccaaatgcggaatcttgattggctctgcaatgggaggcatgaaggtctttcaagaggctattcaagctatgaagatctcttacaagaagatgaatcctttctgtgtacctttcgcaacaacaaacatgggttctgctatgcttgctatggatctgggatggatggggccaaactattctatatcaactgcttgtgcaacaagcaacttttgcattctgaattcagcaaaccacattatcaaaggagaagctgatgtaatgctctgtggtggctcagacgcagtgattattccaatagggttgggaggttttgttgcatgccgtgctctttcacaaaggaataatgatcccacaaaagcttcacgcccttgggatagcaaccgagatggtttcgtgatgggagagggagctggagttttgcttttggaagagcttgaacatgctaagaaaagaggagcaacaatctatgcagagttccttggtgggagtttcacatgtgatgcctatcacatgaccgagcctcgccctgatggtgctggtgtgattctgtgtattgagagagcattggctgatgctgggatttccaaagaacagataaactatataaatgcacatgcaacctctacaccagctggagaccttaaggagtaccaagcccttgctcactgctttggccaaaatcctgagataaaagttaattccacaaaatctatgattggacacttgctgggagctgctggggccgttgaagctgtcgcaactgtgcaggccataaggaccggatgggttcatccaaatatcaaccttgagagtccagacaatggagtggatacaaatttgctggtgggtcctgagaaggagagattggacattaaagcagccttgtcaaattcattcgggtttggtggccacaactccagcatcatttttgctccttacaagtga

SEQ ID NO: 114943 - protein, 536 aa, Brassica napus
MVGAAASSCYASPLCTWFVAACMSVSHGGGDSRQAVALKSTGRSRRSRQQLTKCSGSGSSTTSFGPCNHYNALSSLFGSNSVSLNRNQRRLTRAATASSGGGAMAVAMDMEKEAKVDNKPPTEQRRVVVTGMGVETSLGHDPDTFYENLLQGNSGISQIENFDCSAFPTRIAGEIKSFSTEGWVAPKLSKRMDKFMLYLLTAGKKALVDGGVTEKVMAEFDKAKCGILIGSAMGGMKVFQEAIQAMKISYKKMNPFCVPFATTNMGSAMLAMDLGWMGPNYSISTACATSNFCILNSANHIIKGEADVMLCGGSDAVIIPIGLGGFVACRALSQRNNDPTKASRPWDSNRDGFVMGEGAGVLLLEELEHAKKRGATIYAEFLGGSFTCDAYHMTEPRPDGAGVILCIERALADAGISKEQINYINAHATSTPAGDLKEYQALAHCFGQNPEIKVNSTKSMIGHLLGAAGAVEAVATVQAIRTGWVHPNINLESPDNGVDTNLLVGPEKERLDIKAALSNSFGFGGHNSSIIFAPYK

SEQ ID NO: 114944 - DNA, 1410 bp, Brassica napus
  CDS (1)..(1410)
atgcaatctcttcaatcctcctccctccgcgcttctccgccgaacccacttcgaacaccttcgaaccgccaatcccatcagatcaccaatgcgagacccaccatgagacgctccttcatctccgcatcagcctccgtctccgctcccaaacgcgagacggatccgaagaaacgcgtcgtgattaccggaatgggcctcgtctccgtcttcggcaacgacgtcgatgcttactacgagaagctcctctccggcgagagtggaatcagcttgatcgatcgattcgacgcctccaagttcccgactcgattcggtggccagatccgtgggtttagctccgaggggtacatcgatgggaagaacgagcggaggcttgatgattgcttgaagtactgcattgtcgctgggaagaaggctcttgaaagtgccaatcttggtggtgataagcttaacacgattgataagcagagagctggagtactagttgggactggtatgggtggtttgactgtgttttcagacggtgttcaagctctaattgagaaaggtcacaggaggatttctcccttctttattccttatgctatcacaaacatgggttctgctttgttggcgattgatcttggtcttatgggtccgaactactcgatctctaccgcttgtgctacctctaactactgcttttacgctgctgcgaaccacattcgccgtggtgaagctgatatgatggttgctggtggaaccgaggctgctattatacctattgggttgggaggttttgttgcttgcagggcattgtcgcagagaaatgatgaccctaaaacggcttcaaggccatgggataaacagagagatggctttgtcatgggtgaaggagctggtgttctggtaatggaaagcttggaacatgcgatgaaacgtggtgctccaattgtagcagagtatcttggaggtgctgttaactgtgatgctcatcatatgactgatccaagagctgatgggcttggtgtctcttcatgcattgagagctgccttgaagatgctggtgtatcacccgaggaggtaaactacatcaatgcccatgcaacttccactcttgctggtgatcttgctgagatcaatgccattaaaaaggtgttcaaaagcacttcagggatcaaaatcaatgccactaagtctatgataggtcactgcctcggtgcagctggaggtcttgaagccattgccaccgtgaaggctatcaacactggatggcttcatccctctatcaaccaatttaacccagaaccagcagtggactttgacacggtcgcaaacgagaagaagcagcacgaggtgaatgttgccatatcaaactcgtttgggttcggtggacataactcagtcgtggcattctctgcattcaaaccctga

SEQ ID NO: 114945 - protein, 469 aa, Brassica napus
MQSLQSSSLRASPPNPLRTPSNRQSHQITNARPTMRRSFISASASVSAPKRETDPKKRVVITGMGLVSVFGNDVDAYYEKLLSGESGISLIDRFDASKFPTRFGGQIRGFSSEGYIDGKNERRLDDCLKYCIVAGKKALESANLGGDKLNTIDKQRAGVLVGTGMGGLTVFSDGVQALIEKGHRRISPFFIPYAITNMGSALLAIDLGLMGPNYSISTACATSNYCFYAAANHIRRGEADMMVAGGTEAAIIPIGLGGFVACRALSQRNDDPKTASRPWDKQRDGFVMGEGAGVLVMESLEHAMKRGAPIVAEYLGGAVNCDAHHMTDPRADGLGVSSCIESCLEDAGVSPEEVNYINAHATSTLAGDLAEINAIKKVFKSTSGIKINATKSMIGHCLGAAGGLEAIATVKAINTGWLHPSINQFNPEPAVDFDTVANEKKQHEVNVAISNSFGFGGHNSVVAFSAFKP

SEQ ID NO: 114946 - DNA, 1410 bp, Brassica napus
  CDS (1)..(1410)
atgcaagctcttcaatcctcctccctccgcgcttctccgccgaacccacttcgaacaccttcgaaccgccaatcccatcagatcaccaatgcgagacccaccatgagacgctccttcatctccgcatcagcctccgtctccgctcccaaacgcgagacggatccgaagaaacgcgtcgtgattaccggaatgggcctcgtctccgtcttcggcaacgacgtcgatgcttactacgagaagctcctctccggcgagagtggaatcagcttgatcgatcgattcgacgcctccaagttcccgactcgattcggtggccagatccgtgggtttagctccgaagggtacatcgatgggaagaacgagcggaggcttgatgattgcttgaagtactgcattgtcgctgggaagaaggctcttgaaagtgccaatcttggtggtgataagcttaacacgattgataagcagagagctggagtactagttgggactgctatgggtggcttgactgtgttttcagacggtgtacaagctcttattgagaaaggtcacaggaggatttctcccttttttattccttatgctattacaaacatgggttctgctttgttggcgattgatcttggtcttatgggtccgaactactcgatctctaccgcttgtgctacctctaactactgcttttacgctgctgcgaaccacattcgccgtggtgaagctgatatgatggttgctggtggaaccgaggctgctattattcctattgggttgggaggttttgttgcttgcagggcattgtcgcagagaaatgatgaccctaaaactgcttcaaggccatgggataaacagagagatggctttgtcatgggtgaaggagctggtgttctggtgatggaaagcttggaacatgcgatgaaacgtggtgctccaattgtagcagagtatcttggaggtgctgttaactgtgatgctcatcatatgactgatccaagagctgatgggcttggtgtctcttcatgcattgagagctgccttgaagatgctggtgtatcccccgaggaggtaaactacatcaatgcccatgcaacttcaactcttgctggtgatcttgctgagatcaatgccgttaaaaaggtgttcaaaagcacttcagggatcaaaatcaatgccactaagtctatgataggtcactgcctcggtgcagctggaggtcttgaagccattgccactgtgaaggctatcaacactggatggcttcatccctctatcaaccaatttaacccagaaccagcagtggactttgacacggtcgcaaacgagaagaagcagcatgaggtgaatgttgccatatcaaactcgtttgggttcggtggacataactcagtcgtcgcattctctgcattcaaaccctga

SEQ ID NO: 114947 - protein, 469 aa, Brassica napus
MQALQSSSLRASPPNPLRTPSNRQSHQITNARPTMRRSFISASASVSAPKRETDPKKRVVITGMGLVSVFGNDVDAYYEKLLSGESGISLIDRFDASKFPTRFGGQIRGFSSEGYIDGKNERRLDDCLKYCIVAGKKALESANLGGDKLNTIDKQRAGVLVGTAMGGLTVFSDGVQALIEKGHRRISPFFIPYAITNMGSALLAIDLGLMGPNYSISTACATSNYCFYAAANHIRRGEADMMVAGGTEAAIIPIGLGGFVACRALSQRNDDPKTASRPWDKQRDGFVMGEGAGVLVMESLEHAMKRGAPIVAEYLGGAVNCDAHHMTDPRADGLGVSSCIESCLEDAGVSPEEVNYINAHATSTLAGDLAEINAVKKVFKSTSGIKINATKSMIGHCLGAAGGLEAIATVKAINTGWLHPSINQFNPEPAVDFDTVANEKKQHEVNVAISNSFGFGGHNSVVAFSAFKP

SEQ ID NO: 114948 - DNA, 1467 bp, Glycine max
  CDS (1)..(1467)
atggcttcgaccaccacctcctccctctgcacgtggctcgttgctgcttgcatgtcagtcacgtgccacgccgaccgcaccaaaacccctcacgcaatgttccgctcctccaaaaagtctcgctactctcaattcaacgtttgtcgatccactcattctggtaaaacaatggctgtagctttgcaacctacccaagagatcacgacaataaaaaaacctcccacgaagcaaaggcgagtggttgtgacaggattgggtgtggttacaccacttgggcatgagccagatatcttctacaataatttgcttgatggtgctagtggcataagcgagattgaaacatttgattgtgcagaatatccaacaaggattgctggtgaaatcaagtctttctcaactgatggctgggtagcaccaaaactttctaagagaatggataaatttatgctctatatgctgacagctggcaaaaaagccttggttgatggtggaattactgatgatgtaatggatgagttaaataaagaaaagtgtggagttctgattgggtcagcaatgggtggcatgaaggttttcaatgatgccatcgaagctttacgaatctcatataagaagatgaagcctttttgtgtaccttttgcaacaacaaatatgggttctgccatgcttgcaatggatctgggatggatgggccctaattattctatctctacagcttgtgctacaagtaacttttgtatattgaatgcagcaaaccatatcattagaggtgaagctgatgtgatgctttgtggaggctcagatgctgctattataccaattggtttgggaggctttgtggcatgcagggcactctcacaaaggaatactgatcctaccaaagcttcacgcccttgggacattaaccgtgatggatttgtcatgggtgaaggggctggagttttgcttttagaggaactggagcatgctaaggaaagaggtgcaaccatatatgctgaattccttggtggaagtttcacctgtgatgcatatcatgtgactgagccgcgtcctgatggggctggtgttatactgtgcattgaaaaggcattagctcagtctggagtatcaaaagaggatgtgaattacataaatgcacatgccacatccacaccagctggagatcttaaggagtaccaagctctaatgcattgttttggtcaaaaccccgagttaagagtgaattctacaaaatctatgattggtcatctactaggggcagctggcggtgtggaagctgtggccacaatacaggcaattaggacagggtgggttcatcccaatatcaacctagaaaacccagataacggagtggatgctaaagtgcttgttggctcaaagaaagagagactggatgtcaaggcagccttgtcgaattcatttggttttgggggtcacaattcttcaatcatatttgcaccatactag

SEQ ID NO: 114949 - protein, 488 aa, Glycine max
MASTTTSSLCTWLVAACMSVTCHADRTKTPHAMFRSSKKSRYSQFNVCRSTHSGKTMAVALQPTQEITTIKKPPTKQRRVVVTGLGVVTPLGHEPDIFYNNLLDGASGISEIETFDCAEYPTRIAGEIKSFSTDGWVAPKLSKRMDKFMLYMLTAGKKALVDGGITDDVMDELNKEKCGVLIGSAMGGMKVFNDAIEALRISYKKMKPFCVPFATTNMGSAMLAMDLGWMGPNYSISTACATSNFCILNAANHIIRGEADVMLCGGSDAAIIPIGLGGFVACRALSQRNTDPTKASRPWDINRDGFVMGEGAGVLLLEELEHAKERGATIYAEFLGGSFTCDAYHVTEPRPDGAGVILCIEKALAQSGVSKEDVNYINAHATSTPAGDLKEYQALMHCFGQNPELRVNSTKSMIGHLLGAAGGVEAVATIQAIRTGWVHPNINLENPDNGVDAKVLVGSKKERLDVKAALSNSFGFGGHNSSIIFAPY

SEQ ID NO: 114950 - DNA, 1410 bp, Glycine max
  CDS (1)..(1410)
atgcaagcgcttcactcccccaccctccgcacttctcccttggaccctcttcggggccccaacaatgccgccgccaaccgacgcgcctccaccgccaagcgcgtgttcttcgtctccgccacggtggcgccgaaggtgtccgccccgcagcggcagaaggactcgaagaagcgcgtggttatcacgggaatggggctcgcgtcggtgttcgggaacgacgtggaggggtactacgagaagcttctcgccggcgagagcggcatcacccccatcgaccgcttcgacgcctccaagtttcccacgcgcttcggcggccagatccgcggcttctccgccgagggctacatcgacggcaagaacgaccgccgcctcgacgactgcctccgctactgcattgtcgccggcaaaaaggccctcgaaaacgccgaccttgcccccgacaaccactccaagattgataaggagcgtgctggtgttcttgtaggctctggaatgggaggcttaacggtgttttctgacggtgttcaggctctgattgagaaggggcacaggaagataacgccgtttttcattccttatgcaattactaacatgggttcggctttgcttgggatagaccttggattcatgggtcccaactactctatatccacggcttgtgctacttccaattattgcttttatgctgcggcgaaccatattcggagaggggaggctgatttgatgatagccggtgggactgaggctgccattattcctattgggttagggggttttgttgcttgcagagcgctttctcagaggaacgacgaccctaaaaccgcttccaggccatgggataaggaacgtgatggctttgttatgggtgaaggtgctggagttttggtaatggagagcttggagcatgctatgaagcgaggcgcacctattattgctgaatatttgggaggagctgttaactgtgatgcttatcacatgactgatccaaggtctgatggacttggtgtgtctacatgcattcagagcagccttgaagatgccggtgtgtcaccagaggaggtcaactacataaatgcacatgcaacttccactcttgctggagacttggcagaaattaatgctattaaaaaggttttcaaggacacttctggcatcaaaattaatgccaccaagtctatgatagggcactgccttggtgcagctgggggtttagaagccattgccacagtgaaagccataacaacaggatggctgcatccaacaatcaatcaatttaacccagaacctgcagttgattttgatacagtggcaaatgtcaagcagcagcatgaaatcaacgttgccatttcaaattcatttggattcggtggacacaactctgtggtggcattttctgctttcaagccttga

SEQ ID NO: 114951 - protein, 469 aa, Glycine max
MQALHSPTLRTSPLDPLRGPNNAAANRRASTAKRVFFVSATVAPKVSAPQRQKDSKKRVVITGMGLASVFGNDVEGYYEKLLAGESGITPIDRFDASKFPTRFGGQIRGFSAEGYIDGKNDRRLDDCLRYCIVAGKKALENADLAPDNHSKIDKERAGVLVGSGMGGLTVFSDGVQALIEKGHRKITPFFIPYAITNMGSALLGIDLGFMGPNYSISTACATSNYCFYAAANHIRRGEADLMIAGGTEAAIIPIGLGGFVACRALSQRNDDPKTASRPWDKERDGFVMGEGAGVLVMESLEHAMKRGAPIIAEYLGGAVNCDAYHMTDPRSDGLGVSTCIQSSLEDAGVSPEEVNYINAHATSTLAGDLAEINAIKKVFKDTSGIKINATKSMIGHCLGAAGGLEAIATVKAITTGWLHPTINQFNPEPAVDFDTVANVKQQHEINVAISNSFGFGGHNSVVAFSAFKP

SEQ ID NO: 114952 - DNA, 1410 bp, Glycine max
  CDS (1)..(1410)
atgcaagcgcttcattcccccaccctccgcacttctcccttggaccctcttcggggccccaacaatgccgccgccaagcgacgcgcctcctctgccaagcgcgtgttcttcgtgtccgccacggtggcgccgaaggtgtccgccccgcagcggcagaaggactcgaagaagcgcgtggttatcacgggaatggggctcgcgtcggtgttcgggaacgacgtggaggggtactacgagaagcttctcgccggcgagagcggcatcacccccatcgaccgcttcgacgcctccaagtttcccacgcgcttcggcggccagatccgcggcttctccgccgagggctacatcgacggcaagaacgaccgccgcctcgacgactgcctccgctactgcattgtcgccggcaaaaaggccctcgaaaacgccgaccttgccccagacaaccactccaagattgataaggagcgtgctggtgttctagtacgctccggaatgggaagtttaaccgtgttttctgacggtgttcaggctctgattgagaaggggcacaggaagataacgccgttttttattccgtatgccattactaacatgggttcggctttgcttgggatagaccttgggttcatgggtcccaactattctatatccacggcttgtgctacctccaactattgcttttatgctgcggcgaaccatattcggagaggggaggctgatttgatgattgcgggtgggactgaggctgccattattccaattgggttagggggtttcgttgcttgcagggcgctttcgcagaggaatgatgaccccaaaactgcttccaggccgtgggataaggaccgtgatggctttgttatgggcgaaggtgctggagttttggtaatggagagcttggaacatgccatgaagcgaggcgcacctattattgctgaatacttgggaggtgctgttaactgtgatgcttatcacatgactgatccaaggtctgatggacttggtgtgtctacatgcattcagagcagccttgaagatgcgggtgtgtcaccagaggaggtcaactacataaatgcacatgcaacttccactcttgctggagacttggcagagatcaatgctattaaaaaggttttcaaggacacttctggaatcaaaattaatgcaaccaagtctatgatagggcactgccttggtgcagctgggggtttggaagccattgccacagtgaaagccataacaacaggatggctgcatccaacaatcaatcaatttaacccagaacctgcagttgattttgatacagtggcaaatgtcaagcagcagcatgaaatcaacgttgccatttcaaattcatttggattcggtggacacaactctgtggtagcattttctgctttcaggccttga

SEQ ID NO: 114953 - protein, 469 aa, Glycine max
MQALHSPTLRTSPLDPLRGPNNAAAKRRASSAKRVFFVSATVAPKVSAPQRQKDSKKRVVITGMGLASVFGNDVEGYYEKLLAGESGITPIDRFDASKFPTRFGGQIRGFSAEGYIDGKNDRRLDDCLRYCIVAGKKALENADLAPDNHSKIDKERAGVLVRSGMGSLTVFSDGVQALIEKGHRKITPFFIPYAITNMGSALLGIDLGFMGPNYSISTACATSNYCFYAAANHIRRGEADLMIAGGTEAAIIPIGLGGFVACRALSQRNDDPKTASRPWDKDRDGFVMGEGAGVLVMESLEHAMKRGAPIIAEYLGGAVNCDAYHMTDPRSDGLGVSTCIQSSLEDAGVSPEEVNYINAHATSTLAGDLAEINAIKKVFKDTSGIKINATKSMIGHCLGAAGGLEAIATVKAITTGWLHPTINQFNPEPAVDFDTVANVKQQHEINVAISNSFGFGGHNSVVAFSAFRP

SEQ ID NO: 114954 - DNA, 1479 bp, Glycine max
  CDS (1)..(1479)
atggcaggtatcgctggtacatgtcctttaggagcattgctcagaaacagtgtctcagaaaacaatgggaagatatctgtggttcattatgaggggcttagattgcagcagagaatgcaaatgccttcaccaagccagtacatttcagcttcttcatcagcagctccaagatgcagaacaatcaaggccatggcttccccaactgttggagcaccaaagagagaaaaggatccaaaaaagcgagtagtaataacaggaatgggtcttgtgtcagtctttggtagtgacgttgatgccttttacaacaagcttcttgagggagaaagtgggataagcctaatagataggtttgatgcctcaaacttctcggtccgttttggaggtcagatacgtgatttctcttcagaaggctacattgatggcaagaatgaccggcgccttgacaattgctggaggtattgcattgttgcaggcaagagggcccttgatgatgccaaccttggaaagcaagtccttgacactatggacaaaacaagaataggagttctggtgggatcaggaatgggaggtataacggctttctcgaatggtgtggaagctcttgtacaaaagggatataagaaaattactccatttttcattccctactccatcaccaacatgggttctgccttgttggctatagacacaggcctaatgggtcccaattattcaatttccactgcttgtgcaacggcaaattactgcttttgtgcggctgctaatcacattagaaaaggcgaagcagatatcatggtggttggtggaactgaggctgcaatcatgcctagtggtcttggaggcttcattgcttgcagggctttgtctcacagaaacgaagaccccaagaaggcttcaagaccatgggacaaagatcgtgatggttttgtgatgggtgaaggctctggtgtgctggtaatggagagcttggagagtgcaacaaaaaggggagccaaaataatagcagaatatttggggggtgccataacgtgtgatgctcatcacatgactgatccaagagctgatggtcttggagtttcatcttgcataagcaagagtttagaagatgctggagtttctcctgaagaggtgaactatgtgaatgctcatgccacgtcaacactggctggtgacttggctgaggttaatgcaattaaaaaggtttttaaggacacatcagaattgaaaatgaatgcaactaagtcaatgattggtcatggtcttggggctgctggtggtttggaagccatagcaactatcaaagccataacaactggctggttgcatccaagcattaacctagataacttggaggctagtgttacaattgacactgtccctaacgttaagaagaagcatgaagttaatgttggtatatccaactcatttggattcggtggacacaattcagtagttgtctttgccccattcaggccataa

SEQ ID NO: 114955 - protein, 492 aa, Glycine max
MAGIAGTCPLGALLRNSVSENNGKISVVHYEGLRLQQRMQMPSPSQYISASSSAAPRCRTIKAMASPTVGAPKREKDPKKRVVITGMGLVSVFGSDVDAFYNKLLEGESGISLIDRFDASNFSVRFGGQIRDFSSEGYIDGKNDRRLDNCWRYCIVAGKRALDDANLGKQVLDTMDKTRIGVLVGSGMGGITAFSNGVEALVQKGYKKITPFFIPYSITNMGSALLAIDTGLMGPNYSISTACATANYCFCAAANHIRKGEADIMVVGGTEAAIMPSGLGGFIACRALSHRNEDPKKASRPWDKDRDGFVMGEGSGVLVMESLESATKRGAKIIAEYLGGAITCDAHHMTDPRADGLGVSSCISKSLEDAGVSPEEVNYVNAHATSTLAGDLAEVNAIKKVFKDTSELKMNATKSMIGHGLGAAGGLEAIATIKAITTGWLHPSINLDNLEASVTIDTVPNVKKKHEVNVGISNSFGFGGHNSVVVFAPFRP

SEQ ID NO: 114956 - DNA, 1404 bp, Glycine max
  CDS (1)..(1404)
atgccaacaatgcgctccagaaaactcttcaattccttttaccgaaccatttcctcttcaagttttcctcctcctccggttgtttcttcccgaagagtagttgtcactgggctaggcatggtgacgccacttggttgtggagtggacacaacgtggaagcgcctcgttggtggggaatgtggggtaagggctttgtctttggaagacctcaagatgaatgcttttgatagggaaacccagttgagtacgtttgatcagttgacatccaaggttgctgctcttgttcctaccggaaccaatccgggcgaattcgaccaccaaatctggctcaattctaaggaccatcgatcaatagcaaggtttatagcatatgcattatgtgctgctgatgaagctctcaaggattctaattggtttcccattgagcaacaagataaggaaagaacgggggtgtctattggtgggggaactggaagcgttagtgacatcttggattctgcacaactgatctgcgagaagcgccttcgtcggcttagtccattttttatcccacggatattgatcaacatggcatcaggtcatgtgagcatgaaatatgggttccagggaccaaatcatgctgcagtcactgcctgcgccactggttcacattctattggtgatgcaatgagaatgattcaatttggggatgcagatgttatggtagctggaggcacagagtccagcattgatgcattatcaattgcaggattctgcaggtctcgagctttgacaacaaaatataattcaagcccacaggaagcatcacggccatttgatagtggtcgagatgggtttgtgataggtgaaggttctggagtcttggtcttggaggaatttgagcatgcaaaaaatcgaggagccaaaatctatgcagaggttcgaggctatgggatgtcaggtgatgcatatcatattactcaacctcctagtgatgggagaggagccattttggccatgactcgtgctttaagacagtcaggttttcatccttctgaagtggattacataaatgctcatgctacatctacacctttgggcgatgcaatagaagctaatgctatcaaaaccatgttctctgaccgtgcaagctcatctgctttagccctctcctccacaaagggtgctattggtcatctcctaggtgctgctggagctgttgaagcaatttttgcagttttggcaatacggcatggaattgctccactaactcttaatttaactaagcctgatcctgtgttcggtgatagtttcatgccattgtctgcttcagaagaaatgccaattagagttgctatatcaaactcttttggttttggaggcacaaatgcgtccctactttttgctcacactggttcggactga

SEQ ID NO: 114957 - protein, 467 aa, Glycine max
MPTMRSRKLFNSFYRTISSSSFPPPPVVSSRRVVVTGLGMVTPLGCGVDTTWKRLVGGECGVRALSLEDLKMNAFDRETQLSTFDQLTSKVAALVPTGTNPGEFDHQIWLNSKDHRSIARFIAYALCAADEALKDSNWFPIEQQDKERTGVSIGGGTGSVSDILDSAQLICEKRLRRLSPFFIPRILINMASGHVSMKYGFQGPNHAAVTACATGSHSIGDAMRMIQFGDADVMVAGGTESSIDALSIAGFCRSRALTTKYNSSPQEASRPFDSGRDGFVIGEGSGVLVLEEFEHAKNRGAKIYAEVRGYGMSGDAYHITQPPSDGRGAILAMTRALRQSGFHPSEVDYINAHATSTPLGDAIEANAIKTMFSDRASSSALALSSTKGAIGHLLGAAGAVEAIFAVLAIRHGIAPLTLNLTKPDPVFGDSFMPLSASEEMPIRVAISNSFGFGGTNASLLFAHTGSD

SEQ ID NO: 114958 - DNA, 1467 bp, Glycine max
  CDS (1)..(1467)
atggcttcgaccaccacctcctccctctgcacgtggctcgttgctgcttgcatgtcagtcacgtgccacgccgaccgcaccaaaacccctcacgcaatgttccgctcctccaaaaagtctcgctactctcaattcaacgtttgtcgatccactcattctggtaaaacaatggctgtagctttgcaacctacccaagagatcacgacaataaaaaaacctcccacgaagcaaaggcgagtggttgtgacaggattgggtgtggttacaccacttgggcatgagccagatatcttctacaataatttgcttgatggtgctagtggcataagcgagattgaaacatttgattgtgcagaatatccaacaaggattgctggtgaaatcaagtctttctcaactgatggctgggtagcaccaaaactttctaagagaatggataaatttatgctctatatgctgacagctggcaaaaaagccttggttgatggtggaattactgatgatgtaatggatgagttaaataaagataagtgtggagttctgattggctcagcaatgggtggcatgaaggttttcaatgatgccatcgaagctttacgaatctcatataagaagatgaatcctttttgtgtaccttttgcaacaacaaatatgggttctgccatgcttgcaatggatctgggatggatgggccctaattattctatctctacagcttgtgctacaagtaacttttgtatattgaatgcagcaaaccatatcattagaggtgaagctgatgtgatgctttgtggaggctcagatgctgctattataccaattggtttgggaggctttgtggcatgcagggcactctcacaaaggaatactgatcctaccaaagcttcacgcccttgggacattaaccgtgatggatttgtcatgggtgaaggggctggagttttgcttttagaggaactggagcatgctaaggaaagaggtgcaaccatatatgctgaattccttggtggaagtttcacctgtgatgcatatcatgtgactgagccgcgtcctgatggggctggtgttatactgtgcattgaaaaggcattagctcagtctggagtatcaaaagaggatgtgaattacataaatgcacatgccacatccacaccagctggagatcttaaggagtaccaagctctaatgcattgttttggtcaaaaccccgagttaagagtgaattctacaaaatctatgattggtcatctactaggggcagctggcggtgtggaagctgtggccacaatacaggcaattaggacagggtgggttcatcccaatatcaacctagaaaacccagataacggagtggatgctaaagtgcttgttggctcaaagaaagagagactggatgtcaaggcagccttgtcgaattcatttggttttgggggtcacaattcttcaatcatatttgcaccatactag

SEQ ID NO: 114959 - protein, 488 aa, Glycine max
MASTTTSSLCTWLVAACMSVTCHADRTKTPHAMFRSSKKSRYSQFNVCRSTHSGKTMAVALQPTQEITTIKKPPTKQRRVVVTGLGVVTPLGHEPDIFYNNLLDGASGISEIETFDCAEYPTRIAGEIKSFSTDGWVAPKLSKRMDKFMLYMLTAGKKALVDGGITDDVMDELNKDKCGVLIGSAMGGMKVFNDAIEALRISYKKMNPFCVPFATTNMGSAMLAMDLGWMGPNYSISTACATSNFCILNAANHIIRGEADVMLCGGSDAAIIPIGLGGFVACRALSQRNTDPTKASRPWDINRDGFVMGEGAGVLLLEELEHAKERGATIYAEFLGGSFTCDAYHVTEPRPDGAGVILCIEKALAQSGVSKEDVNYINAHATSTPAGDLKEYQALMHCFGQNPELRVNSTKSMIGHLLGAAGGVEAVATIQAIRTGWVHPNINLENPDNGVDAKVLVGSKKERLDVKAALSNSFGFGGHNSSIIFAPY

SEQ ID NO: 114960 - DNA, 1386 bp, Zea mays
  CDS (1)..(1386)
atgcagagcctcctcctgcccaccgctgccgtggccccggtggcgcctccgtgcggaaggcggaatctcccgggacgcctctccgtccgcgcctccgcgacggtggtagcggcaccgcggcgggagacggatcccaagaagcgggtggtgatcacggggatggggctggtctccgttttcgggaacgatgtagacgcttactacgaccgcctgctagtcggggagagcggcatcgggcccatcgaccgcttcgacgcttctaagttccccacccgctttgccggtcagatccggggcttctcctccgagggatacatcgacggaaagaacgaccgccgccttgatgattgcctccgatactgcatcgtcagtggcaagaaggctctcgaggcctccggtatcgcccacggctccaagcccatggaaaagattgacaagacccgggccggtgtgcttgtgggcactggtatgggtggcctcacggtgttttcggatggtgtccagaatctcattgagaagggatacagaaagataactcctttcttcatcccatatgctatcacaaacatgggttctgccctgcttggaatggacattggtttcatgggtccaaactactccatctcaactgcctgtgctacctcgaactactgtttctatgctgcagcaaaccatatccgtagaggcgaagcggatataatgatagctggaggcactgaagctgcaattattccaattggtgttggtggctttgttgcatgtagagcactgtcacagaggaatgatgaccctaaaacagcatccaggccttgggacaaggatcgtgatggttttgtcatgggtgaaggagctggagtcctggtcatggagagcctagagcatgcaattaaacgtgatgcaccaataattgcggagtatttaggaggtgctgtgaactgtgatgcttaccatatgactgacccgagatctgatggtcttggtgtttcatcttgcatcaagcaaagtctcgaagatgctggtgtggctcctgaggaggtcaactatattaatgctcatgcaacatcaacccttgctggtgatctggcagaggtgaatgccatcaagcaagtcttcaaggacccatctgggatcaaaataaatgcaaccaagtccatgataggacattgccttggtgcagcaggtggtttggaagccattgctactgtcaaagcgataactactggatgggtgcatccaagcataaaccaatttaacccagaggaagcggttgaattcgacacagtacctaatgtaaaaaagcagcatgaagtgaacgttggcatctcaaattcttttggatttggaggtcacaattctgtcgtagtatttgcgccatttaagccataa

SEQ ID NO: 114961 - protein, 461 aa, Zea mays
MQSLLLPTAAVAPVAPPCGRRNLPGRLSVRASATVVAAPRRETDPKKRVVITGMGLVSVFGNDVDAYYDRLLVGESGIGPIDRFDASKFPTRFAGQIRGFSSEGYIDGKNDRRLDDCLRYCIVSGKKALEASGIAHGSKPMEKIDKTRAGVLVGTGMGGLTVFSDGVQNLIEKGYRKITPFFIPYAITNMGSALLGMDIGFMGPNYSISTACATSNYCFYAAANHIRRGEADIMIAGGTEAAIIPIGVGGFVACRALSQRNDDPKTASRPWDKDRDGFVMGEGAGVLVMESLEHAIKRDAPIIAEYLGGAVNCDAYHMTDPRSDGLGVSSCIKQSLEDAGVAPEEVNYINAHATSTLAGDLAEVNAIKQVFKDPSGIKINATKSMIGHCLGAAGGLEAIATVKAITTGWVHPSINQFNPEEAVEFDTVPNVKKQHEVNVGISNSFGFGGHNSVVVFAPFKP

SEQ ID NO: 114962 - DNA, 1386 bp, Zea mays
  CDS (1)..(1386)
atgcagagcctcctcatgcccaccgctgcagcggccccggtggcgcctccgcgcgcaaggcggaatctcccgagacgcctctccgtccgcgcctccgcgacggcggcagcggcaccgcggcgggagacggatcccaagaagcgggtggtgatcacggggatggggctggtctccgtgttcgggaacgacgtagacgcttactacgaccgcctgctagccggggagagcggcatcgggcccatcgaccgcttcgacgcctctaagttccccacccgcttcgccggccagatccggggcttctcctccgagggatacatcgacggaaagaacgaccgccgcctcgacgactgcctccgatactgcatcgtcagtggcaagaaggctctcgaggccgccggtatcgcccacggctccaagcccatggaaaagattgacaaaacccgggccggtgtgcttgtgggcactggtatgggtggcctcacggtgttttcggatggtgtccagaatctcattgagaagggatacagaaaaataactcctttcttcatcccatatgctataacaaacatgggttctgccctgcttggaatggacattggtttcatgggtccaaactactccatctcaactgcctgggctacctcgaactactgtttctatgctgcagcaaaccatatccgtagaggcgaagcggatataatgatagctggaggcactgaagctgcaattattccaattggtgttggtggctttgttgcatgtagagcactgtcacagaggaatgatgaccctaaaacagcatccaggccttgggacaaggatcgtgatggttttgtcatgggtgaaggagctggagtcctgatcatggagagcctagagcatgcaattaaacgtgatgcaccaataattgcggagtatttaggtggtgctgtgaactgtgatgcttaccatatgactgacccgagatctgatggtcttggtgtttcatcttgcatcaagcaaagtctcgaagatgctggtgtggctcctgaggaggtcaactatattaatgctcatgcaacatcaacccttgctggtgatctggcagaggtgaatgccatcaagcaagtcttcaaggacccatctgggatcaaaataaatgcaaccaagtccatgataggacactgccttggtgcagcaggtggtttggaagccattgctactgtcaaagcgataactactggatgggtgcatccaagcataaaccaatttaacccagaggaagcggttgaattcgacacagtacctaatgtaaaaaagcagcatgaagtgaacgttggcatctcaaattcttttggatttggaggtcacaattctgtcgtagtatttgcgccatttaagccataa

SEQ ID NO: 114963 - protein, 461 aa, Zea mays
MQSLLMPTAAAAPVAPPRARRNLPRRLSVRASATAAAAPRRETDPKKRVVITGMGLVSVFGNDVDAYYDRLLAGESGIGPIDRFDASKFPTRFAGQIRGFSSEGYIDGKNDRRLDDCLRYCIVSGKKALEAAGIAHGSKPMEKIDKTRAGVLVGTGMGGLTVFSDGVQNLIEKGYRKITPFFIPYAITNMGSALLGMDIGFMGPNYSISTAWATSNYCFYAAANHIRRGEADIMIAGGTEAAIIPIGVGGFVACRALSQRNDDPKTASRPWDKDRDGFVMGEGAGVLIMESLEHAIKRDAPIIAEYLGGAVNCDAYHMTDPRSDGLGVSSCIKQSLEDAGVAPEEVNYINAHATSTLAGDLAEVNAIKQVFKDPSGIKINATKSMIGHCLGAAGGLEAIATVKAITTGWVHPSINQFNPEEAVEFDTVPNVKKQHEVNVGISNSFGFGGHNSVVVFAPFKP

SEQ ID NO: 114964 - DNA, 1386 bp, Zea mays
  CDS (1)..(1386)
atgcagagcctcctcctgcccaccgctgccgtggccccggtggcgcctccgtgcggaaggcggaatctcccgggacgcctctccgtccgcgcctccgcgacggtggtagcggcaccgcggcgggagacggatcccaagaagcgggtggtgatcacggggatggggctggtctccgttttcgggaacgatgtagacgcttactacgaccgcctgctagtcggggagagcggcatcgggcccatcgaccgcttcgacgcttctaagttccccacccgctttgccggtcagatccggggcttctcctccgagggatacatcgacggaaagaacgaccgccgccttgatgattgcctccgatactgcatcgtcagtggcaagaaggctctcgaggcctccggtatcgcccacggctccaagcccatggaaaagattgacaagacccgggccggtgtgcttgtgggcactggtatgggtggcctcacggtgttttcggatggtgtccagaatctcattgagaagggatacagaaagataactcctttcttcatcccatatgctatcacaaacatgggttctgccctgcttggaatggacattggtttcatgggtccaaactactccatctcaactgcctgtgctacctcgaactactgtttctatgctgcagcaaaccatatccgtagaggcgaagctgatataatgatagctggtggcactgaagctgcaattattccaattggtgttggtggctttgttgcatgtagagcactgtcacagaggaatgatgaccctaaaacagcatccaggccttgggacaaggatcgtgatggttttgtcatgggtgaaggagctggagtcctggtcatggagagcctagagcatgcaatgaaacgtgatgcaccaataattgcggagtatttaggaggtgctgtgaactgtgatgcttaccatatgactgatccgagatctgatggtcttggtgtttcatcttgcatcaagcaaagccttaaagatgctggtgtggcgcctgaggaggtcaactatattaatgctcatgcaacatcaacccttgctggtgatctggcagaggtgaatgccatcaagcaagtcttcaaggacccatctgggattaaaataaatgcaaccaagtccatgataggacattgccttggcgcagcaggcggtttggaagccattgctactattaaagcgataactactggatgggtgcatccaagcataaaccaatttaacccagaggaagcagttgaatttgacactgtacctaatgtaaaaaagcagcatgaagtgaatgttggtatctcaaattcctttggatttggaggtcacaattctgtcgtagtatttgcaccatttaagccataa

SEQ ID NO: 114965 - protein, 461 aa, Zea mays
MQSLLLPTAAVAPVAPPCGRRNLPGRLSVRASATVVAAPRRETDPKKRVVITGMGLVSVFGNDVDAYYDRLLVGESGIGPIDRFDASKFPTRFAGQIRGFSSEGYIDGKNDRRLDDCLRYCIVSGKKALEASGIAHGSKPMEKIDKTRAGVLVGTGMGGLTVFSDGVQNLIEKGYRKITPFFIPYAITNMGSALLGMDIGFMGPNYSISTACATSNYCFYAAANHIRRGEADIMIAGGTEAAIIPIGVGGFVACRALSQRNDDPKTASRPWDKDRDGFVMGEGAGVLVMESLEHAMKRDAPIIAEYLGGAVNCDAYHMTDPRSDGLGVSSCIKQSLKDAGVAPEEVNYINAHATSTLAGDLAEVNAIKQVFKDPSGIKINATKSMIGHCLGAAGGLEAIATIKAITTGWVHPSINQFNPEEAVEFDTVPNVKKQHEVNVGISNSFGFGGHNSVVVFAPFKP

SEQ ID NO: 114966 - DNA, 1386 bp, Zea mays
  CDS (1)..(1386)
atgcagagcctcctcgtgcccactgctgcatcggccccggtggcggctccgcgggctcggcggaatctccctatgcgcctctccgtccgcgcctccgcgacggcggcagcggcaccgcggcgggagacggatcccaagaagcgggtggtgatcacggggatggggttggtctccgtgttcgggaacgacgtagacgcttactacgaccgcctgctagccggggagagcggcatcgggcccatcgaccgcttcgacgcctctaagttccccacccgcttcgccggccagatccggggcttctcgtccgagggctacatcgacggaaagaacgaccgccgcctcgacgactgcctccgatactgcatcgtcagtggcaagaaggctctcgaggctgccggtattgcccacggctccaagcccatggaaaagattgacaaaacccgggctggtgtgcttgtgggcactggtatgggtggcctcacggtgttttctgatggtgttcagaatctcattgagaagggctacagaaaaataactcctttcttcatcccatatgctataacaaacatgggttctgccctgcttggaatggatattggtttcatgggtccaaactactccatctcaactgcctgtgctacctcgaactactgtttctatgctgcagcaaaccatatccgtagaggcgaagcggatataatgatagctggaggcactgaagctgcaattattccaattggtgttggtggctttgttgcatgtagagcactgtcacagaggaatgatgaccctaaaacagcatccaggccttgggacaaggatcgtgatggttttgtcatgggtgaaggagctggagtcctggtcatggagagcctagagcatgcaattaaacgtgatgcaccaataattgcggagtatttaggaggtgctgtgaactgtgatgcttaccatatgactgacccgagatctgatggtcttggtgtttcatcttgcatcaagcaaagtctcgaagatgctggtgtggctcctgaggaggtcaactatattaatgctcatgcaacatcaacccttgctggtgatctggcagaggtgaatgccatcaagcaagtcttcaaggacccatctgggatcaaaataaatgcaaccaagtccatgataggacactgccttggtgcagcaggtggtttggaagccattgctactgtcaaagcgataactactggatgggtgcatccaagtataaaccaatttaatccagaggaagcggttgaattcgacacagtacctaatgtaaaaaagcagcatgaagtgaacgttggcatctcaaattcttttggatttggaggtcacaattctgtcgtagtatttgcgccatttaagccataa

SEQ ID NO: 114967 - protein, 461 aa, Zea mays
MQSLLVPTAASAPVAAPRARRNLPMRLSVRASATAAAAPRRETDPKKRVVITGMGLVSVFGNDVDAYYDRLLAGESGIGPIDRFDASKFPTRFAGQIRGFSSEGYIDGKNDRRLDDCLRYCIVSGKKALEAAGIAHGSKPMEKIDKTRAGVLVGTGMGGLTVFSDGVQNLIEKGYRKITPFFIPYAITNMGSALLGMDIGFMGPNYSISTACATSNYCFYAAANHIRRGEADIMIAGGTEAAIIPIGVGGFVACRALSQRNDDPKTASRPWDKDRDGFVMGEGAGVLVMESLEHAIKRDAPIIAEYLGGAVNCDAYHMTDPRSDGLGVSSCIKQSLEDAGVAPEEVNYINAHATSTLAGDLAEVNAIKQVFKDPSGIKINATKSMIGHCLGAAGGLEAIATVKAITTGWVHPSINQFNPEEAVEFDTVPNVKKQHEVNVGISNSFGFGGHNSVVVFAPFKP

SEQ ID NO: 114968 - DNA, 1518 bp, Zea mays
  CDS (1)..(1518)
atggcggccgtggcaggcccactctgcacgtggctcgtcgccgcgtgcttatctgcggcatgcgacgctgaagagcacaagcagaagcatttctgcccaggcggaagccgcgctgggggcggcgtcatggtcggccagcgccgccgcctcggcgcgcggcgtcgcggcttggcgcgctctggaatgactatggctgttgccttacaagctgaaagaagtgtcattgaaaagaagaaacccgatatcaaacaaaggagggtggttgtcactggcatgggtgtagtgacaccattgggccatgatcccgacgtcttttacaacaatcttcttgatggtgttagcggaataagtgagatagagaggtttgactgttccaacttccccacgagaattgcaggagagataaaatccttttccactgatggttgggttgtacctaaacttgcaaagcggatggacaagtttatgctatatctgataactgctggaaagaaagcattagaaaatggtggactcactgaagaactgaggaacgagttggacaaaaccaggtgcggggtcctcattggttctgcaatgggcggcatgaaggtttttaatgatgcaattgaagcactgagggtctcttacaagaaaatgaacccattttgtgttccttttgcaactaccaatatgggctctgcaatccttgcaatggatctgggatggatgggaccaaattattctatttccacagcctgtgctaccagtaacttctgtatccttaacgcagcaaaccacatcagaagaggcgaagctgacgttatgctctgcggtggttctgatgcacctcttatcccaatcggattgggaggttttgtggcctgcagagcactttcacagaggaacagtgacccaacgaaagcttctcgaccttgggacatgggccgtgatggttttgttatgggggaaggggctggtgtcctcgtattggaagaacttgagcacgccaaggaaagaggtgcaacaatatatgctgaatttcttggtggaagcttcacatgtgatgcttaccacatgactgagccacatcctgaaggaagagggattactctctgcatagaaaaggcactagctgatgcaggggtagcaagggaagaaatcaactacgtgaatgcccatgcaacttctacacaagcaggtgacctgaaggagtatgaggctattgtgcgctgttttcgccagaaccctcaactgagggtgaactcgaccaaatcaatgactgggcatcttataggagcagctggtggaatagaagcagttgcttctatacaagctataagaactggttgggtccatccaaatttgaatttagaaaatcctgaggacactgtggatgtgggcatcttggtaggatcacagaaggagagatgtgaggtgaaggtggcgttatccaactcattcggcttcggtgggcacaactcatcaattctctttgccccctttaaggaactgccatcttcctcatcgtccaaatag

SEQ ID NO: 114969 - protein, 505 aa, Zea mays
MAAVAGPLCTWLVAACLSAACDAEEHKQKHFCPGGSRAGGGVMVGQRRRLGARRRGLARSGMTMAVALQAERSVIEKKKPDIKQRRVVVTGMGVVTPLGHDPDVFYNNLLDGVSGISEIERFDCSNFPTRIAGEIKSFSTDGWVVPKLAKRMDKFMLYLITAGKKALENGGLTEELRNELDKTRCGVLIGSAMGGMKVFNDAIEALRVSYKKMNPFCVPFATTNMGSAILAMDLGWMGPNYSISTACATSNFCILNAANHIRRGEADVMLCGGSDAPLIPIGLGGFVACRALSQRNSDPTKASRPWDMGRDGFVMGEGAGVLVLEELEHAKERGATIYAEFLGGSFTCDAYHMTEPHPEGRGITLCIEKALADAGVAREEINYVNAHATSTQAGDLKEYEAIVRCFRQNPQLRVNSTKSMTGHLIGAAGGIEAVASIQAIRTGWVHPNLNLENPEDTVDVGILVGSQKERCEVKVALSNSFGFGGHNSSILFAPFKELPSSSSSK

SEQ ID NO: 114970 - DNA, 24 bp, Artificial sequence
  primer
atgtctaagcgtcgtgtagttgtg

SEQ ID NO: 114971 - DNA, 27 bp, Artificial sequence
  primer
ttagatctttttaaagatcaaagaacc

SEQ ID NO: 114972 - protein, 485 aa, Artificial sequence
  consensus sequence
  Variant (4)..(4): Xaa in position 4 is any amino acid
  Variant (7)..(7): Xaa in position 7 is any amino acid
  Variant (9)..(13): Xaa in position 9 to 13 is any amino acid
  Variant (15)..(23): Xaa in position 15 to 23 is any amino acid
  Variant (24)..(27): Xaa in position 24 to 27 is any or no amino acid
  Variant (29)..(30): Xaa in position 29 to 30 is any amino acid
  Variant (32)..(62): Xaa in position 32 to 62 is any amino acid
  Variant (63)..(100): Xaa in position 63 to 100 is any or no amino acid
  Variant (102)..(113): Xaa in position 102 to 113 is any amino acid
  Variant (115)..(128): Xaa in position 115 to 128 is any amino acid
  Variant (129)..(147): Xaa in position 129 to 147 is any or no amino acid
  Variant (149)..(151): Xaa in position 149 to 151 is any amino acid
  Variant (153)..(153): Xaa in position 153 is any amino acid
  Variant (154)..(155): Xaa in position 154 to 155 is any or no amino acid
  Variant (158)..(163): Xaa in position 158 to 163 is any amino acid
  Variant (164)..(183): Xaa in position 164 to 183 is any or no amino acid
  Variant (185)..(186): Xaa in position 185 to 186 is any amino acid
  Variant (187)..(187): Xaa in position 187 is any or no amino acid
  Variant (189)..(190): Xaa in position 189 to 190 is any amino acid
  Variant (191)..(192): Xaa in position 191 to 192 is any or no amino acid
  Variant (194)..(203): Xaa in position 194 to 203 is any amino acid
  Variant (204)..(204): Xaa in position 204 is any or no amino acid
  Variant (206)..(207): Xaa in position 206 to 207 is any amino acid
  Variant (210)..(215): Xaa in position 210 to 215 is any amino acid
  Variant (218)..(226): Xaa in position 218 to 226 is any amino acid
  Variant (227)..(227): Xaa in position 227 is any or no amino acid
  Variant (229)..(231): Xaa in position 229 to 231 is any amino acid
  Variant (233)..(234): Xaa in position 233 to 234 is any amino acid
  Variant (236)..(236): Xaa in position 236 is any amino acid
  Variant (239)..(242): Xaa in position 239 to 242 is any amino acid
  Variant (245)..(245): Xaa in position 245 is any amino acid
  Variant (247)..(254): Xaa in position 247 to 254 is any amino acid
  Variant (255)..(255): Xaa in position 255 is any or no amino acid
  Variant (258)..(261): Xaa in position 258 to 261 is any amino acid
  Variant (262)..(262): Xaa in position 262 is any or no amino acid
  Variant (266)..(266): Xaa in position 266 is any amino acid
  Variant (267)..(272): Xaa in position 267 to 272 is any or no amino acid
  Variant (274)..(274): Xaa in position 274 is any amino acid
  Variant (275)..(275): Xaa in position 275 is any or no amino acid
  Variant (277)..(277): Xaa in position 277 is any amino acid
  Variant (278)..(278): Xaa in position 278 is any or no amino acid
  Variant (283)..(283): Xaa in position 283 is any amino acid
  Variant (285)..(286): Xaa in position 285 to 286 is any amino acid
  Variant (292)..(292): Xaa in position 292 is any amino acid
  Variant (297)..(301): Xaa in position 297 to 301 is any amino acid
  Variant (303)..(304): Xaa in position 303 to 304 is any amino acid
  Variant (308)..(309): Xaa in position 308 to 309 is any amino acid
  Variant (313)..(313): Xaa in position 313 is any amino acid
  Variant (314)..(316): Xaa in position 314 to 316 is any or no amino acid
  Variant (318)..(318): Xaa in position 318 is any amino acid
  Variant (321)..(322): Xaa in position 321 to 322 is any amino acid
  Variant (324)..(328): Xaa in position 324 to 328 is any amino acid
  Variant (331)..(331): Xaa in position 331 is any amino acid
  Variant (333)..(333): Xaa in position 333 is any amino acid
  Variant (335)..(335): Xaa in position 335 is any amino acid
  Variant (337)..(337): Xaa in position 337 is any amino acid
  Variant (338)..(339): Xaa in position 338 to 339 is any or no amino acid
  Variant (341)..(341): Xaa in position 341 is any amino acid
  Variant (343)..(349): Xaa in position 343 to 349 is any amino acid
  Variant (352)..(353): Xaa in position 352 to 353 is any amino acid
  Variant (355)..(359): Xaa in position 355 to 359 is any amino acid
  Variant (360)..(364): Xaa in position 360 to 364 is any or no amino acid
  Variant (366)..(366): Xaa in position 366 is any amino acid
  Variant (370)..(370): Xaa in position 370 is any amino acid
  Variant (374)..(375): Xaa in position 374 to 375 is any amino acid
  Variant (376)..(376): Xaa in position 376 is any or no amino acid
  Variant (378)..(379): Xaa in position 378 to 379 is any amino acid
  Variant (381)..(382): Xaa in position 381 to 382 is any amino acid
  Variant (384)..(394): Xaa in position 384 to 394 is any amino acid
  Variant (395)..(403): Xaa in position 395 to 403 is any or no amino acid
  Variant (408)..(409): Xaa in position 408 to 409 is any amino acid
  Variant (412)..(412): Xaa in position 412 is any amino acid
  Variant (418)..(419): Xaa in position 418 to 419 is any amino acid
  Variant (421)..(426): Xaa in position 421 to 426 is any amino acid
  Variant (428)..(432): Xaa in position 428 to 432 is any amino acid
  Variant (433)..(435): Xaa in position 433 to 435 is any or no amino acid
  Variant (437)..(438): Xaa in position 437 to 438 is any amino acid
  Variant (440)..(465): Xaa in position 440 to 465 is any amino acid
  Variant (466)..(476): Xaa in position 466 to 476 is any or no amino acid
  Variant (484)..(484): Xaa in position 484 is any amino acid
RVVXTGXGXXXXXGXXXXXXXXXXXXXGXXGXXXXXXXXXXXXXXXXXXXXXXXXXXXXXXXXXXXXXXXXXXXXXXXXXXXXXXXXXXXXXXXXXXXXXDXXXXXXXXXXXXAXXXXXXXXXXXXXXXXXXXXXXXXXXXXXXXXXGXXXGXXXGGXXXXXXXXXXXXXXXXXXXXXXXXXXPXXXPXXXXNXXXXXXXXXXXGXXGPXXXXXXACXXXXXXXXXXAXXXIXXGXADXXXXGGXEXXXXXXXXXGFXXXXXALSXXXXXXXNXXPXXASRPXDXXRDGFVXGEGAXXXXXEXXEHAXXRGAXXXXIXAEXXGXXXXXDAXHXTXPXXXGXGXXXXXXXALXXAXXXXXXXXXXYXNAHXTSTXXXDXXEXXAXXXXXXXXXXXXXXXXXXXXSTKSXXGHXLGAAGXXEXXXXXXAXXXXXXXXPXXNXXXXXXXXXXXXXXXXXXXXXXXXXXXXXXXXXXXXXNSFGFGGXN

SEQ ID NO: 114973 - protein, 42 aa, Artificial sequence
  protein pattern
  Variant (2)..(3): Xaa in position 2 to 3 is any amino acid
  Variant (5)..(6): Xaa in position 5 to 6 is any or no amino acid
  Variant (8)..(9): Xaa in position 8 to 9 is any or no amino acid
  Variant (12)..(12): Xaa in position 12 is Ala or Pro
  Variant (13)..(13): Xaa in position 13 is Phe, Trp or Tyr
  Variant (14)..(14): Xaa in position 14 is Asp, Glu, Ser or Thr
  Variant (15)..(16): Xaa in position 15 to 16 is any amino acid
  Variant (18)..(18): Xaa in position 18 is Asp, Glu, Gly, Asn or Ser
  Variant (21)..(21): Xaa in position 21 is Ile or Val
  Variant (22)..(22): Xaa in position 22 is any amino acid
  Variant (23)..(23): Xaa in position 23 is Ala, Gly or Ser
  Variant (24)..(24): Xaa in position 24 is Asp, Glu or Gly
  Variant (25)..(25): Xaa in position 25 is Ala or Gly
  Variant (26)..(26): Xaa in position 26 is Ala, Cys, Gly or Ser
  Variant (27)..(27): Xaa in position 27 is Ala or Gly
  Variant (28)..(28): Xaa in position 28 is any amino acid
  Variant (29)..(29): Xaa in position 29 is Phe, Ile, Leu, Met or Val
  Variant (30)..(30): Xaa in position 30 is any amino acid
  Variant (31)..(31): Xaa in position 31 is Phe, Ile, Leu, Met or Val
  Variant (33)..(33): Xaa in position 33 is Ala, Asp, Glu, Ser or Thr
  Variant (34)..(34): Xaa in position 34 is any amino acid
  Variant (35)..(35): Xaa in position 35 is Ala, Asp, Glu, Gly, Asn or Ser
  Variant (36)..(36): Xaa in position 36 is any amino acid
  Variant (38)..(39): Xaa in position 38 to 39 is any amino acid
  Variant (41)..(41): Xaa in position 41 is any amino acid
  Variant (42)..(42): Xaa in position 42 is Ala, Leu or Val
NXXPXXAXXSRXXXXXRXGFXXXXXXXXXXXEXXXXAXXRXX

SEQ ID NO: 114974 - protein, 18 aa, Artificial sequence
  protein pattern
  Variant (2)..(2): Xaa in position 2 is Gly or Ser
  Variant (3)..(4): Xaa in position 3 to 4 is any amino acid
  Variant (7)..(7): Xaa in position 7 is any or no amino acid
  Variant (9)..(9): Xaa in position 9 is any or no amino acid
  Variant (12)..(12): Xaa in position 12 is any amino acid
  Variant (14)..(14): Xaa in position 14 is any amino acid
  Variant (15)..(15): Xaa in position 15 is any or no amino acid
  Variant (17)..(17): Xaa in position 17 is any amino acid
  Variant (18)..(18): Xaa in position 18 is Ala, Gly, Ile, Leu or Val
KXXXGHXLXGAXGXXEXX

SEQ ID NO: 114975 - protein, 16 aa, Artificial sequence
  protein pattern
  Variant (2)..(2): Xaa in position 2 is Ile, Leu or Val
  Variant (4)..(4): Xaa in position 4 is Ala or Thr
  Variant (6)..(6): Xaa in position 6 is Ala or Gly
  Variant (8)..(8): Xaa in position 8 is Ala, Gly or Ser
  Variant (10)..(11): Xaa in position 10 to 11 is any amino acid
  Variant (12)..(12): Xaa in position 12 is any or no amino acid
  Variant (14)..(15): Xaa in position 14 to 15 is any amino acid
YXNXHXTXTXXXDXXE

SEQ ID NO: 114976 - protein, 11 aa, Artificial sequence
  protein pattern
  Variant (2)..(2): Xaa in position 2 is Ala, Gly, Asn, Ser or Thr
  Variant (8)..(8): Xaa in position 8 is any amino acid
  Variant (10)..(10): Xaa in position 10 is Ala, Gly, Ser, Thr or Val
  Variant (11)..(11): Xaa in position 11 is Ala, Cys, Ser, Thr or Val
NXFGFGGXNXX

SEQ ID NO: 114977 - protein, 14 aa, Artificial sequence
  protein pattern
  Variant (4)..(4): Xaa in position 4 is Ile or Val
  Variant (7)..(7): Xaa in position 7 is Ile, Leu, Met or Val
  Variant (9)..(10): Xaa in position 9 to 10 is any amino acid
  Variant (11)..(11): Xaa in position 11 is Ala, Cys, Ser or Thr
  Variant (12)..(13): Xaa in position 12 to 13 is any amino acid
  Variant (14)..(14): Xaa in position 14 is Ala, Gly or Ser
RVVXTGXGXXXXXX

SEQ ID NO: 114978 - protein, 30 aa, Artificial sequence
  protein pattern
  Variant (3)..(4): Xaa in position 3 to 4 is Ala, Ser or Thr
  Variant (5)..(5): Xaa in position 5 is Ala, Gly or Ser
  Variant (6)..(7): Xaa in position 6 to 7 is any amino acid
  Variant (8)..(8): Xaa in position 8 is Ala, Cys, Asn or Ser
  Variant (9)..(9): Xaa in position 9 is Phe, Ile, Leu or Val
  Variant (10)..(11): Xaa in position 10 to 11 is any amino acid
  Variant (12)..(12): Xaa in position 12 is Ala, Gly or Ser
  Variant (13)..(15): Xaa in position 13 to 15 is any amino acid
  Variant (17)..(18): Xaa in position 17 to 18 is any amino acid
  Variant (19)..(19): Xaa in position 19 is Asp, Gly or Asn
  Variant (20)..(24): Xaa in position 20 to 24 is any amino acid
  Variant (25)..(25): Xaa in position 25 is Phe, Ile, Leu or Val
  Variant (26)..(26): Xaa in position 26 is Ala, Cys, Ser, Thr or Val
  Variant (28)..(28): Xaa in position 28 is Ala, Gly or Ser
  Variant (29)..(29): Xaa in position 29 is Ala, Cys, Gly, Ser, Thr or Val
  Variant (30)..(30): Xaa in position 30 is Asp or Glu
ACXXXXXXXXXXXXXIXXXXXXXXXXGXXX

SEQ ID NO: 114979 - DNA, 2190 bp, Escherichia coli
  CDS (1)..(2190): transl_table=11
atgctttcaacacaatttaacagggataatcaatatcaagccatcaccaaaccgtcactacttgccggttgcatagcactggcactattaccttctgccgcttttgctgcaccagccactgaagaaacggtgattgttgagggttcagccacagctccagatgatggcgaaaatgattacagcgtaacgtctacctctgcgggtaccaaaatgcagatgactcaacgtgatattcctcagtcggtcactattgttagccagcagcggatggaagatcagcagttacaaacgctgggcgaagtgatggaaaacacgctggggatcagcaaaagtcaggcggattccgatcgtgctctttattattcccgcggattccagatcgataactatatggttgatggtatccccacctattttgaatcgcgctggaatctgggcgacgcactttctgatatggcactctttgaacgcgtagaagtagtgcgtggcgcgacaggactcatgaccgggacgggtaatccatctgcggcaattaatatggttcgaaaacacgcgaccagtcgtgaatttaaaggcgatgtctcggcggaatacggtagctggaacaaagaacggtatgtggcggatttacaaagcccactcaccgaagacggtaaaatccgcgcgcgaattgtcggcggctaccagaataacgactcatggctggaccgctacaacagtgaaaagaccttcttctcgggcattgtcgatgctgatttaggcgatcttacgacgctttcagccggttacgaatatcagcgcattgatgttaatagccctacctggggcggtttaccgcgctggaatactgatggcagcagcaacagttacgatcgcgcacgcagtaccgcacctgactgggcgtacaacgataaagagatcaacaaggtctttatgaccctgaagcagcagtttgctgatacctggcaagcgacactgaatgccacccactctgaagtcgaatttgacagcaaaatgatgtatgtcgatgcctatgtaaacaaagcggatggtatgctggttgggccatacagtaattatggacctggctttgattatgtcggcggcaccggttggaacagtggcaaacgtaaagttgatgcgctggatttgttcgctgacggtagttatgaattgtttggtcgtcagcacaatctaatgtttggtggcagttacagcaaacaaaacaatcgttacttcagttcatgggccaacatcttcccggatgaaattggcagtttctacaactttaatggcaatttcccacaaaccgactggtcaccacagagcctggcgcaggacgataccacacatatgaaatcgttatatgctgccactcgtgtcacccttgccgatccgctgcatctgatcctcggcgcacgttataccaactggcgggttgatacgctgacttacagcatggagaaaaaccacaccacgccttacgctggtctggtgtttgacatcaatgacaactggtcgacctacgccagctatacctctattttccagccgcaaaatgatcgtgacagttcaggcaaatatctggctccaatcaccggtaacaactacgagctgggtctgaaatcggactggatgaatagccgtctgaccaccacgttagccatcttccgtattgagcaggataatgtcgctcagtccaccggtacacctatccccggcagcaacggcgaaaccgcctataaagcggtggatgggacagtcagtaaaggggtggaatttgaactcaacggcgcaattaccgacaactggcagctgacatttggcgcaacgcgctatattgcagaggataacgaaggaaacgccgttaatcctaatctgccacgcaccacggttaaaatgttcaccagctatcggttgcctgtcatgccagagttgacggtcggcggtggtgttaactggcaaaatcgcgtgtataccgacaccgtgacgccgtatggcaccttccgcgccgagcaaggtagctacgcgctggtggatctcttcacccgctaccaggtgacgaaaaacttctcgttacaggggaacgtcaataacctgttcgacaaaacctacgataccaacgtggaaggttctatcgtctacggcacaccgcgtaatttcagcattaccggcacgtatcaattctaa

SEQ ID NO: 114980 - protein, 729 aa, Escherichia coli
MLSTQFNRDNQYQAITKPSLLAGCIALALLPSAAFAAPATEETVIVEGSATAPDDGENDYSVTSTSAGTKMQMTQRDIPQSVTIVSQQRMEDQQLQTLGEVMENTLGISKSQADSDRALYYSRGFQIDNYMVDGIPTYFESRWNLGDALSDMALFERVEVVRGATGLMTGTGNPSAAINMVRKHATSREFKGDVSAEYGSWNKERYVADLQSPLTEDGKIRARIVGGYQNNDSWLDRYNSEKTFFSGIVDADLGDLTTLSAGYEYQRIDVNSPTWGGLPRWNTDGSSNSYDRARSTAPDWAYNDKEINKVFMTLKQQFADTWQATLNATHSEVEFDSKMMYVDAYVNKADGMLVGPYSNYGPGFDYVGGTGWNSGKRKVDALDLFADGSYELFGRQHNLMFGGSYSKQNNRYFSSWANIFPDEIGSFYNFNGNFPQTDWSPQSLAQDDTTHMKSLYAATRVTLADPLHLILGARYTNWRVDTLTYSMEKNHTTPYAGLVFDINDNWSTYASYTSIFQPQNDRDSSGKYLAPITGNNYELGLKSDWMNSRLTTTLAIFRIEQDNVAQSTGTPIPGSNGETAYKAVDGTVSKGVEFELNGAITDNWQLTFGATRYIAEDNEGNAVNPNLPRTTVKMFTSYRLPVMPELTVGGGVNWQNRVYTDTVTPYGTFRAEQGSYALVDLFTRYQVTKNFSLQGNVNNLFDKTYDTNVEGSIVYGTPRNFSITGTYQF

SEQ ID NO: 114981 - DNA, 2178 bp, Neisseria meningitidis
  CDS (1)..(2178): transl_table=11
atgacacgcttcaaatattccctgctgtttgccgccctgttgcccgtgtacgcgcaggccgatgtttctgtttcagacgaccccaaaccgcaggaaagcactgaattgccgaccatcaccgttaccgccgaccgcaccgcgagttccaacgacggctacactgtttccggcacgcacaccccgctcgggctgcccatgaccctgcgcgaaatcccgcagagcgtcagcgtcatcacatcgcaacaaatgcgcgaccaaaacatcaaaacgctcgaccgcgccctgttgcaggcgaccggcaccagccgccagatttacggctccgaccgcgcgggctacaactacctgttcgcgcgcggcagccgcatcgccaactaccaaatcaacggcatccccgttgccgacgcgctggccgatacgggcaatgccaacaccgccgcctatgagcgcgtagaagtcgtgcgcggcgtggcggggctgctggacggcacgggcgagccttccgccaccgtcaatctggtgcgcaaacgcctgacccgcaagccattgtttgaagtccgcgccgaagcgggcaaccgcaaacatttcgggctggacgcggacgtatcgggcagcctgaacaccgaaggcacgctgcgcggccgcctggtttccaccttcggacgcggcgactcgtggcggcggcgcgaacgcagccgcgatgccgaactctacggcattttggaatacgacatcgcaccgcaaacccgcgtccacgcaggcatggactaccagcaggcgaaagaaaccgccgacgcgccgctcagctacgccgtgtacgacagccaaggttatgccaccgccttcggcccgaaagacaaccccgccacaaattgggcgaacagccgccaccgtgcgctcaacctgttcgccggcatcgaacaccgcttcaaccaagactggaaactcaaagccgaatacgactacacccgcagccgcttccgccagccctacggcgtagcaggcgtgctttccatcgaccacaacaccgccgccaccgacctgattcccggttattggcacgccgacccgcgcacccacagcgccagcgtgtcattgatcggcaaataccgcctgttcggccgcgaacacgatttaatcgcgggtatcaacggttacaaatacgccagcaacaaatacggcgaacgcagcatcatccccaacgccattcccaacgcctacgaattttcccgcacgggtgcctacccgcagcctgcatcgtttgcccaaaccatcccgcaatacggcaccaggcggcaaatcggcggctatctcgccacccgtttccgcgccgccgacaacctttcgctgattttgggcggacgatacacccgttaccgcaccggcagctacgacagccgcacacaaggcatgacctatgtgtccgccaaccgtttcaccccctacacaggcatcgtgttcgacctgaccggcaacctgtctctttacggctcgtacagcagcctgttcgtcccgcaatcgcaaaaagacgaacacggcagctacctgaaacccgtaaccggcaacaatctggaagccggcatcaaaggcgaatggcttgaaggccgtctgaacgcatccgccgccgtgtaccgcgcccgtaaaaacaacctcgccaccgcagcaggacgcgacccgagcggcaacacctactaccgcgccgccaaccaagccaaaacccacggctgggaaatcgaagtcggcggccgcatcacgcccgaatggcagatacaggcaggttacagccaaagcaaaacccgcgaccaagacggcagccgcctgaaccccgacagcgtacccgaacgcagcttcaaactcttcactgcctaccactttgcccccgaagcccccagcggctggaccatcggcgcaggcgtgcgctggcagagcgaaacccacaccgaccctgccacgctccgcatccccaaccccgccgccaaagcccgcgccgccgacaacagccgccaaaaagcctacgccgtcgccgacatcatggcgcgttaccgcttcaatccgcgcgccgaactgtcgctgaacgtggacaatctgttcaacaaacactaccgcacccagcccgaccgccacagctacggcgcactgcggacagtgaacgcggcgtttacctatcggtttaaataa

SEQ ID NO: 114982 - protein, 725 aa, Neisseria meningitidis
MTRFKYSLLFAALLPVYAQADVSVSDDPKPQESTELPTITVTADRTASSNDGYTVSGTHTPLGLPMTLREIPQSVSVITSQQMRDQNIKTLDRALLQATGTSRQIYGSDRAGYNYLFARGSRIANYQINGIPVADALADTGNANTAAYERVEVVRGVAGLLDGTGEPSATVNLVRKRLTRKPLFEVRAEAGNRKHFGLDADVSGSLNTEGTLRGRLVSTFGRGDSWRRRERSRDAELYGILEYDIAPQTRVHAGMDYQQAKETADAPLSYAVYDSQGYATAFGPKDNPATNWANSRHRALNLFAGIEHRFNQDWKLKAEYDYTRSRFRQPYGVAGVLSIDHNTAATDLIPGYWHADPRTHSASVSLIGKYRLFGREHDLIAGINGYKYASNKYGERSIIPNAIPNAYEFSRTGAYPQPASFAQTIPQYGTRRQIGGYLATRFRAADNLSLILGGRYTRYRTGSYDSRTQGMTYVSANRFTPYTGIVFDLTGNLSLYGSYSSLFVPQSQKDEHGSYLKPVTGNNLEAGIKGEWLEGRLNASAAVYRARKNNLATAAGRDPSGNTYYRAANQAKTHGWEIEVGGRITPEWQIQAGYSQSKTRDQDGSRLNPDSVPERSFKLFTAYHFAPEAPSGWTIGAGVRWQSETHTDPATLRIPNPAAKARAADNSRQKAYAVADIMARYRFNPRAELSLNVDNLFNKHYRTQPDRHSYGALRTVNAAFTYRFK

SEQ ID NO: 114983 - DNA, 2262 bp, Yersinia pestis
  CDS (1)..(2262): transl_table=11
atgagaatactagaaaaaaatcacggcaaaagccgagtgcgttttaactgcacacaccctatcaaaccagcggcatgggtgcttgctgctaatgtatcgttgttgggttgtgcatatgccgcgactgacgagaataatagtcagaaaaaagaaagagaaaacaaccctgcaaataccaccataaccgttacggcatcaccattgcgtcatgctggcgtcacagaagacagtggcagctacaacacgtcatcaatgtcgacagcaactggcctgaatatttcagcacgggaaaccccacagtcggtaagtgttctgactaaacagcgcatgcgtgatcaaaacctgaacagcgtcgaaagtgccgtgaataacatcaccggcatcagtgtgcgccagtttgacagtgatcgtttcggttttacctctcgcggcatggccgttaataatgttatgcgagatggcgtcgccaccttttacgatacccgctttaattatggtgataacacgcttgataccgatatgtttgatcgtattgaagtggttcgaggtgcggcaggcttaatggctgggccgggtaacccttccgccgttattaaccttgtgcgcaaacgccccacgcaggattttcgcggcagtgtgtcggcaggtgttggttcatgggagaaatggcggacggcgctagatatctccggccccctcaatagtgaaggcagtgtgcgcgggcgttttgtcacggcttatgaagataagaactcttttgttaaccgctatgatcaaagtaaaaacccgttttacggtatcttggagatagatgtcacccccaataccctattcacctttggtgccgatacacaacggactctaacccggggcggtatgtttggtgggcttcccctgtttaacagcgctggtgggcggacaaattatgcccaatccgccaccaccgcatcggattgggcatccgccgaaacccgaactcaaacgctgtttagcagtctgcaacacaattttgataacggctggaatattaaaggcacctttacctttgataacgataagctgcgccaagacgtgatgtggcccaccggttatcccgacccacaaaccaatataggtatgcggccaggcagtctgtcactgattgatggtgcccgccgtcagcaaaattacgatattcaagtcaatggtcagtacagcctgtttggccgccaacatcagttgggtttgggctggaatcgtcaacgacaaaatattgataacgactattatctggcgacctgtaatgccaccagaacctgtcccgaccttggggatttcacccagccgggctggcaatatcctaagcctgtttggagtgataaacgggcttatggttcgaaagggcgcagcgatcaatcctcgcagtatgtggtgacccaactctctctgattgacccgttaaccttgatccttggtggccgcctgaccacttgggaaacccgtggtgataacttcggtacgccacaaaatgctcgttataagaatgagtttgtcccatacagcggcctgacttatgacattaatcgcgatttgtcggtttataccagttataccgaaatatttaacccagaaaaccgtcgggaccgtaataacacattattggccccggtgagtgggcagaattacgaagccggtttgaaaggtgttgccttcgataatagtcttgattattcactggcagtgtttgaaatccgtcagaataatatgcccgtaccggacaccaccgccccccgcttgccggataacagccagccttacttcgccgtcgacggtactaaaacccgtggttttgaagcggaagtcagtggaaaaatgactgaagactggaatatttctgcgggctatacccagtacaacgtgaaactaccgagctcaaatacccagacacctgtcaccccagtcacaccacggaaagtcttaaaactcttcaccacctataccttaccggggcaactaagcgatctgaccctcggcggtggcgtcaactggcaaagccaaatcgccagaaacctcagtagcccaatcggtattcaacaaatcggtcaaggcagttttgccatttacagcctgatgagccgctaccagtttacccctcagctctccttaacggtcaatctggataacctgtttaatcagcattactacacacaaatcggccaatacaaccaatacttgttaggcgcaccacgcaatgtcgatgccaccgtgcgctacaccttctaa

SEQ ID NO: 114984 - protein, 753 aa, Yersinia pestis
MRILEKNHGKSRVRFNCTHPIKPAAWVLAANVSLLGCAYAATDENNSQKKERENNPANTTITVTASPLRHAGVTEDSGSYNTSSMSTATGLNISARETPQSVSVLTKQRMRDQNLNSVESAVNNITGISVRQFDSDRFGFTSRGMAVNNVMRDGVATFYDTRFNYGDNTLDTDMFDRIEVVRGAAGLMAGPGNPSAVINLVRKRPTQDFRGSVSAGVGSWEKWRTALDISGPLNSEGSVRGRFVTAYEDKNSFVNRYDQSKNPFYGILEIDVTPNTLFTFGADTQRTLTRGGMFGGLPLFNSAGGRTNYAQSATTASDWASAETRTQTLFSSLQHNFDNGWNIKGTFTFDNDKLRQDVMWPTGYPDPQTNIGMRPGSLSLIDGARRQQNYDIQVNGQYSLFGRQHQLGLGWNRQRQNIDNDYYLATCNATRTCPDLGDFTQPGWQYPKPVWSDKRAYGSKGRSDQSSQYVVTQLSLIDPLTLILGGRLTTWETRGDNFGTPQNARYKNEFVPYSGLTYDINRDLSVYTSYTEIFNPENRRDRNNTLLAPVSGQNYEAGLKGVAFDNSLDYSLAVFEIRQNNMPVPDTTAPRLPDNSQPYFAVDGTKTRGFEAEVSGKMTEDWNISAGYTQYNVKLPSSNTQTPVTPVTPRKVLKLFTTYTLPGQLSDLTLGGGVNWQSQIARNLSSPIGIQQIGQGSFAIYSLMSRYQFTPQLSLTVNLDNLFNQHYYTQIGQYNQYLLGAPRNVDATVRYTF

SEQ ID NO: 114985 - DNA, 2166 bp, Acinetobacter baumannii
  CDS (1)..(2166): transl_table=11
atgagaattatttacattatctttaatcttatgaatatcccacctcgaccatttaagttgtctgtaatcgcctgcgcgatttgttatgccaatctcacctatgcccaagatgcacaggtacaagctttgcaaacgattcaagtcaaagcatcaaatgcagagcagtcttctgaacagaccaaggcatataatgttaaaaactcaagtagtgcaaccaagcttaatattgaggctaaggaaacaccccaaaccattaatgtcgttactcgtcagcaaattgaagattttggccttaccagtactcgtgatgttttaagaaatacccctggtgtaacagtctctaatcaagaaactgagcgaaccacttatatggctcgtggttttgagatttcaaatatcttgacggatggcgtaggctttcctctttcaggttataactataataatacgaatcctgatacttacttttatgatcgtgtagaagtagttaaaggagctgactcgttaactaatgcctttggcgatccgagtgcaaccatcaataatattcgaaaacgtccaacccaagaatttcaagcaagcggtggtgtaagttacggttcatgggatacgcagcgctatgaagctgacgtatctggctcaattctaccaagtggaaaagtacgtggccgtattatgggctatgaacaaactggtgattcttacctagaccgatattctgcggaaaaaaacggctttgctggtattgttgaagccgatttaacagatagtactttacttaccgccggttatagccaagaacaaaataaacctaatgcaaacaactggggtgcactacctttattagatgccaacggtaaacaaatttcctatgaccgctcatataatccaaaccctgattgggcacattgggataatgagacacaaaatgcttttgttgaattaaagcaaaaacttaatgaccaatggaatgctaaactgacttacaactatcttgatacgaagcataatagccgtcttctctattactatggttatccaaaatctgatgggtccggtgtttctctaacgccttggggtggacaagaacatcaagaaaaacatgctgtagattttaatctcgaagggacctataagctatttaaccgagaacatgaagcaactctaggctacagctatgtacgtaatcatcaacaagataaacaatctacaggaacgattaacgatagtaacgttataaagtcaactactaccgattgggcaagttggacaccgcaatctataacttggtcagatttcacagaagcggctaactataaacaaaatattaactcaatttatgccgcgacacgtttacatcttaatgaagatttaaaacttttacttggtgcaaactatgttcaagctgagagtaaaggcgaaagttatagctcaccaatgtcatatagtgaaagtaaagtttctccatatgttggactaacctataactttacacctgaatatacgggttatatgagttacacctcaattttccgtcctcaaactggtattgataaagacaccaatcaggctttaaaacctattgagggtaaaagctatgaaatgggtgtaaaaagctcatggctagatgaccgcttaacaggaacactttcagtatttaaaactgaacaaaataattaccctttacgtaactcggatggaaatccacttaatcgaaaagtaccaacgagtgatctagaatcgcaaggtgtagaagtcggtctatcaggtcaaattactgataacgtaaatctttctttcggctacgctcaatttagtattaaagatactaaaaatggtggcgaagcaagaacatacaatccaaaccagacacttaacttgctaactacctatactccgccagttttacctaagcttaaagttggtgcaggtttacagtggcaagatgggataaagttatatgactcaaatgtaaacggtacgatcaaacaagatgcatatgctttagtcaatttaatggcaagctatgaagtcaatgatcatattacgcttcaagcaaatggtaataatatttttgacaagaaatatttaaatagtttcccagatgggcaggctttttatggtgccccagccaactatacagttgctgtaaagtttaaatattaa

SEQ ID NO: 114986 - protein, 721 aa, Acinetobacter baumannii
MRIIYIIFNLMNIPPRPFKLSVIACAICYANLTYAQDAQVQALQTIQVKASNAEQSSEQTKAYNVKNSSSATKLNIEAKETPQTINVVTRQQIEDFGLTSTRDVLRNTPGVTVSNQETERTTYMARGFEISNILTDGVGFPLSGYNYNNTNPDTYFYDRVEVVKGADSLTNAFGDPSATINNIRKRPTQEFQASGGVSYGSWDTQRYEADVSGSILPSGKVRGRIMGYEQTGDSYLDRYSAEKNGFAGIVEADLTDSTLLTAGYSQEQNKPNANNWGALPLLDANGKQISYDRSYNPNPDWAHWDNETQNAFVELKQKLNDQWNAKLTYNYLDTKHNSRLLYYYGYPKSDGSGVSLTPWGGQEHQEKHAVDFNLEGTYKLFNREHEATLGYSYVRNHQQDKQSTGTINDSNVIKSTTTDWASWTPQSITWSDFTEAANYKQNINSIYAATRLHLNEDLKLLLGANYVQAESKGESYSSPMSYSESKVSPYVGLTYNFTPEYTGYMSYTSIFRPQTGIDKDTNQALKPIEGKSYEMGVKSSWLDDRLTGTLSVFKTEQNNYPLRNSDGNPLNRKVPTSDLESQGVEVGLSGQITDNVNLSFGYAQFSIKDTKNGGEARTYNPNQTLNLLTTYTPPVLPKLKVGAGLQWQDGIKLYDSNVNGTIKQDAYALVNLMASYEVNDHITLQANGNNIFDKKYLNSFPDGQAFYGAPANYTVAVKFKY

SEQ ID NO: 114987 - DNA, 2175 bp, Salmonella typhimurium LT2
  CDS (1)..(2175): transl_table=11
atgtctttcattcaataccgccgggacaaacaccttccgtccaccgccgcaccgtcgctgttagctatgggtatggcgatggcatttatgcctgccgccttcgcggctgaggataccgttattgtcgaaggcgagacgaccgctgacgccgtaaaccgtgaagaacaggattacagcatgaaaacgaccgcagcgggcaccaaaatgccgatgactcagcgcgatatcccgcagtcggtcagtattgtcagccagcagcgtatggaagaccagcagttgcaaaccctgggcgaggtgatgaccaatacgctggggatcagcggaagtcaggctgactccgatcgcatcagctattactcgcgcgggtttgaaattgacaactatatggttgacggtattccaacgtattttgagtcccgctggaatctgggcgatgcgctaacggataccgcgctgtatgagcgcgtggaggtggttcgcggcgcgaatgggctgatgaccgggaccggtaatccttctgcctcaattaatatgatccgtaaacacgccaccagtcgggagttcaaaggtaacgtctccacagaatacggtagctggaataagcagcgttacgtcatggatctgcaaagtccgctcaccgcagacggtaatgtccgtgggcgcatcgtggcgggttatcagaataatgattcctggctggaccgctataacagtgagaaagcgttcttttccggaattgtcgatgccgatctgggtacaaccaccaacctttcagccggttatgaatatcaaaaaattgatgtcaacagcccaacctggggcggtctgccgcgctggaacaccgatggcagcaaaaatagctatgaccgcgcgcgtagtaccgccccggactgggcttataacaacaaagagataaataaattcttcgtcacgcttaaacagcgttttgccgaaagctggcaggcgaccctgaatgcgacccatactgaggtcaaattcgacagtaaaatgatgtatatcgatgcgttagtcgataaagagacaggtacgctggtgagtccttatggcgcaagctaccccgtggtcggcggtacgggctggaacagcggcaagcgcaaagtagatgccatagatctctttgccgatggcgcttatgagctgtttggccgtcagcacaatatgatgtttggcggcagttatagtaaacagaataaccgctattttagcgcctgggcgaacgtctttccggacgacattggcaacttcagcgcctttaacggtaatttcccccaaacccactgggcgccacaaaatctggcgcaggacgataccacgcatatgaaatcgctgtatgccgctacgcgcatttcgctggccgacccgctgcatctgattctcggcgctcgttataccaactggcgtgttgatacactgacctacagcatggagaaaaaccataccacgccgtatgccgggctgatttatgatatcaacgacaactggtccgcttatgccagttatacctctatctttcagccgcagaataaacgcgacaaagcgggtcaatatctggctccgattaccggtaataactatgaagcgggtctgaagtccgactggatgaacagtcgcctcaccaccacgttgtccgtgttccgcattgagcagaataacgtcgctcaggcaaccactattcccatccctggcagtaatggggagtttgcctggaagtctactgacggaacggtgagcaaaggcgtcgaatttgaagtgaacggcgcaattaccgataactggcagatgactttcggggctacccggtatgttgccgaggacaatgaaggtaacgccgtgaaccctaatcttccgcgcaccagcgtgaagttattcacccgctatcgtctgccggcgataccggagctgacggtcggcggcggcgtgaactggcagaatcgggtttacaaagataccacgacgccgtacggcactttccgcgccgaacagggcagctatgcgctggtcgatctgtttacccgctatcaggtgacgaaaaatttctccgtacagggaaacatcaacaacctgtttgataaaacctacgacaccaatattgatggttccattgtttacggcgcaccgcgtaacgtcagcctcaccgccaattatcagttctga

SEQ ID NO: 114988 - protein, 724 aa, Salmonella typhimurium LT2
MSFIQYRRDKHLPSTAAPSLLAMGMAMAFMPAAFAAEDTVIVEGETTADAVNREEQDYSMKTTAAGTKMPMTQRDIPQSVSIVSQQRMEDQQLQTLGEVMTNTLGISGSQADSDRISYYSRGFEIDNYMVDGIPTYFESRWNLGDALTDTALYERVEVVRGANGLMTGTGNPSASINMIRKHATSREFKGNVSTEYGSWNKQRYVMDLQSPLTADGNVRGRIVAGYQNNDSWLDRYNSEKAFFSGIVDADLGTTTNLSAGYEYQKIDVNSPTWGGLPRWNTDGSKNSYDRARSTAPDWAYNNKEINKFFVTLKQRFAESWQATLNATHTEVKFDSKMMYIDALVDKETGTLVSPYGASYPVVGGTGWNSGKRKVDAIDLFADGAYELFGRQHNMMFGGSYSKQNNRYFSAWANVFPDDIGNFSAFNGNFPQTHWAPQNLAQDDTTHMKSLYAATRISLADPLHLILGARYTNWRVDTLTYSMEKNHTTPYAGLIYDINDNWSAYASYTSIFQPQNKRDKAGQYLAPITGNNYEAGLKSDWMNSRLTTTLSVFRIEQNNVAQATTIPIPGSNGEFAWKSTDGTVSKGVEFEVNGAITDNWQMTFGATRYVAEDNEGNAVNPNLPRTSVKLFTRYRLPAIPELTVGGGVNWQNRVYKDTTTPYGTFRAEQGSYALVDLFTRYQVTKNFSVQGNINNLFDKTYDTNIDGSIVYGAPRNVSLTANYQF

SEQ ID NO: 114989 - DNA, 2187 bp, Xanthomonas axonopodis pv. citri str. 306
  CDS (1)..(2187): transl_table=11
atgaatcgtcctaccgtaatgcgtctccttcccattgcgctgcgcccgcgcgcgctgtcgcatgcggtgtttgccgcgctgtgcaccctgtcggcagggcaggcgttggccgaaacgccggccggcgacgcggaggtcaccaccctggatcggctcaatgtgcagggcgagcaggtcaagggctacacggtggaaaagaccaccgccggcactcggatgaacctgtcgctgcgcgagattccgcagtcggtcacggtggtcacgcgcgatcgcatggacgaccagaacctgcagagcatcaccgatgtgctcaacaacgttaccggcatttcggttgcgcagagcgatagcgagcggcttgagttctatgcgcgcgggttctacatcgacaattaccagttcgacggcattccggcctacatggagcaggcctggagctacggcgattcggcgctggacgtggcgctgtacgaccgcgtggaagtggtgcgcggcgcgaccggcctgttgaccggttcgggtaatccgtcggcctcgatcaacctggtgcgcaagcatgcggtcagccgcgatttcaccggcaccgtatcggtgggcggcggcgacttcaacaagacccgcagcgtggccgacgtcacggtgccgttgagccctgaaggtaccgtgcgcgcgcgtgtggtgggcgtataccaggacggcgaatcggacatggaccgctacagcctgcgcaagaagatcggctcggcgatcatcgatgccgacctcaccgacagcacgttgctgagcgtgggctacgaataccagaagaaggaatcggatgatgtcacctggggtggcttcccgctgttctacagcgacggcacgcgtaccgactacaagcgttcgttcaatccggcggccgactggacgttctgggacacgcgtctgcagcgcaccttcgccagcctgcagcagagcttcgacaacggttggaccctcaaggccaatgtgagccacgaaaagaccgaagcggcgaatcatctgttttatccgtactacaccattttcggattcgatcgcagtaccggtgccggcgtggtgccgtattcgggcaactaccagacagagcgcaaggccgatggcgccgacgtctatgcggagggcccgttccggctgttcggtcgcgaacatcagttggtcgccggcgccagctacaaccgacgcgagtacgtcaacaacggcacctacgatttccccgcgccgctggacagctacctcggctggaacggcgcgtatccggagcccaattggagcccgcgcacggtacagagcgaaggcaccatcacgcagaaagccgcctatgtggctgcgcgtttctcgctggccgagccgctgaccctgctggtgggggcccgctataccgactggcagatcgatggccgcaactttgatttcaccacccagcagctgctgccgttcgccgacacccagaccgaagtcactccgtacgccggactggtgtacgacatcgacgatgtgtggtcgacctacgtcagctacaccgagatcttcaacccgcagaccttgcgcgatgccaacggcggctacctggatccgctgagcggcaagggctacgaagccggcgtcaaggcagcgtggttcgacgatcagctcaacgcttcgcttgcgttgttccgtatcgagcaggacaacctcggggtgacgaccggcggcttcgttccgggcagcagcgaatcggcgtacgaagcggccaacggcgtcgtcagcgaaggcttcgatttcgagctgtccggccgcctcacccagggctggaatgccaccttcggcgcttcccactacactgcgcgcgacgacagcggcacctcgatcaatacgcacctgccacgcaccaccatcaagttgttcagcagctacaccccgcagggcgcatggagcgatctgaccgtaggcggtggcgtcaactggcagaaccgttcgtactacgtggacccggtgtacggcaacttccagcagagtgcctacgccctggtcagcgcgttcgcgcgctatcgcctgtcgccgcagttctcggtgcagctcaacgtggacaacttgctcgacaagcgctattacgcgcagttcaacggcggttatggcgcatggggcgcatcgcgtaacggcatgctgactttcaattacacgttctga

SEQ ID NO: 114990 - protein, 728 aa, Xanthomonas axonopodis pv. citri str. 306
MNRPTVMRLLPIALRPRALSHAVFAALCTLSAGQALAETPAGDAEVTTLDRLNVQGEQVKGYTVEKTTAGTRMNLSLREIPQSVTVVTRDRMDDQNLQSITDVLNNVTGISVAQSDSERLEFYARGFYIDNYQFDGIPAYMEQAWSYGDSALDVALYDRVEVVRGATGLLTGSGNPSASINLVRKHAVSRDFTGTVSVGGGDFNKTRSVADVTVPLSPEGTVRARVVGVYQDGESDMDRYSLRKKIGSAIIDADLTDSTLLSVGYEYQKKESDDVTWGGFPLFYSDGTRTDYKRSFNPAADWTFWDTRLQRTFASLQQSFDNGWTLKANVSHEKTEAANHLFYPYYTIFGFDRSTGAGVVPYSGNYQTERKADGADVYAEGPFRLFGREHQLVAGASYNRREYVNNGTYDFPAPLDSYLGWNGAYPEPNWSPRTVQSEGTITQKAAYVAARFSLAEPLTLLVGARYTDWQIDGRNFDFTTQQLLPFADTQTEVTPYAGLVYDIDDVWSTYVSYTEIFNPQTLRDANGGYLDPLSGKGYEAGVKAAWFDDQLNASLALFRIEQDNLGVTTGGFVPGSSESAYEAANGVVSEGFDFELSGRLTQGWNATFGASHYTARDDSGTSINTHLPRTTIKLFSSYTPQGAWSDLTVGGGVNWQNRSYYVDPVYGNFQQSAYALVSAFARYRLSPQFSVQLNVDNLLDKRYYAQFNGGYGAWGASRNGMLTFNYTF

SEQ ID NO: 114991 - DNA, 2196 bp, Xanthomonas axonopodis pv. citri str. 306
  CDS (1)..(2196): transl_table=11
atgtcccatcgtatcgtccctgcgcgcgcgctgacgcgtgcggatatccgttcgccgcagctcccgctggcgtactccctgcttgcgcttgcgctggcctgcgcatggccattggcggctgcggcgcaatcgagcacgcgcgacccggtcgatctggaccgcctgcagatcgaggcacaccgcggcgccgcgaccgaaggcagcgactcctacaccgccgatgtggcgcgcagttcgaccaagctggagctgtcgctgcgcgagacgccgcagtcggtggtggtggtgacccgccagcagatcgtcgaccgtaacctgcaatcgctgcaggacgtcaccgacaccgtggccggcttcaactcgccgacctgggacaccgagcgcacctacatcactgcgcgcggcttcgaagtggactactaccgcatcgacggcattcccaccgactacaccggcgacgtgcagcagaacatggcgatctacgaccgggtggaaatcatccgcggcgccaacggcctgaccaccggcgcgggcagtccggccgcgtcgatcgacctggtgcgcaagcatgccgacagcgatgtgttcaccggtcgggtcgatctgtcggcagggcgttgggaccgctatcgcggcaccgtcgacctgcaatcgcccttgaacgccgccggcaacgtgcgtggacgggtggttgccagtgacgaggacaagcagtcgttccgcgattactacagcaagcaatcgtcgctgttctacggcatcgtcgatgcggatttcagcgatgccacccgcggctacatcggcgtcaacaagcagcgcaacgacggccgcggcaccacctggggcggcgtgccggcgtatttcagcgacggtagccgcaccgattttgcgcgatcggattcgttcacgccgcgctgggcgcgcggcgtggccgacaccaccaatgcgtttgccggcctgacccatcgcttcgacaacggtgcgcagctgcacgtggaatattcgcatcagcggttcgaagccgattggaagtcggtgctgttcggctacttcgattacccggaccgcgagaccggcctgggcctttccaacacttttggcgggcgctatcccgcaatcactgcgcaaaacagcctggatgcctacctcagcgtgccgttgacctggtggggccgcaatcacgaactggtcgccggtgccacctggatgaaccgcaacgtgcgcagctggtccaacgggccgcagccgccgcaggtgctgacggccgaaagcgtctacgcctggaccggcagcatggcgcagccgcaatggacgccgctggtgaagggcgaagaacgcgacgtgcgccaggtggccgcctacgctgccggccgcttcagcctgaccgacgcgctcacggccatcgtcggcgcacgcgtcaccgactggaagaacaccgatcagctggtgccggccaacacctacgagcgccgtggtcgcaccacgccgtacgccggcctgatcctggacgtggacgaccaccattcgctctacgccagctacaccggcatcttcaagccgcaaaacaatcgcgaccgcagcgggcgctatctggcaccgctggaaggcaacagctacgaggtcggtgccaagggcgagtacctcggcggccagctcaacgcggcgctggcgttgttccgtatcgagcaggacaacctggcggtcaacgaccccggacaactcgtgcccggcaccaccaatcaggccttcctggccgcgaagggcacggtcagccagggggtggaattccagctcgatgggcagctttccgagcagtggcggatcgcgttcggctttgcccagttcgatgccaacgatgccagcggcgtcgacgtcaatccgaccagcccgcgtcgcgaggctaccctgttcgccagttggcagaccggcccatggcgcgtgggcggtggcctgagctggcagtcggccatccacgaattgatgtccgggccactgggcagcacgcagcggctgactcagggcagcgtggtgttggccaacgccatggcacgctacgacatcaaccaggcatggtcggcgcagctcaacgtgcgcaacctgttcgaccgcaagtactacgccaacatcgtctatcaaagccagttgatctacggcgacccgcgcgatgtggagctgacgctgtcctggaagttctga

SEQ ID NO: 114992 - protein, 731 aa, Xanthomonas axonopodis pv. citri str. 306
MSHRIVPARALTRADIRSPQLPLAYSLLALALACAWPLAAAAQSSTRDPVDLDRLQIEAHRGAATEGSDSYTADVARSSTKLELSLRETPQSVVVVTRQQIVDRNLQSLQDVTDTVAGFNSPTWDTERTYITARGFEVDYYRIDGIPTDYTGDVQQNMAIYDRVEIIRGANGLTTGAGSPAASIDLVRKHADSDVFTGRVDLSAGRWDRYRGTVDLQSPLNAAGNVRGRVVASDEDKQSFRDYYSKQSSLFYGIVDADFSDATRGYIGVNKQRNDGRGTTWGGVPAYFSDGSRTDFARSDSFTPRWARGVADTTNAFAGLTHRFDNGAQLHVEYSHQRFEADWKSVLFGYFDYPDRETGLGLSNTFGGRYPAITAQNSLDAYLSVPLTWWGRNHELVAGATWMNRNVRSWSNGPQPPQVLTAESVYAWTGSMAQPQWTPLVKGEERDVRQVAAYAAGRFSLTDALTAIVGARVTDWKNTDQLVPANTYERRGRTTPYAGLILDVDDHHSLYASYTGIFKPQNNRDRSGRYLAPLEGNSYEVGAKGEYLGGQLNAALALFRIEQDNLAVNDPGQLVPGTTNQAFLAAKGTVSQGVEFQLDGQLSEQWRIAFGFAQFDANDASGVDVNPTSPRREATLFASWQTGPWRVGGGLSWQSAIHELMSGPLGSTQRLTQGSVVLANAMARYDINQAWSAQLNVRNLFDRKYYANIVYQSQLIYGDPRDVELTLSWKF

SEQ ID NO: 114993 - DNA, 2298 bp, Pseudomonas putida KT2440
  CDS (1)..(2298): transl_table=11
atgaatccccaaagcatcacgccagtgttcatccccttcagtcaaagtggcaattgcctcaagccgctggccttctgcattgccgtcgccatcagcggtggtgcagtggctgccgacggcaaaccccttgaactcgacgccacacagatcgaagacagcgcagtactgcctgccgacgatgccggccagttgggctatacggtcgagagcacccgcagctccactggcctggcactgacgccacggcagacaccgcaatcggttaccaccatcacccgccagcagatggatgaccgcgacatccacaccatcgagcaggcattggaaaccgccccaggcgtaacggccaacaagtccgaggtgggtgggcgcaccgactaccgcgcgcgtggttactcgatcagcaactggaaggtcgatggcctgcagacccagggcggctccgatttcagtggcagcggcaatgcgctgaacatggacctgtacgaacgcatcgacatcgtgcgcggcgccaacggcctgctgggcggcaccggcgacccctcggccaccgtcaacctgatccgcaaggcaccgaccaaaaccttcggcggcagcgcttatgccacttatggcagctgggacaagcgtcgtctgggtgctgacttgaacctgccgctgtccgaagatggccgcctgcgttcgcgcttcgtgatgacccagcaggatgccaactcgttccgcgacaaccagtccgaacgttcccgcgccgcgttggccaatttcgagttcgacctggacgacgccaccaccctcggcgccggttaccagtatgagtacaacaaggtcgtgggtggcggctggggcgcgaacatcccgatctggtaccgcgacggcagcaagaccgacttgccgcgcagcaccaacctggtgcccagctggagctttggcgagtacaccacccgcactgcgttcggttcgctcgagcatcgcttcgacaacgactggaccctggacctgaaagccgcccaggccaccaccgaagccctgaaccatcgcggccttgccaaggtgaattcggccgggcgcggcagctacggcggctattgggaccaggacggcagcggcgcagtactgaatggtttgcacagctccagcgacaccacccagcagtcggcgcagatcgacctgtctggcccgttccagctgtttggccgcacccaccaggcgatggtcggctacaacgacagccgcaccgtcggctggtcgccccagtacacctgcaccatggtcggcgacggcatgaccagcgcgcctgcactgggttgccagttccgcgccaacaacggcttcccggtgaccgactggcacaatggcgtggatgacgactacgacctcatcgcctcgcgcaccggccttcacagcaagaccaccacccgtctgcagggcatgtacgccgccacccgcctgagcatcaccgacccgttgtcggtgatcgttggcgtgcgcaccagcaactattcctcggtcacccgcagcgtggccggcgagcgcagcagccaggaagaaaacggcatcgtcaccccttacctgggcgcggtgtatgacctcaatgtcaactactcggtatacgccagctacaccgatatcttcacgccgcaaacgtctgaaaccagcagcggcagcaaggtcgagccgattcgtgggcaaagctacgagacaggtatcaagggtgagtggttcgatggccgcctgaacgcctcggcggcgtacttccgcaccaagcaggaaaacaaggccgtgttggacggcgacctgaccaccccgactggcggcagcgcctacaaggccggctccgggcaggaaaccgatggtatcgacttggaagtcgcaggcgccctgacccccaactggaacgtctacgccggttacacctacctgcactttcgccgcgtcgacagcgacggccgcagcgacccgtcgcacttgttcaaggcctccaccacctaccgcctgagcggcccgctcgaccgcctgaccctgggcgccggcgtgactgcgcagaccaacatccgcgccatctccagccctgctggccagcctactaacggtgtgagcaatggtgccactgacgtgaactggtccggttatgccatctggaatgccatggccaagtaccagctgaccgacgacaccagcgtcagcctccacgccaacaacctgttcgacaagcactactacagccagtacgggttctatgccggggcgatttatggcgacccgcgtaacctgtcgttgacggtaagcaccgcgttctga

SEQ ID NO: 114994 - protein, 765 aa, Pseudomonas putida KT2440
MNPQSITPVFIPFSQSGNCLKPLAFCIAVAISGGAVAADGKPLELDATQIEDSAVLPADDAGQLGYTVESTRSSTGLALTPRQTPQSVTTITRQQMDDRDIHTIEQALETAPGVTANKSEVGGRTDYRARGYSISNWKVDGLQTQGGSDFSGSGNALNMDLYERIDIVRGANGLLGGTGDPSATVNLIRKAPTKTFGGSAYATYGSWDKRRLGADLNLPLSEDGRLRSRFVMTQQDANSFRDNQSERSRAALANFEFDLDDATTLGAGYQYEYNKVVGGGWGANIPIWYRDGSKTDLPRSTNLVPSWSFGEYTTRTAFGSLEHRFDNDWTLDLKAAQATTEALNHRGLAKVNSAGRGSYGGYWDQDGSGAVLNGLHSSSDTTQQSAQIDLSGPFQLFGRTHQAMVGYNDSRTVGWSPQYTCTMVGDGMTSAPALGCQFRANNGFPVTDWHNGVDDDYDLIASRTGLHSKTTTRLQGMYAATRLSITDPLSVIVGVRTSNYSSVTRSVAGERSSQEENGIVTPYLGAVYDLNVNYSVYASYTDIFTPQTSETSSGSKVEPIRGQSYETGIKGEWFDGRLNASAAYFRTKQENKAVLDGDLTTPTGGSAYKAGSGQETDGIDLEVAGALTPNWNVYAGYTYLHFRRVDSDGRSDPSHLFKASTTYRLSGPLDRLTLGAGVTAQTNIRAISSPAGQPTNGVSNGATDVNWSGYAIWNAMAKYQLTDDTSVSLHANNLFDKHYYSQYGFYAGAIYGDPRNLSLTVSTAF

SEQ ID NO: 114995 - DNA, 2169 bp, Pseudomonas syringae pv. tomato str. DC3000
  CDS (1)..(2169): transl_table=11
atgccggggcaacaatcgcaacaccgtattcgtttcactcctgccctgctgacaatgggcatctggatagcaaccactcaggcggcttatgctgccgatacgcagggcgccgaagcaccgcccgcgacgaccatggaactgggtgctaccgaaatcagcagtgaccaactcggcgccaccaccgagggcagtggttcctacaccacgggtgccatgcagacggctaccaaattgccgctgaccatgcgtgaaacgccgcaggcggtgaccgtcgtcacccggcaacgcatggacgatcaggccatgaccagcatcaacgacgtggtcaggtatacgcccggtctgttcctcgatcagtccagcgggcccggccgtcaaacctacacgtcccgcggtttcgacatcgacaacatcatgtacgacggcctgcccgcctcctactcgggctatacggcaggcgtgcagcccaatctggccatgttcgaccatgttgaagtgatcagaggcgctaccggcctgacgacaggctctggcaatccatcggcagctatcaatatggtgcgcaagcgcccgaccgccgatccgcaggtctccctcaccggcgctgccggcagttgggacgattaccgtggcgtattcgacgcctccggcccactgaacgacagccgcacggtgcgtggccggatagtcggctcctaccaggatgcacacagcttccgtgaccaggaaaaaagcgatcacggcgtgttctatggcgtaatcgaagccgacctgacggatgcgaccacggcgacctttggcctgtctcgtcaggaggatcaaaccaactttttctggggcagcctgccgcttggcgccgatggccaccacctgaacctgtcccgctcgacctaccccggcacggactgggaaaacaagaaaatccagatcgacaccgtgttcggcgaacttgaacatcgtttcgacaacgactggaaactgcgcgttgcgggctcgagttccacgctggacggcgtgttctcgggcacctacctctctcgctacaacggtccgctggagaccacggcctatcagtccaggcccgatgaaaagcaggctgcattcgatacctacgccagcggcccggtccaagcgtttggccgcactcatgaagtggtggtcggcaccagcaggcgcgtctacgacaagaccagcaaggaatacagcccctacgacaccggactccctatcggcgcgccgaagccggactttgtccgcaacggtaaaactcacaacatcgccacccaggacgcaatctacctcaccacgcgcctgagcctggcggacccgttgaccctgattctcggtggtcgtctggactggtacgactacgacgaccgctcaggcgacgaggacttcaaggtcacccgcaacctgacacgttacgcgggcctgatctacaaactggatgaccagtactccctgtacgccagctacaccgatatcttcaacccgcagaattatcaggacctgtccggtaaagtgctcgaccccgtggtgggcaagaactatgaggtcggtatcaaaggcgagtatttcaacggcgctctcaacgccagccttgcggtgttccagatcgatcaggaaaacctcaagaccgaagcgccaacccaggcaggctgcgcggtactcacttgctacgatgccgcaggcctggtgcgcagtcagggcatcgacatggagctacagggtgcgctgaccgagaactggcaagtcggggcgggatacacctacgcccgcacccactacctcaaggatttcgatccggcgaaagaaaatcagcgcttcgacaccgacacgcctgagcatttgttcaaattttcgacggtctatcgcctgcaaggcgcactggaaaaaatgcgcgttggcggcaacgtctactggcagagccgcctgtacaacgacattgcccttaccgacgccagctaccgtctggaacagggcagttatgccgtcgcagacttgatggccgggtatcaggtgaacaagcatctggacctgcaactgaacgccaacaacatcttcgaccgtacctactacaccgcgattggcgccagcagtgtctggggctctaccgacgtctacggcaacccgcgcagctatgcactgacggcgaagtatagtttctga

SEQ ID NO: 114996 - protein, 722 aa, Pseudomonas syringae pv. tomato str. DC3000
MPGQQSQHRIRFTPALLTMGIWIATTQAAYAADTQGAEAPPATTMELGATEISSDQLGATTEGSGSYTTGAMQTATKLPLTMRETPQAVTVVTRQRMDDQAMTSINDVVRYTPGLFLDQSSGPGRQTYTSRGFDIDNIMYDGLPASYSGYTAGVQPNLAMFDHVEVIRGATGLTTGSGNPSAAINMVRKRPTADPQVSLTGAAGSWDDYRGVFDASGPLNDSRTVRGRIVGSYQDAHSFRDQEKSDHGVFYGVIEADLTDATTATFGLSRQEDQTNFFWGSLPLGADGHHLNLSRSTYPGTDWENKKIQIDTVFGELEHRFDNDWKLRVAGSSSTLDGVFSGTYLSRYNGPLETTAYQSRPDEKQAAFDTYASGPVQAFGRTHEVVVGTSRRVYDKTSKEYSPYDTGLPIGAPKPDFVRNGKTHNIATQDAIYLTTRLSLADPLTLILGGRLDWYDYDDRSGDEDFKVTRNLTRYAGLIYKLDDQYSLYASYTDIFNPQNYQDLSGKVLDPVVGKNYEVGIKGEYFNGALNASLAVFQIDQENLKTEAPTQAGCAVLTCYDAAGLVRSQGIDMELQGALTENWQVGAGYTYARTHYLKDFDPAKENQRFDTDTPEHLFKFSTVYRLQGALEKMRVGGNVYWQSRLYNDIALTDASYRLEQGSYAVADLMAGYQVNKHLDLQLNANNIFDRTYYTAIGASSVWGSTDVYGNPRSYALTAKYSF

SEQ ID NO: 114997 - DNA, 2502 bp, Nitrosomonas europaea ATCC 19718
  CDS (1)..(2502): transl_table=11
atgatcatcatcaaacattattttttattaccatcatttcaacgtttgtggaacggcagggcgatcgcgcgcctgttcctgatcgtgatgctggctgtatcgtacctgaccatgatatcgccagtcagtgcgcagcaatccggggttgtcaggcattaccacattccagccggttcactgactactgtactcaatgatttcggtcgggaagcaggcattttgctgtcattctcgacagagctgaccaacagtctgcaaagcgcaggattgaatggtaactatacggctcacgacggattatctgctttactggctggtagcgggctggaagcagtaagaacggctgacggcagctataccctgagaggatcgtctgccactgtttctcaaccttcagagggggcgttgacattgccggcaatgactgtcatgacatccgggatagttgatccgacgactgaggacactggctcttatacgaccggttcgaccaatacttctacccgtttgccattgactctgcgcgaaacaccccagtctgtcagtgtcatgacacgccagcgtatggaagatcaaggattgacacaactttctgatgtcgtgaatcagaccaccgggatggtattccagtcaggcgggagcagtcagtccgattccgccactttttatgcgcgcgggtttgctgtcgataactatcagatcgatggcgtgccgcagatttacaataactacaaccgtatttttcagaccaatgatatggcgatcttcgatcgtgtcgagatcgtgcggggcgctaatggcttgatgaatagtgtcggcacacccggtgccagtatcaatctgatacgcaagcgtccgacagatacattccgggccgcgacgagattcgaaggaggaaactggggatatcgccgagccgaaggggatatttccatgccactgattccatcgggaaaagtgcgcggcaggctggtgggtgtgctgaataccagcgattcctatatcgatcgtgaggaacagaaaagatcgctgctttatgggattgtcgaggcagatctgacaccttccacactggcaacggccggtttcatgttccaggagcaggatcaaaccgcaaatgcaagaggcgctttaccggctttctactctgacgggacacgcactacctggggacgatccgataccgcggccgcaaactgggcttattccaaaaggaatggtgagatggtattcgtgacactggatcaccgcttcaacgaggactggctggcgagaatatcgtggaatcgtacagtcactaaatacgatgaagtactgggttatgcgctgggtggttatcctgataaagcaaccggtgcgggagtcaacctctgggccggtcgctggaaaggcgcgcctacacaaaatacactcgatgtttacaccatgggttcattttctctgttcggacgcaagcatgatctgattgccgggaccctgttctcgttcacgaaagatcacacacctacttaccggctatggtttttcgacaactggagcaactcgatcggtaatattttcacctgggatggcaatacacccactatgccacccaccaacgatacgcctatcggtgagtggggtcaggatgagcaggttatcagcggctatgcgacaggccgattcagattactcgattcattgtccctgattgggggagccagagtaacgcactggaagttcaagcgtttttccgaaaactatcagactggcaacataacacggatcaattccaatcaggatccggaaattattccatttgcagggattacctacgattttctcgataactggacggtttatgccagctataccagtattttcaagccacagacggtacgcagcgaaaatggtgcatttatcgatccattgctgggcaacagttatgaggcaggtatcaaggcggcattctttgataatcgtttgaatctgcatggtgcagtctacagaattcagcaggataacctcgccgttgcactgccgaataatgtactggcaccggatggttcaaccgcttaccggtcagtatccggggccagaaccgatggtttcgagatggaactggccggtatgctgacccggaactggcaggcatcagtcgggtttgctcataacgtaacggaagaccgggataaagtgaagctgaatacccaggttccccggaatacgttcaaactgttttccacttaccgttttccgactgttgcagaaggtttgacgatcggtggtggcgtacgctggcagaatcgcatctatcgtaatgaccagggtcctgccagagtcgagatttcccagggcggttatgcggtggttgatctgatggcgcgcctcgagattaccaaaatggtcgctttatccgccaatctctacaatctcttcgatgagaagtattaccaaacggtaccggcgagttactacggcgcaccgcgtaatgttcgtgttgcactcaatataagattctga

SEQ ID NO: 114998 - protein, 833 aa, Nitrosomonas europaea ATCC 19718
MIIIKHYFLLPSFQRLWNGRAIARLFLIVMLAVSYLTMISPVSAQQSGVVRHYHIPAGSLTTVLNDFGREAGILLSFSTELTNSLQSAGLNGNYTAHDGLSALLAGSGLEAVRTADGSYTLRGSSATVSQPSEGALTLPAMTVMTSGIVDPTTEDTGSYTTGSTNTSTRLPLTLRETPQSVSVMTRQRMEDQGLTQLSDVVNQTTGMVFQSGGSSQSDSATFYARGFAVDNYQIDGVPQIYNNYNRIFQTNDMAIFDRVEIVRGANGLMNSVGTPGASINLIRKRPTDTFRAATRFEGGNWGYRRAEGDISMPLIPSGKVRGRLVGVLNTSDSYIDREEQKRSLLYGIVEADLTPSTLATAGFMFQEQDQTANARGALPAFYSDGTRTTWGRSDTAAANWAYSKRNGEMVFVTLDHRFNEDWLARISWNRTVTKYDEVLGYALGGYPDKATGAGVNLWAGRWKGAPTQNTLDVYTMGSFSLFGRKHDLIAGTLFSFTKDHTPTYRLWFFDNWSNSIGNIFTWDGNTPTMPPTNDTPIGEWGQDEQVISGYATGRFRLLDSLSLIGGARVTHWKFKRFSENYQTGNITRINSNQDPEIIPFAGITYDFLDNWTVYASYTSIFKPQTVRSENGAFIDPLLGNSYEAGIKAAFFDNRLNLHGAVYRIQQDNLAVALPNNVLAPDGSTAYRSVSGARTDGFEMELAGMLTRNWQASVGFAHNVTEDRDKVKLNTQVPRNTFKLFSTYRFPTVAEGLTIGGGVRWQNRIYRNDQGPARVEISQGGYAVVDLMARLEITKMVALSANLYNLFDEKYYQTVPASYYGAPRNVRVALNIRF

SEQ ID NO: 114999 - DNA, 2406 bp, Nitrosomonas europaea ATCC 19718
  CDS (1)..(2406): transl_table=11
atgccgcgactcaccccgctcgccctggccgctgcactggccttgccgtcattggtattcatcgtttcgccagctcatgcccagacgtctaccgctatgcctatctctctgcccgcgcagtcactgggcgccgcgctgaatgagctggcctggcaggcaggcttgcagttgatggtgcatcccgatctggtggaagataagcaggcgccagccgtatcgggcagcctgacgccacggcaggcgctggacagggtgctggccggcagcggactgaaggcggatatccaggggacggaagtcatcatccgacggatgcctgcagcggagtccggcgtgactacgctggtcgagatgaaggtgacggcgcagggcatggatgatggtaccaccgaaggcacgggcagctacaccacgcgcagcatgggcacggtcaccgggctggtgctgtcgccgcgtgaaacaccgcaatcggtcagcgtcatcacgcatcagcgtatcgaggatcaaaggctggtgtcagtggccgaggcgttgcgcaacgcacccggtgtttcatacaaggcgattgatcgtggtcgtggcggcactaccgtgcgcggcttcagccttaccaatttccagatcgacggcgtaccgacgatcctcgatgccaatatggacatcgacaacgccagcatcgcgatctacgaccgtatcgaggtggtacgcggcgccaccggcttgcgctccggcgcgggcgatccgggggcgactatcaacctcgtgcgcaagcatgcaaacaacaaggtgttcaccggcaatctcatgttggaggcaggttcctggaaccgctacggcgccacggccgacctcaccgcaccgttgaataccgacggttcggtgcgtgcccgcgtggtggccaattaccgcgatcagggcggctttatcgatttcgagcagactcgaactacggtgttctacggcattgtcgatgctgacctcggcaaccgcacgcgtctgagcctgggcttcagcgatcagcgcaacgagcgcaagggaacctattggggtggcctgccggtctggtatgctgacggcacacgtactgagtgggaccgttccaagactacggcggccaaatggcatcggtgggatgatcacttgcagagcgtgttcgcgtcgctcgatcattacttcgatggcggctggtcgattcaggtcaacgcccagtacctgcgcgccaaggaagtcaccaatctgctttggttcggaggactgccagatcgcactaccggcctgggcatgagtgcgtggccatactactaccggggtaagccgcgacaataccagatcaatatccaggctggcggtcccttcgagctgttcggtcgcacgcatgaactgatggttggcgcggtgcacatgcacggcaagagcggctgggattcggcggatcagatcggcgaccccgcgccggtcggcgattttaatcactgggacggctcctatcccgagccggtttatggcccgacgtatgtcggtcgtggacagaccgaaacccagtcagccgcctacgctgccgcgcgcttgaacttgagcgacccgctcaagctgatcgtcggcacacgcgtcacccgcttcgaccgcgacatcaccgccatgtggggggcacccccctacgaaatgcgtgaatctgccgtcttcacgccgtatcttggcgtgttgtacgacctgagcacccatctgaccgcctatgccggctacaccagcatcttctcgccacagaacttgcgcgaccgcaacggcggctatctcgatccgctcgaaggccagagctatgaagcaggcctcaaatccgagttctttgatggcaatctctacgcctcggcatccgtgtttcgcattcagcaggagaacttcggcgtgcttgatggcggcacgctggtgcccggcaccaccgagtgggcataccgtgccgaaaaaggggtgaagagcgaaggctacgaactggaaatcacgggcaggattctcccgcgctgggatgtcagcctgagctggacacagttctcggccaagaaccgtgaaggtgagcgcgttgcattccggtatccgtcacgtatgctcaagctgttcaccaagtatgatctgtctggtgccttaaacggcctcagcatcggtggcaatgttgaatggcagaacgacatgcctgactggcgtgcgaaccctgccaccggcctgcaagagaacgtcggccagtcggctttcgccaccgtggggctgatggcgcgctaccagctcaacaaatcactgtcagtgcaggccaacatctataacctgttcgacaagcaatactacgagggttcgtggggaaccttcacctatggcgagccgcgccggattttggccaacctgacgtaccggttctga

SEQ ID NO: 115000 - protein, 801 aa, Nitrosomonas europaea ATCC 19718
MPRLTPLALAAALALPSLVFIVSPAHAQTSTAMPISLPAQSLGAALNELAWQAGLQLMVHPDLVEDKQAPAVSGSLTPRQALDRVLAGSGLKADIQGTEVIIRRMPAAESGVTTLVEMKVTAQGMDDGTTEGTGSYTTRSMGTVTGLVLSPRETPQSVSVITHQRIEDQRLVSVAEALRNAPGVSYKAIDRGRGGTTVRGFSLTNFQIDGVPTILDANMDIDNASIAIYDRIEVVRGATGLRSGAGDPGATINLVRKHANNKVFTGNLMLEAGSWNRYGATADLTAPLNTDGSVRARVVANYRDQGGFIDFEQTRTTVFYGIVDADLGNRTRLSLGFSDQRNERKGTYWGGLPVWYADGTRTEWDRSKTTAAKWHRWDDHLQSVFASLDHYFDGGWSIQVNAQYLRAKEVTNLLWFGGLPDRTTGLGMSAWPYYYRGKPRQYQINIQAGGPFELFGRTHELMVGAVHMHGKSGWDSADQIGDPAPVGDFNHWDGSYPEPVYGPTYVGRGQTETQSAAYAAARLNLSDPLKLIVGTRVTRFDRDITAMWGAPPYEMRESAVFTPYLGVLYDLSTHLTAYAGYTSIFSPQNLRDRNGGYLDPLEGQSYEAGLKSEFFDGNLYASASVFRIQQENFGVLDGGTLVPGTTEWAYRAEKGVKSEGYELEITGRILPRWDVSLSWTQFSAKNREGERVAFRYPSRMLKLFTKYDLSGALNGLSIGGNVEWQNDMPDWRANPATGLQENVGQSAFATVGLMARYQLNKSLSVQANIYNLFDKQYYEGSWGTFTYGEPRRILANLTYRF

SEQ ID NO: 115001 - DNA, 2205 bp, Bordetella bronchiseptica RB50
  CDS (1)..(2205): transl_table=11
atgccagatcccgctcacttctccccggcgcattcgcgccgtttgcgtttctttgcccacgttctgcacctgctcggcgcactctttacccagcacgccctggcccaggaagcgcgaacggggaacgatatcgctcagttgcccgccataagcgtcacgggtcgtgagatttccgacctcaccgagggcacaaacgcctacacaaccgaggccatgagcacggccacgggcctgacactctcgccacgcgaaacaccacaatccgtcagtgtggtcacccgacagcagatcgaggatcagggcctcaccgacaccggcgccatcctggcgaccgcgccagggatttccgtcacgcgcagcgacagcaaccgctattcattctcggcccgcggcttcaccatcgacaacttccagtttgacggcctggtatcgcccatcctgagccaatggaactatggttcgaccgatatggacgccgccatctacgatcacgtggaaatcgtacgtggcgccacaggcctgatgacaggctcgggcaatccttcagccgccgtgaacttcgtgcgcaagcgtcccttgcgtgagttcgcggctacgttcaatgcgagtgtcggcagctgggactatgtgcgcggcgatgccgacatctccgtgcccatcacggaagacggcagaatacggtcacgcctggtggccgcctacagtcagggcgacagctatgtgcactttttagatacgcgccggcgcacattctatggcgtggtcagcgccgatctgacgccggatacggtgctgacgaccagcgtggagtaccagcacaaccacagcaacgggtttggcagcggctttccgctgttctatagcgacggttcgcgcaccgatttcaaccgctcggtggccaacaacgctccctgggcccggcaggataccgaagccaccacctatttcgtggacctcacgcaccgcttcaccaatgactggaagctgcgcgcggcctacagccacactgatggccgctatctcatgaaacatgtgtaccggggcggctaccccgatcgccatactggcatcatcgctgccccccctgcattttccaactacgacggcaacctcgatcgggatgacatccatttgtccttgtccgctcctttcgaggccttcggcctgcgccacgaagttgccctgggctggatgagcatcgacaaccatagcgacatccagcgatacgcaatggtcggaccggccccagccatcggcagcttcttcgactggcgccgcgcccacatccaagagcccagctgggccgacacgctgtcgcccgccgacgacgtgcgcaccaagcagaccggcgcctatctggtcggccggtttgcactagccgaacccctgcacctcatcgtgggcggccgttggagcgactggaaaaccaaacagatgtattttggctcgcgccgcgaatacaggatcaagaatcagttcaccccctatgccggtctgacctacgacatcaacgacacctacacggcgtacgccagctatacggagatcttccagccgcagaacgcgcgcgacaccagcggcggcattcttcctcccatcaaaggcaagagctatgagctgggtctgaaggcagcctatctggagggacggctcaatacctccgccgcgctctttcagacgcggcaggataacctggcccaggtcatcccgggctcatccattccgggctttccgaacatgcaggcctcacgtgccgcctccggcgccaaggtcgaggggatagacctggaggccagcggccagatcctgcccgactggaacatcggcgccagctatacacacttcaccaccaaggacgccagcggcaaccccatcaacaccaatcatccgcgcagcctgttcaagctctacaccacgtaccgcctgccgggcgccctgcaccggcttaccgtgggcggcggcgttgactggcaaagtcgcatgtaccaggccgcagccagtccgcgcggcaatgtcgaagtcgaacaggacagctacgcactcgtgagcctcatggcgcgcttcgactttaacaaaaaactgtcggcaacactgaacgtgaacaatctgttcgacaaaaagtactacgatcagatcggcttctacagccagggttggtggggtgcgccacgcaatgtaatgctcaacttgcgggcgcagtattga

SEQ ID NO: 115002 - protein, 734 aa, Bordetella bronchiseptica RB50
MPDPAHFSPAHSRRLRFFAHVLHLLGALFTQHALAQEARTGNDIAQLPAISVTGREISDLTEGTNAYTTEAMSTATGLTLSPRETPQSVSVVTRQQIEDQGLTDTGAILATAPGISVTRSDSNRYSFSARGFTIDNFQFDGLVSPILSQWNYGSTDMDAAIYDHVEIVRGATGLMTGSGNPSAAVNFVRKRPLREFAATFNASVGSWDYVRGDADISVPITEDGRIRSRLVAAYSQGDSYVHFLDTRRRTFYGVVSADLTPDTVLTTSVEYQHNHSNGFGSGFPLFYSDGSRTDFNRSVANNAPWARQDTEATTYFVDLTHRFTNDWKLRAAYSHTDGRYLMKHVYRGGYPDRHTGIIAAPPAFSNYDGNLDRDDIHLSLSAPFEAFGLRHEVALGWMSIDNHSDIQRYAMVGPAPAIGSFFDWRRAHIQEPSWADTLSPADDVRTKQTGAYLVGRFALAEPLHLIVGGRWSDWKTKQMYFGSRREYRIKNQFTPYAGLTYDINDTYTAYASYTEIFQPQNARDTSGGILPPIKGKSYELGLKAAYLEGRLNTSAALFQTRQDNLAQVIPGSSIPGFPNMQASRAASGAKVEGIDLEASGQILPDWNIGASYTHFTTKDASGNPINTNHPRSLFKLYTTYRLPGALHRLTVGGGVDWQSRMYQAAASPRGNVEVEQDSYALVSLMARFDFNKKLSATLNVNNLFDKKYYDQIGFYSQGWWGAPRNVMLNLRAQY

SEQ ID NO: 115003 - DNA, 2337 bp, Wolinella succinogenes DSM 1740
  CDS (1)..(2337): transl_table=11
atgggtctggtgaaaaaatcttggattgcgcctggtttggcgatgcttttatcaagcgctctttatgcagcgggagcctatacggtcacgacctcttcgctaagcgaggcgattgagcaaatttcggaaatttccaaaaagccctacattgtggacgcgcgaattttggagggcaaaaaggccaatcccatcacgggtatagagaatttggagaaggcgcttgagctgcttcttgaaggaagtgggcttgaggcggtcatccagagtgacacgattgtcattcgctccaaaggaggagagcctgcaatgctcaacactatctctatcgccgagccacttttgagtgagaacacggaagagactcactcctacaccgcacctcgaatgcgcaccgcaaccaagcttgggctctccatccgagagacaccccaatcagtgacggttctaacccagcagagattagaggatatgggggtgacctcctatcaggatatgctaggcagtgtcgcaggaatctccctcaatcgatgggatgagaggatttatccgaccgctagaggttttgaggtggactactatctaattgatgggatgcccacctacaacatctccgattcgaccgcgggtgatgttgatctctccatctatgatcgcatagaggtggtcaaaggggctaatggcttgatgacgggggcggggaatccaggtgtaggactcaacttcattcgcaagcacgccaactctaaaaccttcaaaggggatgtagaggtctccgcaggctcttgggatgcctatggctatcttgctgatgtttcggcgccacttaataaagaggggacgattcggggtaggttgattgccaaacatgaggataaaaattctttcatggatggataccaaaagagcaatgatgtagtctatggcgttgtggatatggatttgacggagacgacctacctctccttggcgggagagtaccaaaggttagaacgagatggaatccgatggggaggcctgcccgccttttatagcgatggcacaagaaccaactttgatcgatccaagaccgtgagcgaggattggacctattggaatagcgagacgagagctttttatgccgactttaagcaatatctctatgaagatatctcgctcaacctctcttttgtggatcgaaaactctacagcgagacctctcttctctattttggagggactgtggatagggacacgggcaatggtcaaggctatgtctatcaatatgtcaatgacgcgctctatcatgaacaaaacatggatgcctatctctctatccccttggaattatcgagactagagcatgagattgtgatgggattcacccagacgagctccaagctcaagcataatgactggagcatgagtgttcttgcgtccactttggcgagcccaaaaatcaatctctacaatatcaatgttgccaaccccaatctcaccaaaaacacctccgccgatccccataaaaccacacaaacaggcttttatctagcaggaaagttctccttggcggaggattggaagcttattggcggggcgcgagtctctgattggaaatataaaagtgacacaggcgtggggaatcgagaattcacccatgaagtcaccccttatgcgggactcatctatgacctcaatgagaatcactccgtctatgtaagctacacggatatcttcaagccacaagataagaggggcgcaagcggagagtatctcgaccccatcgtgggcaaaaactatgagacgggaatcaagggagagtattttgataagcgtctcaatgcctccctttcgctctttaaaatcgagcaagacaatgtagcggaggaggttccgggggtctttgccccagggacgaccgaaaaggcctataaggctgcatcaggagtgaatagcaaaggaatcgaactagaaattaatggagaaatcaccgatgattggagtctaggattctcgctggccaactttgaagctaaagacgcagaagacaaaaaggtcaccaccacctcctctcgaaccatggcgaatcttttcaccaaatacacgatagacaagcttagcctaggaggcggagtcacctacagaagcaaaatttacgcaggaagcggtgtgactgaagtgatccaagatgcctatatgttggctaatttgatggtcgcttacaaattcgaccaaagcatgaagctacagctcaatgtcaacaacctctttgataagaaatattatgaaggaatcggctctgattcgatggtctatggagcaccaaggaatgcgaccttgagttttaggtatagcttttaa

SEQ ID NO: 115004 - protein, 778 aa, Wolinella succinogenes DSM 1740
MGLVKKSWIAPGLAMLLSSALYAAGAYTVTTSSLSEAIEQISEISKKPYIVDARILEGKKANPITGIENLEKALELLLEGSGLEAVIQSDTIVIRSKGGEPAMLNTISIAEPLLSENTEETHSYTAPRMRTATKLGLSIRETPQSVTVLTQQRLEDMGVTSYQDMLGSVAGISLNRWDERIYPTARGFEVDYYLIDGMPTYNISDSTAGDVDLSIYDRIEVVKGANGLMTGAGNPGVGLNFIRKHANSKTFKGDVEVSAGSWDAYGYLADVSAPLNKEGTIRGRLIAKHEDKNSFMDGYQKSNDVVYGVVDMDLTETTYLSLAGEYQRLERDGIRWGGLPAFYSDGTRTNFDRSKTVSEDWTYWNSETRAFYADFKQYLYEDISLNLSFVDRKLYSETSLLYFGGTVDRDTGNGQGYVYQYVNDALYHEQNMDAYLSIPLELSRLEHEIVMGFTQTSSKLKHNDWSMSVLASTLASPKINLYNINVANPNLTKNTSADPHKTTQTGFYLAGKFSLAEDWKLIGGARVSDWKYKSDTGVGNREFTHEVTPYAGLIYDLNENHSVYVSYTDIFKPQDKRGASGEYLDPIVGKNYETGIKGEYFDKRLNASLSLFKIEQDNVAEEVPGVFAPGTTEKAYKAASGVNSKGIELEINGEITDDWSLGFSLANFEAKDAEDKKVTTTSSRTMANLFTKYTIDKLSLGGGVTYRSKIYAGSGVTEVIQDAYMLANLMVAYKFDQSMKLQLNVNNLFDKKYYEGIGSDSMVYGAPRNATLSFRYSF

SEQ ID NO: 115005 - DNA, 2385 bp, Wolinella succinogenes DSM 1740
  CDS (1)..(2385): transl_table=11
atgcaagcatctcaaatcaatttgaaacacttagcgttaagcgctatattggcgctggctacgcccacatggctagtggccgccgaggtgagcgtgaatatcgcccctaagtctctagctcaatccctcaaagagctcgcccaagaggcgaagatgcagctaatctttgcttctgagattgttgaggggaaacaatctcaagaggtttcgggaaggatggagatttcagaagcgctacggaggttgctagaggggagcggcttggaggggcgaatcgaaggggatacaatcatcatccaaaagatttccttgcttaacgctcaaactttgaaggcggtcaaggtgcaagccgattcagagaatcgctccagcgagaagagccaatcctacaccatgaagtcgatgtccactgcaacgggcttgggattatcagcgcgcgacaccccgcaatccgtgagcgtcatgactcgtcaaagaatcgaagatcaggggctagagaccctcacggatgtggtcaacaacaccataggaatctcctctaggctctatgatagcagtcgttcgggtttttcggctagaggttttgatattgacaatattcaaattgatggaatctccaaaaactggtctacgggatggagcgcgggcgagacgctcatggatacagcgatttatgatcgcgtggagattgtgcgaggagcgacaggtcttatgagcggggcaggaaatccctccgccgcggtcaatcttgttcgtaagcacgccgatagtaaagagtttacaggaagtgtggtgggaggagtgggctcttgggatgattaccaggggacggtggatgtgaccacgccgctcaatgccgaaggcacgattcgtgcacgcgtagtcggctcctacagggacaaagattcttttatggatctgcttagcgaggagaagagtgtcttttatggagtggtggatatggatatcacccctctaacgcgtctaagtgtaggggcaagctaccaagaaaacaaacctttgggctccacatggggaggcttgccctcttggtatagcgatggcacgaggacggattgggatcgttccaaaaccaccgcagcccaatggtcttcatgggcaaccgcacacacgacctacttcgctgacttgaatcatcgatgggagaatgattggcgcatgaaactcgctttgagtcgaaccaaaaatgaggccaacatgaagctgctctatctctcgggtaccgtggataaaagcacaggattgggacttggtgcctcggcggctcgatacgatgttttaagagagcaggatgatgtggtgttgcaggtgaatggacctgtggagattcttggtcgaacccatgagattggatgggggctctcgcactccaagcaggatttcaaggattatagctacagcggaagcggcgctcctctggttggaagtttctttggatgggatggctcctatgcggagcctgcatggggagatcggagccttagcgaggattacaccaccaaacaaaatgctctttatggagtggcgcgattctctttggccgattccctctggctcattgcgggaagtcgattgagttattgggagagagagggcgtttcgtggggaaatggctttagctataagcacaacgacaccctcaccccctatgcgggcttgatctatgatctcaatgatatcttctctctctatgtgagctacacggatattttcactccgcaagatgcccaagatgcgagcgggaactatcttgatccgatcacaggggagacctatgaggcaggaatcaagggagagttttttgaaggcaaattgaatgcaggattcaccctctatcgaatcttgcaggataatctagctcaacttgtggggctcaatcccgtgacgggaaaatccatccatgaagccgctaaaggcaccaaaagtgagggatttgagctggatgtttcaggcgagattggcgaggggtggaatctctttttgggctactctcaaatcttttcaactcaagatgccaatggagcggagatcaatacgcagcaccccaaaagaatggcaaagattttcaccacctatcgcctgcccatgatggagaagctaacggttggagggggcgtgaattgggagagtcgaagctacgcgctaaccaccaatcccgtcacgctcgctagcgaagagatcgctcaatcctcttttgcggtggcgaatctcatggctcgatatgagttcaccaaggagttttcggcgcaactcaacctcaacaatctttttgacaaaaagtactacaccaatgttggcttttatgatcaattggcgtatggagccccccgaaatgccctcttgacgataaagtataaattttaa

SEQ ID NO: 115006 - protein, 794 aa, Wolinella succinogenes DSM 1740
MQASQINLKHLALSAILALATPTWLVAAEVSVNIAPKSLAQSLKELAQEAKMQLIFASEIVEGKQSQEVSGRMEISEALRRLLEGSGLEGRIEGDTIIIQKISLLNAQTLKAVKVQADSENRSSEKSQSYTMKSMSTATGLGLSARDTPQSVSVMTRQRIEDQGLETLTDVVNNTIGISSRLYDSSRSGFSARGFDIDNIQIDGISKNWSTGWSAGETLMDTAIYDRVEIVRGATGLMSGAGNPSAAVNLVRKHADSKEFTGSVVGGVGSWDDYQGTVDVTTPLNAEGTIRARVVGSYRDKDSFMDLLSEEKSVFYGVVDMDITPLTRLSVGASYQENKPLGSTWGGLPSWYSDGTRTDWDRSKTTAAQWSSWATAHTTYFADLNHRWENDWRMKLALSRTKNEANMKLLYLSGTVDKSTGLGLGASAARYDVLREQDDVVLQVNGPVEILGRTHEIGWGLSHSKQDFKDYSYSGSGAPLVGSFFGWDGSYAEPAWGDRSLSEDYTTKQNALYGVARFSLADSLWLIAGSRLSYWEREGVSWGNGFSYKHNDTLTPYAGLIYDLNDIFSLYVSYTDIFTPQDAQDASGNYLDPITGETYEAGIKGEFFEGKLNAGFTLYRILQDNLAQLVGLNPVTGKSIHEAAKGTKSEGFELDVSGEIGEGWNLFLGYSQIFSTQDANGAEINTQHPKRMAKIFTTYRLPMMEKLTVGGGVNWESRSYALTTNPVTLASEEIAQSSFAVANLMARYEFTKEFSAQLNLNNLFDKKYYTNVGFYDQLAYGAPRNALLTIKYKF

SEQ ID NO: 115007 - DNA, 2244 bp, Photorhabdus luminescens subsp. laumondii TTO1
  CDS (1)..(2244): transl_table=11
atgaataataagaaagtgatgtatccgtttttgcaaaaggattccatgattaaaaaaacaactcttgcaatgactatacagttagtattaatgggaaatagctatgcaatcgcggaaagtgcacagaataagagcgataaaaccgctgcccaaaatgacaagatactcgtcaccgcttcacgaccagaacatgaaggggtgaccgaagacaccggcatgtacaataccacgtcgatggtcaccgccaccggtctaaacctctcggcgcgtgaaacgccacagaccgtcagtgtcgtgaccaaacaacggatgcttgacgaaaatctggacagtgttaatcgcgtcatcgatagcacaacgggtatgaacgtacgccagtttgatagtgatcgtttcgggtttacttctcgtggcatgtctatcaataacatcctgcgtgatggggttgcgacctactacgacactcgctttaactatggtgacaatcttttggatgctgacctgcttgatcgtatcgaagtggtacgtggagcagccggtttgatggttggcccaggcaatccttcggcagccgttaacctgattcgtaaacgtccaacccgcgatttccgtggtgaattctctgccggagcaggttcttgggataaatggcgcactggccttgatctctctggcccattaaatgacagcggcaacctacgtggacgtttcgttacagcctatcaagcggctaactcttttattgatcgcaataacaacgaaagatacccgttctatggcgttcttgaagcggatttgacagaaaataccttgctgactataggcgtggattatcaacgtaatcacacccgtggcggtatgtttggtggtttgccgatctactttgcaaacggcagcaaaacagactataaacgcagcgacagctatgcacctgattgggctttttcaaaagttcggaccttctctacctttaccagcctgcaacataactttgacaacggctggagtgtaaaaggcacctttacttatgataatagcgctctggaccaaaaagtcctgtgggcaacaagttttcctaaccgtagcaccaatattggtatggtgccaggtaacatgacactcatcgatggcagccgtcgccagaagaactacgatctacaagtgaacggtgactaccggttgtttaaccgtacacatcatgtcagcttcggcttaaaccatcagcaacaggatttccaaaacgattacttcaacgcaacctgtatgcttacacgtccaaatagctgtccaggaataggtgacttcacctctcctggctggcaatatcctgaaccagagtggagtaatacgcgaacttatggctcgaaaggccgtaatgaacagacctcaggttatgcagtcactcagatttctctggcagatccattgaccttgatccttggtggtcgagtaaccagttggcaaacacgtggtgataatttcaatactccacaaaatgccagctacagtgacgaatttgttccttacggtggacttatctacaacattactcaagacttgtcggtttacaccagttataccgaaatattcaacccggaaaaccaacgtgaccgcaataacaaattacttgccccagtgtctggacaaaactatgaagtgggcctaaaaggtgttgccttcgataacagtctcgattattcactggcagtctttgaaatccgtcaagataacctgccattagtggataacaatgccccgagactaccagatctctccattcctcgttatacagtggatggcaccaaaactcgcgggttcgaagcagaaatcagtggtcaactgacagataactggcgtctttatactggttacacgcaattccgggcaacagatcctaatggtgtgcgaatcaatgccaatacgccaaacaggctgtttaagctgtttaccacctacaccttgccaggtgcgatgagcaatctgaccattggtggtggtgttaactggcaggataaaacctggttgaccgttgatgggcctggaaaaacatcaatgcaagcggaacaaaacagctttgctgtggtgaacctgatgagccgttatcaattcacaccggatctctctttgacggttaacctgaataacgtctttgataagacctactacacccagttcggccaatattctcagtattactatggcgcacctcgcaacattgaagcgatcttgcgttataagttctga

SEQ ID NO: 115008 - protein, 747 aa, Photorhabdus luminescens subsp. laumondii TTO1
MNNKKVMYPFLQKDSMIKKTTLAMTIQLVLMGNSYAIAESAQNKSDKTAAQNDKILVTASRPEHEGVTEDTGMYNTTSMVTATGLNLSARETPQTVSVVTKQRMLDENLDSVNRVIDSTTGMNVRQFDSDRFGFTSRGMSINNILRDGVATYYDTRFNYGDNLLDADLLDRIEVVRGAAGLMVGPGNPSAAVNLIRKRPTRDFRGEFSAGAGSWDKWRTGLDLSGPLNDSGNLRGRFVTAYQAANSFIDRNNNERYPFYGVLEADLTENTLLTIGVDYQRNHTRGGMFGGLPIYFANGSKTDYKRSDSYAPDWAFSKVRTFSTFTSLQHNFDNGWSVKGTFTYDNSALDQKVLWATSFPNRSTNIGMVPGNMTLIDGSRRQKNYDLQVNGDYRLFNRTHHVSFGLNHQQQDFQNDYFNATCMLTRPNSCPGIGDFTSPGWQYPEPEWSNTRTYGSKGRNEQTSGYAVTQISLADPLTLILGGRVTSWQTRGDNFNTPQNASYSDEFVPYGGLIYNITQDLSVYTSYTEIFNPENQRDRNNKLLAPVSGQNYEVGLKGVAFDNSLDYSLAVFEIRQDNLPLVDNNAPRLPDLSIPRYTVDGTKTRGFEAEISGQLTDNWRLYTGYTQFRATDPNGVRINANTPNRLFKLFTTYTLPGAMSNLTIGGGVNWQDKTWLTVDGPGKTSMQAEQNSFAVVNLMSRYQFTPDLSLTVNLNNVFDKTYYTQFGQYSQYYYGAPRNIEAILRYKF

SEQ ID NO: 115009 - DNA, 2199 bp, Acinetobacter sp. ADP1
  CDS (1)..(2199): transl_table=11
atgataactatttacattaacatttatatcatgtcccttaatcctccatcatttttgaaattgtctctggttaccttagcaattttgcaagttcagcttgcacaagcacaagacaccactctacctgttattcaacttcaagctgaagatagtgaggggcaaagttctgaaaagactagatcctatattattaaaaaaagcagtagtgcaaccaagctgaatattgatgcaaaagaaactccacaaacggtgaatgttgtcactcgccagcaaatggatgacttcaatttaaactctacacgtaaagttcttgaaaatactcctggtgtcacagtttcaaatcaagaaactgaacgtacaacctatatgtctcgtggctttgaaatatcaaacattctcactgatggcgttggctttccactttccaactataattataacaacaccaatccagatacttatttttacgatcgagtcgaagtgattaaaggtgctgatgcgcttacgaacgctttcggagacccaagtgccaccattaataatattcgaaaacgtccaactaaagaatttcaagcgaatgctggcatcagttatggttcatggaacactcaacgttatgaagcagatgtatctggtgctttaacccaagatggtcgtgttcgtggccgaatgatgggctttgagcaaacgggtgactcttatctagatcattattcatcagaaaaaaatggctttgctggtattttggatgccgatttaaccgatactacgacactaacagtgggctatagcgaacagcagaataatccgaatgcaaataactggggtgctttaccgcttttagataataatggtcatcaaatttcctatagccgttcatacaacccaaatccagactggacacactgggatcataaaactcaagaagcatttgcagaactcaaacaaaaacttggcgaaaaatggacagccaaactgacttacaattacaccaatacacaacatgacagtagattactctactattacgggagcccaacagcacaaggtagcgatgtatctttaacggcatgggggggccaagaaagaaacgaacaaaagttacttaattttgacttgcaagggagttatgcactttttggccaggagcatgaagctgctctgggctatagccatattaaaaataaacagcatgatctgcaatccagtggctatataaacgatagcaatgtcgttgataaatacaatgacaaagatgaatttctcggtcaatttactaccaattggacaagctggacacctcaatctgtgacatggtcagatttttccgaagctgcaaattacacacagagaattgattcattttacgctgccacccgcctacacctcacaaatgatttaaaattgattataggcggtaattatgtacaagctgaaagtaatggctatagttacggctcaaacatgtcttatgataaagacaagttttctccatatgcagggatcacctacaattttacccccgaatatacaggatatgcgagctacacctctatttttagaccgcaaacaggaattgatcaaaccactaatcaggctttgaaagctgttgaaggaaaaagctacgaagttggtatgaagagctcttggctggataataagctaataggaacgctggcagtctttaaaaccgagcaaaataattatcaattaagaagctcagatggaaacccacttaatcgcaaagttttgaccagtgatttagattcacaaggtgttgaagttggcttggcaggtcagcttacagatcatgtcaatcttgcatttggttacgcacagtttagtattaaagacaaaaagaatggtggtgaagctcgtacctataatccatctcaaacgttgaatttactggcgacttatacagttcctaccctaccgaagctgaaagttggagcaggtttacgctggcaaaatgcgattaagctttatgatgtgagtttaggaaattctaatctgattaaacaagatgcttatggtttggtagatatcatggcaagttatgagattaacaatcatctaagtgttcaagttaatgggaataatataacggacaaaaaatatttaaatagctttccagatggtcaagctttttacggcgaacccgccaattacactgttgcagtgaagtttaaatattag

SEQ ID NO: 115010 - protein, 732 aa, Acinetobacter sp. ADP1
MITIYINIYIMSLNPPSFLKLSLVTLAILQVQLAQAQDTTLPVIQLQAEDSEGQSSEKTRSYIIKKSSSATKLNIDAKETPQTVNVVTRQQMDDFNLNSTRKVLENTPGVTVSNQETERTTYMSRGFEISNILTDGVGFPLSNYNYNNTNPDTYFYDRVEVIKGADALTNAFGDPSATINNIRKRPTKEFQANAGISYGSWNTQRYEADVSGALTQDGRVRGRMMGFEQTGDSYLDHYSSEKNGFAGILDADLTDTTTLTVGYSEQQNNPNANNWGALPLLDNNGHQISYSRSYNPNPDWTHWDHKTQEAFAELKQKLGEKWTAKLTYNYTNTQHDSRLLYYYGSPTAQGSDVSLTAWGGQERNEQKLLNFDLQGSYALFGQEHEAALGYSHIKNKQHDLQSSGYINDSNVVDKYNDKDEFLGQFTTNWTSWTPQSVTWSDFSEAANYTQRIDSFYAATRLHLTNDLKLIIGGNYVQAESNGYSYGSNMSYDKDKFSPYAGITYNFTPEYTGYASYTSIFRPQTGIDQTTNQALKAVEGKSYEVGMKSSWLDNKLIGTLAVFKTEQNNYQLRSSDGNPLNRKVLTSDLDSQGVEVGLAGQLTDHVNLAFGYAQFSIKDKKNGGEARTYNPSQTLNLLATYTVPTLPKLKVGAGLRWQNAIKLYDVSLGNSNLIKQDAYGLVDIMASYEINNHLSVQVNGNNITDKKYLNSFPDGQAFYGEPANYTVAVKFKY

SEQ ID NO: 115011 - DNA, 2157 bp, Acinetobacter sp. ADP1
  CDS (1)..(2157): transl_table=11
ttgttcatgtttcattgtgtcattggaaattttaaagttcatccgctggtcatggcgatgactatgcttgcttctccattcatttatgctgaacctactgaaaagggagaggtattaccaacgattgagttaaaagcagactccgaacaacaagccaatacttatgctgccaatacagcttctactgcattacctctaaaactgaatattaaggaaattccacagtctgtttctgtcattacccagcagcgtatgcaagatcaaggcttaacaactttagttgaagtagcagaaaacgtgactggagtgaacgttaatcgttatgagacgaatcgtggtggattatattcacgaggatttgttatcgataactatattattgatgggataccaaccacgtattcgttgccttggtcatctggtgaaatattctctagtacggcgatttatgatcacattgatgttgtacgtggctcgacaggcctaacaacgggcacaggtaatccatccgcagcgattaatatggtacgaaaacgagctaccagcaagattccagcagcaactatagaagtaagtggtggaagttgggacaattatcgggtattgggagatatttctaatcgcctcaatcaatcaggttcccttcggggaagagccgttgctcaatatgagcagggagatagctacacagatttactcagtaagcaacgtttaactttgcttttaacaggtgaggcagatctcacagattcgacgcttctttcagcaggtgtaagttatcaggaagacgacccgcgaggtccaatgtggggaggattgcctgcttatttcagtgatggtagtcgtaccacgtggtggaaaggattaaccacctctcaggactggacgcgctggaatgttaaatataccaattggtttgcagacttaactcaaaaaatcaatgagaactggaatgttaagctggcttattcacatggtaagcgtgaagcagattccaaattattttatgtatcaggtaatccagataaaacgacaggtttaggtttatctggatttgcgggtgcgtatgatgtaaatgttgatcaggatgatgtgacattacaacttgatggtcaattcaatttatttggtcaaaatcatcgagtggtggcgggttatcaatatctaaatcaggattttattgcattaggtcgctctgttcaggatattagtacaagtagtatttatgcttggaatacatctttgccagaacctgcatggggtgcatggacacctgctgaaaaatatacggtaaagcagaatgcagtgtttgcggcaacacaattgaccttacttgaccctttgaaactgattctcggtgggagagtgacgcagtatgaaaaaaaccttcctttaaaaaagaagacgattgaatatgatcatgaatttatcccttatgcagggctgatctacgatatcaatccaacttattcggcctatgtcagttataccagtatctttcagccacaagatgccaaagatattaataataattatttagatccaattgaaggcaatagtaccgaaattggtgtgaaatcttcttggtttgatcagcgcttaaatggttctttggctatttttcaaatcaagcaagatcatttggcacaatctataggggagaagattcctggtactaacaatgaagatgcgtatcgcgctgctgagggcacagaaagtaaaggttttgaactcgaactgagtgggaaggtcacagatcagtggaatattactgcgggttatagtcagtacaaagcaaccgatgccaatggtgcagatgtaaactcacaattaccacgtaagcagatacaaacttatacgacgtaccagcttccagacaaatgggaggctttaaccattggtggtggaatcaattggcaaagtgaaacctatattaaggcaagtaatgcacctaaaaatgcagattcacgggttgaacaaggtgcttatgcattggttaatctaatggctaaatataaaatatctaaagatttttctgcacagctcaatattaataatgtatttaatcaagattattacggtgtttttgcgacttatggtcagatcactcagggtgcaccacgtaatgcaaccttaacgtttagatatcatttctaa

SEQ ID NO: 115012 - protein, 718 aa, Acinetobacter sp. ADP1
MFMFHCVIGNFKVHPLVMAMTMLASPFIYAEPTEKGEVLPTIELKADSEQQANTYAANTASTALPLKLNIKEIPQSVSVITQQRMQDQGLTTLVEVAENVTGVNVNRYETNRGGLYSRGFVIDNYIIDGIPTTYSLPWSSGEIFSSTAIYDHIDVVRGSTGLTTGTGNPSAAINMVRKRATSKIPAATIEVSGGSWDNYRVLGDISNRLNQSGSLRGRAVAQYEQGDSYTDLLSKQRLTLLLTGEADLTDSTLLSAGVSYQEDDPRGPMWGGLPAYFSDGSRTTWWKGLTTSQDWTRWNVKYTNWFADLTQKINENWNVKLAYSHGKREADSKLFYVSGNPDKTTGLGLSGFAGAYDVNVDQDDVTLQLDGQFNLFGQNHRVVAGYQYLNQDFIALGRSVQDISTSSIYAWNTSLPEPAWGAWTPAEKYTVKQNAVFAATQLTLLDPLKLILGGRVTQYEKNLPLKKKTIEYDHEFIPYAGLIYDINPTYSAYVSYTSIFQPQDAKDINNNYLDPIEGNSTEIGVKSSWFDQRLNGSLAIFQIKQDHLAQSIGEKIPGTNNEDAYRAAEGTESKGFELELSGKVTDQWNITAGYSQYKATDANGADVNSQLPRKQIQTYTTYQLPDKWEALTIGGGINWQSETYIKASNAPKNADSRVEQGAYALVNLMAKYKISKDFSAQLNINNVFNQDYYGVFATYGQITQGAPRNATLTFRYHF

SEQ ID NO: 115013 - DNA, 2214 bp, Erwinia carotovora subsp. atroseptica SCRI1043
  CDS (1)..(2214): transl_table=11
atgtcttttggagttactcgcgccgggaaaacgcgcgtttgtgattcttcgctggccggagcaaaaccattcggagtttctcttctcgccctgttgatttctgcctctttcctgcctactcaggctgttgccgaagaaaatcccgcctcaggcgacacacttgtcgtcagcgctaacgccaatgcgaatgcagaggccagcgatccgcaggattacagcgtgaaagtcactagcgccggaacgaagatgacgctgacgccgcgtgatatcccgcagtcggtgagtgttatcagcaagcagcgtatcgaagatcagaacctgcaaaccattggcgaggtgatggcgaacacgacgggtgtgtcctctaaaattatcgactccgaacgtgcgacgtatttcgctcgtggttttcgtatcactaactatctgtttgacgatattccgacggtggttaacgaaatctgggattttggtgattcaggctcagacacggcgatctatgatcgtattgaagtggtacgcggtgcgacgggactaatgacgggaacgggtaaccctgctgctgcggtgaacatggtgcgcaagcatgcggacagccgcgagttcaaaggctcggtatctggcagctacggttcatgggataaacaacggatggtggccgatctgtctgcgccgttgacggaatacggtaacgtgcgcgggcgcgtaattgcgggctatcaggacaacgatacctggctcgatcgttatcatagtcgtaagaaattcctctacggcgtgattgatgctgatgtcaccgattccaccacgttgtcgcttggttatgattatcaggaacacaacacagatagcccaacctggggtggtttgccaacgtggtttaccgatggcagtcccacgaattttggacacaaatttaattccgcaccgaactggagctactccgacaaaacgtcgagaaaagtctttgccgatctgactcagcgttttgataacggctggcaggtgcgtatgaacgggacgcatggcgaaaccaacttcgattccaagctgatgtatgccaatggtttcctcgataaagataccggaatacttgttgatccgtatggatctaatgttggtgcttacggtggatggaataagggaacccgtaaagttgatgcggttgacacttacgcctctggcccgttcgagctattgggacgccagcatgagctggtggttggcggtagctatactcgacagcgtaaccagttctataacactcaatcgacgatcagcacgacagatatgggaagttactacaactggaatggcaatatcgccgatcctgcatgggggccgtgggcggattatgaacattcaaccacgcgccaaaaatcgctctatgcgtcggcgcgtttctcgctggccgatccgctgcatctgattgctggcgcgcgttataccgactggagcatcattggttcgacgggtgataccagcaataatcgcattacgccttatgttggtctggtttatgacatcaacgatacctggtcgacgtatgccagctacaccgatatcttccagccgcaaacgcaaaaagatattaataaaaagtatctgtctcctactacgggtaaaaactacgaaacgggtgttaagggagactggtataacagccgcctgactgcctcggtatcaattttccgcattgagcaggataacgtgggacaatcaacgggaatcgcgattcccggcggtggcggtgagtttgcctaccgtacagttgatggtgttgtcagcaaagggatcgagtttgaagttaatggcgcggtgacggataacctgcaaatgacgtttggcggttcgcgctatgtggttgacgatcaagatggtaaatcggtcaacccagaacagccgcgcacgtcgttcaaattgttcacccgctaccagttaccaacgctgccggaattaaccgttggtggtggcgttaactggcaaaatggcatctggcaagaaggttctggtccgcaacagaccatgttacgtgtcgatcaaggcagctacgcgctggttaacctgtttagccgctaccaggtcactaaacagctggcggtacaggcgaatatcaacaacctgtttgataaagagtacagcgactaccttgcgccttatgccgtgtatggcgcgccgcgcagtgtctctatgacggtcaactatgccttttaa

SEQ ID NO: 115014 - protein, 737 aa, Erwinia carotovora subsp. atroseptica SCRI1043
MSFGVTRAGKTRVCDSSLAGAKPFGVSLLALLISASFLPTQAVAEENPASGDTLVVSANANANAEASDPQDYSVKVTSAGTKMTLTPRDIPQSVSVISKQRIEDQNLQTIGEVMANTTGVSSKIIDSERATYFARGFRITNYLFDDIPTVVNEIWDFGDSGSDTAIYDRIEVVRGATGLMTGTGNPAAAVNMVRKHADSREFKGSVSGSYGSWDKQRMVADLSAPLTEYGNVRGRVIAGYQDNDTWLDRYHSRKKFLYGVIDADVTDSTTLSLGYDYQEHNTDSPTWGGLPTWFTDGSPTNFGHKFNSAPNWSYSDKTSRKVFADLTQRFDNGWQVRMNGTHGETNFDSKLMYANGFLDKDTGILVDPYGSNVGAYGGWNKGTRKVDAVDTYASGPFELLGRQHELVVGGSYTRQRNQFYNTQSTISTTDMGSYYNWNGNIADPAWGPWADYEHSTTRQKSLYASARFSLADPLHLIAGARYTDWSIIGSTGDTSNNRITPYVGLVYDINDTWSTYASYTDIFQPQTQKDINKKYLSPTTGKNYETGVKGDWYNSRLTASVSIFRIEQDNVGQSTGIAIPGGGGEFAYRTVDGVVSKGIEFEVNGAVTDNLQMTFGGSRYVVDDQDGKSVNPEQPRTSFKLFTRYQLPTLPELTVGGGVNWQNGIWQEGSGPQQTMLRVDQGSYALVNLFSRYQVTKQLAVQANINNLFDKEYSDYLAPYAVYGAPRSVSMTVNYAF

SEQ ID NO: 115015 - DNA, 2262 bp, Yersinia pseudotuberculosis IP 32953
  CDS (1)..(2262): transl_table=11
atgagaatactagaaaaaaatcacggcaaaagccgagtgcgttttaactgcacacacactatcaaaccagcggcatgggtgcttgctgctaatgtatcgttgttgggttgtgcatatgccgcgactgacgagaataatagtcagaaaaaagaaagagaaaacaaccctgcgaataccaccataaccgttacggcatcaccattgcgtcatgctggcgtcacagaagacagtggcagctacaacacgtcatcaatgtcgacagcaactggcctgaatatttcagcacgggaaaccccacagtcggtaagtgttatgactaaacagcgcatgcgtgatcaaaacctgaacagcgtcgaaagtgccgtgaataacatcaccggcatcagtgtgcgccagtttgacagtgatcgtttcggttttacctctcgtggcatggccgttaataatgttatgcgagatggcgtcgccaccttttacgatacccgctttaattatggtgataacacgcttgataccgatatgtttgatcgtattgaagtggttcgaggtgcggcaggcttaatggctgggccgggtaacccttccgccgttattaaccttgtgcgcaaacgccccacacaggattttcgcggcagtgtgtcggcaggtgttggttcatgggagaaatggcgtacggcgctagatatctccggccccctcaatagtgaaggcagtgtgcgcgggcgttttgtcacggcttatgaagataagaactcttttgttaaccgctatgatcaaagtaaaaacccgttttacggtatcttggagatagatgtcacccccaataccctattcacctttggtgccgatacacaacggactctaacccggggcggtatgtttggtgggcttcccctgtttaacagcgctggtgggcggacaaattatgcccaatccgccaccaccgcatcggattgggcatccgccgaaacccgaactcaaacgctgtttagcagtctgcaacacaattttgataacggctggaatattaaaggcacctttacctttgataacgataagctgcgccaagacgtgatgtggcccaccggttatcccgacccacaaaccaatataggtatgcggccaggcagtctgtcactgattgatggtgcccgccgtcagcaaaattacgatattcaagtcaatggtcagtacagcctgtttggccgccaacatcagttgggtttgggctggaatcgtcaacgacaaaatattgataacgactattatctggcgacctgtaatgccaccagaacctgtcccgaccttggggatttcacccagccgggctggcaatatcctaagcctgtttggagtgataaacgggcttatggttcgaaagggcgcagcgatcaatcctctcagtatgtggtgacccaactctctctgattgacccgttaaccttgatccttggtggccgcctgaccacttgggaaacccgtggtgataacttcggtacgccacaaaatgctcgttataagaatgagtttgtcccatacagcggcctgacttatgacattaatcgcgatttgtcggtttataccagttataccgaaatatttaacccggaaaaccgtcgggaccgtaataacacattattggccccggtgagtgggcagaattacgaagccggtttgaaaggtgttgccttcgataatagtcttgattattcactggcagtgtttgaaatccgtcagaataatatgcccgtaccggacaccaccgccccccgcttgccggataacagccagccttacttcgccgtcgacggtactaaaacccgtggttttgaagcggaagtcagtggaaaaatgactgaagactggaatatttctgcgggctatacccagtacaacgtgaaactaccgagctcaaatacccagacacctgtcaccccagtcacaccacggaaagtcttaaaactcttcaccacctataccttaccggggcaactaagcgatctgaccctcggcggtggcgtcaactggcaaagccaaatcgccagaaatctcagtagcccaatcggtattcaacaaatcggtcaaggcagttttgccatttacagcctgatgagccgctaccagtttacccctcagctctccttaacggtcaatctggataacctgtttaatcagcattactacacacaaatcggccaatacaaccaatacttgttaggcgcaccacgcaatgtcgatgccaccgtgcgctacaccttctaa

SEQ ID NO: 115016 - protein, 753 aa, Yersinia pseudotuberculosis IP 32953
MRILEKNHGKSRVRFNCTHTIKPAAWVLAANVSLLGCAYAATDENNSQKKERENNPANTTITVTASPLRHAGVTEDSGSYNTSSMSTATGLNISARETPQSVSVMTKQRMRDQNLNSVESAVNNITGISVRQFDSDRFGFTSRGMAVNNVMRDGVATFYDTRFNYGDNTLDTDMFDRIEVVRGAAGLMAGPGNPSAVINLVRKRPTQDFRGSVSAGVGSWEKWRTALDISGPLNSEGSVRGRFVTAYEDKNSFVNRYDQSKNPFYGILEIDVTPNTLFTFGADTQRTLTRGGMFGGLPLFNSAGGRTNYAQSATTASDWASAETRTQTLFSSLQHNFDNGWNIKGTFTFDNDKLRQDVMWPTGYPDPQTNIGMRPGSLSLIDGARRQQNYDIQVNGQYSLFGRQHQLGLGWNRQRQNIDNDYYLATCNATRTCPDLGDFTQPGWQYPKPVWSDKRAYGSKGRSDQSSQYVVTQLSLIDPLTLILGGRLTTWETRGDNFGTPQNARYKNEFVPYSGLTYDINRDLSVYTSYTEIFNPENRRDRNNTLLAPVSGQNYEAGLKGVAFDNSLDYSLAVFEIRQNNMPVPDTTAPRLPDNSQPYFAVDGTKTRGFEAEVSGKMTEDWNISAGYTQYNVKLPSSNTQTPVTPVTPRKVLKLFTTYTLPGQLSDLTLGGGVNWQSQIARNLSSPIGIQQIGQGSFAIYSLMSRYQFTPQLSLTVNLDNLFNQHYYTQIGQYNQYLLGAPRNVDATVRYTF

SEQ ID NO: 115017 - DNA, 2154 bp, Pseudomonas syringae pv. syringae B728a
  CDS (1)..(2154): transl_table=11
atgtcggggcaacaatcgcaaagccgtaatcgtttcacaccgggtctgctggccatgggcatctgggctgccactacacaggcagcccttggcgctgaagaacagcccgccacgaccatggagctgggcgccacgcagatcagcagtgatcaacttggctccacaaccgagggcagtcagtcctacaccaccggcccgatgcagaccgcgaccaagttgccgctgaccattcgtgaaacgccgcaggccgtgacggtcgtcacccgccaacgcatggacgatcaggccatgaccagcatcaatgacgtggtcaggtatacgccgggactgtttttggaccagtccagcggaccgggccggcaaacctacacgtcgcgcggtttcgacatcgacaacatcatgtacgacggcctgcccgcctcctactcgggctacacggcaggcgttcaacccaatctggccatgttcgatcatgtcgaggtgatcaggggcgcgactggcctggcgacagggtctggcaatccttcggcagcgatcaatatggtgcgcaaacgccctaccgccgtgccacaggtcaccctcaccggcacggtcgggagctgggacgattaccgtggcgtcttcgatgcgtccggcccactgaacgacagccgcacggttcgcggccgcatagtcggctcctaccaggatgccaacagcttccgcgacaaggaaaagagcgatcacggcgtgttctacggggtggtcgaagccgatctgagcgacgcgacgaccgccaccctgggcctgtctcgtcaggaagaccagaccaactacttctggggcggcctgcccttgggcgtcgatggtcaccacctgaacctgccgcgctccacctattccggctcggattgggaaaacaagaaaatccagatagacaccatgttcggtgagctggagcaccgtttcgacaacgactggaaattgcgcgtagcaggctcgagctcgtcgctggacggcctgttttcggggacctacctgtctcgctacaacggcccgctggaaaccacggcctaccagtcgaggccggaagagcagcagagcgccttcgatgtctacgccagtgggccggtcgaagccttcggccgcactcatgaagtggtggtcggcaccagccggcgcgtgtacgaccagaccagcaaggagtacagcccctacgacaccggtctgcccattgccgcgccaaagccggacttcgttcgcaatggcaagacgcacagcatcgccacccaggacgcggtctatctcaccacacgcctgagcctggccgatccgctgaccctgatcctcggcggccgtctggactggtacgactacgatgaccgcgtcggcgatgaagactacaaagtcacccgtaacctgacgcgctacgcagggctgatctataagctggatgaacaccactcgctgtacaccagctacaccgacgtctttcagccgcagagcgcacaggacctgtccggcaaggtgctcaagccggtggtcggcgaaaactatgaagtcggtatcaagggtgaatacttcaacggcgccctcaacacctccctggcggtgttccagatcgaccagaaaaacctcaagacccagtcaccgacccaggcaggctgcgcggtcctgacctgttacgacgctgcaggcctggtacgcagtcagggcatcgagatggagctgcaaggcgcgttgaccgagaactggcaagtcggcgccggctacacctacgcccgcacccactacatcaaggatgccgatccggcgaacaagaaccagcaattcaacaccgacacgcccgagcatctgttcaaggtatcgacggtctatcgcctgcagggtgcactggagaaaatacgcgtcggtggcaacgtctactggcaaagccgcatgtacaacgacatcgcactcaccgatggcagctatcgcctggaacagggcagctacgccgtcgccgacctgatggcggggtatcaggtgagcaagaacctcgacctgcaactgaacgccaacaacatattcgaccgcacctactacacggcgattggcgccagctcggtctggggctccaccgacgtctacggcaacccgcgcagttatgcgttgacggccaagtacagcttctga

SEQ ID NO: 115018 - protein, 717 aa, Pseudomonas syringae pv. syringae B728a
MSGQQSQSRNRFTPGLLAMGIWAATTQAALGAEEQPATTMELGATQISSDQLGSTTEGSQSYTTGPMQTATKLPLTIRETPQAVTVVTRQRMDDQAMTSINDVVRYTPGLFLDQSSGPGRQTYTSRGFDIDNIMYDGLPASYSGYTAGVQPNLAMFDHVEVIRGATGLATGSGNPSAAINMVRKRPTAVPQVTLTGTVGSWDDYRGVFDASGPLNDSRTVRGRIVGSYQDANSFRDKEKSDHGVFYGVVEADLSDATTATLGLSRQEDQTNYFWGGLPLGVDGHHLNLPRSTYSGSDWENKKIQIDTMFGELEHRFDNDWKLRVAGSSSSLDGLFSGTYLSRYNGPLETTAYQSRPEEQQSAFDVYASGPVEAFGRTHEVVVGTSRRVYDQTSKEYSPYDTGLPIAAPKPDFVRNGKTHSIATQDAVYLTTRLSLADPLTLILGGRLDWYDYDDRVGDEDYKVTRNLTRYAGLIYKLDEHHSLYTSYTDVFQPQSAQDLSGKVLKPVVGENYEVGIKGEYFNGALNTSLAVFQIDQKNLKTQSPTQAGCAVLTCYDAAGLVRSQGIEMELQGALTENWQVGAGYTYARTHYIKDADPANKNQQFNTDTPEHLFKVSTVYRLQGALEKIRVGGNVYWQSRMYNDIALTDGSYRLEQGSYAVADLMAGYQVSKNLDLQLNANNIFDRTYYTAIGASSVWGSTDVYGNPRSYALTAKYSF

SEQ ID NO: 115019 - DNA, 2472 bp, Pseudomonas fluorescens Pf-5
  CDS (1)..(2472): transl_table=11
atgcaaatcattcctatttcgtacgggacttccatgcaccttccaacactcaccccggcccgcagcatcctcgcgctggccatctgcctggcctgcaaccccgtgatggcggtcgagcccaccaccgctaccgacaaccaggcaaccgccacctacagttttgccatcgcccgccagtccctggccaatgccctggaccaactgagtacccagagcggtttgcagatcgcctactccgcggcactggcccaggggatcgagtcggcgggggtcagcgggcgcatgagcgcggaacaggcactgggcaagctgctggccggcaccggcctgggttttgaacgcaacggcgccaacgcggtgctgctgacccgcctgccccagagcagccaggccgtggagctggaggccacccagatcgtcagcaaccagttgggcaccgtcaccgaaggcagcggctcctacaccccaggcaccatcgccacggcgacccgcatggtgctgaccccgcggcagaccccgcagtcgatcaccgtggtcacccggcagcacatggaagatttcggcctcaacaatgtcgacgacgtgatgcgccacaccccgggcatcaccgtctcggcctacgataccgaccgcaccaactactacgcccgcggtttctcgatcaacaacttccagtacgacggtatcccctccaccgtgcgcaacgtcgcctattcggctggcaacaccctcagcgacatggccatctacgaccgggtggaagtgctcaagggtgccaccggcctgctgaccggcgccggctccctgggcgccaccatcaacctggtgcgcaagaagcccactgcccagttccagggccacgcctccctgggcatgggctcctgggacaactaccgcagcgaactggacgtcagcgggccgctgaccgaaaccggcaatgttcgcggccgcgcagtggcggcctaccaggacaagcagtcgttcctcgaccactattcgcgcaagacctcgacctactacggcatcctcgaattcgacctgtcccccgacaccctgctgaccgtgggcggcgactaccaggacaacatccccaagggctccagctggtccggcaccttcccgctgatcaacgccaccggcgggcacaacagcatgtcgcgctcctacaacaacggcgcgacctggagcggctgggagcaatacacccgcaccgcttttgccatgctcgaacacgacctgggggatggctgggtcaccaagctgcaactggaccacaagatcaacagctaccacgccgagctcggctcgatccagttcgacgagccgcagaccgatggcacggccaaggtcaacgcacagaagtacaccggcgacaccaccagcgattccgccgacctgtacctgagcggccccttcaatctgttcggccgcgagcatgaactggtgctgggcggctccatcgccaactcgcgctggaccggcaagggctactggtccccggacttccccgggggcaagggtaacgtggtggacttctacaactggcacggcaagatcgaacggcccatctgggggctgccggcccagcgcaccgacgacaccgtgcgccagaccggcacctacatgaccacccgcctcaacctgatggacgacctgaacctgtttctgggcgggcgcgtggtcaactatcacctcaccggcctgaccccgtcctacaaggaaagcggacgcttcgtgccctacgtcggcgcggtctacgacctcgacgaccacttctcggtctacgccagctacaccgatatcttcatgccccaggaaagctggaacaaggacaaggacagcaagctgctcaacccggacgaaggccagaactacgagctggggctcaagggcgagttcttcgaaggccgcctcaacagcagcctggcctacttcgaagtgcacgagaccaaccgctcggtgccggacgatgcctacaacaaccagtcgcccacccccgacaactacgcgttcaagggcgccaaggcggtcaccaagggctacgagctggagatttccggcgaactgagcccgggctggcaagtgcaggccggctacacccacaagatcgtgcgtgatgacgagggcgacaagatctccaccttcgagccgcaggaccaggtcaacctctacaccagctacaagctcaagggcgacctggacaagctgaccgtcggtggcggcctgcgctggcagagcgagggctggtattcggtctacaacgcaccgcgcaagatcaacgaagacatttcccaggaggcctactggctggtggacctgatgacccgctaccagatcacccagaacctgtcggcgaccctcaacgtcaacaacatcttcgacaagtcctactacaccaacgtcggtttctataactcggcagcctacggcgaaccccgcaacttcatgctcagcacccgctgggacttctga

SEQ ID NO: 115020 - protein, 823 aa, Pseudomonas fluorescens Pf-5
MQIIPISYGTSMHLPTLTPARSILALAICLACNPVMAVEPTTATDNQATATYSFAIARQSLANALDQLSTQSGLQIAYSAALAQGIESAGVSGRMSAEQALGKLLAGTGLGFERNGANAVLLTRLPQSSQAVELEATQIVSNQLGTVTEGSGSYTPGTIATATRMVLTPRQTPQSITVVTRQHMEDFGLNNVDDVMRHTPGITVSAYDTDRTNYYARGFSINNFQYDGIPSTVRNVAYSAGNTLSDMAIYDRVEVLKGATGLLTGAGSLGATINLVRKKPTAQFQGHASLGMGSWDNYRSELDVSGPLTETGNVRGRAVAAYQDKQSFLDHYSRKTSTYYGILEFDLSPDTLLTVGGDYQDNIPKGSSWSGTFPLINATGGHNSMSRSYNNGATWSGWEQYTRTAFAMLEHDLGDGWVTKLQLDHKINSYHAELGSIQFDEPQTDGTAKVNAQKYTGDTTSDSADLYLSGPFNLFGREHELVLGGSIANSRWTGKGYWSPDFPGGKGNVVDFYNWHGKIERPIWGLPAQRTDDTVRQTGTYMTTRLNLMDDLNLFLGGRVVNYHLTGLTPSYKESGRFVPYVGAVYDLDDHFSVYASYTDIFMPQESWNKDKDSKLLNPDEGQNYELGLKGEFFEGRLNSSLAYFEVHETNRSVPDDAYNNQSPTPDNYAFKGAKAVTKGYELEISGELSPGWQVQAGYTHKIVRDDEGDKISTFEPQDQVNLYTSYKLKGDLDKLTVGGGLRWQSEGWYSVYNAPRKINEDISQEAYWLVDLMTRYQITQNLSATLNVNNIFDKSYYTNVGFYNSAAYGEPRNFMLSTRWDF

SEQ ID NO: 115021 - DNA, 2484 bp, Rhodospirillum rubrum ATCC 11170
  CDS (1)..(2484): transl_table=11
atgggggacgtggtgaacggcaagctgacgattggccggtgggggcggcgtttgctgatgggcgtatcggtactcgccctgggacagacggcgctgatcgcccgggccgaggatggaccggcggcgggcgggccaacggctcaggcgggcgcggtttacgtttttgatatcgcgacaaagccgctgccccgggccctggccgatttctcggcggtgaccggccttcaggtgctctacagcggatcggccgcttacagccataccgcgccggcgctccaggggtcttatggggcgcgacaggcgctgggcctgctgctggccggcagcggtctggcggcgcgcttcacctcgccgacctcgatcaccctcgaggcgatcaaggacgccgaggacgctttggtggtcgatccgatcgccgttgaaggcgccttgctgcgcggcggattgcccggcaccgagggcacggggtcctatgcgaccggggcgaccaacacggcgaccaagctcactctctcgccgcgcgaaaccccgcaatcggtcagcatcatgacccgccagcgcatggacgatcagaacctcaatgaaatggccgatgttctcgatgaaacggtggggatgaccttcaaggagggcgggccgatcggctcggatgccaacgccgtttattcccggggcttcgaggttcacaatttccaggtcaacggcgtcagccgctcgaccaaatacggctttggcgacgatctctccgatatggcgatctatgaccgggtcgaggtggtgcgcggcgccaccgggttgatgagcggcgttggcgatccgtcggccagcgtcaatctggtgcgcaagcggccgaccgataccttccaaagcgcggccgagctgcaggcgggaagctggaaccgctatcgggccgaaggcgatgtcgccagcccgctgatcgaaagcggccgcctgcgcggccggctggtcgccgcctatcagcaaggcgagtcctatatcgaccgcctggagacgtcgaaaaaggttctttatggggttatcgaagccgatttgaccgaggataccttactgaccgccggggtccagtatcagcaccatcgctccgatcacgcctcgcgcgccggcatcccgatgttttattccgatggcgggcggacggatttttcccgctccaccagttcggcggccgattgggcctatttcgacaatacccaactcaccaccttcgccgcgctcgaacagcgtttcgacaacgattggacggttaccctcgatctcgaacatgcccggcggtcctatgacgcgctgatcggttacggcattcgcggcacgcccgaccgcgagaccggggcggggatgggcctctatgccgggcgttgggccgccaaaccgatccagaactcggtcggcctcaccgccaccggccccattaccctgtttggtcgccagcacgatctgatggcgggcttcagcacctatcacgccagctacgaagacccgagctatcctttgtggtcgatccccggctatgacacgtcgatcggcaattactacacctggaacggtgcgatcgccgaacccgtgcttgaggaaaacggcagcgaaagtttcctggaacgtcaggtcgcgggctatatggcgacccgtttgcggccaacggatgatctatcgatcatcctcggcggccggctgacttcgtggagccaggagaccgagtcccgctacgccgatggctcgtcgagctattccgagcagtcggaaaacggcaaagtcaccccctatgccggaatcgtctatgacctgagcgacatttggtcggtctatgccagctacaccagcatcttcaagccgcagagcctgcaagacgccgacggtggttatctgcagcccctggtcggcgacgcctatgaagccggcatcaaggccgcgttctacgacggccggttgaacgccagtctggcggtgttccgcatcaatcaggacaacctgggggtcgccgatggcgcggcgctgacgccgagcggcggtcaggcctataaggcggccaaaggcaccaccagccagggcatcgaactggaactgaccggcgaggtcttgccgggttggcaggttggcggcggctatgcccatgcctcgccgaccgatgtcaaaggcaagcggctgctaaccgatatcccgcgcgatacggtcaaggtgttctcgacctatcgcttgccgggggccttcgatcgcctgatgatcggcggcaatctgcgttggcagggggcgatctatgccaataacgttggccccaacggcgaacgcgccacccagaaggccttttcggtcgtcgatgtcctggccagctaccgcctcaccgaggcggtcaccgccacccttaacgtcaataacatcttcgacgaaaagtattattccagcatcggcgccatcggctattacggcgaaccgcgcaatgcgatgctcagcgtgaaggcgagcttctaa

SEQ ID NO: 115022 - protein, 827 aa, Rhodospirillum rubrum ATCC 11170
MGDVVNGKLTIGRWGRRLLMGVSVLALGQTALIARAEDGPAAGGPTAQAGAVYVFDIATKPLPRALADFSAVTGLQVLYSGSAAYSHTAPALQGSYGARQALGLLLAGSGLAARFTSPTSITLEAIKDAEDALVVDPIAVEGALLRGGLPGTEGTGSYATGATNTATKLTLSPRETPQSVSIMTRQRMDDQNLNEMADVLDETVGMTFKEGGPIGSDANAVYSRGFEVHNFQVNGVSRSTKYGFGDDLSDMAIYDRVEVVRGATGLMSGVGDPSASVNLVRKRPTDTFQSAAELQAGSWNRYRAEGDVASPLIESGRLRGRLVAAYQQGESYIDRLETSKKVLYGVIEADLTEDTLLTAGVQYQHHRSDHASRAGIPMFYSDGGRTDFSRSTSSAADWAYFDNTQLTTFAALEQRFDNDWTVTLDLEHARRSYDALIGYGIRGTPDRETGAGMGLYAGRWAAKPIQNSVGLTATGPITLFGRQHDLMAGFSTYHASYEDPSYPLWSIPGYDTSIGNYYTWNGAIAEPVLEENGSESFLERQVAGYMATRLRPTDDLSIILGGRLTSWSQETESRYADGSSSYSEQSENGKVTPYAGIVYDLSDIWSVYASYTSIFKPQSLQDADGGYLQPLVGDAYEAGIKAAFYDGRLNASLAVFRINQDNLGVADGAALTPSGGQAYKAAKGTTSQGIELELTGEVLPGWQVGGGYAHASPTDVKGKRLLTDIPRDTVKVFSTYRLPGAFDRLMIGGNLRWQGAIYANNVGPNGERATQKAFSVVDVLASYRLTEAVTATLNVNNIFDEKYYSSIGAIGYYGEPRNAMLSVKASF

SEQ ID NO: 115023 - DNA, 2061 bp, Saccharophagus degradans 2-40
  CDS (1)..(2061): transl_table=11
atgatttcccgactgtcccctttggtagcttttatctgcctaactactacatctgttgcttttgccgaggaaggcaccagctctaagctggaagaaacctttatatatggtgagcagggaaagacagacactgcaacaaaacttgagctaagtatttttgaaaccccgcaaaccgttaccgcggtttctagagcgcagctggacgaatttgcgttaaccagcatttctgatgtgcttaactatgcaccaggcattaccgtagaagaagttgaaactaatcgaacctactacactgcgcgcggcttcgatattgttaactttcaatacgatggtgtgggcattccttttattagcggcttgaatttaggccaacaagatacggctatttatgaaaaagttgagattgttaaaggctctgcaggcttgattactggcttggcgaacccttctgcaacaattaactatgtacgcaaacgaccaactgatgatttgcaagcatctgctgcacttagccttggacagtggcaaaacaagcgcgccgaagtggatatagcaactgcactttcagattcagtgcgagcacgagcagttgtggcctatgacaatggtgaaacccatttagatcgcaataaaaacacaactcaattgggctacggcatttttgagttcgacttaagcgataacaccatgctaacggcgggatacagttacgaccgcaatgaatctaaaggtgttttatggggtgcgttgcccttactttataccgatggctcgcgtacaaattatgacgtatctaccagtaatgcgcccgactggacgtttgccaacactacgcaaaaacaaagttttgcagagctggaacatcacataaatcaaaattggacagcgcatttacaccttacgcataaccaatcaacttacgattcaaacttattttacgtatacggtacacccgagcgcgaaaccgaagttggactatttggctatgccagtgcctatgagcgcgatgaagagcaattaaatgtagatttgtttgtatctggcgattttagcctgtttgaaagaaaccaccagctagtacttggttacagcgattctgataccaaccttgccgaagcatcgcattacaataataccgatggcttcccggtacttggcgccgactgggccaaaggcaatactccagcgatggattttcctgatcacgaccccgccacaagctccaccgatatagacctaagccaaaaagcgttttatgtggctgcgcgtttaaatgtacttgataacctagcgttattattgggtgcaagaaatacagagcttgagcaaacaggcgtaagctacggcggcgaatcgaatgcgagtgcaaataaaactgtaccctatttcggggttacctatgcattaatcgacagtctaatgttgtactcaagttacagcgaagtatttaagcaacaaacttgggtgaacagcgagctgcaaccgcttggtgctaccgtgggggcatcctctgaattagggttgaaaaagtcgtttaatgacgagcgctcagtgctaacacttgcagcattttcatctgaacaaagtgattttggtgtatttgtagctcgaaatgaaagcggcattgcaatctaccgaactgcggagttaagcagctctggctacgagctggaattttctggtgaggttactgatggcttaaacattggcgccggcttaacggtattggatattaaagaagacgacgaagatgcgcgtccgttcattcccacacagcttttaaaattctcggcttcatatgtattgcctagtctgcctgacttaaaaattggtagctcggttaaatggcagaatgaaactaccacaagcgatggatcgtatacccaagatgcctttaccttactagacattgctgcgcactatcaaattaacgcccagttaagtgtgtcgctaaacctagaaaacctaggtaacgagaagtatttaaacagcctgtattggagccaagcgtatttcggcgagccgcgcaacatgagtgccacagtacgctggaagctataa

SEQ ID NO: 115024 - protein, 686 aa, Saccharophagus degradans 2-40
MISRLSPLVAFICLTTTSVAFAEEGTSSKLEETFIYGEQGKTDTATKLELSIFETPQTVTAVSRAQLDEFALTSISDVLNYAPGITVEEVETNRTYYTARGFDIVNFQYDGVGIPFISGLNLGQQDTAIYEKVEIVKGSAGLITGLANPSATINYVRKRPTDDLQASAALSLGQWQNKRAEVDIATALSDSVRARAVVAYDNGETHLDRNKNTTQLGYGIFEFDLSDNTMLTAGYSYDRNESKGVLWGALPLLYTDGSRTNYDVSTSNAPDWTFANTTQKQSFAELEHHINQNWTAHLHLTHNQSTYDSNLFYVYGTPERETEVGLFGYASAYERDEEQLNVDLFVSGDFSLFERNHQLVLGYSDSDTNLAEASHYNNTDGFPVLGADWAKGNTPAMDFPDHDPATSSTDIDLSQKAFYVAARLNVLDNLALLLGARNTELEQTGVSYGGESNASANKTVPYFGVTYALIDSLMLYSSYSEVFKQQTWVNSELQPLGATVGASSELGLKKSFNDERSVLTLAAFSSEQSDFGVFVARNESGIAIYRTAELSSSGYELEFSGEVTDGLNIGAGLTVLDIKEDDEDARPFIPTQLLKFSASYVLPSLPDLKIGSSVKWQNETTTSDGSYTQDAFTLLDIAAHYQINAQLSVSLNLENLGNEKYLNSLYWSQAYFGEPRNMSATVRWKL

SEQ ID NO: 115025 - DNA, 2172 bp, Shewanella sp. MR-4
  CDS (1)..(2172): transl_table=11
atgactatgcgttttaatctacttccacttgctgctgcagtaaccctagctttgaatcctttggcgctgatggccgaagaacaaaccgcttcaacaacagagacacaagatcaaaatatcgaaaaaatcactgtgatgggtaaatacacagtgagtcgtaatattgataccgcaacggggttaggactcacgctgcgggaaacgccacagtcggtcagcattatgacagcggatcggattgaagatcaggcgctaaataccgtggtcgatgtggtcaacaacactgtgggtttatcatcctcaaaaaccgataacgtgcgtaacggtttttcggcccgcggttttaccgtgcaaaactatcaaattgatggcgtgcctttatcttggagtttaggtggtgatgcaggtgaaacggtatcggatgtgtctatctacgagcgcgttgaagtcgtgcgtggtgctaccggattattaacgggtgctggcgatccttcggcctcgattaacttagtgcgtaagcatgccgacagttctgatcttaaaggttatgtggatgtcgccactggaagttgggataaaaaacaagtcaccgcggatgtgtctaatggtctgaatgaagacggcagcgtgcgtgggcgcttggtcgctaagtatgtgaatagcgattcttaccaagatctgtatcaagaccgcaaaaccattctctatggtgtggtcgacagtgatattacggccaacaccttgctgcgcgtcggtggtagctataaccacaacgatcccaaaggggcgatgtggggcgcgttgcctgccgtctttagtgatggttctgccactgattgggatacatcggccaccacagctgccgattggagccgctgggaaaccaaaaacatcaactactttgcgaacctgaatcactacttcagcaatggttggcagctggtcgctaactacaaccgcatggagtatgagaccaccactaagatgatctacatgtcgggtatgctcgataaagacacgggggtgggactcagtggacagcgttatcacagccatggtgaaagtaactcgaataactttgatgtgcagctaaagggcgactatgacctctttggtcaaacccatgagtttgtgacgggcgctttgtatagtaagcaaaaatcctacgccgatacctatgagcctatccgtgacgatatgacggggtgggactcacaagtggtggataacttctacgaatggcaacaaaatcagtttgccgagccagaatggtcgagcaacgcgaaccgtcagctcaatatggataccgagcaaaaaggcttttatgcggcgactcgcttaacgattaccgatgattttaaactgattgccggtggacgtatctcaagctggaaccgtgaaggcgtgagctatggtaccgatactaactttggtgatgatggggtgtttgtgccctatgttggcgccttgtacgatatcaatgacgcgcaccgtatttacgccagttataccgggatttttaacccgcagaataatttcgatgccgatcaaaattacctcgacccattagaaggcaaagcctacgaattaggtctgaagagtgcttatcttgacgatcgtctacataccactgtggccgtgttccaaattgaccaagataacttggcaaccttagccggaacgattgttatcggtggtcaacccgtgaattattatgaggccgcacaaggcactaagagtaagggatttgagctagaggtggtgggtgagcctgccgatggctggaatatctctgcgggttactcgcaatttaatgccgaagatgcagagggtaagcgggttgcgactaccagtccgcagaagcaattcaaactgtttaccacctaccaatttgtggacttattgcctgagttaaccataggtggtggggtgaattggcaaagcgacagttactctgaaggcggtggtgtggcaatcaagcaggatgcttactccctagtgaatctgatggcacgctacgatctggctgagaatatggatctgcaggttaacgtagagaatctgctggatgagaaatattatgcctatatgacagcgtctggcattgcttacagtgcgtatcactacggcgcgccacgtaattttaccgtcagctttaactatcgtttttaa

SEQ ID NO: 115026 - protein, 723 aa, Shewanella sp. MR-4
MTMRFNLLPLAAAVTLALNPLALMAEEQTASTTETQDQNIEKITVMGKYTVSRNIDTATGLGLTLRETPQSVSIMTADRIEDQALNTVVDVVNNTVGLSSSKTDNVRNGFSARGFTVQNYQIDGVPLSWSLGGDAGETVSDVSIYERVEVVRGATGLLTGAGDPSASINLVRKHADSSDLKGYVDVATGSWDKKQVTADVSNGLNEDGSVRGRLVAKYVNSDSYQDLYQDRKTILYGVVDSDITANTLLRVGGSYNHNDPKGAMWGALPAVFSDGSATDWDTSATTAADWSRWETKNINYFANLNHYFSNGWQLVANYNRMEYETTTKMIYMSGMLDKDTGVGLSGQRYHSHGESNSNNFDVQLKGDYDLFGQTHEFVTGALYSKQKSYADTYEPIRDDMTGWDSQVVDNFYEWQQNQFAEPEWSSNANRQLNMDTEQKGFYAATRLTITDDFKLIAGGRISSWNREGVSYGTDTNFGDDGVFVPYVGALYDINDAHRIYASYTGIFNPQNNFDADQNYLDPLEGKAYELGLKSAYLDDRLHTTVAVFQIDQDNLATLAGTIVIGGQPVNYYEAAQGTKSKGFELEVVGEPADGWNISAGYSQFNAEDAEGKRVATTSPQKQFKLFTTYQFVDLLPELTIGGGVNWQSDSYSEGGGVAIKQDAYSLVNLMARYDLAENMDLQVNVENLLDEKYYAYMTASGIAYSAYHYGAPRNFTVSFNYRF

SEQ ID NO: 115027 - DNA, 2196 bp, Shewanella sp. MR-7
  CDS (1)..(2196): transl_table=11
atgactatgcgttttaatctacttccacttgctgctgcagtaaccctagctttgaatcctttggcgctgatggccgaagaacaaaccgcttcaacaacagagacacaagatcaaaatatcgaaaaaatcactgtgatgggtaaatacacagtgagtcgtaatattgataccgcaacggggttaggactcacgttgcgggaaacgccacagtcggtcagcattatgacggcggatcggattgaagatcaggcgctaaataccgtggtcgatgtggtcaacaacactgtgggtttatcatcttcaaaaaccgataacgtgcgtaacggtttttcggctcgcggttttaccgtgcaaaactatcaaattgatggcgtgcctttatcttggagtttaggtggtgatgccggtgaaacggtatcggatgtgtctatctacgagcgcgttgaagtcgtgcgtggtgctaccggattattaacaggtgctggcgatccttcggcctcaattaacttagtgcgtaagcatgccgacagttctgatcttaaaggttatgtcgatgttgccactggaagttgggataaaaaacaagtcaccgcggatgtgtctaatggtctgaatgaagacggcagcgtgcgtgggcgcttggtcgctaagtatgtgaatagcgattcttaccaagatctgtatcaagaccgcaaaaccattctctatggtgtggtcgacagtgatattacggccaacaccttgctgcgtgttggtggtagctataaccacaacgatcccaaaggggcgatgtggggcgcgttgcccgccgtctttagtgatggttctgccacagattgggatacatcggccaccactgccgccgattggagccgctgggaaaccaaaaacatcaactactttgcgaaccttaatcactacttcagcaatggttggcagctcgtcgctaactacaaccgcatggggtatgagaccactactaagatgatatacatgtcgggtatgctcgataaagacacgggggcgggactcagtggacagcgttatcacagccatggcgaaagtaactcgaataactttgatgtgcagcttaaaggcgactatgacctctttggccaaacccatgagtttgtgacgggcgctatgtatagtaagcaaaaatcctacgccgatacctacgagcctatccgtgacgatatgacgggttgggactcacaagtggtggataacttctacgaatggcaacaaaatcagtttgctgagccagagtggtcgagcaacgcgaaccgtcagctcaatatggataccgagcaaaaaggcttttatgcggcgactcgcttaacgattaccgatgattttaaattgattgctggtggacgtatctcaagctggaatcgtgaaggcgtgagctatggtaccgatactaactttggtgatgatggggtgtttgtgccctacgttggcgccttgtacgatatcaatgacgcgcaccgtatttacgccagttataccgggatttttaacccgcagaataaacaggatgctagtggcgattatcttgacccattagaggggaaagcatatgagattggattaaaaagtgcgtatttagatgaccgtctacatacatcgttagcattgtttaaaatcgagcaggataactttggtaaacaagatccggactttgtaccgactgaagagcaaatcgccaacggccaaacgaccgcatactatgctatccaaggtacggaaagtaagggcttcgagttagaagttgttggggagtttatcgacggttggaatatttcagcgggctattcacaatttaaagccgaagatgctgaaggaaataagttggatacaaccagtccacgtaagcaatttaaactgtttactacctatcaatttgtggatctattgccagagttaaccattggtggtggagtgaattggcaaagtgatagttattctacaggtggcaatgtcactatcacgcaggatgcctattctttggtgaatctaatggcgcgctacgatctggctgaaaatatggatttgcagtttaacctcgagaatctgctggatgagaaatattacgcctatatgtcaacctctagttatttgccggaagcttacagcgtgtatcactacggcgcgccacgtaactttaccgtcagctttaactatcgtttttaa

SEQ ID NO: 115028 - protein, 731 aa, Shewanella sp. MR-7
MTMRFNLLPLAAAVTLALNPLALMAEEQTASTTETQDQNIEKITVMGKYTVSRNIDTATGLGLTLRETPQSVSIMTADRIEDQALNTVVDVVNNTVGLSSSKTDNVRNGFSARGFTVQNYQIDGVPLSWSLGGDAGETVSDVSIYERVEVVRGATGLLTGAGDPSASINLVRKHADSSDLKGYVDVATGSWDKKQVTADVSNGLNEDGSVRGRLVAKYVNSDSYQDLYQDRKTILYGVVDSDITANTLLRVGGSYNHNDPKGAMWGALPAVFSDGSATDWDTSATTAADWSRWETKNINYFANLNHYFSNGWQLVANYNRMGYETTTKMIYMSGMLDKDTGAGLSGQRYHSHGESNSNNFDVQLKGDYDLFGQTHEFVTGAMYSKQKSYADTYEPIRDDMTGWDSQVVDNFYEWQQNQFAEPEWSSNANRQLNMDTEQKGFYAATRLTITDDFKLIAGGRISSWNREGVSYGTDTNFGDDGVFVPYVGALYDINDAHRIYASYTGIFNPQNKQDASGDYLDPLEGKAYEIGLKSAYLDDRLHTSLALFKIEQDNFGKQDPDFVPTEEQIANGQTTAYYAIQGTESKGFELEVVGEFIDGWNISAGYSQFKAEDAEGNKLDTTSPRKQFKLFTTYQFVDLLPELTIGGGVNWQSDSYSTGGNVTITQDAYSLVNLMARYDLAENMDLQFNLENLLDEKYYAYMSTSSYLPEAYSVYHYGAPRNFTVSFNYRF

SEQ ID NO: 115029 - DNA, 2214 bp, Shewanella sp. MR-7
  CDS (1)..(2214): transl_table=11
atggaatttaagatcattattatgaaaaccttccccctcaaccgtctcgcggcgcactgtcaactcgccatcacacgccctgagcttattctctgcagtgccatactcagcatgccctatgcttatgccgatgccagcgatacccagaaaaaatccaccaaagacattgaaatcattaatgtcgttggcgctaaggatctccacgataatcgctacaaaactcaggcgatgaacacggcaacgggtctagatttgtcctatttagagacgccgcaatccgtcacctctgttaccagccaaatgatgcatgaccaacaactaaacagcgtcatcgaagccatgaccagcgtggctggcatcaatgctcggccgatggacaacgacagatacagcatcagctcgcgcggaattgcggtcactagcattctttacgatggcgtgcccaccacctatgacacccgttttaactacggcgataaccttatcgataccgccatctacgagcgcgtggaaatagtccgtggcgctacagggttaatgacaggtgcaggtaatccctcggccgcgattaaccttattcgtaaacgcccaacgcaagaatttatgggcagcacctcagtgagtgtcggctcatggaacaatctgcgcggtatggtcgatttatccagcggcttaaatgacagtggtagcattcgtggccgggttgtcgccgcctatcaggataaagaatccttccaagacagatacgagcaacaacgcaccaccctctatggcattgttgaaaccgatattaccgacagcacactgctgaccttaggcgtggattatcaagacaccacacccgaagccactatgtccggcgggctgccgctgttccacagtgatggcagccgaacaaattacgatcgcgccacttccaccgcccccgattgggcctcggcgcatacccaaggactcaataccttcgccagccttcaacatcgttttgataacggttgggaactaaaaggcacttacagttacggcgataactcactgaaatataatgtgctgtgggctacaggttaccctgaccccgtgactaatcttggtgccaccgcaggctcaatcgcctatgtcgatggaagtcgtacccaacataacctcgacttacgggcgcagggaatgtttgccctgtttggccaagaacatcagctgacctttggctggacgggtcagcgccaagagtttgccaacccttactattatcctacggccgccgtgccgcccttgggagattttcgcgatcccaacttccagtatccaaaacctcagtggaaagaaactcacaccacgggctccttcggcgaaaccgagcaaagcgccgcctatgtggccacgcagcttaatctgaccgatgccttggcattgctcgcgggcctgcgccttaaccagtggcaaaccgaccaagataactttggcagcatgtatgactttaaggtcgacaatgagctcaccacctattttggcctgacctacgcactgagcgagcaatactccctctacgccagttatacggatattttcgcgccgcaaaccttgcagcgcatagatgccagttacatcgaccccgtcaaaggcaaaaactacgaggcgggcattaaagccagcttaatggatgaaagcttagatatgtcgttgtcggtatttgaaattcgccaagacaatgttggtgaacgcaccggagatgtactgccaggtaccactatccctgtgtatcgagaggttaacggcactaagacccaaggctttgagtttgaatccacaggcaaaatcaccgatgactggaatatctacttcggctacacccaattcagtaccgatgatcctaagggcaatcgcatcaacacctcatctcctcgccagcagctaaaactctttaccacttatacctttagcggcgattggaacaagttgcagcttggcgctggggttaattggcaaagccgagtctatcaaaccgtcaactcgcccttaggcagagtcgaggttgagcaaggctcctatgcgttggccagcctaatggcaagttatgcctttaccgagcaggtaaagctaagcgccaatgtgcacaacgccttagataaaacctactacagccaagtggggcaatttagtcagtaccaatatggtaccccgcgcagcgtgagcgtgaatttggattaccgcttctaa

SEQ ID NO: 115030 - protein, 737 aa, Shewanella sp. MR-7
MEFKIIIMKTFPLNRLAAHCQLAITRPELILCSAILSMPYAYADASDTQKKSTKDIEIINVVGAKDLHDNRYKTQAMNTATGLDLSYLETPQSVTSVTSQMMHDQQLNSVIEAMTSVAGINARPMDNDRYSISSRGIAVTSILYDGVPTTYDTRFNYGDNLIDTAIYERVEIVRGATGLMTGAGNPSAAINLIRKRPTQEFMGSTSVSVGSWNNLRGMVDLSSGLNDSGSIRGRVVAAYQDKESFQDRYEQQRTTLYGIVETDITDSTLLTLGVDYQDTTPEATMSGGLPLFHSDGSRTNYDRATSTAPDWASAHTQGLNTFASLQHRFDNGWELKGTYSYGDNSLKYNVLWATGYPDPVTNLGATAGSIAYVDGSRTQHNLDLRAQGMFALFGQEHQLTFGWTGQRQEFANPYYYPTAAVPPLGDFRDPNFQYPKPQWKETHTTGSFGETEQSAAYVATQLNLTDALALLAGLRLNQWQTDQDNFGSMYDFKVDNELTTYFGLTYALSEQYSLYASYTDIFAPQTLQRIDASYIDPVKGKNYEAGIKASLMDESLDMSLSVFEIRQDNVGERTGDVLPGTTIPVYREVNGTKTQGFEFESTGKITDDWNIYFGYTQFSTDDPKGNRINTSSPRQQLKLFTTYTFSGDWNKLQLGAGVNWQSRVYQTVNSPLGRVEVEQGSYALASLMASYAFTEQVKLSANVHNALDKTYYSQVGQFSQYQYGTPRSVSVNLDYRF

SEQ ID NO: 115031 - DNA, 2190 bp, Shewanella sp. ANA-3
  CDS (1)..(2190): transl_table=11
atgcgttttaatctacttcctcttgcggctgcggtaacactagcattgaatcctttggcgttgatggccgaagaacaaacctcttctaaaacagagacacaagatcaaaatatcgaaaaaatcaccgtgatgggtaaatacactgtgagtcgaaatattgatacagcgacaggtctcggactcacattacgggaaacgccacagtcggtcagcatcatgacggcggatcggattgaagatcaggcgttaaatactgtggtcgacgtggtgaataacactgtgggcctgtcttcttcaaaaaccgataacgtgcgtaacggtttttcggcccgcggttttaccgtacaaaactatcaaattgatggcgtgcctttatcttggagtttaggcggcgatgctggcgaaacggtatcggatgtgtctatctacgagcgtgttgaagttgtgcgtggtgctaccggtttattaacgggtgcaggcgatccttctgcctcgattaacttagtgcgtaagcatgccgacagctcagatcttaaaggttatgtggatgtcgcaacgggaagttgggataaaaaacaagtcactgcggatgtgtccaatggtttgaatgaagacggcagtgtccgtggccgtttagtcgctaagtatgtgaatagcgattcttaccaaaatctgtatcaagaccgtaaaaccattctctatggtgtggttgatagcgatatcaccgccaacactttactgcgtgtcggtgctagctataaccacaacgatccaaaaggcgcgatgtggggcgcgttgcccgccgtctttagcgatggctcagccacagattgggatacttcggccaccacagccgccgattggagccgctgggaaaccaagaatatcaactactttgctaacctaaatcattacttcagcaatggttggcaactggtggctaactacaaccgcatggaatatgaaaccacaactaagatgatctacatgtcgggtttactcgataaagacacgggtgctgggctcagtggtcagcgttatcacagccatggtgaaagtaactcgaataactttgatgtgcagcttaagggcgactatgacctctttggtcaaacccatgagtttgtgacgggcgccttatatagtaagcaaaaatcctacgccgatacttatgagcctatccgtgacgatatgacgggttgggactcacaagtggtcgataacttctacgaatggcaacaaaatcagtttgctgagcctgaatggtcgaccaatgcgaaccgtcagctcaatatggataccgagcaaaaaggcttttatgcggcgactcgcctgaccatcaccgatgatttcaaactgattgccggtgggcgtatctcaagctggaaccgtgaaggcgtgagctatggtaccgatactaactttggcgatgatggtgtgtttgtgccctatgttggtgccttatacgatatcaatgaagagcaccgtatttacgccagctataccgggatttttaatccgcagaataaacaggatgcgagtggcgattatcttgacccattagaggggaaagcatatgagattggtttaaaaagtgcgtatttagatgaccgtctgcatacatcgctagcattgtttaaaatcgagcaggataactttggtaaacaagatccggactttgtaccgactgaagagcaaatcgccaacggccaaacgaccgcatactatgctatccaaggtacggaaagtaagggcttcgagttagaagttgttggggagtttatcgacggttggaatatttcagcaggctattcacaatttaaagccgaagatgctgaaggaaataagctggatacaaccagtccacgtaagcaatttaaactctttactacctatcaatttgtggatttattaccagagttaaccattggtggtggagtgaattggcaaagcgacagttattctacaggtggcaatgtcactatcacgcaggatgcctattctttggtgaatctgatggcgcgctacgatctggctgaaaatatggatctgcaggttaacgtagagaatttactggatgagaaatattacgcctatatgtcaacctctagttatttgccagaagcttatagcgtatatcactacggtgcgccacgtaactttaccgttagctttaactatcgcttctaa

SEQ ID NO: 115032 - protein, 729 aa, Shewanella sp. ANA-3
MRFNLLPLAAAVTLALNPLALMAEEQTSSKTETQDQNIEKITVMGKYTVSRNIDTATGLGLTLRETPQSVSIMTADRIEDQALNTVVDVVNNTVGLSSSKTDNVRNGFSARGFTVQNYQIDGVPLSWSLGGDAGETVSDVSIYERVEVVRGATGLLTGAGDPSASINLVRKHADSSDLKGYVDVATGSWDKKQVTADVSNGLNEDGSVRGRLVAKYVNSDSYQNLYQDRKTILYGVVDSDITANTLLRVGASYNHNDPKGAMWGALPAVFSDGSATDWDTSATTAADWSRWETKNINYFANLNHYFSNGWQLVANYNRMEYETTTKMIYMSGLLDKDTGAGLSGQRYHSHGESNSNNFDVQLKGDYDLFGQTHEFVTGALYSKQKSYADTYEPIRDDMTGWDSQVVDNFYEWQQNQFAEPEWSTNANRQLNMDTEQKGFYAATRLTITDDFKLIAGGRISSWNREGVSYGTDTNFGDDGVFVPYVGALYDINEEHRIYASYTGIFNPQNKQDASGDYLDPLEGKAYEIGLKSAYLDDRLHTSLALFKIEQDNFGKQDPDFVPTEEQIANGQTTAYYAIQGTESKGFELEVVGEFIDGWNISAGYSQFKAEDAEGNKLDTTSPRKQFKLFTTYQFVDLLPELTIGGGVNWQSDSYSTGGNVTITQDAYSLVNLMARYDLAENMDLQVNVENLLDEKYYAYMSTSSYLPEAYSVYHYGAPRNFTVSFNYRF

SEQ ID NO: 115033 - DNA, 2214 bp, Shewanella sp. ANA-3
  CDS (1)..(2214): transl_table=11
atggaatttaagatcattattatgaaaaccttccccctcaacagcctcgcggcgcactgccaactcgccatcacacgccctgagcttatcctctgctctgccatactcagcatgccctatgcttatgccgatgccagcgatacccagaaaaaatccaccaaagacattgaaatcattaatgtcgttggcgctaaggatctccacgataatcgctacaaaactcaggcgatgaatacggcaacgggcttagatttgtcctatttagagacgccgcaatccgtcacctctgtgactagccaaatgatgcatgaccagcaactaaacagcgtgatcgacgccatgactagcgtagcaggcatcaacgctcggccgatggacaacgacaggtacagcatcagctcccgcgggattgcggtcaccagtattctttacgatggcgtgcccaccacctatgacacccgttttaactacggcgataaccttatcgataccgccatctacgagcgggtggaaattgtacgtggcgccacaggattaatgacgggtgcgggtaatccctcggccgcgattaaccttattcgtaaacgcccgacacaagaatttatgggcagcacctcagtgagtgttggctcatggaacaatctgcgcggcatggtcgatttatcaagcggcttaaatgacagtggcagcattcgtggccgtgttgtcgccgcctatcaggataaggaatccttccaagacagatatgagcagcaacgcaccaccctctatggcattgttgaagccgatattaccgccagcacattgctgaccttaggcgtggattatcaagacaccacgcccgaaggcactatgtccggcggtctgccgctgttccacagtgatggcagccgtacaaattacgatcgcgcgacctccaccgcccccgattgggcctcggcgcatacccaaggactcaataccttcgccagccttgaacatcgttttgataacggttgggagctaaaaggcacctacagttacggcgataactcactgaaatacgatgtactctgggctacggggtatcccgatccggtaacaaacataggcgcaaccgcaggctcaatcgcctatgtcgatggtagtcgtacccaacataacctcgacttacgggcacagggaatgtttgccctgtttggccaagagcaccagctcacctttggctggacgggtcagcgccaagagtttgccaacccttactattatcctacggccgccgtaccgcccttaggggattttcgcgatcccaacttccagtatccaaaacctcagtggaaggagactcacaccacgggaaccttcggcgaaaccgaacaaagcgccgcctatgtggccacgaagcttaatctgaccgatgccttggcattgcttgcggggctgcgcctgaacaagtggcaaaccgaccaagataactttggcagcatgtatgactttaaggtcgacaatgagctcaccacctattttggcctgacctacgcactcggcgagcaatactccctctacgccagttatacggatatttttgcgccgcaaaccttgcagcgcatcgatgccagctacatcgaccccgtcaaaggtaaaaactacgaggcgggtattaaggccagcttgatggatgaaagcttagatatgtcgttgtcggtatttgaaattcgccaagacaatgttggtgaacgcactggcgatgtgttgccgggcaccactattccagtatatcgagaggttaacagcactaaaacccaaggctttgagtttgaatccacgggcaaaatcaccgatgactggaatatctacttcggctacacccaattcagcaccgatgaccctaagggcaatcgcatcaacaccacttcccctcgccagcagctaaaactctttaccacttatacctttagcggcgattggaacaaattgcagcttggcgctggggtcaattggcaaagccgtgtctaccaaaccgtgaactcgcccttaggcagagtcgaggttgagcaagactcctacgcgttagccagcttaatggcaagttatgcctttaccgagcagctaaagctaagcgccaatgtgcacaacgccttagataaaacctactacagccaagtggggcaatatagccaattccaatacggcgccccacgcagcatgagtgtgaatttggattatcgcttctaa

SEQ ID NO: 115034 - protein, 737 aa, Shewanella sp. ANA-3
MEFKIIIMKTFPLNSLAAHCQLAITRPELILCSAILSMPYAYADASDTQKKSTKDIEIINVVGAKDLHDNRYKTQAMNTATGLDLSYLETPQSVTSVTSQMMHDQQLNSVIDAMTSVAGINARPMDNDRYSISSRGIAVTSILYDGVPTTYDTRFNYGDNLIDTAIYERVEIVRGATGLMTGAGNPSAAINLIRKRPTQEFMGSTSVSVGSWNNLRGMVDLSSGLNDSGSIRGRVVAAYQDKESFQDRYEQQRTTLYGIVEADITASTLLTLGVDYQDTTPEGTMSGGLPLFHSDGSRTNYDRATSTAPDWASAHTQGLNTFASLEHRFDNGWELKGTYSYGDNSLKYDVLWATGYPDPVTNIGATAGSIAYVDGSRTQHNLDLRAQGMFALFGQEHQLTFGWTGQRQEFANPYYYPTAAVPPLGDFRDPNFQYPKPQWKETHTTGTFGETEQSAAYVATKLNLTDALALLAGLRLNKWQTDQDNFGSMYDFKVDNELTTYFGLTYALGEQYSLYASYTDIFAPQTLQRIDASYIDPVKGKNYEAGIKASLMDESLDMSLSVFEIRQDNVGERTGDVLPGTTIPVYREVNSTKTQGFEFESTGKITDDWNIYFGYTQFSTDDPKGNRINTTSPRQQLKLFTTYTFSGDWNKLQLGAGVNWQSRVYQTVNSPLGRVEVEQDSYALASLMASYAFTEQLKLSANVHNALDKTYYSQVGQYSQFQYGAPRSMSVNLDYRF

SEQ ID NO: 115035 - DNA, 2427 bp, Azoarcus sp. BH72
  CDS (1)..(2427): transl_table=11
gtgaagtccaccgtcgtccccgccgtcacccccgtccaggcgcatcgatttatcgctcgccgcctggagctgatcgtccgtgccgtcttcgccggcattctgctgagccccgcggcgcaggtgcctgcggcgcaggcgcagcagtcgtccgccgccgtgcgcagctacagtattccggccgggccgctgacggtggtgctgacgcgcttcgtcggcgaatccggcatcttcctcgccgggacggccgaactggcccagggcaaggccagccccggtctgcagggggcttactcggtcgggtcggggctgcaggcgctgcttgccggcaccggcctcgaggccgtcgcatcgcccaatggcgagtatgtgctgcgcaggcttgccgcgccttcgggggcagacatggtgctgcctgccgtcaccgtggctgcggccgcagccagccaggttaccgaagggacgggggcgtatacggtgaggtcggcgaataccgcgacccggctggatttgtcgccgcgcgaaacgccgcagtcgctcagcgtggtgacccgcgccgtgatggacgacttcagcctgaccagcgtcaacgacatgctggccacggcgaccggcgtcaatgtcgagctggtcgaacccgaccggacctacttctcggtgcggggtttcgaggtgtccaatttccttgtcgatggcatcggtctgccttttgccactggcgatcaactgggcgatctcgataccgcaccctacgatcgtgtcgagatcctgcgcggcgccaacggtctgctcgcagccaccggcaatccgtccggcaccatcaatttcgtgcgcaagcggccgacggatcaactgcaggcgtcagccgcattgacgctggggtcgtggagcaacagacgcatcgatggcgacgtcgcggggccgctcaacgagtcgggttcgctgcgtggccgtctgatcgccgccgcgcagaagaaggattcttacctcgaccgctactcgctggaaaagaacgtgttttcggttgtgctcgaggccgatctcgcgccggacaccttgctgaccttcggtcatgcggagcagcacaacaggcccaagggcacgatgtggggtgcattgccgctttactacaccgacggcacgccgaccgactactcgacctcggccagcgtcggtacggactggacctactggaacaccgacgacatccacactttcgtcgagttgaggcagaacctcgccgatggctggcaggcaaaggggacggtgatccggcgcgagctgaagtcggacggaaaactcttttatctcagcggcgtggccgatcgcaccacgggcgcaggcctgacgagctggccgtcggaatacgatcacaccgaacgtcaatgggggagcgatctgcatgtgtccggccccttcacgctgggggggcgacgtcatgaactggtgttcggcgtcaattgggcggagagcaagaaccgtctgcactccagggatgacgacaccggcctgccgctcaccgagtatgaagcactggccggtcacttcccggagccggctttcgacgccggcctgaccggggccgccgccttcaccaaccggcgcagcagtctctatgcgaccgcccgcttcaaccttaccgatgatctgaaactgatcaccggtgccagcgtcacccgggccaccagctcgggcatgcagtacggtgtcgtccacgactaccgcgaaacccggaccacgccctacctcggcgtggtctacgacctcgacgaccggcatagcgtctatgccagctacgccggcatcttcagcccgcagcaccagatcgagcagagtggcagcgtgatgagtccgatcgaagggcgcaatgtcgagatcggcgccaagggtgaatggttcgaccagcgcttgaacggcagcgtggcgctcttccgtaccaagcaggacaacaccgccgagtatgccggctttgccaacggcaggtcgtattacagcggcgtggatgcaacgaccaccggcttcgaactggatttgtccgggcgggtgacgtcgatctgggatatcagcgccggttacacccagttccggctcgaggacgaagacggccacgacgtccgcacctacgtgccgcggcgaaccctgcggctgacctccacggtcaggattcccttcgtccccggcctgaagctcggcgccaacctgaaatggcaggacgacatccatcgggaccagggcggcggcatcgtcacgaagcagaagagctacgccttgcttgatctgatggccagctacgagatcgacaagcacttcaacctgatcgccaaagtcggcaacgtcaccgacgagaaatacctgaacagcctgctctgggcccagagctactacggcgcaccgctgaacggcagcgtgacgctgcagtggaagtactga

SEQ ID NO: 115036 - protein, 808 aa, Azoarcus sp. BH72
MKSTVVPAVTPVQAHRFIARRLELIVRAVFAGILLSPAAQVPAAQAQQSSAAVRSYSIPAGPLTVVLTRFVGESGIFLAGTAELAQGKASPGLQGAYSVGSGLQALLAGTGLEAVASPNGEYVLRRLAAPSGADMVLPAVTVAAAAASQVTEGTGAYTVRSANTATRLDLSPRETPQSLSVVTRAVMDDFSLTSVNDMLATATGVNVELVEPDRTYFSVRGFEVSNFLVDGIGLPFATGDQLGDLDTAPYDRVEILRGANGLLAATGNPSGTINFVRKRPTDQLQASAALTLGSWSNRRIDGDVAGPLNESGSLRGRLIAAAQKKDSYLDRYSLEKNVFSVVLEADLAPDTLLTFGHAEQHNRPKGTMWGALPLYYTDGTPTDYSTSASVGTDWTYWNTDDIHTFVELRQNLADGWQAKGTVIRRELKSDGKLFYLSGVADRTTGAGLTSWPSEYDHTERQWGSDLHVSGPFTLGGRRHELVFGVNWAESKNRLHSRDDDTGLPLTEYEALAGHFPEPAFDAGLTGAAAFTNRRSSLYATARFNLTDDLKLITGASVTRATSSGMQYGVVHDYRETRTTPYLGVVYDLDDRHSVYASYAGIFSPQHQIEQSGSVMSPIEGRNVEIGAKGEWFDQRLNGSVALFRTKQDNTAEYAGFANGRSYYSGVDATTTGFELDLSGRVTSIWDISAGYTQFRLEDEDGHDVRTYVPRRTLRLTSTVRIPFVPGLKLGANLKWQDDIHRDQGGGIVTKQKSYALLDLMASYEIDKHFNLIAKVGNVTDEKYLNSLLWAQSYYGAPLNGSVTLQWKY

SEQ ID NO: 115037 - DNA, 2214 bp, Azoarcus sp. BH72
  CDS (1)..(2214): transl_table=11
atgcctcgtttcgtcccgccccccaacccaatccccaacccagccctgaccccgctggcgctcgccctccccctgatctgcacccccatcctcaccacccccgcgctcgcccaatccaccacccccgaagccccccgcatcctgcagcccgtcaccgtctccgccgacaccaccgccgcccccgaccccgccaccgagggcaccggctcctacaccacccgcgtcacccgcagcgccacgcggctggatctgtcgatccgcgacacgccgcagtcggtcagcgtggtcacgcgcgagcgcatcgacgaccaggggctgcagtccatcaccgacgtggtggcagccaccaccggcgtttccaccaaggtgaacgacagctcgcgctccagtttttcggcgcgcggcttcgccatcgacaacctgcagatcgacggcattcccaccacctggagcaccggctggagtgcgggcgagacgttgaccgacaccgccatctacgaccgcgtcgagatcgtgcgcggcgccaccgggctgatgacgggggcgggcaacccgtcggcggcgatcaacctggtgcgcaagcacgccgacagcaccgtgttcaccggcgcggtcacgctcggcgccggttcgtgggacaactacttcggcacggtggatctcaccgcgccgctcaatgccagcggcagcgtgcgtgcccgcgtggtcgggagcctgcaggaccaggattcctacgtcgatctctaccacaaccgccgcgagacgctgtacggcgtggtcgatgccgacctcggcgagcgcacccggctgtcggtgggcgccagccggcaggagaacgatcccgacgcctcccagtggggcgggctgcccgcctggcatgccgacggcacgcgcaccgactggcgccgttccgccaccactgcggcgaagtgggcgtcgtgggcgtcctcccatcgcacccatttcgtccggctggagcaccagttcgacaacggctggaaggccgagctgatgctcaaccacggcgagaacgagggcgatctgaagctgctctacctgtacggaacgccggaccggagcaccggcctcggcatgggcgcctcgccggcgcgctacgcggtcagccgcaagcaggacgacatcggcgtgcacgccagcggccccttcgaactgctgggccgcaagcacgaactcgccttcggcctgatgcgcagcgagcaggacttcgacgccacccggcgcgccgcggcgggcgtcagcgcggtgggaaacttcaacctgtgggacggcagttacccggagccggcgtgggggccggagaccctctccgaagcctatgaaacggtgcaggaagccgcctacgcggtggcgcgcctcagcctcgccgatccgctcaagctcatcgtcggcgcccgcgtcagcaactggacgcgcgacggccagacccccaccgcgcgctacgaattcgaccacaagggcgtggtcacgccctacgccgggctgatctacgacatcgacggccagcactccgcctacgccagctacaccgacatcttcaacccgcagaactaccgcgaccgcaatggcgactacctcgacccgctcaccggcaagagctacgaggtgggcgtcaagggcgagtacttcggcggccgcctcaatgcctcgctggcggtgttccgcatcgagcaggacaacctcgcccagaccgatgccggctacctggtgccgggcaccagcaaccaggcctactacgccgcccagggcaccaccagcgaaggctacgagatcgaggtcgccggcgaacccgcaccgggctggaagattgccgccggctggacgcagttcgaagcgaaggacgaggacggcgacaaggtgaacaccaaccacccgcgccgcatgctgaagctgttcaccacctggcagctgcccggcgcctgggaaaagctcaccgtgggtggcggcatcaactgggaaggcgagaactacaccgcggtcaccaacccggtgaccggcgccgcggaaaagctgaagcagcgcccgtatgcgctggtgaacctgatggcgcgctaccagatcagcaaggcggtttcggcccagctcaatgtcaacaacctgttcgacaagacctattacagccagatcggcttctacaaccagctcgcctacggcgccccccgcaacgcccagctgacgctgaagtaccagttctga

SEQ ID NO: 115038 - protein, 737 aa, Azoarcus sp. BH72
MPRFVPPPNPIPNPALTPLALALPLICTPILTTPALAQSTTPEAPRILQPVTVSADTTAAPDPATEGTGSYTTRVTRSATRLDLSIRDTPQSVSVVTRERIDDQGLQSITDVVAATTGVSTKVNDSSRSSFSARGFAIDNLQIDGIPTTWSTGWSAGETLTDTAIYDRVEIVRGATGLMTGAGNPSAAINLVRKHADSTVFTGAVTLGAGSWDNYFGTVDLTAPLNASGSVRARVVGSLQDQDSYVDLYHNRRETLYGVVDADLGERTRLSVGASRQENDPDASQWGGLPAWHADGTRTDWRRSATTAAKWASWASSHRTHFVRLEHQFDNGWKAELMLNHGENEGDLKLLYLYGTPDRSTGLGMGASPARYAVSRKQDDIGVHASGPFELLGRKHELAFGLMRSEQDFDATRRAAAGVSAVGNFNLWDGSYPEPAWGPETLSEAYETVQEAAYAVARLSLADPLKLIVGARVSNWTRDGQTPTARYEFDHKGVVTPYAGLIYDIDGQHSAYASYTDIFNPQNYRDRNGDYLDPLTGKSYEVGVKGEYFGGRLNASLAVFRIEQDNLAQTDAGYLVPGTSNQAYYAAQGTTSEGYEIEVAGEPAPGWKIAAGWTQFEAKDEDGDKVNTNHPRRMLKLFTTWQLPGAWEKLTVGGGINWEGENYTAVTNPVTGAAEKLKQRPYALVNLMARYQISKAVSAQLNVNNLFDKTYYSQIGFYNQLAYGAPRNAQLTLKYQF

SEQ ID NO: 115039 - DNA, 2178 bp, Neisseria meningitidis FAM18
  CDS (1)..(2178): transl_table=11
atgacacgcttcaaatattccctgctgtttgccgccctgttgcccgtgtacgcgcaggccgatgtttctgtttcagacgaccccaaaccgcaggaaagcactgaattgccgaccatcaccgttaccgccgaccgcaccgcgagttccaacgacggctacactgtttccggcacgcacaccccgctcgggctgcccatgaccctgcgcgaaatcccgcagagcgtcagcgtcatcacatcgcaacaaatgcgcgaccaaaacatcaaaacgctcgaccgcgccctgttgcaggcgaccggcaccagccgccagatttacggctccgaccgcgcgggctacaactacctgttcgcgcgcggcagccgcatcgccaactaccaaatcaacggcatccccgttgccgacgcgctggccgatacgggcaatgccaacaccgccgcctatgagcgcgtagaagtcgtgcgcggcgtggcggggctgctggacggcacgggcgagccttccgccaccgtcaatctggtgcgcaaacgcccgacccgcaagccattgtttgaagtccgcgccgaagcgggcaaccgcaaacatttcgggctgggcgcggacgtatcgggcagcctgaacaccgaaggcacgctgcgcggccgcctggtttccaccttcggacgcggcgactcgtggcggcagcgcgaacgcagccgcgatgccgaactctacggcattttggaatacgacatcgcaccgcaaacccgcgtccacgcaggcatggactaccagcaggcgaaagaaaccgccgacgcgccgctcagctacgccgtgtacgacagccaaggttatgccaccgccttcggcccgaaagacaaccccgccacaaattgggcgaacagccgccaccgtgcgctcaacctgtttgccggcatcgaacaccgcttcaaccaagactggaaactcaaagccgaatacgactacacccgcagccgcttccgccagccctacggcgtagcaggcgtgctttccatcgaccacaacaccgccgccaccgacctgattcccggttattggcacgccgacccgcgcacccacagcgccagcgtgtcattgatcggcaaataccgcctgttcggccgcgaacacgatttaatcgcgggtatcaacggttacaaatacgccagcaacaaatacggcgaacgcagcatcatccccaacgccattcccaacgcctacgaattttcccgcacgggcgcctatccgcagcctgcatcgtttgcccaaaccatcccgcaatacggcaccaggcggcaaatcggcggctatctcgccacccgtttccgcgccgccgacaacctttcgttgatactcggcggcagatacagccgttaccgcaccggcagctacgacagccgcacacaaggcatgacctatgtatccgccaaccgtttcaccccctacacaggcatcgtgttcgacctgaccggcaacctgtcgctttacggctcgtacagcagcctgttcgtcccgcaatcgcaaaaagacgaacacggcagctacctgaaacccgtaaccggcaacaatctggaagccggcatcaaaggcgaatggcttgaaggccgtctgaacgcatccgccgccgtgtaccgcgcccgtaaaaacaacctcgccaccgcagcaggacgcgacctgagcggcaacacctactaccgcgccgccaaccaagccaaaacccacggctgggaaatcgaagtcggcggccgcatcactcccgaatggcagatacaggcaggttacagccaaagcaaaacccgcgaccaagacggcagccgcctgaaccccgacagcgtacccgaacgcagcttcaaactcttcactgcctaccactttgcccccgaagcccccagcggctggaccatcggcgcaggcgtgcgctggcagagcgaaacccacaccgaccctgccacgctccgcatccccaaccccgccgccaaagcccgcgccgccgacaacagccgccaaaaagcctacgccgtcgccgacatcatggcgcgttaccgcttcaatccgcgcgccgaactgtcgctgaacgtggacaacctgttcaacaaacactaccgcacccagcctgaccgccacagttacggcgcactgcggacagtgaacgcggcgtttacctatcggtttaaataa

SEQ ID NO: 115040 - protein, 725 aa, Neisseria meningitidis FAM18
MTRFKYSLLFAALLPVYAQADVSVSDDPKPQESTELPTITVTADRTASSNDGYTVSGTHTPLGLPMTLREIPQSVSVITSQQMRDQNIKTLDRALLQATGTSRQIYGSDRAGYNYLFARGSRIANYQINGIPVADALADTGNANTAAYERVEVVRGVAGLLDGTGEPSATVNLVRKRPTRKPLFEVRAEAGNRKHFGLGADVSGSLNTEGTLRGRLVSTFGRGDSWRQRERSRDAELYGILEYDIAPQTRVHAGMDYQQAKETADAPLSYAVYDSQGYATAFGPKDNPATNWANSRHRALNLFAGIEHRFNQDWKLKAEYDYTRSRFRQPYGVAGVLSIDHNTAATDLIPGYWHADPRTHSASVSLIGKYRLFGREHDLIAGINGYKYASNKYGERSIIPNAIPNAYEFSRTGAYPQPASFAQTIPQYGTRRQIGGYLATRFRAADNLSLILGGRYSRYRTGSYDSRTQGMTYVSANRFTPYTGIVFDLTGNLSLYGSYSSLFVPQSQKDEHGSYLKPVTGNNLEAGIKGEWLEGRLNASAAVYRARKNNLATAAGRDLSGNTYYRAANQAKTHGWEIEVGGRITPEWQIQAGYSQSKTRDQDGSRLNPDSVPERSFKLFTAYHFAPEAPSGWTIGAGVRWQSETHTDPATLRIPNPAAKARAADNSRQKAYAVADIMARYRFNPRAELSLNVDNLFNKHYRTQPDRHSYGALRTVNAAFTYRFK

SEQ ID NO: 115041 - DNA, 2466 bp, Pseudomonas putida GB-1
  CDS (1)..(2466): transl_table=11
atgagaaacgcaaacatgacccgccgcttcaaccccaggcctttcactgcgccaggcctgcgcacctgcctgatgctggctgccctgctcggtgggcccggcgccgcctgtgccagccaagcccatgattaccacctgccgcagggtgacttaggcgaaacactgactcagttcgctgcgcagtccggcatcgtgctgtcgttcgacacgcacttgacgcgcggtaaacgttcgccggcactcgacgggcgctatggcgtagagcaggccttgcgaatgctgctgggcggtaccgggttgcaagccatacaggaaagtgacgggcgctattcgctgctgttgaacaccggcgagggcgatgtggtggagttggcacccagccgcgtcgatgccctggggctgggtaacgtcaccgagggtaccggtgcgtacaccaccggtggttctaccactgcaaccaagctgccactgaccctgcgtgagacaccgcagtcggtcagcgtgatcactcgccaggtcatggacgaccacggctcgcaagacatcggcgacgtgctgcgcaacacgcctggggtgtcagtccaggcttatgacagcgaacgcatggagtactccgcacgcggctttgccatcaccaattaccagtacgatggcatcaacaccatctatgacggggtctacgacgagggcgtaacccatgtcgacatggccgcctatgaccgtatcgaagtcatcaagggcgcgaccggcctgatgaccggctctggcgacccatctgccacggtcaacctggtgcgcaagaagcccactcaccacttcaaggcgtcgatcaccgccagcgccggctcctgggacaactaccgtaccgaaggtgacatttccggttcgctcaacgacagcggtagcgtgcgcggccgcctggtgggtgcctaccaggaccgcaagtcgtacctggaccactacaagcagaaaaaggacgtctactacggcattgtcgaagccgacctgacacccgacacgctgctgacattcggcatcgacaaccaggccactaccccgcgcgggtcgtcctggaccggcaacccgacgtacttctccgacggcagccgcaccgacttttcgcgcgcacacaacccggcagccgactggagccgtcgcgacttccagtccaccacctacttcagctcgctggagcaggccctggtcaatgactggaaggtcaaattcagcctcaaccacatgatcagcgatcacgacacacgcctggcttctgccagcggcggcaacccggacccggtcaccggcgaagggatgttcctgtattgggggcgctgggaaggccaccgcgtgcaaaacaccgcagacttgaatgtatccgggccgttcaccctgttcggccgcgagcatgacctggtggcaggcttcatgacctcgcattcgcggcagaccggtgatacctacgacggcagcgcattcgagaaggtgcccggttccatcttcgactggaacggcaaactgcccgagcagcacttcccgaaaaacggcgactacaccaccacgcaaagccagaacggcgcctatgtggccacccgcctgcggccgaccgacaagctttcggtcatcctcggcacccgcgtcagcaccttcaagtacaacgatgatgaagactattacccaacgtcttcgctgagcgacacccacgcgagctacaaggaacacggtgtggtcaccccctacgcgggcgtggtctatgacctggacgacacctactcggcctatgccagctacacctccatttaccagccacaagtgtacaaggacatcaacggcgcgaccttggcaccggtggaaggcgatggttatgaagcaggtttcaaggccgcctggttcgatggccggctgaacggcaccctggcgttcttccgcatcgagcaagacaacgtcgcctccaacgtcggcaccaacccggtaaccaacgaaggcatctacaaagctatcgacggtgcaaccaccaaaggtgtcgaactggaactggccggcgaactggcgcccggctggaacatcaccgccggctatacctatgcccgtacccgcgatgccgacgaccagcggatattcggtttcccgttggcaaccaccaagcctgaacacgtagtgcggctattcaatacctaccgcctgcctggtgtactcgatccggtgaccgtaggcggcgggctgaggtggcaaagcggcttctatggcaacatctacagcccggtcgccaatgactacacccgcatcaagcaaggcggctacaccctggtcgacttgatggcccgctaccagtacaacgagcacctgagttttacggtcaacgccaacaacgtgttcgacaaggtctacctgaccgggctgggcaacttcgatacgacctactatggcgaaccacgcaacctgatggtcaccacccgctgggatttctaa

SEQ ID NO: 115042 - protein, 821 aa, Pseudomonas putida GB-1
MRNANMTRRFNPRPFTAPGLRTCLMLAALLGGPGAACASQAHDYHLPQGDLGETLTQFAAQSGIVLSFDTHLTRGKRSPALDGRYGVEQALRMLLGGTGLQAIQESDGRYSLLLNTGEGDVVELAPSRVDALGLGNVTEGTGAYTTGGSTTATKLPLTLRETPQSVSVITRQVMDDHGSQDIGDVLRNTPGVSVQAYDSERMEYSARGFAITNYQYDGINTIYDGVYDEGVTHVDMAAYDRIEVIKGATGLMTGSGDPSATVNLVRKKPTHHFKASITASAGSWDNYRTEGDISGSLNDSGSVRGRLVGAYQDRKSYLDHYKQKKDVYYGIVEADLTPDTLLTFGIDNQATTPRGSSWTGNPTYFSDGSRTDFSRAHNPAADWSRRDFQSTTYFSSLEQALVNDWKVKFSLNHMISDHDTRLASASGGNPDPVTGEGMFLYWGRWEGHRVQNTADLNVSGPFTLFGREHDLVAGFMTSHSRQTGDTYDGSAFEKVPGSIFDWNGKLPEQHFPKNGDYTTTQSQNGAYVATRLRPTDKLSVILGTRVSTFKYNDDEDYYPTSSLSDTHASYKEHGVVTPYAGVVYDLDDTYSAYASYTSIYQPQVYKDINGATLAPVEGDGYEAGFKAAWFDGRLNGTLAFFRIEQDNVASNVGTNPVTNEGIYKAIDGATTKGVELELAGELAPGWNITAGYTYARTRDADDQRIFGFPLATTKPEHVVRLFNTYRLPGVLDPVTVGGGLRWQSGFYGNIYSPVANDYTRIKQGGYTLVDLMARYQYNEHLSFTVNANNVFDKVYLTGLGNFDTTYYGEPRNLMVTTRWDF

SEQ ID NO: 115043 - DNA, 2238 bp, Janthinobacterium lividum
  CDS (1)..(2238): transl_table=11
atgatgcaatcgaccaccgtcttctcttcttcgcgccagcccgccttgcgccccctcccccgtttattacacatcagcctgctcagtcttgccgccggcgtggtcttgcctgctcaggcggccgacgccgctgcggccgacgtcaccatgccggccgtgaccgtgctgggccagtcgatggccaccacggaaggcacgcagtcgtacacggcaggcgaaacgcgcagcgccacgcgcatggacctgtccctgcgcgaaacgccgcaatcggtcagcgtgatcacgcgccaactgctcgacgacctgggcgccgtgcgcctggaccaggcgctggcgcagacgacgggcatccaggtgaaccagaacgacacagaacgcacgacctttagtgcgcgcggcttcggcatcaacaatatccagatcgatggcatggcgcgcggcggcaatgcgccattgcaagacaccatcctgtacgaccgcatcgaagtcgtgcgcggcgccaccggcctgatgggcggcaagggcgacccgtcggccacaatcaacatgatacgcaagcggccgacgaaggaattccaggccagcgccggtctcatcatgggccgctgggatgaccagcgcttcgaggccgacctttccacgccgctgaacccgcagggcagcgtgcgcgcgcgcacggccctggcatggcaaaaacgcgattcctacctggacatgtatcacgaacgcaagacagtcggcatgctcatcgtcgaggcggacctgcgtcccggcaccctgctgacggccggcgtcgacttccaggacaacaagcccacgggcgccacctggggcgccgtgccctactggaacgccgatggcagcctggccaacttgccgcgcaacaccagctggacgacgccatggagcacctgggccaacaagcagcacacggtattcacctcgctggaccagcgcctgcccggcaactggaatatgcacctcggctatgcgcgcacggaaagcacgaaccgcactaccgttctctatgcgggcaaaggttatcccgatcccgccacgggcgaaggcatgaaactatggacgggcgcctggggcgcaggcaagaacacaggcgacaatttcgacttgtacgccagcggtcccttcaccttgctggggcgcaagcacacggccattgtaggctggaacggcagcaaccagcgctcgcgctcactgggcggcgaagcggaaatcaattacccggactttatccctgattaccgcagctggacgggcaacatcccccgccccgtgttccacccggacggctcgcacacggaaaccgtcacgcgcctggcaggcggctatgtggccacgcgtttgagcctggccgacccgctgcacctgatcatcggcgcgcgcagcagcacctaccgcacggatacgcgcaactacaacacgcaaggcgtgtatacgggcagcggcgactttgcggaaacacgcaatgaagtcacaccgtacgtgggcgccgtattcgacatcaacaagcaatattcggcttacgccagcttcacccagctgttcaaccctcaaacgagcaaggaccgcaacgacaaattcctgccaccggaaacgggcgacaatgcggaactgggcatcaagggcgaattctatgaaggcaagctgaacgcctcggccgccctgttccacacgaagaaaaagaacctggcggagctggaccgcacggtaccgcccggctttctgctgcccgacggcggccaggccatggtggccaatggcgccggcgtgacggccaagggcgtcgagttcgacgtttccggccagttttctcccagctgggaagcgagcggcggctacacctatctgcacgcggccgaggcagatggccgccgcgccgccaccacgcagccgcgccatttgctgcgcctggccaccagctaccgtttcgacggccgcctggctggcttgaaagcgggcgccagcatgacggcgcaaagcgccacctacagcgaatcgtggtacggccgcccgccatcgggcgagatgacgaatatcccgcaagccggttatgcactggtcaacgccatggcaagctacgcgctcaaccggcacgccagcgtgcagttgaacgtgaataacttgctcgataaaaagtactaccgcaacgtgggcttcttcgacggcgtgttctggggcgaaccgcgcaacatcagcctggccgtgcgcacggcgttttaa

SEQ ID NO: 115044 - protein, 745 aa, Janthinobacterium lividum
MMQSTTVFSSSRQPALRPLPRLLHISLLSLAAGVVLPAQAADAAAADVTMPAVTVLGQSMATTEGTQSYTAGETRSATRMDLSLRETPQSVSVITRQLLDDLGAVRLDQALAQTTGIQVNQNDTERTTFSARGFGINNIQIDGMARGGNAPLQDTILYDRIEVVRGATGLMGGKGDPSATINMIRKRPTKEFQASAGLIMGRWDDQRFEADLSTPLNPQGSVRARTALAWQKRDSYLDMYHERKTVGMLIVEADLRPGTLLTAGVDFQDNKPTGATWGAVPYWNADGSLANLPRNTSWTTPWSTWANKQHTVFTSLDQRLPGNWNMHLGYARTESTNRTTVLYAGKGYPDPATGEGMKLWTGAWGAGKNTGDNFDLYASGPFTLLGRKHTAIVGWNGSNQRSRSLGGEAEINYPDFIPDYRSWTGNIPRPVFHPDGSHTETVTRLAGGYVATRLSLADPLHLIIGARSSTYRTDTRNYNTQGVYTGSGDFAETRNEVTPYVGAVFDINKQYSAYASFTQLFNPQTSKDRNDKFLPPETGDNAELGIKGEFYEGKLNASAALFHTKKKNLAELDRTVPPGFLLPDGGQAMVANGAGVTAKGVEFDVSGQFSPSWEASGGYTYLHAAEADGRRAATTQPRHLLRLATSYRFDGRLAGLKAGASMTAQSATYSESWYGRPPSGEMTNIPQAGYALVNAMASYALNRHASVQLNVNNLLDKKYYRNVGFFDGVFWGEPRNISLAVRTAF

SEQ ID NO: 115045 - DNA, 4245 bp, Azospirillum brasilense
  CDS (960)..(3368): transl_table=11
atctggaccgggtgcccgatccgcgaaagggaaccgcccccgcgacgcggcgccgtttcctggcctcgggcccgtcggcggggccgggcctcgcgcggcgctgggcggagcggtcgtcctgacggctggccgggcgacctgaagaccgggatcggcgagcggcggacggtggcgctggacgacggctcggtcctgaccctggacgccgacagcgcggtggccgtcgccttcaccgccggcgaacggcgcgtccgtttgaccgaggggcgggcgcatttcgtgaccgctcccgacccggggcgccccttcgtcgtcgcctgcgccgacgggcggatcgccaccgccgacgccagcttcgtggtgcaccgctgcctggactccgtggtggtggcggtggaatccggaacggccagcctgaccaccgggacggagcccccccttcccatcgccgccggacaaagccgatcctatggccccgatggtcccggcccgctgctgagccagggcgtggcggtggagaacgcgtggcggcacggccggctggtcttccagggacagcgctcgacgcggtgattgccgatctcaaccgctaccaccccgcccgcatcgtgctgtgggaccgcccgctcgccggactgcgcttcgacggcagcgtggacatcagccggccggacgccgccctgaacgccattctccgcacgcttccctttcggcaccgtgcgccccgttcccggcttggtcatcatccgttccatctagccggttcgtatcaaattttttccaaaccgaggtgaggtggttcccgccgggcatcgtcatgacctgcatacacgaaaatgcaactcattcgcaaaatggcggggtcttggtgatgatcaatggcgggggacgtctggctgcgggggcagacggcgcaggggaagacggcgcggggtggctggactccggctctgctgggcatgctgctggcatcaacggcgcttcgacgcctggcggcgcctgcaacaatcggggaaacggccattcaggtggcccagcagggccggaccgtcagcttcgccatcgccgccggcccgctgccgggcgtgctcgccgcctacgggcaggccaccggcttccaggtgctctacccctccgacatcgcgcagggcgtgttctcgccgggggtgacgggcactctggcgccgcaggacgcgctgatccgcctgctggccggcaccggcctgatcgcgcgcttcgtcgatcccgacacggtgacgctggagaaactgccggcccaggccgggaatgcggcggtgctcgacccggtgaccgtccagggcgggctgtcccgcgatccgggccgcagcgagggcaccggctcctacaccaccggatcgaccgacagcgccaccaagctgaatctgacgccgcgcgagacgccgcagtcggtcagcgtgatgacccgccagcgcatggacgaccagggcctgaacgagatccgcgacgtgctcgaccagacggtcggcgtgtcgcggatgcagcgcggtccgctgggcagcgacggagacgatgtcttcgcgcgcggcttcccggtgacgaattatcaggtgaacgggatcccgcgctcgaccgtgtacgggttcgacgattccatctcggacacggcggtgttcgaccggatcgaggtggtgcgcggcgcgaccggcctgctgaacggtgtcggcgagccgtcggcctcggtcaatctggtccgcaagcgcccgaccccgatcctccagggctacgccgaggggcagatcgggtcctggaaccgctaccgcggcgaggccgacctgtcgggcccgctgaccgggaacggccgcctgcgtgggcgcgtcgtcggcgcctaccaggacaacgacagcttcatcgaccgcctgcacgagcgcaagaaggtgctctacggcgtcctggaggccgacatcaccgaggacacgacctggacggtcggcgtcgagtaccagaagcaccgctccgacgacgcctcccgcgccggttttccgctgttctacgccgacgggacgaagaccgacttctcccgctctcacaacagcggcgcccggtgggcgtatttcatgcacgacaacctgaccgtcttcagcgagttgaagcaccgcttcggggacggctggacggcgacgctgaacgtggagcgcaacaaccgcgaatatgatggcctgctcggctatggcgcgcgcggtagcctgaaccgggacggcaccggcatgggcatctggccgggccgctggaactccgacctggagcagacctcggtcagcgccgacctgaacggcggcttcgacctgttcgggcggcggcacgacctgatggccggcatcagcggctattacgccaagcgcgaggggctcgactacccgctctggaccatccccggctacgatccctcgatccccaactacttcacctggaacggcagcatcgcccagccgacgctcaacccgaccggccggtcgcagaccgacgagcggcaggtggtcgcctacgccgccacccgcctgcgcccgaccgacgcgctgtcggtcatcctcggcagccgcatcagccggtgggagcagatcgagaagagcagcccgaacgcgggggcgggaagctacagcaaacggtcggagaacggggtgttcacacccttcgccggcgtcgtgctcgacctgaccgacatctggtcggtctacgccagctacaccagcatcttcaagccgcaaaacctacaaagggacgtcagcggccagtccctcgatccgctggacggcaacgcctacgaggccggcgtgaaggccgagttcttcggcggcgccctgaacgccagcgccgcggtgttcctgatccagcaggacaatctgggcgaggccgatcccggccgcttcgctccggacggcacgcaggcctaccgggcggtgaagggtgcggaaagcaagggcttcgagctggaagtggccggagaggtgatgaccggctggcaggtcggcggcggctacagccacacctcgatcaagaacgccgacggccagcggatgatgacctacgtgccgcgcgacaccttcaagctgttcaccacctaccgcctgccgggcgcttgggatcgcgtgatggtgggcggcaacgtcaagtgggaaggcgacgtctacaccggcaccggcgcccggccgtacgaccgcgacggctacgcggtggtcgatctgatgacgcgctatcagatcaccgacaaggtctcggccacgctgaacctcaacaacctgttcgacaagaagtacctgagcagcgtccagaactacggctactacggcgagccgcgcaacgtcctgctgtccctgcgggcgacgtggtgatgacggcgcggcggtcggcggcggcttccggttcccgcgcggtgtgccgcggtctcgccgccgccgcgctggtgctcggcgggctggcctccgccgccctgctgcgcccggccgatcccgccgcctcgcgaggtggcggtggtcggccgcggcacggtcgaggacacggtgacggcgctcggcaagatccagccgcgcgcctacgtcgacgtcggcgcccaggtgtccggccagttgacccggctgcacgtgacggtcgggcagatggtccgcgaggcgatctgctggccgagatcgaccccgccctgcaacaggccaaggtcgaggccgggcgcgccgaacgcggctgaccgccctgctggccgagcagcgggcgcgcgccgacttcgccgaggcccagctggcccgtcagcggcgctgcggccgacgggtcggggcgcggcgaggccttcgaccaggcccgcatggaggcgcgcatcgccgccgcccaggtcgaggccacccaagcgcagatccgccagacggactcgaccctccaggccgacgaggcgcagtcggctacacccgcatctacgcgccgatgagcggcaccgtgatcgcggtggacgcccgccaccgagaccatcaactccgcctacgaggcgccggtcctgatgcggatcgccgacctgtcggcgatgaccgtgtggacccaggtgtcggaagccgacgtgacgcggctgaccgacggcatgccgctctacttcaccacgctcggccatccgggacgcgctggaccgcgcgcctccaggaaatcctgcccgcgccgccgaagccgcccgcgaccgggaacggcggcggctcgtccggtccggcgcggcggggcagccaacagcgt

SEQ ID NO: 115046 - protein, 802 aa, Azospirillum brasilense
MLLASTALRRLAAPATIGETAIQVAQQGRTVSFAIAAGPLPGVLAAYGQATGFQVLYPSDIAQGVFSPGVTGTLAPQDALIRLLAGTGLIARFVDPDTVTLEKLPAQAGNAAVLDPVTVQGGLSRDPGRSEGTGSYTTGSTDSATKLNLTPRETPQSVSVMTRQRMDDQGLNEIRDVLDQTVGVSRMQRGPLGSDGDDVFARGFPVTNYQVNGIPRSTVYGFDDSISDTAVFDRIEVVRGATGLLNGVGEPSASVNLVRKRPTPILQGYAEGQIGSWNRYRGEADLSGPLTGNGRLRGRVVGAYQDNDSFIDRLHERKKVLYGVLEADITEDTTWTVGVEYQKHRSDDASRAGFPLFYADGTKTDFSRSHNSGARWAYFMHDNLTVFSELKHRFGDGWTATLNVERNNREYDGLLGYGARGSLNRDGTGMGIWPGRWNSDLEQTSVSADLNGGFDLFGRRHDLMAGISGYYAKREGLDYPLWTIPGYDPSIPNYFTWNGSIAQPTLNPTGRSQTDERQVVAYAATRLRPTDALSVILGSRISRWEQIEKSSPNAGAGSYSKRSENGVFTPFAGVVLDLTDIWSVYASYTSIFKPQNLQRDVSGQSLDPLDGNAYEAGVKAEFFGGALNASAAVFLIQQDNLGEADPGRFAPDGTQAYRAVKGAESKGFELEVAGEVMTGWQVGGGYSHTSIKNADGQRMMTYVPRDTFKLFTTYRLPGAWDRVMVGGNVKWEGDVYTGTGARPYDRDGYAVVDLMTRYQITDKVSATLNLNNLFDKKYLSSVQNYGYYGEPRNVLLSLRATW

SEQ ID NO: 115047 - DNA, 25 bp, Artificial sequence
  primer
atgctttcaacacaatttaacaggg

SEQ ID NO: 115048 - DNA, 26 bp, Artificial sequence
  primer
ttagaattgatacgtgccggtaatgc

SEQ ID NO: 115049 - protein, 740 aa, Artificial sequence
  consensus sequence
  Variant (2)..(8): Xaa in position 2 to 8 is any amino acid
  Variant (9)..(9): Xaa in position 9 is any or no amino acid
  Variant (11)..(11): Xaa in position 11 is any amino acid
  Variant (13)..(16): Xaa in position 13 to 16 is any amino acid
  Variant (18)..(19): Xaa in position 18 to 19 is any amino acid
  Variant (24)..(26): Xaa in position 24 to 26 is any amino acid
  Variant (28)..(32): Xaa in position 28 to 32 is any amino acid
  Variant (34)..(47): Xaa in position 34 to 47 is any amino acid
  Variant (49)..(62): Xaa in position 49 to 62 is any amino acid
  Variant (63)..(66): Xaa in position 63 to 66 is any or no amino acid
  Variant (69)..(72): Xaa in position 69 to 72 is any amino acid
  Variant (74)..(76): Xaa in position 74 to 76 is any amino acid
  Variant (79)..(94): Xaa in position 79 to 94 is any amino acid
  Variant (95)..(101): Xaa in position 95 to 101 is any or no amino acid
  Variant (103)..(103): Xaa in position 103 is any amino acid
  Variant (105)..(106): Xaa in position 105 to 106 is any amino acid
  Variant (110)..(110): Xaa in position 110 is any amino acid
  Variant (113)..(114): Xaa in position 113 to 114 is any amino acid
  Variant (116)..(116): Xaa in position 116 is any amino acid
  Variant (118)..(118): Xaa in position 118 is any amino acid
  Variant (122)..(123): Xaa in position 122 to 123 is any amino acid
  Variant (125)..(126): Xaa in position 125 to 126 is any amino acid
  Variant (129)..(142): Xaa in position 129 to 142 is any amino acid
  Variant (143)..(143): Xaa in position 143 is any or no amino acid
  Variant (145)..(145): Xaa in position 145 is any amino acid
  Variant (147)..(153): Xaa in position 147 to 153 is any amino acid
  Variant (155)..(158): Xaa in position 155 to 158 is any amino acid
  Variant (160)..(162): Xaa in position 160 to 162 is any amino acid
  Variant (164)..(164): Xaa in position 164 is any amino acid
  Variant (165)..(165): Xaa in position 165 is any or no amino acid
  Variant (167)..(167): Xaa in position 167 is any amino acid
  Variant (169)..(169): Xaa in position 169 is any amino acid
  Variant (171)..(177): Xaa in position 171 to 177 is any amino acid
  Variant (179)..(180): Xaa in position 179 to 180 is any amino acid
  Variant (182)..(191): Xaa in position 182 to 191 is any amino acid
  Variant (193)..(196): Xaa in position 193 to 196 is any amino acid
  Variant (198)..(201): Xaa in position 198 to 201 is any amino acid
  Variant (203)..(206): Xaa in position 203 to 206 is any amino acid
  Variant (208)..(210): Xaa in position 208 to 210 is any amino acid
  Variant (212)..(221): Xaa in position 212 to 221 is any amino acid
  Variant (222)..(224): Xaa in position 222 to 224 is any or no amino acid
  Variant (226)..(230): Xaa in position 226 to 230 is any amino acid
  Variant (232)..(245): Xaa in position 232 to 245 is any amino acid
  Variant (247)..(256): Xaa in position 247 to 256 is any amino acid
  Variant (258)..(259): Xaa in position 258 to 259 is any amino acid
  Variant (261)..(267): Xaa in position 261 to 267 is any amino acid
  Variant (269)..(316): Xaa in position 269 to 316 is any amino acid
  Variant (317)..(333): Xaa in position 317 to 333 is any or no amino acid
  Variant (335)..(337): Xaa in position 335 to 337 is any amino acid
  Variant (339)..(339): Xaa in position 339 is any amino acid
  Variant (341)..(342): Xaa in position 341 to 342 is any amino acid
  Variant (344)..(347): Xaa in position 344 to 347 is any amino acid
  Variant (349)..(392): Xaa in position 349 to 392 is any amino acid
  Variant (393)..(419): Xaa in position 393 to 419 is any or no amino acid
  Variant (421)..(428): Xaa in position 421 to 428 is any amino acid
  Variant (430)..(430): Xaa in position 430 is any amino acid
  Variant (432)..(432): Xaa in position 432 is any amino acid
  Variant (435)..(435): Xaa in position 435 is any amino acid
  Variant (437)..(437): Xaa in position 437 is any amino acid
  Variant (439)..(457): Xaa in position 439 to 457 is any amino acid
  Variant (458)..(470): Xaa in position 458 to 470 is any or no amino acid
  Variant (473)..(473): Xaa in position 473 is any amino acid
  Variant (475)..(476): Xaa in position 475 to 476 is any amino acid
  Variant (478)..(485): Xaa in position 478 to 485 is any amino acid
  Variant (487)..(487): Xaa in position 487 is any amino acid
  Variant (491)..(491): Xaa in position 491 is any amino acid
  Variant (494)..(494): Xaa in position 494 is any amino acid
  Variant (497)..(505): Xaa in position 497 to 505 is any amino acid
  Variant (506)..(507): Xaa in position 506 to 507 is any or no amino acid
  Variant (509)..(509): Xaa in position 509 is any amino acid
  Variant (511)..(512): Xaa in position 511 to 512 is any amino acid
  Variant (514)..(515): Xaa in position 514 to 515 is any amino acid
  Variant (518)..(518): Xaa in position 518 is any amino acid
  Variant (520)..(520): Xaa in position 520 is any amino acid
  Variant (522)..(528): Xaa in position 522 to 528 is any amino acid
  Variant (530)..(535): Xaa in position 530 to 535 is any amino acid
  Variant (537)..(539): Xaa in position 537 to 539 is any amino acid
  Variant (541)..(541): Xaa in position 541 is any amino acid
  Variant (543)..(564): Xaa in position 543 to 564 is any amino acid
  Variant (565)..(574): Xaa in position 565 to 574 is any or no amino acid
  Variant (576)..(576): Xaa in position 576 is any amino acid
  Variant (578)..(578): Xaa in position 578 is any amino acid
  Variant (580)..(581): Xaa in position 580 to 581 is any amino acid
  Variant (583)..(587): Xaa in position 583 to 587 is any amino acid
  Variant (589)..(592): Xaa in position 589 to 592 is any amino acid
  Variant (594)..(609): Xaa in position 594 to 609 is any amino acid
  Variant (610)..(618): Xaa in position 610 to 618 is any or no amino acid
  Variant (620)..(628): Xaa in position 620 to 628 is any amino acid
  Variant (630)..(636): Xaa in position 630 to 636 is any amino acid
  Variant (637)..(640): Xaa in position 637 to 640 is any or no amino acid
  Variant (642)..(645): Xaa in position 642 to 645 is any amino acid
  Variant (646)..(646): Xaa in position 646 is any or no amino acid
  Variant (649)..(659): Xaa in position 649 to 659 is any amino acid
  Variant (660)..(674): Xaa in position 660 to 674 is any or no amino acid
  Variant (676)..(683): Xaa in position 676 to 683 is any amino acid
  Variant (685)..(686): Xaa in position 685 to 686 is any amino acid
  Variant (688)..(697): Xaa in position 688 to 697 is any amino acid
  Variant (699)..(700): Xaa in position 699 to 700 is any amino acid
  Variant (702)..(703): Xaa in position 702 to 703 is any amino acid
  Variant (705)..(705): Xaa in position 705 is any amino acid
  Variant (706)..(706): Xaa in position 706 is any or no amino acid
  Variant (708)..(716): Xaa in position 708 to 716 is any amino acid
  Variant (717)..(726): Xaa in position 717 to 726 is any or no amino acid
  Variant (728)..(728): Xaa in position 728 is any amino acid
  Variant (731)..(739): Xaa in position 731 to 739 is any amino acid
YXXXXXXXXTXLXXXXRXXPQSVXXXTXXXXXDXXXXXXXXXXXXXXGXXXXXXXXXXXXXXXXXXRGXXXXNXXXDGXXXXXXXXXXXXXXXXXXXXXXXRXEXXRGAXGLXXGXGXPSAXXNXXRKXXXXXXXXXXXXXXXGXWXXXXXXXDXXXXLXXXGXXRXRXVXXXXXXXSXXDXXXXXXXXXXGXXXXDXXXXTXXXXGXXXQXXXXXXXXXXXXXPXXXXXGXXXXXXXXXXXXXXWXXXXXXXXXXFXXLXXXXXXXWXXXXXXXXXXXXXXXXXXXXXXXXXXXXXXXXXXXXXXXXXXXXXXXXXXXXXXXXXXXXXXXXXGXXXLXGXXHXXXXGXXXXXXXXXXXXXXXXXXXXXXXXXXXXXXXXXXXXXXXXXXXXXXXXXXXXXXXXXXXXXXXXXXXXXXXYXXXXXXXXDXLXLIXGXRXXXXXXXXXXXXXXXXXXXXXXXXXXXXXXXXPYXGXXYXXXXXXXXYXSYTXIFXPQXXXXXXXXXXXLXPXXGXXYEXGXKXXXXXXXLXXXXXXFXXXQXNXXXXXXXXXXXXXXXXXXXXXXXXXXXXXXXXGXEXEXXGXXXXXWXXXXGXXXXXXXXXXXXXXXXXXXXXXXXXPXXXXXXXXXYXXXXXXXXXXXGXXXXXWQXXXXXXXXXXXXXXXXXXXXXXXXXXQXXXXXXXXMXXYXXXXXXXXXXNXXNXXDXXYXXXXXXXXXXXXXXXXXXXGXPRXXXXXXXXXF

SEQ ID NO: 115050 - protein, 27 aa, Artificial sequence
  protein pattern
  Variant (2)..(3): Xaa in position 2 to 3 is Ile or Val
  Variant (4)..(4): Xaa in position 4 is Lys or Arg
  Variant (6)..(6): Xaa in position 6 is Ala, Ser or Val
  Variant (7)..(7): Xaa in position 7 is Ala, Asp, Asn or Thr
  Variant (8)..(8): Xaa in position 8 is Ala, Gly or Ser
  Variant (10)..(10): Xaa in position 10 is any amino acid
  Variant (11)..(11): Xaa in position 11 is Ala, Asp, Gly, Asn, Ser, Thr or Val
  Variant (12)..(12): Xaa in position 12 is Ala, Gly or Ser
  Variant (13)..(13): Xaa in position 13 is any amino acid
  Variant (14)..(14): Xaa in position 14 is Ala or Gly
  Variant (15)..(15): Xaa in position 15 is Asp, Glu, Asn or Thr
  Variant (17)..(17): Xaa in position 17 is Ala, Gly or Ser
  Variant (19)..(19): Xaa in position 19 is Ala, Ser, Thr or Val
  Variant (20)..(20): Xaa in position 20 is Ile or Val
  Variant (22)..(22): Xaa in position 22 is any amino acid
  Variant (23)..(23): Xaa in position 23 is Ile or Val
  Variant (26)..(26): Xaa in position 26 is His, Lys or Arg
  Variant (27)..(27): Xaa in position 27 is Ala, Leu or Pro
EXXXGXXXLXXXXXXPXAXXNXXRKXX

SEQ ID NO: 115051 - protein, 41 aa, Artificial sequence
  protein pattern
  Variant (2)..(7): Xaa in position 2 to 7 is any amino acid
  Variant (8)..(9): Xaa in position 8 to 9 is any or no amino acid
  Variant (11)..(11): Xaa in position 11 is Asp, Glu or Gln
  Variant (12)..(12): Xaa in position 12 is any amino acid
  Variant (15)..(15): Xaa in position 15 is Ala, Ser or Thr
  Variant (16)..(16): Xaa in position 16 is Ile, Leu or Val
  Variant (17)..(17): Xaa in position 17 is Ser, Thr or Val
  Variant (18)..(18): Xaa in position 18 is any amino acid
  Variant (19)..(19): Xaa in position 19 is Ile, Leu, Met or Val
  Variant (20)..(20): Xaa in position 20 is Ser or Thr
  Variant (21)..(21): Xaa in position 21 is any amino acid
  Variant (22)..(22): Xaa in position 22 is Ala, Asp, Glu or Gln
  Variant (23)..(23): Xaa in position 23 is any amino acid
  Variant (24)..(24): Xaa in position 24 is Ile, Leu or Met
  Variant (25)..(25): Xaa in position 25 is any amino acid
  Variant (27)..(40): Xaa in position 27 to 40 is any amino acid
TXXXXXXXXRXXPQXXXXXXXXXXXDXXXXXXXXXXXXXXG

SEQ ID NO: 115052 - protein, 30 aa, Artificial sequence
  protein pattern
  Variant (2)..(3): Xaa in position 2 to 3 is any amino acid
  Variant (6)..(6): Xaa in position 6 is any amino acid
  Variant (8)..(8): Xaa in position 8 is any amino acid
  Variant (10)..(10): Xaa in position 10 is Ala, Gly or Ser
  Variant (11)..(13): Xaa in position 11 to 13 is any amino acid
  Variant (14)..(14): Xaa in position 14 is Asp, Glu, Gly or Asn
  Variant (15)..(16): Xaa in position 15 to 16 is any amino acid
  Variant (18)..(21): Xaa in position 18 to 21 is any amino acid
  Variant (22)..(22): Xaa in position 22 is Ala, Ser or Thr
  Variant (23)..(23): Xaa in position 23 is any amino acid
  Variant (24)..(24): Xaa in position 24 is Phe or Tyr
  Variant (25)..(27): Xaa in position 25 to 27 is any amino acid
  Variant (28)..(28): Xaa in position 28 is Glu or Gln
  Variant (29)..(29): Xaa in position 29 is any amino acid
GXXYEXGXKXXXXXXXLXXXXXXXXXXXXN

SEQ ID NO: 115053 - protein, 37 aa, Artificial sequence
  protein pattern
  Variant (2)..(2): Xaa in position 2 is Ala or Gly
  Variant (4)..(4): Xaa in position 4 is any amino acid
  Variant (5)..(5): Xaa in position 5 is Ile, Met or Val
  Variant (6)..(6): Xaa in position 6 is Ala, Gly, Ser, Thr or Val
  Variant (7)..(12): Xaa in position 7 to 12 is any amino acid
  Variant (13)..(13): Xaa in position 13 is Gly, Ser or Thr
  Variant (14)..(14): Xaa in position 14 is Phe, His, Trp or Tyr
  Variant (15)..(15): Xaa in position 15 is any amino acid
  Variant (16)..(16): Xaa in position 16 is Asp, Asn, Gln or Arg
  Variant (17)..(26): Xaa in position 17 to 26 is any amino acid
  Variant (28)..(29): Xaa in position 28 to 29 is any amino acid
  Variant (30)..(31): Xaa in position 30 to 31 is any or no amino acid
  Variant (33)..(35): Xaa in position 33 to 35 is any amino acid
  Variant (36)..(36): Xaa in position 36 is any or no amino acid
RXRXXXXXXXXXXXXXXXXXXXXXXXGXXXXDXXXXT

SEQ ID NO: 115054 - protein, 26 aa, Artificial sequence
  protein pattern
  Variant (2)..(2): Xaa in position 2 is Phe or Tyr
  Variant (3)..(3): Xaa in position 3 is any amino acid
  Variant (5)..(5): Xaa in position 5 is Ala, Ile, Leu or Val
  Variant (6)..(7): Xaa in position 6 to 7 is any amino acid
  Variant (8)..(8): Xaa in position 8 is Ala, Asp or Asn
  Variant (9)..(9): Xaa in position 9 is Phe, Ile, Leu or Val
  Variant (10)..(15): Xaa in position 10 to 15 is any amino acid
  Variant (17)..(17): Xaa in position 17 is any amino acid
  Variant (20)..(20): Xaa in position 20 is Ala, Ser or Thr
  Variant (21)..(21): Xaa in position 21 is Asp, Glu, Gly or Ser
  Variant (22)..(22): Xaa in position 22 is Ile, Leu or Val
  Variant (23)..(23): Xaa in position 23 is Phe or Tyr
  Variant (24)..(24): Xaa in position 24 is any amino acid
  Variant (25)..(25): Xaa in position 25 is Pro or Gln
  Variant (26)..(26): Xaa in position 26 is Glu or Gln
PXXGXXXXXXXXXXXYXSYXXXXXXX

SEQ ID NO: 115055 - protein, 19 aa, Artificial sequence
  protein pattern
  Variant (2)..(5): Xaa in position 2 to 5 is any amino acid
  Variant (6)..(6): Xaa in position 6 is Ala, Ser or Val
  Variant (9)..(10): Xaa in position 9 to 10 is any amino acid
  Variant (11)..(11): Xaa in position 11 is Ile, Leu or Val
  Variant (12)..(16): Xaa in position 12 to 16 is any amino acid
  Variant (19)..(19): Xaa in position 19 is Ile, Leu, Met or Val
RXXXXXRGXXXXXXXXDGX

SEQ ID NO: 115056 - DNA, 336 bp, Escherichia coli
  CDS (1)..(336): transl_table=11
atgcagctcatgttatttaatttgttttccccagcacttaagcttaatactggcctggcaattctttcgcctggtgcatttgaagttcactctgacggaatagatgtggataacgaattgtttcactatcctattaaaaaagcatataccccatataatatacacacttacaagacagaggaagttgtaaaccagatgaatataaaagttaaaaacatgaccttagatgaaataaacaatacttactgtaataacgattattacaatcaggcaataagagaggaaccgatagaccttctggacagatcgttttcctccagttcatggcctttttaa

SEQ ID NO: 115057 - protein, 111 aa, Escherichia coli
MQLMLFNLFSPALKLNTGLAILSPGAFEVHSDGIDVDNELFHYPIKKAYTPYNIHTYKTEEVVNQMNIKVKNMTLDEINNTYCNNDYYNQAIREEPIDLLDRSFSSSSWPF

SEQ ID NO: 115058 - DNA, 1260 bp, Escherichia coli O157:H7 EDL933
  CDS (1)..(1260): transl_table=11
atgaaattcccttcaatatttaacaaaataaaaccacaatccatacagcaacatccagaaaaaaatcaacttaactggatgctcgaattaaataaatggaaagaagaacgtatacttacaggtgaaatccatcgtccggaatgtcgaaacgaagccgctaaaaggataaactgtgcttttttgtcgaaacagaatgacattgatttatcaggacttaatttatctactcaaccaccagggctgcaaaacttcacctctatcaatcttgataataaccaactcacacattttgatgcaaccaactacgatagactcgtaaaacttagtctgaatagtaacactcttgagtcaataaatattcatcaaggcagaaatgtaagcattacacatatatctatgaataataattgtctcagaaatattgatatagataggctttcatcaattacttattttagtgcggcacataataaactagagtttgtgcaattagaatcttgcgaatggctgcaatacctgaatctcagccataatcaattaactgatattgttacaggaaataaagaagaactcttactgctggatctatcccataataaactagcaagtttacacaatgccttatttcccaacttaaatacgttacttatcaacaacaacttgctttctgaaattaaaatgttttatagcaacttctgcaaagttcagacattaaacgctgctaacaatcagttggaaaaaataaaccttcatttcctgacttatctttcatctatcaaaagtttaaggctggacaataataaaataactcgcattgatactgagaacacatccgatattagaagtttattccccataataaagaagagcgaaagcttaaattttttaaatatttctggcgagaacaattgccctactatccagctcatgttatttaatttgttttccccagcacttaagcttaatactggcctggcaattctttcgcctggtgcatttgaagatcactctgacggattagatgtggataacgaattgtttcactatactattaataaagcatataccccatataatatacatacttataaaacagaagaagttgtaaaccagaggaatataaaaattaaaaatatgaccttagatgaaataaacaatacttattgtaataacgattattacaatgaggcaataagagaggaaccgatagactttctggacagatcgttttcctccagctcatggcctttttatcactaa

SEQ ID NO: 115059 - protein, 419 aa, Escherichia coli O157:H7 EDL933
MKFPSIFNKIKPQSIQQHPEKNQLNWMLELNKWKEERILTGEIHRPECRNEAAKRINCAFLSKQNDIDLSGLNLSTQPPGLQNFTSINLDNNQLTHFDATNYDRLVKLSLNSNTLESINIHQGRNVSITHISMNNNCLRNIDIDRLSSITYFSAAHNKLEFVQLESCEWLQYLNLSHNQLTDIVTGNKEELLLLDLSHNKLASLHNALFPNLNTLLINNNLLSEIKMFYSNFCKVQTLNAANNQLEKINLHFLTYLSSIKSLRLDNNKITRIDTENTSDIRSLFPIIKKSESLNFLNISGENNCPTIQLMLFNLFSPALKLNTGLAILSPGAFEDHSDGLDVDNELFHYTINKAYTPYNIHTYKTEEVVNQRNIKIKNMTLDEINNTYCNNDYYNEAIREEPIDFLDRSFSSSSWPFYH

SEQ ID NO: 115060 - DNA, 1332 bp, Escherichia coli B
  CDS (1)..(1332): transl_table=11
atgatcactgaccttatattacacaatcatcccaggatgaaaacaatcactttaaacgacaaccatattgcacatttaaacgccaaaaacactacaaaactggaatatttaaacttaagcaataacaatttactgccaaccaatgacattgatcaactaatatcatcaaaacatctttggcatgtattagttaacggcatcaacaatgatccacttgcacaaatgcagtactggactgcagtaagaaatataattgatgacactaatgaagtgaccattgatttatcaggacttaatttaaccactcaaccaccagggctgcaaaacttcacctctatcaatcttgataataaccaactcacacattttgatgcaaccaactacgatagactcgtaaagctaagtctgaatagtaatactcttgagtcaataaattttcctcaaggcagaaatgtaagtattacacatatatctatgaataataatgctctcagaaatattgatatagataggctttcatcagttacttattttagtgcggcacataatcaactagagtttgtgcaattagaatcttgcgaatggctgcaatacctgaatctcagccataatcaattaactgatattgttgcaggtaataaaaatgaactcttactgctggatctatcccataataaactaacaagtttacacaatgacttatttcccaacttgaatacgttacttattaacaacaatttgctttctgaaattaaaatattctatagcaacttctgcaatgttcagacattaaacgctgctaacaaccagttgaaatatataaatcttgatttcctgacttatcttccatctatcaaaagtttaagactggacaataataaaataacccacattgatactaataatacatccgatattggaactttattccccataataaaacagagcaaaaacttaaattttttaaatgtttctgggaagaacaattgccctactatgcagctcatgttatttaatttattttccccagcacttaagcttaatactggcctggcaattctttcgcctggtgcatttgaagttcactctgacggaatagatgtggataacgaattgtttcactatcctattaaaaaagcatataccccatataatatacacacttacaagacagaggaagttgtaaaccagaggaatataaaagttaaaaacatgaccttagatgaaataaacaatacttactgtaataacgattattacaatcaggcaataagagaggaaccgatagaccttctggacagatcgttttcctccagttcatggcctttttag

SEQ ID NO: 115061 - protein, 443 aa, Escherichia coli B
MITDLILHNHPRMKTITLNDNHIAHLNAKNTTKLEYLNLSNNNLLPTNDIDQLISSKHLWHVLVNGINNDPLAQMQYWTAVRNIIDDTNEVTIDLSGLNLTTQPPGLQNFTSINLDNNQLTHFDATNYDRLVKLSLNSNTLESINFPQGRNVSITHISMNNNALRNIDIDRLSSVTYFSAAHNQLEFVQLESCEWLQYLNLSHNQLTDIVAGNKNELLLLDLSHNKLTSLHNDLFPNLNTLLINNNLLSEIKIFYSNFCNVQTLNAANNQLKYINLDFLTYLPSIKSLRLDNNKITHIDTNNTSDIGTLFPIIKQSKNLNFLNVSGKNNCPTMQLMLFNLFSPALKLNTGLAILSPGAFEVHSDGIDVDNELFHYPIKKAYTPYNIHTYKTEEVVNQRNIKVKNMTLDEINNTYCNNDYYNQAIREEPIDLLDRSFSSSSWPF

SEQ ID NO: 115062 - DNA, 27 bp, Artificial sequence
  primer
atgcagctcatgttatttaatttgttt

SEQ ID NO: 115063 - DNA, 25 bp, Artificial sequence
  primer
ttaaaaaggccatgaactggaggaa

SEQ ID NO: 115064 - DNA, 1404 bp, Escherichia coli; identical to SEQ ID NO: 45280
  CDS (1)..(1404): transl_table=11

SEQ ID NO: 115065 - protein, 467 aa, Escherichia coli; identical to SEQ ID NO: 45281

SEQ ID NO: 115066 - DNA, 2008 bp, Sorghum bicolor; identical to SEQ ID NO: 45024
  CDS (111)..(1607)
  misc_feature (5)..(5): n is a, g, c or t

SEQ ID NO: 115067 - protein, 498 aa, Sorghum bicolor; identical to SEQ ID NO: 45025

SEQ ID NO: 115068 - DNA, 1770 bp, Arabidopsis thaliana
  CDS (84)..(1559)
gtcgccacgcgccgacttgatccgtcgtcttctctcagtctccatctccgtcttccaagttttactgtcaggcagaagaatccatgtcgatttacgtcgcgtcggcactctccggcggaacaactgtgacggcgctgcgttatgccacctctctgagatcttattcgacctcgtttagggaggagagggacaccttcgggccgattcaagttccttccgataaattgtggggagcccagacgcagagatcgctgcagaacttcgaaatcggtggtgagcgcgagcgcatgcctgaaccaattgtccgcgcttttggcgtcttgaagaaatgcgctgccaaggttaacatggaatacggtcttgatccgacgattgggaaagcaattatgcaagctgctcaggaagtagctgagggaaagctcaatgatcatttcccccttgttgtctggcaaactggtagtgggactcagagtaatatgaatgctaatgaggtcattgctaatagagcagctgagattcttggtcgcaaacgtggtgagaaatgtgtgcacccaaatgaccatgtgaacagatcacaatcttctaacgacacttttcctaccgtcatgcacattgcagctgcaaccgagattaattcgaggctcatccctagtttaaaaactttgcatcgcactttggaatctaagtccttcgagttcaaagatattgtgaaaattggaagaactcacactcaagatgctacacctttgacactaggacaggaatttggtggctatgctactcaagttaagtacggactaaatagagtcacctgcactcttcctcgcctctatcagcttgcacaaggtggaactgcggttgggacaggattaaacactaagaaagggtttgatgtaaagatagctgctgcagtagctgaagaaacaaacttgccatttgtcactgcagaaaacaagtttgaagctctggctgcacacgatgcttgtgttgaaaccagtgggtcacttaacacaatcgccacatcgctgatgaagatcgccaatgatatacgttttcttggaagtggcccaagatgtggtcttggtgaacttgtactacctgaaaatgagccaggaagcagtatcatgcctgggaaggtaaatcctacacagtgtgaggccttgactatggtttgtgcacaggttatgggaaaccatgtagctgtgacagttggtgggtcaaatggtcatttcgaattgaatgtattcaagccggtgacgtcgagtgctcttttacattccgtcagattaatagcagatgcttcagcttcgttcgagaaaaactgtgtgaggggcattgaggccaacagagaaaggatctcaaagctattgcacgagtctcttatgcttgtgacatcattgaatcggaaaatcgggtgtgacaatgctgcagcagttgccaagaaagctcacaaagaaggatgtacattgaaggaagcggctctgaatttaggcgtgcttactgcggaagagtttgatacacttgttgttcctgagaagatgattggtccctccgattgatagttgtttttggagccaaagcttcaagtaccattattcttctgatgcttttatttaggttataataaaaatgagcaaatccagaaacaattcaaattttcttgggagggcaacattgttcttcatcttacggctaaactatgatcttctttatgtatcaattttttttttgtgttgaataagagagtgagtactcagcgagaagaatttc

SEQ ID NO: 115069 - protein, 491 aa, Arabidopsis thaliana
MSIYVASALSGGTTVTALRYATSLRSYSTSFREERDTFGPIQVPSDKLWGAQTQRSLQNFEIGGERERMPEPIVRAFGVLKKCAAKVNMEYGLDPTIGKAIMQAAQEVAEGKLNDHFPLVVWQTGSGTQSNMNANEVIANRAAEILGRKRGEKCVHPNDHVNRSQSSNDTFPTVMHIAAATEINSRLIPSLKTLHRTLESKSFEFKDIVKIGRTHTQDATPLTLGQEFGGYATQVKYGLNRVTCTLPRLYQLAQGGTAVGTGLNTKKGFDVKIAAAVAEETNLPFVTAENKFEALAAHDACVETSGSLNTIATSLMKIANDIRFLGSGPRCGLGELVLPENEPGSSIMPGKVNPTQCEALTMVCAQVMGNHVAVTVGGSNGHFELNVFKPVTSSALLHSVRLIADASASFEKNCVRGIEANRERISKLLHESLMLVTSLNRKIGCDNAAAVAKKAHKEGCTLKEAALNLGVLTAEEFDTLVVPEKMIGPSD

SEQ ID NO: 115070 - DNA, 1395 bp, Pseudomonas aeruginosa
  CDS (1)..(1395): transl_table=11
atgagccggaccgaaaccgatagcctgggcaccatcgaggtgcccgacgacgcctactggggcgcccagacccagcgttcgctggagaacttcgccatcggcggccagcgcatgccgctcgccgtgatccacgccctggcgctgatcaagaaagccgccgcgcgggtcaacgaccacctcggcgaactgccgccggaagtcgcccggctgatcgaacaggccgccgacgaagtcctcgcaggccgccacgacgaacacttcccgctggtggtctggcagaccggcagcggcacccagaccaacatgaacgtcaacgaggtgatcgctggccgcgccaacgaactggccggcaatccgcgtggcggcaagtcgccggtgcatcccaacgaccacgtcaaccgcgcgcagagttccaacgacagcttccccaccgccatgcacatcgccgccgccaaggccgtgcacgaacaattgctgccggccatcgccgagctttccggcggtctcgccgaacagtcggcgcggcacgccagcctggtcaagaccgggcgcacccacctgatggacgccacgccgatcaccttcggccaggaactctcggccttcgtcgcccagctcgactacgccgagcgcgccatccgcgcggcgctgccggcggtctaccagttggcccagggcggcaccgcggtgggcaccgggctcaacgcgccgaagggcttcgccgacgccatcgccgcggaaatcgccgccgaatcgggcctgcccttcgtcgccgcgccgaacaagttcgccgccctggccggccacgagccgctggtcatcctctccggcgccctgaagagcctggcggtggccctgatgaagatcgccaacgacctgcgcctgctcggttccggcccacgcgccggcttcgccgaggtgaagctgccggccaacgagccgggcagctcgatcatgcccggcaaggtcaacccgacccagtgcgaggcgctgtcgatgctggcctgccaggtcatgggcaacgacagcacgatttccttcgccgccagccagggccatctgcaactcaacgtgttcaagccggtgatcgtctacaacctgctggagtccatccgcctgctcgccgacggctgccgcaacttcaacaagcattgcgtcgccggcctggagccggacgcccagcgcatggccgacctgctggagcgcggcctgatgctggtcaccgcactgaacccgcacatcggctacgacaaggccgccgaaatcgccaagaaggcctacgccgaaggcaccaccctgcgcgccgcggcgctgcagctgggctacctggacgaagcgcagttcgacgaatgggtacggccggagcagatgctggaggccggccaccatggttga

SEQ ID NO: 115071 - protein, 464 aa, Pseudomonas aeruginosa
MSRTETDSLGTIEVPDDAYWGAQTQRSLENFAIGGQRMPLAVIHALALIKKAAARVNDHLGELPPEVARLIEQAADEVLAGRHDEHFPLVVWQTGSGTQTNMNVNEVIAGRANELAGNPRGGKSPVHPNDHVNRAQSSNDSFPTAMHIAAAKAVHEQLLPAIAELSGGLAEQSARHASLVKTGRTHLMDATPITFGQELSAFVAQLDYAERAIRAALPAVYQLAQGGTAVGTGLNAPKGFADAIAAEIAAESGLPFVAAPNKFAALAGHEPLVILSGALKSLAVALMKIANDLRLLGSGPRAGFAEVKLPANEPGSSIMPGKVNPTQCEALSMLACQVMGNDSTISFAASQGHLQLNVFKPVIVYNLLESIRLLADGCRNFNKHCVAGLEPDAQRMADLLERGLMLVTALNPHIGYDKAAEIAKKAYAEGTTLRAAALQLGYLDEAQFDEWVRPEQMLEAGHHG

SEQ ID NO: 115072 - DNA, 1389 bp, Bacillus thuringiensis serovar konkukian str
  CDS (1)..(1389)
atggagtacagaattgaaagagatacattaggagaaataaaagttccagctgataaattatgggcagcacaaacacaacgtagtaaagaaaacttcccgattggaacagagcaaatgccgcttgaaattgtaaaagcatttgcaattttaaagaagagtgcagcacttagcaatcaaaaattaggaaagttatcagaagaaaaagcagaagcaattgtggcagcagctgacgaagtgattgcagggaaatggaatgaacattttccgcttgtcgtgtggcaaacaggtagtggtacacaatcaaacatgaatgtgaatgaagtaattgcaaatcgtgggaatcaaattttgaaagaaaagggatctgacgtacatattcatccgaatgatgatgtgaacatgtcccaaagttcaaatgatacatttccaacagcgcttcatgtagcatgtgtaatagcagtagaaaatcacgtattaccagctattacgaaattaaaagaaacgttagcagaaaaagtaactgcatttgaacatattataaaaattggtcgtacacatttacaagatgcgacaccgttaacattaggacaagaaattagtggatggcaccgtatgcttgaaaaaacagagcgtatgattgcagagagcaatacatatatgaaagagcttgcgattggtggtacagcagttggaacaggtattaacgctcatcctaaatttggtgagatggtatcagaggaaattagccaatttacaggtaaacaatttatttctgcaccaaataagttccacgcattaacgagccatgatgaagttgtgtatacgcatggtgcattaaaagcattagcagcggatttaatgaagatcgctaacgatgtacgttggcttgcaagtggtccacgtagtggtcttggagaaattattattccagcaaatgaaccgggaagctctattatgccaggtaaagtaaatccaacgcaaagtgaagcattaacgatggttgtagcgcaagtgatgggaaatgacgcaacaatcggatttgctgcgagtcaaggtaattttgagttgaacgtatttaaacctgttattgcatataacttcttacaatccgctcacttattagcagatgcaattgtttcatttaatgataattgtgcagttggtattgaagctgatgaagaagtcattaaagagaatgtgaatcgttcattaatgcttgttacagcattaaacccgcatatcggatatgaaaatgcagcgaaaattgcgaagcatgctcataaagaagggttaactttaaaagaagcagcattgcaatctggactactaacagaagagcaatttgatgaaattgtcgatccgaaaaaaatgattgctccgaaagagtaa

SEQ ID NO: 115073 - protein, 462 aa, Bacillus thuringiensis serovar konkukian str
MEYRIERDTLGEIKVPADKLWAAQTQRSKENFPIGTEQMPLEIVKAFAILKKSAALSNQKLGKLSEEKAEAIVAAADEVIAGKWNEHFPLVVWQTGSGTQSNMNVNEVIANRGNQILKEKGSDVHIHPNDDVNMSQSSNDTFPTALHVACVIAVENHVLPAITKLKETLAEKVTAFEHIIKIGRTHLQDATPLTLGQEISGWHRMLEKTERMIAESNTYMKELAIGGTAVGTGINAHPKFGEMVSEEISQFTGKQFISAPNKFHALTSHDEVVYTHGALKALAADLMKIANDVRWLASGPRSGLGEIIIPANEPGSSIMPGKVNPTQSEALTMVVAQVMGNDATIGFAASQGNFELNVFKPVIAYNFLQSAHLLADAIVSFNDNCAVGIEADEEVIKENVNRSLMLVTALNPHIGYENAAKIAKHAHKEGLTLKEAALQSGLLTEEQFDEIVDPKKMIAPKE

SEQ ID NO: 115074 - DNA, 1389 bp, Bacillus cereus
  CDS (1)..(1389): transl_table=11
atggagtacagaattgaaagagacacattaggagaaattaaagttccagctgataaattatgggcagcacaaacacaacgtagtaaagaaaactttccgattggcacagagcaaatgccgcttgaaattgtaaaagcatttgccattttaaagaagagtgcagcacttactaataaaaaattaggaaagttatcagaagaaaaagcagaagcaattgtgacagcagctgacgaagtgattgcagggaaatggaatgaacattttccacttgtcgtatggcaaacaggtagtggtactcagtcaaatatgaatgtgaatgaagtaattgcaaaccgagggaatcaaattttgaaagagaagggatttgacgtacatattcatccgaatgatgatgtgaacatgtctcaaagttcaaatgatactttcccaactgcgcttcatgtagcatgtgtactcgcagtagaaaatcacgtgttaccagcaattacgaaattaaaagaaacgttagcagaaaaagtaaaagcatttgaaaatattataaaaattggtcgtacacatttacaagatgcgacaccgttaacattaggacaagaaattagtggatggcaccgtatgcttgaaaaaacagagcgtatgattgcagagagcaatacatatatgaaagagcttgcgattggtggtactgcagttggaacaggtataaacgcccatcctaaatttggtgagatggtatctgaggaaattagccaatttacaggtaagcaatttatttctgcaccaaataaattccatgcattaacgagtcatgatgaagttgtatatacacatggggcattaaaagcattagcagcggatttaatgaagatcgctaacgatgtgcgctggctggcaagtggtccacgtagtgggctaggagaaattattattccagcaaatgagccaggaagctctattatgccaggaaaagtaaatccaacgcaaagtgaagcgttaacgatggttgtagcacaagtgatgggaaatgacgcaacaattggatttgcagcgagccaaggcaattttgagttaaatgtatttaaacctgttattgcatataacttcttacaatctgctcacttattagcagatgcaattgtttcatttaatgataattgtgcagttggtattgaagcagatgaagaagtcattaaagagaatgtgaatcgttcattaatgcttgttacagcattaaacccgcatatcggatatgaaaatgcagcgaaaattgcgaagcatgctcataaagaagggctaactttaaaagaagcagcgttgcaatctggactactaacagaagtacaatttgatgaaattgtcgatccgaaaaaaatgattgctccgaaagagtaa

SEQ ID NO: 115075 - protein, 462 aa, Bacillus cereus
MEYRIERDTLGEIKVPADKLWAAQTQRSKENFPIGTEQMPLEIVKAFAILKKSAALTNKKLGKLSEEKAEAIVTAADEVIAGKWNEHFPLVVWQTGSGTQSNMNVNEVIANRGNQILKEKGFDVHIHPNDDVNMSQSSNDTFPTALHVACVLAVENHVLPAITKLKETLAEKVKAFENIIKIGRTHLQDATPLTLGQEISGWHRMLEKTERMIAESNTYMKELAIGGTAVGTGINAHPKFGEMVSEEISQFTGKQFISAPNKFHALTSHDEVVYTHGALKALAADLMKIANDVRWLASGPRSGLGEIIIPANEPGSSIMPGKVNPTQSEALTMVVAQVMGNDATIGFAASQGNFELNVFKPVIAYNFLQSAHLLADAIVSFNDNCAVGIEADEEVIKENVNRSLMLVTALNPHIGYENAAKIAKHAHKEGLTLKEAALQSGLLTEVQFDEIVDPKKMIAPKE

SEQ ID NO: 115076 - DNA, 1764 bp, Glycine max; identical to SEQ ID NO: 45030
  CDS (34)..(1521)

SEQ ID NO: 115077 - protein, 495 aa, Glycine max; identical to SEQ ID NO: 45031

SEQ ID NO: 115078 - DNA, 2014 bp, Zea mays; identical to SEQ ID NO: 45032
  CDS (30)..(1526)

SEQ ID NO: 115079 - protein, 498 aa, Zea mays; identical to SEQ ID NO: 45033

SEQ ID NO: 115080 - DNA, 1726 bp, Brassica napus; identical to SEQ ID NO: 45034
  CDS (76)..(1554)

SEQ ID NO: 115081 - protein, 492 aa, Brassica napus; identical to SEQ ID NO: 45035

SEQ ID NO: 115082 - DNA, 1860 bp, Glycine max; identical to SEQ ID NO: 45036
  CDS (135)..(1622)

SEQ ID NO: 115083 - protein, 495 aa, Glycine max; identical to SEQ ID NO: 45037

SEQ ID NO: 115084 - DNA, 1425 bp, Bradyrhizobium sp. ORS278
  CDS (1)..(1425): transl_table=11
atggcgacatcagcgagttcatcatcttccggaccgacccggacggagaccgacagtttcggtccgatcgaggtcgcggcggaccgctattggggcgcccagaccgagcgcagccggcagaacttccgcatcggccatgaccgcatgcccctcggcgtggtgcacgcgctggcgctggtgaagctggccgcggccaagaccaatcgcgagctcggactactcgatcctgcgatggctgacgccattgtccaggccgcacaggagatcatcgacggcaagctcgacgaccattttccgctcgtcgtctggcagaccggctccggcacgcagaccaacatgaacctcaacgaggtgatcgccaatcgtgccagcgagctgatgggcggcgagcgcgggaccaagaagcccgtgcatcccaacgatcacgtcaacatgagccagtcctcgaacgactccttccccacggcgatgcatatcgccgcagcgcgggcgatttcgggacatctggtgccggcgctgtcggagctgctggcggcgctccgcgccaagcaggatgcgttcgcggacatcgtcaagatcggccgcacccatacccaggacgccacgccgctgacgctcggccaggagttctccggctatgccgcgcaggtcgagagcgcaatcaccaggatcaagaccgctgcgcacgatctgctgccgctcgcccagggcggcacggcggtcggcaccggactcaacgctcatccggatttcgcgggcctgttcgccagacatgtcgccgacatcaccggccttgccttcaccaccgccgccaacaaattcgaggcgctcgcgtccaacgacgcctatgtgttcgcgcatggcgcgatcaatgcggccgccaccggcctgttcaagatcgccaatgacatccgcttcctcggatcgggcccgcgctcggggctcggcgaattgattctgccggagaacgagccgggatcgtcgatcatgccgggcaaggtgaacccgactcagtgcgaagcactgacgatggtgtgctgccaggtgttcggcaatcacaccgccatcaccatggccggcagccagggccatttcgagttgaacgtctacaagccgttgctcgcacattgcatgatgcagtccatacaattactaggcgacgctgcacgttcgttccacgaacattgcgtgaccggaattcaggccgacgaaacgcggattcgcgagctgatgcagcgctctttgatgctcgtaacggccctcgcaccgaaaatcggctacgacaacgcggccaaggtggcgaagacggcgcaccagcgcggcaccacgctgaaggaagaagccgtgcgtctcggccttgtctccgaagatgaattcgaccgtcttgtgcagcccgagaagatgacgaggcccggaagatcatga

SEQ ID NO: 115085 - protein, 474 aa, Bradyrhizobium sp. ORS278
MATSASSSSSGPTRTETDSFGPIEVAADRYWGAQTERSRQNFRIGHDRMPLGVVHALALVKLAAAKTNRELGLLDPAMADAIVQAAQEIIDGKLDDHFPLVVWQTGSGTQTNMNLNEVIANRASELMGGERGTKKPVHPNDHVNMSQSSNDSFPTAMHIAAARAISGHLVPALSELLAALRAKQDAFADIVKIGRTHTQDATPLTLGQEFSGYAAQVESAITRIKTAAHDLLPLAQGGTAVGTGLNAHPDFAGLFARHVADITGLAFTTAANKFEALASNDAYVFAHGAINAAATGLFKIANDIRFLGSGPRSGLGELILPENEPGSSIMPGKVNPTQCEALTMVCCQVFGNHTAITMAGSQGHFELNVYKPLLAHCMMQSIQLLGDAARSFHEHCVTGIQADETRIRELMQRSLMLVTALAPKIGYDNAAKVAKTAHQRGTTLKEEAVRLGLVSEDEFDRLVQPEKMTRPGRS

SEQ ID NO: 115086 - DNA, 1386 bp, Dichelobacter nodosus VCS1703A
  CDS (1)..(1386): transl_table=11
atgaagaccagaacagaacgcgatacgatgggcacgattgaagtatcagaaaatgtttattggggcgcgcaaacgcaacgtagttttgaaaatttcaaaatcggcagcccgatgcccaaagccgtgattgacgctttagctttggtgaaaaaagcggcggcgataacgaattcttctttaggacgattaggtgcgcgcgaaaaagatttgattattcaagccgctgacgatgttttagccggtaaactcgacgatcaatttccgctggtgattttccaaaccggctccggcacgcaaactaatatgaatatgaacgaagtactcgccaaccgcgcaaacgaatacgctggacaaccgcgcggcagttatcaacccgttcaccccaatgatcacgtcaaccacgcgcaatcaaccaatgatagttttcccacggcaattcatttagccgccgcccgcgccattaacagcgatttgattccggcaattcgtcaactgcgcgatactttggcagccaaagcagcagcgtttcaagatatcgttaaaatcgggcggacgcatttacaagacgccaccccgcttactttaggacaagaattttccgcgttcgtgcaacaattggataacgctttagcgcgcttgcataacgctttgatttatctttatgaattaccattaggcggcacagcggtcggcacgggattaaacagtcaccctgattatgctcaaggtgtggcagaaattttggcgcaattaacgcaattgccttttgtcagcgcaccaaataagtttgaagcattagccagccgcgatgcttgcgtttttgcttctggtagtttgaaaacattggcagcgagtttaaataaaatcgctaacgatattcgctggttggcgagtggaccgcgctgcggtttgggcgaaattcgcattcccgaaaatgaacccggaagttccatcatgcctggaaaagtcaatcccactcaatgcgaagcgctcgcgatggttgtttgtcaggtttacggcaacgatacttgcatcgcgatggctggcgcatcaggcaattttcaattaaacgtttatatgccggtgattgcgagcaatttattgcaatctattcaattattagccgccgcttgtcacagttttgatgaacattgtgcgcgcggcattgaaccgaatcgggaaaaaatcgattattttctccatcattcgttgatgttggtcaccgcattaaatcgtcatttgggatacgaaaaagcggcaaaaatcgcaaaaaccgcgcatcaaaaacaacaatccttaaaagaaacggcgattgaattgggttttttaagcgcggaagaatttgatcaatacgtgcaaccttcagaaatgatcgcgccgaaataa

SEQ ID NO: 115087 - protein, 461 aa, Dichelobacter nodosus VCS1703A
MKTRTERDTMGTIEVSENVYWGAQTQRSFENFKIGSPMPKAVIDALALVKKAAAITNSSLGRLGAREKDLIIQAADDVLAGKLDDQFPLVIFQTGSGTQTNMNMNEVLANRANEYAGQPRGSYQPVHPNDHVNHAQSTNDSFPTAIHLAAARAINSDLIPAIRQLRDTLAAKAAAFQDIVKIGRTHLQDATPLTLGQEFSAFVQQLDNALARLHNALIYLYELPLGGTAVGTGLNSHPDYAQGVAEILAQLTQLPFVSAPNKFEALASRDACVFASGSLKTLAASLNKIANDIRWLASGPRCGLGEIRIPENEPGSSIMPGKVNPTQCEALAMVVCQVYGNDTCIAMAGASGNFQLNVYMPVIASNLLQSIQLLAAACHSFDEHCARGIEPNREKIDYFLHHSLMLVTALNRHLGYEKAAKIAKTAHQKQQSLKETAIELGFLSAEEFDQYVQPSEMIAPK

SEQ ID NO: 115088 - DNA, 1386 bp, Vibrio cholerae O1 biovar eltor str. N16961
  CDS (1)..(1386): transl_table=11
atgactcgcgaataccgaattgaaaaagacagcatgggtgaggtcaaagtccctgctgatgcgctttatcaagcacaaactcaacgtgccgtagataactttacgttaagccgctacaccatgcctagcgcgtttattgctgccctcgcctacattaaacaagcggcggcgatgaccaatgcgcagttaggtcatttagaaggggacatcgcccaagcgattgccaatgcatcgcaagcggtgattgatggccagtatgcaaaacagttcccgattgatgttttccagacaggttcaggcaccagctccaatatgaacgccaatgaggtgattgccaccctcgcctcgcgtgaattgggctatgcggtgagtccaaacgatcatgtcaacatgggacaaagcagtaatgatgtgatcccaacagcaatccaagtcagtgcggccatcaatattgagcagcaactgctccccgccttggcgcatttaagtcaaactctcgcggataaacagtcagagctggctgatgtggtcaaaactggccgcacccatttgatggatgcgatgcccgtgactttcgcacaagaactgggtggatggaaaagccaaatcgaccacgccgcgcaaggcatcagccatgcgctttcccccatcaaagccttggcgcaaggcggcacagcggtcggcacaggcattaatgcggatccgcgttttgcacgtatttttgccgataacctcagtcaattgagtcatgttgcttttcagcccagcgacaattttttctataacctaagcagccaagactgcgtggtcggcctttctggtcagttgaaaaccgccgcggtcgcgctgatgaaaatcgctaacgatttgcgctggatgaactctggccctttggcggggttaggggaaattgagctgcaaggcttacaaccgggctcctcgatcatgccgggaaaagttaaccctgtgatcccggaagccgtgactatggtcgctgcgcaagtgattggcaatgacactaccattaccgtggctggccaatccggtaatttccagcttaatgtgatgctgcctgtgatcgcgcacaacctactggaatcaatagaattattgacaaatgcctgccatgcgctcgccgataaagccatcgcaacctttaaagttcgtcatgacaatctggaaaaagccttggctaaaaacccgattctcgtcaccgccttgaatcctgtcattggttatctcaaagcggctgatattgccaaaaaagcctaccagcaaggtcgcgcgattttggatgtcgctgcggaagagacggaccttgatcgcgccacgcttgaagcgctgcttgacccgaaaaagctcacacaaggtgggattgcccattaa

SEQ ID NO: 115089 - protein, 461 aa, Vibrio cholerae O1 biovar eltor str. N16961
MTREYRIEKDSMGEVKVPADALYQAQTQRAVDNFTLSRYTMPSAFIAALAYIKQAAAMTNAQLGHLEGDIAQAIANASQAVIDGQYAKQFPIDVFQTGSGTSSNMNANEVIATLASRELGYAVSPNDHVNMGQSSNDVIPTAIQVSAAINIEQQLLPALAHLSQTLADKQSELADVVKTGRTHLMDAMPVTFAQELGGWKSQIDHAAQGISHALSPIKALAQGGTAVGTGINADPRFARIFADNLSQLSHVAFQPSDNFFYNLSSQDCVVGLSGQLKTAAVALMKIANDLRWMNSGPLAGLGEIELQGLQPGSSIMPGKVNPVIPEAVTMVAAQVIGNDTTITVAGQSGNFQLNVMLPVIAHNLLESIELLTNACHALADKAIATFKVRHDNLEKALAKNPILVTALNPVIGYLKAADIAKKAYQQGRAILDVAAEETDLDRATLEALLDPKKLTQGGIAH

SEQ ID NO: 115090 - DNA, 1389 bp, Neisseria meningitidis MC58
  CDS (1)..(1389): transl_table=11
atgagcacccgtaccgaacacgacacgatgggcaatgtcgaagtcccatccgaagcctattggggcgcgcagacccagcgcagccgcaacaatttcaaaatcggtggcgaaaccctgccgcagccgttgatttatgctttggcattggtgaaaaaagccgccgctgccaccaatgtttccctcggtaggattaagcctgaacaggcggatttgattacgcaggcggcggatgatgtgttgagcggcaagctcgacgggcagttcccattggtagtgtggcagaccggttccggcacgcagtccaatatgaacatgaacgaagtgctggcaaaccgcgccaacgaaatcgccggtacgggtttggcggcttatcagcccgtccatcccaacgaccatgtgaaccacgcgcaatcgaccaacgacgcattcccgaccgctatccacgttgccgccgcgattgaaatcaaccgccacctcatccccgccgtaaaagccctgcgcgacacgttggacaaaaaagcccaagctttcgcccctatcgtcaaaatcggccgcacccacttgcaagacgcgacgccgctgactttgggacaggaattttccggctacgtttcccagcttgatcacggtttaggccgtctgaacgatgcgcttaaagacttgtatgaacttgctttgggcggtacggcggtcggcacgggtttgaacagccatcccgaatacgccgaaaaagccgccgccaaactcgccgaattgtccggcttgccgtttgtcagcgcgccgaacaaatttgaagccctgggcggacgcgatgccgccgttgccgcttcgggcgcattgaaaacgctggcggcaagcctgaacaaaattgccaacgacatccgttggctggcaagcggcccgcgttgcggtttgggcgaaatcaaaatccccgaaaacgagccgggttcgtccattatgccgggcaaagtcaacccgacccaatgcgaagcaatgacgatggtgtgctgccaagtgttcggcaacgacgttaccatcggtatggcgggcgcgtcgggcaatttcgagctgaacgtctatatgcccgttatcgcctacaacctcttgcaatccatccacctgttgggcgacgcgtgcaacagcttcaacgaacactgcgccatcggcatcgaacccgtgccggaaaaaatcgactatttcctgcaccattccctgatgctggttaccgcattaaaccgtaaaatcggttacgaaaacgccgccaaagtcgccaaaaccgcctacaaaaacaacaaatcgttgcgcgaaaccgccgttgagttgggcttgctgacgggcgaagaatttgacgaactggtcgttcctgccgatatggttcatccgcgctaa

SEQ ID NO: 115091 - protein, 462 aa, Neisseria meningitidis MC58
MSTRTEHDTMGNVEVPSEAYWGAQTQRSRNNFKIGGETLPQPLIYALALVKKAAAATNVSLGRIKPEQADLITQAADDVLSGKLDGQFPLVVWQTGSGTQSNMNMNEVLANRANEIAGTGLAAYQPVHPNDHVNHAQSTNDAFPTAIHVAAAIEINRHLIPAVKALRDTLDKKAQAFAPIVKIGRTHLQDATPLTLGQEFSGYVSQLDHGLGRLNDALKDLYELALGGTAVGTGLNSHPEYAEKAAAKLAELSGLPFVSAPNKFEALGGRDAAVAASGALKTLAASLNKIANDIRWLASGPRCGLGEIKIPENEPGSSIMPGKVNPTQCEAMTMVCCQVFGNDVTIGMAGASGNFELNVYMPVIAYNLLQSIHLLGDACNSFNEHCAIGIEPVPEKIDYFLHHSLMLVTALNRKIGYENAAKVAKTAYKNNKSLRETAVELGLLTGEEFDELVVPADMVHPR

SEQ ID NO: 115092 - DNA, 1425 bp, Mycobacterium leprae TN
  CDS (1)..(1425): transl_table=11
atgaagaggacccaattcatggccgacagcgccgaataccgcatcgagcacgacaccatgggcgaagtccgggtaccggcaatagcattgtggcgcgcgcaaacccagcgcgcggtggagaacttcccaatctccggtcgaggtttagagcgcacccaaatccgagcgttgggtctgctgaaaggcgcttgcgcgcaggtcaacaaagacctgggattgttggcttcggagaaagccaacgcaatcattgccgcggcggccacaatcgccgacggctaccacgacgaccaattcccgattgacgtattccaaaccggatccggcaccagctccaacatgaacaccaacgaggttatcggcagcatcgcggcagccaacggtgtaccggtgcatcccaacgacgacgtcaacatgtcgcaatcatccaacgacacattcccgaccgctacccacatcgcagccaccgaagccgcggtacgccatctgattccggcgctgcaagagctgcacgccgcactggcgaccaagtccagcgagtggcacacggtggtgaaatcgggtcgcacgcacttgatggacgccgttccggtaacactcggccaggagttcggtggatacgctcgccaaatcgaggccggaatcgagcgcgtacgcgccacgctgccacggcttggtgaactggcaatcggcggcaccgcagtaggcaccggcctcaacgctcccgatggcttcggcgctaaggtggtcgaggcactgatcgctaccacgggtctgaccgaactacgaccggcagcaaactcattcgaggcacaggccgcccgagacgggcttgtagaggcatccggggcgctgcgcactatcgcggtgtcactgactaagattgccaacgatattcggttgatgggatccggtccgctgaccggcctggcggagatccagctgccagacttacagccgggtagctcgatcatgccaggcaaggtaaatccggttcttccggaggcggttacccaggttgccgcgcaggtgattggcaatgatgccgccgttgcctggggcggtgcaaatggagcctttgagctcaacgtctatatcccgatgatggcccgcaacatcttggagtcgtaccagctgctaaccaacgtgtccaggctgtttgcggagcgttgtattaaagggctttccgccaatatcgagcacctgcgcgagctggccgagtcgtcgcagtcgatcgtgacacccttgaattcggccatcggatacgaggaggctgccgcggtggtcaaacaagcactcaaggaacgcaagaccctccgtcagaccgttatcgaccgcggcttgatcggggacaagctgtccctcgaggagctggaccgccgacttgatgtgctggcgatggcaaaagtcaagccagcggattcctaa

SEQ ID NO: 115093 - protein, 474 aa, Mycobacterium leprae TN
MKRTQFMADSAEYRIEHDTMGEVRVPAIALWRAQTQRAVENFPISGRGLERTQIRALGLLKGACAQVNKDLGLLASEKANAIIAAAATIADGYHDDQFPIDVFQTGSGTSSNMNTNEVIGSIAAANGVPVHPNDDVNMSQSSNDTFPTATHIAATEAAVRHLIPALQELHAALATKSSEWHTVVKSGRTHLMDAVPVTLGQEFGGYARQIEAGIERVRATLPRLGELAIGGTAVGTGLNAPDGFGAKVVEALIATTGLTELRPAANSFEAQAARDGLVEASGALRTIAVSLTKIANDIRLMGSGPLTGLAEIQLPDLQPGSSIMPGKVNPVLPEAVTQVAAQVIGNDAAVAWGGANGAFELNVYIPMMARNILESYQLLTNVSRLFAERCIKGLSANIEHLRELAESSQSIVTPLNSAIGYEEAAAVVKQALKERKTLRQTVIDRGLIGDKLSLEELDRRLDVLAMAKVKPADS

SEQ ID NO: 115094 - DNA, 1494 bp, Agrobacterium tumefaciens str. C58; identical to SEQ ID NO: 45048
  CDS (1)..(1494): transl_table=11

SEQ ID NO: 115095 - protein, 497 aa, Agrobacterium tumefaciens str. C58; identical to SEQ ID NO: 45049

SEQ ID NO: 115096 - DNA, 1446 bp, Agrobacterium tumefaciens str. C58; identical to SEQ ID NO: 45050
  CDS (1)..(1446): transl_table=11

SEQ ID NO: 115097 - protein, 481 aa, Agrobacterium tumefaciens str. C58; identical to SEQ ID NO: 45051

SEQ ID NO: 115098 - DNA, 1494 bp, Sinorhizobium meliloti 1021; identical to SEQ ID NO: 45288
  CDS (1)..(1494): transl_table=11

SEQ ID NO: 115099 - protein, 497 aa, Sinorhizobium meliloti 1021
MAKAEKCPAAGSKIGLGPGPRLGFMNRMTKAGITMTSTRTETDTFGPIEVASDRYWGAQAQRSLGNFKIGWEKQPLAIVRALGIVKQAAARANMALGRLDPAIGDAIVKAAQEVIDGKLDEHFPLVVWQTGSGTQSNMNANEVVSNRAIELLGGVMGSKKPVHPNDHVNMSQSSNDTYPTAMHIACAERVIHDLLPALKHLHKALEEKVKAFDHIIKIGRTHTQDATPLTLGQEFSGYAAQVASSIKRIEMTLPGLCELAQGGTAVGTGLNAPVGFAEKVAEEIAAITGIGFTSAPNKFEALAAHDSMVFSHGAINATAAALFKIANDIRFLGSGPRSGLGELSLPENEPGSSIMPGKVNPTQCEALTQVCVQVFGNHAALTFAGSQGHFELNVYNPLMAYNFLQSVQLLADAAISFTDNCVVGIEAREDNIKAALDRSLMLVTALAPKIGYDNAAKIAKTAHKNGTTLREEAVGGGYVTDEEFDAVVRPETMIGPA

SEQ ID NO: 115100 - DNA, 1416 bp, Nostoc sp. PCC 7120
  CDS (1)..(1416): transl_table=11
atgactacaaatacagattttcgtattgaacgcgattcgatgggcgatcgccaaattgctagtgatgtttattacggtattcaaactctccgagccgttgaaaatttccccattagtggtcttaagcccttacctacttacgtagatgctggtcttttaattaaaaaagctacagcaattgtcaatggagaactaggttgtattccccaagatattagccaagcgattgtgcaagcaaccgatgaaattctggcagggaagttaagagatcagttcgtcgttgatgtctatcaagctggtgcaggcacatcccaccacatgaacattaacgaagtcctagcaaatcgggctttggaaattttgggtgcagaaaagggcaattaccaacgagttagccctaatgatcatgtgaactacgggcagtctaccaacgatgttattcccacagcaattcgcatcggtggcttattggcactgaccaaaacattacagccagcattagaaaaagcgatcgccgccttagaacacaaagctgtagaatttcaagatattgtcaaatctggcagaacccatttacaggatgccgttcccgtccgcttgggtgataatttcgccgcttgggcgcatatcctctcagaacatcaaaaccgcatttacactgcctctggagacttgatggtactcggtttaggtggtagtgcggcgggaacaggcttaaacacccatcctcaataccgcgcccgtgtggtggaagtactggcagaattactaaacttaccactccaacccgccccccatctcatggctgccatgcagagtatgtccccatttgtgaacgtttccggggcgatacgcaacctagcccaagacttagcgaaaatttcccacgacttgaggctgatggactccgggccaaaaactggtttaaaagaaattcaactacccccagtccaacccggttcctcaatcatgccaggcaaatataaccccgttatggcagagatgacatcgatggtgtgtttccaggtgatgggttacgatcaggcgatcgctcttgcagcccaagccggacaattagaattaaacgtgatgatgccgttgattgcctatgatttgatccacagcatcgaaattctggggtcaaccatcgccgcccttacagaacgctgcattcaaggaattaccgccaacaaagaacgctgtttagcctacgccgaaggcagtttagctttagttaccgccctcaacactcacattggttatttaaatgccgcagatgtcgccaaagaatccttaaacacaggaaaatctctaaggcagattgtgttagaaaaaggactgatgagcgaagcagagttagccaccgtgttaaatctagaagaaatgagtagtatattgccactccaaacagagtaa

SEQ ID NO: 115101 - protein, 471 aa, Nostoc sp. PCC 7120
MTTNTDFRIERDSMGDRQIASDVYYGIQTLRAVENFPISGLKPLPTYVDAGLLIKKATAIVNGELGCIPQDISQAIVQATDEILAGKLRDQFVVDVYQAGAGTSHHMNINEVLANRALEILGAEKGNYQRVSPNDHVNYGQSTNDVIPTAIRIGGLLALTKTLQPALEKAIAALEHKAVEFQDIVKSGRTHLQDAVPVRLGDNFAAWAHILSEHQNRIYTASGDLMVLGLGGSAAGTGLNTHPQYRARVVEVLAELLNLPLQPAPHLMAAMQSMSPFVNVSGAIRNLAQDLAKISHDLRLMDSGPKTGLKEIQLPPVQPGSSIMPGKYNPVMAEMTSMVCFQVMGYDQAIALAAQAGQLELNVMMPLIAYDLIHSIEILGSTIAALTERCIQGITANKERCLAYAEGSLALVTALNTHIGYLNAADVAKESLNTGKSLRQIVLEKGLMSEAELATVLNLEEMSSILPLQTE

SEQ ID NO: 115102 - DNA, 1437 bp, Brucella melitensis 16M
  CDS (1)..(1437): transl_table=11
atgcgaaaagggctcgtccgagcctcagccagccggagacatgaaatggccgccacgcgtaccgaaacagacactttcggaccgatcgatgttcccgcagaccgttattggggcgcacagacacagcgttccctgcaaaatttcaggatcggcggcgagcgcatgcccctgcccctggttcacgcgctgggcgtggtaaagcgcgcggcggcggaaaccaatatcgcgctcggcaagcttgatcccgtcctgggtcaggtgattgcggttgccgcttccgaagtcattgagggcaagctcgacgaccatttcccgctcgtagtctggcagacaggctccggcacgcaatcgaacatgaatgccaatgaagtgatctcgaaccgggctatcgagttgctcggcggggaaatgggctccaaaaagccgatccacccgaacgaccatgtcaatatgagccagtcttccaatgacagtttcccgacggcgatccacatcgccacggcggtcgaaaccgtcaaccggctctatcccgcgctcgaacacctcaccaaagccctgaaggtcaaggaagaagcattcaaggacatcatcaagattggccgcacccacacgcaggacgcaacacctgtgacgctggggcaggaattttcgggctaccgcgcggcacttgaatatgcccgccatcggctcgaacaatcgcttgccgacgtcttcctgctggcgcagggcggcacggctgtcggcaccggtctcaacgcacctgtcggtttcgacaagggctttgccgaagcggtgagcgagattaccgggctttccttcaagaccgcgccaaacaagttcgaggcgctggcaagccacggcgccgttctcaacttccacggcagcctgaatgcgcttgcagccgatctcttcaagatcgccaacgatatccggtttctcggttccggcccgcgttccggccttggcgagctttctctgccggaaaacgaacccggctcctccatcatgccgggcaaggtcaaccccacacaggccgaagccatgaccatggtggcaacccaggttttcggcaaccagaccgccgtaaccgtcgccgccagccaggggcatttcgagctgaacgtcttcaaaccggtcattgcctataatgtgctgcaatcgatccggcttttgagcgacaccatggtttcctttgccgatcattgcgtcgaggggattgaacccaatacggcccgcatcaaggaattgctggaacgctcgctcatgctcgtcacggcgcttgcgcctgccatcggctatgacaatgcggccaggatcgccaaaaccgcccataagaacggcaccacgcttcgcgaggaagcattggcaagcggcctcgtatcggaagaagattatgaccggctggtgcgcgccgagcggatgatcgccccacaatga

SEQ ID NO: 115103 - protein, 478 aa, Brucella melitensis 16M
MRKGLVRASASRRHEMAATRTETDTFGPIDVPADRYWGAQTQRSLQNFRIGGERMPLPLVHALGVVKRAAAETNIALGKLDPVLGQVIAVAASEVIEGKLDDHFPLVVWQTGSGTQSNMNANEVISNRAIELLGGEMGSKKPIHPNDHVNMSQSSNDSFPTAIHIATAVETVNRLYPALEHLTKALKVKEEAFKDIIKIGRTHTQDATPVTLGQEFSGYRAALEYARHRLEQSLADVFLLAQGGTAVGTGLNAPVGFDKGFAEAVSEITGLSFKTAPNKFEALASHGAVLNFHGSLNALAADLFKIANDIRFLGSGPRSGLGELSLPENEPGSSIMPGKVNPTQAEAMTMVATQVFGNQTAVTVAASQGHFELNVFKPVIAYNVLQSIRLLSDTMVSFADHCVEGIEPNTARIKELLERSLMLVTALAPAIGYDNAARIAKTAHKNGTTLREEALASGLVSEEDYDRLVRAERMIAPQ

SEQ ID NO: 115104 - DNA, 1488 bp, Drosophila melanogaster; identical to SEQ ID NO: 45056
  CDS (1)..(1488)

SEQ ID NO: 115105 - protein, 495 aa, Drosophila melanogaster; identical to SEQ ID NO: 45057

SEQ ID NO: 115106 - DNA, 1410 bp, Corynebacterium glutamicum ATCC 13032; identical to SEQ ID NO: 45058
  CDS (1)..(1410): transl_table=11

SEQ ID NO: 115107 - protein, 469 aa, Corynebacterium glutamicum ATCC 13032; identical to SEQ ID NO: 45059

SEQ ID NO: 115108 - DNA, 1497 bp, Methanosarcina acetivorans C2A
  CDS (1)..(1497): transl_table=11
ttgccgattaacgtggatatacaacgaaaaaatgccgaaaaagtgccttcaatcctcgacctgcctatcggtactggagcgactggcaaacgaaaagaaagcgattctttgggggaggttgaggttccagccgaccattactggggggctcagacccagaggtctctgattcacttttccatcggcgacgactacatgccaaaggaggtctatcatgcttatgggtacgtgaaaaaggcagctgctctggtcaacgaagccgccggaataataccgccgtggaaagctgaattgatagcaagggttgcagatgaagttatcgccggtaaactcgacagcgaattcccgctctatgtctggcagactggctcaggcactcagtcgaacatgaacgtgaatgaagtcatcagcaatcgcgccatccagctcgtgggcggaagcctcggcagtaagcaccctgtccatcctaatgacgatgttaatatgagtcagtcgtccaacgacacctttccaacggccatgcacattgcaactgtgctcgaattcagcaaccgcctcattcccgcagttaccgttcttgaagagtccatatgggccaaagcacgggaatgggtggatatcgtcaagataggccgaacacatcttcaggacgcaaccccacttacagtgggccaggagtggtctggctacgccacacagctcgatgacgcgttggcgtttgtcaagcattctctccggggattatatcggttggccatcggaggcactgcggtcgggaccggcatcaataccccaccagacttcggtgaaaaggttgcagatgagattgccaggctcacaggtcatccatttgtcacagctccaaataaattcgcagctcagggctcccttgatgcaatggtaacctcaagcgcggcactgcgtacattagcagtcgcactgatgaagattgcaaatgacctgcaatggcttggttcgggaccgaggtcgggtctccacgagcttatcctcccaagtgacgagccgggaagctcaatcatgcctgggaaagtcaatccgactcaggaggaagccatgttaatggtttgcatccaggtgattggggaagataatgccgtcgcatttgccgggtcacagggaaacttcgagcttaacgcaatgtgcccgataatcataaataatgtcttacattctgcgcgcactctcggcgatgcttgcgtaaagttccgtgagtacggaatcaatggaatcatgctcgacaggagtcgtatcgacaaatttgtgggcacctccctcatgttagtgacagcgcttagccctgtcataggctacgacaaggcttccgcaattgtccagcgagcactggacgagaatacgacactgagggaagctgcagtgaaaggaggtttcatcagcgcggaggattttgacaggattgtggatccgaagaagatggttggggatccgcgacacgacctgaagctggcttcagagtag

SEQ ID NO: 115109 - protein, 498 aa, Methanosarcina acetivorans C2A
MPINVDIQRKNAEKVPSILDLPIGTGATGKRKESDSLGEVEVPADHYWGAQTQRSLIHFSIGDDYMPKEVYHAYGYVKKAAALVNEAAGIIPPWKAELIARVADEVIAGKLDSEFPLYVWQTGSGTQSNMNVNEVISNRAIQLVGGSLGSKHPVHPNDDVNMSQSSNDTFPTAMHIATVLEFSNRLIPAVTVLEESIWAKAREWVDIVKIGRTHLQDATPLTVGQEWSGYATQLDDALAFVKHSLRGLYRLAIGGTAVGTGINTPPDFGEKVADEIARLTGHPFVTAPNKFAAQGSLDAMVTSSAALRTLAVALMKIANDLQWLGSGPRSGLHELILPSDEPGSSIMPGKVNPTQEEAMLMVCIQVIGEDNAVAFAGSQGNFELNAMCPIIINNVLHSARTLGDACVKFREYGINGIMLDRSRIDKFVGTSLMLVTALSPVIGYDKASAIVQRALDENTTLREAAVKGGFISAEDFDRIVDPKKMVGDPRHDLKLASE

SEQ ID NO: 115110 - DNA, 1404 bp, Xanthomonas campestris pv. campestris str. ATCC 33913
  CDS (1)..(1404): transl_table=11
atgagcgagagtttcaggatcgaacacgacagcatgggcgagttgcaggtgcctgccgatgcgttgtggggtgcgcagacccagcgcgctgtgcagaacttcccgatttccggccagccgatgccgcgcggtttcattcgcgcgctggggttgatcaaggccgcggccgcaggcgtcaacgccgatctcgggctgctgtccaaatcggtggccaaggtggtgcaggaagccgccttgcaggtggcgcagggcgcgcacgatgcacatttcccgatcgatgtgtatcagaccggctctggtacgtcgtcgaacatgaatgccaacgaggtgattgccacgctggccacccgcgccggcaaggacgcggtgcaccccaatgaccacgtcaatctcgggcagagttccaacgacgtggtgcccaccgccattcgcgtctcggcattgctggcggtgcaggagcagctgcagccggcgctcaagcacctgcgcaagaccatcgacaagcgcgccaagggtctggacaagatcgtcaagaccggccgcacgcatctgatggatgcgatgcccctgacctttggtcaggagttcggcgcgtggtctgcgcagctcagttcagcgcaggagcgcatcgacgacagcctgaagcggctgcgccggttgccgctgggcggcactgcgattggcaccggcatcaacgccgatccgcgcttcggcggcaaggtggccaaggccttgtccacgttgagcagcgtcaagttcgaaagtgccgagaacaagttcgaaggcctggcggcgcaggatgatgcggtggaattgtcgggccagctcaatgcgctggcggtggccttgatcaagatcgccaacgacctgcgctggatgaatgccgggccgctggcagggctgggcgagatcgaattgccggcgctgcagccaggcagttcgatcatgccgggcaaggtgaatccggtgattcccgaagcgaccgtgatggtgtgcgcgcaggtcatcgggcaccacgccgcgatcacggtggccgggcagaccggcaattttcagttgaacgtggcgttgccgctgatcgccgcgaacctgctggattcgatcaacctgctcagcaacgtctcgcgcctgctcgccgataccgccattgccggattgaaggtgcgccaggagcgcgtgcgcgaggccctggaccgcaacccgatcctggtgaccgcgctcaacccgatcatcggctacgaaaaggctgccgcgatcgccaagcgcgcctacaaggagcagcgcccggtgctggatgtggccaaggaagacagcggtctgagcgaggcagagctgcgccgtttgctggatccggcggcgttgacacgcggcggcatccaggcgggtggcggtggtggcggctga

SEQ ID NO: 115111 - protein, 467 aa, Xanthomonas campestris pv. campestris str. ATCC 33913
MSESFRIEHDSMGELQVPADALWGAQTQRAVQNFPISGQPMPRGFIRALGLIKAAAAGVNADLGLLSKSVAKVVQEAALQVAQGAHDAHFPIDVYQTGSGTSSNMNANEVIATLATRAGKDAVHPNDHVNLGQSSNDVVPTAIRVSALLAVQEQLQPALKHLRKTIDKRAKGLDKIVKTGRTHLMDAMPLTFGQEFGAWSAQLSSAQERIDDSLKRLRRLPLGGTAIGTGINADPRFGGKVAKALSTLSSVKFESAENKFEGLAAQDDAVELSGQLNALAVALIKIANDLRWMNAGPLAGLGEIELPALQPGSSIMPGKVNPVIPEATVMVCAQVIGHHAAITVAGQTGNFQLNVALPLIAANLLDSINLLSNVSRLLADTAIAGLKVRQERVREALDRNPILVTALNPIIGYEKAAAIAKRAYKEQRPVLDVAKEDSGLSEAELRRLLDPAALTRGGIQAGGGGGG

SEQ ID NO: 115112 - DNA, 1404 bp, Xanthomonas axonopodis pv. citri str. 306
  CDS (1)..(1404): transl_table=11
atgagcgaacgtttcaggaccgaacacgacagcatgggcgaattgcaggtgcccgccgacgcgttgtggggcgcgcagacccagcgcgcggtgcagaatttcccggtgtccgggcagccgatgccgcgcggtttcattcgcgcgctgggcttgatcaaggccgcggcagccggcgtcaacgccgagcttggattgctgccgaagtcgatcggcaagaccgtgcaggccgctgcattgcaagtggccgagggcagcttcgatgcgcagtttcccatcgatgtgtaccagaccggttcgggcacctcgtccaacatgaatgccaatgaggtgattgccaccctggccacgcgtgccggcaaggatgcggtgcatcccaacgaccacgtcaatctgggccagagttccaacgatgtggtccccaccgccattcgcgtgtcggcattgctggcggtgcaggaacatctgcaaccggcgctcaagcatctgcgcaagaccatcgacaagcgcgccaaatcgcttgataagatcgtcaagaccggtcgcacgcatttgatggacgcgatgccgctcacctttggtcaggagttcggcgcgtggtcggcgcagctgagttcggcgcaggagcgtatcgacgacgcgctcaagcgcttgcgacgcttgccgctgggcggcacggcgatcgggaccggcatcaatgccgacccgcgcttcggtggcaaggtcgccaaggccttgtccaccctgagcggagccaggttcgagagcgcggaaaacaagttcgaaggactcgccgcgcaggacgatgcggtggagttgtctggccaactcaacgcgctggcggtggcactgatcaagatcgcaaacgacttgcgctggatgaatgccggcccgttggcgggcctgggcgaaatcgaactgccggcgctgcagcctggcagctcgatcatgccaggcaaggtcaatccggtgattcccgaagccaccgtgatggcgtgcgcgcaggtgatcggccaccacactgccatcaccatcgccgggcaaaccggcaacttccagttgaacgtgacgttgccgctgatcgcctacaacctgctggattcgatcaccttgctgggcaacgtttcgcgcctgttggccgacaccgccattgccggtctgaaggtgcgtcaggagcgcgtccgcgaggcgttggaccgcaaccccatcttggtgacggcactgaaccccatcatcggttacgaaaaggccgcggcgatcgccaagcgtgcctacaaggagcagcggtcggtactggatgtggccaaggaagacagcgggctcggcgaagcggaactgcggcgattgctcgacccgacggcattgacacgcggcggtatccatgccggcggcggtagcgggggctga

SEQ ID NO: 115113 - protein, 467 aa, Xanthomonas axonopodis pv. citri str. 306
MSERFRTEHDSMGELQVPADALWGAQTQRAVQNFPVSGQPMPRGFIRALGLIKAAAAGVNAELGLLPKSIGKTVQAAALQVAEGSFDAQFPIDVYQTGSGTSSNMNANEVIATLATRAGKDAVHPNDHVNLGQSSNDVVPTAIRVSALLAVQEHLQPALKHLRKTIDKRAKSLDKIVKTGRTHLMDAMPLTFGQEFGAWSAQLSSAQERIDDALKRLRRLPLGGTAIGTGINADPRFGGKVAKALSTLSGARFESAENKFEGLAAQDDAVELSGQLNALAVALIKIANDLRWMNAGPLAGLGEIELPALQPGSSIMPGKVNPVIPEATVMACAQVIGHHTAITIAGQTGNFQLNVTLPLIAYNLLDSITLLGNVSRLLADTAIAGLKVRQERVREALDRNPILVTALNPIIGYEKAAAIAKRAYKEQRSVLDVAKEDSGLGEAELRRLLDPTALTRGGIHAGGGSGG

SEQ ID NO: 115114 - DNA, 1413 bp, Drosophila melanogaster; identical to SEQ ID NO: 45062
  CDS (1)..(1413)

SEQ ID NO: 115115 - protein, 470 aa, Drosophila melanogaster; identical to SEQ ID NO: 45063

SEQ ID NO: 115116 - DNA, 1455 bp, Drosophila melanogaster; identical to SEQ ID NO: 45068
  CDS (1)..(1455)

SEQ ID NO: 115117 - protein, 484 aa, Drosophila melanogaster; identical to SEQ ID NO: 45069

SEQ ID NO: 115118 - DNA, 1404 bp, Drosophila melanogaster; identical to SEQ ID NO: 45070
  CDS (1)..(1404)

SEQ ID NO: 115119 - protein, 467 aa, Drosophila melanogaster; identical to SEQ ID NO: 45071

SEQ ID NO: 115120 - DNA, 1512 bp, Drosophila melanogaster; identical to SEQ ID NO: 45072
  CDS (1)..(1512)

SEQ ID NO: 115121 - protein, 503 aa, Drosophila melanogaster; identical to SEQ ID NO: 45073

SEQ ID NO: 115122 - DNA, 1455 bp, Corynebacterium efficiens YS-314
  CDS (1)..(1455): transl_table=11
ttggctccagccatatttaactcgacgctagaaatgagtgatttcatgaccgagcaggaattccgtattgaacacgacaccatgggtgaagtgaaggtccccgcacaggctctgtggcgtgcacagacccagcgtgccgtggagaacttccccatctctggccgtggtctggaatccgcacagatccgcgcgatgggcctgctgaaggcagcctgcgcgcaggtgaacaaggactccggtgccctggatgccgccaaggccgacgccatcatcgccgccggcaaggagatcgccaccggcaagcatgatgccgagttcccgatcgacgtcttccagaccggttccggcacctcctccaacatgaacaccaacgaggtcatcgcctccatcgcgaaggccaacggcaccgaggtccaccctaacgacgatgtcaacatgggccagtcctccaatgacaccttccccaccgcgacccacgtcgccgccaccgaggcagccgtcaatgacctgatcccgggcctgaaggtgctgcacgagtccctggccaagaaggccaacgagtgggattccgtggtcaagtccggccgcacccacctcatggacgccgtcccggtcaccctgggccaggagttcggcggctacgcacgccagatccagctcggcatcgagcgcatcgaggccaccctgccacgtctgggtgagctggccatcggtggtaccgccgtcggcaccggcatcaacacctccgccgacttcggtggcaaggttgtcgccgagctcgtcgagctcaccggcgtcacccagctgcaggaggcagccaaccacttcgaggcacaggccaaccgcgacgccctcgtcgagttctccggcgcgatgcgcgttgtcgccgtctccctctacaagatcgccaacgacatccgcctcatgggctccggcccgctgaccggcctcggcgagatccagctgcccgacctgcagccgggttcctccatcatgccgggcaaggtcaaccccgtcctgtgcgagaccgccacccaggtctccgcccaggtcatcggcaacgacgccgctgtcgccttcgccggcagccagggccagttcgagctcaacgtgttcatccccgtgatggcccgcaacgtccttgagtccgcccgcctgctggccaacaccgcgcgcgtgttcgccacccgcctggttgacggcattgttcccaacgaggagcacatgaagcagctggccgagtcctccccgtccattgtcactccgctgaactccgcaatcggctacgaagccgccgcgaaggtcgccaaggctgcgctggcagagggcaagaccatccgccagaccgtcatcgacatgggctttgtcgacggtgagaagctgaccgaggaggagctggacaagcgtctggacgttctcgcgatggccaacaccgaccgcaagcagaagttctaa

SEQ ID NO: 115123 - protein, 484 aa, Corynebacterium efficiens YS-314
MAPAIFNSTLEMSDFMTEQEFRIEHDTMGEVKVPAQALWRAQTQRAVENFPISGRGLESAQIRAMGLLKAACAQVNKDSGALDAAKADAIIAAGKEIATGKHDAEFPIDVFQTGSGTSSNMNTNEVIASIAKANGTEVHPNDDVNMGQSSNDTFPTATHVAATEAAVNDLIPGLKVLHESLAKKANEWDSVVKSGRTHLMDAVPVTLGQEFGGYARQIQLGIERIEATLPRLGELAIGGTAVGTGINTSADFGGKVVAELVELTGVTQLQEAANHFEAQANRDALVEFSGAMRVVAVSLYKIANDIRLMGSGPLTGLGEIQLPDLQPGSSIMPGKVNPVLCETATQVSAQVIGNDAAVAFAGSQGQFELNVFIPVMARNVLESARLLANTARVFATRLVDGIVPNEEHMKQLAESSPSIVTPLNSAIGYEAAAKVAKAALAEGKTIRQTVIDMGFVDGEKLTEEELDKRLDVLAMANTDRKQKF

SEQ ID NO: 115124 - DNA, 1380 bp, Pseudomonas putida KT2440; identical to SEQ ID NO: 45076
  CDS (1)..(1380): transl_table=11

SEQ ID NO: 115125 - protein, 459 aa, Pseudomonas putida KT2440; identical to SEQ ID NO: 45077

SEQ ID NO: 115126 - DNA, 1437 bp, Pseudomonas putida KT2440; identical to SEQ ID NO: 45078
  CDS (1)..(1437): transl_table=11

SEQ ID NO: 115127 - protein, 478 aa, Pseudomonas putida KT2440; identical to SEQ ID NO: 45079

SEQ ID NO: 115128 - DNA, 1665 bp, Bradyrhizobium japonicum USDA 110; identical to SEQ ID NO: 45268
  CDS (1)..(1665): transl_table=11

SEQ ID NO: 115129 - protein, 554 aa, Bradyrhizobium japonicum USDA 110
MRSLALPASKPSTLEPCDCLSVPHAQRAFARCKPRRPPCHSEKGRSFAEACALCRPYTLGRRRKSAPDINCHERQRMNDLRKETDSLGEVNVPADKLWGAQTQRSLEHFSIGRDLMPREMIQSYAILKKAAANANYAGGRLDGKIHKLIVHTCDEILAGQHHDMFPLHVWMTGSGTQFNMNVNEVISNRCCQLAGTALGSKLPVHPNDHVNMSQSSNDSFPSAMYIAAAMNVTQRLVPAVEALHDAIAAKSNQWDDIVKIGRTHMQDATPLTLGQEWSGYAAMLADGLARIDDALKGVFRLALGGTAVGTGINAAPGFAEAVAAEIARLTGLPFVSAPNKFAVQGAHDALVQLSGTLRTLAGSLYKIANDIRLLSCGPRAGFAELRIPENEPGSSIMPGKVNPTQAEALTMIAVQVMANDVAVGFGGAGGYLEMNVYKPLIIHNIAQSVTILTDGCTNFRTFLVEGTEPNRKKIKEYVERSLMLVTALAPVIGYDKASRIAHYAMDNDLTLKSAALKLGFVTEPEFDRIVDPAKMVKPYVAEIKVPLAIGAKTG

SEQ ID NO: 115130 - DNA, 1467 bp, Bradyrhizobium japonicum USDA 110; identical to SEQ ID NO: 45266
  CDS (1)..(1467): transl_table=11

SEQ ID NO: 115131 - protein, 488 aa, Bradyrhizobium japonicum USDA 110
MKRPRGISRGGMDVLMAKSARTKTARPATRTETDSFGPIEVPSDRYWGAQTERSRQNFRIGTDRMPISLVHALGIVKLAAAQSNRELGLLDQRRASAIIRAAREVIDGSLDDHFPLVVWQTGSGTQTNMNLNEVIANRANELLGGELGAKKPVHPNDHVNMSQSSNDSFPTAMHIAAASRITADLVPALGELLRALRKKEKEFAKIVKIGRTHTQDATPLTLGQEFSGYAAQVESGIARLKVAVKELYPLAQGGTAVGTGLNAKPRFARLFAKHVAGITKLPFTSAANKFEALASNDAYVLAHGAISSVATGLFKIANDIRLLGSGPRSGLGELILPENEPGSSIMPGKVNPTQCEAMTMVCCQVFGNHTAITVAGSQGHFELNVYKPVLAYNMLHSIRLMADAARSFTEHCVSGIRADEKRISELMQRSLMLVTALAPKIGYDNAAKVAKTAHANGTTLKEEALRLGFVTADEFDRLVQPEKMTKPG

SEQ ID NO: 115132 - DNA, 1383 bp, Lactobacillus plantarum WCFS1
  CDS (1)..(1383): transl_table=11
atgacagaatatcgagttgaatcagatactttaggcgaagttaaaattcctgcgaacgccttatggggtgctcagacagaacggagtcgccataactttccgactggtacgaagatgccgttggaaatgattcgggcattacttcaaattaagcgggccgcagcgattgcgaataaagaagttgaagcaatgactgctgaaaaagctgatttaatcgtggctgccattgataagttattagcgctcgacgatgaagatttgcgtaaggactttccgctggttgtttaccaaactggttcggggacgcaaacgaatatgaacgttaatgaagtggtcgcacacatggctggtaagatcaatcctgatattgaaatcttgccgaacgacgatgttaaccatggtcaaagctctaacgatatcttcccaacggcgatgaacattacggccgcagttgccgtggataagctgattgccgcagcggaacacttattagcggaattgaagatcaaacaaaagaagtactggcgggtagtaaagattggccggacccatcttcaagatgcaacgccattaacttttggccaagaagtgagtggttgggccagtgcgattgaacatgatattgcctacttaaaacagttgaatccaacgttaggcgagcttgcaatgggtgggaccgccgttgggactggtctaaatgctgcccctcattttgctgaaaatattgcggcggcgatgagcaaattgtatgggattgaatttacggctgattccaataagttctatggtttggcccatcattctggtttaaacgtggttcacggggccatcaagaccctagcagccgatttgatgaagattgccaatgatgtgcggttcttggcaagcggtccacgggccggttatgacgaattaaacattccggctaacgaacccggctcatcaatcatgcctgggaaagttaacccaacccaagctgaagccatcactatggcagcggtacgagttatggggaatgacgtggtcgtcgatttagcttctagccaaggtaattttgaaatgaacgtttacaagaccgttttgattgatgctttccttgaatctgctgaattgttagctggaacgattaccggcttcactgaccgaatgattgctggtttgacggtcaaccaagaccggatggcagagttagtcgacagttccttgatgacggttacggcattgtcaccacatattggctatcatgatagtgcgatgattgctcaagcagctgaaaaagcggggacgacattgcgtgaagcagctatcaagtctggcaaagtaaccgcggaacaattcgatgaatggatggttccactggatatgacgaatattgatgattaa

SEQ ID NO: 115133 - protein, 460 aa, Lactobacillus plantarum WCFS1
MTEYRVESDTLGEVKIPANALWGAQTERSRHNFPTGTKMPLEMIRALLQIKRAAAIANKEVEAMTAEKADLIVAAIDKLLALDDEDLRKDFPLVVYQTGSGTQTNMNVNEVVAHMAGKINPDIEILPNDDVNHGQSSNDIFPTAMNITAAVAVDKLIAAAEHLLAELKIKQKKYWRVVKIGRTHLQDATPLTFGQEVSGWASAIEHDIAYLKQLNPTLGELAMGGTAVGTGLNAAPHFAENIAAAMSKLYGIEFTADSNKFYGLAHHSGLNVVHGAIKTLAADLMKIANDVRFLASGPRAGYDELNIPANEPGSSIMPGKVNPTQAEAITMAAVRVMGNDVVVDLASSQGNFEMNVYKTVLIDAFLESAELLAGTITGFTDRMIAGLTVNQDRMAELVDSSLMTVTALSPHIGYHDSAMIAQAAEKAGTTLREAAIKSGKVTAEQFDEWMVPLDMTNIDD

SEQ ID NO: 115134 - DNA, 1377 bp, Pseudomonas syringae pv. tomato str. DC3000
  CDS (1)..(1377): transl_table=11
atgagtaatacccgtatcgaacgcgacagcatgggccaattacaggtcccggccgaggccctttacggcgcgcagactcagcgtgcggtggaaaattttccgatcagccatcagcgtatgcccaggctgttcattcgcgcgctactgctggccaaagcggccgctgcacaggcgaaccttgagctggagcagatcagcgaagggcagagccaggcgattgtcggtgccgtgaaagagctgttggccagcgactacatgactcatttcccggtcgatatcttccagaccggttccggcaccagcaccaacatgaacgccaacgaagtgctcgcaacgctggcaacgcggttactgggcgaagaggtcaaccccaacgatcacgtcaactgcgggcaaagcagcaacgacatcatcccgaccacgattcacgtcagcgccgcgctggcactccatgaacaactgctgccagcgcttgcgcatctggtgcaggtcaccgagcacaaggccgtgcaagtccacgccttcgtcaagaccggccgcacacacctgatggacgccatgcccgtgcgcatgagccaggtgctcaatggctgggcgcagcagattcgcgccaacatcgaacatctgcagggtttgcagcccagcctgcaagcactggctcagggcggcacggcggttggcaccggaatcaatgcgcatcccgagtttgcagcacgcttcagtcgccaattgagcacattgaccggcgtgcagttcgcaccgggcaaggacctttttgcgctgatcggctcgcaagacacagcggtagcagtgtctggtcagctaaaggccacggcggtgtcgctgatgaaaattgccaacgacctgcgctggatgaactccgggccgctggcagggctgggtgagatcgagcttgaggccctgcaaccgggctcgtcgatcatgcccggcaaggtcaacccggtgatccccgaggcgactgcgatggtggccgcgcaggtcatcggcaacgacgcgaccatcaccgtggcggggcagtccggcaactttgagctgaacgtgatgctgccgatcatcgcccagaacctgctcagcagcatcgagctgttggccaacgccagccggcttctggcggacaaggcagttgccagcttcaaggtcaatgaatccaggctccaggaagcgctgtcacgtaacccgattctggtcaccgcgctcaacccgatcatcggttatcagaaggccgccgaaatcgccaaggccgcttacaagcagggtcgcccggtgattgacgtcgctctggagcacaccgatttgcagcgcagcgagctggaagtgttgctcaatcccgaaaaactcaccgctggcggcatctga

SEQ ID NO: 115135 - protein, 458 aa, Pseudomonas syringae pv. tomato str. DC3000
MSNTRIERDSMGQLQVPAEALYGAQTQRAVENFPISHQRMPRLFIRALLLAKAAAAQANLELEQISEGQSQAIVGAVKELLASDYMTHFPVDIFQTGSGTSTNMNANEVLATLATRLLGEEVNPNDHVNCGQSSNDIIPTTIHVSAALALHEQLLPALAHLVQVTEHKAVQVHAFVKTGRTHLMDAMPVRMSQVLNGWAQQIRANIEHLQGLQPSLQALAQGGTAVGTGINAHPEFAARFSRQLSTLTGVQFAPGKDLFALIGSQDTAVAVSGQLKATAVSLMKIANDLRWMNSGPLAGLGEIELEALQPGSSIMPGKVNPVIPEATAMVAAQVIGNDATITVAGQSGNFELNVMLPIIAQNLLSSIELLANASRLLADKAVASFKVNESRLQEALSRNPILVTALNPIIGYQKAAEIAKAAYKQGRPVIDVALEHTDLQRSELEVLLNPEKLTAGGI

SEQ ID NO: 115136 - DNA, 1386 bp, Vibrio parahaemolyticus RIMD 2210633
  CDS (1)..(1386): transl_table=11
atgaccaccgaatttcgtatcgaaaccgacagcatgggcgaagtaaaagtcccggcgaatgccttgtatcaagcgcaaactcagcgtgctatcgataacttcgcattcagccagcacaccatgccaagcggtttcatccaagctttggcccacatcaagcaaacggcagcgctgaccaacgcacaactagggttactggaaggtgatattgccaatgcgattgcagacgccgcgcaagccattattgatggccagcatctcgatcagttccctatcgacctgttccaaaccggttctgggacaagctccaacatgaacgccaatgaagtgattgccacgctcgcgtctgaattgcttggcggcaacgtcaccccgaatgaccacgttaacatgggtcaaagcagtaacgatgtggtgccgacggcgattcaagtcagctcagcacttgctattgaacacaagttgttgcctgcactggctcatcttagccaaagcctagaaaccaagaagcaagctttgcaaggtgtggtaaaaacaggccgaactcatttgatggacgccatgccaatcactttcgcgcaagagctgggcggctggcaattccagattgaacacgctaaacaagccattgaacaaacactgccgatggtgaaagcccttgctcaaggcggcactgccgttggcacagggatcaacgccgatccgcgttttgcctctctgtttgcagacaacctcactcagtccactcgagtcacctttacttcaagcgacaatttcttcttcaacctcagcagccaggatgcgatcgtcgcactgtctggacagctcaaaacagcagcagttgcgatcatgaagatcgcaaacgatcttcgctggatgaactctggcccattggctggcttgggtgaaatcgaactgcaaggcttacagccgggttcatcaatcatgccgggcaaagtaaacccggttattcctgaagccgcagccatggcgtcagcgcaagtgattggcaacgatgcaaccatcaccatcgcgggtcagtctggcaacttccagttgaatgttatgctacctgtgattgcgcataatattttggagagcattgagctcgttgcgaacagtgcgaccgcccttgccgataaggcgattgcgacctttgacgttcgacaagataacctcgatattgctttggccaagaatccgattttagtcaccgcactaaacccggtgatcgggtatttgaaagcggcagaagtcgcgaaaaaagcctacaaacaaggacgagccatcattgatgtggccgaagaggaaacggatttaaaccgcgaaacgcttgaaaggctgcttaatccagccaaattgactcaaggtggcgtggctgagtaa

SEQ ID NO: 115137 - protein, 461 aa, Vibrio parahaemolyticus RIMD 2210633
MTTEFRIETDSMGEVKVPANALYQAQTQRAIDNFAFSQHTMPSGFIQALAHIKQTAALTNAQLGLLEGDIANAIADAAQAIIDGQHLDQFPIDLFQTGSGTSSNMNANEVIATLASELLGGNVTPNDHVNMGQSSNDVVPTAIQVSSALAIEHKLLPALAHLSQSLETKKQALQGVVKTGRTHLMDAMPITFAQELGGWQFQIEHAKQAIEQTLPMVKALAQGGTAVGTGINADPRFASLFADNLTQSTRVTFTSSDNFFFNLSSQDAIVALSGQLKTAAVAIMKIANDLRWMNSGPLAGLGEIELQGLQPGSSIMPGKVNPVIPEAAAMASAQVIGNDATITIAGQSGNFQLNVMLPVIAHNILESIELVANSATALADKAIATFDVRQDNLDIALAKNPILVTALNPVIGYLKAAEVAKKAYKQGRAIIDVAEEETDLNRETLERLLNPAKLTQGGVAE

SEQ ID NO: 115138 - DNA, 1533 bp, Arabidopsis thaliana; identical to SEQ ID NO: 45096
  CDS (1)..(1533)

SEQ ID NO: 115139 - protein, 510 aa, Arabidopsis thaliana; identical to SEQ ID NO: 45097

SEQ ID NO: 115140 - DNA, 1434 bp, Synechococcus sp. WH 8102
  CDS (1)..(1434): transl_table=11
atgcatacgattgtcgattgggatcggcattctcagatgggccaaccgatgaggcaggagcacgacagcattggaggtgtcgacgtccccgctgcagcgctctggggagcccaaacccagcgatctctcaacaacttcgccattggtcatcaaaagattccagcggagctgattcatgccctggcacggatcaaacagtgctgcgccgcggtgaacggtcgccatggtctgttgaacgaccaacaggtggccttgatcgaacgggcgggccaggcaatccaaacaggccagcaagatgatcactttcctctgagtgtctggcaaaccggcagcggcacgcagacgaacatgaacgtgaatgaggtgatcagcaacctcgctgctcaggaatccggagagaacctcggctcgcaccgtcccctccaccccaacgaccacatcaaccggtctcagtccacaaatgacgttttcccggcagcgatccatgtagctgcggctctgcagctgcagcaggagctgctgccagagctgaagcggctgatcgcgagtctcgatgccaaggccgttgcctggcaggacatcatcaagatcgggcggacccatctgcaggacgcagtgccgcttcgccttggagatgaagtcagcgcctggcgcgaccgactcagcgacggcgcccattggctgaccacagcccatcaagacctactggctctgccgctcggaggcacagccgtcggcagtggattgaacacgccggaccgatttgcccacgaggtttgtgctgaactcgccagccgaacgggatccgactttcagccggcggacaacctgtttgctgtcatggcgggccatgactccctggtgcagaccatggctcagctgcggcgcctggccgtgacgctgctcaccatcgctaatgacatccgcctgctggcttgcggacccagggctgggctgggggaactgctgttgccggccaatgaaccgggcagctcgatcatgccaggaaaggtgaatcccacccagtgcgaggccatggcgatggtctgcacccaggtgatcggcatggatgcagccgtcgcggcagctggtgctggggggcatctccagatgaacgtgtataaacccctgatcggctacaacctgatcgagggcatccgtctgctgcaagacgcctgccgctgtttccggctgaatctgttgaccgggatggaagcagaccgtgaccggatcgcattttacgtggagcgatccctgatgctggtgacggctttgacgccggagatcggctacgaaaaagcctgtgcgatcgcccagcacgcccaccgagacggactgacgcttcgagaggccgccatgcaatccggagcgatcacagacgaacgctttgaccagttgatcgatccagccgcgatggcctcaccccaccgctga

SEQ ID NO: 115141 - protein, 477 aa, Synechococcus sp. WH 8102
MHTIVDWDRHSQMGQPMRQEHDSIGGVDVPAAALWGAQTQRSLNNFAIGHQKIPAELIHALARIKQCCAAVNGRHGLLNDQQVALIERAGQAIQTGQQDDHFPLSVWQTGSGTQTNMNVNEVISNLAAQESGENLGSHRPLHPNDHINRSQSTNDVFPAAIHVAAALQLQQELLPELKRLIASLDAKAVAWQDIIKIGRTHLQDAVPLRLGDEVSAWRDRLSDGAHWLTTAHQDLLALPLGGTAVGSGLNTPDRFAHEVCAELASRTGSDFQPADNLFAVMAGHDSLVQTMAQLRRLAVTLLTIANDIRLLACGPRAGLGELLLPANEPGSSIMPGKVNPTQCEAMAMVCTQVIGMDAAVAAAGAGGHLQMNVYKPLIGYNLIEGIRLLQDACRCFRLNLLTGMEADRDRIAFYVERSLMLVTALTPEIGYEKACAIAQHAHRDGLTLREAAMQSGAITDERFDQLIDPAAMASPHR

SEQ ID NO: 115142 - DNA, 1404 bp, Corynebacterium diphtheriae NCTC 13129
  CDS (1)..(1404): transl_table=11
atgactgagcagcagtaccgcatcgagcacgacaccatgggtgaagttaaggtgcctatcgacgccctctggcgcgcacagacccagcgcgctgttgagaacttcccaatttctggccgtggcctcgaagccgcacagatccgcgctatggggctgctcaaggccgcttgtgctcaggttaataaggaccgcggacttctggctccagagcaggctgatgcaatcatcgccgcagctaccgaggtagccgagggcaagcacgacgaccagttccctatcgacgtcttccagaccggttccggcacctcgtcgaacatgaactccaacgaggttatcgcctcgatcgctaaggctaacggcgttgaggttcaccctaacgaccacgtcaacatgggccagtcctccaacgacaccttcccaactgctactcacatcgccgcaactgaggccgccgtcaaggacctcattccaggtctgaaggttctccatgcctccctagccaagaaagctgccgagtgggagaacgttgtaaagtccggccgtacccacctaatggatgccgttccagttaccttgggccaggagttctccggctacgctcgccagattgaggctggcatcgagcgcgtcgaggcatgcttgccacgtcttggcgagctctccatcggcggcaccgctgtaggcaccggcctgaacaccccagcagacttcggccagaaggtcactgccgagctcgttaagctgaccggggtttctgaacttcgcgagtgcgtgaaccactttgaggctcaggcaagccgcgacggcctcgtcgagttctccggcgcaatgcgcaccatcgctgtgtctttgaccaagattgctaacgacatccgctggatgggatccggcccgctgactggcctcggcgagatccacttgccagacctgcagccaggttcttccatcatgccaggcaaggtcaacccagttctgtgcgaaaccgcaactcaggtggcagctcaggttattggtaacgacgcagccatcgctttcggcggcgcacagggcgcattcgagctcaacgtcttcattccaatgatggcccgcaacgtcctcgagtcctctcgcctgttggctaacaccgcccgcgtattcgcagagcgtcttgtcgacggcatccatccaaatgaggagcgcatgcgcaccttggccgagtcttccccatcgatcgttaccccactgaactccgctatcggctatgaagctgcagcgaaggtggcaaagaccgcgctaaaggaaggcaagaccatccgccagactgtcatcgacttgggctttgttgatggcgaaaagctcaccgaggaagagctggacaagcgcctcaacgttctcgcaatggccaacaccgatcgcgacaagtaa

SEQ ID NO: 115143 - protein, 467 aa, Corynebacterium diphtheriae NCTC 13129
MTEQQYRIEHDTMGEVKVPIDALWRAQTQRAVENFPISGRGLEAAQIRAMGLLKAACAQVNKDRGLLAPEQADAIIAAATEVAEGKHDDQFPIDVFQTGSGTSSNMNSNEVIASIAKANGVEVHPNDHVNMGQSSNDTFPTATHIAATEAAVKDLIPGLKVLHASLAKKAAEWENVVKSGRTHLMDAVPVTLGQEFSGYARQIEAGIERVEACLPRLGELSIGGTAVGTGLNTPADFGQKVTAELVKLTGVSELRECVNHFEAQASRDGLVEFSGAMRTIAVSLTKIANDIRWMGSGPLTGLGEIHLPDLQPGSSIMPGKVNPVLCETATQVAAQVIGNDAAIAFGGAQGAFELNVFIPMMARNVLESSRLLANTARVFAERLVDGIHPNEERMRTLAESSPSIVTPLNSAIGYEAAAKVAKTALKEGKTIRQTVIDLGFVDGEKLTEEELDKRLNVLAMANTDRDK

SEQ ID NO: 115144 - DNA, 1458 bp, Rhodopseudomonas palustris CGA009
  CDS (1)..(1458): transl_table=11
atggcgagcgagactgtgacaccgaccctgcgtgacgtgccgatcggcctcacggcgacaggccagcgccgcgaattcgacagcatgggcagcgtcgacgttccggcggatcgttattggggcgcgcagacgcagcgctcgttgcagcatttctcgatcggcggcgaccgcatgccgaaagcggtgtaccacgcctatggctacgtcaagaaagcctgcgcgctggtcaaccacgccgcgggccggctgccggcctggaagaccgaggccatcgtccgcgcagccgacgagacgatctcgggcgcgctggacgatcactacccgctgttcgtttggcagaccggctccggcacccagagcaacatgaacgtcaacgaagtcgtctccaaccgggcgatccagctgctcgggggtacgctcggcacgcagcagccggtcggccccaatgacgacgtcaatatgggtcagtcgtcgaacgacaccttcccgaccgccatgcacatcgcggcggtgacagcgatcgacgatcaggtcgtgccgcggctttccaagctgatcgagattatcgaacagaaagccgacggctggatggacgtggtcaagatcggccgcacccatctggaagacgccgtgccgctgacggtcggccaggaatggcacggctgggccggtcaattgcgcgacgcccgcgatgcgatcgaagccagccgcgccggcctgtatcagctcgcggtcggcggcaccgcggtcggcaccggcctcaacgcccccaagggcttcgctgccgacgttgctgccaggatcgccgagctgaccggcaagccgttcgtcaccgcaccgaacaagtttgccgcgcagggctcgctcgacgcgatggtccgcgcccacggcgcgctgcgcgatctcgcggtggcgctgatgaagatcgccaacgacatgcgctggctcgcttctggtccgcgctgcggcttcggcgaattgctgctgccgagcaacgagcccggctcctcgatcatgcccggcaaggtcaacccgacgcaatgcgaggcgatggtgatgatctgcatccaggtgatgggcaacgacagcgccgtcgccttcgccggcagccagggcaatttcgaactcaacgcgatgcggccggtgatcatcaacaacttcctgcattcggcgcgcatcctcgccgacggctgtgagaagttccggacctattcggtcgagggcaccgagctcaaccgcgatcgtgtcgcgcagtacgtcgaaggcagcgtgatgctggtcaccgcgctgtcaccggtgatcggctatcagaacgccgcgcatatcgccgaagatgcgatcgccaagaatctcacgctgaagcaggcggcactcgcctccggcaaggtcgacgaggcgacgttcgaccgcatcgtccggccgatcgacatggtcggcagcggtcttgcgggcgcctga

SEQ ID NO: 115145 - protein, 485 aa, Rhodopseudomonas palustris CGA009
MASETVTPTLRDVPIGLTATGQRREFDSMGSVDVPADRYWGAQTQRSLQHFSIGGDRMPKAVYHAYGYVKKACALVNHAAGRLPAWKTEAIVRAADETISGALDDHYPLFVWQTGSGTQSNMNVNEVVSNRAIQLLGGTLGTQQPVGPNDDVNMGQSSNDTFPTAMHIAAVTAIDDQVVPRLSKLIEIIEQKADGWMDVVKIGRTHLEDAVPLTVGQEWHGWAGQLRDARDAIEASRAGLYQLAVGGTAVGTGLNAPKGFAADVAARIAELTGKPFVTAPNKFAAQGSLDAMVRAHGALRDLAVALMKIANDMRWLASGPRCGFGELLLPSNEPGSSIMPGKVNPTQCEAMVMICIQVMGNDSAVAFAGSQGNFELNAMRPVIINNFLHSARILADGCEKFRTYSVEGTELNRDRVAQYVEGSVMLVTALSPVIGYQNAAHIAEDAIAKNLTLKQAALASGKVDEATFDRIVRPIDMVGSGLAGA

SEQ ID NO: 115146 - DNA, 1434 bp, Rhodopseudomonas palustris CGA009
  CDS (1)..(1434): transl_table=11
atgatcatggcccgcacgccccgctctccccgccccgcgcgttctgccgccacgcgaagcgagaccgatagtttcggtccgatcgatgtcgccgccgaccgttactggggcgcgcagaccgagcgttcgcggcaaaacttccgcatcggcaccgagcggatgccgatcggcatcatccgggcgctggcaatcgtgaaactggccgcggccgagaccaacaaggagctcggcctgctcgacaaccgccgcgccggcgccatcgtccgcgccgcccgcgaagtgatcgacggcacccatgacgatcacttcccgttggtggtgtggcagaccggctccggcacccagaccaacatgaacctcaacgaggtaattgctaatcgcgccaacgaactgctcggcggcgagcggggatcgaagaagccggtacatcccaacgatcacgtcaacatgagccagtcgtcgaacgactcgttcccgaccgcgatgcatatcgccgccgcgcaagcgattacggccgacctgatcccagcgctgacgctgctgcacgatgcgttacgcaagaaggagaaggcgttcgccaagatcgtcaagatcggccggactcacacccaggacgccaccccgctgacgctcggccaggaattttccggctacgcggcacagctcgccagcggcatcgcgcggatcaaatcggcgctgaaggagctgtatccgctggcgcagggcggcaccgcggtcggcaccggactgaacacgcatccgaaattcgccaaggcgttcgccaagcgcgccgcggcgattaccaagctgccgttcgtcaccgcgccgaacaaattcgaagcgctcgccgccaacgacgcctacgtgttcgtgcacggcgcactgaacgccgccgccaccgcgctgtttaagatcgccaacgacatccgcctgctcggctccggcccgcgctccgggcttggcgaactgatcctgccggagaacgagcccggctcatcgatcatgcccggcaaggtcaacccgacccagtgcgaggcgatgaccatggtgtgctgccaggtgttcggcaatcagaccaccctcaccgtcgccggcagccagggtcacttcgaactcaacgtctacaagccggtgatggcgcaggcgatgctgcagtcgatcgggctgctcgccgatgccgcacgctcgttcacgaccaactgcgtcgatggcatccgcgccgacgagcagcggatcggcgaactgatgcagcgctcgctgatgctggtgaccgcgctggcgccgagcatcggctacgacaatgccgccaagatcgccaaggcggcgcatcagcgtggtacgaccttgaaggacgaagcggtgcgttcggaactgatcagcgccgccgaattcgaccggctggtgcggccggacaaaatgacgcatccgggctga

SEQ ID NO: 115147 - protein, 477 aa, Rhodopseudomonas palustris CGA009
MIMARTPRSPRPARSAATRSETDSFGPIDVAADRYWGAQTERSRQNFRIGTERMPIGIIRALAIVKLAAAETNKELGLLDNRRAGAIVRAAREVIDGTHDDHFPLVVWQTGSGTQTNMNLNEVIANRANELLGGERGSKKPVHPNDHVNMSQSSNDSFPTAMHIAAAQAITADLIPALTLLHDALRKKEKAFAKIVKIGRTHTQDATPLTLGQEFSGYAAQLASGIARIKSALKELYPLAQGGTAVGTGLNTHPKFAKAFAKRAAAITKLPFVTAPNKFEALAANDAYVFVHGALNAAATALFKIANDIRLLGSGPRSGLGELILPENEPGSSIMPGKVNPTQCEAMTMVCCQVFGNQTTLTVAGSQGHFELNVYKPVMAQAMLQSIGLLADAARSFTTNCVDGIRADEQRIGELMQRSLMLVTALAPSIGYDNAAKIAKAAHQRGTTLKDEAVRSELISAAEFDRLVRPDKMTHPG

SEQ ID NO: 115148 - DNA, 1392 bp, Geobacter sulfurreducens PCA; identical to SEQ ID NO: 45114
  CDS (1)..(1392): transl_table=11

SEQ ID NO: 115149 - protein, 463 aa, Geobacter sulfurreducens PCA; identical to SEQ ID NO: 45115

SEQ ID NO: 115150 - DNA, 1407 bp, Lactobacillus johnsonii NCC 533
  CDS (1)..(1407): transl_table=11
atggtgaaaaaaggttatcgtgttgaaagtgatacattaggcccagtagaaattcctaaaaaggcattgtggggtccacaaacacaaagaagtaaggataatttccatactggagcgttaatgccaattggtattattcgtgcgcttcttcaaataaagctagctgctgctcaagctaatattgaagcaggaactgaaacagaagaaaaaggacgtgccattattgaagcaattcatcaactacttgatttaaacaatgaagaattgcaaccatattttccattgcatgtctatcaaactggatcaggtacccaaactaatatgaatgttaatgaagtggtggctaatcttgctaataaaaatcatcccggtttagatattttacctaatgatgatgtgaacatgggacaatcatcaaatgatacttttccaactgcaatgaatttagttgcaacacaagcgttagatgacttaaaaccttctattaaacacttgattaaagaactaaaagtgaaacaagatgagtattggacaacggttaaagtaggaagaacccacttgcaagatgcggttccattgacttttggtcaggaactatcaggctatatttctgctcttaatcatgatttatcctacattaacgagttagaagaaacactttatgaattaccaattggaggaactgcggttggcactggacttaatgcagctcctggtatggcagaagatatcgctgagcgtttatcaagaaagtatggacataattttaaagttgatacaaataaattctttggtttagcaaatcactcaggcttaaatgttgtgcatggcgctttaaaagctttggcagctgatatgttcaaaattgctcaagatattcgtttcttaggatctggcccaagagctggtttaggagaacttaatttacctgcaaacgaacctggttcatcaattatgccaggtaaagtaaatccgactcaagcagaagctgttaccatggcatgtttgagagtctttggaaatgatacaactattactatggctgcatctcaaggaaactttgaaatgaatgtctttaagccagtgatgattgcagcatttttagagtctgccaatgttttatctggaactatttctggctttgcagataagatgattcatggtatgactgttaataaagaaagaatggctaaggatgtagcaaattcattaatgacagttactgcactttcaccacatattggttaccatgaagctgctactattgcacagactgcagctaaaaataatacgactttgcgtacagcggctttaaagagcggcttagttactaaagaacaatatgataagtggatgaaaccaattaccatgactaatgcaatgaatactaagccaattgatgattag

SEQ ID NO: 115151 - protein, 468 aa, Lactobacillus johnsonii NCC 533
MVKKGYRVESDTLGPVEIPKKALWGPQTQRSKDNFHTGALMPIGIIRALLQIKLAAAQANIEAGTETEEKGRAIIEAIHQLLDLNNEELQPYFPLHVYQTGSGTQTNMNVNEVVANLANKNHPGLDILPNDDVNMGQSSNDTFPTAMNLVATQALDDLKPSIKHLIKELKVKQDEYWTTVKVGRTHLQDAVPLTFGQELSGYISALNHDLSYINELEETLYELPIGGTAVGTGLNAAPGMAEDIAERLSRKYGHNFKVDTNKFFGLANHSGLNVVHGALKALAADMFKIAQDIRFLGSGPRAGLGELNLPANEPGSSIMPGKVNPTQAEAVTMACLRVFGNDTTITMAASQGNFEMNVFKPVMIAAFLESANVLSGTISGFADKMIHGMTVNKERMAKDVANSLMTVTALSPHIGYHEAATIAQTAAKNNTTLRTAALKSGLVTKEQYDKWMKPITMTNAMNTKPIDD

SEQ ID NO: 115152 - DNA, 1395 bp, Wolbachia endosymbiont of Drosophila melanogaster; identical to SEQ ID NO: 45116
  CDS (1)..(1395): transl_table=11

SEQ ID NO: 115153 - protein, 464 aa, Wolbachia endosymbiont of Drosophila melanogaster; identical to SEQ ID NO: 45117

SEQ ID NO: 115154 - DNA, 1401 bp, Bdellovibrio bacteriovorus HD100
  CDS (1)..(1401): transl_table=11
gtgatggcagagggcggattcagaatcgaaaaagacaccatgggtgaagtgaaagttcccgcagacaagttctggggagcacagacccaaaggtccacagaaaacttccgcatcgggggcgatcgtttcccgcgcgagatgatccgggccttgggtgtcttgaagaagtccgccgctatcaccaacgaaaaactgggtctgcttgatccgaaaaaagcctcggtcatcgtgaaagccgccgatgaagtgatcgtcggcaaactcgacgcccatttcccgctggtggtgtggcagacgggttcaggcacacagaccaacatgaatgccaacgaagttatcgccaatcgtgcgatggacatgatgggcatcaaacttcccagcaaggaagttcatcccaatgatgatgtgaacaagggccagtcttcgaatgacactttccccaccgccatgcacattgctgtgggcgagcagattcatcatcgcctgattccgatgctggaaaagctgcacaaagctctggaaaacaaacagaaagaatttaaagacatcgtgaaaatcggtcgcacccatttgatggatgcaacccccctgaccctggggcaggagttttccggttacagcacccaggtgaaacactccatccagcgcgtgaaaaacaccttgccgcatctgtacgagctggcattgggcgggacggcggtgggaacgggtttgaacacgcatccgaaatttgcggttgaagccgctgcggaaatcgctcgcgagacggggattgcctttgtttcggctgaaaacaagtttgaagccctggcggcccatgacgctttggtggaagtcagcggggcgctgaactcggtcgcggtgtccctgatgaaaattgcgaacgacatccgcctgctgggttccggcccgcgctgcgggatcggggagcttcatttgcccgaaaatgaaccgggaagctccatcatgccgggcaaagtgaatcccacccagagcgaggctatgaccatggtctgtgcccaggtgatgggaaatcacgtggccgccacaattggcggggcgacggggcattttgagctgaacgtgtttaagcccgtgattgtgttcaatgttctgaattccgtgcgcctgttggcggacgcggcagaatccttcaccgatcactgtgtggtgggcattgaagccaaccgtaaacagattcagaagcatctggagcagtctttgatgctggtgacggcactgaatcctcacattggctatgacaacgcagccaaaattgccaaaactgcccataaaaacggcacaacactgcgcgaagaagccatcaatcttggactgctctctggcgaagaatttgataagatagtaaaaccggaaaacatggtcggccccagccgatag

SEQ ID NO: 115155 - protein, 466 aa, Bdellovibrio bacteriovorus HD100
MMAEGGFRIEKDTMGEVKVPADKFWGAQTQRSTENFRIGGDRFPREMIRALGVLKKSAAITNEKLGLLDPKKASVIVKAADEVIVGKLDAHFPLVVWQTGSGTQTNMNANEVIANRAMDMMGIKLPSKEVHPNDDVNKGQSSNDTFPTAMHIAVGEQIHHRLIPMLEKLHKALENKQKEFKDIVKIGRTHLMDATPLTLGQEFSGYSTQVKHSIQRVKNTLPHLYELALGGTAVGTGLNTHPKFAVEAAAEIARETGIAFVSAENKFEALAAHDALVEVSGALNSVAVSLMKIANDIRLLGSGPRCGIGELHLPENEPGSSIMPGKVNPTQSEAMTMVCAQVMGNHVAATIGGATGHFELNVFKPVIVFNVLNSVRLLADAAESFTDHCVVGIEANRKQIQKHLEQSLMLVTALNPHIGYDNAAKIAKTAHKNGTTLREEAINLGLLSGEEFDKIVKPENMVGPSR

SEQ ID NO: 115156 - DNA, 1446 bp, Yersinia pestis biovar Microtus str. 91001
  CDS (1)..(1446): transl_table=11
atgctagctcaacatcaatcttttgttctaaatgctaaggaggcagtgatggcaactacccgcagtgaaaaggattctatggggtctatcgatgtacctgcaaaccaattatggggggcgcaaactcaacgttcattggcgcattttcgaatttcacaagaaaaaatgccaacagagctaattcatgcattggctctgaccaaacgagcggcagctcaagtgaatatggacctaggcttgctgccagccgagcgtgcaaaagcgattatgcgggccgcagatgaagttctggatggcgctcatccaaccgagttccctctcgccatctggcaaaccgggtcgggtactcagacgaatatgaatatgaatgaggtactggcaaaccgtgcgagtgagttgctcgggggggcgcgggggaataaccgtttggttcatcccaatgatgatgtcaataaaagccaaagttcaaatgatgtcttcccaacggcgatgcatgtcgctgcagtgatgggggtgagtgaacatcttcttcctgaactgaaggtgttacagaaaaccttggccgacaaagcagaagcttatcgcgatattgtaaaaattggccgtacacatttacaagatgcgacccctttaacgttggggcaggaaatttccgggtgggcggcaatgttatctcacagtgtgcggcatattgaggcgacccttcctcacctgtgtgaattagcgcttgggggaacagcggtggggactggcctcaatacgcatcctgaatatgctgtacgagtagctaatgaaatagccacactgacacgccaaccgtttatcactgccccgaataaatttgaatcattgggaacctgcgatgcattggttcatggtcacggtgcgctaaaaggcttagcggcatccctgatgaaaattgccaatgatgtccgttggttatcatcaggccctcgctgtggtattggcgaaatatctattccggaaaatgagccaggcagttctatcatgccaggcaaagtgaatccaacacagtgtgaagcgatgaccatgctatgtgctcaagttatgggtaatgatgtggctatcaatatcggtggggcgtccggcaactttgaattaaacgtgttccgtccattggtcatccataacttcctgcaatctgttcgtttgttggctgatggaatgcgtggttttaatgagcactgcgctttgggaattgaacccaaccgcgaccgtattacgcaattgctcaatgaatcgctgatgttagttaccgcgctcaatacccatattggctacgataaagcagctgaaatcgccaaaaaggcgcataaagaggggctaacactgaaagcagcagctatggcattgggttatcttaccgatgcagagtttgatgaatgggttcgaccggaagatatggtcggcagtatgaagaaatag

SEQ ID NO: 115157 - protein, 481 aa, Yersinia pestis biovar Microtus str. 91001
MLAQHQSFVLNAKEAVMATTRSEKDSMGSIDVPANQLWGAQTQRSLAHFRISQEKMPTELIHALALTKRAAAQVNMDLGLLPAERAKAIMRAADEVLDGAHPTEFPLAIWQTGSGTQTNMNMNEVLANRASELLGGARGNNRLVHPNDDVNKSQSSNDVFPTAMHVAAVMGVSEHLLPELKVLQKTLADKAEAYRDIVKIGRTHLQDATPLTLGQEISGWAAMLSHSVRHIEATLPHLCELALGGTAVGTGLNTHPEYAVRVANEIATLTRQPFITAPNKFESLGTCDALVHGHGALKGLAASLMKIANDVRWLSSGPRCGIGEISIPENEPGSSIMPGKVNPTQCEAMTMLCAQVMGNDVAINIGGASGNFELNVFRPLVIHNFLQSVRLLADGMRGFNEHCALGIEPNRDRITQLLNESLMLVTALNTHIGYDKAAEIAKKAHKEGLTLKAAAMALGYLTDAEFDEWVRPEDMVGSMKK

SEQ ID NO: 115158 - DNA, 1638 bp, Magnaporthe grisea 70-15; identical to SEQ ID NO: 45126
  CDS (1)..(1638)

SEQ ID NO: 115159 - protein, 545 aa, Magnaporthe grisea 70-15; identical to SEQ ID NO: 45127

SEQ ID NO: 115160 - DNA, 1590 bp, Gibberella zeae PH-1; identical to SEQ ID NO: 45128
  CDS (1)..(1590)

SEQ ID NO: 115161 - protein, 529 aa, Gibberella zeae PH-1; identical to SEQ ID NO: 45129

SEQ ID NO: 115162 - DNA, 1452 bp, Candida glabrata CBS 138; identical to SEQ ID NO: 45130
  CDS (1)..(1452)

SEQ ID NO: 115163 - protein, 483 aa, Candida glabrata CBS 138; identical to SEQ ID NO: 45131

SEQ ID NO: 115164 - DNA, 1479 bp, Kluyveromyces lactis NRRL Y-1140; identical to SEQ ID NO: 45132
  CDS (1)..(1479)

SEQ ID NO: 115165 - protein, 492 aa, Kluyveromyces lactis NRRL Y-1140; identical to SEQ ID NO: 45133

SEQ ID NO: 115166 - DNA, 1479 bp, Debaryomyces hansenii CBS767; identical to SEQ ID NO: 45134
  CDS (1)..(1479)

SEQ ID NO: 115167 - protein, 492 aa, Debaryomyces hansenii CBS767; identical to SEQ ID NO: 45135

SEQ ID NO: 115168 - DNA, 1404 bp, Debaryomyces hansenii CBS767; identical to SEQ ID NO: 45136
  CDS (1)..(1404)

SEQ ID NO: 115169 - protein, 467 aa, Debaryomyces hansenii CBS767; identical to SEQ ID NO: 45137

SEQ ID NO: 115170 - DNA, 1470 bp, Yarrowia lipolytica CLIB122; identical to SEQ ID NO: 45138
  CDS (1)..(1470)

SEQ ID NO: 115171 - protein, 489 aa, Yarrowia lipolytica CLIB122; identical to SEQ ID NO: 45139

SEQ ID NO: 115172 - DNA, 1635 bp, Aspergillus nidulans FGSC A4; identical to SEQ ID NO: 45140
  CDS (1)..(1635)

SEQ ID NO: 115173 - protein, 544 aa, Aspergillus nidulans FGSC A4; identical to SEQ ID NO: 45141

SEQ ID NO: 115174 - DNA, 1389 bp, Candida albicans SC5314; identical to SEQ ID NO: 45142
  CDS (1)..(1389): transl_table=12

SEQ ID NO: 115175 - protein, 462 aa, Candida albicans SC5314; identical to SEQ ID NO: 45143

SEQ ID NO: 115176 - DNA, 1419 bp, Ustilago maydis 521; identical to SEQ ID NO: 45144
  CDS (1)..(1419)

SEQ ID NO: 115177 - protein, 472 aa, Ustilago maydis 521; identical to SEQ ID NO: 45145

SEQ ID NO: 115178 - DNA, 1533 bp, Cryptococcus neoformans var. neoformans B-3501A; identical to SEQ ID NO: 45146
  CDS (1)..(1533)

SEQ ID NO: 115179 - protein, 510 aa, Cryptococcus neoformans var. neoformans B-3501A; identical to SEQ ID NO: 45147

SEQ ID NO: 115180 - DNA, 1494 bp, Tribolium castaneum; identical to SEQ ID NO: 45148
  CDS (1)..(1494)

SEQ ID NO: 115181 - protein, 497 aa, Tribolium castaneum; identical to SEQ ID NO: 45149

SEQ ID NO: 115182 - DNA, 1386 bp, Prochlorococcus marinus str. AS9601
  CDS (1)..(1386): transl_table=11
atgaccaaaaattttaggattgaaaaagatagtatgggaacaatagaggttcccatggaagctttgtggggtgcccaaacacaaagatcgataataaatttttctattggagaagaattaattccaattgagttaatttattcactgaccctcataaaaaaagctgcttcaattgcgaatttcaatttaggtttaatagataaaaggaaaaaagatttgattgtagaggcatgtacggaaatacttgatgggcttcacgattcacagtttcccttaaaggtttggcaaacaggtagtggtacgcaaacaaatatgaatgttaatgaagtaatttcaaatattgcagctttaaaaactaattcagagcttggtagtcatcaaccaattcatccgaatgatgatgtaaataaatctcagtcaactaatgacacttttcctgctgctattcaaatatctgttgttaatgaaataatcaaaaatctagttccaacgatcagagaacttactaaggtctttgataaaaaaagtgaagaatggaaagaccttataaagataggaagaacccattttcaagatgcagttccccttacttttgggcaagaaatatcaggatggtcagagcaacttaaagatgctgagaatgcaattattatgagtctgaatgaattgtatttcttacctctgggaggaactgcggttggtacagggattaattgtccaaaaggattttgtgaagagtctataaaatcaatttccgatgatactaatttaatgttctataaatcaaaaaataatttttctatcatggcctcgcatgatcgtcttgctcaagtaatgagtcagataaaaatattagcaagtgcattatttaaaatttcaaatgacataaaaattctatcttctggtccaagatcaggaatatatgaactgattattcctcaaaatgaacctggaagttctattatgccagggaaagtgaatccaactcaatgcgaagcattatcaatggtttgtactcagataatgggtcttgaatatgcagtctcaatggcaaattctagcggcactttacagatgaatgaatataagcctcttattggatttaatattctcacaagtttaaaattacttaaaaatgtaatagaaaacttcagaaaaaaattagttgatggtatgcaacctaatcaaaagaaaatgaagttaaatttagaaaattcactaatgttggttacagccatagtgccaaaagttggttatgaaaaagcagctgaaattgcaaaccttgccttcaaagaatcattaaatttaaaagaggcaacaattaaattaggttatttaaacgaagatgaatttgatgaagcaatgaatatcaattcaatgatttga

SEQ ID NO: 115183 - protein, 461 aa, Prochlorococcus marinus str. AS9601
MTKNFRIEKDSMGTIEVPMEALWGAQTQRSIINFSIGEELIPIELIYSLTLIKKAASIANFNLGLIDKRKKDLIVEACTEILDGLHDSQFPLKVWQTGSGTQTNMNVNEVISNIAALKTNSELGSHQPIHPNDDVNKSQSTNDTFPAAIQISVVNEIIKNLVPTIRELTKVFDKKSEEWKDLIKIGRTHFQDAVPLTFGQEISGWSEQLKDAENAIIMSLNELYFLPLGGTAVGTGINCPKGFCEESIKSISDDTNLMFYKSKNNFSIMASHDRLAQVMSQIKILASALFKISNDIKILSSGPRSGIYELIIPQNEPGSSIMPGKVNPTQCEALSMVCTQIMGLEYAVSMANSSGTLQMNEYKPLIGFNILTSLKLLKNVIENFRKKLVDGMQPNQKKMKLNLENSLMLVTAIVPKVGYEKAAEIANLAFKESLNLKEATIKLGYLNEDEFDEAMNINSMI

SEQ ID NO: 115184 - DNA, 1395 bp, Prochlorococcus marinus str. NATL1A
  CDS (1)..(1395): transl_table=11
atgtccaacatgaaacgacttgagaaagatagcctaggttcaattgatgttccaaaggatgcgctatggggagctcaaactcaacgctcaatattgaattttgctatcgggaatgaggtcataccactcgagattattcttgcaattgcccaaataaaagcctctgctgctcatgtaaacaatcatctaggtttaataactacagaaactgctcaatttattaccgaagcaagtttagaaattattgaaggaaaacataatgatcaattcccagtgagagtttggcaaacaggcagtggtactcaaaccaatatgaacgtcaatgaggtgatcagcaatatagcttcaaaacgttcaaataatgcgttaggtagtcataatccaatacatcccaatgatcatgtcaattgctctcaatcaacaaacgatgtttttccagctgcaatccaaatagccacaatagtaaccttaaaagatacattaatacctgaattaaccaaactcattgatgtattccatcaaaaaagtaaagagtggaaagatattataaaaataggacgtacccatcttcaagatgcagtacctctaactcttggacaagaagtctctgcttgggctgctcaattagagactgctttaaaacgcattgaaatcaacatcgaggaactttatccacttccacttggaggaaccgctattggtacagggattaatgctcctaaagatttcgataatttaatcgctcttgaaatagccaaaaaaacaaatttaccttttgaaactgcagctaataaatttgccatcatggctagtcatgatggtcttgtaaatataatgtctcaaataaaattactagccgtcacttttctcaaaattgttaatgatcttcgacttttatcttgtggaccaagagctggattatcagaactacagcttccagccaatgaacctggcagctcaataatgccaggaaaaattaatcctactcaatgcgaagccatggcaatggtatgtacgcaaataattggcatggatacctccgtatcgatagcaggaagtggaggacatctacaaatgaatgtctataaaccactgattggctacaacattataacaagtatcaaccttattcaaaatgcctgtaagagttgcagagagaatatgattgaaagtattcaacctaatcaagcaaaaatcaaacaatttctagacaattctttgatgttggtaaccgccttatcgccatcaataggatacgaaaaagcaagtaaaattgctcaactagcccatgaaaagaatctaagtctaagacaagcttccagtcaattaaattatcttgatcaagaagaatttgataaactcatgtgtccaaaatcaatgattggaagtgattga

SEQ ID NO: 115185 - protein, 464 aa, Prochlorococcus marinus str. NATL1A
MSNMKRLEKDSLGSIDVPKDALWGAQTQRSILNFAIGNEVIPLEIILAIAQIKASAAHVNNHLGLITTETAQFITEASLEIIEGKHNDQFPVRVWQTGSGTQTNMNVNEVISNIASKRSNNALGSHNPIHPNDHVNCSQSTNDVFPAAIQIATIVTLKDTLIPELTKLIDVFHQKSKEWKDIIKIGRTHLQDAVPLTLGQEVSAWAAQLETALKRIEINIEELYPLPLGGTAIGTGINAPKDFDNLIALEIAKKTNLPFETAANKFAIMASHDGLVNIMSQIKLLAVTFLKIVNDLRLLSCGPRAGLSELQLPANEPGSSIMPGKINPTQCEAMAMVCTQIIGMDTSVSIAGSGGHLQMNVYKPLIGYNIITSINLIQNACKSCRENMIESIQPNQAKIKQFLDNSLMLVTALSPSIGYEKASKIAQLAHEKNLSLRQASSQLNYLDQEEFDKLMCPKSMIGSD

SEQ ID NO: 115186 - DNA, 1398 bp, Prochlorococcus marinus str. MIT 9303
  CDS (1)..(1398): transl_table=11
atggctgacctgatgcgtatcgaacacgacagcatgggcactgttgaggtgcccgctggggttctctggggtgcacaaacccagcgatcgctccttaacttcgccatcagcacagaccgcatgccagtcgaactgatccatgccttggcattgatcaaacaggctgccgccagcgtgaactgtcgcctgggtgttctcgatgaaatccagcgggatcaaattatcaaggccgcctctgctgttgcatccggtctccatgacgatcagtttccactgagggtctggcagaccggtagcggtacccacacaaacatgaatgtcaacgaggtgattagcaacctggcgtctcaggcaaacgacgaacctctaggtagccatagcccggtgcatccaaacgatcatgtcaatcgatcccagtccaccaatgacgccttccctacagctatacatatcgccgcagtccacgggatcactaaaaacttgctgcctgaactggagcgattgatcgcagcctttgcccgaaaaagcaatgcctggagtgacatcatcaaaatcggtcgcactcatctacaggacgccgtacctctcacccttggtcaggaggcctctgcgtggcgggatcaaattgcctcagcccatagtcgtattcagtcaagcctgatagagctctaccctctgccgcttggaggcaccgccgtggggactggcctcaacgccccagctcgcttcgggcaagaaacagctgcgcaacttgccagcatcacaggcctgccattcagctcagctaaaaacaagttcgccgtgatggcgagccatgacgggttagtgaatgcaatggctcagttgcgcatgttggcggttgccctattcaagatctccaatgatctgcgcctactggcctgtggcccaagggccggcctggcagagctgcatctacctgagaatgagccgggaagctcgatcatgcctgggaaagtcaacccctctcaatgcgaggccatggccatggtctgtttacaagtcatcgggcttgattcagccgtgaccatggcaggtggtagtggtcatctccaaatgaacgtctacaaacccctgattggcttcaacctgcttcacagcattgaattgctacatgacgcctgccgcaattaccggctggcaatggtgcaagggattgaaccaaaccgaatcaagatccagcatgatctagagcaatcgctgatgctagtaacagctttaaccccagaaatcggttacgacaaagccagtgagattgcccacctcgcccatgagaagggattcagcctgcgtgaagcagcactaacactcggctatgtgagcaaagaagacttcgatcgcattgttaatccggcattgatgacatctgctcggctgtga

SEQ ID NO: 115187 - protein, 465 aa, Prochlorococcus marinus str. MIT 9303
MADLMRIEHDSMGTVEVPAGVLWGAQTQRSLLNFAISTDRMPVELIHALALIKQAAASVNCRLGVLDEIQRDQIIKAASAVASGLHDDQFPLRVWQTGSGTHTNMNVNEVISNLASQANDEPLGSHSPVHPNDHVNRSQSTNDAFPTAIHIAAVHGITKNLLPELERLIAAFARKSNAWSDIIKIGRTHLQDAVPLTLGQEASAWRDQIASAHSRIQSSLIELYPLPLGGTAVGTGLNAPARFGQETAAQLASITGLPFSSAKNKFAVMASHDGLVNAMAQLRMLAVALFKISNDLRLLACGPRAGLAELHLPENEPGSSIMPGKVNPSQCEAMAMVCLQVIGLDSAVTMAGGSGHLQMNVYKPLIGFNLLHSIELLHDACRNYRLAMVQGIEPNRIKIQHDLEQSLMLVTALTPEIGYDKASEIAHLAHEKGFSLREAALTLGYVSKEDFDRIVNPALMTSARL

SEQ ID NO: 115188 - DNA, 1422 bp, Mycobacterium sp. JLS
  CDS (1)..(1422): transl_table=11
atgaccgccgacagcgctgtcgaccagaacaccgagtaccgcatcgaacacgacaccatgggcgaggtccgggtgcccaaggatgcgctgtggcgggcgcagacccagcgcgccgtcgagaacttcccgatctcgggccgcggcctcgagcgcacccagatccgcgcgctgggactgctcaagggcgcctgcgcgcaggtgaacaaggatctcggcctgctcgctcccgaaaaggcggatgcgatcatcgccgcggccgccgagatcgccgacgggcgtcacgacgaccagttcccgatcgacgtgttccagaccggttcgggcaccagctcgaacatgaacaccaacgaggtcatcgcctcgatcgcggcggcgaacggcgtgaccgtccaccccaacgacgacgtgaacatgtcgcagagctccaacgacacgttcccgacggccacccacatcgcggcgacggaagccgctgtgcgccacctgatcccggcgctcgaggtgctgcacgaatcgctggccggcaaggcgcggcagtggcgcacggtcgtgaagtccgggcgcacgcacctgatggacgcggtgccggtgacgctgggccaggaattcggcggttacgcccgtcagatcgaggccggtatcgaacgtgtcaaggcgacgctgccccggctgggtgagctggccatcggcggtaccgccgtcggcaccgggctcaacgcgcccgacggtttcggcgccaaggtcgtcgaggtgctcgtcgaccagaccggtctgggcgaattgaccacggccaaggactctttcgaggcgcaggccgcccgcgacgggctggtcgaggcgtccggcgccctgcgggtgatcgcggtgtcgctgaccaagatcgccaacgacatccgctggatgggttcgggcccgctgaccggtctggccgagatccagctgccggatctgcagccgggcagctcgatcatgccgggcaaggtgaatcccgttctgcccgaagccgtcacgcaggtcgccgcccaggtggtcggcaacgacgccgccgtcgcatggggtggcgcggccggcgcgttcgagctcaacgtgtacatcccgatgatggcgcgcaacctgctcgagtcgttcaagctgctgaccaacgtgtcgcggctgttcgccgagcggtgcatcgacggactggtcgccaacgaggagcacatgcgtgagcaggccgagtcgtcgccgtcgatcgtgacgccgctgaactcggcgatcggctacgaggaggcggccaaggtcgccaaggaagcgctcaaggagaagaagacgatccgccagacggtcatcgaccgcgggctgatcggcgacaagctctccgaggaggaactcgaccgccgcctcgacgtgctggcgatggcgaaggtcaagcagggcaagtag

SEQ ID NO: 115189 - protein, 473 aa, Mycobacterium sp. JLS
MTADSAVDQNTEYRIEHDTMGEVRVPKDALWRAQTQRAVENFPISGRGLERTQIRALGLLKGACAQVNKDLGLLAPEKADAIIAAAAEIADGRHDDQFPIDVFQTGSGTSSNMNTNEVIASIAAANGVTVHPNDDVNMSQSSNDTFPTATHIAATEAAVRHLIPALEVLHESLAGKARQWRTVVKSGRTHLMDAVPVTLGQEFGGYARQIEAGIERVKATLPRLGELAIGGTAVGTGLNAPDGFGAKVVEVLVDQTGLGELTTAKDSFEAQAARDGLVEASGALRVIAVSLTKIANDIRWMGSGPLTGLAEIQLPDLQPGSSIMPGKVNPVLPEAVTQVAAQVVGNDAAVAWGGAAGAFELNVYIPMMARNLLESFKLLTNVSRLFAERCIDGLVANEEHMREQAESSPSIVTPLNSAIGYEEAAKVAKEALKEKKTIRQTVIDRGLIGDKLSEEELDRRLDVLAMAKVKQGK

SEQ ID NO: 115190 - DNA, 1386 bp, Prochlorococcus marinus str. MIT 9301
  CDS (1)..(1386): transl_table=11
atgacaaaaaactttaggattgaaaaagatagtatgggaacaataaaggttcccattgaagctttgtggggcgctcaaacacaaagatcgataataaatttttctattggagaagaattaattccaattgaattaatttattcactcaccctcataaaaaaagctgcttcaattgcaaatttcaatttaggattaatagataaaagaaaaaaagatttgattgtagaggcatgtacagaaatacttgatgggcttcatgattcacagtttcccttaaaggtttggcaaacaggtagtggcacgcaaacaaatatgaatgttaatgaggtaatttcaaatattgcagctttaaaaacaaattcagagcttggtagtcatcaaccacttcatccgaatgatgatgtaaataaatctcagtcaacaaatgatacttttcctgctgctattcaaatatcagttgttaatgaaataatcaaaaatttagttccaacgataagagaacttactaagatccttgataataaaagtgagcaatggaaagaccttataaaaataggaagaacccattttcaagatgcagtgccccttacttttggccaagaaatatctggatggtcagagcaacttaaagatgctgagaatgcaattattataagtctgaatgaattgtattttttacctctgggaggcactgcagttggaacagggattaattgtccaaaaggattttgtgaggagtctataaaatcaatttccgatgatactaatctgatgttctataaatcaaaaaataatttttctatcatggcctcgcatgatcgtttagctcaagtaatgagtcagataaaaatattagcaggtgctttatttaaaatttcaaatgatataaaaattctatcttcaggaccaaggtcaggaatatatgaattaatcatccctcaaaatgaacctggaagttctatcatgccgggcaaagtgaatccgactcagtgcgaagccttatcaatggtttgcactcagataatgggccttgaatatgcagtttcaatggcaaattctagcggaactttgcagatgaatgaatataagcctctgataggatttaatattcttacaagtttaaaattacttaaaaatgcaatagaaaacttcagaacaaaattagtttatggaatggaacctaatcaaaaaaaaatgaagtttaatttagataattcactaatgttgattacagccatagtgccaaaagttggttatgaaaaagcagctgaaattgcaaaccttgccttcaaagaatcattaaatttaaaagaggcaacacttaaattaggttatttaaacgaagatgaatttgatgatgcgatgaatattaattcaatgatttaa

SEQ ID NO: 115191 - protein, 461 aa, Prochlorococcus marinus str. MIT 9301
MTKNFRIEKDSMGTIKVPIEALWGAQTQRSIINFSIGEELIPIELIYSLTLIKKAASIANFNLGLIDKRKKDLIVEACTEILDGLHDSQFPLKVWQTGSGTQTNMNVNEVISNIAALKTNSELGSHQPLHPNDDVNKSQSTNDTFPAAIQISVVNEIIKNLVPTIRELTKILDNKSEQWKDLIKIGRTHFQDAVPLTFGQEISGWSEQLKDAENAIIISLNELYFLPLGGTAVGTGINCPKGFCEESIKSISDDTNLMFYKSKNNFSIMASHDRLAQVMSQIKILAGALFKISNDIKILSSGPRSGIYELIIPQNEPGSSIMPGKVNPTQCEALSMVCTQIMGLEYAVSMANSSGTLQMNEYKPLIGFNILTSLKLLKNAIENFRTKLVYGMEPNQKKMKFNLDNSLMLITAIVPKVGYEKAAEIANLAFKESLNLKEATLKLGYLNEDEFDDAMNINSMI

SEQ ID NO: 115192 - DNA, 1389 bp, Herminiimonas arsenicoxydans
  CDS (1)..(1389): transl_table=11
atgaaaacaagaatagagcgcgatactttcggtccgatcgcagtcaatgatgagcgcttgtggggtgcgcaaacgcagcgctcgcttgaacatttcaagatttcgaccgaacgcatgccgcaggaactgatcgttgcactggccgaagtcaagcgtgcggctgcgctggccaatctgggactgggaaagctggacaggaaaaaagccgatgccatcgtcagcgcggcagaggaggtgattgccggtcagcatccgcatgagtttccgctcgccttgtggcaaaccggctccggcacgcaaaccaatatgaacatgaacgaggtgctggccaatcgcgcttcagaattgctgggcggcgaacgcggcgagcaacgtctggtacatccgaatgacgacgttaatctcgggcagtcatccaacgatattttccccacggcgatgtatgtggccgccagtgtcagcatcacgcagaaactgctgccggcgatacatgccttgcgcgtgacgctgcagcgcaaggcggaagagtttgccgatatcgtcaagatcggacgcacgcatttgcaggatgcgacgccgttgaccctggggcaggaattttccggctatgtcgcccagttgcatcatgccgaactcgggattgtggtgttgctgccgccgctgcatgagctggcggtcggcggtacggcggtcggtaccggtttgaacacgcatccggaattcggcacgcgcgtggcagccgagctgacgcaacgtagcggcgtgcatttcaaaagtgcggccaacaagtttgcggcactggccgcgcacgatgcgctggtcagtgtgcacggcggcttgaaaacgctggcagccagcatgatgaaaatcgccaacgatgtacgctggctggcttccgggccgcgttccggtctgggtgaactcagcattcccgagaatgagcctggcagttccatcatgccgggcaaggtcaatccgacgcaaagcgaagcggtgacgatgctgtgttgccaggtattcggcaatgatgtcgcactcaacttcggcggcgcatcgggaaatttcgagttgaatgtgttcaagcccctgatggcgcataattttctgcaaagcgtgcgactgctgagcgacggcatacacggcttcgatgaacattgtgcgcaaggtattgctgccaatcgcgaacgcatcgccgatctgatggcgcgctcattgatgctggtgacggcgctgacgccgcacatcggttacgacaaggcggcacagattgccaagcaggcacatcacgacggcacaaccctgaaggaaacggcgcttgcgctgggctttgtgagtagcgaagaatttgatcgctgggtgcaaccgcaggacatgctacatccatcctga

SEQ ID NO: 115193 - protein, 462 aa, Herminiimonas arsenicoxydans
MKTRIERDTFGPIAVNDERLWGAQTQRSLEHFKISTERMPQELIVALAEVKRAAALANLGLGKLDRKKADAIVSAAEEVIAGQHPHEFPLALWQTGSGTQTNMNMNEVLANRASELLGGERGEQRLVHPNDDVNLGQSSNDIFPTAMYVAASVSITQKLLPAIHALRVTLQRKAEEFADIVKIGRTHLQDATPLTLGQEFSGYVAQLHHAELGIVVLLPPLHELAVGGTAVGTGLNTHPEFGTRVAAELTQRSGVHFKSAANKFAALAAHDALVSVHGGLKTLAASMMKIANDVRWLASGPRSGLGELSIPENEPGSSIMPGKVNPTQSEAVTMLCCQVFGNDVALNFGGASGNFELNVFKPLMAHNFLQSVRLLSDGIHGFDEHCAQGIAANRERIADLMARSLMLVTALTPHIGYDKAAQIAKQAHHDGTTLKETALALGFVSSEEFDRWVQPQDMLHPS

SEQ ID NO: 115194 - DNA, 1395 bp, Burkholderia vietnamiensis G4
  CDS (1)..(1395): transl_table=11
atgaacgaagcagttcggatggaacgcgacacgttcggcgagatcgccgtgcccgccgaccggctctggggcgcgcagaccgagcgctcgctgcagaatttccggatctcgacggagaagcagtcgcccgagctgatccacgcgctcgcgatcgtgaagcgcgccgcggccgccgtgaaccaggcgctcggcgtgctcgccgacgacaaggcgcgcgcgatcatcgatgcggccgacgagatcatcgcgggcaagcatccgcgtgaattcccgctcgccgtgtggcagacgggctccggcacgcagaccaacatgaacctgaacgaagtgatcgcgaaccgcgcgagcgagctgctcggcggcgagcgcggcgaagcgcgcaaggttcatccgaacgacgacgtgaaccgcggccagtcgtcgaacgacgtgttcccgaccgcgatgcacgtcgcggccgcctacgcgatcgtcaaccacctgctgcccgcgctgcgcacgctgcgcacgacgctcgacgcgaagtcgaaggcgttcgccgatatcgtgaagatcggccgcacgcacctgcaggacgcgacgccgctcacgctcggccaggagttctccggttatgtcgcgcagctcgaccagggcatccggcacgtcgaatcggcgctgccgcacctgtacgagctcgcgctcggcggcaccgcggtcggcaccgggctgaacgcgcatccggaattcgcggtgcgcgtggccgacgagatcgggcgcctgaccaagctgccgttcgtcaccgcgccgagcaagttcgaggtgatggcggccgccgacgcgctggtgttcgcacacggcgcgctcaagacggtcgcggccgggctgatgaagatcgcgaacgacgtccgctggctcgcgagcgggccgcgctgcgggctcggcgagctgtcgattccggaaaacgagccgggcagctcgatcatgccgggcaaggtgaacccgacgcagtcggaagccgtgacgatgctgtgctgccaggtgttcggcaacgacgtcgcggtgaacgtcggcggcgcgagcggcaacttcgagctgaacgtgttccggccgatgatcgcgcacaacgtgctgcagtcggtgcgcctgctcgccgacggcgcgcagagcttcaacgaccactgcgcggtcggcatcgagccgaaccgggtgcgcatcgacctgctgttgaacgaatcgctgatgctcgtgaccgcgctcaatccgcacatcggctacgacaagtccgcgcagatcgcgaagaaggcgcacaaggaaggcacgacgctgaaggcggccgcgctcgcgctcggctacctcaccgaagcggaattcgacgaatgggtgcggcccgagcagatgatcggttcgcgctga

SEQ ID NO: 115195 - protein, 464 aa, Burkholderia vietnamiensis G4
MNEAVRMERDTFGEIAVPADRLWGAQTERSLQNFRISTEKQSPELIHALAIVKRAAAAVNQALGVLADDKARAIIDAADEIIAGKHPREFPLAVWQTGSGTQTNMNLNEVIANRASELLGGERGEARKVHPNDDVNRGQSSNDVFPTAMHVAAAYAIVNHLLPALRTLRTTLDAKSKAFADIVKIGRTHLQDATPLTLGQEFSGYVAQLDQGIRHVESALPHLYELALGGTAVGTGLNAHPEFAVRVADEIGRLTKLPFVTAPSKFEVMAAADALVFAHGALKTVAAGLMKIANDVRWLASGPRCGLGELSIPENEPGSSIMPGKVNPTQSEAVTMLCCQVFGNDVAVNVGGASGNFELNVFRPMIAHNVLQSVRLLADGAQSFNDHCAVGIEPNRVRIDLLLNESLMLVTALNPHIGYDKSAQIAKKAHKEGTTLKAAALALGYLTEAEFDEWVRPEQMIGSR

SEQ ID NO: 115196 - DNA, 1398 bp, Synechococcus sp. WH 7803
  CDS (1)..(1398): transl_table=11
atgacgaacgcgacgcgcaccgaacacgacagcatgggcactgtgcaggtgccggagcaggcgctctggggggcgcaaacccagcgctccctgaacaatttcgccattgccgaggatcgggtccccacccccctgattcacgcactcgctcgcatcaagcaagcagcggccatcgtgaatgcgcgacacggcctgatcagcagcgaccagtgcagcttgattgtggacgccgcggccgccatcgccgaagggcatcacgatgcgcagtttccactcagggtctggcaaaccggcagtggcacgcagaccaacatgaacctcaacgaggtgatcagcaatctggcctcgctgcatgcaggggaagcactcggcagccaccggcccattcacccgaatgaccacgtcaaccgttcccagtccaccaacgatgcctttcctgccgccattcacgtggcagccgttgacgcgatcagtcgccgtcttcaaccggaactgcagcagctgaacgaggcctttgccatcaaggcagaggcctggggctccatcgtgaaaatcggtcgcacccacctccaggatgcggtcccgctcaccctcggccaggaagcgtccgcctggagagaccaaatcggaaccgccgcgcgacgcatcgacacgagcctgcaggaaatcctgcctctgcccttgggaggcacggcggtgggaacggggctcaacgcccccagaggcttttccgtcgaggcggcagctgaactccaacagctgacaggcctgcccttcaccacagcccccaacaagttcgccgtgatggccagccacgacggactcgtgaacaccatggggcagctccggcttctggccgtcagcctgctcaagattgccaatgacatccgcctactggcctgcggtccgcgggccggtctggccgaactgcatcttccagagaatgagccaggaagttcgatcatgccgggcaaggtgaatcccacccagtgcgaagcgatggccatggtctgcacccaggtgatcggactggacgctgcggtggccatggccggtgccggtggccatctgcagatgaatgtgtacaaaccgctgatcggcttcaacctgctgcaggccatcaccctgctcaccgatgcctgtcactgttttcgcgtggcgatggttgaagggatggaacccaaccgcgcccgcatccaacgggatgtggagcagtccctgatgctggtcaccccgctcaccccggtgattggatacgacaaagcgagcagaattgccaagtacgcgcacgaccaggggttggacctgaaaagcgctgctctggacctgggatatgtgagcgcggaggaattcgatcgcgtcgtcgaccctgcagccatggcggctcaacagggctag

SEQ ID NO: 115197 - protein, 465 aa, Synechococcus sp. WH 7803
MTNATRTEHDSMGTVQVPEQALWGAQTQRSLNNFAIAEDRVPTPLIHALARIKQAAAIVNARHGLISSDQCSLIVDAAAAIAEGHHDAQFPLRVWQTGSGTQTNMNLNEVISNLASLHAGEALGSHRPIHPNDHVNRSQSTNDAFPAAIHVAAVDAISRRLQPELQQLNEAFAIKAEAWGSIVKIGRTHLQDAVPLTLGQEASAWRDQIGTAARRIDTSLQEILPLPLGGTAVGTGLNAPRGFSVEAAAELQQLTGLPFTTAPNKFAVMASHDGLVNTMGQLRLLAVSLLKIANDIRLLACGPRAGLAELHLPENEPGSSIMPGKVNPTQCEAMAMVCTQVIGLDAAVAMAGAGGHLQMNVYKPLIGFNLLQAITLLTDACHCFRVAMVEGMEPNRARIQRDVEQSLMLVTPLTPVIGYDKASRIAKYAHDQGLDLKSAALDLGYVSAEEFDRVVDPAAMAAQQG

SEQ ID NO: 115198 - DNA, 1392 bp, Candidatus Protochlamydia amoebophila UWE25; identical to SEQ ID NO: 45154
  CDS (1)..(1392): transl_table=11

SEQ ID NO: 115199 - protein, 463 aa, Candidatus Protochlamydia amoebophila UWE25; identical to SEQ ID NO: 45155

SEQ ID NO: 115200 - DNA, 1407 bp, Desulfovibrio vulgaris subsp. vulgaris str. Hildenborough
  CDS (1)..(1407): transl_table=11
atgatgacaccggccgtacgcatcgaacatgacagcatgggggctgtggaggttcccgccgaccgctactggggggcccagacgcagcgcgcactggagcatttccgcatcggcacggaacggatgccgcaggagatggtgcaggcgctagggctcatcaagagggcggcggccgagaccaatgccgcgttggagctcctgccccggcagactgcggacgccgtggcgcgtgccgccaccgaggtggcgtccggtgcactgcccaaccattttcccctctgtgtgtggcagacaggtagcggcacccagaccaacatgaatgtcaacgaggtggtggccaaccgtgcatgtgaactgctgggcggtgtgcgtggcgaccggaaactcgtgcaccccaacgaccacgtcaacctctgccagtcgtccaacgatgtctttcctgcggccatgcacatcgcagcggcgctgggcctgcgcagcatgctgctgccctcgcttcaagcgctggaggccgaactggaggcacgggcacacgagttcgcgggtctggtgaaggtgggccgaacccacttgcaggacgcggttcccctcactctggggcaggaattctcggggtatgcggctcagcttgcgttgtgccgccgtcaactggagggcatgatgcccctcttgtgcgccctcgcgctggggggcactgccgtgggcaccgggctcaatgcccatcccgagttcgcgcggcgtgccgtggcgcgtctggcggggtacaccggcctgccgttcctgccagtggacaatcctttcgccgctcttgcggggcacgaggcccttgtggcctatagcggtgccctgcgtacgctggcagtggcccttttcaaggtgggcaacgacatccggttgctggcgtccggcccgcgctgcggtatcggtgaactggaactgcctgccaacgaacccggttcttccatcatgcccggcaaggtgaaccccacccagtgcgaggccctgaccatggtggcggtgcaggtcatgggtctggacaacgccgtgggcatcgccggttcgcaagggcatctcgaactcaacgtgttcaagccactcatcgcgagaaatgtgctcgaatcggcgcgtctgctggccgacagcatgcgttcattccgtatgcatgcggtgcgggggctgcgggcggtgcccgaacgcatcgcctcgcatgtcgaccggtcgctcatgctcgtcacggccctgtcgcggcatgtgggctatgaccgggcggcagaggtcgcccatcttgcccatgccgagggactgacgctacgggaggcgtgcctgcgccttggcctcatggacggcgaagccttcgacagggccgtcgaccctgtccggatggcgcacccgcacgacatgggctga

SEQ ID NO: 115201 - protein, 468 aa, Desulfovibrio vulgaris subsp. vulgaris str. Hildenborough
MMTPAVRIEHDSMGAVEVPADRYWGAQTQRALEHFRIGTERMPQEMVQALGLIKRAAAETNAALELLPRQTADAVARAATEVASGALPNHFPLCVWQTGSGTQTNMNVNEVVANRACELLGGVRGDRKLVHPNDHVNLCQSSNDVFPAAMHIAAALGLRSMLLPSLQALEAELEARAHEFAGLVKVGRTHLQDAVPLTLGQEFSGYAAQLALCRRQLEGMMPLLCALALGGTAVGTGLNAHPEFARRAVARLAGYTGLPFLPVDNPFAALAGHEALVAYSGALRTLAVALFKVGNDIRLLASGPRCGIGELELPANEPGSSIMPGKVNPTQCEALTMVAVQVMGLDNAVGIAGSQGHLELNVFKPLIARNVLESARLLADSMRSFRMHAVRGLRAVPERIASHVDRSLMLVTALSRHVGYDRAAEVAHLAHAEGLTLREACLRLGLMDGEAFDRAVDPVRMAHPHDMG

SEQ ID NO: 115202 - DNA, 1389 bp, Bartonella quintana str. Toulouse
  CDS (1)..(1389): transl_table=11
atggttgaaacacgtcaggaaacagatagctttggaacgatttcagtacgtcaagatcgttattggggagcacaaactgaacgttctctgcataattttaatattggcacagaaaaacaacctctcaccatcatctatgccttaagccttatcaaaaaagctgcagctgttgtcaatatggaaaaaggcaagcttgcacaaaacatcggaaaagcaatcattactgccgccgatgaagtgctcgcaggagcatttgatacgcattttccactttctgtctggcaaactggttctggcacacaaagtaatatgaacgtcaatgaagtcatcgccaaccatgccagcatgcttttgggaggaaaacttggcagtaaagcacccgttcaccccaatgatcacgtaaatatgagccaatcgtcaaacgattcctttcccacagcacttcacattgccaccacactccaaacacgccaacacttatttcccatccttgacgctcttattactactttaagaaaaaaagaagaagaatttgccgatatcatcaaaatcggacgcacccatacccaggatgcaacacctctgacattaggacaggaattttcaggttatcgcgcagcactagaagccaaccgccaacgcattgaaagtgcgcttgccgatgtccaaatgcttgcccaaggagggacagctgttggaacaggactcaatgcaccgcaaggttttgacgttgcttttgcgcaaacaatcagcaccctcacaggaataacctttaagactgccagcaataaatttgaagcactcgcccatcatggagcccttgcacattttcatggaagcttgaatgcattagcagctgatctgtttaaaattgccaatgacattcggtttttgggatccggtccacgctcagggttgggtgaactaagccttccagaaaatgaaccaggatcttccattatgccaggcaagatcaatcccacgcagtgtgaagcaatgactatggttgcttgccaggttttcggcaatcataccagtataacatttgccgcaagccagggacattttgaactcaatgtttataaacctgttattggctataatgttttacagtcgattacgcttcttggtgattgcatgcgttcttttgacatgcattgcattcaaggattacgtgccaatcgagtccatattcactctctcatggaacgctctctcatgttaataacagctcttgcaccggaaattggctatgaaaaagctgccgaaattgctaaagcagcacataaaaatgacacgactttgcgtactgaagctatcaaagcgggagtttctggagatgattatgatcggctggttgatcccaaaaagatgatccacccgcaataa

SEQ ID NO: 115203 - protein, 462 aa, Bartonella quintana str. Toulouse
MVETRQETDSFGTISVRQDRYWGAQTERSLHNFNIGTEKQPLTIIYALSLIKKAAAVVNMEKGKLAQNIGKAIITAADEVLAGAFDTHFPLSVWQTGSGTQSNMNVNEVIANHASMLLGGKLGSKAPVHPNDHVNMSQSSNDSFPTALHIATTLQTRQHLFPILDALITTLRKKEEEFADIIKIGRTHTQDATPLTLGQEFSGYRAALEANRQRIESALADVQMLAQGGTAVGTGLNAPQGFDVAFAQTISTLTGITFKTASNKFEALAHHGALAHFHGSLNALAADLFKIANDIRFLGSGPRSGLGELSLPENEPGSSIMPGKINPTQCEAMTMVACQVFGNHTSITFAASQGHFELNVYKPVIGYNVLQSITLLGDCMRSFDMHCIQGLRANRVHIHSLMERSLMLITALAPEIGYEKAAEIAKAAHKNDTTLRTEAIKAGVSGDDYDRLVDPKKMIHPQ

SEQ ID NO: 115204 - DNA, 1389 bp, Bartonella henselae str. Houston-1
  CDS (1)..(1389): transl_table=11
atggttgaaacacgtcaagaaacggatagctttgggacgatttcagtccgtcaagaccgttattggggcgcacaaactgaacgctcattgcataattttaatattggcatagaaaaacaacccctcaccatcatctatgccttaagccttatcaaaaaagcagcagctgttgtgaatatggaaaaaggcaaactcgcaaaaaacattggaaaagccatcattactgctgccgatgaagtgctttccggtgcatttgacacgcatttccccctttctgtttggcaaacaggttctggaacacaaagcaatatgaacgtcaatgaagtgatcgccaatcatgccaatatgcttttgggaggaaaattgggtagcaaaacacctgtgcatcccaatgatcacgtcaatatgagccaatcgtcaaacgattcctttcccacagcacttcacattgctactaccctacaaacgcgccaacacctctttcctatccttgacgcacttattaccactttaaagaaaaaagaagaagaatttgccgatatcatcaaaattggacgtactcatacccaggatgccacacccttaactttagcgcaagaattttcgggctatcgcactgcactcgaagccaaccgccaacgcattgaaaatgctctttgtgatgttcaaatgcttgcccaaggaggtacagctgttggaacagggctgaacgcaccgcaaggctttgacatagcttttgcgcaaacaatcagtacatttacaggaataccctttaaaaccgctagcaataaatttgaagccctcgctcatcatggagctcttgcgcatttccatggtagcttaaatgcattagcagctgatctgtttaaaattgccaatgacattcggtttttgggatccggtccacgctcaggcttgggggaactaagcttaccagaaaatgaaccaggatcttccatcatgccaggcaaggttaaccccacacagtgtgaagcaatgaccatggttgcttgccaagtctttggcaatcataccagtgtaacatttgccgcaagccaagggcattttgaactcaacgtttataaacctgtcattggctacaatgttttacaatcgattacgcttcttggggattgcatgcgctcttttgatcttcattgtattcaaggattacgcgccaatcgagttcacattcattctctcatggaacgttctctcatgttggtgacagcgcttgcaccagaaattggctatgaaaaagctgccgcaattgccaaagcagcgcataaaaatgacacaactttgcgtaccgaagcactcaaactaggagtttctggagaagattatgatcggttggttgatcccaaaaagatgatccatccacaataa

SEQ ID NO: 115205 - protein, 462 aa, Bartonella henselae str. Houston-1
MVETRQETDSFGTISVRQDRYWGAQTERSLHNFNIGIEKQPLTIIYALSLIKKAAAVVNMEKGKLAKNIGKAIITAADEVLSGAFDTHFPLSVWQTGSGTQSNMNVNEVIANHANMLLGGKLGSKTPVHPNDHVNMSQSSNDSFPTALHIATTLQTRQHLFPILDALITTLKKKEEEFADIIKIGRTHTQDATPLTLAQEFSGYRTALEANRQRIENALCDVQMLAQGGTAVGTGLNAPQGFDIAFAQTISTFTGIPFKTASNKFEALAHHGALAHFHGSLNALAADLFKIANDIRFLGSGPRSGLGELSLPENEPGSSIMPGKVNPTQCEAMTMVACQVFGNHTSVTFAASQGHFELNVYKPVIGYNVLQSITLLGDCMRSFDLHCIQGLRANRVHIHSLMERSLMLVTALAPEIGYEKAAAIAKAAHKNDTTLRTEALKLGVSGEDYDRLVDPKKMIHPQ

SEQ ID NO: 115206 - DNA, 1395 bp, Acinetobacter sp. ADP1
  CDS (1)..(1395): transl_table=11
atgcaaactcgaattgaacacgacaccatgggtgaggttgaggtcccaaacgatgcactttggggagctcagacgcaacgcagtttgcaaaattttaagatcggtcaggaaagactcccacgagcgatgattcgtgcaatgggacttgtcaagaaggcagcagcgattaccaatgcagaactcgggcagttgccagaggatctgagccaatatatcgttggtgcggcagaagaagtaattgcaggtgactgggactcgcaatttcctttggtggtctggcaaacgggttcaggcacacaaagtaatatgaattgtaatgaagtgattgccaatattgcgaaccaaaaattaggaaatgctttaggttctcaatcacctgtgcatccgaacgatcatgtcaatcgtgctcagtcgacaaacgattctttcccaactgccatacatgttgctgcatcattacaaatcaacgaattgcttattcccgctgtaaaaagcctaaaagagaccttgaagaaaaaatcagatgaattttctgatattgtcaaaattggtcgcacgcatttacaggatgcaacaccgttaacattagggcaagagtttagtgggtatgtatcgcagctcgatcatgggttaaagcgattacagcaagcgcttgagggtttatacgagcttccgttaggtggaacggctgtgggtacaggtttaaatgcacatcctgattatgcagtgaatgcagctcaacaacttgctaaactgacaagtctgccattcgttacggcacctaataaatttgaagctttagctggacgtgatgctgcggtatttgcatctggtgcactgaaaactctcgctgtaagcttaaacaaaattgcaaatgatattcgttggctggcaagtggtccgcgttgcggatttggtgaaattcgtattccagaaaacgaaccaggctcaagcattatgccaggcaaagtaaatccaacgcaaagtgaagctatgacgatggtggttgcgcaggtgttaggcaatgatacaacgatcaatgttgcaggtgcttctggtaactttgaactgaatgtcttcatgcctgtaatcgcatttaatcttcttcagtcaattcagcttctaggtgatgcttgtaatagttttaacgaacattgtgcagtaggtatcgagccaaatagagaaaagattgattattttctgcataattcattaatgttggtgacggcattgaatcctgttattggttatgaaaacgctgcaaaagtagcaaaaacggcttacaaagaaaataaaacgttaaaacaggttgctgtagaactaaatttagtcacagaacagcagtttgatgaaatcgttcgtcctgaaaagatggtatctccaaataccaagtaa

SEQ ID NO: 115207 - protein, 464 aa, Acinetobacter sp. ADP1
MQTRIEHDTMGEVEVPNDALWGAQTQRSLQNFKIGQERLPRAMIRAMGLVKKAAAITNAELGQLPEDLSQYIVGAAEEVIAGDWDSQFPLVVWQTGSGTQSNMNCNEVIANIANQKLGNALGSQSPVHPNDHVNRAQSTNDSFPTAIHVAASLQINELLIPAVKSLKETLKKKSDEFSDIVKIGRTHLQDATPLTLGQEFSGYVSQLDHGLKRLQQALEGLYELPLGGTAVGTGLNAHPDYAVNAAQQLAKLTSLPFVTAPNKFEALAGRDAAVFASGALKTLAVSLNKIANDIRWLASGPRCGFGEIRIPENEPGSSIMPGKVNPTQSEAMTMVVAQVLGNDTTINVAGASGNFELNVFMPVIAFNLLQSIQLLGDACNSFNEHCAVGIEPNREKIDYFLHNSLMLVTALNPVIGYENAAKVAKTAYKENKTLKQVAVELNLVTEQQFDEIVRPEKMVSPNTK

SEQ ID NO: 115208 - DNA, 1398 bp, Erwinia carotovora subsp. atroseptica SCRI1043
  CDS (1)..(1398): transl_table=11
atgagcacgatgcgtagtgaaaaagactcaatgggaccaattgatgttcctgctgaacatttgtggggggcgcaaacacaacgctcactggaacacttccgtatttctgaagaaaaaatgccacgcacgctgatttatgcgctggcgcaaaccaagcgtgcggcggcccgcgtcaacatggatctctcgcttctatctgccgatcggggaaatgcgattattcaggcagcggacgaggtgttgtctggcaaacatgctggggaattcccgttagcaatctggcagacggggtctggcacgcaaagcaatatgaatatgaacgaggtgttggctaaccgcgccagtgagctattggaaggagagcgaggcaacaatcggctggttcatcccaatgatgatgtcaataaaagtcagagttccaatgacgtatttccaacggcgatgcatgttgcggccgtggttgcgatcaacgaacacctgattcctgaattgaaagcgctgcacgccacgctggcgtcgaaggccgaggaattcaaagacatcgtcaagattggtcgtacgcatttacaggatgcgacgccattgacgttggggcaggaaatctccggctgggccgcaatgttgcagcataatctgaagcatatcgaaaacagcgtgccgcatatttgcgagctggcgctgggcggtacggcggtaggaactggattgaacacgcatcctgaatatgcggtgcgtgtggcggcggaactggcgaaattaaccggtcagccgtttgtgacctcgccgaataaatttgaagcgcttgcaacctgtgatgcgctggttcacgggcacggtgccttgaaggggctggcagcatcgttaatgaagattgccaacgatgtgcgctggctggcatctggcccgcgttgtggcatcggggaactcagtattcctgaaaatgaaccgggtagttccatcatgccgggcaaggtcaacccgactcagtgtgaagcgctgacaatgctgtgttgtcaggtgatgggcaatgatgttgctgtgaatatcggcggtgcttccggtaattttgagctaaacgtgtaccgcccaatggtgattcataatttcctgcaatcgattcgcctgttggctgacggcatgaagagctttgatgagcactgtgcggtgggaattgaaccgaatcacgatcgcatcactcaactgctgaacgagtcactgatgctggtgaccgcactgaacacgcatatcggctatgacaaagcggctgagattgccaaaaaagcgcataaagaagggctaacgctgaaggcgtccgcgctcaaactgaactacctcactgaagcacagtttgatgagtgggttcgaccggaagagatggtcggtagtctgaaaaagtaa

SEQ ID NO: 115209 - protein, 465 aa, Erwinia carotovora subsp. atroseptica SCRI1043
MSTMRSEKDSMGPIDVPAEHLWGAQTQRSLEHFRISEEKMPRTLIYALAQTKRAAARVNMDLSLLSADRGNAIIQAADEVLSGKHAGEFPLAIWQTGSGTQSNMNMNEVLANRASELLEGERGNNRLVHPNDDVNKSQSSNDVFPTAMHVAAVVAINEHLIPELKALHATLASKAEEFKDIVKIGRTHLQDATPLTLGQEISGWAAMLQHNLKHIENSVPHICELALGGTAVGTGLNTHPEYAVRVAAELAKLTGQPFVTSPNKFEALATCDALVHGHGALKGLAASLMKIANDVRWLASGPRCGIGELSIPENEPGSSIMPGKVNPTQCEALTMLCCQVMGNDVAVNIGGASGNFELNVYRPMVIHNFLQSIRLLADGMKSFDEHCAVGIEPNHDRITQLLNESLMLVTALNTHIGYDKAAEIAKKAHKEGLTLKASALKLNYLTEAQFDEWVRPEEMVGSLKK

SEQ ID NO: 115210 - DNA, 1407 bp, Propionibacterium acnes KPA171202
  CDS (1)..(1407): transl_table=11
atggcagagatgcgcattgagaaagacagcatgggcgaggtcgaagtacccgccgagcattactggggagcccagacacagcgttccctccacaacttcgagatcggccgtgacaccttcgtttggggccgagacatgatccgtgctctcggaactctcaagaagtccgcggcactagccaacaaggaactgggtgagttgccgggcgacgttgccgacctcatcgtccaggccgccgacgaggtcatcgccggaaaactcgatgacgagttcccgctggtggtcttccagaccggttcgggcacccagtccaacatgaacaccaacgaggtcatcagcaaccgtgcgattgagttggccggtggcgaacgcgggtcgaagaaacccgtccaccccaacgaccacgtcaaccgtggccaatcttccaacgataccttcccgacggccatgcacatcgccgttgtgtgtgccctcaataagcgcctctaccccgccgtccagcagcttcgcgacactctcgacgagaaggccaaaaagtacgacgacgtcgtgatggtcggccgcacccacctgcaggacgcaacgccgatccgcctcggccaggtcattagtggctgggtcgcccaaatcgatttcgccctcgacggcatccgctacgccgattcacgcgcccgtgaactagccatcggcggcaccgccgtcggcaccggcctcaacgcccaccctgatttcggcccgaccgtcgctaagcacgcgaccgaggagactggcattgagttcaagcaggccgacaaccttttcgccgcgctgagcgcccacgacgccctagtacaagtttcggggtcgctgcgtgtcctcgccgacgccctcatgaagattgccaatgacgtccgctggtacgcgtctggcccccgcaacggtatcggcgaactcctgatccccgaaaacgagcccggctcttcgatcatgcctggcaaagtcaatccgacccagtgcgaggccatgacgatggtcgccacccgcgtgttcggtaacgacgcgacagtcggctttgccggttctcaaggcaacttccagctcaacgtgttcaagcccgtcatggcccatgcctgcctggagtcgatccgccttatcgccgattcgtgcatcagcttcgacaaacattgcgcctacggcatcgagccaaaccccgacaaaatcaaggagaacctcgacaagaacctcatgcaggtcacggctctcaaccgtcacatcggttacgacctggcttcgaagatcgctaagaacgctcaccataagggcatcagcctgcgggagtccgctctgacggtcggcggcatgagcgaggaggatttcgacaagtgggtcgtccccgccgacatgactcaccccagcgccgctgaatga

SEQ ID NO: 115211 - protein, 468 aa, Propionibacterium acnes KPA171202
MAEMRIEKDSMGEVEVPAEHYWGAQTQRSLHNFEIGRDTFVWGRDMIRALGTLKKSAALANKELGELPGDVADLIVQAADEVIAGKLDDEFPLVVFQTGSGTQSNMNTNEVISNRAIELAGGERGSKKPVHPNDHVNRGQSSNDTFPTAMHIAVVCALNKRLYPAVQQLRDTLDEKAKKYDDVVMVGRTHLQDATPIRLGQVISGWVAQIDFALDGIRYADSRARELAIGGTAVGTGLNAHPDFGPTVAKHATEETGIEFKQADNLFAALSAHDALVQVSGSLRVLADALMKIANDVRWYASGPRNGIGELLIPENEPGSSIMPGKVNPTQCEAMTMVATRVFGNDATVGFAGSQGNFQLNVFKPVMAHACLESIRLIADSCISFDKHCAYGIEPNPDKIKENLDKNLMQVTALNRHIGYDLASKIAKNAHHKGISLRESALTVGGMSEEDFDKWVVPADMTHPSAAE

SEQ ID NO: 115212 - DNA, 1407 bp, Leifsonia xyli subsp. xyli str. CTCB07
  CDS (1)..(1407): transl_table=11
gtggtggacaccagttcgggcaccgagtaccgcatcgagcacgacacgatgggcgaggtgcgggtgcccgcaaccgccctgtacagcgcgcagacgcagcgagcggtcgagaacttcccgatctccggctctgtgctggagcccgcccagatcgcggcgctcgcccgcatcaagaagtccgcggccctcgcgaacgcccgtctcggcgtcatcgacaccgagatcgcggacgccatcacggcctccgccgacgaggtcgtcgccggcggactgttcggcgaattcccaatcgatgtctaccagaccggctcgggcacctcctccaatatgaacatgaacgaggtgctcgcgaccctcgccacgcgccgcctgggccgcccggtgcatccgaacgaccacgtcaacgcttcgcagtcctcgaacgacgtcttcccgacctccgtccacatcgccgtcaccggcgcgctcatcgacgatctcatcccggccctcgaccacctcgcggtcgcgctggaggagaaggccgagctgtgggccgcggccgtcaagagcggccgcactcatttgatggacgccacgccggtgaccctcgggcaggagttcggtggctatgccgcccagatccgctacggcatcgaacgtgtccgggcggcgctgacccgggtcgccgaagtccccctcggcggcaccgcggtcggaaccggcatcaacaccccggccggcttcccgcagctggtgatcgagctcctcacccaggagacggagctcccgatcaccgaggcccgcaaccacttcgaggcccaggccaaccgcgatgccctggtcgaggcctccggtgcgctccgcaccatcgccgtcagcatgaccaagatctgcaacgacctccgatggatgggctccggccccaacaccggcctcggcgaactgcatatcccggacctccagcccggatcgtcgatcatgcccggcaaggtcaacccggtcgtcccagaagctgccctcatggtcgccgcgcgcgtcatcggcaacgacgcgacgatcgcctggagcggcgcctccggcctcttcgagctgaacgtcgccatcccggtgatgggcaccgccctgctggagtccatccgcctcctcacgcaggccagccgggtgctcgccgacaagaccgtcgccggcctcgaagcgaacctcgcccgggcccgcgcgttcgccgagtccagcccgtccatcgtgaccccgctgaaccgcgtgatcggctacgaggccgccgccaaggtcgccaagcactccgtcgcccaggggatgaccgttcgggaggccgtgatcgctctcggcttcgtcgaacgcggcgaggtgacggaggaacagctcgacaaggcgctagacgtgctgagcatgacccgccccggctga

SEQ ID NO: 115213 - protein, 468 aa, Leifsonia xyli subsp. xyli str. CTCB07
MVDTSSGTEYRIEHDTMGEVRVPATALYSAQTQRAVENFPISGSVLEPAQIAALARIKKSAALANARLGVIDTEIADAITASADEVVAGGLFGEFPIDVYQTGSGTSSNMNMNEVLATLATRRLGRPVHPNDHVNASQSSNDVFPTSVHIAVTGALIDDLIPALDHLAVALEEKAELWAAAVKSGRTHLMDATPVTLGQEFGGYAAQIRYGIERVRAALTRVAEVPLGGTAVGTGINTPAGFPQLVIELLTQETELPITEARNHFEAQANRDALVEASGALRTIAVSMTKICNDLRWMGSGPNTGLGELHIPDLQPGSSIMPGKVNPVVPEAALMVAARVIGNDATIAWSGASGLFELNVAIPVMGTALLESIRLLTQASRVLADKTVAGLEANLARARAFAESSPSIVTPLNRVIGYEAAAKVAKHSVAQGMTVREAVIALGFVERGEVTEEQLDKALDVLSMTRPG

SEQ ID NO: 115214 - DNA, 1395 bp, Desulfotalea psychrophila LSv54
  CDS (1)..(1395): transl_table=11
atgagcagataccgaacagagactgattcatttggtgagttacaggtaccaaccgataaatactatggggcccaatcggcacgctccctgatcaacttccccatcggggtggaaactatcccccctcccctaatccgggccctaggcattgtcaagcaggcagcggcccgggtaaatatgaatctcggcctactcagccctcctctcgctgaggcaatcagccaggcggccggggaggtcatgaccgggaaactcgatgagcacttccccctatcaatatggcagaccggttcgggaacccagagcaatatgaactgcaacgaggtgatctccaaccgggccattgagctcttaggaggggtgctgggcagcaaaagccccgttcaccccaacgaccactgcaatatgggccagtcctccaacgatgtcttccccacggccatgcatattgccgccgttgaagagatcaggcaccgcctcctaccggccctccaatttttgcgtgaccagctgcaaagtaaatctcaggcattcagccatctggttaaaatcggcagaacccatacccaggatgcaacccccctgaccctgggccaagagttttcaggttacactgcccagatggacaatgccctgcgcagagcaagggcagtactacccgccctctatcaactggctcagggcggaaccgccgtgggtacaggacttaatacagtcaaaggttttgatatcagctttgccgaggaggtggcaaggataacggaaattccctttaaaaccgcagaaaacaaatttgaggcactggctgcccacgatgctatagttgagggcagtggcgccctcaacacaatagccgtaagccttatgaagatagcaaacgacatcagatttctgggatctggaccgcgctgcggcattggggagatcaacctgccggaaaatgaaccgggttcctcgattatgcccggcaaggtgaaccccacccagtgtgaggcactaaccatggtcgtggcccaggttatgggcaaccatacaaccatttcggtggcgggtgccaatggccatttcgagctcaatgtctttaagccggtaatgatctataacctcctgcagtcgattcgtctacttgccgatgcctgccaatcctttgccaagagatgcatcagtggcatcagcgccaacgaagaacgtattggcaaactccgtgatgaatccctgatgctggtgacggccctcaatccgcatatcggctacgacaatgccgccaaaattgcaaaaaaggcccaccgggatggctcgaccctcctggaagcagccctggcccttaagctcctgaccaaagagcagtttacagagtgggtagtacctgaaaaaatgatcggacccagaggctga

SEQ ID NO: 115215 - protein, 464 aa, Desulfotalea psychrophila LSv54
MSRYRTETDSFGELQVPTDKYYGAQSARSLINFPIGVETIPPPLIRALGIVKQAAARVNMNLGLLSPPLAEAISQAAGEVMTGKLDEHFPLSIWQTGSGTQSNMNCNEVISNRAIELLGGVLGSKSPVHPNDHCNMGQSSNDVFPTAMHIAAVEEIRHRLLPALQFLRDQLQSKSQAFSHLVKIGRTHTQDATPLTLGQEFSGYTAQMDNALRRARAVLPALYQLAQGGTAVGTGLNTVKGFDISFAEEVARITEIPFKTAENKFEALAAHDAIVEGSGALNTIAVSLMKIANDIRFLGSGPRCGIGEINLPENEPGSSIMPGKVNPTQCEALTMVVAQVMGNHTTISVAGANGHFELNVFKPVMIYNLLQSIRLLADACQSFAKRCISGISANEERIGKLRDESLMLVTALNPHIGYDNAAKIAKKAHRDGSTLLEAALALKLLTKEQFTEWVVPEKMIGPRG

SEQ ID NO: 115216 - DNA, 1398 bp, Yersinia pseudotuberculosis IP 32953
  CDS (1)..(1398): transl_table=11
atggcaactacccgcagtgaaaaggattctatggggtctatctatgtacctgcaaaccaattatggggggcgcaaactcaacgttcattggcgcattttcgaatttcacaagaaaaaatgccaacagagctaattcatgcattggctctgaccaaacgagcggcagctcaagtgaatatggacctaggcttgctgccagccgagcgtgcaaaagcgattatgcgggccgcagatgaagttctggatggcgctcatccaaccgagttccctctcgccatctggcaaaccgggtcgggtactcagacgaatatgaatatgaatgaggtactggcaaaccgtgcgagtgagttgctcgggggggcgcgggggaataaccgtttggttcatcccaatgatgatgtcaataaaagccaaagttcaaatgatgtcttcccaacggcgatgcatgtcgctgcagtgatgggggtgagtgaacatcttcttcctgaactgaaggtgttacagaaaaccttggccgacaaagcagaagcttatcgcgatattgtaaaaattggccgtacacatttacaagatgcgacccctttaacgttggggcaggaaatttccgggtgggcggcaatgttatctcacagtgtgcggcatattgaggcgacccttcctcacctgtgtgaattagcgcttgggggaacagcggtggggactggcctcaatacgcatcctgaatatgctgtacgagtagctaatgaaatagccgcactgacacgccaaccgtttatcactgccccgaataaatttgaatcattgggaacctgcgatgcattggttcatggtcacggtgcgctaaaaggcttagcggcatccctgatgaaaattgccaatgatgtccgttggttatcatcaggccctcgctgtggtattggcgaaatatctattccggaaaatgagccaggcagttctatcatgccaggcaaagtgaatccaacacagtgtgaagcgatgaccatgctatgtgctcaagttatgggtaatgatgtggctatcaatatcggtggggcgtccggcaactttgaattaaacgtgttccgtccattggtcatccataacttcctgcaatctgttcgtttgttggctgatggaatgcgtggttttaatgagcactgcgctttgggaattgaacccaaccgcgaccgtattacgcaattgctcaatgaatcgctgatgttagttaccgcgctcaatacccatattggctacgataaagcagctgaaatcgccaaaaaggcgcataaagaggggctaacactgaaagcagcagctatggcattgggttatcttaccgatgcagagtttgatgaatgggttcgaccggaagatatggtcggcagtatgaagaaatag

SEQ ID NO: 115217 - protein, 465 aa, Yersinia pseudotuberculosis IP 32953
MATTRSEKDSMGSIYVPANQLWGAQTQRSLAHFRISQEKMPTELIHALALTKRAAAQVNMDLGLLPAERAKAIMRAADEVLDGAHPTEFPLAIWQTGSGTQTNMNMNEVLANRASELLGGARGNNRLVHPNDDVNKSQSSNDVFPTAMHVAAVMGVSEHLLPELKVLQKTLADKAEAYRDIVKIGRTHLQDATPLTLGQEISGWAAMLSHSVRHIEATLPHLCELALGGTAVGTGLNTHPEYAVRVANEIAALTRQPFITAPNKFESLGTCDALVHGHGALKGLAASLMKIANDVRWLSSGPRCGIGEISIPENEPGSSIMPGKVNPTQCEAMTMLCAQVMGNDVAINIGGASGNFELNVFRPLVIHNFLQSVRLLADGMRGFNEHCALGIEPNRDRITQLLNESLMLVTALNTHIGYDKAAEIAKKAHKEGLTLKAAAMALGYLTDAEFDEWVRPEDMVGSMKK

SEQ ID NO: 115218 - DNA, 1389 bp, Bacillus cereus E33L
  CDS (1)..(1389): transl_table=11
atggagtacagaattgaaagagatacattaggagaaattaaagttccagctgataaattatgggcagcacaaacgcaacgtagtaaagaaaacttcccgattggaacagagcaaatgccgcttgaaattgtaaaagcatttgcaattttaaagaagagtgcagcacttagcaatcaaaaattaggaaagttatcagaagaaaaagcagaagcaattgtgacggctgctgacgaagtcattgcagggaaatggaatgaacattttccgcttgtcgtatggcaaacaggtagtggtacacaatcaaacatgaatgtgaatgaagtaattgcaaatcgtgggaatcaaattttgaaagaaaagggatctgatgtatatattcatccgaatgatgatgtgaacatgtctcaaagttcaaatgatactttcccaactgcgcttcatgtagcatgtgtactcgcagtagaaaatcacgtattaccagctattacgaaattaaaagaaacgttagcagaaaaagtaactgcatttgaacatattataaaaattggtcgtacacatttacaagatgcgacaccgttaactttagggcaagaaattagcggatggcaccgtatgcttgaaaaaacagagcgtatgattgcagagagcaatacatatatgaaagagcttgcgattggtggtacagcagttggaacaggtattaacgctcatcctaaatttggtgagatggtatcagaggaaattagccaatttacaggtaaacaatttatttctgcaccaaataagttccatgcattaacgagccatgatgaagttgtatatactcacggtgcattaaaagcattagctgcggatttaatgaaaatcgctaacgatgtacgttggcttgcaagtggtccacgtagtggtcttggagaaattattattccagcaaatgaaccgggaagctctattatgccaggtaaagtaaatccaacgcaaagtgaagcattaacgatggttgtagcgcaagtgatggggaatgatgcaacaatcggatttgctgcgagccaaggtaattttgagttgaacgtatttaaacctgttattgcttataacttcttacaatcagctcacttattagcggacgcaattgtatcgtttaatgataattgtgcagttggtattgaagcagatgaagaagtcattaaagagaatgtgaatcgttcactaatgcttgtaacagcattaaacccgcatatcggatatgaaaatgcagcgaaaattgcaaagcatgctcataaagaagggttaactttaaaagaagcagcattgcaatctggactactaacagaagagcaatttgatgaaattgtcgatccgaaaaaaatgattgctccgaaagagtaa

SEQ ID NO: 115219 - protein, 462 aa, Bacillus cereus E33L
MEYRIERDTLGEIKVPADKLWAAQTQRSKENFPIGTEQMPLEIVKAFAILKKSAALSNQKLGKLSEEKAEAIVTAADEVIAGKWNEHFPLVVWQTGSGTQSNMNVNEVIANRGNQILKEKGSDVYIHPNDDVNMSQSSNDTFPTALHVACVLAVENHVLPAITKLKETLAEKVTAFEHIIKIGRTHLQDATPLTLGQEISGWHRMLEKTERMIAESNTYMKELAIGGTAVGTGINAHPKFGEMVSEEISQFTGKQFISAPNKFHALTSHDEVVYTHGALKALAADLMKIANDVRWLASGPRSGLGEIIIPANEPGSSIMPGKVNPTQSEALTMVVAQVMGNDATIGFAASQGNFELNVFKPVIAYNFLQSAHLLADAIVSFNDNCAVGIEADEEVIKENVNRSLMLVTALNPHIGYENAAKIAKHAHKEGLTLKEAALQSGLLTEEQFDEIVDPKKMIAPKE

SEQ ID NO: 115220 - DNA, 1398 bp, Mannheimia succiniciproducens MBEL55E
  CDS (1)..(1398): transl_table=11
atgacagcgtttcgtattgaaaaagatactatgggtgaagtgcaggttcctgcagataaatactgggcggcacaaaccgaacgttctcgcaataattttaaaattggtcctgcggcatctatgccacatgaaatcattgaagcattcggttatttgaaaaaagccgctgcttttgcaaatacagatttaggtgttttacctgccgaaaaacgcgatttaatcggtcaggcttgtgatgaaattcttgcccgtaaattagacgaccaattcccgttggtaatctggcaaaccggttcgggtacgcaatctaacatgaacctgaacgaagttatcgctaaccgcgcccatgtgatcaacggcggaaaattaggtgaaaaatctatcattcacccgaatgacgatgtaaacaaatcccaatcttcaaacgatacttacccgactgcaatgcacatcgcggcatataaaaaagtagttgaagccactattccggcggttgagcgcttacaaaaaaccttagcggcaaaagctgcagaattcaaagatgtggtgaaaatcggccgtactcacttaatggacgcaacaccattaactttaggtcaggaattcagcggttatgcggcgcaattaagctttggtttaactgcaattaaaaataccttaccgcatttacgtcaattggcattaggcggtaccgccgtaggtacaggtttgaatacgcctaaaggttatgatgtgaaagttgcggaatatattgcgaaattcaccggtcttccgttcattaccgcagaaaacaaatttgaagctttagcaacccatgatgccattgtggaaacccacggcgcgttaaaacaagttgccatgtcattattcaaaattgctaacgatattcgtttattggcatccggcccgcgttcaggtatcggcgaaatcttaattcctgaaaacgaaccgggttcgtcaatcatgccgggtaaagtaaatccgactcaatgcgaagccatgacaatggttgccgcacaagtgttaggtaacgataccaccatttcattcgcaggctcacaaggtcacttcgaactaaacgtatttaaaccggtaatggcggcgaacttcctgcaatccgctcaattaatcgcggacgtttgtatctcattcgacgaacattgcgcaaccggtattcaaccgaatacaccgcgtattcaacatttgctagacagctcattaatgttggtaaccgcattaaatacccatatcggttatgaaaatgcggcgaaaattgcgaaaaccgcacacaaaaacggcaccacattacgtgaagaagcaatcaacttaggcttagtttcagccgaagacttcgacaaatgggtggtacctgccgatatggttggtagcttgaaataa

SEQ ID NO: 115221 - protein, 465 aa, Mannheimia succiniciproducens MBEL55E
MTAFRIEKDTMGEVQVPADKYWAAQTERSRNNFKIGPAASMPHEIIEAFGYLKKAAAFANTDLGVLPAEKRDLIGQACDEILARKLDDQFPLVIWQTGSGTQSNMNLNEVIANRAHVINGGKLGEKSIIHPNDDVNKSQSSNDTYPTAMHIAAYKKVVEATIPAVERLQKTLAAKAAEFKDVVKIGRTHLMDATPLTLGQEFSGYAAQLSFGLTAIKNTLPHLRQLALGGTAVGTGLNTPKGYDVKVAEYIAKFTGLPFITAENKFEALATHDAIVETHGALKQVAMSLFKIANDIRLLASGPRSGIGEILIPENEPGSSIMPGKVNPTQCEAMTMVAAQVLGNDTTISFAGSQGHFELNVFKPVMAANFLQSAQLIADVCISFDEHCATGIQPNTPRIQHLLDSSLMLVTALNTHIGYENAAKIAKTAHKNGTTLREEAINLGLVSAEDFDKWVVPADMVGSLK

SEQ ID NO: 115222 - DNA, 1389 bp, Bacillus licheniformis ATCC 14580
  CDS (1)..(1389): transl_table=11
gtggactacagaattgaaaaagatacgatgggtgaagtcaaggttcccgcggataagttttggggagcccaaacccaaagaagcaaggagaactttaaaatcggttccgagaaaatgccgcaggaaattgtgtatgcgtttgcaatcttgaaaagaagcgctgcgattgccaatgaaaagcttggaaatcttgaggcggaaaaaaaggaagcgattgtttccgtatgcgatgatattttagaaggaaagtatgacagccattttccgctggtcgtctggcagaccggcagcggaacacagagcaacatgaatatgaatgaagttgtggcaaacaggggaacggcttatttgcaggaaaaaggatcaagcctgaaaatccacccgaatgatgatgtcaaccgcagccaaagctctaacgacacattcccgacagctatgcacgtggcagctgtcctcgcgattcacgataaactgattccggcgattgaccggttgagaagcacgctgcatgaaaaagctgaagctttcaaagacattgtcaaaatcggccgcactcatttgcaggatgcgacaccgctgacattgggacaggaaatcagcggctgggtatacatgctggaccgctctaaagagatgattcttgaagctgctgaaaaaatccgcgatcttgccatcggcggaactgccgtcggaacaggcattaatgcccaccctgaattcggcagcaccgttgccgaagagatcagcgctctgaccgggcagacattcaaaagctcgcctaataagtttcatgcgctgacaagccatgatgaactgacacacgtgcatggggcgcttaaagcgcttgcggcagatctcatgaaaatcgccaatgatgtcagatggcttgcgagcggacctcgctgcggaatcggcgagctgcttatcccggaaaatgagccgggaagctcgatcatgcctggaaaagtaaaccctacgcaaagcgaagcgctgacaatggtcgcatcccagatcatggggaatgacgcaacgatcggctttgccgcgagccaggggaactttgaactgaacgtctttaaacctgtgattatttacaacttcctccaatccgttcagcttcttgccgacggcatgaattcattccatgacaagtgtgctgtaggaatcgaacctaatcgggaaacaattgagaagaacctgaccaactctctcatgctggttacggctctaaacccgcatatcggatacgaaaatgctgcgaaaatcgcgaagctggctcataaagaggggctgacgctgaaagaagcggctctcaagctgaaccttttgacagaggagcagttcgacgaagttgttaaacctgaagaaatggtgaaaccgaaagcataa

SEQ ID NO: 115223 - protein, 462 aa, Bacillus licheniformis ATCC 14580
MDYRIEKDTMGEVKVPADKFWGAQTQRSKENFKIGSEKMPQEIVYAFAILKRSAAIANEKLGNLEAEKKEAIVSVCDDILEGKYDSHFPLVVWQTGSGTQSNMNMNEVVANRGTAYLQEKGSSLKIHPNDDVNRSQSSNDTFPTAMHVAAVLAIHDKLIPAIDRLRSTLHEKAEAFKDIVKIGRTHLQDATPLTLGQEISGWVYMLDRSKEMILEAAEKIRDLAIGGTAVGTGINAHPEFGSTVAEEISALTGQTFKSSPNKFHALTSHDELTHVHGALKALAADLMKIANDVRWLASGPRCGIGELLIPENEPGSSIMPGKVNPTQSEALTMVASQIMGNDATIGFAASQGNFELNVFKPVIIYNFLQSVQLLADGMNSFHDKCAVGIEPNRETIEKNLTNSLMLVTALNPHIGYENAAKIAKLAHKEGLTLKEAALKLNLLTEEQFDEVVKPEEMVKPKA

SEQ ID NO: 115224 - DNA, 1428 bp, Bacillus licheniformis ATCC 14580
  CDS (1)..(1428): transl_table=11
atgaaagctgaaatgacataccggacggaaaaggattttctcggagagaagaagattccggccgatgtctactacgggattcagacattgcgggcagcggagaacttcccgattacaggatataaaatccacgaagaaatgatcaaggcgctggcagtggtgaaaaaagcggcggcgcttgccaacatggagacaaaacgtctttataaaggccttggagatgccatcgtccaagccgctgatgagatccttgaaggaaagctgcacgatcagttcatcgttgatccgatccaaggcggcgcaggcacttcaatgaatatgaacgcgaacgaagtcatcggaaaccgcgcacttgaactgctcggccacaacaaaggcgaatatattcacctgagtccgaatacgcacgtcaacatgtctcaatcgacaaacgacgtattcccgacggcgattcatatttcaacgcttaagctgctggaaaagctgctggacacaatggaatacatgcttgatgcctttaagaaaaaagcacgcgactttgaccacgtcattaaaatggggcgcacccatcttcaagacgccgtgccgatccgccttggacaggagtttgaagcctacagccgcgtgatcgaacgcgacatcaaacggattaaacaatcgcgccagcatttgtatgaagtcaatatgggcgctaccgcggttggaacgggattaaacgcggatccgcgctatatcgaaaatgtcgtcaagcacttggctgagatcagcggtcttccgcttgtcggcgctgaccatctggtagatgcgacgcaaaatacggacgcttacacagaagtttcagctgcattaaaagtatgcatgatgaacatgtcgaaaatcgccaacgaccttcggttgatggcatcaggtccgcgcgcaggacttgcggagatttcccttccggcaagacagccgggttcatccattatgccggggaaagtcaatccggttatggccgagctgatcaaccaaatcgccttccaggtcatcggaaacgatcatacgatctgccttgcttctgaagccggacagctcgaactgaatgtgatggagccagtgctcgtctttaatctcctgcaatccatcagcatcatgaacaacggattccgttcgttcactgatcactgtgtagcaggtattgaagcgaatgaaaaacgcttaaaagcatatgtcgaaaagagcgccggcgtcatcactgcggtcaatccgcatcttggctacgaagcagctgcaaggattgcgagagaagccattttaacaggccaatccgtccgcgatctctgtcttcaaaacgatgtgttgacagaagaagagcttgatctgattttgaatccttatgaaatgacaaaaccggggattgccggggctgaacttttaaatcgggattga

SEQ ID NO: 115225 - protein, 475 aa, Bacillus licheniformis ATCC 14580
MKAEMTYRTEKDFLGEKKIPADVYYGIQTLRAAENFPITGYKIHEEMIKALAVVKKAAALANMETKRLYKGLGDAIVQAADEILEGKLHDQFIVDPIQGGAGTSMNMNANEVIGNRALELLGHNKGEYIHLSPNTHVNMSQSTNDVFPTAIHISTLKLLEKLLDTMEYMLDAFKKKARDFDHVIKMGRTHLQDAVPIRLGQEFEAYSRVIERDIKRIKQSRQHLYEVNMGATAVGTGLNADPRYIENVVKHLAEISGLPLVGADHLVDATQNTDAYTEVSAALKVCMMNMSKIANDLRLMASGPRAGLAEISLPARQPGSSIMPGKVNPVMAELINQIAFQVIGNDHTICLASEAGQLELNVMEPVLVFNLLQSISIMNNGFRSFTDHCVAGIEANEKRLKAYVEKSAGVITAVNPHLGYEAAARIAREAILTGQSVRDLCLQNDVLTEEELDLILNPYEMTKPGIAGAELLNRD

SEQ ID NO: 115226 - DNA, 1395 bp, Legionella pneumophila subsp. pneumophila str. Philadelphia 1
  CDS (1)..(1395): transl_table=11
atggctaaaacacgtgtagaaacagacagcatgggtgaaattgaagtcccgtctgataaatattggggcgcccaaaccgaacgttcattgcatcacttcaatataggcaaagacattatgccacgcgaagtaacccatgcctttggtatcctgaaaaaggcagccgccctgacgaatcttgaattaggcaaactgccaaaagacaaagcggatttgattgttcaggcagcagaagaagtgagcaaaggactattggatgagcattttcccttgcatgtctggcaaacgggaagcggcacacaatcgaatatgaacgccaatgaagtcatttccaatcgggccattgagctggctggcggcaccctgggaagcaagtcccctattcatcccaatgatcacgtcaatatgtctcaatcatcgaatgacaccttcccaacagccatgcatattgcagcggcgatagcttttaacgaaaaattgttacctgctgtacgcaatttacgtcatgttttcgcagcgaaaatggacgctttcaaaaacatcataaaaattggcagaacccatttgcaagatgcggttccactgactttggggcaagagttttcaggttatgttgcccaactggatgcgtgcgttcaccgtctggaagaagtcttgcctgaattatatgagctggctgccgggggcactgccgttggaaccggattgaacacccatccgcaattcgcagtcaaagttgctgaacacatcgctaaaataaccaaactgccttttgtgaccgctcctaacaaatttgccgctctggcttctcacgaacctctggtgcatgcgcacggtgccatgaaaactctcgcctgcgcattaatgaaaatcgccaatgacatacgctggctcgcctcaggacctcgttgcgggattggtgagctgattattccagaaaatgagccaggctcatccatcatgccaggcaaagtcaacccgacacaatgcgaagccatgaccatggtttgtgcccaggtactgggtaatgatacagccgttggaattgctgacagccagggtaattttgaattaaacgtgtttaaaccggttatcatatttaacgtattgcactcattaaacctgctcgccgacagctgccattccttccaggagttttgcgcagaaggaatagagcctaatcagccggtgattgattactatttacaccattccctcatgctggttactgcccttaatcaacacattggttatgataaagcggctaaaatcgccaaaaccgctcatcatgacaatatttcattgcaagaagccgccgtgaaactgggaattttaaccgccgagcaatttgctgagtttgtgaaaccggaaaagatgatttcccctgagcaatga

SEQ ID NO: 115227 - protein, 464 aa, Legionella pneumophila subsp. pneumophila str. Philadelphia 1
MAKTRVETDSMGEIEVPSDKYWGAQTERSLHHFNIGKDIMPREVTHAFGILKKAAALTNLELGKLPKDKADLIVQAAEEVSKGLLDEHFPLHVWQTGSGTQSNMNANEVISNRAIELAGGTLGSKSPIHPNDHVNMSQSSNDTFPTAMHIAAAIAFNEKLLPAVRNLRHVFAAKMDAFKNIIKIGRTHLQDAVPLTLGQEFSGYVAQLDACVHRLEEVLPELYELAAGGTAVGTGLNTHPQFAVKVAEHIAKITKLPFVTAPNKFAALASHEPLVHAHGAMKTLACALMKIANDIRWLASGPRCGIGELIIPENEPGSSIMPGKVNPTQCEAMTMVCAQVLGNDTAVGIADSQGNFELNVFKPVIIFNVLHSLNLLADSCHSFQEFCAEGIEPNQPVIDYYLHHSLMLVTALNQHIGYDKAAKIAKTAHHDNISLQEAAVKLGILTAEQFAEFVKPEKMISPEQ

SEQ ID NO: 115228 - DNA, 1395 bp, Burkholderia pseudomallei K96243
  CDS (1)..(1395): transl_table=11
atgagcgaagcagtacggatggaacgcgacacgttcggcgaaatcgccgtgccggccgcccggctatggggcgcgcagacgcagcgctcgctgcagaacttcaagatctcgaccgagaagcagtcgcccgaactgatccacgcgctcgcgctgatcaagcgcgcggccgccgccgtcaatctcgagctcggcgtgctcgcgcaggacaaggcgaacgcgatcgtcgccgccgccgacgagatcatcgccggccgtcacgccgacgaattcccgctcgccgtctggcaaacgggttcgggcacgcagaccaacatgaacctcaacgaggtgatcgcgaaccgcgcgagcgagctgctcggcggcgagcgcggcgaaagccgcgccgtgcatccaaacgatgacgtcaatcgcggccagtcgtcgaacgacgtgttcccgaccgcgatgcacatcgccgccgcgcgtgcgatcgtcgaccatctgctgcccgcgctgcgcacgctgcgcgcgacactcgacgcgaaggccgccgcgttcgccgacatcgtgaagatcggccgcacgcacctgcaggacgcgacgccgctcacgctcggccaggaattctccggctacgtcgcgcagctcgatcagggcatccgtcacgtcgaggcggcgctgcctcatctgtacgagctcgcgcaaggcggcaccgcggtcggcacgggcctgaacgcgcatccgaagttcgcggcgggcgttgcggccgagatcggccggctcaccggcctgccgttcgtcagcgcaccgaacaaattcgaagtgatggccgctgccgacgcgctcgtgttcgcgcacggcgcgctgaagacggtcgccgcgagcctgatgaagatcgcgaacgacatccgctggctcgcgagcgggccgcgctgcgggctcggcgagctgtcgattccggaaaacgagccgggcagctcgatcatgccgggcaaggtcaatccgacgcaatccgaagcggtgacgatgctgtgctgccaggtgttcggcaatgacgtcgcggtgaacttcggcggcgcgagcggcaatttcgagctgaacgtgtttcggccgatgatcgcgcacaacgtgctgcaatcggtgcggctgctcgcggacggcgcacggggcttcaacgatcattgcgcggtcggcatcgagccgaatcgcgcgcgcatcgacgcgctgctgaacgaatcgctgatgctcgtgacggcgctcaatccgcacatcggctacgacaaggccgcgcagatcgcgaagaaggcgcacaaggaaggcaccacgctcaaagccgccgcgcttgcgctcggttacgtgaccgatgcgcagttcgacgaatgggtgcggccggagcatatggtcggcaaccgctga

SEQ ID NO: 115229 - protein, 464 aa, Burkholderia pseudomallei K96243
MSEAVRMERDTFGEIAVPAARLWGAQTQRSLQNFKISTEKQSPELIHALALIKRAAAAVNLELGVLAQDKANAIVAAADEIIAGRHADEFPLAVWQTGSGTQTNMNLNEVIANRASELLGGERGESRAVHPNDDVNRGQSSNDVFPTAMHIAAARAIVDHLLPALRTLRATLDAKAAAFADIVKIGRTHLQDATPLTLGQEFSGYVAQLDQGIRHVEAALPHLYELAQGGTAVGTGLNAHPKFAAGVAAEIGRLTGLPFVSAPNKFEVMAAADALVFAHGALKTVAASLMKIANDIRWLASGPRCGLGELSIPENEPGSSIMPGKVNPTQSEAVTMLCCQVFGNDVAVNFGGASGNFELNVFRPMIAHNVLQSVRLLADGARGFNDHCAVGIEPNRARIDALLNESLMLVTALNPHIGYDKAAQIAKKAHKEGTTLKAAALALGYVTDAQFDEWVRPEHMVGNR

SEQ ID NO: 115230 - DNA, 1410 bp, Methylococcus capsulatus str. Bath
  CDS (1)..(1410): transl_table=11
atgagccaagacgactatcgcatcgaaaaagacagcatgggtgagctgcgggttccggtttccgcgctctacgcggctcagacccagcgtgccatcgacaattttccggtgagcgggctggctttgccgccggcgttcatccgcgcgatcgcccggatcaagcagtgcgcggcccgggtcaatgtggcgctggggcatctggatgcaggcaagggcgaggcgatcatggcggcggccgaggagatcatcggcggggcatacgccgaccagtttcctgtcgacgtgttccagaccggttccggcaccagcaccaacatgaacgtcaacgaagtgctggcgactttggcttcccggcgcgcgggaacgcccgtgagcgccaacgacgacgtcaacatggggcagagcagcaatgacgtcatccccacggcgattcacgtcagtgccgcgctggcagtcaacgaacatctgatcccggcgctggaacacctggcggcgacgatacgctacaagggcttggcgcatccgaaggcggtcaagaccgggcggacccatctgatggacgccatgccagtgcggctggagcaagaactctcgggctgggcgctgcaggtcgccaacggcgtcgaccgcctgcgggcgagtctgccgcggctttacaaattggggcagggcggcacggccgtgggcactggcatcaacgccgatccggccttcgcttcctccttcgccgaagctctggccgatgccacgggcctgccttttcgccccaacgattcgttcttcgagagcctgagttgccaggacgcggcagtcgaactgtcgggccagctcaagaccatcgccgtcggcatcatgaagatcgccaacgacctgcgctggatgaattcgggtcccctggctggcctgggggagatcgagctgcccgcgctccagcccggcagctccatcatgcccggcaaggtgaatccggtgattcccgaagccgcctgcatggtcgcggcgcaggtcatcggcaacgacgccgccatcacggtggctggtcagtcgggttctttccaactcaacgtgatgctgccggtgatcgcctacaacttgctgcagagcatcgagttgctggccaacattgctcgtctgctggccgacaaggccatcgccgacttccgggtgcgtgaggacaatctgcgccgggctctggcaacgaatccgatcctggtcaccgcactcaacccggtgatcggctacctgaaggcggcggaaatcgccaagaccgcctaccggacggggcggccgattctggaggtggccatcgaaatgagcggtctggaccgcgccgaactggagcgactgctcgatccggcggccctgaccaccggcggcatccacggtgtacccgccggcgcggcgggctga

SEQ ID NO: 115231 - protein, 469 aa, Methylococcus capsulatus str. Bath
MSQDDYRIEKDSMGELRVPVSALYAAQTQRAIDNFPVSGLALPPAFIRAIARIKQCAARVNVALGHLDAGKGEAIMAAAEEIIGGAYADQFPVDVFQTGSGTSTNMNVNEVLATLASRRAGTPVSANDDVNMGQSSNDVIPTAIHVSAALAVNEHLIPALEHLAATIRYKGLAHPKAVKTGRTHLMDAMPVRLEQELSGWALQVANGVDRLRASLPRLYKLGQGGTAVGTGINADPAFASSFAEALADATGLPFRPNDSFFESLSCQDAAVELSGQLKTIAVGIMKIANDLRWMNSGPLAGLGEIELPALQPGSSIMPGKVNPVIPEAACMVAAQVIGNDAAITVAGQSGSFQLNVMLPVIAYNLLQSIELLANIARLLADKAIADFRVREDNLRRALATNPILVTALNPVIGYLKAAEIAKTAYRTGRPILEVAIEMSGLDRAELERLLDPAALTTGGIHGVPAGAAG

SEQ ID NO: 115232 - DNA, 1389 bp, Anaplasma marginale str. St. Maries; identical to SEQ ID NO: 45176
  CDS (1)..(1389): transl_table=11

SEQ ID NO: 115233 - protein, 462 aa, Anaplasma marginale str. St. Maries; identical to SEQ ID NO: 45177

SEQ ID NO: 115234 - DNA, 1401 bp, Azoarcus sp. EbN1
  CDS (1)..(1401): transl_table=11
atgaaagccacgcgtaccgaaaccgattcgatggggcccgttgaagtcgcggcggaccgttactggggagcccagaccgaacgctcggtcgcgcatttcccgatcggcaccgaccgcttccgctgggggcgggcgatgatccgtgcgctgggcatcctgaaaaaggcggcagcacgagcgaatgcagaactcggcgagttggccccggaagtcgcggcgctgatcgagcgcgccgcggacgaagtcatcgacggcacgctcgatgcgcacttcccgctggtcgtgttccagaccggctccggcacgcaatcgaacatgaacgcgaacgaggtcatcgcgaaccgcgcgatcgaactggccggcggggagctgggctcgaagcgtccggtgcatccgaacgaccacgtgaaccgcggccagtcatcgaacgacacgttccccaccgcgatgcatgtcgcggcagtcgagcagctgcacgaccgcctgctgcccgccgtggggcggctgcgcggcacgctcgccgacaaggcgaaggaattcagcgacgtcgtcaagaccgggcgcacgcacctgcaggacgcgacgccgatcacgctcgggcaggagatcggggcgtgggttgcgcagctcgatttcggcatcgtggcggtcgaaagcgcgctgccggggctgtacgacctggcgatcggcggcaccgcggtcggtaccgggcttaacgcccatccgcgtttcggcgaccgcgcggcggcggagatcgccacgctcaccggacgcccgtttcgtagcgcgccggaccgcttcttcgcgctcgccgcgcacgacgcgctggtgcaggcgtcggcggcgatgcgcacccttgcgggcggcctgatgaagatggcgaacgacgtgcgctggctagcgagcgggccgcgctgcggcatcggcgagctgacgatccccgagaacgagccggggtcgtcgatcatgccgggaaaagtcaatccgacgcagtgcgaggcgctgacgatggtgtgcgtgcaggtgttcggcaacgacgcggcagtcgctttcgccggcacgcaggggaatttccagctgaatgtctataagccggtgatggcgcacaacgtactggagagcatcgcgctgctcgcggacagctgcgacgcgttcgacgcgcactgcgcgcgcggcctgctgccgaacctgccgcgcatccgcgagaatctcgaaaagaacctgatgctggtgacggcgctgaatcgcgagatcggctatgaccgtgccgccgagatcgcgaagaaggcgcacaaggaaggcctgtcgctgcgcgaggcggcgctcgcgtcgggctacgtcggcccggaggagttcgatctgtgggtcgacgcggaagcgatgacgcggcctggcgcgtga

SEQ ID NO: 115235 - protein, 466 aa, Azoarcus sp. EbN1
MKATRTETDSMGPVEVAADRYWGAQTERSVAHFPIGTDRFRWGRAMIRALGILKKAAARANAELGELAPEVAALIERAADEVIDGTLDAHFPLVVFQTGSGTQSNMNANEVIANRAIELAGGELGSKRPVHPNDHVNRGQSSNDTFPTAMHVAAVEQLHDRLLPAVGRLRGTLADKAKEFSDVVKTGRTHLQDATPITLGQEIGAWVAQLDFGIVAVESALPGLYDLAIGGTAVGTGLNAHPRFGDRAAAEIATLTGRPFRSAPDRFFALAAHDALVQASAAMRTLAGGLMKMANDVRWLASGPRCGIGELTIPENEPGSSIMPGKVNPTQCEALTMVCVQVFGNDAAVAFAGTQGNFQLNVYKPVMAHNVLESIALLADSCDAFDAHCARGLLPNLPRIRENLEKNLMLVTALNREIGYDRAAEIAKKAHKEGLSLREAALASGYVGPEEFDLWVDAEAMTRPGA

SEQ ID NO: 115236 - DNA, 1350 bp, Silicibacter pomeroyi DSS-3
  CDS (1)..(1350): transl_table=11
gtgcccgccgacaggtactggggcgcgcagacccaacgctcgatccagaacttcccgatcgggtgggaacgtcagcccgtcgccatcatccgcgcgctgggtgtggtgaaaaaggcctgcgccctgcgcaaccgcgaaaccggcgcgctggcccaggatctggcggatgcgattgtcgccgccgccgacgaggtgatcgcgggccggctggatgatcatttcccgctggtggtctggcagaccggttcgggcacccagtcgaacatgaacgccaacgaggtgatcgccaaccgtgcaatcgagcttttgggcggacagctgggcagtaaggacccggtgcacccgaacgaccatgtgaacatggggcaatcctcgaacgacacctttcccaccgcgatgcatgtggctgcggcgatgatggcgcgcgatgttctgctgccggggctgtacgccctgctggccgggctggagcagaaggcggaagagttccgcgacatcatcaagatcggccgcacccatacccaggacgcgacgccgctgaccctaggacaggagttctcgggctatgcccatcagatccgcatggggctgacccggatcgaggccgccctgcccggcattcatgagctggcccagggcggcaccgccgtgggcaccgggctgaacacacgcgcgggctgggccgaggcggtggccgccaacatggccgagatcaccggcctgccgctggtcagcgcacccaacaagttcgaggcgctggccgcccatgacgcgatggtgttcctgtcaggtgcgatcgcgacggtggcgggcagctgctacaagatcgccaatgacatccgctttctgggctccggcccccgctcggggctgggagagttgatcctgcccgaaaacgaaccgggcagctcgatcatgccgggcaaggttaacccgacccaggccgaggcgctgacccaggtcgccgcccatgtgatgggcaatgacgcggcgatcaagttcgcaggctcgcaaggccatttcgaactgaatgtctataatccgatgatggcctataacctgttgcaatccatgcagcttctgggcgatgcggcggacagtttcacccagcggatgctgttgggcatccgcgccaacaccgctcggatcgaccagttgatgcgcgaaagcctgatgctggtcaccgcattggcccccaccattggttatgacaacgccaccacggtcgccaagaccgcgcacaagaacggcaccaccctgcgcgaagaagcggtgcggctgggctttgtcgacgctgagacctttgacagggtggtacgccccgaacagatgatcgggccccgcgactga

SEQ ID NO: 115237 - protein, 449 aa, Silicibacter pomeroyi DSS-3
MPADRYWGAQTQRSIQNFPIGWERQPVAIIRALGVVKKACALRNRETGALAQDLADAIVAAADEVIAGRLDDHFPLVVWQTGSGTQSNMNANEVIANRAIELLGGQLGSKDPVHPNDHVNMGQSSNDTFPTAMHVAAAMMARDVLLPGLYALLAGLEQKAEEFRDIIKIGRTHTQDATPLTLGQEFSGYAHQIRMGLTRIEAALPGIHELAQGGTAVGTGLNTRAGWAEAVAANMAEITGLPLVSAPNKFEALAAHDAMVFLSGAIATVAGSCYKIANDIRFLGSGPRSGLGELILPENEPGSSIMPGKVNPTQAEALTQVAAHVMGNDAAIKFAGSQGHFELNVYNPMMAYNLLQSMQLLGDAADSFTQRMLLGIRANTARIDQLMRESLMLVTALAPTIGYDNATTVAKTAHKNGTTLREEAVRLGFVDAETFDRVVRPEQMIGPRD

SEQ ID NO: 115238 - DNA, 1389 bp, Bacillus clausii KSM-K16
  CDS (1)..(1389): transl_table=11
atggaaacgcgtacagaaagagatacaatcggcgaaatcgaagtgccagcagaccgtttttggggtgcacaaacacagcgtagcctggaaaactttaaaattggcaccgaaaaaattccttttgaagtggttcttgccttcgcccacttgaagaaagctgcagccattgtcaatgggcgcttaaaaggactcgattctcgcaaagttgaagcgattacatatgcagccgataaagttattgagggcggactcgaagatcatttccctttagttgtctggcaaacaggcagcggcacgcagtctaacatgaatatgaatgaagtgcttgcctacttagcgaaccaatacttggatgaaaatggacatcatgatgttcgtgtccatccaaacgacgatgtcaaccactcacaaagttcaaacgatacatttccaactgcaatgcatgtcgctactgtcgtttttgcggaagaaaacctcctgccagcgattcgtgccttcaaagacacacttgctgaaaaagaagaggcctttgcggatgttgtgaaaattggccgtacacacttgcaagatgcgactccgctcacatttgggcaagaaattagcggttggaaacatatgctgcaaacatgcgaaacactggttagcgaagcacttgaacatgtacgttctcttacgatcggcggaaccgctgttggcactggcttaaacgcgccaattggttttagcaaagaagtttctgctcaacttacaaaccaaacaggcgttgcttttaaagcatcagaaaacttttttcatggcttgacaagccatgacgagcttgtccattttcatggcgcactgaaagcactggctgccgatgcgtttaaaattgcaaacgacattcgcttgcttgcaagtgggccacgttgtggcattggcgaagtgttgattccggccaatgaaccaggaagctcgattatgcctggcaaagtcaatccgacacaaagtgaagcgttaacgatggtagccgcccaagttatggggaacgatgcagcagtcggctttgctgctagccaaggccattttcagctaaatgtatttaaaccagtcattatttacaacgtccttcaatcgatgcgccttcttgcagacgggctcaacaacttccgccacaaatgtttagttggcttaaaagcagatgaagaaaaaatgacgcaattgctaaatgaatcccttatgcttgtaactgctctaaacccgcacatcggctacgaaaatgccgcgaaaattgcgaaaaaagcacatgctgaaaacacaacacttaaagaagctgctattgagtcagggttgctgactgaagagcaatttgatgaatatgtagtaccaaaggaaatgattgctccaaaataa

SEQ ID NO: 115239 - protein, 462 aa, Bacillus clausii KSM-K16
METRTERDTIGEIEVPADRFWGAQTQRSLENFKIGTEKIPFEVVLAFAHLKKAAAIVNGRLKGLDSRKVEAITYAADKVIEGGLEDHFPLVVWQTGSGTQSNMNMNEVLAYLANQYLDENGHHDVRVHPNDDVNHSQSSNDTFPTAMHVATVVFAEENLLPAIRAFKDTLAEKEEAFADVVKIGRTHLQDATPLTFGQEISGWKHMLQTCETLVSEALEHVRSLTIGGTAVGTGLNAPIGFSKEVSAQLTNQTGVAFKASENFFHGLTSHDELVHFHGALKALAADAFKIANDIRLLASGPRCGIGEVLIPANEPGSSIMPGKVNPTQSEALTMVAAQVMGNDAAVGFAASQGHFQLNVFKPVIIYNVLQSMRLLADGLNNFRHKCLVGLKADEEKMTQLLNESLMLVTALNPHIGYENAAKIAKKAHAENTTLKEAAIESGLLTEEQFDEYVVPKEMIAPK

SEQ ID NO: 115240 - DNA, 1392 bp, Campylobacter jejuni RM1221
  CDS (1)..(1392): transl_table=11
atggaatacagagttgaacatgataccatgggtgaagttaaggtcccaaatgacaaatattggggagctcaaactgaaagaagttttgaaaatttcaaaatcggttgcgagaaaatgccaaaggttttaatctatgcttttacaaatcttaaaaaatctttagctttggtcaataacaaacttggcaaacttgatgatgctaagaaaaatgctatagttcaagcttgcgatgagattatcgcaggtaaatttgatgataattttccacttgcgatttggcaaacaggttcaggcacacaaagcaatatgaatatgaatgaagttattgcaaatcgtgccactgaaatcatgggcggggattttcgcaaagaaaagcttgtacatccaaatgatcatgttaatatgagtcaaagttcaaatgatacttttccaacagctatgagtatcgttgcggttgagcaagtagagaaaaagcttatccctgcgcttgatgagcttattgcaacttttgaaaaaaaagtaaaagaatttgatagtattatcaagataggacgcacgcatttacaagatgctactccacttactctagcacaagaatttagtggatatctttctatgcttttgcattcaaaagagcaaatcatcgcttctttaccaactttaagagaacttgccataggaggaaccgcagtaggaacagggcttaatgcgcatccagaattaagccaaaaagtaagtgaagagctaactcaacttataggtacgaaatttgtttcaagtccaaataaatttcatgctttaacaagtcatgatgcgatcaattttactcatggagctatgaagggtttggctgcaaatttaatgaaaattgcaaatgatataagatggttagcttcaggcccaagatgcggtcttggtgagcttatcatccctgaaaatgagccaggaagttcgattatgccaggtaaggtaaatcctacccagtgtgaagctgttactatggttgctgtacaagtgatgggaaatgatgcagctatcggatttgcagcaagtcaaggaaattttgaacttaatgtgtttaagcctgtgattatttataatttcttgcaaagtcttgatttgttagctgattctatgcattcattcaatatccattgtgctgtaggcatagaaccaaatcgtgcaaaaatcgatcataatcttcataattctttaatgctagttaccgctctaaacccatacataggttatgaaaacgctgctaaagtagccaaaaatgcccataaaaaaggtatttctttaaaagaaagcgcaatggagcttggtttggttagcgaagaagatttcaataaatttgttgatcctactaaaatgataggtccaaaagcctag

SEQ ID NO: 115241 - protein, 463 aa, Campylobacter jejuni RM1221
MEYRVEHDTMGEVKVPNDKYWGAQTERSFENFKIGCEKMPKVLIYAFTNLKKSLALVNNKLGKLDDAKKNAIVQACDEIIAGKFDDNFPLAIWQTGSGTQSNMNMNEVIANRATEIMGGDFRKEKLVHPNDHVNMSQSSNDTFPTAMSIVAVEQVEKKLIPALDELIATFEKKVKEFDSIIKIGRTHLQDATPLTLAQEFSGYLSMLLHSKEQIIASLPTLRELAIGGTAVGTGLNAHPELSQKVSEELTQLIGTKFVSSPNKFHALTSHDAINFTHGAMKGLAANLMKIANDIRWLASGPRCGLGELIIPENEPGSSIMPGKVNPTQCEAVTMVAVQVMGNDAAIGFAASQGNFELNVFKPVIIYNFLQSLDLLADSMHSFNIHCAVGIEPNRAKIDHNLHNSLMLVTALNPYIGYENAAKVAKNAHKKGISLKESAMELGLVSEEDFNKFVDPTKMIGPKA

SEQ ID NO: 115242 - DNA, 1386 bp, Ehrlichia ruminantium str. Welgevonden
  CDS (1)..(1386): transl_table=11
atgagaaaagaaaaagatagtttaggagaggtgaatgtaccagcatgtcactattggggagcacaaacacaacgttctattgataattttaaaattggctcagagaaaatgcctaaacctttgataagagctatggggattgtaaaattagctgcagcacgtgttaatatgaaaaatggtgatataaatgaggtgataggtaatgcaatttgtaatgctgctgctgaggttatagatggtaagttagataatgaatttcctctggtagtatggcagactggttctggtactcaaactaatatgaatgttaatgaggttatagcaaaccgtgcgattgaaattttaggtggtgaaaagggtagtaaagttccagttcatccaaatgatcatgtgaattattctcagtcttcaaatgatacttttccgacagcaatgcatattgctactgttagtgaaactgaaaactatttattaccgagtcttaaaaatttatatgatgcattacatagtaaatctatagcatttcaaaatattgtcaaagtgggacgtactcatcttcaagatgcaactccgctaactttagggcaagagttttctggttatgcatatcaaattttacaaggcattggcagaatcaaatcagcattaagtaatttgcttgagttagcacagggtggtactgcagtaggtactggtattaattctaggaagcagtttgatgttcatattgccaatgaaataaaaaaaattacaggttttaattttgtttcttctgtaaataagtttgaagctttggctacacatgatgcactagttgagtttagtggtgcattaaatgtacttgctgttagtttgatgaaaattgctaatgatattagattactgagctctggtccaaggtgtggtataggggaaattatattacctgcaaatgagccaggatcatctatcatgccagggaaagttaatcctactcaatgtgaggcggttactatggtatgtgctcaagttatgggtaataatatgactgttagtattgctggatcaaatggtcattttgaattgaatacatttaaacctgtaattatttataatattttacaatctattagattactatctgatgttagtgttaattttgtacagaagtgtatatacggaataagggctgatacaaaacgtattgcatttttactgaatcagtctctaatgttagtaacagcattaaataaatatataggttatgataatgcagctaaaatatcaaaaactgcttttgaagaaggtatcactttaaaagatgctgctatgaagttaaagttaataagtgaagaagaatttgataaaattataaatcctgaaaatatgatatatcctgataattaa

SEQ ID NO: 115243 - protein, 461 aa, Ehrlichia ruminantium str. Welgevonden
MRKEKDSLGEVNVPACHYWGAQTQRSIDNFKIGSEKMPKPLIRAMGIVKLAAARVNMKNGDINEVIGNAICNAAAEVIDGKLDNEFPLVVWQTGSGTQTNMNVNEVIANRAIEILGGEKGSKVPVHPNDHVNYSQSSNDTFPTAMHIATVSETENYLLPSLKNLYDALHSKSIAFQNIVKVGRTHLQDATPLTLGQEFSGYAYQILQGIGRIKSALSNLLELAQGGTAVGTGINSRKQFDVHIANEIKKITGFNFVSSVNKFEALATHDALVEFSGALNVLAVSLMKIANDIRLLSSGPRCGIGEIILPANEPGSSIMPGKVNPTQCEAVTMVCAQVMGNNMTVSIAGSNGHFELNTFKPVIIYNILQSIRLLSDVSVNFVQKCIYGIRADTKRIAFLLNQSLMLVTALNKYIGYDNAAKISKTAFEEGITLKDAAMKLKLISEEEFDKIINPENMIYPDN

SEQ ID NO: 115244 - DNA, 1383 bp, Chlamydophila abortus S26/3
  CDS (1)..(1383): transl_table=11
atgcggcaagaaaatgatagtttaggaatcgtagaagtccctgaagacaagttgtatggagcgcaaacagcgcgttctcagaagtatttctcctgggctcctgaggtgatgcctcgagaagttattcgagctttagtatggattaaaaaatgtgctgctaaggccaatcgtgatctaggttttctagattcaaaatattgtgacatgattgtttctgcttctgatgagattatcgcaggcaattttgatgaacatttccctctaaaagtttggcagacaggtagtggaacgcaatcaaatatgaatgtgaacgaggtgattgcgaatctagctattcaacgtcacggaggggttttaggtagcaaaacacccatacatcctaatgatcatgtaaataaatctcaatcttcaaatgatgtattcccaacagctatgcatattgctgcagtcatgagtctgaagaagaaactcattcctgctctggatcatttacagagggcgttagatgctaaggttgcggaatttcgagattgtgtcaagattggcagaacacatttaatggatgctgttcctatgacattagggcaggaattttctggttacagtagccaaatacgtcaatgtttagagagagtggctttttcgctgacgcacatgtatgaattagcgataggaggaacagcagtaggaacaggattaaatgttcctgaaggctttgtagataagatgattcactatttgcgtcaagaaacaggagagcctttcattgcctcatctaattatttttcagcattatcgaatcacgatattttagtacatgctcatggtgttttagctactttatcctgtgctttaacaaagattgctacagatttaagttttttgggatcaggtcctcgatgcggtttaggggaattactatttcctgagaatgaactgggatcttcgataatgcctgggaagatcaacccaacgcaatgcgaagctttgcagatggtttgtgctcaggttcttggtaataaccaggcaatcattgttggtggaagtcgagggaacttcgaacttaatgtaatgaaacctttgataatttataactttttacaatctgtagatatcctctcaggtggtatgcaagcctttgctgattattttgtttcaggtttgcgagtgaataagcttcgacttaaagaatacttggataactctttgatgcttgttactgccttaactcctgttttaggttatgataaatgctcgaaaatggctttgaaagcttttcatgaaaacctaagtttaaaagaagcctgtatacagatgggctacttatcagcagaagagttcgatcgtcttgttgttcccgaatctatggtggggaaacattaa

SEQ ID NO: 115245 - protein, 460 aa, Chlamydophila abortus S26/3
MRQENDSLGIVEVPEDKLYGAQTARSQKYFSWAPEVMPREVIRALVWIKKCAAKANRDLGFLDSKYCDMIVSASDEIIAGNFDEHFPLKVWQTGSGTQSNMNVNEVIANLAIQRHGGVLGSKTPIHPNDHVNKSQSSNDVFPTAMHIAAVMSLKKKLIPALDHLQRALDAKVAEFRDCVKIGRTHLMDAVPMTLGQEFSGYSSQIRQCLERVAFSLTHMYELAIGGTAVGTGLNVPEGFVDKMIHYLRQETGEPFIASSNYFSALSNHDILVHAHGVLATLSCALTKIATDLSFLGSGPRCGLGELLFPENELGSSIMPGKINPTQCEALQMVCAQVLGNNQAIIVGGSRGNFELNVMKPLIIYNFLQSVDILSGGMQAFADYFVSGLRVNKLRLKEYLDNSLMLVTALTPVLGYDKCSKMALKAFHENLSLKEACIQMGYLSAEEFDRLVVPESMVGKH

SEQ ID NO: 115246 - DNA, 1395 bp, Pseudomonas syringae pv. syringae B728a
  CDS (1)..(1395): transl_table=11
gtgagccgcaccgaaaccgatagcattggcccgatcgaagtccccgaagatgcctactggggcgcgcagacccaacgctcactgatcaattttgcgattggcgaccagcgaatgccgctgcccgtcctgcacgcactgaccctgatcaagaaagctgccgcacgggtcaacgatcgaaatggcgacttgcctgccgacatcgcccgcctgatcgaacaggccgccgacgaagtgctcgacggtcagcatgacgcgcaatttccgctggtggtctggcagaccggcagtggcacgcagagcaacatgaacgtcaacgaggtgatcgcaggccgcgccaacgaactggctggccaggggcgtggcggcaagtcaccggttcaccccaacgatcatgtcaaccgctcgcaaagctccaacgactgcttcccgacggccatgcacattgccactgcccaggcggtcaaggcgcagctgctgccggccatcgccgaactgtccagcgggctggctgaacaggccgcgcggcacatgaagctggtcaagaccgggcgcacacacatgatggacgcgacgccgatcaccttcggccaggagctgtccgggtttgtcgcgcaactcgattatgcggaaaaagccattcgcgccgccctgcccgccgtctacgagctggctcagggcggaacagcagtcggcaccgggctcaatgcgcccaagggctttgccgaagccattgccgcagaactggccgctctctcaggcctgccattcgttaccgcacccaacaagttcgccgcgctggccggtcacgagccacttgcagcgctgtccggcgcactgaagacgctggccggcacactgatgaagattgccaacgacctgcgtctgctgggctcaggcccgcgtgccggtctggcagaagtcagactgcctgccaacgagcccggcagttcgatcatgcccggcaaggtcaacccgacccagtgcgaggccttgtcgatgctcgcctgccaggtcatgggcaacgacgtgaccatcggtttcgccgccagtcagggccacctgcaactgaacgtgtacaagccggtgatcatccataacgttctgcagtcgattcgcctgctggccgacggctgcagcaatttcaacgagcactgcatcgcgggcatggagccggatggcgaaaaaatggccgaacacctggagcgcggcctgatgctggtcaccgcactcaatccgcatatcggctatgacaagtcggcgcagattgccaagaaagcctacaccgaaggtctgaccctgcgcgaagcggcattggcgctgggttacctgaccgatgaagagttcgatgcctgggtgcggccggacaaaatgctcgaggcaggcagtaatggctga

SEQ ID NO: 115247 - protein, 464 aa, Pseudomonas syringae pv. syringae B728a
MSRTETDSIGPIEVPEDAYWGAQTQRSLINFAIGDQRMPLPVLHALTLIKKAAARVNDRNGDLPADIARLIEQAADEVLDGQHDAQFPLVVWQTGSGTQSNMNVNEVIAGRANELAGQGRGGKSPVHPNDHVNRSQSSNDCFPTAMHIATAQAVKAQLLPAIAELSSGLAEQAARHMKLVKTGRTHMMDATPITFGQELSGFVAQLDYAEKAIRAALPAVYELAQGGTAVGTGLNAPKGFAEAIAAELAALSGLPFVTAPNKFAALAGHEPLAALSGALKTLAGTLMKIANDLRLLGSGPRAGLAEVRLPANEPGSSIMPGKVNPTQCEALSMLACQVMGNDVTIGFAASQGHLQLNVYKPVIIHNVLQSIRLLADGCSNFNEHCIAGMEPDGEKMAEHLERGLMLVTALNPHIGYDKSAQIAKKAYTEGLTLREAALALGYLTDEEFDAWVRPDKMLEAGSNG

SEQ ID NO: 115248 - DNA, 1395 bp, Haemophilus influenzae 86-028NP
  CDS (1)..(1395): transl_table=11
atggcatttcgtattgaaaaagacacaatgggtgaagttcaagttccagcagataaatactgggctgcacaaactgaacgttcacgcaataactttaaaattggcccagccgcatcaatgccacatgaaattatcgaagcttttggctatttgaaaaaagcagccgcatttgctaatcatgatttaggtgtattacctcttgaaaaacgtgatttaattgctctggcttgtgacgaaattttagcaaataaattagatgatcaattcccacttgttatttggcaaactggttctggtacacaatctaatatgaatgtgaacgaagtagttgccaatcgcgcacatgtgataaacggtggaaaattaggtgaaaaatctattattcacccaaatgacgatgtgaacaaatcacaatcttcaaatgatactttcccaacggcaatgcacattgcggcatataaaaaagtagttgagcacaccattccttgtgttgaacgtttacaaaaaacttttgcggcaaaatctgaagccttcaaaaacgtggtaaaaattggccgcactcacttaatggatgcaacgccactcacattaggtcaagaattttcggcttatgcagctcaattagatttcggcttaaaagcattaaaaaatacgctgccacatttaagccaattagcattgggtggaactgcggttggcacaggtttgaatacgccgaaaggctatgatgttaaagtggcagattacattgcaaaattcaccacacttccgtttgtcactgcagataataaatttgaagcattagccgctcatgatgcgattgttgaaactcacggtgcattacgtcaattagcaatgagtttatttaaaattgcgaacgatattcgtctattagcatcaggccctcgttcgggaattggcgaaattttaattcctgaaaatgaaccaggttcttcaattatgccaggtaaagtaaacccaactcaatgcgaagcgatgacaatggtctgtgcacaagtatttggtaatgacactacaatcgcatttgtgggttcacaaggtcacttccaattaaatgtgttcaaccctgtgatgattgcaaacttcttacaatctgctcaattattgggcgatgcttgcgtatctttcgatgaacactgtgcagtgggtattgagccaaactatccacgcattaaacaacaacttgaaaattcattgatgctggtgaccgcacttaatacgaatatcggttatgaaaatgcagctaaaattgcaaaaaccgcacacaaaaatggcaccacattacgtgaagaagcgattaatttaggtttagtgtctgccgaagattttgataaatgggttcgcccagaagatatggtgggtagcttaaaataa

SEQ ID NO: 115249 - protein, 464 aa, Haemophilus influenzae 86-028NP
MAFRIEKDTMGEVQVPADKYWAAQTERSRNNFKIGPAASMPHEIIEAFGYLKKAAAFANHDLGVLPLEKRDLIALACDEILANKLDDQFPLVIWQTGSGTQSNMNVNEVVANRAHVINGGKLGEKSIIHPNDDVNKSQSSNDTFPTAMHIAAYKKVVEHTIPCVERLQKTFAAKSEAFKNVVKIGRTHLMDATPLTLGQEFSAYAAQLDFGLKALKNTLPHLSQLALGGTAVGTGLNTPKGYDVKVADYIAKFTTLPFVTADNKFEALAAHDAIVETHGALRQLAMSLFKIANDIRLLASGPRSGIGEILIPENEPGSSIMPGKVNPTQCEAMTMVCAQVFGNDTTIAFVGSQGHFQLNVFNPVMIANFLQSAQLLGDACVSFDEHCAVGIEPNYPRIKQQLENSLMLVTALNTNIGYENAAKIAKTAHKNGTTLREEAINLGLVSAEDFDKWVRPEDMVGSLK

SEQ ID NO: 115250 - DNA, 1377 bp, Pseudomonas fluorescens Pf-5
  CDS (1)..(1377): transl_table=11
atgagtaatacccgtatcgaacgcgacagcatgggcgaactgcaggtaccggaactggccctgtacggcgcacagacccagcgtgcggtggacaacttccccatcagcgggcaacgcatgccggcagccttcatccgtgcgctgatcctggccaaggcggctgcggccaaggccaacgtcgaactggggcagatcagcgaagcccagggcaaggccatcgtcgatgccgcccagggtctgctggaaggtgatttcatgcagcacttcccggtggacattttccagaccggctctggcaccagttccaacatgaacgccaatgaagtactggcaaccctggccagccgcctgctgggtgaaccggtcaaccccaatgaccatgtcaactgcggccagagcagcaacgacatcatccctaccaccattcatgtcagcgccgcgctgaccctgcatgagcaactgctgccggccctggtgcatctggtggaggtcatcgagcgcaaggcggtacaggtgcaccccttcatcaagaccggccgcactcacctgatggacgcgatgccggtgcgcatgagccaggtgctggagggctgggcgcagcaactcaaggccaatatcagccacctgcaggatctgctgccgagcctgcaatccctggctcagggcggtaccgctgtgggtaccggaatcaatgcacatcccgagttcgctgcgcgtttcagccagcagttgagcaagctgacccaggtgcaattcaccccgggcaagaatcttttcgccctgatcggctcccaggacactgcggtgacggtatccggccagctcaaggctaccgcggtgtcgttaatgaagatcgccaacgacttgcgctggatgaactccggcccgctggccgggctcggcgagatcgagctggaaggtttgcagcccggttcgtcgatcatgcccggcaaggtcaatccggtgattcctgaagccaccgcgatggtcgccgcccaggtcatcggcaacgacagcactatcactgtggccgggcaatcgggcaacttcgagctcaacgtgatgctgccgatcattgcccagaacctgctgagcagcatcgagttgctggccaactccagccgcctgctggcggacaaggccatcgccagcttcaaggtcaacgaacccaagctcaaggaagcgctgtcgcgcaacccgatcctggtcacggcgctgaacccgatcatcggctatcagaaggctgcgcagatcgccaagaccgcctacaagcaggggcgcccggtgatcgacgtggcccttgaacataccgatctgccacgcagccagctggaggtcctgctggacccggaaaagctcactgccggcggcgtgtaa

SEQ ID NO: 115251 - protein, 458 aa, Pseudomonas fluorescens Pf-5
MSNTRIERDSMGELQVPELALYGAQTQRAVDNFPISGQRMPAAFIRALILAKAAAAKANVELGQISEAQGKAIVDAAQGLLEGDFMQHFPVDIFQTGSGTSSNMNANEVLATLASRLLGEPVNPNDHVNCGQSSNDIIPTTIHVSAALTLHEQLLPALVHLVEVIERKAVQVHPFIKTGRTHLMDAMPVRMSQVLEGWAQQLKANISHLQDLLPSLQSLAQGGTAVGTGINAHPEFAARFSQQLSKLTQVQFTPGKNLFALIGSQDTAVTVSGQLKATAVSLMKIANDLRWMNSGPLAGLGEIELEGLQPGSSIMPGKVNPVIPEATAMVAAQVIGNDSTITVAGQSGNFELNVMLPIIAQNLLSSIELLANSSRLLADKAIASFKVNEPKLKEALSRNPILVTALNPIIGYQKAAQIAKTAYKQGRPVIDVALEHTDLPRSQLEVLLDPEKLTAGGV

SEQ ID NO: 115252 - DNA, 1386 bp, Pseudomonas fluorescens Pf-5
  CDS (1)..(1386): transl_table=11
atgcgtcttgaatccgactcgatgggttccatttcggtaccgtccaacaagtactggggagcccagaccgaacgctccatccacaacttccccattggccgtgcacgcttccagtggggggcgccaatgatccgcagcatgggcatcctgaagaaggccgcggccctggccaacctcaagctcggcgagctgccggaagccattgcgctgcccatcgtcaaggcggcggatgaggtgatcagcgggcaactggacgagcatttcccgctggtggtgttccagaccggttccggcacccagtccaacatgaacgccaacgaagtgatcgccaaccgggccatcgagatgctcggcggcgagctgggcagcaagaagccgatccaccccaacgaccacgtcaaccgtggccagtcgtccaacgacaccttccccacggcgatgtacatggtggtggtgacggagatcttcgaaaccctgctgccgggcgtctcggtgctgcgcgacacgctgttcgagaaggccgagcagtaccgcgatgtggtcaaggtcggacgcacccacttgcaggacgccacccccatcaccctgggccaggagatcggtggctgggtcgagcagatcgactatgccctggcggccatccagcacaacctcaccggcctctacgacctggccatcggcggcacggcggtgggcaccgggctcaactcccacccgcagttcggcgacgagtgcgcacgaatcatcgccgagctcaccggctacccgttcaagtcctgcgccaacaagttcttcgccctgtcggcccatgacgcgctgatcaacacctcggcggcgatccgcaccctggccatggccctgatgaagatcgccaacgacgtgcgctggctggccagcgggccgcgctgcggcatcggcgagatcgacattccagagaacgagccgggctcctcgatcatgccgggcaaggtcaacccgacccagtgcgaggcgctgaccatggtctgtacccaggtcttcggcaacgacgccaccgtggccttcgccggcagccagggcaatttccagctcaacgtctacaagccggtgatggtgcacaacgtgctggaaagcatcaccttgctggccgagtcctgccgggccttcaacgaccactgcgcggtgggcatcgagccgaaccgggcgcgcatcgaggccaatatcgagaagaacctgatgctggtgaccgccctcaaccgccacatcggctatgacaaggccgcgatcatcgccaagaccgcccaccacgagggcaagtcgctgcgggaagtggcccagcagctgggctatgtctcggcggcggatttcgaccgctacgtggtggccctggacatgacccatccctga

SEQ ID NO: 115253 - protein, 461 aa, Pseudomonas fluorescens Pf-5
MRLESDSMGSISVPSNKYWGAQTERSIHNFPIGRARFQWGAPMIRSMGILKKAAALANLKLGELPEAIALPIVKAADEVISGQLDEHFPLVVFQTGSGTQSNMNANEVIANRAIEMLGGELGSKKPIHPNDHVNRGQSSNDTFPTAMYMVVVTEIFETLLPGVSVLRDTLFEKAEQYRDVVKVGRTHLQDATPITLGQEIGGWVEQIDYALAAIQHNLTGLYDLAIGGTAVGTGLNSHPQFGDECARIIAELTGYPFKSCANKFFALSAHDALINTSAAIRTLAMALMKIANDVRWLASGPRCGIGEIDIPENEPGSSIMPGKVNPTQCEALTMVCTQVFGNDATVAFAGSQGNFQLNVYKPVMVHNVLESITLLAESCRAFNDHCAVGIEPNRARIEANIEKNLMLVTALNRHIGYDKAAIIAKTAHHEGKSLREVAQQLGYVSAADFDRYVVALDMTHP

SEQ ID NO: 115254 - DNA, 1395 bp, Pseudomonas fluorescens Pf-5
  CDS (1)..(1395): transl_table=11
atgaaccgaatcgaaaccgacagcctgggccaggttgaagtcccgcaagaagcctactggggcgcgcagacccaacgttcgctggtcaacttcgccatcggcaacgaacgcatgcccttggcggtgctgcatgccctggccctgatcaagaaagccgcggcgcgggtcaacgaccgcaacggcgacatccctgccgatatcgcccgcctgatcgaacaggccgccgacgaagtgctcgcgggcgagcatgacgaccagttccctctggtggtgtggcagaccggcagcggtacccaaagcaacatgaacgtcaacgaagtgctggctggacgggccaacgagctggcgggcaaccctcggggcggcaagacgccggtgcaccccaatgaccacgtcaatcgctcgcagagctccaacgactgcttccccactgccatgcacattgcggcggcccaggcggtgcagttccagttgctgccagcgatcaccgagctctccggcggcctggccgagctgtcggcgcggcacatgaagctggtgaagaccggtcgcacccacatgatggacgccacccccattaccttcggccaggaaatctcggccttcatcgcccaactggggtacgccgagcgcgccatccgcagcgctttgccggccgtctgcgaactggcccagggcggcaccgcggtaggcaccgggctcaactcaccccacggtttcggcgaggccatcgccgccgagttggcggcgctctcgggcctgcccttcgtcacggcatcgaacaagttcgccgccctggccggccatgaaccgctgaccagcctttccggcgccctgaagaccctcgccgtgtgcctgatgaaaatcgccaacgacctgcgcctgctgggctccgggccacgggcgggcctggccgaggtcaagctccccgccaacgagcccggcagctcgatcatgcccggcaaggtcaacccgacccagtgcgaagccctgtcgatgctggcctgccaggtcatgggcaacgatgtgaccatcggctttgccgccagccagggccacttgcaactgaacgtgttcaagccggtgatcatccacaacctgctgcaatcgatccgcctgctggccgatggctgcagcaacttccagcaccattgcatcgccgggctggagcctgacccgcaacagatggccgcgcacctggagcgcgggctgatgctggtgaccgcgctcaatacccatatcggctacgacaaggccgccgagatcgccaagaaggcctatgccgagaacctgaccctgcgcgaggcggcgctggaactcgggtacctgaccgatgaacagttcgatgcctgggtccgcccggaaaacatgctggaggccgggaagcaggggtaa

SEQ ID NO: 115255 - protein, 464 aa, Pseudomonas fluorescens Pf-5
MNRIETDSLGQVEVPQEAYWGAQTQRSLVNFAIGNERMPLAVLHALALIKKAAARVNDRNGDIPADIARLIEQAADEVLAGEHDDQFPLVVWQTGSGTQSNMNVNEVLAGRANELAGNPRGGKTPVHPNDHVNRSQSSNDCFPTAMHIAAAQAVQFQLLPAITELSGGLAELSARHMKLVKTGRTHMMDATPITFGQEISAFIAQLGYAERAIRSALPAVCELAQGGTAVGTGLNSPHGFGEAIAAELAALSGLPFVTASNKFAALAGHEPLTSLSGALKTLAVCLMKIANDLRLLGSGPRAGLAEVKLPANEPGSSIMPGKVNPTQCEALSMLACQVMGNDVTIGFAASQGHLQLNVFKPVIIHNLLQSIRLLADGCSNFQHHCIAGLEPDPQQMAAHLERGLMLVTALNTHIGYDKAAEIAKKAYAENLTLREAALELGYLTDEQFDAWVRPENMLEAGKQG

SEQ ID NO: 115256 - DNA, 1404 bp, Psychrobacter arcticus 273-4
  CDS (1)..(1404): transl_table=11
atgtcaacacagaatcaggcaactcgtactgaaaaagacactatgggcaacgtagaagtcccagccgatgcttattggggcgcccaaacccagcgtagccgcgaaaacttcaaaatcggtggcgagaccttgccgcgcccgatgattgaagcgatggcactggtcaaaaaagccgctgcgattaccaatgcgagccttgagcgtatcgatacagacaagcgcgacctgatcgtccaagctgctgatgaagtcatcaatggtggtttaaccgatcagttcccattggttgtttggcagacaggttctggcacccagtcaaacatgaatatgaatgaagtgcttgccaatcgtgccaatgaaatcgctggtaatgagcgtggcagctatacgccgattcacccaaatgaccatgtcaaccatgctcaatctaccaatgacagcttcccaaccgcgattcgtgttgctgctgctcgtgaaatcaatggtttattgattccagcggtaaaagcactacgcgataccttggatgctaaagccaaagaattcgatagcattgttaaaatcggtcgtacgcatttacaagacgccacgcctttgaccttaggtcaagagttcagcggctatgttagccaacttgaccattcactggtacgtattgataatgcgctacaaggcttgtatgaattgccactaggcggtacggcggtaggtacgggtctaaatgcccatcctgattatgcggtaaaatcagctgagcaattggcgacattgtctggtctaccatttgtgacgtcaccgaataaatttgaagcattagccgctcgtgatgctgaagtatttgcttctggcgcattaaaaacgctagcagcaagcttaaacaaaatcgctaacgacgtacgttggttggcatcaggtcctcgttgtggtttgggtgagttgacgattcctgaaaatgagccaggctcttctatcatgccgggcaaagtaaacccaactcagtcagaagcgatgaccatggttgtggcgcaagttatgggtaacgatgtgactatcagcatggcaggcgcgtcaggtaactttgagctaaacgtctacaagccagtaatcgctttcaacctattgcaatctatcaaactgcttggtgatgcgtgcaatagctttaacgaaaactgtgccgttggtatccagccagtaaaagacaaaatcgatgactttttacataactcattaatgctagtcaccgcacttaaccgtcacgtcggttatgaaaatgcggcaaaaatcgctaagactgcttataaagaaaacaaaaccttgaagcaagttgccgttgaattagagctgttaaccgaagctcagttcgatgagtgggttattcctgctgatatggtaaaccctaagtaa

SEQ ID NO: 115257 - protein, 467 aa, Psychrobacter arcticus 273-4
MSTQNQATRTEKDTMGNVEVPADAYWGAQTQRSRENFKIGGETLPRPMIEAMALVKKAAAITNASLERIDTDKRDLIVQAADEVINGGLTDQFPLVVWQTGSGTQSNMNMNEVLANRANEIAGNERGSYTPIHPNDHVNHAQSTNDSFPTAIRVAAAREINGLLIPAVKALRDTLDAKAKEFDSIVKIGRTHLQDATPLTLGQEFSGYVSQLDHSLVRIDNALQGLYELPLGGTAVGTGLNAHPDYAVKSAEQLATLSGLPFVTSPNKFEALAARDAEVFASGALKTLAASLNKIANDVRWLASGPRCGLGELTIPENEPGSSIMPGKVNPTQSEAMTMVVAQVMGNDVTISMAGASGNFELNVYKPVIAFNLLQSIKLLGDACNSFNENCAVGIQPVKDKIDDFLHNSLMLVTALNRHVGYENAAKIAKTAYKENKTLKQVAVELELLTEAQFDEWVIPADMVNPK

SEQ ID NO: 115258 - DNA, 1458 bp, Colwellia psychrerythraea 34H; identical to SEQ ID NO: 45184
  CDS (1)..(1458): transl_table=11

SEQ ID NO: 115259 - protein, 485 aa, Colwellia psychrerythraea 34H; identical to SEQ ID NO: 45185

SEQ ID NO: 115260 - DNA, 1395 bp, Pseudomonas syringae pv. phaseolicola 1448A
  CDS (1)..(1395): transl_table=11
gtgagccgcaccgaaaccgacagcattggcccgatcgaagtccccgaagatgcctactggggcgcgcagacccaacgctcactgatcaattttgcgattggcgatcagcgtatgccactgcccgttctgcacgcgctgaccctgatcaagaaagccgcggcacgcgtcaacgaccgtaacggcgatctgcccgccgacattgcccgcctgatcgaacaggccgccgatgaggtgctcgacggtcagcacgacgcgcaattcccgctggtggtctggcagaccggcagcggcacgcaaagcaacatgaacgtcaacgaagtgatcgcaggccgagctaacgaactggcaggtcagggccgtggcggtaaatcaccagttcaccccaacgatcacgtcaaccgctcgcaaagctccaacgattgcttcccgacagccatgcacatcgccactgcccaagcggtcaaggaacagctgctgcccgccatcgccgagctttccagcgggcttgccgaacaggctgcgcggcacatgaaactggtcaagaccgggcgcacgcacatgatggacgcgacgcctatcacctttggccaggagctgtcggggtttgtcgcgcaattggattacgcagaaaaggctattcgcgctgcgcttcccgccgtctatgagctggctcagggcggtactgcggtcggtaccgggctcaactcgccgaaaggcttcgccgaggccatcgcagcagagctggctgcactgtccgggctgccgttcgtcactgcgcccaacaagttcgccgcactggccggtcacgagccgcttgcagcactttccggcgcactgaagaccttggccggaaccctgatgaaaatcgccaacgacctgcgcctgctgggttccggcccgcgtgccgggctggccgaagtcaggctgccagccaacgagcccggcagttcgatcatgcccggcaaggtcaacccgacccagtgcgaggccttgtcgatgctcgcctgccaggtcatgggcaacgacgtgaccatcggcttcgccgccagccagggccacctgcaactgaacgtctacaagccggtgatcattcacaatgtgctgcaatcgatccgcttgctggccgatggctgcagcaatttcaatgaacactgcattgcaggcatgcagccggatgctgaaaaaatggctgagcacctggagcgcggactgatgctggttactgcactcaatccgcatatcggttatgacaaatcggcgcagattgccaagaaggcttacaccgaaggcctgaccctgcgtgaagccgcattggcgctgggttatctgaccgatgaggagttcgacgcctgggtgcgtccggacaaaatgctcgaggcaggcagtaatggctga

SEQ ID NO: 115261 - protein, 464 aa, Pseudomonas syringae pv. phaseolicola 1448A
MSRTETDSIGPIEVPEDAYWGAQTQRSLINFAIGDQRMPLPVLHALTLIKKAAARVNDRNGDLPADIARLIEQAADEVLDGQHDAQFPLVVWQTGSGTQSNMNVNEVIAGRANELAGQGRGGKSPVHPNDHVNRSQSSNDCFPTAMHIATAQAVKEQLLPAIAELSSGLAEQAARHMKLVKTGRTHMMDATPITFGQELSGFVAQLDYAEKAIRAALPAVYELAQGGTAVGTGLNSPKGFAEAIAAELAALSGLPFVTAPNKFAALAGHEPLAALSGALKTLAGTLMKIANDLRLLGSGPRAGLAEVRLPANEPGSSIMPGKVNPTQCEALSMLACQVMGNDVTIGFAASQGHLQLNVYKPVIIHNVLQSIRLLADGCSNFNEHCIAGMQPDAEKMAEHLERGLMLVTALNPHIGYDKSAQIAKKAYTEGLTLREAALALGYLTDEEFDAWVRPDKMLEAGSNG

SEQ ID NO: 115262 - DNA, 1377 bp, Pseudomonas syringae pv. phaseolicola 1448A
  CDS (1)..(1377): transl_table=11
atgagtaatacccgtatcgaacgcgacagcatgggccagctacaggtcccggccgaggccctttacggcgcgcagactcagcgtgcggtggaaaactttccgatcagtcatcaacgcatgccccgccaattcattcgtgccctgttgctggccaaggcggctgcagcgcaggcgaacctggagctggagcagatcagcgaggggcagagcagggcgattgtcagtgccgtgaaagacctgctggccagtgactacatggcgcattttccggtcgatatctttcagaccggttccggcaccagtaccaacatgaacgccaacgaggtgatcgccacgctggccacgcgtgtgatgggcgaagaggtcaaccccaatgaccacgtcaactgcgggcagagcagcaacgacatcatcccgaccacgattcatgtgagcgctgcactggctctgcacgaacaactgctgcctgcgctggcccatctggtgcgagtgaccgaacacaaagccgagcaggtccatgccttcgtcaagactggtcgtacgcatctgatggacgccatgcccgtgcgcatgagccaggtgctcaacgggtggtcacagcagattcgcgccaacgtcgagcatctgcaaggtctccagccgagccttcagtcactggcacagggcggcaccgcagtcggtaccgggatcaacgcgcatcctgagttttcggctcgtttcagtcgtcagttgagcacgttgaccggtgtgcaattcgcgcctggcaagaacctgttcgcgttgatcggttcgcaggacaccgcggtcgcggtatccggccagctcaaagccacggcggtgtcgctgatgaaaattgccaacgacctgcgctggatgaattcggggccactggcagggctgggtgagattgagctggaggcattgcagccgggctcatcgatcatgccgggtaaggtcaacccggtcattccggaagccaccgccatggttgccgcgcaagtgatcggcaacgacgcgacgattaccgtggcggggcagtccggcaacttcgaacttaacgtgatgctaccgatcattgcccagaacctgctcagcagcatcgagctgctggccaattccagtcggctgctggctgacaaagcgattgcgagcttcaaggtcaatgaatccaagctcaaggaagcgctgtcgcgtaatccgattctggtgacggccctcaacccgatcattggctatcagaaagccgccgaaatcgccaagaccgcttacaagcagggccgtccggtcattgacgtcgcccttgagcacactgatttgcaacgtagcgaactggaagtgttgctcaaccctgaaaaactcaccgctggcggtatttga

SEQ ID NO: 115263 - protein, 458 aa, Pseudomonas syringae pv. phaseolicola 1448A
MSNTRIERDSMGQLQVPAEALYGAQTQRAVENFPISHQRMPRQFIRALLLAKAAAAQANLELEQISEGQSRAIVSAVKDLLASDYMAHFPVDIFQTGSGTSTNMNANEVIATLATRVMGEEVNPNDHVNCGQSSNDIIPTTIHVSAALALHEQLLPALAHLVRVTEHKAEQVHAFVKTGRTHLMDAMPVRMSQVLNGWSQQIRANVEHLQGLQPSLQSLAQGGTAVGTGINAHPEFSARFSRQLSTLTGVQFAPGKNLFALIGSQDTAVAVSGQLKATAVSLMKIANDLRWMNSGPLAGLGEIELEALQPGSSIMPGKVNPVIPEATAMVAAQVIGNDATITVAGQSGNFELNVMLPIIAQNLLSSIELLANSSRLLADKAIASFKVNESKLKEALSRNPILVTALNPIIGYQKAAEIAKTAYKQGRPVIDVALEHTDLQRSELEVLLNPEKLTAGGI

SEQ ID NO: 115264 - DNA, 1407 bp, Dechloromonas aromatica RCB
  CDS (1)..(1407): transl_table=11
atggaagctggtgctcggacccgcttggaaaacgactcattcggcagcatcaaggtcgccgccgaacggctctggggtgcgcaaacgcaacgggcgctggaaaattttgcgatttcgtcagagcgcatgccgagcgaactgatccatgccctagccacgatcaaggccgcctgcgccagcgtcaatcgggaactcggcctgatgaagccagccctagcggcagccattgtcattgcggccaacgaagtcgccagcggccgccatgacgacgaattcgtgctgccggtttggcagaccggttccggcacgcaaaccaacatgaacatgaacgaggtgctggccaaccgcgcatcagaactgctcaatggcccgcgcggcaacgcccgcctcgttcaccccaacgacgaggtcaatctcggccagtcatccaacgacatttttccgacggccatgcatgtcgcagcggctaccgccatcaccagacaactgttgccggccatccagcaactgactgcaacgctggaagaaaaaacagccgaattcgctgacatcatcaagatcggtcgcacccatctgcaagacgccactccgctatcgctgggccaggaattttcggcgtatgtagcccaactgcagcatgccgaaaccttgatcagcgccagcctgtgttcgctctttccgctggccgtgggaggaacggccgtcggcaccggcttgaacacgcatcgtgaattcggcagtcgagtcgccgccgagcttgccatccgcaccggccagcctttcaccagcgccgccaacaagttcgccgcgctggccgcgcatgatgccctggtggccgcccacggtgccctgaaaaccctggccgtggccctgatcaaaatggccaatgacattcgctggctaggttcaggcccccgctcgggcttgggcgaaatcaggctgccggaaaacgaaccgggtagctccatcatgccaggcaaggtcaacccgacccagtgcgaggcgctgaccatgctctgctgccaggtgatgggcaacgatgtgacgatcggcatcgccggcgcctccggcaatttcgaactgaacgtctacaaaccggtgattgcccacaatttcctgcagagcgtacgcctgctggctgacggcatgctcagtttcgaacgccactgcctgcgcggcatcacagccaacaaggaacgcattgccgatctgatggaaggctcactgatgctggtcaccgcgctgaccccgcacatcggctacgacaatgcggctgaaatcgccaaactggcacaccgtcagggaatgacactgaagcaggcagcactggccctcggtcatgtctcggcaacggactacgaccgctgggtcgtgccggccgacatgattcatccgggaaggccctaa

SEQ ID NO: 115265 - protein, 468 aa, Dechloromonas aromatica RCB
MEAGARTRLENDSFGSIKVAAERLWGAQTQRALENFAISSERMPSELIHALATIKAACASVNRELGLMKPALAAAIVIAANEVASGRHDDEFVLPVWQTGSGTQTNMNMNEVLANRASELLNGPRGNARLVHPNDEVNLGQSSNDIFPTAMHVAAATAITRQLLPAIQQLTATLEEKTAEFADIIKIGRTHLQDATPLSLGQEFSAYVAQLQHAETLISASLCSLFPLAVGGTAVGTGLNTHREFGSRVAAELAIRTGQPFTSAANKFAALAAHDALVAAHGALKTLAVALIKMANDIRWLGSGPRSGLGEIRLPENEPGSSIMPGKVNPTQCEALTMLCCQVMGNDVTIGIAGASGNFELNVYKPVIAHNFLQSVRLLADGMLSFERHCLRGITANKERIADLMEGSLMLVTALTPHIGYDNAAEIAKLAHRQGMTLKQAALALGHVSATDYDRWVVPADMIHPGRP

SEQ ID NO: 115266 - DNA, 1392 bp, Thermobifida fusca YX
  CDS (1)..(1392): transl_table=11
atgactgaataccgcatcgagcgggactcgatgggcgaggtcaaggttcctgtcgaggccaagtggcgggcgcagacccagcgcgcggtcgagaacttccctatctcggggcagggcctggaggccgcgcacatcgcggcactgggccacatcaaggctgcggcggcgaaggtcaacgctgagctcggtgtgatcaaggaggacatggccgaggcgatccgcgaggccgcgctggaggtcgccgcgggcaagtggaacgaccagttccccgtggacgtgttccagaccgggtcgggcacgtccagcaacatgaacgcgaacgaggtcatcgcgacgctggccacggagcggctgggccagccggtccaccccaacgaccacgtcaacgcgtcccagtcgtccaatgacgtgttcccgtcctcgattcacatcgcggcgacctccgcgctgatcaacgagctgattccggcgctgaagcacttggaggagacgctgtcggcgaaggcgtcggagttcgccaccgtggtgaagagcggccgcacccatttgatggacgcgactccggtgaccttgggccaggagttcgacgggtacgccgcgcaggtgcggtacggcattgagcggatcgaagcgtccctgccgcgggtcgcggagcttccgctgggcggtacggccgtggggaccgggatcaacacgccggagggcttctccgcgaaggtgatcgcggagattgcgcgggctacggggctgccgctgaccaaggcgcgcaaccacttcgaggcccagggggcgcgggacgctctggtggagctgtccggtcagctgcgcacgatcgcggtgagcttctgcaagatcgccaacgacatccggtggatgggttcgggtccgcggaccggtctcagcgagatcttcctgccggacctgcagccggggtcgtcgatcatgccgggcaaggtcaacccggtgctgtgcgagtcgatgctccaggtggcctcgcaggtggtggggaacgatgccgcggtggcgttcggcgggtcgaccggcaacttcgagctgaacgtgcaactgccgctgatcgcccgcaacgtgctggagtcgatccggctgctggccaacatttcccgggtgttcgcggaccggtgcgtggccgggatcaccgctaacgaggagcggtgccgcgagtacgcggaatcgtcgccgtcgatcgtcaccccgctcaaccgctacatcggctacgaggaggccgccaaggtcgccaagcaggcgctcgcggagcggaagacgatccgccaggtggtgatcgaacgcgggtacatcgcccagggcaagctgaccgaggcccagttggatgaggcgctcgacgtgctggcgatgaccaactcgcagaagtag

SEQ ID NO: 115267 - protein, 463 aa, Thermobifida fusca YX
MTEYRIERDSMGEVKVPVEAKWRAQTQRAVENFPISGQGLEAAHIAALGHIKAAAAKVNAELGVIKEDMAEAIREAALEVAAGKWNDQFPVDVFQTGSGTSSNMNANEVIATLATERLGQPVHPNDHVNASQSSNDVFPSSIHIAATSALINELIPALKHLEETLSAKASEFATVVKSGRTHLMDATPVTLGQEFDGYAAQVRYGIERIEASLPRVAELPLGGTAVGTGINTPEGFSAKVIAEIARATGLPLTKARNHFEAQGARDALVELSGQLRTIAVSFCKIANDIRWMGSGPRTGLSEIFLPDLQPGSSIMPGKVNPVLCESMLQVASQVVGNDAAVAFGGSTGNFELNVQLPLIARNVLESIRLLANISRVFADRCVAGITANEERCREYAESSPSIVTPLNRYIGYEEAAKVAKQALAERKTIRQVVIERGYIAQGKLTEAQLDEALDVLAMTNSQK

SEQ ID NO: 115268 - DNA, 1395 bp, Prochlorococcus marinus str. NATL2A
  CDS (1)..(1395): transl_table=11
atgtccaacatgaaacgacttgagaaagatagcctaggttcaattgatgttccaaatgatgcgctatggggagctcaaactcaacgctcaatattgaattttgctatcgggaatgaggtcataccactcgagattatttttgcaattgcccaaataaaagcctctgctgctcatgtaaacaatcatctaggtttaataactacagaaactgctcaatttattaccgaagcaagtttagaaattattgaaggaaaacataatgatcaattcccagtgagagtttggcaaacaggcagtggtactcaaacaaatatgaacgtcaatgaggtgatcagcaatatagcttcaaaacgttcaaataatacgttaggtagtcataagccaatacatcccaatgatcatgtcaattgctctcaatcaacaaacgatgtttttccagctgcaatccaaatagccacaatagtcaccttaaaagacacattaatacctgaattaaccaaactcattgatgtattccatcaaaaaagtaaagaatggaaagatattataaaaataggacgtacccatcttcaagatgcagtacctctaactcttggacaagaagtctctgcttgggcttctcaattagagactgctttaaaacgcattgaaatcaacatcgaggaactttatccgcttccacttggaggaaccgctattggtacagggattaatactcctaaggatttcgataatttaatcgctcttgaaatagccaaacaaacaaatttaccttttaaaactgcagctaataaatttgccatcatggctagtcatgatggtcttgtaaatataatgtctcaaataaaattactagccgtcacttttctcaaaattgttaatgatcttcgacttttatcttgtggaccaagagctggattatcagaactacagcttccagccaatgaacctggtagctcaataatgccagggaaaattaatcctactcaatgcgaagccatggcaatggtgtgtacgcaaataattggcatggacacctcagtatcgatcgcaggaagtggaggacatctacaaatgaatgtctataaaccactgattggctacaacattataacaagtatcaaccttattcaaaatgcctgtaagagttgcagagagaatatgattgaaggtattcaacctaataaagaaaaaatcaaacaatttctagacaattctttgatgttggtaaccgccttatctccatcaataggatacgaaaaagcaagtaaaattgctcaactagcccatgaaaagaatctaagtctaagacaagcttccagtcaattaaattatcttgatcaagaagaatttgataaactcatgagtccaaaatcaatgattggaagtgattga

SEQ ID NO: 115269 - protein, 464 aa, Prochlorococcus marinus str. NATL2A
MSNMKRLEKDSLGSIDVPNDALWGAQTQRSILNFAIGNEVIPLEIIFAIAQIKASAAHVNNHLGLITTETAQFITEASLEIIEGKHNDQFPVRVWQTGSGTQTNMNVNEVISNIASKRSNNTLGSHKPIHPNDHVNCSQSTNDVFPAAIQIATIVTLKDTLIPELTKLIDVFHQKSKEWKDIIKIGRTHLQDAVPLTLGQEVSAWASQLETALKRIEINIEELYPLPLGGTAIGTGINTPKDFDNLIALEIAKQTNLPFKTAANKFAIMASHDGLVNIMSQIKLLAVTFLKIVNDLRLLSCGPRAGLSELQLPANEPGSSIMPGKINPTQCEAMAMVCTQIIGMDTSVSIAGSGGHLQMNVYKPLIGYNIITSINLIQNACKSCRENMIEGIQPNKEKIKQFLDNSLMLVTALSPSIGYEKASKIAQLAHEKNLSLRQASSQLNYLDQEEFDKLMSPKSMIGSD

SEQ ID NO: 115270 - DNA, 1407 bp, Ralstonia eutropha JMP134
  CDS (1)..(1407): transl_table=11
atgtccgcaccgtcttcctccgccacccgcatcgaaaaagacagtctcggcgatgtgccagtccccgccgaccacttgtggggggcgcagaccgaacgctcgcgccagaatttccgcatcggcaatgaaaagatgccgccggcgctgattgaagcgtttgccatcctcaagctgtgtgccgcgcgcgccaaccgcgagcttgacgtgctgccacaggaattggcaggcgccatcgagcaagcagcaagcgaagtgatcgaaggccgctggcccgatgaattcccgctttcggtgtggcagaccggctctggcacgcagaccaacatgaacctcaacgaggtcatcgccaaccgcgccatccagctgcttggcggccaggtcggcagcaagaagcccgtgcacccgaacgaccacgtcaacgcgagccagtcgtccaacgacagcttcccgacggccatgcacatcgccgccacgcgcgcgatccagcagaagctgctgcccgcgctcgagacgctgcagcagacgttcgcgcgcaaggtcgatgcgttcgccgacatcgtcaaggtcgggcgcacgcacctgcaggatgccgtgccgctgacgctcggccaggagttctctggctatatgacgcaggtcgccgatgcccaatcgcggttgcagcaggccatgcttcgcgcgatgcctgtcgcgcagggcggcacggcggtgggcaccggcctgaacgcgccgccgggattcgccgccgcattcgcgcgcgcgctggccgactacaccggcctgccattcgagcccgcaccgaaccgctatgcgctgcaggccgcccacgatgcgctggccgacctgtccggcgccctcaatacgacggcctcatcgttcctgaagatcgcgcgcgatttcatgctgctgggctcgggcccgcgcgccggctttgccgaactgcagcttccggccaacgaaccgggttcgtcgatcatgccgggcaaggtcaatccgacgcaggcggaagcgctcgccatggtctgctgccgcgtgatcggaaaccacaccacggtcacgctggcgaatgcgctcggcacgctcgaactcaatgcgtacaagccggtgatcgtctacagcctgctgcagtcggtgacactgcttgcggatgccgcatcgagcttcgccgaacacatggtcgaaggcgtggaagccgaccgcgagcgcattgccgaactgctcgaacgctcgctgatgccggtaaccgcgctcaatccgcatatcggctacgacaaggctgcggaaatcgccaagctggccgtcaagcgcaacctgtcgctgcgcgaggcggcgattgcttcgggtcatgtaaccgaggagcagtttgcgcagtggatcgatctgaaggggatgaccaaagaggtgtaa

SEQ ID NO: 115271 - protein, 468 aa, Ralstonia eutropha JMP134
MSAPSSSATRIEKDSLGDVPVPADHLWGAQTERSRQNFRIGNEKMPPALIEAFAILKLCAARANRELDVLPQELAGAIEQAASEVIEGRWPDEFPLSVWQTGSGTQTNMNLNEVIANRAIQLLGGQVGSKKPVHPNDHVNASQSSNDSFPTAMHIAATRAIQQKLLPALETLQQTFARKVDAFADIVKVGRTHLQDAVPLTLGQEFSGYMTQVADAQSRLQQAMLRAMPVAQGGTAVGTGLNAPPGFAAAFARALADYTGLPFEPAPNRYALQAAHDALADLSGALNTTASSFLKIARDFMLLGSGPRAGFAELQLPANEPGSSIMPGKVNPTQAEALAMVCCRVIGNHTTVTLANALGTLELNAYKPVIVYSLLQSVTLLADAASSFAEHMVEGVEADRERIAELLERSLMPVTALNPHIGYDKAAEIAKLAVKRNLSLREAAIASGHVTEEQFAQWIDLKGMTKEV

SEQ ID NO: 115272 - DNA, 1386 bp, Ehrlichia canis str. Jake
  CDS (1)..(1386): transl_table=11
atgaggaaagaaagagatagtttgggtgaaatagaagttcctgcgtgtcattactggggtgcacaaacgcagcgttctattaataattttaaaattggatcagaaaaaatgcctcaacctttgataaaggcgttaggacttgttaagttggcagcagctcgtgttaatatgaagaatggtgatattgatgaagtaataggtagtgcaatttgtgatgctgcaaatgaagttgtaaatggtaaacttaatgatgaatttcctttggtaatttggcagactggttctggtactcaaactaacatgaatgttaatgaagtaatagcaaatcgtgcaattgaaatgttgggtggagaaaagggtagtaaatgtcctgtacatccaaatgatcatgttaattattctcaatcttccaatgatactttcccaacagcaatgcatattgcagctgttgttgaaactgaaaattctttattgccaagtttgaagaatttatatgaagctcttcatagtaagtctatagcatttcaaaatattgttaaagtgggacgtactcatcttcaagatgctactccattaactttaggtcaggtattttctggatatgcgtaccaaattttacagggtatgaataggataaaagctgcattaggtaatttgcttgagttggctcaaggtggtactgctgtaggtacaggtatcaattctagaaaacaatttgatattcattttgcaagtgaaattaaaaagttgactggttttaattttgtatcttctattaataagtttgaagcgttagctacgcacgatgcattagttgagtttagtggtgtattgaatgttattgctgtaagtttgatgaaaatagcaaatgatattagattgcttggttcaggaccaagatgtggaataggagagattgtattacctgctaatgaacctggctcttctataatgccaggtaaggtaaatccaactcaatgtgaagctatgactatggtgtgtgctcaggttatgggtaatcatacaactgtgactgttgcaggatcaaatggtcattttgaattaaatgcgtttaagcctgttattatttataacgttttacaatccattaagttattatctgatgttagcattaatttttcacaaaaatgtgttcaaggcattaaagcggatacaaagcgtatttcatttttgttgaatcagtctttgatgttagtaactgcattgaataagcatataggttatgataatgcagcaaaaatttcaaaaactgcttttgatgagggaataacattaaaagatgctgcaatgaaacttaacttgataagtgaagaagaatttgataggattgttaatccagaaaacatgatacatcctacaaattaa

SEQ ID NO: 115273 - protein, 461 aa, Ehrlichia canis str. Jake
MRKERDSLGEIEVPACHYWGAQTQRSINNFKIGSEKMPQPLIKALGLVKLAAARVNMKNGDIDEVIGSAICDAANEVVNGKLNDEFPLVIWQTGSGTQTNMNVNEVIANRAIEMLGGEKGSKCPVHPNDHVNYSQSSNDTFPTAMHIAAVVETENSLLPSLKNLYEALHSKSIAFQNIVKVGRTHLQDATPLTLGQVFSGYAYQILQGMNRIKAALGNLLELAQGGTAVGTGINSRKQFDIHFASEIKKLTGFNFVSSINKFEALATHDALVEFSGVLNVIAVSLMKIANDIRLLGSGPRCGIGEIVLPANEPGSSIMPGKVNPTQCEAMTMVCAQVMGNHTTVTVAGSNGHFELNAFKPVIIYNVLQSIKLLSDVSINFSQKCVQGIKADTKRISFLLNQSLMLVTALNKHIGYDNAAKISKTAFDEGITLKDAAMKLNLISEEEFDRIVNPENMIHPTN

SEQ ID NO: 115274 - DNA, 1497 bp, Methanosarcina barkeri str. Fusaro
  CDS (1)..(1497): transl_table=11
ttgccgattgacgtggatacacaacgaaaaaatgccgaacaagtgccttcaatcctcgacctgcctgtcggcactggagctactggcaagcgaaaagaaagcgattctttaggggaagttgaggttccagccgaccattactggggggctcagacccagaggtctctgattcacttctccatcggtgacgactacatgccaaaggaggtctattacgcttatgggtatgtgaaaaaggcatctgctctggtcaacgaagccgccggaataataccgccgtggaaagctgaattgatagcaagagttgcagatgaagttattgcaggtaaactcgacagcgaattcccgctctatgtctggcagactggctcaggcactcagtcgaatatgaacgtgaatgaagtcatcagcaatcgcgccatccagctcgtgggtggaagcctcggcagcaagtaccctgtccatcctaatgacgatgttaatatgagtcagtcgtctaacgacacctttcccacggccatgcacattgcaactgtgctcgaattcagcaaccgcctcattcccgcagctaccgctcttgaagagtcaatatgggctaaagcacgggaatgggtggatatcatcaagatcggtcgaacacatcttcaggacgcaacaccacttacagtgggtcaggagtggtctggctatgccacacaactcaatgacgcgctggcgtttgttaaacaatctctccagggattatatcggttggccatcggaggcactgcggtaggaactggcatcaataccccaccagacttcggtgaaaaggttgcaggtgagatttccaggctcacaggtcatccattcgttacagctccaaataaattcgcagctcagggctcccttgatgcaatggtaaactcaagcgcagccttgcgtgcattagcagtagcactgatgaagatcgcaaatgacctgcgatggcttggttcgggaccgaggtcggggatccacgagcttatcctccccagtaacgagcctggcagcgcgatcatgcctgggaaagtcaatccgactcaggaggaagccatgctaatggtttgcatccaggtaattggtgaagacaatgccgtcgcatttgccgggttacagggaaacttcgagcttaacgcaatgtgcccgataatcataaataatgtcttacattctgcacgtattctcggtgatgcttgcgtaaagttctgtgagtacggaatcaaggaaatcatgctcgaccggagtcgtatagacaaatttgtggacgactccctcatgttagtgacagcacttagccctgttataggctacgacaaggcttccgcaattacccagcgagcactggacgagaatactacactgagggaagctgcagtgaaaggaggtttcatcagcgcgaaggattttgacagaattgtggatccaaagaagatggtagggaatccgcgacacgacctgaagctggcttcagagtag

SEQ ID NO: 115275 - protein, 498 aa, Methanosarcina barkeri str. Fusaro
MPIDVDTQRKNAEQVPSILDLPVGTGATGKRKESDSLGEVEVPADHYWGAQTQRSLIHFSIGDDYMPKEVYYAYGYVKKASALVNEAAGIIPPWKAELIARVADEVIAGKLDSEFPLYVWQTGSGTQSNMNVNEVISNRAIQLVGGSLGSKYPVHPNDDVNMSQSSNDTFPTAMHIATVLEFSNRLIPAATALEESIWAKAREWVDIIKIGRTHLQDATPLTVGQEWSGYATQLNDALAFVKQSLQGLYRLAIGGTAVGTGINTPPDFGEKVAGEISRLTGHPFVTAPNKFAAQGSLDAMVNSSAALRALAVALMKIANDLRWLGSGPRSGIHELILPSNEPGSAIMPGKVNPTQEEAMLMVCIQVIGEDNAVAFAGLQGNFELNAMCPIIINNVLHSARILGDACVKFCEYGIKEIMLDRSRIDKFVDDSLMLVTALSPVIGYDKASAITQRALDENTTLREAAVKGGFISAKDFDRIVDPKKMVGNPRHDLKLASE

SEQ ID NO: 115276 - DNA, 1416 bp, Anabaena variabilis ATCC 29413; identical to SEQ ID NO: 45192
  CDS (1)..(1416): transl_table=11

SEQ ID NO: 115277 - protein, 471 aa, Anabaena variabilis ATCC 29413; identical to SEQ ID NO: 45193

SEQ ID NO: 115278 - DNA, 1395 bp, Pseudomonas fluorescens PfO-1
  CDS (1)..(1395): transl_table=11
atgagccgtatcgaaaccgacagcctgggccagatcgaggtcccggacgacgcttactggggcgctcagacgcaacgctcgctgatcaacttcgccatcggtcaggaacgcatgcccttgccggtactgcacgcgctggccctgatcaagaaagccgcggcccgggtcaacgaccgcaacggcgacctgcccgccgacattgcccgcctgatcgaacaggccgccgacgaagtgctcgacggccagcatgacgaccagttcccgctggtggtctggcagaccggcagcggcacgcaaagcaacatgaacgtcaacgaagtgattgccgggcgcgccaacgaactggccggcaacccgcgcggcggcaagacgccggtgcaccccaacgatcacgtcaaccgctcgcagagctccaacgactgcttccccaccgccatgagtatcgccaccgcgcaagcggtgcagacccaactgctgccagcgatcgccgagctgtcgggcggactggccgaactttcggcgcgacacatgaagctggtgaagaccggccgcacccacatgatggacgccacgccgatcacctttggtcaggagctctccggattcatagcgcagctggattacgccgaacgggcgattcgcgcggcgttgccggcggtctgcgaactggcgcagggcggcactgccgtcggcaccgggctcaactcgccccacggcttcggcgaagcgattgccgctgaactggcggcgttgtccggcctgccgttcgtcaccgcgccgaacaagtttgccgcccttgccggtcatgaaccattgaccaccctttccggcgccctgaaaaccctcgccgtggcgctgatgaaaattgcaaacgatctgcgcctgctgggctccggcccacgagccgggttcgccgaagtgcgcctgccggccaacgaaccgggcagctcgatcatgcccggcaaggtcaaccctacccagtgcgaggcgttgtcgatgctggcctgtcaggtgctgggcaacgacgtggcgatcggtttcgccgccagccagggtcacctgcaactgaacgtgttcaaaccggtgatcatccacaacctgctgcaatcgatccgcctgctggctgatggctgcagcaacttccagcagcattgcatcgccggtcttgagccggatgccgacgtcatggcgaaacatctggaacgcggcctgatgctggtgacggcgctcaacccgcacatcggctacgacaagtcggcggaaatcgccaagaaagcctacagcgaaggcaagaccctgcgcgaagcggcgctggagctgggttatctgaccgatgaagagttcgatgcctgggtgcggccggagaacatgatcgaagccggcgccaagggctga

SEQ ID NO: 115279 - protein, 464 aa, Pseudomonas fluorescens PfO-1
MSRIETDSLGQIEVPDDAYWGAQTQRSLINFAIGQERMPLPVLHALALIKKAAARVNDRNGDLPADIARLIEQAADEVLDGQHDDQFPLVVWQTGSGTQSNMNVNEVIAGRANELAGNPRGGKTPVHPNDHVNRSQSSNDCFPTAMSIATAQAVQTQLLPAIAELSGGLAELSARHMKLVKTGRTHMMDATPITFGQELSGFIAQLDYAERAIRAALPAVCELAQGGTAVGTGLNSPHGFGEAIAAELAALSGLPFVTAPNKFAALAGHEPLTTLSGALKTLAVALMKIANDLRLLGSGPRAGFAEVRLPANEPGSSIMPGKVNPTQCEALSMLACQVLGNDVAIGFAASQGHLQLNVFKPVIIHNLLQSIRLLADGCSNFQQHCIAGLEPDADVMAKHLERGLMLVTALNPHIGYDKSAEIAKKAYSEGKTLREAALELGYLTDEEFDAWVRPENMIEAGAKG

SEQ ID NO: 115280 - DNA, 1395 bp, Rhodobacter sphaeroides 2.4.1
  CDS (1)..(1395): transl_table=11
atgactgcaacccgcaccgagaccgacagctttggcccgctcgaggttcctgccgacaaatactggggcgcccagacgcagcggtcgatccagaacttcccgatcggctgggagaagcagccggtggccatcgtccgggccctgggcgtgatcaagaaggcctgcgcgctcgtcaatgtggcccagggcgacatgcccgaggagctgggtcaggccatcgccgctgccgcgaccgaagtgatcgagggccgcttcgacgacaatttcccgctcgtcgtctggcagaccggctcgggcacccagtcgaacatgaacgcgaacgaggtgatctcgaaccgcgccatcgagatgctgggcggcacgatgggctcgaagaagcccgtccatccgaacgaccatgtgaacatgggccagtcctcgaacgacactttccccaccgccatgcatgtggccatcggcatgatggcgcgcgacgtgctgctgccggggctcgagaagctccatgcagcccttgtcgccaagtcggaagagttcaaggacatcatcaagatcggccgcacccacacccaggatgcgacgccgctgacgctcgggcaggaattctcgggctatgccaagcaggtcgagaagggcatcgcccgcgtgaaggcctgcctccccgacatctacgagctcgcgcagggcggcacggcggttggcacgggcctgaacacccggcagggctgggacagccgcgtggccgcgaagatcgccgagatcacgggcctccccttcgtcaccgccgaaaacaagttcgaggcgctggccgcgcacgatgcgatggtcatgttctcgggcgcgctgaagacggtcgcggcctcgctcttcaagatcgccaacgacatgcggcttctgggctcgggtccgcgctcgggtctgggcgagctgatcctgcccgagaacgagcccggctcctcgatcatgccgggcaaggtgaacccgacgcaggccgaggcgctgaccatggtctgtacccatgtgatgggcaatgacgcggcgatcggcttcgcgggcagccagggccacttcgagctgaacgtctacaatccgatgatgtcctacaacgtgctgcaatcgatgcagcttctgggcgatgctgcgggcagcttcaccgacaacatggtggtcggcacgcaggccaacgtggcgcggatcgacaagctgatgaaggagagcctgatgctggtgacggcgctggcccccaccatcggctatgacaatgccaccaaggtcgccaagaccgcgcacaagaacggcacgacgctgcgcgaggaggccatcgccctcggcctcgtcgatgccgagaccttcgaccgcgtcgtccgccccgaggacatgatcgggccgaagggctga

SEQ ID NO: 115281 - protein, 464 aa, Rhodobacter sphaeroides 2.4.1
MTATRTETDSFGPLEVPADKYWGAQTQRSIQNFPIGWEKQPVAIVRALGVIKKACALVNVAQGDMPEELGQAIAAAATEVIEGRFDDNFPLVVWQTGSGTQSNMNANEVISNRAIEMLGGTMGSKKPVHPNDHVNMGQSSNDTFPTAMHVAIGMMARDVLLPGLEKLHAALVAKSEEFKDIIKIGRTHTQDATPLTLGQEFSGYAKQVEKGIARVKACLPDIYELAQGGTAVGTGLNTRQGWDSRVAAKIAEITGLPFVTAENKFEALAAHDAMVMFSGALKTVAASLFKIANDMRLLGSGPRSGLGELILPENEPGSSIMPGKVNPTQAEALTMVCTHVMGNDAAIGFAGSQGHFELNVYNPMMSYNVLQSMQLLGDAAGSFTDNMVVGTQANVARIDKLMKESLMLVTALAPTIGYDNATKVAKTAHKNGTTLREEAIALGLVDAETFDRVVRPEDMIGPKG

SEQ ID NO: 115282 - DNA, 1395 bp, Burkholderia sp. 383
  CDS (1)..(1395): transl_table=11
atgaacgaagcagttcggatggaacgcgatacgtttggcgagatcgccgtgccggccgaccggctctggggcgcgcagaccgagcgctcgctgcagaatttccggatctcgaccgagaagcagtcgcccgagctgatccacgcgctcgcgatcgtcaagcgcgccgcagcggccgtgaaccagtcgctcggcgtgctggccgacgacaaggcgcgcgcgatcatcgacgcggccgacgagatcatcgccggcaagcatccgcgtgaattcccgctcgccgtgtggcagacgggctccggcacgcagaccaacatgaacctcaacgaggtgatcgcgaatcgcgcgagcgaactgatgggcggcgagcgcggcgaagcgcgcaaggttcatccgaacgacgacgtcaaccgcggccagtcgtcgaacgacgtgttcccgaccgcgatgcacgtcgcggccgcgtacgcgatcgtcaaccacctgctgccggcgctgcgtacgctgcgcacgacactcgacgcgaagtcgaaggcgttcgcggacatcgtgaagatcggccgcacgcacctgcaggacgcgacgccgctcacgctcggccaggagttttccggctacgtcgcgcagctcgaccagagcatccgtcacgtcgaatctgcgctgccgcacctgtacgaactcgcgctcggcggcacggcggtcggcacggggctgaacgcgcatccggagttcgcggtgcgcgtcgccgatgaaatcggccggctcgcgaagctgccgttcgtgacggcgccgagcaagttcgaggtgatggcggccgccgacgcgctggtgttcgcgcacggcgcgctgaagacggtcgcagccggcctgatgaagatcgcgaacgacgttcgctggctcgcgagcgggccgcgctgcgggctcggcgagctgtcgattcccgagaacgagccgggcagctcgatcatgccgggcaaggtgaacccgacgcagtccgaagccgtgacgatgctgtgctgccaggtgttcggcaacgacgtcgcggtcaacgtcggcggcgcgagcggcaatttcgagctgaacgtgttccggccgatgatcgcgcacaacgtgctgcaatcggtgcggctgctcgccgatggcgcacagagcttcaacgatcactgcgcggtgggcatcgagccgaaccgctcgcggatcgacctgctgctgaacgaatcgctgatgctcgtgacggcgctcaatccgcacatcggctacgacaagtcggcgcagatcgcgaagaaggcgcacaaggaaggcacgacgctgaaggcggccgcgctcgcgctcggctacctgaccgaggcggaattcgatgcgtgggtacgacccgaacagatgatcgggtcgcagtaa

SEQ ID NO: 115283 - protein, 464 aa, Burkholderia sp. 383
MNEAVRMERDTFGEIAVPADRLWGAQTERSLQNFRISTEKQSPELIHALAIVKRAAAAVNQSLGVLADDKARAIIDAADEIIAGKHPREFPLAVWQTGSGTQTNMNLNEVIANRASELMGGERGEARKVHPNDDVNRGQSSNDVFPTAMHVAAAYAIVNHLLPALRTLRTTLDAKSKAFADIVKIGRTHLQDATPLTLGQEFSGYVAQLDQSIRHVESALPHLYELALGGTAVGTGLNAHPEFAVRVADEIGRLAKLPFVTAPSKFEVMAAADALVFAHGALKTVAAGLMKIANDVRWLASGPRCGLGELSIPENEPGSSIMPGKVNPTQSEAVTMLCCQVFGNDVAVNVGGASGNFELNVFRPMIAHNVLQSVRLLADGAQSFNDHCAVGIEPNRSRIDLLLNESLMLVTALNPHIGYDKSAQIAKKAHKEGTTLKAAALALGYLTEAEFDAWVRPEQMIGSQ

SEQ ID NO: 115284 - DNA, 1434 bp, Synechococcus sp. CC9605
  CDS (1)..(1434): transl_table=11
atgatcgaagcatcactcgatcgcgccgaagatcagatgacgcagccattcaggattgaaaccgacagcctgggtggcattgaggtggcgtccgaagctctctggggagcccagacccagcgctcgcttcagaacttcgccatcagcgacgaacgaatcccgctcgagatcatccaggctctggcctggatcaagcgctcctgcgccacggtgaacggccagcatgggctcctgagctctcaacaggttgaactgatctgcacggcggccgatgcgattgccgctggccagcacaacaatcagttcccgctgcgggtctggcagaccggaagcgggacccagaccaacatgaacgtcaacgaggtgatcagcaatctggcgtctcaggcttcaggcaccgccctcggcagccacagcccagtgcacccgaatgaccacgtcaatcgatcgcagtccaccaatgatgtgtttcccgcggccatccacgttgccgcggccaagcacctgaaggagggactgctgccggcgctcgatgccctggtgcagtccttggataccaatgcccaggcctggatgccgataatcaagattggccgcacccatctgcaggatgctgtgcccctgcgtcttggtgatgaagtgggcgcctggcgggatcaactcaaacaagcccaggcatggctggaaggctgtctggtgagcctcggcgacctcccgcttgggggcaccgcagtcggcacagggttgaacacgccaccgggcttccgtcatgccgtagcggaagagctgagccgggtcgctggcgtcgaggttcgtcccgctgagaacctcttcgcggtgatggccggccatgacgccctcgtccatgcgatgggccaactgcgcctgctggcggtggccctgctccgcatcgctaacgacgtgcgtctgctggcatgcggccctcgagctgggctaggcgagttgcagctgcccgcaaatgaacccggcagctcgattatgccggggaaaatcaatcccacccagtgcgagtccatggccatggtctgcacccaggtgatcgggctcgatggcgccgtggcagccgccggagcaggcggccatctgcagatgaatgtctacaagcccttgatcggcttcaacctgctgcagtcgatccgcatgctcaaggacgccatgaccagctaccgccagaacctggtggagggcttggagccagatcgcgagcaaattcagcggttcgtcgatcgctccctgatgctggtcaccgccttaaccccgagcatcggttacgagaaggccagtgccatcgctcagcatgcccaccatcaggggctgacgctgaagcaggcggccctggagcttggccacatcagcgaagccgactttgatcagcaggtgaatcccggcgccatggccgctccagaggcctga

SEQ ID NO: 115285 - protein, 477 aa, Synechococcus sp. CC9605
MIEASLDRAEDQMTQPFRIETDSLGGIEVASEALWGAQTQRSLQNFAISDERIPLEIIQALAWIKRSCATVNGQHGLLSSQQVELICTAADAIAAGQHNNQFPLRVWQTGSGTQTNMNVNEVISNLASQASGTALGSHSPVHPNDHVNRSQSTNDVFPAAIHVAAAKHLKEGLLPALDALVQSLDTNAQAWMPIIKIGRTHLQDAVPLRLGDEVGAWRDQLKQAQAWLEGCLVSLGDLPLGGTAVGTGLNTPPGFRHAVAEELSRVAGVEVRPAENLFAVMAGHDALVHAMGQLRLLAVALLRIANDVRLLACGPRAGLGELQLPANEPGSSIMPGKINPTQCESMAMVCTQVIGLDGAVAAAGAGGHLQMNVYKPLIGFNLLQSIRMLKDAMTSYRQNLVEGLEPDREQIQRFVDRSLMLVTALTPSIGYEKASAIAQHAHHQGLTLKQAALELGHISEADFDQQVNPGAMAAPEA

SEQ ID NO: 115286 - DNA, 1410 bp, Geobacter metallireducens GS-15
  CDS (1)..(1410): transl_table=11
gtgacgtttcggattgagaaggataccctcggcgacgtgcaggtcccggccggcgcctactacggtgcccagacggccagggccgtggccaactttcccctctcggggctccggccccatccggccctggttcgggccacggtcgtcataaaaaagagcgccgcccgggccaatatgaccacggggaggctcgacccccggctcggcgaggccatcgtccgggccgccgacgaggccctcgccggcgacttcgatccccacttcgtggtggacccgttccaggccggggccggcacctcccacaatatgaacgtgaacgagatcctcgccaaccgggccaacgaactcctggggggagagcgcggcgcctacgcgccggtccaccccaacgaccacgtgaacatggcccagtccaccaacgacgtctttcccacggccatgcggctggcgtctctttcactcgtggagaagctgcgtccgggactggaggggctcgtggcggccctgcgggggaaggggcgggagttcgacgccgtcctcaagagcggccggacccacctccaggacgcggtgccgattcgcctcggccaggagttcgaggcgtgggccgtggcaatggagaaaaacctggcggggatcgacgccgcgctgccggggctccgggaactggggatcggcggcaccgccgtcggcaccggcatgaacgccgaggcggcctacatcgatctggtggtggcggaactggcccgggaaaccgggtttcctcttcatcgcgggacgaacctggtggagcggatgcagaacatggaccccttcgtggctctttcgtcggccctcaaggggcttgccgcgaacctcgtccgcatcgccaacgacctgcggctcctctcctccggcccccggacggggctcgccgagatcgcgcttccggcgatccagcccggctcctccatcatgccggggaaggtgaacccgagcatggccgaggcaaccgacatggttgccttccaggtgatgggggccgatgcggtcataaccctggcagcccaggcgggacagctggagctgaacgtgatgatgccggtcatcgccttcaatcttctcttcagcctggagatcctgaagaacacggtgccaaggctggtccaggcgtgcatcgccggcatcaccgccgaccgggagcgctgccgccggtacctggaccagtcggtggggctcgccacggtgctggccccctacgtcggctacgccgccgccgccgaggtggcaaaggagtcgacggccacgggacggagcatccgggagatcgtggaggagcggcagctgctgacggccgacaagctcgcggagattctcgacccccttccccttacgagccccggggttccgggagagaagcataacgattaa

SEQ ID NO: 115287 - protein, 469 aa, Geobacter metallireducens GS-15
MTFRIEKDTLGDVQVPAGAYYGAQTARAVANFPLSGLRPHPALVRATVVIKKSAARANMTTGRLDPRLGEAIVRAADEALAGDFDPHFVVDPFQAGAGTSHNMNVNEILANRANELLGGERGAYAPVHPNDHVNMAQSTNDVFPTAMRLASLSLVEKLRPGLEGLVAALRGKGREFDAVLKSGRTHLQDAVPIRLGQEFEAWAVAMEKNLAGIDAALPGLRELGIGGTAVGTGMNAEAAYIDLVVAELARETGFPLHRGTNLVERMQNMDPFVALSSALKGLAANLVRIANDLRLLSSGPRTGLAEIALPAIQPGSSIMPGKVNPSMAEATDMVAFQVMGADAVITLAAQAGQLELNVMMPVIAFNLLFSLEILKNTVPRLVQACIAGITADRERCRRYLDQSVGLATVLAPYVGYAAAAEVAKESTATGRSIREIVEERQLLTADKLAEILDPLPLTSPGVPGEKHND

SEQ ID NO: 115288 - DNA, 1479 bp, Desulfovibrio desulfuricans G20
  CDS (1)..(1479): transl_table=11
atgccgcacgtaccatgtgcagacgcaccgccgcaaaaatattccccgccgcaccaatgtcaccatgaaggagaagccatgcccccagccacccgtacggaacatgacagcatgggcgcagtggaagtgcccgccgaccgctactggggcgcgcagacgcagcgctcgctcaaatatttcgccatcgggcaggacaccatgcccgaagaaatcatccgcgctttcgggctgctgaaaaaggctgccgccattgccaaccgtgatctgggcagactggacccggaactgtgcggtttcatatgcgccgcagcggatgaagtagccgacggaaaactttccggtcactttccgctcaaggtctggcagacgggcagcggcacgcagaccaacatgaatgtgaacgaggtcatcgccaaccgtgccattgagctgagcggaggcattcccggttccaaatctcccgtgcaccccaatgatcatgtgaacatgtcacaatcatccaacgacacatttcctgcggccatgcacatagccgcagccacagccctttcccgcgaactggtgcctgcggtgcgcacgctgcgcaacgcgctggcacaaaaaagccacgactggcagtcggtggtcaagctgggccgcacacatctgcaggatgccgtgcccatgacgctggggcaggaattttccggatacacagctcttcttgatgacggactggaaagaatggaagcggtgatgccccatctgctgcggctggcgctgggcggcacggcagtggggacgggtcttaacgctccgcgtggttttgcgggcatggctgccgcgggtgttgcgcgcttcacgggtctgccttttgtaccggcacccaatttttttgccgtgctttcagcccacgatgccgtgtgcatggccagcggagcgctgcgcacccttgccggttcactgatgaaaatagccaacgacatccgctggctggcatcggggccgcgttgcggcatcggcgaactcagactgcccgccaacgaacccggatcgtccatcatgcccggcaaggtcaaccccacgcagtgcgaagctctgaccatggtggccgtgcaggtgatggggctggacgccgccaccggcatagccggttcgcagggcaatttcgagctgaacgtcttcaagccgctgatgattttcaatctgctgacatccgtgcgcctgctgacagacggctgccgttcattcaccgcccatgcagtggaaggcatgcagcctgacatgcagcgtatcagcgaccatctgggcagatcgctcatgcttgtgactgcgttgtcgcccgtcatcggctacgacaatgccgccagagcggcgcaccacgcacatgcgcggggcacaacgctcaaagaggcctgtctggaactggaacttatttcggcagaagaatttgacgctgccgtggaccccatggtcatggcagttccccatggcgcatga

SEQ ID NO: 115289 - protein, 492 aa, Desulfovibrio desulfuricans G20
MPHVPCADAPPQKYSPPHQCHHEGEAMPPATRTEHDSMGAVEVPADRYWGAQTQRSLKYFAIGQDTMPEEIIRAFGLLKKAAAIANRDLGRLDPELCGFICAAADEVADGKLSGHFPLKVWQTGSGTQTNMNVNEVIANRAIELSGGIPGSKSPVHPNDHVNMSQSSNDTFPAAMHIAAATALSRELVPAVRTLRNALAQKSHDWQSVVKLGRTHLQDAVPMTLGQEFSGYTALLDDGLERMEAVMPHLLRLALGGTAVGTGLNAPRGFAGMAAAGVARFTGLPFVPAPNFFAVLSAHDAVCMASGALRTLAGSLMKIANDIRWLASGPRCGIGELRLPANEPGSSIMPGKVNPTQCEALTMVAVQVMGLDAATGIAGSQGNFELNVFKPLMIFNLLTSVRLLTDGCRSFTAHAVEGMQPDMQRISDHLGRSLMLVTALSPVIGYDNAARAAHHAHARGTTLKEACLELELISAEEFDAAVDPMVMAVPHGA

SEQ ID NO: 115290 - DNA, 1386 bp, Prochlorococcus marinus str. MIT 9312
  CDS (1)..(1386): transl_table=11
atgacaaaaaactttaggattgaaaaagatagtatgggaactataaaggttcccatagaagctttgtggggagctcaaacacaaagatcgataataaatttttctattggagaagaattaattccaattgagttaatttattcactaaccctcataaaaaaagctgcttcaattgcgaatttcaatttaggtttaatcgataaaagaaaaaaagatttgattgtagaggcatgtacagaaatacttgatgggattcatgattcacagtttcccttaaaagtttggcaaacaggcagtggcacgcaaacaaatatgaatgtaaatgaggtaatttcaaatattgcagcattaagaacaaattcagagcttggtagtcatcaaccaattcatccgaatgatgatgtaaataaatctcagtcaactaatgatacttttcctgctgctattcaaatatctgttgttaatgaaataatcaaaaatttagttccaacgataagagaacttacgaagatccttgataaaaaaagtgaagaatggaaagaccttataaagataggaagaacccattttcaagatgcagtgccccttacttttgggcaagaaatatcaggatggtcagagcaacttaaagatgctgagaatgcaattattatgagcctaaatgaattgtatttcttacctctgggaggaactgcagttggtacagggattaattgtccaaaaggattttgtgaagaggcaataaaatcaatttccgatgatactaatctaatgttctataaatcaaaaaataatttttctatcatggcctcgcatgatcgtctagctcaagtaatgagtcagataaaaatattagcaggtgcattatttaaaatttcaaatgatataaaaattctatcttctggtccaagatcaggaatatatgaattaattatccctcaaaatgaacctggaagttctatcatgccgggcaaagtgaatccgactcaatgcgaagccttatcaatggtttgcactcagataatgggtcttgaatatgcagtttcaatggcaaattctagcggtactttacagatgaatgaatataagcctttgattggatttaatattcttacaagtttaaaattacttaaaaatgcaatagaaaactttagaataaaattagttgatgggatggaacctaatcaaaagaaaatgaagttaaatttagaaaattcactaatgttggttacagccatagtgccaaaagttggttatgaaaaagcagctgaaattgcaaaccttgccttcaaagaatcactaaatttaaaagaggcaacacttaaattaggttatttaaacgaagatgaatttgatgaagcaatgaatattaattcaatgatttga

SEQ ID NO: 115291 - protein, 461 aa, Prochlorococcus marinus str. MIT 9312
MTKNFRIEKDSMGTIKVPIEALWGAQTQRSIINFSIGEELIPIELIYSLTLIKKAASIANFNLGLIDKRKKDLIVEACTEILDGIHDSQFPLKVWQTGSGTQTNMNVNEVISNIAALRTNSELGSHQPIHPNDDVNKSQSTNDTFPAAIQISVVNEIIKNLVPTIRELTKILDKKSEEWKDLIKIGRTHFQDAVPLTFGQEISGWSEQLKDAENAIIMSLNELYFLPLGGTAVGTGINCPKGFCEEAIKSISDDTNLMFYKSKNNFSIMASHDRLAQVMSQIKILAGALFKISNDIKILSSGPRSGIYELIIPQNEPGSSIMPGKVNPTQCEALSMVCTQIMGLEYAVSMANSSGTLQMNEYKPLIGFNILTSLKLLKNAIENFRIKLVDGMEPNQKKMKLNLENSLMLVTAIVPKVGYEKAAEIANLAFKESLNLKEATLKLGYLNEDEFDEAMNINSMI

SEQ ID NO: 115292 - DNA, 1392 bp, Synechococcus elongatus PCC 7942
  CDS (1)..(1392): transl_table=11
atgactgagactgcgaatcaacgccgtgaaagcgacagcatgggtgaagtgctggtgcccaccgatcgctattggggtgcccaaactcagcgatcgctgcactatttctcgatcggtcaagatcgaatgcccattgaagtctgtcatgctctggcgattgcgaagaaagcctctgcccttgccaatcgagatttgggtgttttatcggcagaaaaagctgatctgattgctcaagctgctgatgaaattattgcaggtcaactagatgaccatttcccgctttatgtctggatgacgggcagcggcacgcaagccaacatgaacgttaatgaggtgattgccaatcgggcgattgaaatggctgggggtgtacttgggagtaaaacacccattcatcccaatgatgatgtcaaccgatcgcagtcctcgaatgatgtctttccaaccgcaatgcatattgctgcagctcaagcgatcggccggcaactactgcccagtatcgaacgactagaacagagtctccaagccaaagttgatgaatggcaaggcattgtcaaaattggccggacccacctgcaagatgcagtgccattaacgctgggtcaggagttctccggttttgtggccatgctagctgaaaatcgtcagcgcctacataatgctttgcaagaactctatcccctagctttgggtggaacagcggttggtactggtctgaatgcgccgactggatttgatgttgcagtcgctgattacatcgcgcaattgacaggacttccgtttgtcacggcaaccaataagtttgcgcaaattggtgcccatgatgcatttgttgctttaagtggcagcttgcgaggactagcagtctcgctctacaaaattgctaatgatattcgcttgctagcctgcgggccacgctgtggttttaacgagttgagtttgcctgcaaatgagcctggttcatcaatcatgcccggcaaagtgaatccgactcagtgtgaagcgttagcaatggttgccgtgcaggtcatgggctatgacgctgcggtcgctttcgctggggctagtggttatttagaactgaatgtctataagccgttgatggtttataacgttctggaatccattcgaattctctcggatgctagtgataacttccgacgtttcaccgtggaaggaatgacagcgaataccgaccaaatcaatacttacttagagcgatcgctgatgttagtgacagcgctgacccctgcgatcggttacgaccaagcagctaaagtagccaagtatgcttttgagaaaaatctcagcctcaaggaagcgtgtctagaactgggttgtattagttctgaagaattcgatcgctgggtggacccagcccaattagtgtga

SEQ ID NO: 115293 - protein, 463 aa, Synechococcus elongatus PCC 7942
MTETANQRRESDSMGEVLVPTDRYWGAQTQRSLHYFSIGQDRMPIEVCHALAIAKKASALANRDLGVLSAEKADLIAQAADEIIAGQLDDHFPLYVWMTGSGTQANMNVNEVIANRAIEMAGGVLGSKTPIHPNDDVNRSQSSNDVFPTAMHIAAAQAIGRQLLPSIERLEQSLQAKVDEWQGIVKIGRTHLQDAVPLTLGQEFSGFVAMLAENRQRLHNALQELYPLALGGTAVGTGLNAPTGFDVAVADYIAQLTGLPFVTATNKFAQIGAHDAFVALSGSLRGLAVSLYKIANDIRLLACGPRCGFNELSLPANEPGSSIMPGKVNPTQCEALAMVAVQVMGYDAAVAFAGASGYLELNVYKPLMVYNVLESIRILSDASDNFRRFTVEGMTANTDQINTYLERSLMLVTALTPAIGYDQAAKVAKYAFEKNLSLKEACLELGCISSEEFDRWVDPAQLV

SEQ ID NO: 115294 - DNA, 1464 bp, Rhodospirillum rubrum ATCC 11170
  CDS (1)..(1464): transl_table=11
atgcccgcgtcgcctcccccgcccgcccccgccacccgccgcgaaaccgacagcatgggcgccatcgacgtcccggccgatcgctattggggggcgcagacccagcgctcgcttgagcatttctcgatcggcatcgagcgcatgcccgaagccctgatccgctccttcggcaccttgaaagaggcggccgccttcgccaaccgctcgcttggccagcttgacgagacgcgcgccgatttgatcgtgaccgccgcccgcgaggtcgccgagggacggctgtcggagcatttccccctgcgggtctggcagaccggcagcggcacccagaccaacatgaacgtcaacgaggtgatcgccaatcgggcgattgaactaagcggcggcgtgctgggctcgaaaacgccgatccaccccaatgatcacgtcaatatggcgcaatcgtccaatgacaccttccccaccgccatgcatatggcggcggtcacggcgctgtcgtgcacgctgctgccgcaggtgcgcggcctgcgcgccagccttgcgcaaaaggcgaagcttttcgcgcccatcgtcaagatcggccgcacccacctgcaagacgccgtgcctttaaccctggggcaggagttttcgggctatgtcgcccagctcgatcaggcgatcgaccgcctggaagccaccctgcccggcttgcgcgaactggccttgggcggcacggcggtgggcaccggtctcaacacccatccggccttcgccgtccgcgccatcgcccgcatcagcgaaatcaccggccatcccttccgtcaggccgataatctgttcgccgccctggccgcccatgatgccatggtcgccgccagcgccggtctgcgcggtctggccgtggccttgaccaagatcgccaatgatatccgctggctgggcagcggtccgcgctgcgggctgggcgaattgatcctgcccgagaatgagccggggtcgtcgatcatgccgggcaaggtcaatcccacccaatgtgaaagcctgctgatgatctgccttcaggtgatggccgccgatggcgccgtggccatggccgggtcccagggcaatttcgaactcaatgtccacaagccgctgatcgcctataacgtcttgcaggcgatcaccctgctcgccgatggctgcaaggctttcacccacttcctggtcgagggcctgagcgccgacgagacgcggatcgccgaaatggtcgatcgttcgctgatgctggtgacggcgcttaccccgtcgatcggctatgaccgcgccgccgccatcgccaaggccgcccatgccaacggcaccaccctgcgcgaggaaaccctggccagcggcctgatggacgacgcggccttcaccgccgccgttcagcccgcccgcatggcccatccccatgggacagccgacgacatcgacaaggacggcggagggccgcgccaaggctag

SEQ ID NO: 115295 - protein, 487 aa, Rhodospirillum rubrum ATCC 11170
MPASPPPPAPATRRETDSMGAIDVPADRYWGAQTQRSLEHFSIGIERMPEALIRSFGTLKEAAAFANRSLGQLDETRADLIVTAAREVAEGRLSEHFPLRVWQTGSGTQTNMNVNEVIANRAIELSGGVLGSKTPIHPNDHVNMAQSSNDTFPTAMHMAAVTALSCTLLPQVRGLRASLAQKAKLFAPIVKIGRTHLQDAVPLTLGQEFSGYVAQLDQAIDRLEATLPGLRELALGGTAVGTGLNTHPAFAVRAIARISEITGHPFRQADNLFAALAAHDAMVAASAGLRGLAVALTKIANDIRWLGSGPRCGLGELILPENEPGSSIMPGKVNPTQCESLLMICLQVMAADGAVAMAGSQGNFELNVHKPLIAYNVLQAITLLADGCKAFTHFLVEGLSADETRIAEMVDRSLMLVTALTPSIGYDRAAAIAKAAHANGTTLREETLASGLMDDAAFTAAVQPARMAHPHGTADDIDKDGGGPRQG

SEQ ID NO: 115296 - DNA, 1431 bp, Moorella thermoacetica ATCC 39073; identical to SEQ ID NO: 45196
  CDS (1)..(1431): transl_table=11

SEQ ID NO: 115297 - protein, 476 aa, Moorella thermoacetica ATCC 39073; identical to SEQ ID NO: 45197

SEQ ID NO: 115298 - DNA, 1863 bp, Burkholderia thailandensis E264
  CDS (1)..(1863): transl_table=11
atgcaccggtcctcttttacgcgcccttttcgtcggaagatgccggatgcctcgcgagcgcggctgattcgcgggcgcgacgcccgcgacagcggcgacctcacctccgcgaacgcggttcgccgcgattcgccgcacatggcggagccggcaaagcggccgcgtcgcccacatcgcgcacgcacgctcgcggcgcagcgtctccacgcggaacgatcgcatccgtctgccgccgcgcgagcgatgctcgcgtgcatcgcgccgccccgatcgtcgcgatgcgcatgcgcgctgttcgctcatccgagtgcccccacgcccgtctcgccgatcgcccgcgacgcggcacgaaatcgcacacggcgctatgcttgcccatcagtggacgccgtcgcgagaacggctccatccccgcatgcgcattgcgccgcgcccgcgcggcgtcccccgtcatctgaaggagcaatcatgagcgaagcagtacggatggaacgcgacacgttcggcgaaatcgcagtgccggccgcccggctatggggcgcgcagacgcagcgctcgctgcagaacttcaagatctcgaccgaaaagcagtcgcccgaactgattcacgcgctcgcgctgatcaagcgcgcggcggccgccgtcaatctcgaactcggcgtgctcgcgcaggacaaggcgaacgcgatcatcgccaccgccgacgagatcatcgccggccgtcatcccgatgaattcccgctcgccgtctggcaaacgggttcgggcacgcagaccaacatgaacctcaacgaggtgatcgcgaaccgcgcgagcgagttgctcggcggcgagcgaggcgaaagccgcaacgtgcatccgaacgacgacgtcaatcgcggccagtcgtcgaacgacgtgttcccgaccgcgatgcacgtcgccgccgcgcgcgcgatcgtcgaccatctgctgcccgcgctgcgcacgctgcgcgcgacgctcgacgcgaaggccgccgcgtttgccgacatcgtgaagatcggccgcacgcacctgcaggacgcgacgccgctcacgctcggccaggaattctccggctacgtcgctcagctcgatcagggcattcgccacgtcgagacggcgctgccccatctgtacgagctcgcgcaaggcggcacggcggtcggcacgggcctgaacgcgcatccgaagttcgcggcgggcgtcgcggccgagatcggccggctcaccggcttgccgttcgtcagtgcgccgaacaaattcgaagtgatggccgcggccgacgcgctcgtgttcgcgcacggcgcgcttaagacggtcgccgcgagcctcatgaagatcgcgaacgacatccgctggctcgcgagcgggccgcgttgcgggctcggcgagttgtcgattccggagaacgagccgggcagctcgatcatgccgggcaaggtcaatccgacgcaatcggaagcggtgacgatgctctgctgtcaagtgttcggcaacgacgtcgcggtgaacttcggcggcgcgagcggcaatttcgaactgaacgtgttccggccgatgattgcgcacaacgtactgcaatcggtgcggctgctcgcggacggcgcgcagagcttcaacgatcactgcgcggtcggcatcgagccgaatcgcacgcgcatcgacgcactcctgaacgaatcgctgatgctcgtgacggcgctcaatccgcacatcggctacgacaaggcggcgcagatcgcgaagaaggcgcacaaggaaggcacgacgctcagagccgccgcgctcgcgctcggttacgtgaccgatgcgcaattcgacgaatgggtgcggccggcgaagatggtcggcaatagctga

SEQ ID NO: 115299 - protein, 620 aa, Burkholderia thailandensis E264
MHRSSFTRPFRRKMPDASRARLIRGRDARDSGDLTSANAVRRDSPHMAEPAKRPRRPHRARTLAAQRLHAERSHPSAAARAMLACIAPPRSSRCACALFAHPSAPTPVSPIARDAARNRTRRYACPSVDAVARTAPSPHAHCAAPARRPPSSEGAIMSEAVRMERDTFGEIAVPAARLWGAQTQRSLQNFKISTEKQSPELIHALALIKRAAAAVNLELGVLAQDKANAIIATADEIIAGRHPDEFPLAVWQTGSGTQTNMNLNEVIANRASELLGGERGESRNVHPNDDVNRGQSSNDVFPTAMHVAAARAIVDHLLPALRTLRATLDAKAAAFADIVKIGRTHLQDATPLTLGQEFSGYVAQLDQGIRHVETALPHLYELAQGGTAVGTGLNAHPKFAAGVAAEIGRLTGLPFVSAPNKFEVMAAADALVFAHGALKTVAASLMKIANDIRWLASGPRCGLGELSIPENEPGSSIMPGKVNPTQSEAVTMLCCQVFGNDVAVNFGGASGNFELNVFRPMIAHNVLQSVRLLADGAQSFNDHCAVGIEPNRTRIDALLNESLMLVTALNPHIGYDKAAQIAKKAHKEGTTLRAAALALGYVTDAQFDEWVRPAKMVGNS

SEQ ID NO: 115300 - DNA, 1392 bp, Frankia sp. CcI3
  CDS (1)..(1392): transl_table=11
atgagcgagcaggaataccgcatcgagcacgacagcatgggtgacgtccgggtaccggtcacggcccggtggcgggcccagacacagcgggcggtggagaactttcccgtctccggccagcggatctcccgcgcgcacatcgcggcgctcgcccggatcaaggccgctgccgcgacggtgaacgccaagctggacgtgctcgacgcggacatcgccgaggcgatcgtcgacgcggccacggaggtggcccgtggtgactgggacgaccagttccccttggacgtcttccagaccggcagcggcacctcgtccaacatgaacaccaacgaggtgctggcctcgctcgcctccgagcgcctcggccgcccggttcacccgaacgaccacgtcaacgcctcgcagtcctcgaacgacgtctttccctcatcgatccacatcgccgccacccagggcatcgtcggggacctgatcccggccctggagcaccttgccaccgcgctcggtcgcaaggagaccgagttcgccgacgtcgtgaagtccggccggacccatctgatggacgcgacccccgtgacgctcggccaggagttcggcgggtacgccgccgcggtccggctcggcgtcgagcgcctgcaggtggcactgccccggatcggagagctgccgctcggtgggacagccgtcgggaccggcatcaacaccccgcccggcttctccgccgcggtgattgaggaactgtccgccagcaccggtcttcccctgaccgaggcacgcaaccacttcgaggcgcaggcctcccgggacggcctcgtcgaggcgtccggcgtgctgcgggtgatcgccctctcgctctacaagatcgctaacgacctgcgctgggcctcgtccggcccgcgagccgggctcggcgagatccggctgcccgacctccagcccggatcctcgatcatgcccggcaaggtcaatccggtccttcccgaggcggtctgtcaggtcgtcgcccaggtcgtcggcaacgacgcggcggtcgcgttcggcggatcagccgggaacttcgagctcaatgtcatgctgccggtgatcgcacgtaacctgctggagtcgatccacatcctgtcgacgatcagccggctgttcgccgaccgttgcatcgacggcatcgtcgccgacgtcgaacgctgccgccgctacgccgagtcctccccctccatcgtgacgccgctgaacaagtacatcggctacgaggaggccgcgaaggtcgccaagatctcgctcgccgaggagaagaccattcgcgaggtcgttctcgagcgcggttacgttgcggcgggccaactcaccgaggcacagctcgacgccgcgctcgacgtgctgtcgatgacccacccgtag

SEQ ID NO: 115301 - protein, 463 aa, Frankia sp. CcI3
MSEQEYRIEHDSMGDVRVPVTARWRAQTQRAVENFPVSGQRISRAHIAALARIKAAAATVNAKLDVLDADIAEAIVDAATEVARGDWDDQFPLDVFQTGSGTSSNMNTNEVLASLASERLGRPVHPNDHVNASQSSNDVFPSSIHIAATQGIVGDLIPALEHLATALGRKETEFADVVKSGRTHLMDATPVTLGQEFGGYAAAVRLGVERLQVALPRIGELPLGGTAVGTGINTPPGFSAAVIEELSASTGLPLTEARNHFEAQASRDGLVEASGVLRVIALSLYKIANDLRWASSGPRAGLGEIRLPDLQPGSSIMPGKVNPVLPEAVCQVVAQVVGNDAAVAFGGSAGNFELNVMLPVIARNLLESIHILSTISRLFADRCIDGIVADVERCRRYAESSPSIVTPLNKYIGYEEAAKVAKISLAEEKTIREVVLERGYVAAGQLTEAQLDAALDVLSMTHP

SEQ ID NO: 115302 - DNA, 1377 bp, Novosphingobium aromaticivorans DSM 12444
  CDS (1)..(1377): transl_table=11
atgcaccggatcgaaaccgacagcctgggcgaagtgcgcgtgcccgcagatgcctattggggcgcccagacgcagcgaagcatcgagaactttccgttcggcgagatggagcggatgccgattggcatcattcgcgcactggcgctggtaaaacgggcagcggcgggggtgaaccgggcacacgggctagacccgacgctggccgacgccatcgaacgggccgccgccgaagtggtcgacggcaagctggacgaccagttcccgctggtcatctggcagaccggcagcggcacccagtccaacatgaacgccaacgaagtcatcgcagggcgcgccaacgagatccttaccggcaagcgcggaggcaagagcccggtccatcccaatgaccacgtaaacatgggccagtcctcgaacgacaccttccctaccgcgctgcacgtcgcggccgtcgaggcgctgaaccgagacctgctgcccgcgctgggacggctgcggggcgcgctggcgggcgcggcgctcgcgtggaaggatatcgtcaagatcgggcgaacccacttgcaggatgcgaccccgctgacactggggcaggagttttccggctatgccgagcagttgcgcggcatcgaagcgcacctgaaggccgccgagacgcaccttctgcgactggcgcaaggcgggactgcggtggggaccgggctcaatgcgccggaaggctttggcgacgccatggcggcagaaatcgccgcattgaccggcaggcccttcgtttccgcgccgaacaagttcgaagcgctcgccagcaacgacgctcttgtccagttttcggggacgctttcgacgctggcggtggcgctgaccaagattgccaacgacatccgcctgctgggttccggcccgcgctcaggccttggcgagctggaattgccggccaacgaaccgggcagttcgatcatgcccggcaaggtcaacccgacgcaggccgaaatgctcacgatggtggcggcgcaggtgatcggcaatcatcaggccgtgaccgtgggagggatgcaggggcatctggaactcaacgtgttcaagccgatgatcggcgccgccgtgctgcgatcggtccacctgctgtcgaccggcatgacaagctttgccacccgctgcgtcgaagggatcgagccgaaccggcggcggatcgcggaccttgtcgaacgctcgctcatgcttgtgaccgcgctggcgccggagatcgggtacgacaacgcggcgaagatcgccaagcacgcgcacgagcatgacctgagcctgcgacaggcggcgctggcgctgggactggttgacgaggcgacgttcgaccggcttatccgaccgggggacatggtctag

SEQ ID NO: 115303 - protein, 458 aa, Novosphingobium aromaticivorans DSM 12444
MHRIETDSLGEVRVPADAYWGAQTQRSIENFPFGEMERMPIGIIRALALVKRAAAGVNRAHGLDPTLADAIERAAAEVVDGKLDDQFPLVIWQTGSGTQSNMNANEVIAGRANEILTGKRGGKSPVHPNDHVNMGQSSNDTFPTALHVAAVEALNRDLLPALGRLRGALAGAALAWKDIVKIGRTHLQDATPLTLGQEFSGYAEQLRGIEAHLKAAETHLLRLAQGGTAVGTGLNAPEGFGDAMAAEIAALTGRPFVSAPNKFEALASNDALVQFSGTLSTLAVALTKIANDIRLLGSGPRSGLGELELPANEPGSSIMPGKVNPTQAEMLTMVAAQVIGNHQAVTVGGMQGHLELNVFKPMIGAAVLRSVHLLSTGMTSFATRCVEGIEPNRRRIADLVERSLMLVTALAPEIGYDNAAKIAKHAHEHDLSLRQAALALGLVDEATFDRLIRPGDMV

SEQ ID NO: 115304 - DNA, 1389 bp, Anaplasma phagocytophilum HZ
  CDS (1)..(1389): transl_table=11
atgggtgttagggtagaacatgatagtatgggcagtgttgaggtatcaggtgagcattactggggtgctcaaacgcagcgttcgcttgtgaattttaaaatcggtgaggagaagatgcctttgccattgattagggcattgggcatagttaagctcgctgcagcgcgcgtcaacatggctaatggcagcattgatgagtctgtggggaaagcaatatgtgcagcggctcaagaggttgtagagggcagattcgacggagagtttcctctggtagtgtggcagactggctccggaacgcagactaacatgaatgccaatgaggtgattgcaaatagggcaatagaaatgctgggtggtgagataggaagtaagtcgcctgtgcatcctaatgatcacgtaaactgttcgcaatcttcaaatgatgtatttcccactgcgatgcacattgcggtagttttggaagtgacaaagaacttattacctaatttatgtatattgcaagaagccctcaaggcaaaggtagaggaattttctggcatagtgaaagtagggcgtactcacttacaagatgctactccgttatttttaagtcaggagttctcagggtatgaataccaagttaagcagagtatagaacgtattaagtcgtccattagtagcctttaccagcttgcacaagggggtacagctgtgggcaccggactaaatgcgaagaagggttttgctgagagctttgctgcagaagttgcaggtattactggatgtccgtttgtgacagcagagaacaagtttgaggctttggctacgcatgatgccttagtcgagtttagtggtactttgaatactttagcagtcagctgcatgaaaatagcgaatgatataaggatgctggcttcagggcctagatgcggtataggtgagattattctcccagctaatgagcctggatcttctattatgcctggtaaagttaatcctacacagtgtgaagcgatgactatggtctgtgcgcaggttatgggtaaccatgttgcagtttctgtcggtggatcgaatggtcattttgaactcaatgtattcaaacctgtaatagcatacaatgtgttgcagtctgttcggcttttatctgacgcatcactgagtttcgcacaaaaatgtgtagttgggataaagccagatgtagaacgtatagaaactttgctaggtgcatcgctgatgttggtgactgcgctgaatcgtcatatcggttatgataatgcagcaaaagtagctaaatttgcatttgaaaatcgtgtgaccttaaaagaagctgcagttaccctgaagcttgtcgatgctgaagagttcgacagaattgtggatcctgtcaaaatggtcacaccaaactaa

SEQ ID NO: 115305 - protein, 462 aa, Anaplasma phagocytophilum HZ
MGVRVEHDSMGSVEVSGEHYWGAQTQRSLVNFKIGEEKMPLPLIRALGIVKLAAARVNMANGSIDESVGKAICAAAQEVVEGRFDGEFPLVVWQTGSGTQTNMNANEVIANRAIEMLGGEIGSKSPVHPNDHVNCSQSSNDVFPTAMHIAVVLEVTKNLLPNLCILQEALKAKVEEFSGIVKVGRTHLQDATPLFLSQEFSGYEYQVKQSIERIKSSISSLYQLAQGGTAVGTGLNAKKGFAESFAAEVAGITGCPFVTAENKFEALATHDALVEFSGTLNTLAVSCMKIANDIRMLASGPRCGIGEIILPANEPGSSIMPGKVNPTQCEAMTMVCAQVMGNHVAVSVGGSNGHFELNVFKPVIAYNVLQSVRLLSDASLSFAQKCVVGIKPDVERIETLLGASLMLVTALNRHIGYDNAAKVAKFAFENRVTLKEAAVTLKLVDAEEFDRIVDPVKMVTPN

SEQ ID NO: 115306 - DNA, 1548 bp, Neorickettsia sennetsu str. Miyayama
  CDS (1)..(1548): transl_table=11
ttgtgggggttctttattcttgtaggtctttgtctttgcttttgtaaatctttctttaagcaaactctagctgaaccctgccggaaggattataatcggcctatgctggtgcactttggttttgcttacagagacatggattatagaattgaaactgattccatcggatcgataaaagttccgcaggataagtattggggcgcacaaactcagagagcaatggaaaatttcaaaatagggacagaaaaggttcctatggaagtagtaaaggccatcgcaataattaaactcgctgcggcgcgcacaaatgtaaaagcaggtgcattatcaaaggattaccttggagcaattgaagaagcgtgtcacgagattatcgatgggaaactagatgatcagttccagctttcggtctggcagacagggtccggaactcagacgaacatgaatgttaatgaagttatctctaatcgggctatagagaagtttaatggtgtgatcggcagcaaaaccccaatccatccaaacgatcatgttaacatggcgcaatcatcaaatgacacctttccctctgcaatgcatattgcagctgttgaaaaggtactcaaaaaacttctcccctcacttttttaccttgttgaggtgttatcagaaaaaataaaaagtttttctggcattgttaagatcgggaggactcatatgcaggatgcagttcctatcacattaagtcaggagttctcatgtttttgtgaacaactaaataaaagcgcatcccgtttgaatgaaaatttatctaggctccttgaaataccacaaggaggtacggctgtcggtactgggttaaacacgaggaggaacttcgatcatgagatcgtcgctgaaatcgcaagaattacttctatagagttcacacctgcgaaaaacaagtgtgagatgcttgcctcacacgacacattagttgagttaagcggtaatttaaatacgttggctgtgtcgttgatgaaaatagcgaatgacattcgattactcggttctggtccgaggtgtggtataggagaacttatattaccgatgaatgaacccggctcatcaattatgccaggaaaggtgaatccaacccagtgcgaagccttaacaatggtttgtgcgcaggtcatcggaaatcactcagccgtaactgtagctggtgctggcggccaattacagctcaacacattcaaaccaatgatcatatacaatctgctacaatcaatggatttactttcagatggaatgatcagtttcggagagaaatgtgtaatgggaatagtgccgaataaaaagcgaatagacaacatgttacaggaatcgttgatgctgattactgctttgaacaaggaaattggatacgacaacgcagcaaagattgcgaaatttgcctactcaaaggattgcacgcttaaggaagcagccatggaactcgaacttctctccgaagatgagtttgacaggattgtcaaccccgcacacatgctaggaccagaccaacaagagaaaacgggcccagcttaa

SEQ ID NO: 115307 - protein, 515 aa, Neorickettsia sennetsu str. Miyayama
MWGFFILVGLCLCFCKSFFKQTLAEPCRKDYNRPMLVHFGFAYRDMDYRIETDSIGSIKVPQDKYWGAQTQRAMENFKIGTEKVPMEVVKAIAIIKLAAARTNVKAGALSKDYLGAIEEACHEIIDGKLDDQFQLSVWQTGSGTQTNMNVNEVISNRAIEKFNGVIGSKTPIHPNDHVNMAQSSNDTFPSAMHIAAVEKVLKKLLPSLFYLVEVLSEKIKSFSGIVKIGRTHMQDAVPITLSQEFSCFCEQLNKSASRLNENLSRLLEIPQGGTAVGTGLNTRRNFDHEIVAEIARITSIEFTPAKNKCEMLASHDTLVELSGNLNTLAVSLMKIANDIRLLGSGPRCGIGELILPMNEPGSSIMPGKVNPTQCEALTMVCAQVIGNHSAVTVAGAGGQLQLNTFKPMIIYNLLQSMDLLSDGMISFGEKCVMGIVPNKKRIDNMLQESLMLITALNKEIGYDNAAKIAKFAYSKDCTLKEAAMELELLSEDEFDRIVNPAHMLGPDQQEKTGPA

SEQ ID NO: 115308 - DNA, 1386 bp, Ehrlichia chaffeensis str. Arkansas
  CDS (1)..(1386): transl_table=11
atgagaaaggaaagagatagtttgggagagatagatgttcctgcatgccattactggggtgcacaaacacaacgttctattgataattttaagattggctcagagaaaatgcctaaacctttaataaaggcattaggacttgttaaattagctgcagctcgtgtcaatatgaaaaatggtgatattagtgaaacaataggtaatgcaatttgtaatgctgcaagtgaaattatagatggtaagtttgatgatgagttccctttagtaatttggcaaactggttctgggactcaaagtaatatgaatgttaatgaagtaatagcaaatcgtgcaattgaaatattaggtggagaaaaaggtagtaaatatcctgtccatccaaatgatcatgtgaattattctcaatcctctaatgatacttttccaacagcaatgcatattgcggctgttattgaaactgaaaattcattgttgccaaatttgaaaaatttatatgatgctctacatagtaagtctatagcgtttcaaaatattgttaaaattgggcgtactcaccttcaagatgctactccgttgactttagggcaggtattttctgggtatgcgtatcagattttacagggtatgagtagggtcaagtcagcgttaggtcatttacttgagctagctcaaggtggtactgcagtaggtactggtattaattctaggaaacagtttgatgtccattttgcaagtgaaataaaaaaattaacaggttttaattttgttgcttctgttaataaatttgaggcattagctacacatgatgcattggttgaatttagtggagctttaaatgtgcttgcagtaagtttaatgaaaatagctaatgatattaggttacttagttcaggtccaagatgtggaataggggaaattatattgcctactaatgaacctggatcttctataatgcctgggaaagtaaatcctacccagtgtgaagctgttactatggtgtgtgctcaagttatggggaatcatacaactgttactgttgcagggtcaaatggtcattttgagttgaatgtatttaaaccagtgattatttataatgttttacaatctattagattattgtctgacgttagcattaatttttctcacaagtgcgttcaggggataaaagctgatacaaatcgtatttcgtttttgttgagtcaatctttaatgttggtaacagcattaaacaaacatataggttatgataatgcggcaaaaattgcaaagactgcctttgatgagggaataacgttaaaaaatgctgcagttaagttgaatttaataagtgaagaggagtttgataaaatcgttaatccagaaaatatgatatatcctacaggttaa

SEQ ID NO: 115309 - protein, 461 aa, Ehrlichia chaffeensis str. Arkansas
MRKERDSLGEIDVPACHYWGAQTQRSIDNFKIGSEKMPKPLIKALGLVKLAAARVNMKNGDISETIGNAICNAASEIIDGKFDDEFPLVIWQTGSGTQSNMNVNEVIANRAIEILGGEKGSKYPVHPNDHVNYSQSSNDTFPTAMHIAAVIETENSLLPNLKNLYDALHSKSIAFQNIVKIGRTHLQDATPLTLGQVFSGYAYQILQGMSRVKSALGHLLELAQGGTAVGTGINSRKQFDVHFASEIKKLTGFNFVASVNKFEALATHDALVEFSGALNVLAVSLMKIANDIRLLSSGPRCGIGEIILPTNEPGSSIMPGKVNPTQCEAVTMVCAQVMGNHTTVTVAGSNGHFELNVFKPVIIYNVLQSIRLLSDVSINFSHKCVQGIKADTNRISFLLSQSLMLVTALNKHIGYDNAAKIAKTAFDEGITLKNAAVKLNLISEEEFDKIVNPENMIYPTG

SEQ ID NO: 115310 - DNA, 1392 bp, Francisella tularensis subsp. holarctica
  CDS (1)..(1392): transl_table=11
ttgcgtagagtagaaacagacagtactggtcaaatagaagttgataatgacaaatattggggtgcacaaacacagcgatctatagagcatttttctataggcagtgatttgatgccgatcgaagttattaaagctttggcaattatcaaaaaagctgcagctatcacaaatcatcagttaggtatcttagcgcgaactaaaaaagaaattatcattaaagtcgcagatgagataattgcaggagaacttgatgagcattttccattacgtgtttttatgactggaagtggtacacaatcaaatatgaatattaatgaagtgatttcaaatagggctattgagcttctaggaggcaaaaaggggagtaaaaatcctatccatccaaatgatgatgttaatatgtctcaatcatcaaatgacacttttccaagtgcgatgtatattgctaccgcccttgagataaataacagacttttacctgctcttgagtatatgcaacaacaattagctgacaaagcaaagcaatgggatgatattgtcaaaattggtaggacacatatgcaagatgctgtgccactaactttaggtcaagagttctctggttatgcggcattattagaaaataatattcaaagaatcaaagatacattaaaatatgtatatcagcttgctcttggcggcacggctgttggtacaggattaaatgctcctgatggttttgctgagatcacagcaaaatatatcgctactattacaagtttagcatttgtttcagctactaataaatttgaagtacaaggctcacatgacgctttagttgcagttatgggacaacttaaaactttagctaattcgttatttaagattgctaatgatattcgtttactaagttgtggaccaagagctggttttcatgagttactaatcccagaaaatgagccaggctcatcaattatgccaggaaaggttaatcccactcaatgtgaagctatggcaatggttgcagctcaagttatcggttatgatgttgcagttggtataggtggttcagcaggttatcttgagatgaatgtctataagccattgattatttttaatatcattcaatcgattaagattatctcagatagctgtgtaaattttacaaagtatcttttagaagggatgaagccaaatcacgataaaatagagttttatctcaaaaattcactgatgcttgtgactgctcttagccctgtaataggctatgataaggcagcaaaactagcccattatgctgagcaaaaaaatatctccttggctgaggcaaatcaagagcttaaatttttatcaaaagaagaatttgataaagttgttgatccttataaaatgactaaaggtggtatcttataa

SEQ ID NO: 115311 - protein, 463 aa, Francisella tularensis subsp. holarctica
MRRVETDSTGQIEVDNDKYWGAQTQRSIEHFSIGSDLMPIEVIKALAIIKKAAAITNHQLGILARTKKEIIIKVADEIIAGELDEHFPLRVFMTGSGTQSNMNINEVISNRAIELLGGKKGSKNPIHPNDDVNMSQSSNDTFPSAMYIATALEINNRLLPALEYMQQQLADKAKQWDDIVKIGRTHMQDAVPLTLGQEFSGYAALLENNIQRIKDTLKYVYQLALGGTAVGTGLNAPDGFAEITAKYIATITSLAFVSATNKFEVQGSHDALVAVMGQLKTLANSLFKIANDIRLLSCGPRAGFHELLIPENEPGSSIMPGKVNPTQCEAMAMVAAQVIGYDVAVGIGGSAGYLEMNVYKPLIIFNIIQSIKIISDSCVNFTKYLLEGMKPNHDKIEFYLKNSLMLVTALSPVIGYDKAAKLAHYAEQKNISLAEANQELKFLSKEEFDKVVDPYKMTKGGIL

SEQ ID NO: 115312 - DNA, 1428 bp, Desulfitobacterium hafniense Y51; identical to SEQ ID NO: 45198
  CDS (1)..(1428): transl_table=11

SEQ ID NO: 115313 - protein, 475 aa, Desulfitobacterium hafniense Y51; identical to SEQ ID NO: 45199

SEQ ID NO: 115314 - DNA, 1383 bp, Saccharophagus degradans 2-40
  CDS (1)..(1383): transl_table=11
atgacgacattaaacgaaggcattaaaacacgcacagaaaaggacagtcttggtgaggttcaggtgccggaatacgcgttgtacggcgcccaaacccaaagagcattaaataactttaagataagcggccttgtatttccgcgaagttttattaaagcgcttgggttaataaaggccagctgtgcacaggcaaataaaaagttaggctctttagagcccgcaatggcaaacgcgatttgcgatgcggcaatcgacgttgcaaacggtacctttgacgaccaattccctcttgacatatttcaaacaggctctggtactagtaccaatatgaatgcaaatgaggtgatcgccaagcttgctagtgataagttgggcaactccgtgcaccccaacgatcacgtgaatatgagccagagctcaaatgatgttatcccttcgtgcatacacttaagtgcagcactgcaaattgaaacaacgttattgccagcgctgaataatttagttgatgtaatcagtattaaaactcaagccctgtctagcgtggttaaaacgggtagaacccatttaatggatgctatgcctttaacctttgggcaagaattaagtggttgggcacaccaaattagaaacaatgttcagcggcttgaaagcgctttgccgcgccttaaaatgttgtgcttaggcggtaccgcggttggcaccggtgttaatgctgctccactattcggccaaagttgcgtaactgcgctctctgaattaagcggtatggagcttacaattacccccaataaatttgagggcattagctcgcaagatacagcgttagaaattagcagccacttaaagacgctggcagcaagcttaatgaaaattagcaacgatttacggtggatgaatagtggcccactcgcaggacttgctgaaatacacctaccccagctacaaccgggcagcagtattatgccgggcaaagttaacccagttatccccgaagcggtttgtatggcggctgctcaagttatagggaacgatgcaaccatcactgtggccgctcaaagcggtaatttccagttgaataccatgttgccggttattgcatttaatttactgcaaagcatccagctgctcgccaatagctgtaacgcactagcaaccaaggcaatagctgggcttgaggtaaatatggacaatataaatcaggtattggctaaaaaccccattttggctacttcgcttaataatgagattggttacgaaaaaagcgcagaaattgcaaagcaggcatatagtcagaagcgccctatattggatgtagctctagagatgtctggtgttgataagaaaacacttcgccgcttgctcgaccctaaaaaccttgtatag

SEQ ID NO: 115315 - protein, 460 aa, Saccharophagus degradans 2-40
MTTLNEGIKTRTEKDSLGEVQVPEYALYGAQTQRALNNFKISGLVFPRSFIKALGLIKASCAQANKKLGSLEPAMANAICDAAIDVANGTFDDQFPLDIFQTGSGTSTNMNANEVIAKLASDKLGNSVHPNDHVNMSQSSNDVIPSCIHLSAALQIETTLLPALNNLVDVISIKTQALSSVVKTGRTHLMDAMPLTFGQELSGWAHQIRNNVQRLESALPRLKMLCLGGTAVGTGVNAAPLFGQSCVTALSELSGMELTITPNKFEGISSQDTALEISSHLKTLAASLMKISNDLRWMNSGPLAGLAEIHLPQLQPGSSIMPGKVNPVIPEAVCMAAAQVIGNDATITVAAQSGNFQLNTMLPVIAFNLLQSIQLLANSCNALATKAIAGLEVNMDNINQVLAKNPILATSLNNEIGYEKSAEIAKQAYSQKRPILDVALEMSGVDKKTLRRLLDPKNLV

SEQ ID NO: 115316 - DNA, 1401 bp, Burkholderia xenovorans LB400
  CDS (1)..(1401): transl_table=11
atgactgaagacgtacgaatggagcgtgacacgttcggcgaaatcgccgtgccgaacgctcgtctatggggcgcgcaaacccagcgctcgctacagaatttccgcatctccaccgagaagcaatcgcccgaactcatcaccgcgctggccgtcatcaagcgcgccgccgccgaagtcaacctgggcctcggcgtgctcgacgaaagcaaggcgaaggcgatcatcgaggccgccgacgagatcatcgccggcaagcacccggatgaatttccgcttgccgtctggcagaccggctccggcacgcagaccaacatgaacctcaacgaggtgatcgcgaatcgcgcgagcgagctgctcggcggcgagcgcggcgaagcgcgcaaggtgcatccgaacgacgacgtgaatcgcggccagtcgtccaacgacgtgttcccgaccgccatgcacgtggccgcggcctatgcgatcgtcaagcatctgctgccggcgctgaagacgctgcgcgatacgctcgacggcaaggcaaaagccttcgtcgacatcgtcaagatcggccgcacgcatttgcaggacgccacgccgctcacgctcggccaggagttttcgggctacgtcgcccaactcgaccagggcattcgtcacgtcgaatcggcgctgccgcatctgtacgaactcgcgcagggcggcaccgcggtcggcaccggtttgaacgcgcatccgcagttcgccggcaaggtggcggcggcgatcggcaaactgaccggcttgccgttcgtctcggcgccgaacaaattcgaagtgatggccgcggccgacgcactggtattcgcgcatggcgcgttgaagacggtggcggcgagcctgaacaagatcgccaacgacatccgctggctggccagcggcccgcgctgcggtctcggcgaactgtcgattccggagaacgagccgggcagctccatcatgccgggcaaggtcaatccgacccagtccgaagcgctgacaatgctctgcgcgcaggtgttcggcaacgacgtcgcggtgaatatcggcggcgcgagcggcaatttcgagctgaacgtgttccggccgatgatcgcgcacaacgtgctgcaatcggtccgtctgctggccgacggcgcgcacagtttcaacgacaactgcgcggtcggcatcgaggcgaatcacgagcgcatcgataccctgctcaacgaatcgctgatgctggtgacggcgctcaatccgcatatcggctacgacaaggccgcgaagatcgccaagaaggctcacaaggaaggcaccacgctgaaggcgtcggcgcttgcgctcggcttcgtcaccgagcagcagttcgacgaatgggtgcgcccgaaagacatggtcgggcatccggcggcgtga

SEQ ID NO: 115317 - protein, 466 aa, Burkholderia xenovorans LB400
MTEDVRMERDTFGEIAVPNARLWGAQTQRSLQNFRISTEKQSPELITALAVIKRAAAEVNLGLGVLDESKAKAIIEAADEIIAGKHPDEFPLAVWQTGSGTQTNMNLNEVIANRASELLGGERGEARKVHPNDDVNRGQSSNDVFPTAMHVAAAYAIVKHLLPALKTLRDTLDGKAKAFVDIVKIGRTHLQDATPLTLGQEFSGYVAQLDQGIRHVESALPHLYELAQGGTAVGTGLNAHPQFAGKVAAAIGKLTGLPFVSAPNKFEVMAAADALVFAHGALKTVAASLNKIANDIRWLASGPRCGLGELSIPENEPGSSIMPGKVNPTQSEALTMLCAQVFGNDVAVNIGGASGNFELNVFRPMIAHNVLQSVRLLADGAHSFNDNCAVGIEANHERIDTLLNESLMLVTALNPHIGYDKAAKIAKKAHKEGTTLKASALALGFVTEQQFDEWVRPKDMVGHPAA

SEQ ID NO: 115318 - DNA, 1398 bp, Silicibacter sp. TM1040
  CDS (1)..(1398): transl_table=11
atgtcgaacacccgcaccgaaaccgacagctttggcccgcttgaggtcccttccgacaaatactggggggcgcagactcagcgttcgatcatgaactttcccattggctgggaaaaacagcctgtcgccatcgtgcgcgcgcttggcgtgatcaagaaggcctgcgccatggccaacaaagcttcgggcaagctggacgccaagatcgcagatgcggtgatccaggccgcaggcgaagtggttgagggcaagttcgacgacaacttcccgctcgtggtctggcagaccgggtccggcacccagtccaacatgaactccaacgaggtgatcgccaaccgcgcgatcgagatcctcggcggcgtcattggctccaaagatccagtccacccgaacgatcactgcaacatggggcagtcctccaacgacacgttcccgactgccatgcatatcgccaccgcaatgtccgtgcgcgacgtgttggtgccgggcctcacgaaactggccgaggggctggaagccaaggccgaggaattcaaagacatcatcaagatcggccgcacccacacgcaggatgcaacgccgctcacactgggtcaggaattcggcggctacgcgcatcagatccgtcagggtctggcccgggttgaggctgcaatgcccggcatctacgagctggcacagggcggcaccgcagttggcaccggtctcaataccgtagaaggctggggcgaggaagtcgctgcaaacatggcagaaatcaccggtttgccgtttgtgaccgcgcccaacaagttcgaagccctcgcagcgcatgacgcgatggttttcctctctggcgcgctcgcgaccatcgctggcagctgctacaagatcgccaacgacattcggttcctcggctctggcccgcgctccggtctgggcgagctgatcctgccagagaacgaacccggctcttcgatcatgccgggcaaagtgaacccgacccaggccgaggcgctcactcaggtggcagcacatgtcatgggcaatgacgccgcgatcaaatttgcgggctctcagggtcactttgaactgaacgtctacaacccgatgatgtcctataacctcttgcagtccatccagctcctcggcgacgcggccgacagctttaccgagcggatgctgagcggcattcaggccaacgagccgcgcatcgacaagctgatgaaagaaagcctgatgctggtgaccgcgctggcaccgaccatcggctacgacaacgccaccacggtcgccaagaccgcgcataaaaacggcaccaccctcaaggaagaggcgatcaaactcggctttgtggacgaagagacctttgacaaggttgtccgccccgagcagatgatcggccccaaggcgaagtga

SEQ ID NO: 115319 - protein, 465 aa, Silicibacter sp. TM1040
MSNTRTETDSFGPLEVPSDKYWGAQTQRSIMNFPIGWEKQPVAIVRALGVIKKACAMANKASGKLDAKIADAVIQAAGEVVEGKFDDNFPLVVWQTGSGTQSNMNSNEVIANRAIEILGGVIGSKDPVHPNDHCNMGQSSNDTFPTAMHIATAMSVRDVLVPGLTKLAEGLEAKAEEFKDIIKIGRTHTQDATPLTLGQEFGGYAHQIRQGLARVEAAMPGIYELAQGGTAVGTGLNTVEGWGEEVAANMAEITGLPFVTAPNKFEALAAHDAMVFLSGALATIAGSCYKIANDIRFLGSGPRSGLGELILPENEPGSSIMPGKVNPTQAEALTQVAAHVMGNDAAIKFAGSQGHFELNVYNPMMSYNLLQSIQLLGDAADSFTERMLSGIQANEPRIDKLMKESLMLVTALAPTIGYDNATTVAKTAHKNGTTLKEEAIKLGFVDEETFDKVVRPEQMIGPKAK

SEQ ID NO: 115320 - DNA, 1392 bp, Rubrobacter xylanophilus DSM 9941
  CDS (1)..(1392): transl_table=11
atgacccgagaataccggacggagcgcgactccatgggggaggtccgggttcccgaggaggccctctacggggcccagacccagcgggcggtcgagaacttccccataagcggcctgcggctcccccggcggttcatccaggcgctcggggccataaagctggaggccgcggtggtgaacaacgagctggggctgctggacggcaggctcagggacgccatcgtgcgggccgcggaggaggtggtggagggcgccctcgacgagcacttcgtggtggacgtcttccagaccggcagcggcacctccaccaacatgaacgccaacgaggtcatcgccaaccgggccatccagctcctgggcggcaaggtcggctcccgcgaccccgtccatcccaacgaccacgtcaacaagggccagtcctcgaacgacgtgatcccgacggccatacacctctcggtcctgatctccttcaaggaggatctgttcccggcgctggaggggatgcagcgggcgctggaggagaaggcccgcgagttcgacggcgtgatcaagaccggccgcacccacctgcaggacgccaccccgatccggctcggccaggagttcgccggctacgccgggcagatagagcgcggcctccggcgcctgaggagggccgccgaggacctctccgaggtcgccctgggcggcaccgccgtgggcaccggggtcaacacccacccggagttcgcccggcgcgtctgcgagcgcctctcccgccgcttcggggtggaggtgcgcgagacggagaaccacttccaggcccagagcgccatggacgccgcggtgttcgccggcggggccttgaggaccgtcgccgggagcatcatgaagatctccaacgacatccgctggatggggagcgggccgcgggcggggatcggcgagctggccctccccgaggtgcagccgggctcctccatcatgcccggcaaggtgaacccggtgatcgccgagagcgcctgccaggtctgcgcccaggtgatgggcaacgacctcacggtcgccctcggcgggcagagcggcaacttcgagctgaacgtcatgctcccggtcatcgcctacaacctgctgcagtcgacctccctgctcgccgccacggccgccaacctcaccgacaggtgcatctctggcctcagggccaccgggcggggtccggagctggtggagcaggggctcatgctggccaccgccctcgccccggtcatcggctacgacgcggcggccgagatctccaaggaggcctacagaaccggcaaaaccatccgggaggtggcccgcgagaggacggacctctccgaggaggagctggagaggctgctggacgcccgcaagatgaccggggaccgctag

SEQ ID NO: 115321 - protein, 463 aa, Rubrobacter xylanophilus DSM 9941
MTREYRTERDSMGEVRVPEEALYGAQTQRAVENFPISGLRLPRRFIQALGAIKLEAAVVNNELGLLDGRLRDAIVRAAEEVVEGALDEHFVVDVFQTGSGTSTNMNANEVIANRAIQLLGGKVGSRDPVHPNDHVNKGQSSNDVIPTAIHLSVLISFKEDLFPALEGMQRALEEKAREFDGVIKTGRTHLQDATPIRLGQEFAGYAGQIERGLRRLRRAAEDLSEVALGGTAVGTGVNTHPEFARRVCERLSRRFGVEVRETENHFQAQSAMDAAVFAGGALRTVAGSIMKISNDIRWMGSGPRAGIGELALPEVQPGSSIMPGKVNPVIAESACQVCAQVMGNDLTVALGGQSGNFELNVMLPVIAYNLLQSTSLLAATAANLTDRCISGLRATGRGPELVEQGLMLATALAPVIGYDAAAEISKEAYRTGKTIREVARERTDLSEEELERLLDARKMTGDR

SEQ ID NO: 115322 - DNA, 1392 bp, Mesorhizobium sp. BNC1
  CDS (1)..(1392): transl_table=11
atgacgaagacccgcaccgaaaccgatacttttggcccgatcgacgtcgccgccgatcgttactggggcgcgcagacccagcgctctttgaccaatttccgcatcggcgtggaaaagatgcctgttccactggtgcgcgcctttggcatcgtcaagcttgccgccgcggaggtgaatacgaaccttggaaagcttgatcccaagcttggcgaagcgatcgttgcggcggcacgcgaggtggtggacgggaaactggacgcgcacttcccgctcgccgtctggcagaccggttccggcacacagtcgaacatgaacgccaatgaggtgatctccaatcgggcaatcgaaatgctcggcggtgagatgggttcaaaaaagcccatccatccaaacgatcacgtcaatatgagccagtcgtcgaatgacagcttccccaccgccatgcacatcgcggccgcccgcgaggcggcggaagagctgttgccggcgctggaccacctgaccgccacgctggaggaaaaggaacgggctttcggcgatatcgtcaagatcggccgcacccatacgcaggacgcgacgcctctcacactcggccaggaattttccggctatgtggcagcgctgaggctcgggcgaaagcgtatcgaggatgcgctgcatgacgtgcatgcgctggcccagggaggcactgccgttggcactggcttgaatgcgcccaagggtttcgacagggcctttgcggatcgcgtcgcagccatcaccggcctgcccttccgcactgctgaaaacaaattcgaggccttggcgagccacggagcgctgaacgccctgcacggcacgctcaacgcgcttgccggcgatctcttcaagatcgcgaatgatatccgcttcctgggttccggtccgcgctccgggctgggcgaactcaagcttcccgaaaacgaacccggatcctcgatcatgcccggcaaggtgaacccgacccaggcggaagctcttaccatggtggccacgcagatcatgggcaatcagaccacggtctcgatcgccgccagtcaggggcatttcgagctcaatgtcttcaagcctgtaatcgcaaacgccgtgctgcagtcaattcgcctgctttccgacgcgatgcgctccttcgccgacaattgcgtcaagggcatagaggcggacgaagtgcgcattgcggagttgatgcagcgctcgctcatgctggtgacggccctggcgcccgtgatcggctacgacaacgcggccaagatcgccaagacggcacacaagaacggaacgacgctgcgcgaggaagcgctgaggaccggccttgtgacggaagaggaatacgaccgcatcgtgcggccggaaaacatgatctcaccgggatag

SEQ ID NO: 115323 - protein, 463 aa, Mesorhizobium sp. BNC1
MTKTRTETDTFGPIDVAADRYWGAQTQRSLTNFRIGVEKMPVPLVRAFGIVKLAAAEVNTNLGKLDPKLGEAIVAAAREVVDGKLDAHFPLAVWQTGSGTQSNMNANEVISNRAIEMLGGEMGSKKPIHPNDHVNMSQSSNDSFPTAMHIAAAREAAEELLPALDHLTATLEEKERAFGDIVKIGRTHTQDATPLTLGQEFSGYVAALRLGRKRIEDALHDVHALAQGGTAVGTGLNAPKGFDRAFADRVAAITGLPFRTAENKFEALASHGALNALHGTLNALAGDLFKIANDIRFLGSGPRSGLGELKLPENEPGSSIMPGKVNPTQAEALTMVATQIMGNQTTVSIAASQGHFELNVFKPVIANAVLQSIRLLSDAMRSFADNCVKGIEADEVRIAELMQRSLMLVTALAPVIGYDNAAKIAKTAHKNGTTLREEALRTGLVTEEEYDRIVRPENMISPG

SEQ ID NO: 115324 - DNA, 1413 bp, Mesorhizobium sp. BNC1
  CDS (1)..(1413): transl_table=11
atgactattcgctcggaatcggacgcaaacggtcccattgaaattccagcggatcgctactggggagcgcagaccgcccgcgcgctgaggctgttcccgcaggaaggaccgcgattgcctgtgagtttcctgcgtgccttcggcctccagaaggccgccgctgcccgagcgaacatggcgcttggcgtacttgatcgagaacgcggcgaacgtatcctcgccgctgccgtggaattgcgcgacggccgttttgacgaccacttcccgctctccatttggcagacgggaagcggcacgcagacgaatatgaacgccaacgaggtgctggccaaccgagccaacgaactgtccggccagccgctaggcacgcgcgacccgatccatcccaacgaccacgtcaatctcggccagtcgtccaacgacacctttcccacggtgatgcatgtcgccgccgtactggagcttcaagatggcgttctgccggcgctggatcaattggaaacggcgttcgcgcggctcgaaaccgatcacggcgcctatgtccgcatggggcgtacgcatctcaacgatgccgttccggtaacgcttggccagaccttggcatcgtatcgcaggcaggtgagccaggctcaaaaacggattgcggcaacgctggccgatctcaaagtgctttcgcagggtggaacagccgcgggcagcgggttgaatgccgccgaagggttcgatcaggcgttttgcgcagcgctcagcgacgcgaccgggatcgatttcgcaccaaatcccgtcaaggtggagggcatggccgcgcatgacgcgctcgtggcggcatcggccgctctcgaagggctcgccacggcattgattcatatcctcaacgatatccggcttcttgcggccggtccgcgcgccggactggccgaactgacacttcccgacgacgggctgtcgtcctcaatcatgccgggcaagcggaacgcgacgctggcggaagccctgttgcaggtctgcttccgcgtgattggcaatcacaccacggtcgtgtgggctgccggttccggcctgttcgagctcaatgtcgcaaagccggtgctgatccacgcgttcctcgaaagcgcgaccgccctgaaggtcgccatcgcatcctttgtcgcgggaacgttgaacggattagaggtcaatggcgagcggatggcgcactacgtcaattcctcgctgatgctggcgaccgccctgacaccgcgcctcggctacgaccgtgtggcggaagttatacgcctggccgacctcgaaaacctcaccctgcgggaggcctgcgcccgtttcggcgtgatctccatgcaggattacgacgctctgatcgatccggcgcgcatggcaaatggcggccgcatgaaggaaggggagagggaatga

SEQ ID NO: 115325 - protein, 470 aa, Mesorhizobium sp. BNC1
MTIRSESDANGPIEIPADRYWGAQTARALRLFPQEGPRLPVSFLRAFGLQKAAAARANMALGVLDRERGERILAAAVELRDGRFDDHFPLSIWQTGSGTQTNMNANEVLANRANELSGQPLGTRDPIHPNDHVNLGQSSNDTFPTVMHVAAVLELQDGVLPALDQLETAFARLETDHGAYVRMGRTHLNDAVPVTLGQTLASYRRQVSQAQKRIAATLADLKVLSQGGTAAGSGLNAAEGFDQAFCAALSDATGIDFAPNPVKVEGMAAHDALVAASAALEGLATALIHILNDIRLLAAGPRAGLAELTLPDDGLSSSIMPGKRNATLAEALLQVCFRVIGNHTTVVWAAGSGLFELNVAKPVLIHAFLESATALKVAIASFVAGTLNGLEVNGERMAHYVNSSLMLATALTPRLGYDRVAEVIRLADLENLTLREACARFGVISMQDYDALIDPARMANGGRMKEGERE

SEQ ID NO: 115326 - DNA, 1389 bp, Cytophaga hutchinsonii ATCC 33406; identical to SEQ ID NO: 45202
  CDS (1)..(1389): transl_table=11

SEQ ID NO: 115327 - protein, 462 aa, Cytophaga hutchinsonii ATCC 33406; identical to SEQ ID NO: 45203

SEQ ID NO: 115328 - DNA, 1404 bp, Rhodococcus sp. RHA1
  CDS (1)..(1404): transl_table=11
atgaccgagagcaacgagcagaagtaccggatcgaacacgacaccatgggcgaggtgcgggtgcccgtggatgccctgtggcgcgcgcaaactcagcgcgccgtcgagaacttcccgatcagcggtcgaggtctcgagcgcacccagatacgtgcaatgggtctgctgaaggcagcctgcgcgcaggtcaacaaggacctcggcctcctcgacgccgagaaggcggacgccatcatcgcggcggcgggcgagatcgccgaaggcaagcacgacgatcagttccccatcgacgtcttccaaacaggctcgggcaccagttccaacatgaacgccaacgaggtgatcgcgtcgatcgccgcggcgaacggcgtggtcgtccaccccaacgacgacgtcaacatgtcgcagtcgtccaacgacacctttcccaccgcgacgcacgtcgcggccaccgagtccgcggtcaaggacctcctccccgccctcgaccacctgcgcctggccctgctcgacaagtccaccgagtggaagaccgtcgtgaagtcgggccgcacccacctcatggacgccgttccggtgaccctcggccaggagttcggcggttacgcccgccagatggaggcggggatggagcgggtcgtggcctgccttccccggctcggtgagctgcccatcggcggcaccgcggtcggaacggggctcaatgcccccgacgggttcggcccgaaggtcgtcgccgaactggtcaaggcgacgggtgtcgacgccctcacaccggcgaagaacagtttcgaggcgcaggcggcgcgggacggcctggtggaggcgtccggcgcactgcgcacgatcgcggtgtccttgaccaagatcgccaacgacatccggtggatgggatcgggaccgctgaccggtctcggcgagatccgtctccccgacctgcagcccggcagttcgatcatgcccggcaaggtcaatccggtgctcccggaggcggccacccaggtcgccgcacaggtggtcggcaacgatgccgcggtcgcctggggcggtgccgcgggcgcattcgagctcaacgtctacatcccgatgatggcgcggaacctgctcgaatcgctgacgttgctggccaacgtcacgcggctgttcgccgaccggtgcgtcgtcgggctcgtcgcgaacatcgagcacctcaagaccctcgcggaatcgtcgccgtccatcgtgacgccactgaactccgcgatcgggtacgaggaggcggcggccgtcgccaagcaggcgctgaaggagaagaagaccatccgcgagaccgtcgtcgaccgtggtctgatcggcgacaagctgagcgaggaggaactcgacaagcgtctcgacgtgctggcgatggcgaaggtcgaggactga

SEQ ID NO: 115329 - protein, 467 aa, Rhodococcus sp. RHA1
MTESNEQKYRIEHDTMGEVRVPVDALWRAQTQRAVENFPISGRGLERTQIRAMGLLKAACAQVNKDLGLLDAEKADAIIAAAGEIAEGKHDDQFPIDVFQTGSGTSSNMNANEVIASIAAANGVVVHPNDDVNMSQSSNDTFPTATHVAATESAVKDLLPALDHLRLALLDKSTEWKTVVKSGRTHLMDAVPVTLGQEFGGYARQMEAGMERVVACLPRLGELPIGGTAVGTGLNAPDGFGPKVVAELVKATGVDALTPAKNSFEAQAARDGLVEASGALRTIAVSLTKIANDIRWMGSGPLTGLGEIRLPDLQPGSSIMPGKVNPVLPEAATQVAAQVVGNDAAVAWGGAAGAFELNVYIPMMARNLLESLTLLANVTRLFADRCVVGLVANIEHLKTLAESSPSIVTPLNSAIGYEEAAAVAKQALKEKKTIRETVVDRGLIGDKLSEEELDKRLDVLAMAKVED

SEQ ID NO: 115330 - DNA, 1410 bp, Trichodesmium erythraeum IMS101
  CDS (1)..(1410): transl_table=11
atgacagaatcaaagcaccccaaaatgcgacttgaaagggatagtatgggaaatattgaagtaccagcagaccgttattggggcgctcaaacccaaagatcgcttatctacttctctattgggcaagactacattccactggaagttatcaaagcatttgctatcctcaaaaaagcagttgcccaaactaaccaggaatttggtaaacttccagaatacaaaacaaaattaatcattcaagcagcagaagaaattattgccggaaaattagatagaaattttccgctacgagtttggatgacaggaagtggcactcaatgcaatatgaatattaacgaagtcatagctaaccgggcgatcgaaattgctggtggaaaaatgggaagcaaaaatccgatacatcctaatgatcatgttaatatgtcacagtcatctaacgacacattccctactgctatgcacatctcttcagcagtagcattacataaacagttgctgccgaaagtcaaaaaaatccgggatgcactccaagagaaatcagtagaatttgatgaaattgttaaaatagggcgcactcacctacaagatgcggttccactgactttgggacaagaattttcggggtatgtggcgcaactagatgcaaatttgcaacgtatcactcatacattgccagatttatatgaattagctataggtggtactgcagtgggaacaggattaaatacggtgaaaggctttgctgaacttgctgcgaaacatattagtgaaataaccgggttgccttttgtgtctgcacctaataagtttgctgctttagctgctcatgatgggatagtgatggcgagcggtgctttgaagactttagcttgttcgttgctgaaaattgctaacgatattcggtggttgggaagtggacctagatgtgggtttggggagttgattttacctgcaaatgaaccgggatcttctattatgccaggaaaagttaatcctactcagtgtgaagcaatgacgatggtggcgactcaggtgatgggttatgatgcagcgatcactttggctggtgcccaggggaattttgaattgaatacctataaaccgatgatgatatttaatttgattcagtcgattaatttgattgctgatagttgtaataattttactgattttctcttggttgatttgaaaccaaatagaaaaaaaattgaattttatttggaaaattctttgatgttagtgactgctttaagtccgaaaattggatatgatcgggctgccgaagttgctcattttgcccatgaaaaagatttaactttaaagcaagcttgtttggaattaggttatgtttcgggaaaggaatttgatgaaattgtgattcctgaaaatatgactcatccttctacttag

SEQ ID NO: 115331 - protein, 469 aa, Trichodesmium erythraeum IMS101
MTESKHPKMRLERDSMGNIEVPADRYWGAQTQRSLIYFSIGQDYIPLEVIKAFAILKKAVAQTNQEFGKLPEYKTKLIIQAAEEIIAGKLDRNFPLRVWMTGSGTQCNMNINEVIANRAIEIAGGKMGSKNPIHPNDHVNMSQSSNDTFPTAMHISSAVALHKQLLPKVKKIRDALQEKSVEFDEIVKIGRTHLQDAVPLTLGQEFSGYVAQLDANLQRITHTLPDLYELAIGGTAVGTGLNTVKGFAELAAKHISEITGLPFVSAPNKFAALAAHDGIVMASGALKTLACSLLKIANDIRWLGSGPRCGFGELILPANEPGSSIMPGKVNPTQCEAMTMVATQVMGYDAAITLAGAQGNFELNTYKPMMIFNLIQSINLIADSCNNFTDFLLVDLKPNRKKIEFYLENSLMLVTALSPKIGYDRAAEVAHFAHEKDLTLKQACLELGYVSGKEFDEIVIPENMTHPST

SEQ ID NO: 115332 - DNA, 1392 bp, Synechococcus sp. CC9311
  CDS (1)..(1392): transl_table=11
atgacccaaacaacaaggactgaatacgacagcatggggcctgtagaggtgccggccaaagccctctggggggcgcagacccaacgctctctccaaaacttcgccattagcgatgaccgcattcctgttgatctaatccatgccttagcgcaaatcaaacaggcggcagcgatcgtgaacgctcgcctgggggtgttggataacaaccgacgcgacctgatcgtgaaggtggcggccgacattgccgagggtcgtcacgacgatcagttccccctaagggtttggcaaacgggtagcggcacccaaacaaacatgaatgtcaatgaggtgatcagcaacctggtgtcgcgaagcgtgggagaaccattaggcagccatcagccggtacaccccaacgatcacgtcaaccgctcgcagtcaaccaacgacgccttcccagcagcgatccacatcgctgctgcagccggcattcaataccggctgttgccggaagtccaacaactcagcgaggcgtttgccaccaagagtgaggcctggcaagacatcgtgaagattggcaggacccacctacaggatgcggtgccgctgacccttggccaagaagcttctgcttggcgcgatcaactcagcagtgccaggaaccgaatcgaaacatcgttgcaggagctatacccgctcccgctcggtggcaccgcggttggaacgggcctcaatgccccagaaggcttcgcctaccaagcagcgactgaactggcacgcttgagcggcttgcccttgatctcggctccgaacaagtttgctgtgatggcaagccatgacggcctagtgaatgccatgggccagctgcgactcctcgcggtgagcttgctgaagatcgccaacgacctccgtctcctcgcctgcggcccacgcgccggcctagcggaattgcatttgcctgagaacgaaccaggcagttcgatcatgcctggcaaggtgaaccccacccagtgcgaagcgatggcgatggtttgcacccaggtgatcggccttgatgcagccgttgcaatggccggggctggcggccacctgcagatgaatgtctacaaaccactgatcggcttcaacctgctgcaaacgatcacgctgctcaccgatgcctgccattccttcagggtggcaatggtggaaggcatcaaacccaacctcagtcggatccaacgcgatgtggagcaatccctgatgctcgttactccgcttgcacctgtgatcgggtacgacaaggccagtgcgatcgctaagtatgcccacgaacagggatcaagcctgcgcgatgcagccctagaactgggctacgtgaatgcaacggaattcgatcgaattattgatcccgcagccatgacgaatccttga

SEQ ID NO: 115333 - protein, 463 aa, Synechococcus sp. CC9311
MTQTTRTEYDSMGPVEVPAKALWGAQTQRSLQNFAISDDRIPVDLIHALAQIKQAAAIVNARLGVLDNNRRDLIVKVAADIAEGRHDDQFPLRVWQTGSGTQTNMNVNEVISNLVSRSVGEPLGSHQPVHPNDHVNRSQSTNDAFPAAIHIAAAAGIQYRLLPEVQQLSEAFATKSEAWQDIVKIGRTHLQDAVPLTLGQEASAWRDQLSSARNRIETSLQELYPLPLGGTAVGTGLNAPEGFAYQAATELARLSGLPLISAPNKFAVMASHDGLVNAMGQLRLLAVSLLKIANDLRLLACGPRAGLAELHLPENEPGSSIMPGKVNPTQCEAMAMVCTQVIGLDAAVAMAGAGGHLQMNVYKPLIGFNLLQTITLLTDACHSFRVAMVEGIKPNLSRIQRDVEQSLMLVTPLAPVIGYDKASAIAKYAHEQGSSLRDAALELGYVNATEFDRIIDPAAMTNP

SEQ ID NO: 115334 - DNA, 1389 bp, Alkalilimnicola ehrlichei MLHE-1
  CDS (1)..(1389): transl_table=11
atgaacggacagggataccgcatcgagcgggacagcatgggcgaactgcaggtgccggaaaccgccctctggggggcgcagacccagcgtgcggtggagaattttccggtcagcgatctgcggatgccgcgcagcttcatccgcgccctggggctgatcaagggcgcggcggcgcgggccaactatgagctggagctcctcgccccggagattgccgaggccatcgccgaggccgcccgcgaggtggagcagggcgaccatgacgaccagtttccggtggacgtcttccagaccggctccggcaccagcagcaacatgaatgccaacgaggtgattgcccgcctggccagcgaccggttgggcaaggccgtacaccccaacgatcacgtcaacatgggacagagcagcaatgacgtgatccccaccgccattcatgtcagcgcctgtctggccctgcacgagcaactcctgcccgccttggaggggctggaacaacagatccgcgacaaggccgcggcgttggaggggcgggtcaagaccgggcggacccatttgatggacgccatgccggtgagctttgcccaagagcttggggggtgggccacccaggtgggccacggcgcggagcgcatccgcgccagtctgccgcgcctggaggcgttggcccagggcgggaccgccgtcggcaccgggatcaacgccccgccctccttcggcgcccgggtggctggcctgatcgcggagcgtaccggagtgccctttacgccctgcgcggaccgcttcgaggcgctctccagccaggatgcggcggtggagatgcacggtcagctccgcaccgtggcggtcagcctgatgaagatcgccaatgatctgcgctggatgaacagcgggccgctggccggtctgggcgagatcgcactcccggccctgcaaccgggcagctcgatcatgccgggcaaggtcaacccggtgatcccggagtcggtggccatggtcagcgcccaggtcatgggcaacgacaccaccctggcggtcgccggccagtcgggcaatttccagctcaatgtcatgctgcccgtggtgggttacaacctgttgcagagcatcggtctgctggccaacgccagccggctgctgggggacaaggccatcgccggtttcacggtgaacgaggggcgcatcggcgaggccctggaccgcaaccccatcctggtcacggccctgaacgcggtgatcggttacgaaaagggcgccgagatcgccaagaccgcctacaaagagggccgtccgatcatggaggtggcccgtgagcacacggatctgtccgaggaggcgctgcagcgtctgctggacccggccgcgctcacccggggcgggattcagaagtga

SEQ ID NO: 115335 - protein, 462 aa, Alkalilimnicola ehrlichei MLHE-1
MNGQGYRIERDSMGELQVPETALWGAQTQRAVENFPVSDLRMPRSFIRALGLIKGAAARANYELELLAPEIAEAIAEAAREVEQGDHDDQFPVDVFQTGSGTSSNMNANEVIARLASDRLGKAVHPNDHVNMGQSSNDVIPTAIHVSACLALHEQLLPALEGLEQQIRDKAAALEGRVKTGRTHLMDAMPVSFAQELGGWATQVGHGAERIRASLPRLEALAQGGTAVGTGINAPPSFGARVAGLIAERTGVPFTPCADRFEALSSQDAAVEMHGQLRTVAVSLMKIANDLRWMNSGPLAGLGEIALPALQPGSSIMPGKVNPVIPESVAMVSAQVMGNDTTLAVAGQSGNFQLNVMLPVVGYNLLQSIGLLANASRLLGDKAIAGFTVNEGRIGEALDRNPILVTALNAVIGYEKGAEIAKTAYKEGRPIMEVAREHTDLSEEALQRLLDPAALTRGGIQK

SEQ ID NO: 115336 - DNA, 1401 bp, Hyphomonas neptunium ATCC 15444; identical to SEQ ID NO: 45206
  CDS (1)..(1401): transl_table=11

SEQ ID NO: 115337 - protein, 466 aa, Hyphomonas neptunium ATCC 15444; identical to SEQ ID NO: 45207

SEQ ID NO: 115338 - DNA, 1392 bp, Rhizobium leguminosarum bv. viciae 3841
  CDS (1)..(1392): transl_table=11
atgactgcaacccgcaccgaaaccgatacttttggccagatcgaggtcgccgccgaccgatattggggcgcccaggccgagcgttcgctcggcaatttcaagatcggctgggaaaaacagccgctgtcgatcgtgcgtgcgctcggtatcgtcaagcaggccgccgcccgcgccaacatgtcgctcgaccaactcgatcctgccctcggcaaagcgatcgtcgaggctgcccaggaagtggtcgacggcaagctgaacgaccatttcccgcttgtggtctggcagaccggttctggcacacagtcgaacatgaacgccaatgaagtgatctccaatcgtgcgatagaaatgctcggcggcgtcatgggttccaagaagccggtgcatccgaacgatcacgtcaatatgagccagtcgtcgaacgacacctatccgacggccatgcacattgcctgcgccgagcagatcgcccatcacctgctgccggccctgaagcacctgcatgccgcgctcgacatgaaggtcacagaattcagccacatcatcaagatcggccgcacccacacccaggatgcgacgccgctgacgctcggccaggaattttcgggttatgccgcccaggtcggctccgccatcaggcgcatcgaaatgaccctgcccggcctttgcgagctcgcccagggcggtactgccgtcggcaccggcctcaatgcgccggtgggctttgccgaaaaggtcgccgaagagattgccgccatcacaggcatgcctttcgtcaccgcgccgaacaagttcgaggcgctcgcctctcatgacagcatggtcttttcccacggcgccatcaatgcggcagccgccgccctcttcaagatcgccaacgacatccgcctgctcggttccggcccacgcgccggcctcggcgagctggcgctgccggaaaacgagcccggctcctcgatcatgcccggcaaggtcaatccgacccagtgcgaggcgctgacgcaggtctgcatccatatcttcggcaacaacgcggctctgaccttcgccgacagccagggccatttcgagctcaacgtctacaatccgatgatggcctataatttcctgcagtcggtgcagctgctcgccgacgccgccgtctccttcaccgacaattgcgtcgtcggcatcgaggcgcgcgaggacaatatcaaggccggcctcgaacgctcgctgatgctggtgacggcacttgccccgaagatcggctacgacgcagccgccaagatcgccaagaccgcccacaagaacggcacgacgctgaaggaagagagcctcgccagcggcctagtgacgtcggaagagtatgacgcgatcgtccggccggaaacgatgatcgggccgaagtag

SEQ ID NO: 115339 - protein, 463 aa, Rhizobium leguminosarum bv. viciae 3841
MTATRTETDTFGQIEVAADRYWGAQAERSLGNFKIGWEKQPLSIVRALGIVKQAAARANMSLDQLDPALGKAIVEAAQEVVDGKLNDHFPLVVWQTGSGTQSNMNANEVISNRAIEMLGGVMGSKKPVHPNDHVNMSQSSNDTYPTAMHIACAEQIAHHLLPALKHLHAALDMKVTEFSHIIKIGRTHTQDATPLTLGQEFSGYAAQVGSAIRRIEMTLPGLCELAQGGTAVGTGLNAPVGFAEKVAEEIAAITGMPFVTAPNKFEALASHDSMVFSHGAINAAAAALFKIANDIRLLGSGPRAGLGELALPENEPGSSIMPGKVNPTQCEALTQVCIHIFGNNAALTFADSQGHFELNVYNPMMAYNFLQSVQLLADAAVSFTDNCVVGIEAREDNIKAGLERSLMLVTALAPKIGYDAAAKIAKTAHKNGTTLKEESLASGLVTSEEYDAIVRPETMIGPK

SEQ ID NO: 115340 - DNA, 1395 bp, Pseudomonas aeruginosa UCBPP-PA14
  CDS (1)..(1395): transl_table=11
atgagccggaccgaaaccgatagcctgggcaccatcgaggtgcccgacgacgcctactggggcgcccagacccagcgctcgctggagaacttcgccatcggcggccagcgcatgccgctcgccgtgatccacgccctggcgctgatcaagaaagccgccgcgcgggtcaacgaccacctcggcgaactgccgccggaagtcgcccggttgattgaacaggccgccgacgaggtcctcgcaggccgccacgacgaacacttcccgctggtggtctggcagaccggcagcggcacccagaccaacatgaacgtcaacgaggtgatcgccggccgcgccaacgaactggccggcaatccgcgcggcggcaagtcgccggtgcatcccaacgaccacgtcaaccgcgcgcagagttccaacgacagcttccccaccgccatgcacatcgccgccgccaaggccgtgcacgaacaattgctgccggccatcgccgagctttccggcggtctcgccgaacagtcggcgcggcacgccagcctggtcaagaccgggcgcacccacctgatggacgccacgccgatcaccttcggccaggaactctcggccttcgtcgcccagctcgactacgccgagcgcgccatccgcgcggcgctgccggcggtctaccagttggcccagggcggcaccgcggtgggcaccgggctcaacgcgccgaagggcttcgccgacgccatcgccgcggaaatcgccgccgaatcgggcctgcccttcgtcgccgcgccgaacaagttcgccgccctggccggccacgagcctctggtcatcctctccggcgccctgaagagcctggcggtggccctgatgaagatcgccaacgacctgcgcctgctcggctcaggcccacgcgccggcttcgccgaggtgaagctgccggccaacgaaccgggcagctcgatcatgcccggcaaggtcaacccgacccagtgcgaggcgctgtcgatgctggcctgccaggtcatgggcaacgacagcacgatttccttcgccgccagccagggccatctgcaactcaacgtgttcaagccggtgatcgtctacaacctgctggagtccatccgcctgctcgccgacggctgccgcaacttcaacaagcattgcgtcgccggcctggagccggacgcccggcgcatggccgacctgctggagcgcggcctgatgctggtcaccgcactgaacccgcacatcggctacgacaaggccgccgaaattgccaagaaggcctacgccgaaggcaccaccctgcgcgccgcggcgctgcagctgggctacctggacgaagcgcagttcgacgaatgggtacggccggagcagatgctggaggccggccatcatggttga

SEQ ID NO: 115341 - protein, 464 aa, Pseudomonas aeruginosa UCBPP-PA14
MSRTETDSLGTIEVPDDAYWGAQTQRSLENFAIGGQRMPLAVIHALALIKKAAARVNDHLGELPPEVARLIEQAADEVLAGRHDEHFPLVVWQTGSGTQTNMNVNEVIAGRANELAGNPRGGKSPVHPNDHVNRAQSSNDSFPTAMHIAAAKAVHEQLLPAIAELSGGLAEQSARHASLVKTGRTHLMDATPITFGQELSAFVAQLDYAERAIRAALPAVYQLAQGGTAVGTGLNAPKGFADAIAAEIAAESGLPFVAAPNKFAALAGHEPLVILSGALKSLAVALMKIANDLRLLGSGPRAGFAEVKLPANEPGSSIMPGKVNPTQCEALSMLACQVMGNDSTISFAASQGHLQLNVFKPVIVYNLLESIRLLADGCRNFNKHCVAGLEPDARRMADLLERGLMLVTALNPHIGYDKAAEIAKKAYAEGTTLRAAALQLGYLDEAQFDEWVRPEQMLEAGHHG

SEQ ID NO: 115342 - DNA, 1377 bp, Pseudomonas aeruginosa UCBPP-PA14
  CDS (1)..(1377): transl_table=11
atgactgacacccgcatcgaacgcgacagcatgggcgaactggcggtcccggcgaccgccctctatggcgcccagacccagcgcgcggtgaacaacttcccggtcagcggccagcgcatgccccaggccttcgtccgcgccctgctgctggccaaggccgcggcagcgcgggcgaacgtctccctgcagcaactggatgcaccgatgggcgaggcgatcgccgagacctgcctgcagttgctgcaggaggacttcatgcagcatttcccggtggatgtgttccagaccggctccggcaccagttccaacatgaacgccaacgaagtggtggcgaccctggccagtcgccgcctgggcggcaaggtcaatccgaacgaccatgtgaactgcgggcagagcagcaacgacatcatcccctcgaccatccacatcagtgccgccctcgagatcagcgaacgcctgctgccggcgctgcgccacctggagcagactatccagagcaaggccggcgaagtgcatgcctatgtgaagaccggccgcacccacctgatggatgcgatgccggtacgcatgagccaggtgctcggtggctgggcgcagcaggtgcgacaggctggcgtgcacatcgagagcgtacttcctgccttgcagcagttggcacagggcggcaccgcggtgggcaccgggatcaacgcccatccgcggttcgccgaacgtttcagccaggagctgaacgacctgaccgggttggcgttccgccccggcgacgacttcttcgccctgatcggttcgcaggacacggcggtcgctgcgtccggccagttgaagaccctggccgtgaccctgatgaagctggccaacgacctgcgctggatgaactccgggccgcttgccgggctcggcgagatcgagctggaagcgctgcaaccaggctcctcgatcatgcccggcaaggtcaacccggtgatcccggaggccaccgcgatggtcgccgcccaggtgatcggcaatgacgccgccattgccgtcgccggccaatcgggcaacttcgaactgaacgtgatgctgccgctggtggcggacaacctgttgcacagcatccagttgctggccaacgtcagccggctgctggcggacaaggccatcgccagcttcaaggtcaaccagggcaagctcagcgaggcgttggcgcgcaacccgatcctggtcactgcgctgaacccgatcatcggctaccagaaggctgcggaaatcgccaagcaggcctatcgcgagggacggccgatcatcgatgtggcgctggaaaacaccgatctggaccgtgcgcgcctggaggtgttgctggatccggaaaaactcacggctggcggcctctga

SEQ ID NO: 115343 - protein, 458 aa, Pseudomonas aeruginosa UCBPP-PA14
MTDTRIERDSMGELAVPATALYGAQTQRAVNNFPVSGQRMPQAFVRALLLAKAAAARANVSLQQLDAPMGEAIAETCLQLLQEDFMQHFPVDVFQTGSGTSSNMNANEVVATLASRRLGGKVNPNDHVNCGQSSNDIIPSTIHISAALEISERLLPALRHLEQTIQSKAGEVHAYVKTGRTHLMDAMPVRMSQVLGGWAQQVRQAGVHIESVLPALQQLAQGGTAVGTGINAHPRFAERFSQELNDLTGLAFRPGDDFFALIGSQDTAVAASGQLKTLAVTLMKLANDLRWMNSGPLAGLGEIELEALQPGSSIMPGKVNPVIPEATAMVAAQVIGNDAAIAVAGQSGNFELNVMLPLVADNLLHSIQLLANVSRLLADKAIASFKVNQGKLSEALARNPILVTALNPIIGYQKAAEIAKQAYREGRPIIDVALENTDLDRARLEVLLDPEKLTAGGL

SEQ ID NO: 115344 - DNA, 1383 bp, Pediococcus pentosaceus ATCC 25745
  CDS (1)..(1383): transl_table=11
atggaaaaatatcgtacagaagaagatacccttgggcccgtccaaatcccagtagacgcactttggggagcccaaactgaaagaagtcgtcataattttgcgactggtgccaagatgcccctggaaattatcaaagctcttctacagattaaaaaagcggcagccatcgctaataaaaaggaacaatcaatggctgctgaaaaagcggatttaattgtagtagctattgatcgtctgctagcactggatgatgctgaattacggaaagattttccgctggtagtttatcaaactggttcgggaacgcaaactaacatgaatgtaaacgaagtggtggcccatatggctgctaaaattaatgcggaaatagaaattttgcctaatgatgatgttaaccatggacaaagttcaaacgatattttcccaacggccatgaatattacagctgcagtagcggtagtacgcttggaagaggcagttcaacatttaattgaacaattagaccaaaaacaaaagcaatattggaacgtggttaaaattggacgaactcacctccaggatgcgactccactaacttttgggcaagaaattagtggatggaagagcgcccttgaacatgatttggaatacttaaaagaacttaattcaacgctaagtgaattggcaatggggggtacagcggtcggaacgggtttaaatgcagctccgcatttttcgtccataattgcagctcagatgagcgaagtctaccactttgaatttacggcggattctaacaaattttatggactagcacatcactccggtttgaatgtggttcacggagcgattaaaactttggcgagtgatttgatgaaaattgctaatgatattcggttcttgggtagtggtccgcgggcaggatatggcgagttgaaactaccagcaaacgagcccggatcatcaatcatgccaggtaaagtcaatccaactcaagcagaggcccttaccatggcggcagtgcgggttatggctaatgacgttgcgattgatttagctgcaagccagggcaattttgaaatgaatgtttataaaccagttatcatcagctctttcttggaatcaaccactctattagaaggtacgattcgtagttttaccgacttgatgatcgctggattagaagttaatgcggaacggatggaagaattagttaaccattccttgatgacagttaccgccttatctcctcatattggctaccacgatagtgctaaaatcgctcagcaggctgaaaaagatgggaccacgctgaaagaagctgccctaaaatctggtaaagttaccgctgagcaatttgatcagtgggtggttcccattgagatgactaattatgataaatag

SEQ ID NO: 115345 - protein, 460 aa, Pediococcus pentosaceus ATCC 25745
MEKYRTEEDTLGPVQIPVDALWGAQTERSRHNFATGAKMPLEIIKALLQIKKAAAIANKKEQSMAAEKADLIVVAIDRLLALDDAELRKDFPLVVYQTGSGTQTNMNVNEVVAHMAAKINAEIEILPNDDVNHGQSSNDIFPTAMNITAAVAVVRLEEAVQHLIEQLDQKQKQYWNVVKIGRTHLQDATPLTFGQEISGWKSALEHDLEYLKELNSTLSELAMGGTAVGTGLNAAPHFSSIIAAQMSEVYHFEFTADSNKFYGLAHHSGLNVVHGAIKTLASDLMKIANDIRFLGSGPRAGYGELKLPANEPGSSIMPGKVNPTQAEALTMAAVRVMANDVAIDLAASQGNFEMNVYKPVIISSFLESTTLLEGTIRSFTDLMIAGLEVNAERMEELVNHSLMTVTALSPHIGYHDSAKIAQQAEKDGTTLKEAALKSGKVTAEQFDQWVVPIEMTNYDK

SEQ ID NO: 115346 - DNA, 1377 bp, Oenococcus oeni PSU-1
  CDS (1)..(1377): transl_table=11
atggataacgagaaatatcgaatcgaaaaagatactttgggagaagttaaaattcctgcaagtgccctgtggggacctcaaactgaacgaagtcgacaaaattttaaaatcgggcaaagaatgccttttgaaataattgagtctctattacagattaaaaaagcagctgcagtggttaacgaaaaaaatggtgaaattagtaaagaaaaatctaatttaattgttgaagtaattgatcaacttttggtgggaaaatatcaagatgattttccattagttgtttatcaaacaggtagtggaacgcaaacgaatatgaatgtgaacgaagtgatagttcacttggcggctgaaattaatcctaaggttttgttacaagcaaatgatgatgttaatcactcgcagagttccaatgatacttttcccaccgcgatggcaattgctgcttatgatgctgtaaaaaaattgttatctgttttggaacatttggaaaattcattgaacgataaagcacttgagtttaaaaatattgtaaaaattggtcgtacccatcttcaagatgccaccccaattacttttggacaggaaattagtggttggtccagccagataaaacacaattttgattatttgcaaaataataaaaagactttacttgaattgccaatcggaggaacagcggtcggtaccggtttgaataccgtcaaagattttgatcgacaaatggtcgaacaactatcggtccaaaaaggaataagttatcttgttgctccgaataagtttcaaggtctggccgcacatagcgctattaatttcattcatggtatttttaagactcttgcagctgacttagttaagattggcaacgatattcgttttctcgccagtggtcccagatcaggatatggtgagatcaatattcctgctaacgaacctggctcttcaatcatgcccggtaaaataaatccaactcaaatcgaagcactaacaatggtagctgcccgtgtaatgggaaatgatacaacaattgatttttcatccagtcaaggaaattttgaaatgaatgtttataagccaattataattcagagctttcttgaaagtgcaaagttattggctgaagcaattggttctgttgataagaatctaattcaaggaattaccgttaatcaaaaaagaatgaaagatctagtcgataattcgttgatgactgttacggctttaagcccacatatcggctatgaaaaaagtgccaaaattgcccaaaaagcattgcgtgaaaacaccaaattaattgatgccgctttagctagtgggtatgtaactgaaaaagagtttagagagtgggtcgatccttttaaaatgacttcacataaatga

SEQ ID NO: 115347 - protein, 458 aa, Oenococcus oeni PSU-1
MDNEKYRIEKDTLGEVKIPASALWGPQTERSRQNFKIGQRMPFEIIESLLQIKKAAAVVNEKNGEISKEKSNLIVEVIDQLLVGKYQDDFPLVVYQTGSGTQTNMNVNEVIVHLAAEINPKVLLQANDDVNHSQSSNDTFPTAMAIAAYDAVKKLLSVLEHLENSLNDKALEFKNIVKIGRTHLQDATPITFGQEISGWSSQIKHNFDYLQNNKKTLLELPIGGTAVGTGLNTVKDFDRQMVEQLSVQKGISYLVAPNKFQGLAAHSAINFIHGIFKTLAADLVKIGNDIRFLASGPRSGYGEINIPANEPGSSIMPGKINPTQIEALTMVAARVMGNDTTIDFSSSQGNFEMNVYKPIIIQSFLESAKLLAEAIGSVDKNLIQGITVNQKRMKDLVDNSLMTVTALSPHIGYEKSAKIAQKALRENTKLIDAALASGYVTEKEFREWVDPFKMTSHK

SEQ ID NO: 115348 - DNA, 1386 bp, Solibacter usitatus Ellin6076
  CDS (1)..(1386): transl_table=11
atgatcgcgccggttcgtaaggaaactgacagccacggtgaagtcgaagtccccgccgataagctctggggcgcccagacccagcgttccctcgagcatttcagcatcggccgcgatctcatgccgcgcgagatgatcactgcctacgccaccttgaaaaaggccgcggccgcggcgaaccacgagatcgggggcctcgacgacgagcgccacaaattgatcgcccaggcctgcgacgaaatcctcgctggtctgcaccacgacatgtttccccttcacgtctggatctccggcagcggcacccagttcaatatgaacgtgaacgaggtcatctctaatcgctgctgccagctcgccggcaccccgttgggcagcaagacccccgtccaccccaacgaccacgtgaacatgtcgcagtcgtcgaatgacacctttcccgctgcgatgtacatcgcggccgccgtcaacgtgaagcagcgcctgactccggccgtcaccgccctgcgcgatgccatccacgaaaaagcccgcgcgtggaacgacatcatcaaaatcggccgcacccacctgcaggacgccaccccgctgacgctcggccaggaatggtccggctacgctgcgatgttgaccgacgatctcgatcgcctcgagtccgcgcttcccggcctctaccgcctcgcgctcggcggcactgccgtgggaaccggcatcaacgcgcctccggagttcggagcggcggcagccgccggaatcgccgcgctcaccggcctgcccttcgtatccgctccgaacaagttcgccgtgcaaggcgcgcacgatgccctggtgcaactctccggcacgctccgcaccctcgccgtgtccctgtacaaaatcgccaacgacattcgcctgctctcctgcggaccccgcgctggaattgcggagttgtccctccccgaaaatgagcccggctcctccatcatgccgggcaaggtcaaccccacccagtgcgagtcgctcaccatgatcgccgcccaggtaatggccaacgacgtcgccgtcggtctcgccggcgctggcggccatctcgaaatgaacgtctacaagccgctgctcatcttcaacatcacccactccctcgagatcctcaccggcggcgtcaccaacttccgcaaatacctggtcgaaggtacccgccccaatcggaaaaagatccaggagtacctcgaccgttctctgatgctggtaacggctctcactcccgtcatcggctatgacaaggcagcccagatcgctcactacgcccagcacaatgacctgaccctgaaagccgccgccctgcacctgggcttcgtgaccgagcacgacttcgatcgcctggtcgatccccgcaagatggtgtag

SEQ ID NO: 115349 - protein, 461 aa, Solibacter usitatus Ellin6076
MIAPVRKETDSHGEVEVPADKLWGAQTQRSLEHFSIGRDLMPREMITAYATLKKAAAAANHEIGGLDDERHKLIAQACDEILAGLHHDMFPLHVWISGSGTQFNMNVNEVISNRCCQLAGTPLGSKTPVHPNDHVNMSQSSNDTFPAAMYIAAAVNVKQRLTPAVTALRDAIHEKARAWNDIIKIGRTHLQDATPLTLGQEWSGYAAMLTDDLDRLESALPGLYRLALGGTAVGTGINAPPEFGAAAAAGIAALTGLPFVSAPNKFAVQGAHDALVQLSGTLRTLAVSLYKIANDIRLLSCGPRAGIAELSLPENEPGSSIMPGKVNPTQCESLTMIAAQVMANDVAVGLAGAGGHLEMNVYKPLLIFNITHSLEILTGGVTNFRKYLVEGTRPNRKKIQEYLDRSLMLVTALTPVIGYDKAAQIAHYAQHNDLTLKAAALHLGFVTEHDFDRLVDPRKMV

SEQ ID NO: 115350 - DNA, 1413 bp, Mycobacterium avium 104
  CDS (1)..(1413): transl_table=11
atggccactgacgacggcgacaccgactaccgcatcgagcgcgacaccatgggcgaggtccgggtacccgcaaaagcgttgtggcgcgcgcaaacccagcgcgcggtcgagaacttcccgatctcgggccggggcctggaacgcacccagatccgcgccctgggcctgctgaagggcgcctgcgcgcaggtcaacaaggatctggggttgctggcgccggagaaggccgacgcgatcatcgccgcggccgccgagatcgccgacggtcgccacgacgaccagtttcccatcgacgtcttccagaccggctcgggcaccagctcgaacatgaacaccaacgaggtgatcgcgtccatcgcggccgccaacggggtgaccgtgcatcccaacgacgacgtcaacatgtcgcagtcgtcgaacgacaccttccccaccgcaacccacatcgcggccacggaagccgcagtgcgccatctgattccggcgctgcaggtgctgcacgacgccctggcgagcaaggcccgcgagtggcacaccgtggtcaagtcgggccgcacccacctgatggacgccgtgccggtgacgctcggccaggagttcagcggctacgcccgccagatcgaggccggcatcgagcgggtgcgggccacgctgccccggctgggtgagctggcgatcggcgggaccgcggtgggcaccggtctcaacgctcccgacggcttcggcgccaaggtggtcgagacgctgatcgcctccaccggattgagcgaattgcgcacggcgacaaactcgttcgaggcccaggcggcgcgcgacgggctggtcgaggcctccggcgcgctgcgcaccatcgcggtgtcgctgaccaagatcgccaacgacatccgctggatgggttcggggccgctgaccggcctggccgagatcgcccttcccgatctgcagccgggcagctcgatcatgccgggcaaggtgaatccggttatccccgaagcggttacgcaggtcgccgcgcaggtgatcggcaacgacgcggcggtggccgtcggcggcttgtcgggcgccttcgagctcaacgtgtacatcccgatgatggcccgcaacatcctggagtcgttcaagctgctgaccaacgtgtcgaggctgttcgccgagcgctgcatcagcgggctgagcgccaacgtggagcacctgcgcgagctcgccgaatcctcaccgtcgatcgtgacgccgctgaactcggcgatcggctacgaggaggcggcggcggtggccaagcaggcgctcaaggagcgcaagacgattcggcagaccgtcatcgaccgcgggctgatcggcgacaagctgtcgctcgaggagctcgaccgccggctcgacgtgctggccatggccaaggtcaagccgcaggactga

SEQ ID NO: 115351 - protein, 470 aa, Mycobacterium avium 104
MATDDGDTDYRIERDTMGEVRVPAKALWRAQTQRAVENFPISGRGLERTQIRALGLLKGACAQVNKDLGLLAPEKADAIIAAAAEIADGRHDDQFPIDVFQTGSGTSSNMNTNEVIASIAAANGVTVHPNDDVNMSQSSNDTFPTATHIAATEAAVRHLIPALQVLHDALASKAREWHTVVKSGRTHLMDAVPVTLGQEFSGYARQIEAGIERVRATLPRLGELAIGGTAVGTGLNAPDGFGAKVVETLIASTGLSELRTATNSFEAQAARDGLVEASGALRTIAVSLTKIANDIRWMGSGPLTGLAEIALPDLQPGSSIMPGKVNPVIPEAVTQVAAQVIGNDAAVAVGGLSGAFELNVYIPMMARNILESFKLLTNVSRLFAERCISGLSANVEHLRELAESSPSIVTPLNSAIGYEEAAAVAKQALKERKTIRQTVIDRGLIGDKLSLEELDRRLDVLAMAKVKPQD

SEQ ID NO: 115352 - DNA, 1407 bp, Mycobacterium smegmatis str. MC2 155
  CDS (1)..(1407): transl_table=11
atggccgacaccgacgtcgaataccgcatcgaacacgacaccatgggtgaagtccgggtacccaaggacgccctgtggcgcgcgcagacccagcgcgcggtcgagaacttccccatctcgttccgcggcctcgagcgcacgcagatccgcgcgctcggtctcctgaaggccgcgtgcgcgcaggtcaacaaggacctgggcctgctggaccccgagaaggccgacgcgatcatcgccgccgcgggtgagatcgccgagggcaagcacgacgaccagttccccatcgacgtgttccagaccggctcgggcacgagctcgaacatgaacaccaacgaggtgatcgcgtcgatcgcggcagccaacggtgtgacggtgcacccgaacgaccacgtgaacatgtcgcagagctccaacgacaccttccccaccgcgacccacatcgcggccacggaagccgctgtgcgccatctgatcccggcgctggaggtcctgcacgcatcgctggccgccaaggccaagcagtggcgcaccgtcgtcaagtccggccgcacgcacctcatggacgccgtgcccgtcacgctcgggcaggagttcggcggctatgcgcgccagatcgaggcaggcatcgaacgcgtcaaggccacgctgccacgtctcggtgaactcgcgatcggcggcaccgccgtcggcaccggcctcaacgcgccggaaggcttcggcgccaaggtcgtcgaggtgctcgtcaacgagaccggcctggccgagttgcgcaccgccgtcgactcgttcgaggcgcaggccgcgcgcgacgggctggtcgaggcctccggtgcgctgcgcaccatcgcggtgtcgctcaccaagatcgccaacgacatccgctggatgggctcgggcccgctgaccggcctggccgagatccagctgccggacctgcagccgggcagctcgatcatgccgggcaaggtcaaccccgtcctgcccgaggccgtcacgcaggtggcctgccaggtggtcggcaacgacgcggcgatcgcgttcggcggtgcgtcgggtgccttcgagctcaacgtgtacatcccgatgatggcgcgcaacctgctcgagtcgttcacgttgctgtccaacgtgtcccggctgttcgccgagcgctgcatcgacggcctggtggccaacgaggagcgcctgcgggagctcgccgagtcctcgccgtcgatcgtgacgccgctgaactcggcgatcggttacgaagaggccgccaaggtcgccaagcaggctctcgcggagaagaagaccatccgccagaccgtgatcgaccgtggcctcatcggcgacaagctgagcctcgaggaactcgaccgtcgtctcgacgtgctcgccatggcgcgggtcaaggacggcgagtag

SEQ ID NO: 115353 - protein, 468 aa, Mycobacterium smegmatis str. MC2 155
MADTDVEYRIEHDTMGEVRVPKDALWRAQTQRAVENFPISFRGLERTQIRALGLLKAACAQVNKDLGLLDPEKADAIIAAAGEIAEGKHDDQFPIDVFQTGSGTSSNMNTNEVIASIAAANGVTVHPNDHVNMSQSSNDTFPTATHIAATEAAVRHLIPALEVLHASLAAKAKQWRTVVKSGRTHLMDAVPVTLGQEFGGYARQIEAGIERVKATLPRLGELAIGGTAVGTGLNAPEGFGAKVVEVLVNETGLAELRTAVDSFEAQAARDGLVEASGALRTIAVSLTKIANDIRWMGSGPLTGLAEIQLPDLQPGSSIMPGKVNPVLPEAVTQVACQVVGNDAAIAFGGASGAFELNVYIPMMARNLLESFTLLSNVSRLFAERCIDGLVANEERLRELAESSPSIVTPLNSAIGYEEAAKVAKQALAEKKTIRQTVIDRGLIGDKLSLEELDRRLDVLAMARVKDGE

SEQ ID NO: 115354 - DNA, 1398 bp, Nocardioides sp. JS614
  CDS (1)..(1398): transl_table=11
atgacccttgacgacaccgcggacttccgcgtcgagcacgacagcatgggcgaggtccgcgtccccgcggacgcgctctggcgggcccagacccagcgagcggtcgagaacttcccgatcagcggcacgccgatcgagccggcgctgatccacgccatcggccgggtgaaggcggcggcggccacggtgaacgccgagctcggggtgctcgacggggagcaggcggaggcgatcgtcgcggccgcgaacgcggtcgcggaggggcgacacgacggcgggttccccatcgacgtcttccagaccggctcgggcaccagctcgaacatgaacgccaacgaggtgatcgcgaccctcgcccagcgagccggcaccgacgtgcaccccaacgaccacgtcaacgccagccagtcgagcaacgacacgttcccgaccgcgatccacgtggcgtcgacgctggcggtgaccggcgacctgctgcccggcctggccgtcctccaggccagcctgcagcgcaaggccgacgagttcgccggcctggtgaagtcggggcgcacccacctgatggacgccacgccggtgatgctcgggcaggagctcggcggctacgccgcgacggtgcggtacgccgcggagcgtctccagtcggtgctgccgcgggtgcgcgagctgcccctgggcggtacggcggtcggcaccgggatcaacaccccgcccgggttcgccgagcgggtgatcgccgtactcggcgagacgaccggcgagccgttcaccgaggcccgcgaccacttcgaggcgcaggggacccgcgactcgctggtcgagctgagcggcgtgctgcgcacgatcgcggtcgggctgatcaagatctgcaacgacctgcggtggatgtcctccgggccgacgaccggcctcgccgagatccacctgcccgacctccagccggggtcgagcatcatgcccggcaaggtgaacccggtgctgccggaggcgaccctgatggtgtgcttccaggtgatcggcaacgacgcggccgtcaccgccgccggcgcgagcggcagcttcgagctcaacgtcgcgatgccggtcatcgcccgcaacgtgctggagtccgcgcgcctgctggccgcgtcgtcccgggtgctggccgagcgctgcatcgacggcatcaccgcgaacgccgagcggatgcggcagtacgccgagacctcaccgtccgtggtgacgccgctgaacaagcacatcggctacgaggccgcggccaaggtggccaagcgggcgctcgccgagggcgcgacgatccgcgagaccgtgatcgcgatgggctacgtcgagcgcggcgagctcaccgaggcgcagctcgacgaggccctcgacgtggagtcgatgacccacccctga

SEQ ID NO: 115355 - protein, 465 aa, Nocardioides sp. JS614
MTLDDTADFRVEHDSMGEVRVPADALWRAQTQRAVENFPISGTPIEPALIHAIGRVKAAAATVNAELGVLDGEQAEAIVAAANAVAEGRHDGGFPIDVFQTGSGTSSNMNANEVIATLAQRAGTDVHPNDHVNASQSSNDTFPTAIHVASTLAVTGDLLPGLAVLQASLQRKADEFAGLVKSGRTHLMDATPVMLGQELGGYAATVRYAAERLQSVLPRVRELPLGGTAVGTGINTPPGFAERVIAVLGETTGEPFTEARDHFEAQGTRDSLVELSGVLRTIAVGLIKICNDLRWMSSGPTTGLAEIHLPDLQPGSSIMPGKVNPVLPEATLMVCFQVIGNDAAVTAAGASGSFELNVAMPVIARNVLESARLLAASSRVLAERCIDGITANAERMRQYAETSPSVVTPLNKHIGYEAAAKVAKRALAEGATIRETVIAMGYVERGELTEAQLDEALDVESMTHP

SEQ ID NO: 115356 - DNA, 1380 bp, Azoarcus sp. BH72
  CDS (1)..(1380): transl_table=11
atggatccgagcacccgaatcgaacgcgacagcatgggcgagatggcggtgccgctcgccgcgctgtacggcgcgcagacgcaacgcgccgtgctcaacttccccatcagtggccagcgcctgcccccggccttcatccgcgcgctgctgctggtcaagcttgccgccgcgcgcgccaacgtggaactcgggcagttgcccgcgcccaccggcgaggccatcgcgcaggcctgcgaacaactgctggcaggcgagttcatgcagcactttccggtcgacgtgttccagaccggttccggcaccagctccaacatgaacgccaacgaggtcgtagcgacggtcgccagccgcatcctcggcgcgccggtcagccccaacgacgacgtcaaccacggccagagcagcaacgacacggtgccgagcgcgatccacatcgccgcggcgattgcgctcgccggcgaactgctgcccgccctgcgctacctcgcccacaccatccgcgacaaggcgcgcacggtgcatcaccacgtcaagaccggccgcacccacctgatggacgcgatgccggtgcggatgagccaggtgctcaacggctgggcgcagcagctcgacaccgacatcgagcacctgcgcgcgctgcagccttcggtgcagagcctggcccagggcggcaccgcggtgggaaccggcatcaacgcccatccgcagttcgctgcctgcttctgcgccgaactcggccgcctgaccgggctgggcttcaccccggcgcacgactacttcgcgctgatgggagcgcaggacgtggcggtggcgctgtcgggccagctcaagaccaccgcggtaagcctgatgaagatcgccaacgacctgcgctggatgaactccggcccgcttgccgggctgggcgagatcgagctggaggcactgcagccgggctcctcgatcatgccgggcaaggtgaacccggtgatcccggaagcgacctgcatggtcgcggcgcaggtcatcggcaacgacgccgcgatcaccgtggcgggccaatccggcaatttcgaactcaacgtgatgctgccgctgatcgcccacaacctgctcggcagcctgcacctgctgaccaccaccagccgcctgctggccgaccgcgcgatcgcgggcttccgggtaaacgacgcccgcctgaaggaggcgctggcgcgcaaccccattctggtgactgcgctgaatccggtcatcggctacgccaaggcggcggaaatcgccaagcaggcctatcgcgagggacgcccgatcatcgacgtcgccgccgagcagaccggcatcgaccgcgccgaactcgaacgcctgctcgaccccgagaagctcaccgccggcgggctgtga

SEQ ID NO: 115357 - protein, 459 aa, Azoarcus sp. BH72
MDPSTRIERDSMGEMAVPLAALYGAQTQRAVLNFPISGQRLPPAFIRALLLVKLAAARANVELGQLPAPTGEAIAQACEQLLAGEFMQHFPVDVFQTGSGTSSNMNANEVVATVASRILGAPVSPNDDVNHGQSSNDTVPSAIHIAAAIALAGELLPALRYLAHTIRDKARTVHHHVKTGRTHLMDAMPVRMSQVLNGWAQQLDTDIEHLRALQPSVQSLAQGGTAVGTGINAHPQFAACFCAELGRLTGLGFTPAHDYFALMGAQDVAVALSGQLKTTAVSLMKIANDLRWMNSGPLAGLGEIELEALQPGSSIMPGKVNPVIPEATCMVAAQVIGNDAAITVAGQSGNFELNVMLPLIAHNLLGSLHLLTTTSRLLADRAIAGFRVNDARLKEALARNPILVTALNPVIGYAKAAEIAKQAYREGRPIIDVAAEQTGIDRAELERLLDPEKLTAGGL

SEQ ID NO: 115358 - DNA, 1389 bp, Neisseria meningitidis FAM18
  CDS (1)..(1389): transl_table=11
atgaacacccgcaccgaacacgacaccatgggcaatgtcgaagtcccgtccgaagcctattggggcgcgcagacccagcgcagccgcaacaatttcaaaatcggcggcgaaaccctgccgcagccgctgatttatgctttggcgctggtgaaaaaagccgctgccgcgaccaatgtttccctcggcaggattaagccggaacaggcggatttgattacgcaggcggcggatgatgtgttgaacggcaggcttgacggacagtttcctttagtggtttggcagaccggctccggcacgcagtccaatatgaacatgaacgaagtgctggcgaaccgcgccaacgaaatcgccggtacgggtttggcggcgtatcagcccgtccatcccaacgaccatgtgaaccacgcgcaatcgaccaacgacgcattcccgaccgccatccacgttgccgccgcgattgaaatcaaccgccacctcatccccgccgtaaaagccctgcgcgacaccttggacaaaaaagcccaagccttcgcccccatcgtcaaaatcggccgcacccacttgcaggacgcgacgccgctgactttaggccaagaattttccggctacgtttcccagctcgaccacggcttaggccgtctgaatgacgcgcttaaagacttgtatgaacttgctttgggcggtacggcggtcggcacgggtttgaacagccatcccgaatacgccgaaaaagccgccgccaaactcgccgaattgtccggcttgccgtttgtcagcgcgccgaacaaatttgaagccttgggcggacgcgatgccgccgttgccgcttcgggcgcattgaaaacgctggcggcaagcctgaataaaatcgccaacgacatccgctggctggcaagcggcccgcgctgcggtttgggcgaaatcaaaatccccgaaaacgagccgggttcgtccatcatgccgggcaaagtcaacccgacccaatgcgaagcgatgaccatggtgtgctgccaagtgttcggcaacgacgttaccatcggcatggcgggcgcgtcgggcaatttcgagctgaacgtctatatgcccgttatcgcctacaacctcttgcaatccatccgcctgttgggcgacgcgtgcaacagcttcaacgaacactgcgccgtcggcatcgaacccgtaccggaaaaaatcgactatttcctgcaccattccctgatgctggttactgcgttaaaccgtaaaatcggctacgaaaacgccgccaaagtcgccaaaaccgcctacaaaaacaacaaatcgttgcgcgaaaccgccgttgagttgggcttgctgacgggcgaagaatttgacgaactggtcgttcctgccgatatggttcatccgcgctaa

SEQ ID NO: 115359 - protein, 462 aa, Neisseria meningitidis FAM18
MNTRTEHDTMGNVEVPSEAYWGAQTQRSRNNFKIGGETLPQPLIYALALVKKAAAATNVSLGRIKPEQADLITQAADDVLNGRLDGQFPLVVWQTGSGTQSNMNMNEVLANRANEIAGTGLAAYQPVHPNDHVNHAQSTNDAFPTAIHVAAAIEINRHLIPAVKALRDTLDKKAQAFAPIVKIGRTHLQDATPLTLGQEFSGYVSQLDHGLGRLNDALKDLYELALGGTAVGTGLNSHPEYAEKAAAKLAELSGLPFVSAPNKFEALGGRDAAVAASGALKTLAASLNKIANDIRWLASGPRCGLGEIKIPENEPGSSIMPGKVNPTQCEAMTMVCCQVFGNDVTIGMAGASGNFELNVYMPVIAYNLLQSIRLLGDACNSFNEHCAVGIEPVPEKIDYFLHHSLMLVTALNRKIGYENAAKVAKTAYKNNKSLRETAVELGLLTGEEFDELVVPADMVHPR

SEQ ID NO: 115360 - DNA, 1392 bp, Acidovorax sp. JS42
  CDS (1)..(1392): transl_table=11
atgacttccagcacccgtatcgaacgcgacaccttcggccccatcgaggtgccggccgacaggctctggggcgcgcagacgcagcgctcgctgcagaacttcgccatctcgggtgaacgacagccgcaggaactcatccgcgcgctggcgcaggtcaagcgcgcgtcggcccgggtcaaccacgcgctggggctgctgggggcggacaagacgcgcgccatcgtcgccgcggccgacgaggtgctgctgggccagcacgacgacgagttcccgctggtggtctggcagaccggctcgggcacgcagaccaacatgaacgtcaacgaggtgctggccaaccgcgccagcgagctgttgggcggcgagcgcggcgaggcacggctggtacatcccaacgacgacgtgaacaagagccagtccagcaacgacgtgttccccaccgccacgcatgtggccgcggtgcaggcgctggtgcaccggctgctgcccgccatggaggagctgcgcgccaccctgcaggccaaggccgaggcgttcgacgacatcgtgaagatcggccgcacccatctgcaggatgcgacgccgctcacgctggggcaggagatctcgggctgggtggcgcagcttgcccatggggaacgccacgtgcgcgcggcgctgccgcacctgtatgaactggccctgggcgggacggccgtgggcacgggcctgaatgcgcccgagggctacgccgaacgtgtggcgcaggagctggcccagttcaccggtcagcccttcgtgacctcgcccaacaagttcgaatcgctcgcatcgcaggacgcgctggtgcatgcccacggcgcgctgaagacgctggcggccagcctcacgaagatcgccaacgacgtgcggtggctggccagcggcccgcgctgcggcatcggcgagatcaccatccctgagaacgagcccggctcgtccatcatgcccggcaaagtgaaccccacgcagtgcgaggcgctgaccatgctgtgcgcccaggtgctgggcaacgacgtggccatcaacatcggcggggccagtggcaacttcgagctgaacgtgttccgcccgctggtggcgcacaacttcctgcagagcgtgcggttgctggccgacggcatggtgagcttcaacgagcactgcgccgtgggtatcgagcccaaccgcgcgcgcatcgcggagctggtggagcgctcgctgatgctggtgacggcgctcaccccgcacatcggctacgacaaggccgcggcgattgccaagaaggcgcacaaggaaggcagcacgctgcgcgaggccgcgctggcgctgggctacgtgacgcccgcgcagttcgatgagtgggtggtgcccgcccggatggtggggcgctag

SEQ ID NO: 115361 - protein, 463 aa, Acidovorax sp. JS42
MTSSTRIERDTFGPIEVPADRLWGAQTQRSLQNFAISGERQPQELIRALAQVKRASARVNHALGLLGADKTRAIVAAADEVLLGQHDDEFPLVVWQTGSGTQTNMNVNEVLANRASELLGGERGEARLVHPNDDVNKSQSSNDVFPTATHVAAVQALVHRLLPAMEELRATLQAKAEAFDDIVKIGRTHLQDATPLTLGQEISGWVAQLAHGERHVRAALPHLYELALGGTAVGTGLNAPEGYAERVAQELAQFTGQPFVTSPNKFESLASQDALVHAHGALKTLAASLTKIANDVRWLASGPRCGIGEITIPENEPGSSIMPGKVNPTQCEALTMLCAQVLGNDVAINIGGASGNFELNVFRPLVAHNFLQSVRLLADGMVSFNEHCAVGIEPNRARIAELVERSLMLVTALTPHIGYDKAAAIAKKAHKEGSTLREAALALGYVTPAQFDEWVVPARMVGR

SEQ ID NO: 115362 - DNA, 1395 bp, Haemophilus somnus 2336
  CDS (1)..(1395): transl_table=11
atggcatttcgtatcgaaaaagacactatgggcgaagttcaagttcctgctgataaatattgggctgcacaaacagaacgttctcgtaacaatttcaaaatcggtcctgaagcttcgatgccaaaagaaattattgaggctttcggttatttaaaaaaagccgccgcttatgcaaaccatgatttaggtgtgttaaatacggaaaaacgtgatttaatcgctcgggcttgcgatgaaattcttgccaataaacttgatgaccaattccctcttgtaatttggcaaactggttcaggcactcaatcgaatatgaatgtcaatgaagttgttgcaaaccgtgcacatgtcattcaaggcggtaaattaggagaaaaatccgttattcacccgaatgatgatgtcaataaatcccaatcttcaaatgatacttatcctaccgccatgcatattgctgcttataaaaaagtggttgaacatacgttaccttgtgtcagacgtttgcaaaaaacgttagcagaaaaagcagaattatttaaagatgttgtaaaaattggtcgtactcatttaatggacgctacaccattaactttaggccaagagttttcggcgtatgcggcacaacttgctttcggtatcaaggcactggaaaacaccttaccgcatttgcgtgagcttgccttaggtggcacagctgttggtacagggctgaatacacctaaaggctatgatgtaaaagtagcggaatatattgctaaatttacagggttgccttttgttaccgcacaaaataaatttgaagctcttgcaactcatgatgcgattgttgaaactcatggtgccttaaaacagttagcagtttctctttacaaaatcgccaatgatgttcgtttattggcttcaggtccacgctcaggcattggggaaattctcattcctgaaaatgagccgggttcatcaattatgccgggtaaagtaaacccaacgcaatgtgaagcaatgacaatggtttgtgcacaagtactaggtaatgatgtcactatttctttcgcaggtacacaaggtcatttccaattaaatgtgtataaacccgtcatggcatacaatttcttacaatcggcacaattattaggtgatgcttgtgtgtcatttgatgaacattgtgcaatgggtattgagccaaactatccacgtattaagcaacaactggagcaatctttaatgttagttaccgcacttaatacgcatattggttatgaaaatgcagctaaaattgcgaaaactgcacataaaaatggtacaacattgaaagcagaagccatcaatcttgggttggtgagtgcggaacaattcgatgaatgggtacgtccggaagatatggttggcagcttaaaatag

SEQ ID NO: 115363 - protein, 464 aa, Haemophilus somnus 2336
MAFRIEKDTMGEVQVPADKYWAAQTERSRNNFKIGPEASMPKEIIEAFGYLKKAAAYANHDLGVLNTEKRDLIARACDEILANKLDDQFPLVIWQTGSGTQSNMNVNEVVANRAHVIQGGKLGEKSVIHPNDDVNKSQSSNDTYPTAMHIAAYKKVVEHTLPCVRRLQKTLAEKAELFKDVVKIGRTHLMDATPLTLGQEFSAYAAQLAFGIKALENTLPHLRELALGGTAVGTGLNTPKGYDVKVAEYIAKFTGLPFVTAQNKFEALATHDAIVETHGALKQLAVSLYKIANDVRLLASGPRSGIGEILIPENEPGSSIMPGKVNPTQCEAMTMVCAQVLGNDVTISFAGTQGHFQLNVYKPVMAYNFLQSAQLLGDACVSFDEHCAMGIEPNYPRIKQQLEQSLMLVTALNTHIGYENAAKIAKTAHKNGTTLKAEAINLGLVSAEQFDEWVRPEDMVGSLK

SEQ ID NO: 115364 - DNA, 1392 bp, Rickettsia sibirica 246
  CDS (1)..(1392): transl_table=11
atgaaaaattacagaaccgaaagtgattcttttggagaaattcaaatagaagaaaaattttattggggggctcaaactcaaagatctttagaaaattttaaaataggcaagcaaaaaatgcctgaaattttaattcgtgctcttgctattttaaaaaaatgtgcagcacaggttaatcatgagtttggtgatttagaagctaaaatcgctataagtatagataaagccacggatagaatcttagaaggcgaatttgaggataattttcctttagtagtttggcaaacaggttcaggaacgcaaacaaacatgaatatgaacgaggttattgcctctattgccaacgaagaattaacaggcaagaaaggcggcaaatctccggtacatcctaacgatcatgttaataaaggacaatcatccaacgactcttttccaaccgctatgcatatagcaaccgtacttgcaactaaacagcaactgataccagctttgaataatatactcacctctttgcaggataagtcaaaagattgggacaaaatcataaaaataggacgtacccacttgcaggatgcaactcctttaactcttaaacaggaattctccggatatattacacaaatagagtatgctttagaacgcatagaaaatgcactagaaaaagtttatctacttgcccaaggaggcacagcagtcggtacaggtattaactcaaaaataggctttgatataaaatttgccgagaaagtggcagagtttactaaccaaccctttaagacggctcctaataaatttgaaagtctagctgctcacgacgcactagtagaattttcaggaactcttaatactatagcagttagcttaatgaaaatagcaaatgatataagactgctcggctccggtccaagatgcggtcttggtgagctacatttacctgaaaatgaacctggttcttctattatgcccggtaaagtaaaccctacacaagtcgaagctttaacaatggtgtgcagtcaggtgatggggaatcatgttacggttactattgccggctcaaacggacatcttgaacttaacgtatttaaacccgtaataatatacaatatcctacaatctatagagctgttatccgatagcgtaaatagctttgttactcactgtgttaaaggattagaacccaatatagcacgcattaatgatttacgtgataaatctctaatgcttgttacagctcttaatccgcatataggctatgataatgctgcaaaaattgctaaagaagcacataagcacgggatcactttaaaagaagcagctaaaaaactcaatcttctatcggaagcaaaatttgataaaatagtagtacctgaaaaaatggttagtcaatcttag

SEQ ID NO: 115365 - protein, 463 aa, Rickettsia sibirica 246
MKNYRTESDSFGEIQIEEKFYWGAQTQRSLENFKIGKQKMPEILIRALAILKKCAAQVNHEFGDLEAKIAISIDKATDRILEGEFEDNFPLVVWQTGSGTQTNMNMNEVIASIANEELTGKKGGKSPVHPNDHVNKGQSSNDSFPTAMHIATVLATKQQLIPALNNILTSLQDKSKDWDKIIKIGRTHLQDATPLTLKQEFSGYITQIEYALERIENALEKVYLLAQGGTAVGTGINSKIGFDIKFAEKVAEFTNQPFKTAPNKFESLAAHDALVEFSGTLNTIAVSLMKIANDIRLLGSGPRCGLGELHLPENEPGSSIMPGKVNPTQVEALTMVCSQVMGNHVTVTIAGSNGHLELNVFKPVIIYNILQSIELLSDSVNSFVTHCVKGLEPNIARINDLRDKSLMLVTALNPHIGYDNAAKIAKEAHKHGITLKEAAKKLNLLSEAKFDKIVVPEKMVSQS

SEQ ID NO: 115366 - DNA, 1392 bp, Rickettsia rickettsii
  CDS (1)..(1392): transl_table=11
atgaaaaattacagaaccgaaagtgattcttttggagaaattcaaatagaagaaaaattttattggggggctcaaactcaaagatctttagaaaattttaaaataggcaagcaaaaaatgcctgaaattttaattcgtgctcttgctattttaaaaaaatgtgcagcacaggttaatcatgagtttggtgctttagaagctaaaatcgctataagtatagataaagccacggatagaatcttagaaggcgaatttgaggataattttcctttagtagtttggcaaacaggttcaggaacacaaacaaacatgaatatgaacgaggttattgcctctattgccaacgaagaattaacaggcaagaaaggcggcaaatctccggtacatcctaacgatcatgttaataaaggacaatcatccaacgactcttttccaaccgctatgcatatagcaaccgtacttgcaactaaacagcaactgataccagctttgaataatatactgacctctttgcaggataagtcaaaagattgggacaaaatcataaaaataggacgtacccacttgcaggatgcaactcctttaactcttaaacaggaattctccggatatattacacaaatagagtatgctttagaacgcatagaaaatgcactacaaaaagtttatctacttgcccaaggaggtacagcagtcggtacaggtattaactcaaaaataggctttgatataaaatttgccgagaaagtggcagagtttactaaacaaccctttaagacggctcctaataaatttgaaagtctagctgctcacgacgcactagtagaattttcaggaactcttaatactatagcagttagcttaatgaaaatagcaaatgatataagactgctcggctccggtccaagatgcggtcttggtgagctacatttacctgaaaatgaacctggttcttctattatgcccagtaaagtaaaccctacacaagtcgaagctttaacaatggtgtgcagtcaggtgatgggaaatcatgttacggttactattgccggctcaaacggacatcttgaacttaacgtatttaaacccgtaataatatacaatatcctacaatctatagagctgttatccgatagcgtaaatagctttgttactcactgtgttaaaggattagaacccaatatagcacgcattaatgatttacgtgataaatctctaatgcttgttacagctcttaatccgcatataggctatgataatgctgcaaaaattgctaaagaagcacataagcacgggatcactttaaaagaagcagctaaaaaactcaatcttctatcggaagcaaaatttgataaaatagtagtacctgaaaaaatggttagtcaatcttag

SEQ ID NO: 115367 - protein, 463 aa, Rickettsia rickettsii
MKNYRTESDSFGEIQIEEKFYWGAQTQRSLENFKIGKQKMPEILIRALAILKKCAAQVNHEFGALEAKIAISIDKATDRILEGEFEDNFPLVVWQTGSGTQTNMNMNEVIASIANEELTGKKGGKSPVHPNDHVNKGQSSNDSFPTAMHIATVLATKQQLIPALNNILTSLQDKSKDWDKIIKIGRTHLQDATPLTLKQEFSGYITQIEYALERIENALQKVYLLAQGGTAVGTGINSKIGFDIKFAEKVAEFTKQPFKTAPNKFESLAAHDALVEFSGTLNTIAVSLMKIANDIRLLGSGPRCGLGELHLPENEPGSSIMPSKVNPTQVEALTMVCSQVMGNHVTVTIAGSNGHLELNVFKPVIIYNILQSIELLSDSVNSFVTHCVKGLEPNIARINDLRDKSLMLVTALNPHIGYDNAAKIAKEAHKHGITLKEAAKKLNLLSEAKFDKIVVPEKMVSQS

SEQ ID NO: 115368 - DNA, 1395 bp, Haemophilus influenzae R2846
  CDS (1)..(1395): transl_table=11
atggcatttcgtattgaaaaagacacaatgggtgaagttcaagttccagcagataaatactgggctgcacaaactgaacgttcacgcaataactttaaaattggttcagccgcatcaatgccacatgaaattatcgaagcttttggctatttgaaaaaagcagccgcatttgctaatcatgatttaggtgtattacctcttgaaaaacgtgatttaattgctcaggcttgtgacgaaattttagcaaataaattagatgatcaattcccacttgttatttggcaaactggttctggtacacaatccaatatgaatgtaaacgaagtggttgccaatcgtgcacatgtgataaacggtggaaaattaggcgaaaaatcaatcattcatccaaatgacgatgtgaacaaatcacaatcttcaaatgatactttcccaacggcaatgcacattgcggcatataaaaaagtagttgagcacaccattccttgtgttgaacgtttacaaaaaacttttgcggcaaaatctgaagccttcaaaaacgtggtaaaaattggccgcactcacttaatggatgcaacgccactaacattaggccaagaattttcggcttatgtagctcaattagatttcggcttaaaagcattaaaaaatacgctgccacatttaagccaattagcattgggtggaactgcggttggcacaggtttgaacacgccgaaaggctatgatgtgaaagtggcagattacattgcaaaattcaccgcacttccgtttgttaccgcagataataaatttgaagcattagctgctcatgatgcgattgttgaaactcacggtgcattacgtcaattagccataagtttatttaaaatcgcgaacgatattcgtctattagcatcaggccctcgttcgggaattggcgaaattttaattcctgaaaatgaaccaggttcttcaattatgccaggtaaagtaaacccaactcaatgcgaagcgatgacaatggtctgtgcacaagtatttggtaatgacactacaatcgcatttgtgggttcacaaggtcacttccaattaaatgtgttcaaccctgtgatgattgcaaacttcttacaatctgctcaattattgggcgatgcttgcgtatctttcgatgaacactgtgcagtgggtattgagccaaactatccacgcattaaacaacaacttgaaaattcattgatgctggtgaccgcacttaatacgaatatcggttatgaaaatgcagctaaaattgcaaaaaccgcacacaaaaatggcaccacattacgtgaagaagcgattaatttaggtttagtgtctgccgaagattttgataaatgggttcgcccagaagatatggtgggtagcttaaaataa

SEQ ID NO: 115369 - protein, 464 aa, Haemophilus influenzae R2846
MAFRIEKDTMGEVQVPADKYWAAQTERSRNNFKIGSAASMPHEIIEAFGYLKKAAAFANHDLGVLPLEKRDLIAQACDEILANKLDDQFPLVIWQTGSGTQSNMNVNEVVANRAHVINGGKLGEKSIIHPNDDVNKSQSSNDTFPTAMHIAAYKKVVEHTIPCVERLQKTFAAKSEAFKNVVKIGRTHLMDATPLTLGQEFSAYVAQLDFGLKALKNTLPHLSQLALGGTAVGTGLNTPKGYDVKVADYIAKFTALPFVTADNKFEALAAHDAIVETHGALRQLAISLFKIANDIRLLASGPRSGIGEILIPENEPGSSIMPGKVNPTQCEAMTMVCAQVFGNDTTIAFVGSQGHFQLNVFNPVMIANFLQSAQLLGDACVSFDEHCAVGIEPNYPRIKQQLENSLMLVTALNTNIGYENAAKIAKTAHKNGTTLREEAINLGLVSAEDFDKWVRPEDMVGSLK

SEQ ID NO: 115370 - DNA, 1368 bp, Listeria monocytogenes str. 4b H7858
  CDS (1)..(1368): transl_table=11
atggaacgaatagagcgagatacgcttggagaaatttctgtagatgcgacgaaatattggggagcgcaaacagaacgaagtaaaaggaactttgctattggtgataatcctatgccgatagaaattatatatgcttttgctcaattaaagaaagccactgcaaaagtaaacgcagcagaaggaaaactatccgaagaaaaagcgatagcgattggccaggtttgtgatcaaatcattcaaggagaactagatgagcattttcctttagtcgtttggcaaaccggaagcggaacgcagagcaacatgaatgtcaatgaagttatcgcacatgttgccaacttaactttaggcgaaggacaaattcatccgaatgatgatgtcaacatgtcgcaaagctcgaacgacacatttccaacagcgatgcatatcgctgcatacggggctttagtaacaaaacttttacctgaaataactaaaatggaagctgttttggcagagaagaaaaataaatacatgcatctcgttaaaattggcagaacacatttgcaagacgcaaccccattaacacttggccaagaaattagtggctgggaagcatgtcttacaaataataaaaactatcttgaaacaagtatgaaagcaattttgccacttgcgattggtgggacggcagttggaactggcttaaatgcctcacgtgattttggtgataaggttgccgaagaattgatgaaacaaacgggatatccttttacttctgattccaataagtattttgctctaactagtcatagtccgattaattttgttcatggatccattcgtagccttgcttcggatctaatgaaaattgctaatgatatccgtttattagcaagtggaccacgtagcggcataggtgagttaacaatcccagctaatgaaccaggaagctccattatgccaggaaaagtaaatcctactcaatgtgaagcaatgacgatggtagcggctcaagtcatgggaaatgatgtgacaattaatgttgccgccagccaaggaaactttgaactcaatgtctacaagccagttatcatttttaatttcttagaatctgtcaaactgctttcagatagcatgcgttcgttccgattgcattgtttggaaggacttactgcgaatgaaaaagttattgaaacaaaagtaaatgactccctaatgcttgtgacagcattgaatccgcatatcggctatgaaaaagctgccaaaattgccaagctggcttttgatgaaaatacgacattaaaagaagcggcaatcaaaaccggttttgtgacagaaaaacaatttgatttatggattgatccgttaaaaatgactaatttgtaa

SEQ ID NO: 115371 - protein, 455 aa, Listeria monocytogenes str. 4b H7858
MERIERDTLGEISVDATKYWGAQTERSKRNFAIGDNPMPIEIIYAFAQLKKATAKVNAAEGKLSEEKAIAIGQVCDQIIQGELDEHFPLVVWQTGSGTQSNMNVNEVIAHVANLTLGEGQIHPNDDVNMSQSSNDTFPTAMHIAAYGALVTKLLPEITKMEAVLAEKKNKYMHLVKIGRTHLQDATPLTLGQEISGWEACLTNNKNYLETSMKAILPLAIGGTAVGTGLNASRDFGDKVAEELMKQTGYPFTSDSNKYFALTSHSPINFVHGSIRSLASDLMKIANDIRLLASGPRSGIGELTIPANEPGSSIMPGKVNPTQCEAMTMVAAQVMGNDVTINVAASQGNFELNVYKPVIIFNFLESVKLLSDSMRSFRLHCLEGLTANEKVIETKVNDSLMLVTALNPHIGYEKAAKIAKLAFDENTTLKEAAIKTGFVTEKQFDLWIDPLKMTNL

SEQ ID NO: 115372 - DNA, 1368 bp, Listeria monocytogenes str. 1/2a F6854
  CDS (1)..(1368): transl_table=11
atggaacgaatagagcgagatacgcttggagaaatttctgtagatgcgacgaaatattggggagcgcaaacagaacgaagtaaaaggaattttgctattggtgataatcctatgccgatagaaattatatatgcttttgctcagttaaagaaagccactgcaaaagtgaacgcagcagaaggaaaactagccgaagaaaaagcgatagcgattggccaggtttgtgatcaaatcattcaaggagaactagatgagcattttcctttagtcatttggcaaacaggaagcggaacgcagagcaacatgaatgtcaatgaagttatcgcacacgttgccaacttaactttaggcgaaggacaaattcatccaaatgatgatgttaacatgtcacaaagctcgaacgacacatttccaacagcgatgcacattgccgcatacggggctttagtaacaaaacttttaccagaaataactaaaatggaagctgttttgacagagaagaaaaataaatatatgcatctcgttaaaattggtagaacgcatttacaagatgcaactcctttaacacttggtcaagaaattagtggctgggaagcatgtcttacaaataataaaaactatcttgaaacaagtatgaaagcaattttgccacttgcaattggcgggactgcagttggaacgggcttaaatgcctcacgtgattttggtgataaggttgccgaagaattgatgaaacaaacgggatatccttttacttctgattccaataagtattttgctttaactagtcatagtccgattaattttgttcatggcgccattcgtagccttgcttcggatctaatgaaaattgctaatgatatccgtttattagcaagtggaccacgtagcggcataggtgagctagagataccagctaatgaaccaggaagctctattatgcccgggaaagtaaaccctacccaatgtgaagcaattacgatggtagcggctcaagtcatgggaaatgatgtgacaattaatgttgccgcaagccaagggaactttgagttaaatgtctacaagccggttatcatttttaatttcctagaatctatcaaacttcttgcagatagcatgcgttcgttccgagtgcattgtttggaaggacttactgcgaatgaaaaagttattgaaacaaaagtaaatgactccctaatgcttgttacagcattgaatccgcatatcggctatgaaaaagctgctaaaattgccaaactggcttttgatgaaaatacgacattaaaagaagcggcaatcaaaatcggctttgtgacagaaaaagaatttgatttgtggataaatccattgaaaatgactaatttgtaa

SEQ ID NO: 115373 - protein, 455 aa, Listeria monocytogenes str. 1/2a F6854
MERIERDTLGEISVDATKYWGAQTERSKRNFAIGDNPMPIEIIYAFAQLKKATAKVNAAEGKLAEEKAIAIGQVCDQIIQGELDEHFPLVIWQTGSGTQSNMNVNEVIAHVANLTLGEGQIHPNDDVNMSQSSNDTFPTAMHIAAYGALVTKLLPEITKMEAVLTEKKNKYMHLVKIGRTHLQDATPLTLGQEISGWEACLTNNKNYLETSMKAILPLAIGGTAVGTGLNASRDFGDKVAEELMKQTGYPFTSDSNKYFALTSHSPINFVHGAIRSLASDLMKIANDIRLLASGPRSGIGELEIPANEPGSSIMPGKVNPTQCEAITMVAAQVMGNDVTINVAASQGNFELNVYKPVIIFNFLESIKLLADSMRSFRVHCLEGLTANEKVIETKVNDSLMLVTALNPHIGYEKAAKIAKLAFDENTTLKEAAIKIGFVTEKEFDLWINPLKMTNL

SEQ ID NO: 115374 - DNA, 1392 bp, Rickettsia akari str. Hartford
  CDS (1)..(1392): transl_table=11
atgaaaaattacagaaccgaaagcgattcttttggagaaattcaaatagaagaaaaattttattggggagctcaaactcaaagatctttagaaaattttaaaataggcaaacaaaaaatgcctgaaattttaattcgtgctcttgctattttaaaaaaatgtgcagcacaggttaattatgagtttggtgatttagaagctaaaatagctacaagtatcgataaagctacagatagaatcttagaaggcgaatttgaggataattttcctttagtagtttggcaaacgggttcgggtacgcaaacaaacatgaatatgaacgaggttattgcatctattgctaatgaagaattaacaagcaagaaaggcggcaaatctccagtacatcctaacgaccatgttaataaaggacaatcatccaacgactcttttccaaccgctatgcatatagcaaccgtacttgcaactaaacagcaacttataccggctttgaataatttacttacagctttgcaagacaagtcaaaagattggggtaaaatcataaaaataggacgcacccacttgcaggacgcaactcctttaactcttaaacaggaattctccggatatattacacaaatagagtatgctttagaacgcataggagatgcactaaaaaaagtttatctacttgctcaaggtggaacggcagtcggcacaggtattaactcaaaaataggctttgatatcagatttgctgagaaagtggcagagtttactaaacaacccttcaagacggctcctaataaatttgaaagtctagctgcccacgacgcactagtagaattttcaggaactcttaatactatagcagttagcttaatgaaaatagcacatgatataaggttactcgggtcaggtccaagatgcggtcttggtgagctgcatttaccagaaaacgaacccggttcttcgattatgcccggtaaagtaaaccctacccaagtcgaagctttaacaatggtgtgcagtcaggtgatgggaaatcatgttacggttactattgccggctctaacggacatcttgaacttaacgtatttaaacctgtaataatatacaatatcctacaatctatagagctgttatccgatagcgtaaatagctttgttactcactgtgttaagggcttagaacctaatatagcacgcattaatgatttacgtgataaatcgctaatgcttgttacggctcttaatccgcatatcggctatgataacgccgcaaaaattgctaaagaagctcataagcatggtattactctaaaagaagcagctaaaaaactcaatcttttatcggaagaagatttcgataaaatagtagtgcctgtaaaaatggttggacaaccttag

SEQ ID NO: 115375 - protein, 463 aa, Rickettsia akari str. Hartford
MKNYRTESDSFGEIQIEEKFYWGAQTQRSLENFKIGKQKMPEILIRALAILKKCAAQVNYEFGDLEAKIATSIDKATDRILEGEFEDNFPLVVWQTGSGTQTNMNMNEVIASIANEELTSKKGGKSPVHPNDHVNKGQSSNDSFPTAMHIATVLATKQQLIPALNNLLTALQDKSKDWGKIIKIGRTHLQDATPLTLKQEFSGYITQIEYALERIGDALKKVYLLAQGGTAVGTGINSKIGFDIRFAEKVAEFTKQPFKTAPNKFESLAAHDALVEFSGTLNTIAVSLMKIAHDIRLLGSGPRCGLGELHLPENEPGSSIMPGKVNPTQVEALTMVCSQVMGNHVTVTIAGSNGHLELNVFKPVIIYNILQSIELLSDSVNSFVTHCVKGLEPNIARINDLRDKSLMLVTALNPHIGYDNAAKIAKEAHKHGITLKEAAKKLNLLSEEDFDKIVVPVKMVGQP

SEQ ID NO: 115376 - DNA, 1374 bp, Crocosphaera watsonii WH 8501
  CDS (1)..(1374): transl_table=11
atgagaatagaaagtgatacgatgggaaaaattgaagttccatcagacgcttattggggcgcacagacccaaagatccctacgttattttgccattggtgatgataccatgcccagggaaatgattagggcgatcgctattctaaaaaaagccacagctattgttaataaaaacttaggaaaattagacactaaaaaagcagaattaattgtacaagcagcagatgaagtaataacaggaaaattagatgaacactttcccttaaaaatttggcaaaccggaagcggtacgcaaaccaacatgaatgctaacgaagttattgctaaccgtgccatcgagttagctggaggtgtcttaggtagtaaagatcccattcatcccaacgatcatgttaatatgtctcagtcttctaatgatacctttcccactgctatgcacatagctgctgtagaagaaatatatcataatttattaccaaatattactaaattaagagatagtttagcaactaaaatgaaagaatttcaagaagtttttaaaattggcagaactcacttaatggatgcagttcccttgaccttgggacaagaattttcaggatacatttcccaactggataaagatatagaaagaattcaattaagtttaccagatttatatgaattagctattggaggaacagcagtaggaacaggattaaatacccatccagaatttgccgaaaaagtagcccaagaaattgccaaaataacagatttaccttttgtttcagcagataataaatttgctgccttagctgcacacgatgctgttgtaatgtgtagtggaaccctgaaaactttggcttgttcattgatgaaaatagccaacgatattaggtggttaggatcggggcctcgttgtggcataggagagcttattttaccagcaaatgagccaggatcttccattatgccaggaaaagttaacccaactcaatgcgaggcaatgactatggtttgtgtgcaagttatgggctatgatgctgctattagtgttgccggaagtcagggaaattttgagttaaatgtctttaaaccgttactaatctttaatttgttaaactctattagactattatcggatgcttgttcatcttttaccgaacatttagtgcttggtttaacaattaatcaagaacaaattgcagattatttgaataattctttgatgttagtaacagcattaaaccctcatattggttatgataaagcagccaaagtagctaaaaaagcttatgaagaaaatacgactttagaagcagcttgtgttgcattaggttttctgagttcagaagattttaaaaacattgttcggcctgaaaagatgatataa

SEQ ID NO: 115377 - protein, 457 aa, Crocosphaera watsonii WH 8501
MRIESDTMGKIEVPSDAYWGAQTQRSLRYFAIGDDTMPREMIRAIAILKKATAIVNKNLGKLDTKKAELIVQAADEVITGKLDEHFPLKIWQTGSGTQTNMNANEVIANRAIELAGGVLGSKDPIHPNDHVNMSQSSNDTFPTAMHIAAVEEIYHNLLPNITKLRDSLATKMKEFQEVFKIGRTHLMDAVPLTLGQEFSGYISQLDKDIERIQLSLPDLYELAIGGTAVGTGLNTHPEFAEKVAQEIAKITDLPFVSADNKFAALAAHDAVVMCSGTLKTLACSLMKIANDIRWLGSGPRCGIGELILPANEPGSSIMPGKVNPTQCEAMTMVCVQVMGYDAAISVAGSQGNFELNVFKPLLIFNLLNSIRLLSDACSSFTEHLVLGLTINQEQIADYLNNSLMLVTALNPHIGYDKAAKVAKKAYEENTTLEAACVALGFLSSEDFKNIVRPEKMI

SEQ ID NO: 115378 - DNA, 1395 bp, Exiguobacterium sibiricum 255-15
  CDS (1)..(1395): transl_table=11
atggaataccgtttagaacatgacacgatgggggaaattcgtgtcccggaagcacaggaatggggagcacaaacacaacgcagtctggaaaactttaagattggcacggaaaagatgccgattgaaatcattcgggcattcgccgttctgaaaaagggcgcagcactagccaatcgtgatctaggggtcttggatcaagaaaaagcggaagtgattgcggaagtctgtgacgaaatcatcgccggacagttcgatgcagaatttccactggtcgtttggcagacgggttccggtacacaatcgaacatgaacgttaacgaagtggttgcccgggtcgcaacacggaaacttgccgagcggggaagtgacaaggtcatccatccgaatgatgatgtcaataaatcacaaagttcaaacgatacatatccgactgcgatgcatattgcagcgaagacgattgtcatcgatcaattgttgccggcaatcgatgcgatccacgcaacgcttgacgagaaagccaaagccttctcagacatcgtcaaaatcggccggacccatctacaggacgccacaccgattacactgggtcaggaaatcagcggctgggtccgtatgttacaactttcgaaaaaaatgattgaattgacattagaaccgttgacggaactggcaatcggcggaacggctgtcggtaccggcatcaatgcccatccggaattcggagaccgggcagctgaaaaaatgagtgaagaaaccggaaaatcgtttgtcagcgcagaaaataaattccatgccctgacgagccatgatcaactcgtcttttcccatggagccatcaaggcactcgcgatggatgcgatgaaaatcgccaatgacgtccgctggctcgcatccggtccgcgtgccggaatcggtgagattacgattccggaaaatgaaccgggaagctccatcatgccgggaaaagttaatccgactcaaagcgaggcgttgacgatggtcgctgctcaagtccttggaaatgatgcgacaatcggatttgctgcaagtcaagggaactttgaactcaatgtctttaagccggtgattatgtataactacatccagtcggttcggttattgacggattcccttcagtcgtttaatgatcactgtgccatcggaatcgagccggagcggactgtcatcgctgagaacgtcgaacgttccttaatgcttgtcacggcactcaatccgcatatcgggtatgaaaatgcagctcggattgctaaagctgcgcacaaagagggtacaactttaaaagaggcggcacttgccaccggtttattgacagaagaacaatacgatcaatggatcgttccggcggacatggtccatccgaacttaaaagcataa

SEQ ID NO: 115379 - protein, 464 aa, Exiguobacterium sibiricum 255-15
MEYRLEHDTMGEIRVPEAQEWGAQTQRSLENFKIGTEKMPIEIIRAFAVLKKGAALANRDLGVLDQEKAEVIAEVCDEIIAGQFDAEFPLVVWQTGSGTQSNMNVNEVVARVATRKLAERGSDKVIHPNDDVNKSQSSNDTYPTAMHIAAKTIVIDQLLPAIDAIHATLDEKAKAFSDIVKIGRTHLQDATPITLGQEISGWVRMLQLSKKMIELTLEPLTELAIGGTAVGTGINAHPEFGDRAAEKMSEETGKSFVSAENKFHALTSHDQLVFSHGAIKALAMDAMKIANDVRWLASGPRAGIGEITIPENEPGSSIMPGKVNPTQSEALTMVAAQVLGNDATIGFAASQGNFELNVFKPVIMYNYIQSVRLLTDSLQSFNDHCAIGIEPERTVIAENVERSLMLVTALNPHIGYENAARIAKAAHKEGTTLKEAALATGLLTEEQYDQWIVPADMVHPNLKA

SEQ ID NO: 115380 - DNA, 1398 bp, Prosthecochloris aestuarii DSM 271
  CDS (1)..(1398): transl_table=11
atggagtacagaatcgagaaagacactatgggcgaagtacgtgtgcccgcagaaaaatactggggcgctcagacccaacgttcagtccagaactttaaaatcggtccttccgggtcgatgccgcgagagattatcaaagcgttcgcatttctcaaaaaagcggcagcaataaccaattgtcaactcggtgttcttcctgccgagaagcgcgatgcgattgcctctgtatgcgatgaaatcattgacggtcagcttgctgaccagtttcctctggttatatggcagaccggttcaggtacacagtccaatatgaatgtcaacgaggtcgttgcaaaccgtgcgcatgtgcttgcaggaaaacagcttggagagggggagcgtttgctcaatcccaatgacgatgtcaacaaatcgcagtcatccaacgatacctttccgacggcgatgcatattgccgcatacagaatgctcgtcggaacaactattcccggggtcaggacgctccgcgatgagctgcatcgcaaagccgaagaactgaaaaccgtggtcaagatcggtcggacccactggatggatgctacgccgctgacgcttggtcaggaattttcaggctatgtctctcagcttgaccacgctcttcgtgccatagataatacgcttccgcatcttgctgaactggcccttggaggtacggctgtcggaaccggtctgaatacgcctgacggttatgctgttcatgttgctgaaaccattgcgtcgctcacaggcttgccattcgtaaccgccgacaacaagtttgaggctttggcggcacacgatgccattgtcgagtcgcatggcgcactgaaacagcttgcagtcagcctcatgaagatcgccaacgatatccgaatgcttgcttccggtccgcgaagcggtattggtgaaatcactattccacctaacgaacccggttcatcgattatgccgggaaaggtcaatccgacccaggttgaagcggtgacgatggtgtgtgcgcaggtcatgggtaacgatgtggctgtcagtgtcggcggctcaaacggccattttgaactgaacgtcttcaagccgctcatgatcgccaacctgctgcaatcagccgagcttctcggtgacgcctgtcggtcgtttaccgataactgtgtctgcggcatcgagccgaaccatccgagaatcaaggaacaccttgaaaattcccttatgcttgttacggcgctcaacccgcatatcggttattataaagccgctgaaatcgccaaaaaagcgcatgctgatggcacgacgctccgtcaggcggcagtcgggctgggttacctgaccagtgaagagtttgatgagtgggtagtcccttcaaaaatgacgggttctctcgactga

SEQ ID NO: 115381 - protein, 465 aa, Prosthecochloris aestuarii DSM 271
MEYRIEKDTMGEVRVPAEKYWGAQTQRSVQNFKIGPSGSMPREIIKAFAFLKKAAAITNCQLGVLPAEKRDAIASVCDEIIDGQLADQFPLVIWQTGSGTQSNMNVNEVVANRAHVLAGKQLGEGERLLNPNDDVNKSQSSNDTFPTAMHIAAYRMLVGTTIPGVRTLRDELHRKAEELKTVVKIGRTHWMDATPLTLGQEFSGYVSQLDHALRAIDNTLPHLAELALGGTAVGTGLNTPDGYAVHVAETIASLTGLPFVTADNKFEALAAHDAIVESHGALKQLAVSLMKIANDIRMLASGPRSGIGEITIPPNEPGSSIMPGKVNPTQVEAVTMVCAQVMGNDVAVSVGGSNGHFELNVFKPLMIANLLQSAELLGDACRSFTDNCVCGIEPNHPRIKEHLENSLMLVTALNPHIGYYKAAEIAKKAHADGTTLRQAAVGLGYLTSEEFDEWVVPSKMTGSLD

SEQ ID NO: 115382 - DNA, 1416 bp, Kineococcus radiotolerans SRS30216
  CDS (1)..(1416): transl_table=11
atggtcaccgacgcccccgcacccgatccccgcgccgagttccgcatcgagcacgacaccatgggggaggtcagggtcccggccgcggcgaagtaccgcgcgcagacgcagcgggccgtggagaacttcccgctgtcgggcaccggcctcgaacgcgcccacatcgaggcgctcgcccggatcaagaaggccgccgcgctggccaacgccgagctcggcgtcctggccgaggacctcgcccgcgccgtcgccgacgccgccgaggaggtcgcgaccggccgctgggacgcggagttccccgtcgacatcttccagaccggttcgggcaccagctccaacatgaacgccaacgaggtcatcgcgacgctggccaccgagcgcttcggctcccccgtgcaccccaacgaccacgtcaacgcctcgcagtcctccaacgacgtcttccccacctccgtgcacgtcgccgcgacctcggccgtcgtcaacgagctggtgccggcgctgcgccacctcgaggcgtcgctgcggcgcaaggccgtcgagtgggccgaggtcgtgaagtccgggcgcacccacctcatggacgccaccccggtgaccctgggccaggagttcgccggctacgcggcgcaggtgaagcgcgggatcgagcgggtcgaggcaaccgtcgtgcgcgtcgccgaggtccccctgggcgggacggccgtcggcaccggcatcaacaccccgcccgggttcccgcagcgggtcatcgagctgctcgccgccgacacgggcctgcccctgaccgaggccgaggaccacttcgaggcccagggcgcccgcgacgcgctggtggagctgtccggggccctcaaggtcgtcgccgtcagcgtcacgaagatctgcaacgacctgcgctggatggggtccgggccgcgcaccggtctcggcgagctccggctgcccgacctgcagccggggtcctcgatcatgcccggcaaggtgaacccggtcgtgccggaggcggcgctcatggtctgcgcgcaggtcgtcggcaacgacgccgcggtgacctgggccggggccagcggcgccttcgagctcaacgtccagatcccggtgatggcccgcaacgtcctggagtccgcgcggctgctgggcaacgcggcgaagctgctggccgaccgcaccgtcgacggcctcgaggccgacgtggaggcctgccgccggttcgcggagtcctccccctccatcgtcacgccgctgaaccgggtgatcggctacgaggcggccgcgaaggtcgccaagcacgccgtggccaccggctccacggtgcgcgaggccgtcgtcgcgctcggcttcgtcgagcgcggcgaggtcagcgaggagcagctcgacaccgccctcgacgtcatgtcgatgacccacccctga

SEQ ID NO: 115383 - protein, 471 aa, Kineococcus radiotolerans SRS30216
MVTDAPAPDPRAEFRIEHDTMGEVRVPAAAKYRAQTQRAVENFPLSGTGLERAHIEALARIKKAAALANAELGVLAEDLARAVADAAEEVATGRWDAEFPVDIFQTGSGTSSNMNANEVIATLATERFGSPVHPNDHVNASQSSNDVFPTSVHVAATSAVVNELVPALRHLEASLRRKAVEWAEVVKSGRTHLMDATPVTLGQEFAGYAAQVKRGIERVEATVVRVAEVPLGGTAVGTGINTPPGFPQRVIELLAADTGLPLTEAEDHFEAQGARDALVELSGALKVVAVSVTKICNDLRWMGSGPRTGLGELRLPDLQPGSSIMPGKVNPVVPEAALMVCAQVVGNDAAVTWAGASGAFELNVQIPVMARNVLESARLLGNAAKLLADRTVDGLEADVEACRRFAESSPSIVTPLNRVIGYEAAAKVAKHAVATGSTVREAVVALGFVERGEVSEEQLDTALDVMSMTHP

SEQ ID NO: 115384 - DNA, 1410 bp, Xylella fastidiosa Dixon
  CDS (1)..(1410): transl_table=11
atgagcaacagtgatcgttacagaattgaacacgacagtatgggtgatctacgggtgccgatcgatgcgttgtggggtgcgcagacgcaacgtgctatcgagaactttccgatttccgggcggtcaatgcctcagggatttatccacgcattggggtttatcaaggcggctgcggcgaaggttaacgctgagctggggttgttaccaaagtcaatggccaaggagattgaggccgctgcattggatgttgctgcgggccgttatgatgcggaatttccagtcgatatttaccagactggctcaggaacctcgtcgaatatgaacgctaatgaggtgattgcgacgctggccatgcgtgccaccaaggggcctatccaccccaacgaccatgtcaaccttggccaaagttctaatgatgtggttccaacagcgattcggatttccgcaacgttggcggttcagggacggttattaccggcgctcaagcatttacgcaaaatgattaacaagcgtgcccgtggtttgggcagtgtggtgaagaccggccgtacccacctgatggatgcgatgccgctgacgttcgctcaagaattcggtgcctggtcggcacaaattgtctctgcagaggcgcgcttgaatgacaccctgaaacggttgcatcggctgccattgggagggacagcaattggtaccggcatcaatacggatccacatttcggccgcaatgcggtgaaggtactgtcagcattgacagggattcactttgagagtgcgaacaataagttcgagggattggcagcgcaagatgatttggttgagttatccggccagttcaatgcgttagcagtggcgttgatgaagattgctaatgatctacgctggatgaacgctggaccgcttgctggcttgggagagattgagttgcccgcgttgcagccgggaagttcgatcatgccaggtaaggtaaacccggtgattccggaagcagtggtgatggtcgccttgcaagtgattggccatcacactgcagtgaccgtggctgggcagagtggcaattttcagttgaatgtgacgttaccgctgattgcttacaacctattggagtctgcgacgttgcttggaaatgtggtgatgctgttggctgataaagtcatcgttggtctgaaggtgcgccaggatcgagtgcaggaggtactggagcggaatccgattttggtgacagcgttgaatccgatcattggctatgagaaagctgcggtgattgctaagcgtgcttataaggagcaccggccagtgcttgaggtggcttgcgaggagagcgacctaaatcctgcggagttggcgcgcttactggatccgactgcgttgactgagggtgggattcatgtcctcgggggagatggtggataa

SEQ ID NO: 115385 - protein, 469 aa, Xylella fastidiosa Dixon
MSNSDRYRIEHDSMGDLRVPIDALWGAQTQRAIENFPISGRSMPQGFIHALGFIKAAAAKVNAELGLLPKSMAKEIEAAALDVAAGRYDAEFPVDIYQTGSGTSSNMNANEVIATLAMRATKGPIHPNDHVNLGQSSNDVVPTAIRISATLAVQGRLLPALKHLRKMINKRARGLGSVVKTGRTHLMDAMPLTFAQEFGAWSAQIVSAEARLNDTLKRLHRLPLGGTAIGTGINTDPHFGRNAVKVLSALTGIHFESANNKFEGLAAQDDLVELSGQFNALAVALMKIANDLRWMNAGPLAGLGEIELPALQPGSSIMPGKVNPVIPEAVVMVALQVIGHHTAVTVAGQSGNFQLNVTLPLIAYNLLESATLLGNVVMLLADKVIVGLKVRQDRVQEVLERNPILVTALNPIIGYEKAAVIAKRAYKEHRPVLEVACEESDLNPAELARLLDPTALTEGGIHVLGGDGG

SEQ ID NO: 115386 - DNA, 1410 bp, Xylella fastidiosa Ann-1
  CDS (1)..(1410): transl_table=11
atgagcaacagtgatcgttacagaattgaacacgacagtatgggtgatctacgggtgccgatcgatgcgttgtggggtgcgcagacgcaacgtgctatcgagaactttccgatttccgggcggtcaatgcctcagggatttatccacgcattggggtttatcaaggcggctgcggcgaaggttaacgctgagctggggctgttaccaaagtcaatggccaaggagattgaggccgctgcattggatgtcgctgcgggccgttatgatgcggaatttccagtcgatatttaccagactggctcaggaacctcgtcgaatatgaacgctaatgaggtgattgcgacgctggctatgcgtgccaccaaggggcctatccaccccaacgaccatgtcaaccttggccaaagttctaatgatgtggttccaacagcgattcggatttccgcaacgttggcggttcagggacgattattaccggcgctcaagcatttacgcaaaatgattaacaagcgtgcccgtggtttgggcagtgtggtgaagaccggccgtacccacctgatggatgcgatgccgctgacgttcgctcaagaattcggtgcctggtcggcacaaattgtctctgcagaggcgcgcttgaatgacaccctgaaacggttgcatcggctgccattgggagggacagcaattggtaccggcatcaatacggatccacatttcggccgtaatacggtgaaggtactgtcagcattgacagggattcactttgagagtgcgaacaataagttcgaaggattggcagcgcaagatgatttggttgagttatccggccagttcaatgcgttagcagtggcgttgatgaagattgctaatgatctacgctggatgaacgctggaccgcttgctggcttgggagagattgagttgcccgcgttgcagccgggaagttcgatcatgccaggtaaggtaaacccggtgattccggaagcagtggtgatggtcgcctcgcaagtgattggccatcacactgcagtgaccgtggctgggcagagcggcaattttcagttgaatgtgacgttaccgctgattgcttacaacctattggagtctgcgacgttgcttggaaatgtggtgatgctgttggctgataaagtcatcgttggcctgaaggtgcgtcaggatcgagtgcaggaggtgctggagcggaatccgattttggtgacagcgttgaatccgatcattggctatgagaaagctgcggtgattgctaagcgtgcttataaggagcaccggccagtgcttgaggtcgcctgcgaggagagcaacctaaaccctgtggagttggcgcgcttacttgatccggctgcgttgactgagggtgggattcatgtcgtcgggggaggtggtggataa

SEQ ID NO: 115387 - protein, 469 aa, Xylella fastidiosa Ann-1
MSNSDRYRIEHDSMGDLRVPIDALWGAQTQRAIENFPISGRSMPQGFIHALGFIKAAAAKVNAELGLLPKSMAKEIEAAALDVAAGRYDAEFPVDIYQTGSGTSSNMNANEVIATLAMRATKGPIHPNDHVNLGQSSNDVVPTAIRISATLAVQGRLLPALKHLRKMINKRARGLGSVVKTGRTHLMDAMPLTFAQEFGAWSAQIVSAEARLNDTLKRLHRLPLGGTAIGTGINTDPHFGRNTVKVLSALTGIHFESANNKFEGLAAQDDLVELSGQFNALAVALMKIANDLRWMNAGPLAGLGEIELPALQPGSSIMPGKVNPVIPEAVVMVASQVIGHHTAVTVAGQSGNFQLNVTLPLIAYNLLESATLLGNVVMLLADKVIVGLKVRQDRVQEVLERNPILVTALNPIIGYEKAAVIAKRAYKEHRPVLEVACEESNLNPVELARLLDPAALTEGGIHVVGGGGG

SEQ ID NO: 115388 - DNA, 1398 bp, Croceibacter atlanticus HTCC2559
  CDS (1)..(1398): transl_table=11
atggcttttagaatagaaaaagatacaatgggtgaggttaaagtgccggcagacaagctttggggcgcacaaaccgaacgttcgagaaataattttaaaataggtaaaccagcttctatgcctttagaggtaatttatggttttgcatacctaaaaaaagctgctgcttataccaattgtgagcttggcgtacttcctgtagataaaagagatcttattgcacaagtgtgtgatgagattttagaaggaaagcacgacgaccaatttccattagttatatggcaaactggtagtggtactcaaagtaacatgaatgttaatgaagttgttgcaaacagagcacaccaattagcaggtaaaactattggtgaaggtgagaaaacacttttaccaaatgatgatgtaaataaaagtcaatcttcaaacgatacctttccaacaggaatgcacattgctgcatataagaaggttgtagaggttactattcctggtataaaacaactaagagatacgctaaaacgtaaatctgaagaatttaagaatgttgtaaagataggccgcacgcattttatggatgctacgcctttaactttagggcaagaatttggaggttacgtttctcaattagatcacggtcttaaagcgttacacaatacacttccacatttagctgaactagctttaggaggaacagctgttggtacaggattaaataccccaaaaggttactctactcgcgttgcagaatatatagcttcttttacaaaacttccttttgtttctgcagagaataagtttgaggcacttgctgctcacgatgctttagttgaaactcacggtgcattaaaacaattggccgtttctttaaataaaataggaaatgatataagaatgttagcttcaggaccacgtagtggtattggtgagcttaatattcctgcaaatgagccaggttcttcaatcatgccaggaaaagtaaatcctacacaatgtgaagctttaactatggtttgtgcgcaagttataggtaatgatatggctattgctgttggtggtatgcaaggacaatttgaacttaacgtttttaaacctgtaatggcatctaatttattagaaagtgctcaattactaggagatgcatctgtttcttttgaagagcactgtgcaagcggtatagagccaaaccaagcacgtatagatgaattacttaaaaactcattaatgcttgttacagctttaaatactaaaattggttattataaagctgcagaaatagcaaatactgctcataaaaacggaacaaccttgaaggaggaagccgttaatttaggatatgtaaccgcagaagaatttgatgaatgggttaagccagaagatatggtaagctctaaaaagtag

SEQ ID NO: 115389 - protein, 465 aa, Croceibacter atlanticus HTCC2559
MAFRIEKDTMGEVKVPADKLWGAQTERSRNNFKIGKPASMPLEVIYGFAYLKKAAAYTNCELGVLPVDKRDLIAQVCDEILEGKHDDQFPLVIWQTGSGTQSNMNVNEVVANRAHQLAGKTIGEGEKTLLPNDDVNKSQSSNDTFPTGMHIAAYKKVVEVTIPGIKQLRDTLKRKSEEFKNVVKIGRTHFMDATPLTLGQEFGGYVSQLDHGLKALHNTLPHLAELALGGTAVGTGLNTPKGYSTRVAEYIASFTKLPFVSAENKFEALAAHDALVETHGALKQLAVSLNKIGNDIRMLASGPRSGIGELNIPANEPGSSIMPGKVNPTQCEALTMVCAQVIGNDMAIAVGGMQGQFELNVFKPVMASNLLESAQLLGDASVSFEEHCASGIEPNQARIDELLKNSLMLVTALNTKIGYYKAAEIANTAHKNGTTLKEEAVNLGYVTAEEFDEWVKPEDMVSSKK

SEQ ID NO: 115390 - DNA, 1395 bp, Sulfitobacter sp. EE-36
  CDS (1)..(1395): transl_table=11
atggccgatacccgtacagaaaccgacagctttggcccattggaagtgccgtccgacaaatactggggcgcgcagacccagcggtcgatcatcaatttccccatcgggtgggaaaaacagcccgtgccgatcatccgcgcccttggcgtcgtgaaaaaagcctgtgcgatggaaaacctgaaccagggcaatctggaccagaagctggccgatgcgatcaccgccgccgcgaccgaggtgatcgagggtaagttcgacgacaatttcccgctggtcgtctggcagaccggttccggcacccagtcgaacatgaacgcgaacgaggtgatctcgaaccgcgcgatcgagatgctgggcggcgagatggggtcgaaagatccggtccaccccaacgaccactgcaacatgggacagtcgtccaacgataccttccccaccgcgatgcatgtggccatcggcatgcaggcccgcgatgtgctgctgcccggtctgcaaaaactgcacgacgccttggtcgcgaagtccgaagagttcaaggacatcatcaagatcggccggacccatacccaggatgcgacaccgctgaccttgggtcaggaattctcgggctatgcgcatcaggtgaaaaaggggatcgaacgggtcaacgcctgcctgcccgatatctatgaactggctcaaggcggtactgccgttggcaccggtctgaacaccaaaaaaggctgggccgaagccgtggccgcgcatatggccgagatcaccggcctgccctttgtcaccgcgccgaacaagtttgaatcgctggccgcccatgacgcgatggtcatgttctcgggtgcgctgaaaaccgtggcgggatcgctgttcaagatcgccaatgacatgcgcttgctggggtccggcccgcgttcgggtctgggcgagttgatcctgcccgagaacgagcccgggtcgtcgatcatgccgggcaaggtgaacccgacgcaggccgaagcgctgacaatggtctgtgcgcatgtcatgggtaatgacgccgccgtcggctttgccgggtcgcaagggcatttcgagcttaacgtctacaacccgatgatgagctataacgtcctgcaatccatgcagcttttgggcgacagcgcctcggccttcacggacaatatggtggtcggcacgcaggccaatgtcgaacgtatcgacaagctgatgaaagaaagcctgatgctggtcacagcgctggcccccacgattggctatgacaacgcgaccaaagtcgcgaagacggcccacaagaacggcacgacgctcaaggaagaagcaatcgccttgggctttgtcgatgccgaaacattcgaccgcgtggtgcggccggagcaaatgatcggacccaaagaatga

SEQ ID NO: 115391 - protein, 464 aa, Sulfitobacter sp. EE-36
MADTRTETDSFGPLEVPSDKYWGAQTQRSIINFPIGWEKQPVPIIRALGVVKKACAMENLNQGNLDQKLADAITAAATEVIEGKFDDNFPLVVWQTGSGTQSNMNANEVISNRAIEMLGGEMGSKDPVHPNDHCNMGQSSNDTFPTAMHVAIGMQARDVLLPGLQKLHDALVAKSEEFKDIIKIGRTHTQDATPLTLGQEFSGYAHQVKKGIERVNACLPDIYELAQGGTAVGTGLNTKKGWAEAVAAHMAEITGLPFVTAPNKFESLAAHDAMVMFSGALKTVAGSLFKIANDMRLLGSGPRSGLGELILPENEPGSSIMPGKVNPTQAEALTMVCAHVMGNDAAVGFAGSQGHFELNVYNPMMSYNVLQSMQLLGDSASAFTDNMVVGTQANVERIDKLMKESLMLVTALAPTIGYDNATKVAKTAHKNGTTLKEEAIALGFVDAETFDRVVRPEQMIGPKE

SEQ ID NO: 115392 - DNA, 1392 bp, Roseovarius nubinhibens ISM
  CDS (1)..(1392): transl_table=11
atgaccgctacccgtaccgaatccgacagtttcggcccgctcgaggtgcctgccgacaaatactggggcgcgcagacccagcgctcgatcatgaacttccccatcggctgggaaaaacaacccgtcgccatcgtgcgcgcgctgggcgtgatcaaacaggcctgcgctcaggccaacaaggcgtcgggtgcgctggatgcgaaactggccgatgcgatcatcgcggcggcgggcgaggtgatcgacggtcggctcgacgacaatttcccgctggtggtctggcagaccggctcgggcacgcagtccaacatgaacgccaatgaggtgatcgccaaccgggccatcgaaatgctcggcggcgagatcggctccaaggatccggtgcatccgaacgaccattgcaacatgggccaatcgtcgaacgacaccttccccaccgcgatgcatatcgccacggcgatgatggtgcgcgatgtgttcatgcccggtctcacccgcctcgccgaggcgctcgagcgcaagtcggaggccttcaaggacatcatcaagatcggccgcacccacactcaggacgcgacgccgctgactttgggtcaggaattctcgggctatgcccatcagatccgccaaggcatcgcgcgggtcgaggcggccatgcccggcatttatgagctggcgcagggcggcaccgccgtcggcaccgggctcaacaccacaaagggctggggcgaagaggttgccgccaatatggccgagatcaccggcctgcccttcgtcaccgcccccaataaattcgaagccctggccgcccatgacgcgatggtgttcctgtcgggtgcgctcgcgaccgtggcgggcagctgctacaagatcgccaatgacatccgcttcctcggctccggcccgcgttccggtctgggcgagttgatcctgccggaaaacgaacccggctcgtcgatcatgcccggcaaggtcaacccgacccaggccgaggcgctgacccaggtggcggcgcatgtgatgggcaatgacgcggcgatcaaattcgccggctcgcaagggcatttcgagctcaatgtctacaacccgatgatggcctataacctgctgcaatcgatccagcttctgggcgatgccgccgacagctttaccgagcggatgctcgacgggatcgaggccaatgaggcccgcatcgacaagctgatgcgcgaatcgctgatgctggtcaccgcgctcgcaccgaccatcggctatgacaatgccaccaaggtcgccaagaccgcgcataagaacggcaccaccttgcgcgaagaggcggtcaagctcggctttgtcgatgaagagaccttcgatcgcgtggtgcgcccgcaggacatgatcggacccaaatga

SEQ ID NO: 115393 - protein, 463 aa, Roseovarius nubinhibens ISM
MTATRTESDSFGPLEVPADKYWGAQTQRSIMNFPIGWEKQPVAIVRALGVIKQACAQANKASGALDAKLADAIIAAAGEVIDGRLDDNFPLVVWQTGSGTQSNMNANEVIANRAIEMLGGEIGSKDPVHPNDHCNMGQSSNDTFPTAMHIATAMMVRDVFMPGLTRLAEALERKSEAFKDIIKIGRTHTQDATPLTLGQEFSGYAHQIRQGIARVEAAMPGIYELAQGGTAVGTGLNTTKGWGEEVAANMAEITGLPFVTAPNKFEALAAHDAMVFLSGALATVAGSCYKIANDIRFLGSGPRSGLGELILPENEPGSSIMPGKVNPTQAEALTQVAAHVMGNDAAIKFAGSQGHFELNVYNPMMAYNLLQSIQLLGDAADSFTERMLDGIEANEARIDKLMRESLMLVTALAPTIGYDNATKVAKTAHKNGTTLREEAVKLGFVDEETFDRVVRPQDMIGPK

SEQ ID NO: 115394 - DNA, 1395 bp, Oceanicola batsensis HTCC2597
  CDS (1)..(1395): transl_table=11
atgacccagacccgcacggaaagcgacagtttcggcccgctcgaagttcccgccgacaagtattggggcgcgcagacgcagcgctcgatcatgaacttcccgatcggatgggagaaacagcccgttgccatcgtccgtgcgctcggcgtcatcaagcaggcctgtgcccaggccaacaaggagagcggcgcgctggacgccaagcttgccgatgcgatcgtccaggcggcaagcgaggtggtcgagggccggttcgacgacaattttccgctggtcgtctggcagaccggatcgggcacccagtccaacatgaatgccaacgaggtcatcgccaaccgcgcgatcgagatcctcggcggcacgatcgggtcgaaggacccggtgcatccgaacgaccactgcaacatgggtcagagctcgaacgataccttcccgaccgccatgcacatcgcggccgcgatgaccgcaagggacgttctgcttccgggtttgaaaaagcttctcaaggggttggaggccaaatccgaccaattcaaggacatcatcaagatcgggcggacgcacacccaggatgccacgccgctgacgctcggccaggaattctcggggtatgcgcatcagatccgccagggcatcgcccggatcgagaccgccctgccgggtatctacgaactggcccagggcggcacggccgtcggcaccgggctgaacacgaaacagggctggggcgagacggtcgcgaagaacatggccgagatcaccggcctgcccttcgtcaccgcccccaacaagttcgaggcgctggccgcgcatgacgccatggtcttcatgtccggggcgctgtcgaccgtggcggggtcgatgtacaagatcgccaacgacatccggttcctgggctccggtccccgctcgggcctgggcgaactgatcctgcccgagaacgagcccggatcctcgatcatgccgggcaaggtcaacccgacccaggccgaggcgatgacccaggtggcggcccatgtgatgggcaatgacgccgccatcaagtttgcggggagccagggccatttcgaactgaacgtctacaaccccatgatgtcctacaacctgctgcagtccatgcagcttctgggcgacgtggccgacagctttaccgaacggatgctgaacggcatcgaggcgaacgagccgcgcatcgagaagctgatgaaggaatcgctgatgctggtgacggcgctggcccccacgatcggctatgacaacgccaccaaggtcgcgaagacggcgcacaagaacggcaccaccctcaaggaagaagccatcgcgcttggtttcgtcgacgaagagaccttcgacaaggtcgtgcgcccggaacagatgatcggccccaaggcctga

SEQ ID NO: 115395 - protein, 464 aa, Oceanicola batsensis HTCC2597
MTQTRTESDSFGPLEVPADKYWGAQTQRSIMNFPIGWEKQPVAIVRALGVIKQACAQANKESGALDAKLADAIVQAASEVVEGRFDDNFPLVVWQTGSGTQSNMNANEVIANRAIEILGGTIGSKDPVHPNDHCNMGQSSNDTFPTAMHIAAAMTARDVLLPGLKKLLKGLEAKSDQFKDIIKIGRTHTQDATPLTLGQEFSGYAHQIRQGIARIETALPGIYELAQGGTAVGTGLNTKQGWGETVAKNMAEITGLPFVTAPNKFEALAAHDAMVFMSGALSTVAGSMYKIANDIRFLGSGPRSGLGELILPENEPGSSIMPGKVNPTQAEAMTQVAAHVMGNDAAIKFAGSQGHFELNVYNPMMSYNLLQSMQLLGDVADSFTERMLNGIEANEPRIEKLMKESLMLVTALAPTIGYDNATKVAKTAHKNGTTLKEEAIALGFVDEETFDKVVRPEQMIGPKA

SEQ ID NO: 115396 - DNA, 1401 bp, Prochlorococcus marinus str. MIT 9211
  CDS (1)..(1401): transl_table=11
atgactaactcatttagaacagagaatgacagtcttggatcaattgaagtacctcgggaggcattatggggggcacaaacccaaaggtctctattgaactttgcaattggacaagatcaaattcctatgaagctcatatactccctggcaagaattaagcaagcggcatcaattgttaataatcgacttggcacactggatgacaataaaagagatttaatcgttaacgctgcctgtgagatagctatgggcaagcatgatgctcatttcccattaagtgtctggcaaacagggagtggcacacaaacaaatatgaacttaaacgaagttattagcaacctcgcctcaaaagctaccggcaaaccattaggtagtcatctgccattacaccctaatgatgatgttaatcaatctcaatcaacaaatgatgtcttcccagctgctattcaaatcgctactgtacaagaaattcagacaactttaatccctgaactagatctactaattgagtcattaactaaaaagagcaatgcatggagtgaaattgtaaaaatcggtcgaacacatttacaagacgcggtcccacttacccttgggcaagaagtttcagcctggagcacccagctttccacagcaagagaaaggatagaagtcagtctcagagagctatatccacttccattaggaggtacagccatagggactggtctcaactcaccaaagaattttgatagtgaaattgctacagagatttctcttttaactaacttacctttcagtaaggctaataataaatttgcaattatgggtagtcatgatggattggtaaatgctatgtcccaattaaagatgttagcagtatcactattaaaaatagtcaatgatatccgactcttgtcatgtggtccaagagctgggttttccgaactacaactcccagagaatgagcctggaagttcaataatgcctgggaaagtcaacccaactcaatgtgaagccatgtcaatggtatgcatgcaagtaataggtcttgataccgcagtaactatgggtggaggtggggggcacctacaaatgaatgcctacaaaccattaatagggttcaatcttctaaaaagcattgaactcttacatgatgcgtgcagaagttgccgaaaaaatatggtagagggcattagaccaaacgaagagaaaattgcaaaagatcttcagcaatcactaatgcttgtcacagcgctgtctcctaagattgggtacgacaatgccactaagattgccaaatatgcttatgagacaggcgtaagtttacgagaagcagctgttaattttaattatgtagatgaagatgaatttgatcaattagttaatcccatactgatggccaatccaaaatctaaatag

SEQ ID NO: 115397 - protein, 466 aa, Prochlorococcus marinus str. MIT 9211
MTNSFRTENDSLGSIEVPREALWGAQTQRSLLNFAIGQDQIPMKLIYSLARIKQAASIVNNRLGTLDDNKRDLIVNAACEIAMGKHDAHFPLSVWQTGSGTQTNMNLNEVISNLASKATGKPLGSHLPLHPNDDVNQSQSTNDVFPAAIQIATVQEIQTTLIPELDLLIESLTKKSNAWSEIVKIGRTHLQDAVPLTLGQEVSAWSTQLSTARERIEVSLRELYPLPLGGTAIGTGLNSPKNFDSEIATEISLLTNLPFSKANNKFAIMGSHDGLVNAMSQLKMLAVSLLKIVNDIRLLSCGPRAGFSELQLPENEPGSSIMPGKVNPTQCEAMSMVCMQVIGLDTAVTMGGGGGHLQMNAYKPLIGFNLLKSIELLHDACRSCRKNMVEGIRPNEEKIAKDLQQSLMLVTALSPKIGYDNATKIAKYAYETGVSLREAAVNFNYVDEDEFDQLVNPILMANPKSK

SEQ ID NO: 115398 - DNA, 1452 bp, Erythrobacter sp. NAP1
  CDS (1)..(1452): transl_table=11
atgaccaacgagggtggggcgaaagtcgtccacaacgacggatccatttttggtgcaacgggggaggttcgcatcgaagccgactcgctaggcgatgtggcttgcccggtggacgcccactggggtgcccagagccagcgcagccttgcaaacttcgcgatcggcactgagacgatgcccgcaccgttgatcaaggcgctaggtatccagaagcaatctgcggcgaaggccaacatggatcttggcgtcctggattcgaaactgggcgaagccatcgtgcaggcagcgagcgaagtgatcgatggaacgctcgccgaccagttcccgctcagcgtctggcagactggttcgggcacacagtcgaacatgaatgccaacgaagtgattgcgagccgcgccaaccagattctcaccggccagcacgggggtaaggaaccggtgcaccccaatgaccactgcaatatgggtcagagctcgaacgacactttcccgactgcgatgcatattgctgcagcgagcgagacaatcgacaccctcatcccggccctatcgcacctccacggcgcattggatgacaaggccgatgcctttggcgacatcgtcaagattggccgcacgcacctgcaggacgcaacgccgctgacgctgggtcaggagttttcgggctacgcgaagcaggtcgaatacggcatcgcccgtctcaagagcgcgctcccgcgagttcttgaactcgctcaaggcggcacggcagtcggcacaggcatcaattcgaaggccggatttgctgaaaaattcgccgaacatgtcgccaacacaaccgggcatgcctttgtcaccgctccaaacaagttcgaagcgctcgctgcgcatgacgctcttgtcgagctctcaggagcgctcaacactatcgcggtcagcctgatgaagatcgcgaacgatatccgactgctcggctctggcccgcgttcgggtcttggcgagattgcgctcccggcgaatgagccaggctcatcgatcatgccgggcaaggtcaatccgacccagtgtgaagcgctgaccatggtgtgcgcgcaggtcatgggcaacaacactacagtcagtgtggccggctcgcacggccatctcgagctcaacgtgttcaagccagtgatgatctacaatgtgctgcaatcgatccgcttgctgagcgatgcgtcgatcagcttcacgaacaattgtgtcgtcggaatcgaggcgaaccgtggccggatcgaccagctgatgaacgaaagcctgatgctcgtcaccgcgctcaatccgcatattggctacgacaatgcggcgaaaattgcgaagaaggcccatgcagacgggacaacgttgaaagaagccgcgctcgagcttgacctgctcaccgaagaacaatttgcgcaatgggtagtcccggcagacatgatcaagccgcgcgactga

SEQ ID NO: 115399 - protein, 483 aa, Erythrobacter sp. NAP1
MTNEGGAKVVHNDGSIFGATGEVRIEADSLGDVACPVDAHWGAQSQRSLANFAIGTETMPAPLIKALGIQKQSAAKANMDLGVLDSKLGEAIVQAASEVIDGTLADQFPLSVWQTGSGTQSNMNANEVIASRANQILTGQHGGKEPVHPNDHCNMGQSSNDTFPTAMHIAAASETIDTLIPALSHLHGALDDKADAFGDIVKIGRTHLQDATPLTLGQEFSGYAKQVEYGIARLKSALPRVLELAQGGTAVGTGINSKAGFAEKFAEHVANTTGHAFVTAPNKFEALAAHDALVELSGALNTIAVSLMKIANDIRLLGSGPRSGLGEIALPANEPGSSIMPGKVNPTQCEALTMVCAQVMGNNTTVSVAGSHGHLELNVFKPVMIYNVLQSIRLLSDASISFTNNCVVGIEANRGRIDQLMNESLMLVTALNPHIGYDNAAKIAKKAHADGTTLKEAALELDLLTEEQFAQWVVPADMIKPRD

SEQ ID NO: 115400 - DNA, 1395 bp, Synechococcus sp. WH 5701
  CDS (1)..(1395): transl_table=11
atgaccatccagccggtagcccccacacgccgcgaaagcgacagcctcggtgccattgaggtgccagcggagcactactggggggcccagacccaacgctcgatacgtaatttccctttcggtgcggcaatgccgctggcggtggtgcaggccttcggccaactcaaggcggcctgcgccgaggtgaaccaagccgaaggaaagctcgcgccgaagctggcggcgctgatcgtggtcgccgccgaggaggtggcgagcgggactctggatgaggagttcccgctgaaggtctggcagacgggctcgggcacccagaccaacatgaacgtcaacgaggtgatcgccaaccgggcgatcgaggccgctggcggcaggctgggcagcaaggcgccggtccaccccaatgaccacgtcaacctgagccagtcgagcaacgacactttccccaccgccctgcacgttgcggtggtgctggaactggagaggcggttgattccggccgtggaggcgctgatcaccgccctgcatgccaaggcggaaaggtttgcagggatcatcaagatcggccgcacccatctgcaggatgctgtgccactcagcctgggccaggagttcggcggctatgtggcccagctggagctggggctgaatactctgcgccacacgctgccccaggtgcaccagctggcgatcggcggcacggcggtgggtaccggtctcaatgcccccccaggcttcggcgagaaggtggcggcacggctggccgaacggatcggtctgccgttcagcagcgcaccgaacaagttccaggccctggcgggccatgaacccctggcggcagcccatggcgccctcacggtgctggccggcagcctgctgaagatcgccaacgacatccgctggctcggcagcggaccccgatgtgggctgggcgagttgagcttgccggagaacgaacctggctcctcgatcatgccgggcaaggtgaatcccacccagtgcgaaagcctcaccatggtggccctgcaggtaatgggtaacaacagcgctgtgcagatggcggccagccagggcaactttgagctcaatgtgttcaagccactgatcgcccacaacgtgcttgaaagcatcgagctgctcaccggcggctgcaccagcttccgcgagcactgcatcgaagggctcgaggccaacgagagtcgcatcagtgatctgctcgatcagagcctgatgctggtgacggccctcaccccggcgatcggctacgaccgcgcctgcgctatcgccaaacacgcccacgagcaccggctgagcctcaaggaagcggccctggtgcttggcgagatcaatgccgaggagttcgaccaatgggtgaagccggaggcgatggtgtga

SEQ ID NO: 115401 - protein, 464 aa, Synechococcus sp. WH 5701
MTIQPVAPTRRESDSLGAIEVPAEHYWGAQTQRSIRNFPFGAAMPLAVVQAFGQLKAACAEVNQAEGKLAPKLAALIVVAAEEVASGTLDEEFPLKVWQTGSGTQTNMNVNEVIANRAIEAAGGRLGSKAPVHPNDHVNLSQSSNDTFPTALHVAVVLELERRLIPAVEALITALHAKAERFAGIIKIGRTHLQDAVPLSLGQEFGGYVAQLELGLNTLRHTLPQVHQLAIGGTAVGTGLNAPPGFGEKVAARLAERIGLPFSSAPNKFQALAGHEPLAAAHGALTVLAGSLLKIANDIRWLGSGPRCGLGELSLPENEPGSSIMPGKVNPTQCESLTMVALQVMGNNSAVQMAASQGNFELNVFKPLIAHNVLESIELLTGGCTSFREHCIEGLEANESRISDLLDQSLMLVTALTPAIGYDRACAIAKHAHEHRLSLKEAALVLGEINAEEFDQWVKPEAMV

SEQ ID NO: 115402 - DNA, 1392 bp, Synechococcus sp. WH 7805
  CDS (1)..(1392): transl_table=11
atgaccaatccgacgcgcatcgaacacgacagcatggggaccgtgcatgttcctgagcaggcgttatggggtgctcagacccagcgctccttaaagaatttcgccatcgccgaggatcggatccccaccccactgattcatgcgctcgctcgcatcaagcaggcagcggcgatcgtgaatgcgcgacatggtctgatcagcaacgaccaatgtgacttaattgttgaagccgcggccgcaatcgccgaagggcgccacgacgctcaattccctctgagggtctggcaaaccggcagcggcacgcagaccaacatgaacctcaacgaggtgatcagcaatctggcatcgctgcgtgctggggaggctctcggcagccatcggcccatccatccgaatgatcacgtcaaccgttcccagtccacgaacgatgcctttccggccgccatccatgtggcagcagctgaagggatcagccgccgccttcaacctgaactgcaacagctgaaagaggcctttgccaccaaagcgaacgactgggcatccatcgtgaagatcggccgcacccaccttcaggatgcagtgccgctcacactcggccaggaagcatccgcctggagagatcagatcggaaccgcagcgcgacgcatcgacaccagcctggaggaaatcctgcctctgcccctgggaggcacagcggtgggaaccgggctcaacgcccccgaaggcttttccgtcgaggcggcagcggagctcaagcggctcacaggcctccccttcagcacagcccccaacaagttcgccgtgatggccagccacgatggactcgtcaacaccatgggacaactcaggcttttggccgtcagcctgctcaagattgccaatgacatccgcctgctggcctgcggtccaagagccgggctcgccgaactgcatcttccggagaacgagcctgggagttcgatcatgccgggcaaggtaaatcccacccagtgcgaagcgatggcgatggtctgcacccaggtgatcggccttgacgtggcggtagcgatggccggtgcaggtggtcatctgcagatgaatgtgtacaaaccgctgatcggcttcaacctgctgcagtccatcaccctgctcactgatgcctgtcactgttttcgggtggccatggttcaagggattgaacccaaccgcacccgcatccagagagatgtggaacagtctctaatgctcgtcaccccgctcacccaggtgattggatacgacaaagccagcgcgattgccaagtacgcgcacgaacaggggatagacctcaggagtgcagcactcgacctgggttacgtcagtgctgaagaattcgatcgcgtcgtcgaccctgcctccatggcctctccatag

SEQ ID NO: 115403 - protein, 463 aa, Synechococcus sp. WH 7805
MTNPTRIEHDSMGTVHVPEQALWGAQTQRSLKNFAIAEDRIPTPLIHALARIKQAAAIVNARHGLISNDQCDLIVEAAAAIAEGRHDAQFPLRVWQTGSGTQTNMNLNEVISNLASLRAGEALGSHRPIHPNDHVNRSQSTNDAFPAAIHVAAAEGISRRLQPELQQLKEAFATKANDWASIVKIGRTHLQDAVPLTLGQEASAWRDQIGTAARRIDTSLEEILPLPLGGTAVGTGLNAPEGFSVEAAAELKRLTGLPFSTAPNKFAVMASHDGLVNTMGQLRLLAVSLLKIANDIRLLACGPRAGLAELHLPENEPGSSIMPGKVNPTQCEAMAMVCTQVIGLDVAVAMAGAGGHLQMNVYKPLIGFNLLQSITLLTDACHCFRVAMVQGIEPNRTRIQRDVEQSLMLVTPLTQVIGYDKASAIAKYAHEQGIDLRSAALDLGYVSAEEFDRVVDPASMASP

SEQ ID NO: 115404 - DNA, 1383 bp, Photobacterium sp. SKA34
  CDS (1)..(1383): transl_table=11
atgactacataccgcatagaaacagacagtatgggtgatgtacaagtacctgaagcagcactctatcaagcgcaaacccaacgagctgttgataactttccaatcagtgcgttaacaatgccagctacattcattaaagcattagcattcatcaaacaagcagctgcacaggcaaatgccgaattagacctattagaaacagacatcgctgatgagattatctctgcctgccaagaaatcattgacggacagcatttaacgcaatttccagtagatgtattccaaacgggatcaggaacaagctctaacatgaatgccaatgaagtcattgcaacactggcatcacaaaaactcggtaaatcagtgaacccaaatgaccatgtcaatatggggcaaagtagtaatgatgttattccaaccgctatcgccgttagcgcatcgcttgctactgaacaagagcttattccagcattacagtatttgagccaagccattgagtcaaaggcacagacacttgaagatgtagttaaaacaggtcgaacacacttaatggatgcgatgccaatcactttggcacaagagcttcgcggctggaaatatcagatagatgcagcatcaagtggaatacaaaaaacactgccgcaagtaaaagccttagcacaaggcggtacagcggtaggaacaggcatcaatgcagtaccagccttctctggtatatttactaaacatctctccgcagcaacgaaatcatctttcaaacctagtgacaatttcttttacaacatgtcgagccaagatgcgattgttagcctctcaggacagctaaaaacagccgctgtcgcaataatgaagatcgcaaacgatctacggtggatgaattctggcccacttgcagggctaggagaaatagaactccaagctttacaaccaggttcatctatcatgcctggcaaagttaaccctgttattcctgaatctgcaaccatggttgcagcacaagtgattggcaacgatacgacgatcactattgctggtcagtctggaaattttcaactaaatgtaatgcttccggtcattgctttaaatattagtcagagtattgagctactaacaaacacctctgttcaactcgctaaaaaagcaatattaagcttcaacgttcgtgaagataacttacaagcagcactcgcgaaaaaccctattctggttacggcactcaatccagttattggttatttgaaagcagctgagattgctaaaaaagcttacaaagagcaacgcgcaattattgatgttgcagaagaagaaacagatcttagccgtaaagagctgcaaaaattactcgaccctgcaaaattaacccaaggtggtattgctaaatag

SEQ ID NO: 115405 - protein, 460 aa, Photobacterium sp. SKA34
MTTYRIETDSMGDVQVPEAALYQAQTQRAVDNFPISALTMPATFIKALAFIKQAAAQANAELDLLETDIADEIISACQEIIDGQHLTQFPVDVFQTGSGTSSNMNANEVIATLASQKLGKSVNPNDHVNMGQSSNDVIPTAIAVSASLATEQELIPALQYLSQAIESKAQTLEDVVKTGRTHLMDAMPITLAQELRGWKYQIDAASSGIQKTLPQVKALAQGGTAVGTGINAVPAFSGIFTKHLSAATKSSFKPSDNFFYNMSSQDAIVSLSGQLKTAAVAIMKIANDLRWMNSGPLAGLGEIELQALQPGSSIMPGKVNPVIPESATMVAAQVIGNDTTITIAGQSGNFQLNVMLPVIALNISQSIELLTNTSVQLAKKAILSFNVREDNLQAALAKNPILVTALNPVIGYLKAAEIAKKAYKEQRAIIDVAEEETDLSRKELQKLLDPAKLTQGGIAK

SEQ ID NO: 115406 - DNA, 1380 bp, Oceanospirillum sp. MED92
  CDS (1)..(1380): transl_table=11
atgactgaaacacgaatcgctaaagacagcatgggagaattggaagtacccgttgatgcgttatacgcagcgcagacccagcgtgcagtgaataacttcccggtcagtggtcagccaatgccagaagcatttattcgggcgttactgcaggctaaagcagcggcagccttggctaatgtttctctggaacagattcctgctgatatggggcaggcgatcaaccaagctgttcagggtttattgaatgatgaaaacctgatgcagcattttccagtggatatcttccagactggatcaggtaccagttccaatatgaacgccaatgaagtactggcgacactggcgtcagatatctatggtcagcccgttggagccaatgaccatatcaactacggtcaaagtagtaacgatattatcccttccaccattcatatcagtgcagctgttgaactggctgaatcattactaccggctctggaacatctggttcaggtgacccgggataaagctcaagctgttgataagtacgttaaaaccggccgcactcatctgatggatgcgatgccgattcggatgagccaggggttggaaagctgggctacccagattgagcagaacattcagcagttgaaggccatacagccacagcttcagagtttggcccaaggcggtacagcggtgggcacaggtatcaacgcgcacccggattttgctgagaagtttaaccaggaactaagtcagattacggggctgacttttaaaccagcagataacttttttgcccatattggctcacaggatgtagcggtatctctgtcggggcaattaaaagcaaccgcggtctcaattttaaaaattgctaatgacttgcgctggatgaattcgggtcctttggcaggattgggcgaaattgaactggaagctttgcagccgggctcttcaattatgccaggcaaggttaacccggttattcctgaagcagcagccatggtatcagcgcaggttattggcaatgatgcagcgatcacggtcggtggccaatcaggtaacttcgaattgaatgtcatgttgccgatgattgcgagcaacttactcaacagtatcagcttgctggcgaatgtgagccgtctgctagccgataaagcggtcgcaagttttaaagttaatgaggcgaagctcaatgaagctttatcacgcaaccctattctggtgactgcgctgaacccaatcatcggttatatgaaagctgcggaaattgctaaacaggcctacaaggaggggcgtccggttatcgacgttgctgcagagaatactgatctttcagtggatgagctaaagaagctgttagatccggctaagttaactcagggcggtctgtaa

SEQ ID NO: 115407 - protein, 459 aa, Oceanospirillum sp. MED92
MTETRIAKDSMGELEVPVDALYAAQTQRAVNNFPVSGQPMPEAFIRALLQAKAAAALANVSLEQIPADMGQAINQAVQGLLNDENLMQHFPVDIFQTGSGTSSNMNANEVLATLASDIYGQPVGANDHINYGQSSNDIIPSTIHISAAVELAESLLPALEHLVQVTRDKAQAVDKYVKTGRTHLMDAMPIRMSQGLESWATQIEQNIQQLKAIQPQLQSLAQGGTAVGTGINAHPDFAEKFNQELSQITGLTFKPADNFFAHIGSQDVAVSLSGQLKATAVSILKIANDLRWMNSGPLAGLGEIELEALQPGSSIMPGKVNPVIPEAAAMVSAQVIGNDAAITVGGQSGNFELNVMLPMIASNLLNSISLLANVSRLLADKAVASFKVNEAKLNEALSRNPILVTALNPIIGYMKAAEIAKQAYKEGRPVIDVAAENTDLSVDELKKLLDPAKLTQGGL

SEQ ID NO: 115408 - DNA, 1389 bp, Xanthobacter autotrophicus Py2
  CDS (1)..(1389): transl_table=11
atgagcacccgcatcgagaccgacacgttcggtcccatcgaagttcaatccgaccgttattggggtgcgcaggcgcagcgctcgctggggaacttcaagatcggctgggaaaagcagccgctcccggtggtgcgcgccctcggcatcgtcaagcgtgctgccgcggaagtaaaccgcgacctcggccgcctcgatcccaagatcgccgacgccattgtcgccgccgcccaggaagtcatcgacggcaagctcgatgaacacttcccgctggtggtctggcagaccggctcgggcacccagtccaacatgaacgccaacgaggtgatctcgaaccgggccatcgagctgctcggcggggagaagggctccaagaagcccgtgcatcccaacgatcacgtcaacatgagccagtcgtccaacgacacctaccccaccgccatgcacatcgcctgcgcggaggagatcgtccaccgcctgctgccggcgctgcgccacctgcatgcggcgctgaaggccaagtccgaggcctgggccggcatcatcaagatcggccgcacccacacccaggacgccacgccgctgacgctgggccaggaattctccggctacgcccagcaggtggagaacggcatcgcccgcctggaactgaccctgccgggcctccagcagctggcccagggcggcaccgcggtgggcaccggcctcaacgcccccgtcggcttcgccgagcaggtcgcggcgaagatcgccgccatcaccggcatcgccttcacctcggcgcccaacaagttcgaggcgctcgccgcccatgacgccatggtgttctcccacggtgccatcaacacgctggcggcctccctgttcaagatcgccaacgacatccgcctgctcggctcgggtccgcgctcgggccttggcgagctgtcgctgccggagaacgagcccggctcgtccatcatgccgggcaaggtgaaccccacccagtgcgaggcgctgacccaggtctgcgtgcagatcttcggcaacaacgccgcgctcaccttcgccggcagccagggccacttcgagttgaacgtgtacaacccggtgatggcctacaatttcctccagtcggtgcggctgatggcggacgcggcggtgagtttcaccgacaattgcgtcgtcggcatcgaggcccgcgaggacaacatcaagtcggcgctggagcgctcgctcatgctggtcaccgcgctggctccgaagatcggctacgacaacgccgccaagatcgccaagaccgcgcacaagaatggcaccaccctgcgcgaggaggccgttggcggcggctatgtgaccaacgaggagttcgacgccgtcgtgcgtcccgagaacatgatctcgcccggctga

SEQ ID NO: 115409 - protein, 462 aa, Xanthobacter autotrophicus Py2
MSTRIETDTFGPIEVQSDRYWGAQAQRSLGNFKIGWEKQPLPVVRALGIVKRAAAEVNRDLGRLDPKIADAIVAAAQEVIDGKLDEHFPLVVWQTGSGTQSNMNANEVISNRAIELLGGEKGSKKPVHPNDHVNMSQSSNDTYPTAMHIACAEEIVHRLLPALRHLHAALKAKSEAWAGIIKIGRTHTQDATPLTLGQEFSGYAQQVENGIARLELTLPGLQQLAQGGTAVGTGLNAPVGFAEQVAAKIAAITGIAFTSAPNKFEALAAHDAMVFSHGAINTLAASLFKIANDIRLLGSGPRSGLGELSLPENEPGSSIMPGKVNPTQCEALTQVCVQIFGNNAALTFAGSQGHFELNVYNPVMAYNFLQSVRLMADAAVSFTDNCVVGIEAREDNIKSALERSLMLVTALAPKIGYDNAAKIAKTAHKNGTTLREEAVGGGYVTNEEFDAVVRPENMISPG

SEQ ID NO: 115410 - DNA, 1395 bp, Flavobacteria bacterium BBFL7
  CDS (1)..(1395): transl_table=11
atggcatatcgtatagaaaaagatactatgggacaggttgaagtcccagcagataaattatggggagcgcaaacacaacgctctcgtaacaattttaaaataggccctaccgcaagtatgccgttagaaatagtgtatggatttgcttatttgaaaaaagctgccgcctacactaattgtgaattaggagtgctagcagaagaaaaaagagatttaatcgcacaagtgtgtgatgaaatcctagacggtaaacatgatgatcagtttccacttgtcgtatggcaaactggatctggtacacagtccaatatgaatgttaatgaagtgattgcaaatcgtgcacatcaattagctggtaaaacaataggtgaaggagaaaaaacgatacaacctaatgatgatgtcaataaatcacaatcatctaatgatacattccctaccggaatgcatatcgcttgttatactaaaattgtagaaaataccattcctggtgtagaacaactacgtaacacgttaaatgcaaaagctgaggcttttaaagacgttgtaaagataggtcgtacacacttgatggatgctacaccattaacaataggtcaagagttttctggatatgtgtcacaactagatcatggaattaaggctcttaagaatacactggctcatttaagtgagcttgctttaggtggtaccgcggtaggaacaggtttaaatactcctgcaggttatgatgtaaaagtagcagaatatattgctcaatttactggtttaccatttgtaacagccgaaaataaatttgaagcacttgctgcacacgatgcactggttgaaactcatggagcactaaagcaaattgctgtttcaattaataaaatagcgcatgatataagaatgcttgcgagtggtccacgatctggaataggtgaattaattatccctgcaaatgagcctggtagttctatcatgcctggaaaagtaaaccctacgcaagccgaagcgattacaatggtttgtgcacgtgtcatgggtaatgacactactgttactgtaggtggaatgcaaggtcattttgaattgaatgtatttaaaccagtaatggcagcagctgttctagaaagtgcacagttgataggagattcttgtagaagttttgatgagaattgtgctgtaggtattgaacctaatcatgataagattaaatcattactggacaattctttaatgcttgtaactgctttaaacactaaaataggatattataaagctgcggaaattgccaataaagctcacgaagaaggttcaacattaaaagaagctgcgcttgccttaggttacgtaacttctgaagaatttgacgcttgggtaaaaccagaagatatggtaggtcataaataa

SEQ ID NO: 115411 - protein, 464 aa, Flavobacteria bacterium BBFL7
MAYRIEKDTMGQVEVPADKLWGAQTQRSRNNFKIGPTASMPLEIVYGFAYLKKAAAYTNCELGVLAEEKRDLIAQVCDEILDGKHDDQFPLVVWQTGSGTQSNMNVNEVIANRAHQLAGKTIGEGEKTIQPNDDVNKSQSSNDTFPTGMHIACYTKIVENTIPGVEQLRNTLNAKAEAFKDVVKIGRTHLMDATPLTIGQEFSGYVSQLDHGIKALKNTLAHLSELALGGTAVGTGLNTPAGYDVKVAEYIAQFTGLPFVTAENKFEALAAHDALVETHGALKQIAVSINKIAHDIRMLASGPRSGIGELIIPANEPGSSIMPGKVNPTQAEAITMVCARVMGNDTTVTVGGMQGHFELNVFKPVMAAAVLESAQLIGDSCRSFDENCAVGIEPNHDKIKSLLDNSLMLVTALNTKIGYYKAAEIANKAHEEGSTLKEAALALGYVTSEEFDAWVKPEDMVGHK

SEQ ID NO: 115412 - DNA, 1410 bp, Rickettsiella grylli
  CDS (1)..(1410): transl_table=11
atgtctgaaaattcaaaaaatagccgtgttgaaaccgatagtatgggttctattaacgttcccgcgcaacattattggggctcgcaaacgcaacgaagtgtgcgtcactttgacatcggtggtgaacaaatgcctttggcggttatccatgcatttggtattttaaaaaaggcggccgcaaaagcgaatctcgaattaggattattaacaaaagagaatgcagatttaatcattcaagtggccgatgaagtaaaatcgggacaactggatgctgaattccctttgcgcgtttggcaaacgggtagcggcacgcaaaccaatatgaatgtgaatgaagtcattgccaatcgcgctatcgaactagccggcggggaacggggtactaaaaaaccaattcatcccaacgatcacgtgaataaatcacaatcctcgaatgatacctttcccaccgcaatgtatattgcagctgcggtggcgatggtcaaaaaactcatccctgcggtacaaaccttatatggtgcactgattgaaaaagtgcatgaatttaaagcgattattaaaataggccgtacgcatttgcaagatgcggttcctttaacattgggtcaagaattttcagcgtatgtggatcaattagaatcggcattagcacatatcgaacaaaccttgccagggctttatcaattggcgataggcggcacggcggtggggacaggattgaatacgcatccaaaatttgctgaattaaccgcaaagtttattgctcaagaaacgaaattacctttcgtttcagccaaaaataaattttctgcgttagccgcgcatgaggctttagtgtttgcaagtggggcgcttaaaaccttagcctgtgcgctaatgaaacttgcaaacgacattcgttggttagggtcaggcccgcgttcaggtttaggtgaacttattttacccgaaaatgagcctggttcttccatcatgccgggtaaagtgaatccgacacaatgtgaagcgatgacaatggtgtgtattcaagtgatgggaaatgatgccgccatcacctttgcaggaagccaaggtaattttgaactgaatgtgtataaaccgttgatgatttataactttttacaatcggtcgatctgttaagttctgcgtgtatttcatttacgcgttattgcgtgaaggatttaaaagcgaatcagactaaaattaaacaatttcttgaaaactcattaatgttagtgacggcattgaatcctatcattggctatgataaagccgctaaaattgcgcataaagcgttacaggaagaaatgagtttacgggaggcctgtgtcgcattgggttatcttgatgcggaaacctttgataaagtcgttgatcctaaaaaaatgctgggaccgcgagtggattaa

SEQ ID NO: 115413 - protein, 469 aa, Rickettsiella grylli
MSENSKNSRVETDSMGSINVPAQHYWGSQTQRSVRHFDIGGEQMPLAVIHAFGILKKAAAKANLELGLLTKENADLIIQVADEVKSGQLDAEFPLRVWQTGSGTQTNMNVNEVIANRAIELAGGERGTKKPIHPNDHVNKSQSSNDTFPTAMYIAAAVAMVKKLIPAVQTLYGALIEKVHEFKAIIKIGRTHLQDAVPLTLGQEFSAYVDQLESALAHIEQTLPGLYQLAIGGTAVGTGLNTHPKFAELTAKFIAQETKLPFVSAKNKFSALAAHEALVFASGALKTLACALMKLANDIRWLGSGPRSGLGELILPENEPGSSIMPGKVNPTQCEAMTMVCIQVMGNDAAITFAGSQGNFELNVYKPLMIYNFLQSVDLLSSACISFTRYCVKDLKANQTKIKQFLENSLMLVTALNPIIGYDKAAKIAHKALQEEMSLREACVALGYLDAETFDKVVDPKKMLGPRVD

SEQ ID NO: 115414 - DNA, 1398 bp, Synechococcus sp. RS9916
  CDS (1)..(1398): transl_table=11
atggtggcagcgacccgggttgaaaccgacagcatgggccctgtcgaggtgcctgctgaggctctttggggggcccaaacccagcgttcgctgcataatttcgccattgctgcggatcgcatgccggcggagctcatccacgccctggctcggatcaagcaagcagccgcgatcaccaatgcacgacttggcgtattagatgcagaacgccgcgattacatcgttgctgcagcaaccgctgtggcggaaggcctgcacgacgggcagttcccgctgcgggtctggcagaccggcagcgggacgcaaaccaacatgaacctcaatgaggtgatcagcaatctggccgcgcaggcagccggcgagcccctgggaagccacaaaccggtgcaccccaacgaccacgtcaaccgctcccagtcgaccaacgacgccttccccgcagcgattcatgtggcagcggcgcaaggcatcagccaccgtctgctgccggaactgcaacggctgaaaaacgccttcggggccaaagcggatgcctggactgacatcgtcaagatcgggcgcacccacctgcaggacgccgtgccgctgacccttggccaggaagcgtcggcctggcgcgatcagatcggtaccgcagcacaacggatcgacgccagcctggcggaggtgctgccactaccgctggggggcacggctgtcggcaccggcctgaatgctcctgatggatttgcccgactagcagcggaagaactcacccggctcacgggcctgcccttcagctcagcacccaacaaatttgcggtgatggctggccatgacgggctcgtcaatgccatgggtcagctgcgcctgctggcggtcagcctgctgaagatcgccaacgacatccgtctgctggcctgcggtccgcgcgctggcctggcggaactgcatctgccggccaatgaaccgggcagctcaatcatgccggggaaggtgaatcccacccagtgcgaggcgatggcgatggtctgcacccaggtgatcggcctcgatgcagcggtggcgatggccggcagcggcggccatctgcagatgaacgtctacaaaccgttgatcggcttcaacctgctagagacgatcacccttctcaccgatgcctgtcgatgcttccgcgtggcgatggtggagggcatggagcccaatcgcagccgcattgagcacgacgttgaacaatcgctgatgttggtgactcccctcgctccagtgatcggctacgacaaagccagcgcgatcgccaaacacgcccacgaacaaggctcaagcctcaaagaagcagccttggaactgggctatgtgagtgctgaagagtttgaccaggttgttgaccctgcagcgatggctgtggctcaggattga

SEQ ID NO: 115415 - protein, 465 aa, Synechococcus sp. RS9916
MVAATRVETDSMGPVEVPAEALWGAQTQRSLHNFAIAADRMPAELIHALARIKQAAAITNARLGVLDAERRDYIVAAATAVAEGLHDGQFPLRVWQTGSGTQTNMNLNEVISNLAAQAAGEPLGSHKPVHPNDHVNRSQSTNDAFPAAIHVAAAQGISHRLLPELQRLKNAFGAKADAWTDIVKIGRTHLQDAVPLTLGQEASAWRDQIGTAAQRIDASLAEVLPLPLGGTAVGTGLNAPDGFARLAAEELTRLTGLPFSSAPNKFAVMAGHDGLVNAMGQLRLLAVSLLKIANDIRLLACGPRAGLAELHLPANEPGSSIMPGKVNPTQCEAMAMVCTQVIGLDAAVAMAGSGGHLQMNVYKPLIGFNLLETITLLTDACRCFRVAMVEGMEPNRSRIEHDVEQSLMLVTPLAPVIGYDKASAIAKHAHEQGSSLKEAALELGYVSAEEFDQVVDPAAMAVAQD

SEQ ID NO: 115416 - DNA, 1386 bp, Vibrio sp. Ex25
  CDS (1)..(1386): transl_table=11
atgagcaccgaattccacatagaaactgacagtatgggcgaagtgaaagtcccagcagatgcactctaccaagcccaaactcagcgcgccgtcgataacttctcattcagtcaacataagatgccatctggcttcatccaagcgttggcacacatcaagcagactgcggcactcaccaacgcacaattggggctgcttgaaggtgatatcgctaatgcgattgctgacgcagctcaggcgattatcgagggcaatcatattgagcaatttccaattgacgtatttcaaaccggatcaggcaccagctcaaatatgaatgcgaatgaagtgattgcaacactggcctcccagcatctaggcggtaccgtcagtcctaatgatcacgtcaacatgggacaaagcagtaacgatgtggtgccaacggccattcaagttagcgcagcattagccattgaaacacagctcttcccggccctgtcacacctcatccaaacactagagtctaagcaacaagcactgaaagatgttgtaaaaaccggtcgcacccacttaatggacgcgatgcctattacctttgctcaagagcttggcggttggcagttccaaatcgagcacgcaaaacaagcgattgaacaagcacttcctgcggtaaaagccttagctcaaggtggtaccgcggttggcacggggatcaatgccgatccacgctttgcagacttattcgctagcaacctaacccagtcaactcgtattcagttcacggccagtgataacttctttttcaatttaagcagtcaagatgcgatcgtcgctctgtcgggacagctcaaaacagcagcagttgcgatcatgaagatcgcaaacgatcttcgttggatgaattcaggcccattggctggtttaggtgagattgaattacaaggcttgcaaccgggttcttccatcatgcctggcaaagtaaatcctgtgatcccagaagccgcagctatggcctcagcgcaagtcattggtaatgacaccacgattaccgtcgcgggccaagcaggcaacttccaactaaacgtcatgctacctgtcattgctcataacgtattggagagcatcgagttgctcgctaacagcgcaaccgctttagccgataaggccattgcaacatttgaagttcgtcaagataacttggatgtagcgctcgccaaaaacccaattttggtcacggccctcaacccggtcattggctacctgaaagcggcagaagtcgcgaaaaaagcctataagcaggggcgtgcgattattgatgtcgcagaagaagaaaccgatttagatagagccacgttagaacgattgcttaatcccgcaaaactcacccaaggcggcgtcgcggaataa

SEQ ID NO: 115417 - protein, 461 aa, Vibrio sp. Ex25
MSTEFHIETDSMGEVKVPADALYQAQTQRAVDNFSFSQHKMPSGFIQALAHIKQTAALTNAQLGLLEGDIANAIADAAQAIIEGNHIEQFPIDVFQTGSGTSSNMNANEVIATLASQHLGGTVSPNDHVNMGQSSNDVVPTAIQVSAALAIETQLFPALSHLIQTLESKQQALKDVVKTGRTHLMDAMPITFAQELGGWQFQIEHAKQAIEQALPAVKALAQGGTAVGTGINADPRFADLFASNLTQSTRIQFTASDNFFFNLSSQDAIVALSGQLKTAAVAIMKIANDLRWMNSGPLAGLGEIELQGLQPGSSIMPGKVNPVIPEAAAMASAQVIGNDTTITVAGQAGNFQLNVMLPVIAHNVLESIELLANSATALADKAIATFEVRQDNLDVALAKNPILVTALNPVIGYLKAAEVAKKAYKQGRAIIDVAEEETDLDRATLERLLNPAKLTQGGVAE

SEQ ID NO: 115418 - DNA, 1374 bp, Alteromonadales bacterium TW-7
  CDS (1)..(1374): transl_table=11
atgagcaactttagaatagaatcagacagtatgggcgaattaaaagtacctgttaacgctttatatcaagcacaaacacagcgcgctgttaataactttgctattagcgcccttactatgccagcacaatttataaaggcactggcatatataaaacaagctgcagcacaaagtaactgtgagctagggcttataaataaaaccaaaacaactgcaatagagcatgcttgccaagcgattattgatggtaagcatcatgatcagtttcctgttgatgtgtttcaaaccggatcaggaactagttctaatatgaacgccaatgaagtaatagcaacacttgccagtactcaactggagcttgtacatcctaatgatgatgtaaacatgggccaaagctcaaacgatgtagtccctacggctattgcactaagtagtgccctagccgttaaacaagcattactgccagctcttgaaaacctttcgcaacatttagaaaataaaaagagcgaggtaggcgctattgttaaaacgggtcgcactcacttaatggacgcgatgcctgttacattcgaacaaacccttaatgcatggcaatcgcaagtaaacaacgcggcttcaggcattcgccatagcttagagccagtgtgtgagcttgctcaaggtggtacagctgttggtaccggtattaatgccgacccaaagtttgcagacttattttgcactaacctaactaaaaacgtggggatccagttttcgccaagcaaaaactttttttataatattggttcacaagatgccattgttgcactgtctgggcaattaaaagtactcgctgtagcacaaatgaaaatagcgaacgacttacgctggatgaactcaggcccccttgcaggtttaggcgaaatagaacttgaagccctacaacctggctcatctattatgccgggtaaagtaaacccagtcataccagaagccgctgcgatggttagcgcacaagtgattggtaacgacgctacaattaccgttgctggtcaatctggtaactttgaactaaatgttatgctgcccgttattgcctataatattttgcaaagcatagagctactaacaaacagcgtccaagctttggcagaaaaagccatagccacatttaccgtaaatcaggctaatattgaccgcgctcttgctaaaaaccctattttagtgactgcacttaatccggtgatcggttacgaaaaagcagccaaaatagccaagcaagcctataaagaagcccgtcctattattgatgttgccgaacaagaaactgacttaccacgtgaagagctcgaaaaactgctcaacccgactaagctcacacaaggtggcttgtag

SEQ ID NO: 115419 - protein, 457 aa, Alteromonadales bacterium TW-7
MSNFRIESDSMGELKVPVNALYQAQTQRAVNNFAISALTMPAQFIKALAYIKQAAAQSNCELGLINKTKTTAIEHACQAIIDGKHHDQFPVDVFQTGSGTSSNMNANEVIATLASTQLELVHPNDDVNMGQSSNDVVPTAIALSSALAVKQALLPALENLSQHLENKKSEVGAIVKTGRTHLMDAMPVTFEQTLNAWQSQVNNAASGIRHSLEPVCELAQGGTAVGTGINADPKFADLFCTNLTKNVGIQFSPSKNFFYNIGSQDAIVALSGQLKVLAVAQMKIANDLRWMNSGPLAGLGEIELEALQPGSSIMPGKVNPVIPEAAAMVSAQVIGNDATITVAGQSGNFELNVMLPVIAYNILQSIELLTNSVQALAEKAIATFTVNQANIDRALAKNPILVTALNPVIGYEKAAKIAKQAYKEARPIIDVAEQETDLPREELEKLLNPTKLTQGGL

SEQ ID NO: 115420 - DNA, 1395 bp, Pseudomonas putida GB-1; identical to SEQ ID NO: 45230
  CDS (1)..(1395): transl_table=11

SEQ ID NO: 115421 - protein, 464 aa, Pseudomonas putida GB-1; identical to SEQ ID NO: 45231

SEQ ID NO: 115422 - DNA, 1380 bp, Pseudomonas putida GB-1; identical to SEQ ID NO: 45232
  CDS (1)..(1380): transl_table=11

SEQ ID NO: 115423 - protein, 459 aa, Pseudomonas putida GB-1; identical to SEQ ID NO: 45233

SEQ ID NO: 115424 - DNA, 1380 bp, Marinobacter sp. ELB17; identical to SEQ ID NO: 45234
  CDS (1)..(1380): transl_table=11

SEQ ID NO: 115425 - protein, 459 aa, Marinobacter sp. ELB17; identical to SEQ ID NO: 45235

SEQ ID NO: 115426 - DNA, 1437 bp, Bacillus cereus; identical to SEQ ID NO: 45236
  CDS (1)..(1437): transl_table=11

SEQ ID NO: 115427 - protein, 478 aa, Bacillus cereus; identical to SEQ ID NO: 45237

SEQ ID NO: 115428 - DNA, 1650 bp, Aspergillus oryzae; identical to SEQ ID NO: 45240
  CDS (1)..(1650)

SEQ ID NO: 115429 - protein, 549 aa, Aspergillus oryzae; identical to SEQ ID NO: 45241

SEQ ID NO: 115430 - DNA, 1865 bp, Solanum tuberosum; identical to SEQ ID NO: 45242
  CDS (66)..(1547)

SEQ ID NO: 115431 - protein, 493 aa, Solanum tuberosum; identical to SEQ ID NO: 45243

SEQ ID NO: 115432 - DNA, 1434 bp, Escherichia coli; identical to SEQ ID NO: 45244
  CDS (1)..(1434): transl_table=11

SEQ ID NO: 115433 - protein, 477 aa, Escherichia coli; identical to SEQ ID NO: 45245

SEQ ID NO: 115434 - DNA, 1389 bp, Neisseria subflava
  CDS (1)..(1389): transl_table=11
atgagcacccgcaccgaacacgacacgatgggcaatgtcgaagtcccgtccgaagcctattggggcgcgcagacccagcgcagccgcaacaatttcaaaatcggcggcgaaaccctgccgcagccgctgatttatgctttggcattagtgaaaaaagccgccgccgcgaccaatgtttccctcggcaggattaagcccgagcaggcggatttgattacgcaggcggcggacgatgtgttgagcggcaagcttgacgggcagtttccattggtagtgtggcagaccggctccggcacgcagtccaatatgaacatgaacgaagtgctggcaaaccgcgccaacgaaatcgccggtacgggtttggcggcgtatcagcccgtccatcccaacgaccatgtaaaccacgcgcaatcaaccaatgacgcgttcccaaccgccatccacgtcgccgccgcgattgaaatcaaccgccaccttattccggcggtaaaagccttgcgcgacaccttggacaaaaaagcccaagaattcgcccctatcgtcaaaatcggccgcacccacttgcaagacgcgacgccgttgactttgggtcaagagttttccggctacgtttcccaacttgaccacggcttaggccgtctgaacgacgcgctcaaaggtttatacgaactcgctttgggcggcacggcggtcggtacgggtttgaacagccatcccgaatacgccgaaaaagccgccgccaaacttgccgaattgtccggcctaccgtttgtcagcgcaccgaacaaatttgaagctttgggcggacgcgatgctgccgttgctgcttcgggtgcattaaaaactctggcggcaagcctgaacaaaatcgccaacgatatccgctggctggcaagtggcccgcgttgcggtttgggcgaaatcaaaattcccgaaaacgagccgggttcgtccatcatgccgggcaaagtcaacccgacccaatgcgaagcgatgaccatggtgtgctgccaagtgttcggcaacgacgttaccatcggcatggcaggcgcatcgggcaacttcgagctgaacgtctatatgcctgttatcgcctacaaccttttgcaatccattcgtctgttgggcgatgcgtgcaacagcttcaacgaacactgcgccgtcggtatcgaacccgtaccggaaaaaatcgactatttcctgcaccattccctgatgttggttactgcgttaaaccgcaaaatcggctacgaaaacgccgccaaagtcgccaaaaccgcctacaaaaacgacaaatcgctgcgcgaaaccgccatcgaattgggcttgttgacaggcgaggagtttgacgaattggtcgttcctgccgatatggttcatccgcgctaa

SEQ ID NO: 115435 - protein, 462 aa, Neisseria subflava
MSTRTEHDTMGNVEVPSEAYWGAQTQRSRNNFKIGGETLPQPLIYALALVKKAAAATNVSLGRIKPEQADLITQAADDVLSGKLDGQFPLVVWQTGSGTQSNMNMNEVLANRANEIAGTGLAAYQPVHPNDHVNHAQSTNDAFPTAIHVAAAIEINRHLIPAVKALRDTLDKKAQEFAPIVKIGRTHLQDATPLTLGQEFSGYVSQLDHGLGRLNDALKGLYELALGGTAVGTGLNSHPEYAEKAAAKLAELSGLPFVSAPNKFEALGGRDAAVAASGALKTLAASLNKIANDIRWLASGPRCGLGEIKIPENEPGSSIMPGKVNPTQCEAMTMVCCQVFGNDVTIGMAGASGNFELNVYMPVIAYNLLQSIRLLGDACNSFNEHCAVGIEPVPEKIDYFLHHSLMLVTALNRKIGYENAAKVAKTAYKNDKSLRETAIELGLLTGEEFDELVVPADMVHPR

SEQ ID NO: 115436 - DNA, 1389 bp, Neisseria gonorrhoeae
  CDS (1)..(1389): transl_table=11
atgagcacccgcaccgaacacgacacgatgggcaatgtcgaagtcccgtccgaagcctattggggcgcgcagacccagcgcagccgcaacaatttcaaaatcggcggcgaaaccctgccgcagccgctgatttacgctttggcgttggtgaaaaaagccgccgccgcgaccaatgtttccctcggcaggattaagcccgaacaggcggatttgattacgcaggcggcggatgatgtactgaacggcaggctcgacgggcagttccccttagtggtttggcagaccggctccggtacgcagtccaatatgaacatgaacgaagtgctggcaaaccgcgccaacgaaattgcaggtacgggtttggcggcgtaccggcccgtccaccccaacgaccatgtgaaccacgcgcaatcgaccaacgacgcgttcccgaccgccatccacgtcgccgccgcgattgaaatcaaccgccaccttattccggcggtaaaagccttgcgcgatacattggacaaaaaagcccaagccttcgcccccatcgtcaaaatcggccgtacccacttgcaggatgcgacgccgctgactttgggacaagaattttccggctacgtttcccaactcgaccacagcttaggccgtctgaacgacgcgctcaaaggtttgtacgaactcgccttgggtggaacggcggtcggtacgggtttgaacagccatcccgaatacgctgaaatagccgccgccaaactcgccgaactgtccggcctgccgtttgtcagcgcgccgaacaaatttgaagccttgggcggacgcgatgccgccgttgccgcttcgggcgcattgaaaacgctggcggcaagcctgaacaaaatcgccaacgacatccgctggctggcaagcggcccgcgctgcggcttgggcgaaatcaaaatccccgaaaacgaaccgggttcgtccattatgccgggcaaagtcaacccgacccaatgcgaagcgatgacgatggtgtgctgccaagtgttcggcaacgacgttaccatcggtatggcgggcgcgtcgggcaatttcgagctgaacgtctatatgcccgtcatcgcctacaacctcttgcaatccatccgcctcttgggcgacgcgtgcaacagcttcaacgaaaactgcgccgccggcatcgaacccgtaccggaaaaaatcgactatttcctgcaccattccctgatgctggttactgcgttaaaccgcaaaatcggctacgaaaacgccgccaaagtcgccaaaaccgcctacaaaaacgataaatcgctgcgcgaaactgccgttgggttgggcttgctgacgggcgaagagtttgacgaactggtcgtccctgccgatatggttcatccgcgctaa

SEQ ID NO: 115437 - protein, 462 aa, Neisseria gonorrhoeae
MSTRTEHDTMGNVEVPSEAYWGAQTQRSRNNFKIGGETLPQPLIYALALVKKAAAATNVSLGRIKPEQADLITQAADDVLNGRLDGQFPLVVWQTGSGTQSNMNMNEVLANRANEIAGTGLAAYRPVHPNDHVNHAQSTNDAFPTAIHVAAAIEINRHLIPAVKALRDTLDKKAQAFAPIVKIGRTHLQDATPLTLGQEFSGYVSQLDHSLGRLNDALKGLYELALGGTAVGTGLNSHPEYAEIAAAKLAELSGLPFVSAPNKFEALGGRDAAVAASGALKTLAASLNKIANDIRWLASGPRCGLGEIKIPENEPGSSIMPGKVNPTQCEAMTMVCCQVFGNDVTIGMAGASGNFELNVYMPVIAYNLLQSIRLLGDACNSFNENCAAGIEPVPEKIDYFLHHSLMLVTALNRKIGYENAAKVAKTAYKNDKSLRETAVGLGLLTGEEFDELVVPADMVHPR

SEQ ID NO: 115438 - DNA, 1389 bp, Neisseria meningitidis; identical to SEQ ID NO: 45246
  CDS (1)..(1389): transl_table=11

SEQ ID NO: 115439 - protein, 462 aa, Neisseria meningitidis; identical to SEQ ID NO: 45247

SEQ ID NO: 115440 - DNA, 1488 bp, Drosophila melanogaster
  CDS (1)..(1488)
atggtgctaccattattgcaacgctccacgcttcgcggcgttcaacaaatgacgaaaccctgggccgccattggaagtttgcgtctggcctcccaggagtttcgcgtggagagcgacacctttggcgaactgaaggtgcccgcggataagtactatggcgcccaaacgatgcgatcccagatcaatttccccatcggcggagccaccgaacggatgcccaaacccgtggtccaggccatgggcatcctgaagaaggccgccgccgaggtgaacaaggagttcggactggacagcaaggttagcgaggcgatctcgaaggcggccgacgatgtgatctctggcaagctatacgacgaccacttcccgctggtcatctggcagacgggctcgggcacgcagagcaacatgaatgtgaatgaggtgatcagcaatcgtgccattgagctgctgggcggcaaactgggctccaagacgcccgtgcatcccaacgatcatgtgaacaaatcgcagagctccaacgataccttccccaccgccattcacatctcggtggcgctggagctgaacaacaaccttaagccggcgattaagacgctgcacgatgcgctgcgtgccaagtcggaggagttcaaggacattatcaagatcggacgcacgcatacgatggatgcggtgccattgacgctgggccaagagttcagcggctatgcccagcaattggcctacgcccaggagcgcatcgatgcctgtctgccgcgcgtctatgagctggctctgggcggcactgctgtgggtacgggtctgaacacacgcaagggattcgccgagaagtgcgctgcaaagatcgccgagctgaccagcctgcccttcgttaccgcgcccaacaagttcgaggcactggctgcccgcgatgccatggtggaggtgcatggtgtgctcaacacgatcgccgttagcctgatgaagattgccaacgatattcgtttccttggctccggaccgcgttgcggtttgggtgagctctcgctaccggagaacgagccaggtagctccatcatgcccggcaaggtgaatcccacgcaatgcgagtcgctgacaatgctctccgcccaggtgatgggcaatctggtggcggtgaccatcggtggatccaatgggcacttcgagctgaatgtattcaagcccctgatcgtgtccaatgtgctgcgctccattcggctattgtctgatggcagcaggaccttcactgccaactgtgtgaatggcatccaggcgaaccgcgagaatattgccaagatcatgaacgagtcgctcatgctggtgaccgctctgaatccgcacattggttacgacaaggctgcgaaaattgcaaagacggcgcacaagaatggcaccacactcaaggaggaggccatcaatttgggttacctgacggagcagcagttcaacgactgggtgcgacccgaacagatgctgggacccaagtga

SEQ ID NO: 115441 - protein, 495 aa, Drosophila melanogaster
MVLPLLQRSTLRGVQQMTKPWAAIGSLRLASQEFRVESDTFGELKVPADKYYGAQTMRSQINFPIGGATERMPKPVVQAMGILKKAAAEVNKEFGLDSKVSEAISKAADDVISGKLYDDHFPLVIWQTGSGTQSNMNVNEVISNRAIELLGGKLGSKTPVHPNDHVNKSQSSNDTFPTAIHISVALELNNNLKPAIKTLHDALRAKSEEFKDIIKIGRTHTMDAVPLTLGQEFSGYAQQLAYAQERIDACLPRVYELALGGTAVGTGLNTRKGFAEKCAAKIAELTSLPFVTAPNKFEALAARDAMVEVHGVLNTIAVSLMKIANDIRFLGSGPRCGLGELSLPENEPGSSIMPGKVNPTQCESLTMLSAQVMGNLVAVTIGGSNGHFELNVFKPLIVSNVLRSIRLLSDGSRTFTANCVNGIQANRENIAKIMNESLMLVTALNPHIGYDKAAKIAKTAHKNGTTLKEEAINLGYLTEQQFNDWVRPEQMLGPK

SEQ ID NO: 115442 - DNA, 2112 bp, Helicobacter pylori
  CDS (658)..(2049): transl_table=11
tctaaatctttagccaaacccaaactaaaaagcagtaacaaggctgttaaaaggcgtattaaaacgccccccttataaaacacgcttataaaagatagcatgcacttataaatccaagcttgttttagcgcgataaactttgccttctttggatttaatatccaccctcacctgccatgtcccgttcatagaaagattggttttagcttcataaaggccgtttttttcactcacttgtgccatttctttcatcgctggcatgccgggcatttcaggcatcataaactgcaccctaacgatagctttttctaaagccttaccttttaaagtggggctgagtatgaaagtgttatcgcctttaatggggttacccacggatttgattttcacttccaagtcattggcttttagggtttgctcccatgcgtttaaactcataacccccaacacgctcattaaaaataaagcggctaactttttcatcgttttgacctttacattaagataacaagaaaattcttgttgcgaacggataataaccctcttttgtgtaaaaattgtggaaatggtttttaaaaaaatgggggttttaagtagaaggtataagagtttatgctatttttttaaggttttaaaatcaaatttcaaaggattagtatgcaatttagaatcgaacatgacacgatgggcgaaatcaaagtagatgatagccaatactggggggctcaaacgcaacgcagtcttgaaaactttaaaatcggcactgaaaaaatgcctaaagaactcattggcgcgtttgccaaactcaaaaggagtctggcggttgtcaatcaccagttagggaaattaagcttggaaaaatcgcaagccattatcaaggcgtgcgattgcattttaaaaggcgagctgtgcggcgagttccccttagcgatatggcaaacagggagcgggactcaaacgaacatgaatctcaatgaagtcattgccaataaggctaccgaaattttagggggtaattttagggagaaaaaactcatccaccctaacgatgatgtgaacatgtctcaaagctccaacgacactttccctaccgctatgcacattgtgagcgtgctagaaatcacgcataaactactgcccagtttagagaatttgttaaagacctttaaagacaaaagccaacaatttaaagagattgtcaaaatcgggcgcacgcatttacaagacgctacgcctttaactttggggcaagaatttagcgggtatgcgagcatgttagagcattctaaacaacaaattttagagagtttggagcatttaagggaattagccataggcgggacggccgtaggcacagggctaaacgctcacaaagaattgagccaaaaagtggctgaagaattgagcgagtttagcggcgtgaaattcatctctgcgcccaataaattccatgcgctcactagccatgacgctatcgcttatgcgcatggggcttttaaggctttagcggcgaatttaatgaaaatcgctaacgatattagatggcttgcgagcgggccgcgctgtggtttgggcgagcttaatatccctgaaaacgagccgggtagttctatcatgcccggtaaagtcaatcccacgcaatgcgaagcgatgaccatggtggccgtgcaagtgatggggaatgataccgctattggcattgcggccagtcagggtaattttgaattgaatgtgttcaagccggtgattatttataatttcttgcaaagtttgaggctactaagcgatagcatggaaagttttaatacccattgcgcgatcggcattgagcctaataaagaaaagattgattattacttgcaccattctttgatgctagtaaccgccctaaacccgcatgtaggctatgaaaacgccgctaaaatcgctaaaaacgcccacaaaaaaggcatttctttaaaagaaagcgcgctggaactgaagctcttgagcactgaagattttgacaaattcgtggtgcctgaaaagatgatcgggcctaaggcttgaaaaccttgggtgggcgtgcgagatgaatcctgaaaaagccactcatagcaaagagattcgtaa

SEQ ID NO: 115443 - protein, 463 aa, Helicobacter pylori
MQFRIEHDTMGEIKVDDSQYWGAQTQRSLENFKIGTEKMPKELIGAFAKLKRSLAVVNHQLGKLSLEKSQAIIKACDCILKGELCGEFPLAIWQTGSGTQTNMNLNEVIANKATEILGGNFREKKLIHPNDDVNMSQSSNDTFPTAMHIVSVLEITHKLLPSLENLLKTFKDKSQQFKEIVKIGRTHLQDATPLTLGQEFSGYASMLEHSKQQILESLEHLRELAIGGTAVGTGLNAHKELSQKVAEELSEFSGVKFISAPNKFHALTSHDAIAYAHGAFKALAANLMKIANDIRWLASGPRCGLGELNIPENEPGSSIMPGKVNPTQCEAMTMVAVQVMGNDTAIGIAASQGNFELNVFKPVIIYNFLQSLRLLSDSMESFNTHCAIGIEPNKEKIDYYLHHSLMLVTALNPHVGYENAAKIAKNAHKKGISLKESALELKLLSTEDFDKFVVPEKMIGPKA

SEQ ID NO: 115444 - DNA, 1380 bp, Pseudomonas putida; identical to SEQ ID NO: 45250
  CDS (1)..(1380): transl_table=11

SEQ ID NO: 115445 - protein, 459 aa, Pseudomonas putida; identical to SEQ ID NO: 45251

SEQ ID NO: 115446 - DNA, 1428 bp, Bacillus subtilis; identical to SEQ ID NO: 45252
  CDS (1)..(1428): transl_table=11

SEQ ID NO: 115447 - protein, 475 aa, Bacillus subtilis; identical to SEQ ID NO: 45253

SEQ ID NO: 115448 - DNA, 1437 bp, Serratia marcescens
  CDS (1)..(1437): transl_table=11
atgtcaaacaacattcgtatcgaagaagacctgttaggaacacgtgaagtccccgcagacgcttactacggagttcacactctgcgtgcgattgaaaacttctacatcagcaacagcaaaatcagcgatgtccccgagttcgttcgcggcatggtgatggtgaaaaaggccgcggcgatggccaacaaagaactcaaaaccatcccgcgcaaaatcgccgacgtgatcatccaggcctgcgacgaggtgctggataaaggcaagtgcatggatcagttcccggtggacgtattccagggcggcgcgggcacctcgctgaacatgaacaccaacgaagtgctggcgaacatcggcctggagctgatgggccatcaaaaaggcgaataccagtacctgaacccgaacgatcacctcaataagtgtcagtccaccaacgacgcctacccgaccgggttccgcatcgcggtgtacgcctccaaccagaaactgatcgacgccatcaaccagctgcgcgaaggcttcgatcgcaaggcgaaagagttcgaaaccatcctgaaaatgggccgcacccagctgcaggacgcggtgccgatgaccctaggccaggaattccacgccttcagcgtgctgctgaacgaagagacccgcaatctgcaccgcaccgcgacgctgctgctggaagtgaacctcggcgccaccgccatcggcaccgcgctcaacaccccggaaggctaccagccgctggcggtgcaaaaactggcggaagtcagcggcctgccggtggtgccggcagaagacctgatcgaagccacctccgactgcggcgcctacgtgatggtgcacagcgcgctcaaacgcctggcggtgaaactgtccaaaatctgtaacgacctgcgcctgctctcctccggcccgcgcgccggcctgaacgaaatcaacttgccggagctgcaggcgggatcgtccatcatgccggccaaagtgaatccggtggtgccggaagtggtcaatcaggtgtgtttcaaggtgattggcaacgacacttgcgttaccatggcggccgaagcgggccagctgcagctgaacgtgatggagccggtgatcggccaggcgatgttcgagtcgatccacatcctgaccaacgcctgctacaacctgctggaaaaatgcattaacggcatcaccgcgaataaagaagtctgcgaacactacgtcttcaactcgatcggtatcgtcacctatctgaacccgttcatcggccaccataacggtgacatcgtcgggaagatctgcgccgaaaccggcaagagcgtgcgcgaagtggtgctggaacgcggcctgctgaccgaagccgagctggatgacatcttctccgtggagaacctgatgcacccggcctataaagccaaacgctatacggatgaaaatgaacaataa

SEQ ID NO: 115449 - protein, 478 aa, Serratia marcescens; identical to SEQ ID NO: 45261

SEQ ID NO: 115450 - DNA, 1479 bp, Arabidopsis thaliana
  CDS (1)..(1479)
atgtcgatttacgtcgcgtcgcgacggctctccggcggaacaactgtgacggcgctgcgttatgccacctctctgagatcttattcgacctcgtttagggaggagagggacaccttcgggccgattcaagttccttccgataaattgtggggagcccagacgcagagatcgctgcagaacttcgaaatcggtggtgagcgcgagcgaatgcctgaaccaattgtccgcgcttttggcgtcttgaagaaatgcgctgccaaggttaacatggaatacggtcttgatccgacgattgggaaagcaattatgcaagctgctcaggaagtagctgagggaaagctcaatgatcatttcccccttgttgtctggcaaactggtagtgggactcagagtaatatgaatgctaatgaggtcattgctaatagagcagctgagattcttggtcgcaaacgtggtgagaaatgtgtgcacccaaatgaccatgtgaacagatcacaatcttctaacgacacttttcctaccgtcatgcacattgcagctgcaaccgagattaattcgaggctcatccctagtttaaaaactttgcatagcactttggaatctaagtccttcgagttcaaagatattgtgaaaattggaagaactcacactcaagatgctacacctttgacactaggacaagaatttggtggctatgctactcaagttaagtatggactaaatagagtcacctgcactcttcctcgcctctatcagcttgcacaaggtggaactgcggttgggacaggattaaacactaagaaagggtttgatgtaaagatagctgctgcagtagctgaagaaacaaacttgccatttgtcactgcagaaaacaagtttgaagctctggctgcacacgatgcttgtgttgaaaccagtgggtcacttaacacaatcgccacatcgctgatgaagatcgccaatgatatacgttttcttggaagtggcccaagatgtggtcttggtgaacttgtactacctgaaaatgagccaggaagcagtatcatgcctgggaaggtaaatcctacacagtgtgaggccttgactatggtttgtgcacaggttatgggaaaccatgtagctgtgacagttggtgggtcaaatggtcatttcgaattgaatgtattcaagccggtgatcgcgagtgctcttttacattccgtcagattaatagcagatgcttcagcttcgttcgagaaaaactgtgtgaggggcattgaggccaacagagaaagaatctcaaagctattgcacgagtctcttatgcttgtgacatcattgaatccgaaaatcgggtatgacaatgctgcagcagttgccaagaaagctcacaaagaaggatgtacattgaaggaagcggctctgaatttaggcgtgcttactgcggaagagtttgatacacttgttgttcctgagaagatgattggtccctccgattga

SEQ ID NO: 115451 - protein, 492 aa, Arabidopsis thaliana; identical to SEQ ID NO: 45263

SEQ ID NO: 115452 - DNA, 1500 bp, Arabidopsis thaliana; identical to SEQ ID NO: 45264
  CDS (1)..(1500)

SEQ ID NO: 115453 - protein, 499 aa, Arabidopsis thaliana; identical to SEQ ID NO: 45265

SEQ ID NO: 115454 - DNA, 1467 bp, Bradyrhizobium japonicum; identical to SEQ ID NO: 45266
  CDS (46)..(1467): transl_table=11

SEQ ID NO: 115455 - protein, 473 aa, Bradyrhizobium japonicum; identical to SEQ ID NO: 45267

SEQ ID NO: 115456 - DNA, 1377 bp, Pseudomonas aeruginosa
  CDS (1)..(1377): transl_table=11
atgactgacacccgcatcgaacgcgacagcatgggcgaactggcggtcccggcgaccgccctctatggcgcccagacccagcgcgcggtgaacaacttcccggtcagcggccaacgcatgccccaggccttcgtccgcgccctgctgctggccaaggccgcggcggcgcgggcgaacgtctccctgcagcaactggatgcaccgatgggcgaggcgatcgccgacacctgcctgcaactgctgcaggaggacttcatgcagcatttcccggtggatgtgttccagaccggctccggcaccagttccaacatgaacgccaacgaagtggtggcgaccctggccagtcgtcgcctgggcggcaaggtcaatccgaacgaccatgtgaactgcgggcagagcagcaacgacatcattccctcgaccatccacatcagtgccgccctcgagatcagcgaacgcctgctgccggcgctgcgccacctggagcagactatccagagcaaggccggcgaagtgcatgcctatgtgaagaccggccgcacccacctgatggatgcgatgccggtacgcatgagccaggtgctcggtggctgggcgcagcaggtgcgacaggccggcgtgcacatcgagagcgtacttcctgccttgcagcagttggcacagggcggcaccgcggtgggcaccgggatcaacgcccatcctcggttcgccgaacgtttcagccaggagctgaacgacctgaccgggctggcgttccgccccggcgacgacttcttcgccctgatcggttcgcaggacaccgcggtcgctgcgtccggccagttgaagaccctggcggtgaccctgatgaagctggccaacgacctgcgctggatgaactccgggccgcttgccgggctcggcgagatcgagctggaagcgctgcaaccaggctcctcgatcatgcccggcaaggtcaacccggtgatcccggaggccaccgcgatggtcgccgcccaggtgatcggcaatgacgctgccattgccgtcgccggccaatcgggcaacttcgaactgaacgtgatgctgccgctggtggcggacaacctgttgcacagcatccagttgctggccaacgtcagccggctgctggcggacaaggccatcgccagcttcaaggtcaaccagggcaagctcagcgaggcgttggcgcgcaacccgatcctggtcactgcgctgaacccgatcattggctaccagaaggctgcggaaatcgccaagcaggcctatcgcgagggacggccgatcatcgatgtggcgctggaaaacaccgatctggaccgtgcgcgcctggaggtgttgctggatccggaaaaactcacggctggcggcctctga

SEQ ID NO: 115457 - protein, 458 aa, Pseudomonas aeruginosa
MTDTRIERDSMGELAVPATALYGAQTQRAVNNFPVSGQRMPQAFVRALLLAKAAAARANVSLQQLDAPMGEAIADTCLQLLQEDFMQHFPVDVFQTGSGTSSNMNANEVVATLASRRLGGKVNPNDHVNCGQSSNDIIPSTIHISAALEISERLLPALRHLEQTIQSKAGEVHAYVKTGRTHLMDAMPVRMSQVLGGWAQQVRQAGVHIESVLPALQQLAQGGTAVGTGINAHPRFAERFSQELNDLTGLAFRPGDDFFALIGSQDTAVAASGQLKTLAVTLMKLANDLRWMNSGPLAGLGEIELEALQPGSSIMPGKVNPVIPEATAMVAAQVIGNDAAIAVAGQSGNFELNVMLPLVADNLLHSIQLLANVSRLLADKAIASFKVNQGKLSEALARNPILVTALNPIIGYQKAAEIAKQAYREGRPIIDVALENTDLDRARLEVLLDPEKLTAGGL

SEQ ID NO: 115458 - DNA, 1665 bp, Bradyrhizobium japonicum; identical to SEQ ID NO: 45268
  CDS (229)..(1665): transl_table=11

SEQ ID NO: 115459 - protein, 478 aa, Bradyrhizobium japonicum; identical to SEQ ID NO: 45269

SEQ ID NO: 115460 - DNA, 1494 bp, Agrobacterium tumefaciens; identical to SEQ ID NO: 45048
  CDS (103)..(1494): transl_table=11

SEQ ID NO: 115461 - protein, 463 aa, Agrobacterium tumefaciens; identical to SEQ ID NO: 45271

SEQ ID NO: 115462 - DNA, 1389 bp, Bacillus anthracis; identical to SEQ ID NO: 45272
  CDS (1)..(1389): transl_table=11

SEQ ID NO: 115463 - protein, 462 aa, Bacillus anthracis; identical to SEQ ID NO: 45273

SEQ ID NO: 115464 - DNA, 1389 bp, Bacillus cereus
  CDS (1)..(1389): transl_table=11
atggagtacagaattgaaagagatacattaggagaaataaaagttccagctgataaattatgggcagcacaaacacaacgtagtaaagaaaactttccaattggaacagagcaaatgccacttgaaattgtaaaagcatttgcaattttaaagaagagtgcagcgcttagcaatcaaaaattaggaaagctatcagaagaaaaagcagaagcaattgtagaagctgcggatgaagtgattgcagggaaatggaatgaacattttccgcttgtcgtatggcaaacaggtagtggtacacagtcaaacatgaatgtgaatgaagtaattgcaaatcgtgggaatcaaattttgaaagagaagggatctgacgtacatattcatccgaatgatgatgtgaacatgtcacaaagttcaaatgatacatttccaacggcgcttcatgtagcttgtgtaatcgcagtagaaaatcacgtattaccagcaattacgaaattaaaagaaactttagtagaaaaagtaactgcatttgaacatatcataaaaattggtcgtacacatttacaagatgcaacgccgttaactttagggcaagaaattagcggatggcaccgtatgcttgaaaaaacagagcgtatgattgcagagagcaatacatatatgaaagagttagcaattggtggaactgcggttggaacaggtatcaatgctcatcctaaatttggtgagatggtatcagaggaaattagtcaatttacaggtaaacaatttgtttctgcaccaaataagttccatgcattaacgagccatgatgaagttgtatatactcacggtgcattaaaagcattagctgcggatttaatgaaaatcgctaacgatgtacgttggcttgcaagtggtccacgtagtggtcttggagaaattattattccagcaaatgaaccgggaagctctattatgccagggaaagtaaatccaacgcaaagtgaagcattaacgatggttgtagcgcaagtgatggggaatgatgcaacaatcggatttgctgcgagccaaggtaactttgagttaaatgtatttaaacctgttattgcttataacttcttacaatcagctcacttattagcggatgcaattgtttcgtttaatgacaattgtgcagttggtattgaagcagatgaagaagtaattaatgaaaatgtgaatcgttcactaatgcttgtaacagcgctaaacccacatatcggatatgaaaatgcagcgaaaattgcgaagcatgctcataaagaagggttaactttaaaagaagcagcattgcaatctgggctactaacagaagagcaatttgatgaaattgtagatccaaagaaaatgattgctccaaaagagtaa

SEQ ID NO: 115465 - protein, 462 aa, Bacillus cereus
MEYRIERDTLGEIKVPADKLWAAQTQRSKENFPIGTEQMPLEIVKAFAILKKSAALSNQKLGKLSEEKAEAIVEAADEVIAGKWNEHFPLVVWQTGSGTQSNMNVNEVIANRGNQILKEKGSDVHIHPNDDVNMSQSSNDTFPTALHVACVIAVENHVLPAITKLKETLVEKVTAFEHIIKIGRTHLQDATPLTLGQEISGWHRMLEKTERMIAESNTYMKELAIGGTAVGTGINAHPKFGEMVSEEISQFTGKQFVSAPNKFHALTSHDEVVYTHGALKALAADLMKIANDVRWLASGPRSGLGEIIIPANEPGSSIMPGKVNPTQSEALTMVVAQVMGNDATIGFAASQGNFELNVFKPVIAYNFLQSAHLLADAIVSFNDNCAVGIEADEEVINENVNRSLMLVTALNPHIGYENAAKIAKHAHKEGLTLKEAALQSGLLTEEQFDEIVDPKKMIAPKE

SEQ ID NO: 115466 - DNA, 1389 bp, Bacillus subtilis; identical to SEQ ID NO: 45274
  CDS (1)..(1389): transl_table=11

SEQ ID NO: 115467 - protein, 462 aa, Bacillus subtilis; identical to SEQ ID NO: 45275

SEQ ID NO: 115468 - DNA, 1347 bp, Blochmannia floridanus
  CDS (1)..(1347): transl_table=11
atgatatgtaatagattatggggagatcaaacagaatcttctttaaaattttttaatatttctacagaaaaaatgccttgggaattaattaaagcattagctcaaataaaacgagtatcagctcaagtaaattatgatttaaaattacttgattatgaacgttctcaagctattattgcagcagtagatgaaatattatctggcaatcataaaaatgaatttccattatcagtgtggcaaactggatctggtactcaaagcaatatgaatatgaatgaagttttggcaaatagggcaaatgaattattaagaaaaaatcagataaatatagtcgtacatccaaacgatcatgtcaataaaagtcaaagttcaaatgatgtttttcctagtgcaatgcacattgcagcagtagttaatttaaaaacaaaactaatacctgtaattaaattattacaaaaaacttttttaaaaaaatctattgaatttcgtaatattataaaaattggacgtactcatttgcaggatgctattccattgactttagggcaagaaatttccggatgggattttatgttaaaaaataatacaaatcatattcaatcaactattcttgatttaagtgcattggcattaggaggaacggcagtagggacaggatttagcgctcatgtagaatatgcagaacgtgttgtattaggcttgtctaaactaattcatcactctttttttagcgctcctaataaatttgaatctttatctacgtgtgatgctatagtttatagtcatgggactttgaagggattagctatatccatgatgaagattgcaaacgatatacgtttgttatcatctggtcctcagtgtggtctgggagagttgattattcctgctaatgaacctggaagttctattatgcctggtaaagttaatcctacgcaatgtgagtctatgactatgtcatgttgccaagttatgggtaatgatttaagcattagtttgggaggttcatctggacagttacaattaaatacatataggcctttaattatttacaattttttacaatcaatacgattacttacagatagtataaaaaattttcatgattattgtattgtgggtatcagaccaaaattcaaaagaattgaaaaattgttaaacaaatctttaatgttagtaacagcattaagttctcatataggatatgataaatcagcacaaattgctcaaacagcttatttaaatggaattactttaaaagctgcatcgatacaatcgggttacgtaactgaaaaacagtttgatgattgggtttgtccagaaaatatgatttatcctgatatgtag

SEQ ID NO: 115469 - protein, 448 aa, Blochmannia floridanus
MICNRLWGDQTESSLKFFNISTEKMPWELIKALAQIKRVSAQVNYDLKLLDYERSQAIIAAVDEILSGNHKNEFPLSVWQTGSGTQSNMNMNEVLANRANELLRKNQINIVVHPNDHVNKSQSSNDVFPSAMHIAAVVNLKTKLIPVIKLLQKTFLKKSIEFRNIIKIGRTHLQDAIPLTLGQEISGWDFMLKNNTNHIQSTILDLSALALGGTAVGTGFSAHVEYAERVVLGLSKLIHHSFFSAPNKFESLSTCDAIVYSHGTLKGLAISMMKIANDIRLLSSGPQCGLGELIIPANEPGSSIMPGKVNPTQCESMTMSCCQVMGNDLSISLGGSSGQLQLNTYRPLIIYNFLQSIRLLTDSIKNFHDYCIVGIRPKFKRIEKLLNKSLMLVTALSSHIGYDKSAQIAQTAYLNGITLKAASIQSGYVTEKQFDDWVCPENMIYPDM

SEQ ID NO: 115470 - DNA, 1392 bp, Bordetella pertussis; identical to SEQ ID NO: 45276
  CDS (1)..(1392): transl_table=11

SEQ ID NO: 115471 - protein, 463 aa, Bordetella pertussis; identical to SEQ ID NO: 45277

SEQ ID NO: 115472 - DNA, 1392 bp, Brucella melitensis
  CDS (1)..(1392): transl_table=11
atggccgccacgcgtaccgaaacagacactttcggaccgatcgatgttcccgcagaccgttattggggcgcacagacacagcgttccctgcaaaatttcaggatcggcggcgagcgcatgcccctgcccctagttcacgcgctgggcgtggtaaagcgcgcggcggcggaaaccaatatcgcgctcggcaagcttgatcccgtcctgggtcaggtgattgcggttgccgcttccgaagtcattgagggcaagctcgacgaccatttcccgctcgtagtctggcagacaggctccggcacgcaatcgaacatgaatgccaatgaagtgatctcgaaccgggctatcgagttgctcggcggggaaatgggctccaaaaagccgatccacccgaacgaccatgtcaatatgagccagtcttccaatgacagtttcccgacggcgatccacatcgccacggcggtcgaaaccgtcaaccggctctatcccgcgctcgaacacctcaccaaagccctgaaggtcaaggaagaagcattcaaggacatcatcaagattggccgcacccacacgcaggacgcaacacctgtgacgctggggcaggaattttcgggctaccgcgcggcacttgaatatgcccgccatcggctcgaacaatcgcttgccgacgtcttcctgctggcgcagggcggcacggctgtcggcaccggtctcaacgcacctgtcggtttcgacaagggctttgccgaagcggtgagcgagattaccgggctttccttcaagaccgcgccaaacaagttcgaggcgctggcaagccacggcgccgttctcaacttccacggcagcctgaatgcgcttgcagccgatctcttcaagatcgccaacgatatccggtttctcggttccggcccgcgttccggccttggcgagctttctctgccggaaaacgaacccggctcctccatcatgccgggcaaggtcaaccccacacaggccgaagccatgaccatggtggcaacccaggttttcggcaaccagaccgccgtaaccgtcgccgccagccaggggcatttcgagctgaacgtcttcaaaccggtcattgcctataatgtgctgcaatcgatccggcttttgagcgacaccatggtttcctttgccgatcattgcgtcgaggggattgaacccaatacggcccgcatcaaggaattgctggaacgctcgctcatgctcgtcacggcgcttgcgcctgccatcggctatgacaatgcggccaggatcgccaaaaccgcccataagaacggcaccacgcttcgcgaggaagcattggcaagcggcctcgtatcggaagaagattatgaccggctggtgcgcgccgagcggatgatcgccccacaatga

SEQ ID NO: 115473 - protein, 463 aa, Brucella melitensis
MAATRTETDTFGPIDVPADRYWGAQTQRSLQNFRIGGERMPLPLVHALGVVKRAAAETNIALGKLDPVLGQVIAVAASEVIEGKLDDHFPLVVWQTGSGTQSNMNANEVISNRAIELLGGEMGSKKPIHPNDHVNMSQSSNDSFPTAIHIATAVETVNRLYPALEHLTKALKVKEEAFKDIIKIGRTHTQDATPVTLGQEFSGYRAALEYARHRLEQSLADVFLLAQGGTAVGTGLNAPVGFDKGFAEAVSEITGLSFKTAPNKFEALASHGAVLNFHGSLNALAADLFKIANDIRFLGSGPRSGLGELSLPENEPGSSIMPGKVNPTQAEAMTMVATQVFGNQTAVTVAASQGHFELNVFKPVIAYNVLQSIRLLSDTMVSFADHCVEGIEPNTARIKELLERSLMLVTALAPAIGYDNAARIAKTAHKNGTTLREEALASGLVSEEDYDRLVRAERMIAPQ

SEQ ID NO: 115474 - DNA, 1392 bp, Campylobacter jejuni
  CDS (1)..(1392): transl_table=11
atggaatacagagttgaacatgataccatgggtgaagttaaggttccaaatgacaaatattggggagctcaaactgaaagaagttttgaaaatttcaaaatcggttgtgagaaaatgccaaaggttttaatctatgcttttgcaaatcttaaaaaatctttagctttggtcaataacaaacttggcaaacttgatgatgctaagaaaaatgctatagttcaagcttgcgatgagattatcgcaggtaaatttgatgataattttccacttgcgatttggcaaacaggttcaggcacacaaagcaatatgaatatgaatgaagttattgcaaatcgtgccactgaaatcatgggcggggattttcgcaaagaaaagcttgtacatccaaatgatcatgttaatatgagtcaaagttcaaatgatacttttccaacagctatgagtatcgttgcggttgagcaagtagagaaaaagcttatccctgcgcttgatgagcttattgcaacttttgaaaaaaaagtaaaagaatttgatggtattatcaagataggacgcacgcatttacaagatgctactccacttactctagcgcaagaatttagtggatatctttctatgcttttacattcaaaagagcaaatcatcgcttctttaccaactttaagagaacttgccataggaggaaccgcagtgggaacagggcttaatgcacatccagaattaagccaaaaagtaagtgaagagctaactcaacttataggtacaaaatttatttcaagtccaaataaatttcatgctttaacaagtcatgatgcgattaattttactcatggagctatgaaaggtttggctgcaaatttaatgaaaattgcaaatgatataagatggttagcttcaggcccaagatgcggtcttggtgagcttatcatccctgaaaatgagccaggaagttcgattatgccaggtaaggtaaatcctacccagtgtgaagctgttactatggttgctgtacaagtgatgggaaatgatgtagctatcggatttgcagcaagtcaaggaaattttgaacttaatgtgtttaagcctgtgattatttataatttcttgcaaagtcttgatttgttggctgattctatgcattcattcaatatccattgtgctgtaggcatagaaccaaatcgtgcaaaaatcgatcataatcttcataattctttaatgctagttaccgctctaaatccacacataggttatgaaaacgctgctaaagtagccaaaaatgcccataaaaaaggtatttctttaaaagaaagcacaatggagcttggtttggttagcgaagaagatttcaataaatttgttgatcctactaaaatgataggcccaaaagcctag

SEQ ID NO: 115475 - protein, 463 aa, Campylobacter jejuni
MEYRVEHDTMGEVKVPNDKYWGAQTERSFENFKIGCEKMPKVLIYAFANLKKSLALVNNKLGKLDDAKKNAIVQACDEIIAGKFDDNFPLAIWQTGSGTQSNMNMNEVIANRATEIMGGDFRKEKLVHPNDHVNMSQSSNDTFPTAMSIVAVEQVEKKLIPALDELIATFEKKVKEFDGIIKIGRTHLQDATPLTLAQEFSGYLSMLLHSKEQIIASLPTLRELAIGGTAVGTGLNAHPELSQKVSEELTQLIGTKFISSPNKFHALTSHDAINFTHGAMKGLAANLMKIANDIRWLASGPRCGLGELIIPENEPGSSIMPGKVNPTQCEAVTMVAVQVMGNDVAIGFAASQGNFELNVFKPVIIYNFLQSLDLLADSMHSFNIHCAVGIEPNRAKIDHNLHNSLMLVTALNPHIGYENAAKVAKNAHKKGISLKESTMELGLVSEEDFNKFVDPTKMIGPKA

SEQ ID NO: 115476 - DNA, 1392 bp, Caulobacter crescentus
  CDS (1)..(1392): transl_table=11
atgaccgccacgcgtatcgagaccgacacctttggcccgatcgaagtcgccgccgaccgctactggggcgcgcaagctcagcgcagcctgggcaacttcaagatcggctgggaaaagcagcccctgcccgtcgtccgcgccctgggcatcgtcaagcgcgccgccgccgaggccaacctcgccttgggcaagctggacccgaagatcgccgagacgatcatcgccgccgccaacgaagtgatcgagggcaagctgaacgaccacttcccgctggtggtctggcagaccggctcgggcacccagtcgaacatgaacgccaacgaggtgatctcgaaccgcgccatcgagatgctgggcggtgagatgggcagcaagaagcccgtccaccccaacgaccacgtcaatatgagccagtcgtcgaacgacaccttcccgacggccatgcacatcgcctgcgccgaacaggtggtccacgacctgctgcccgcgctgaagcacctgcacaaggccctggccgccaaggccgccgagtggaaggacatcatcaagatcggccgcacccacacccaggacgccaccccgctgacgctgggccaggagttcggcggctacgctcagcagatcgagaacggcatcgctcgtatcgagatgaccctgccgatgctgatgcaactggcccagggcggcaccgccgtcggcaccggcctgaacgcccccgtgggcttcgccgagctggtcgccgagcagatcgccggcatcacgggcctaggcttcaccacggccccgaacaagttcgaggccctggccgcccacgacgccatggtcttcacccacggcgccatcaacacggtggccgccagcctgttcaagatcgccaacgacatccgcttcctgggctctggcccgcgcgccggtctcggcgagctttccctgccggaaaatgagccgggcagctcgatcatgccgggcaaggtcaatccgacccagtccgaagccctgacccaggtctgcgcccaggtgttcggcaaccactcgaccctgaccttcgccggcagccagggccatttcgagctgaacgtcttcaacccggtgatggcctataacttcctgcagtcggtccgtctggtcgccgacgcggcgatcagcttcaccgacaactgcgtggtcggcatcgagccgcgtgtcgacaacatcaagaagggcgtcgagaacagcctgatgctggtcacggccctgaacggcaagctcggctacgacgcctgcgccaagatcgccaagaccgcgcacaagaacggcaccaccctgcgcgaggaggccgtcggcggcggctatctgacgaacgaagagttcgaacagtacgtccgccccgaaaagatgatctcgccgggctga

SEQ ID NO: 115477 - protein, 463 aa, Caulobacter crescentus
MTATRIETDTFGPIEVAADRYWGAQAQRSLGNFKIGWEKQPLPVVRALGIVKRAAAEANLALGKLDPKIAETIIAAANEVIEGKLNDHFPLVVWQTGSGTQSNMNANEVISNRAIEMLGGEMGSKKPVHPNDHVNMSQSSNDTFPTAMHIACAEQVVHDLLPALKHLHKALAAKAAEWKDIIKIGRTHTQDATPLTLGQEFGGYAQQIENGIARIEMTLPMLMQLAQGGTAVGTGLNAPVGFAELVAEQIAGITGLGFTTAPNKFEALAAHDAMVFTHGAINTVAASLFKIANDIRFLGSGPRAGLGELSLPENEPGSSIMPGKVNPTQSEALTQVCAQVFGNHSTLTFAGSQGHFELNVFNPVMAYNFLQSVRLVADAAISFTDNCVVGIEPRVDNIKKGVENSLMLVTALNGKLGYDACAKIAKTAHKNGTTLREEAVGGGYLTNEEFEQYVRPEKMISPG

SEQ ID NO: 115478 - DNA, 1383 bp, Chlamydophila caviae
  CDS (1)..(1383): transl_table=11
atgcggcaagaaaatgatagtttaggaattgtagaagtccctgaagataagttgtatggtgcgcagacagcgcgctctcaaaaatatttttcttgggctcctgaggttatgcctaaagaagttattcgagctttagttttgatcaaacaatgtgctgctaaagccaaccatgatctagggtttttagattcaaaatattgtgacatgattgtttctgctgcttctgagattcttgaaggcggatttgaggagcattttcctttaaaggtatggcaaacgggcagcggcacgcaatccaacatgaatgtaaatgaggttattgctaatttagctattcaacgtcatggaggggttgtaggtagtaaaacaccgatacatcctaatgatcatgtcaataaatcccaatcttcgaatgatgttttccctacagctatgcatattgctgcggtgattaatctgaagaaaaagctcattcccgctatggatcatttgcaaagggcattagatgctaaggtagctgaatttcgtgactgcgtaaagataggaagaacacatttaatggatgctgttcctatgacattaggacaggagttttctggttatagtaatcagatacgtcaatccttagagagggtagcgttttcccttacgcatatgtatgagttagctatagggggaactgcagtaggtacgggattgaatgttcctaatggatttatagataaagtgatccactatttgcgtcaggaaaccggagagcctttcgttgctgcatcgaattatttctcagcattatctaaccacgatacgttagtaaatgctcatggtgttttagctactttagcttgtgctttaacaaagatagctacggatctaagctttttaggatctggtcctcggtgtggtttaggagagttgctatttcctgagaatgagccgggatcttcaataatgccggggaagatcaatcctacacagtgcgaagctttgcaaatggtttgtgctcaggttatagggaataaccaagcagtaatcatggggggaagtcgaggaaattttgaactcaatgtgatgaaacctgtaataatttataactttttacaatctgtggatattcttgcgggaggtatgcaggcttttgcagattactttgtttcaggtttgcgtgtgaataaacctcgtcttaaagagtatttggataactctttaatgcttgttacagctttaactccagttttaggatatgataaatgctcgaaaatggctttaaaagctttccatgacaatattaatttaaaagaagcctgtatacaaatgggttatctatctgcagaagagtttgaccgccttgttgttcccgaatctatggtgggaaaattttaa

SEQ ID NO: 115479 - protein, 460 aa, Chlamydophila caviae
MRQENDSLGIVEVPEDKLYGAQTARSQKYFSWAPEVMPKEVIRALVLIKQCAAKANHDLGFLDSKYCDMIVSAASEILEGGFEEHFPLKVWQTGSGTQSNMNVNEVIANLAIQRHGGVVGSKTPIHPNDHVNKSQSSNDVFPTAMHIAAVINLKKKLIPAMDHLQRALDAKVAEFRDCVKIGRTHLMDAVPMTLGQEFSGYSNQIRQSLERVAFSLTHMYELAIGGTAVGTGLNVPNGFIDKVIHYLRQETGEPFVAASNYFSALSNHDTLVNAHGVLATLACALTKIATDLSFLGSGPRCGLGELLFPENEPGSSIMPGKINPTQCEALQMVCAQVIGNNQAVIMGGSRGNFELNVMKPVIIYNFLQSVDILAGGMQAFADYFVSGLRVNKPRLKEYLDNSLMLVTALTPVLGYDKCSKMALKAFHDNINLKEACIQMGYLSAEEFDRLVVPESMVGKF

SEQ ID NO: 115480 - DNA, 1392 bp, Chlamydia muridarum
  CDS (1)..(1392): transl_table=11
atgcggcaagagaatgatagtttagggattgtaatggttcctgaagataaattatttggtgctcagacggggagatcaaaaaattttttctcctatggaaaagaattgatgcctattgaggtcattcaggcgttggtaaaaattaaaaaatgtgcagctaaggcaaatggagatttgcagtgtctcgatgctaaaaggcgggatatgattgtggctgcttcggatgaaattctttccggaggattagaggaacacttccctttaaaggtatggcaaacaggaagtggaacccaaagcaatatgaatgtgaatgaggtaatcgctaatttagcgattaaacgtcacggaggggagctaggaagtaaaaatcctgtgcatcccaatgatcatgtgaataaatcacagtcttctaacgatgttttccctacggccatgcatatagctgctgtgcaaagtataaaaggttctttaataccggcattagaacatttacaaaaaaaccttgatgccaaagctttagagttttctagagacattaaaattggaagaacacatctaatggatgccgttccaatgactctagggcaagagttttctgggtacagtcatcagttacgtagttgtttggagcgtataggtttttccttaacccatctttacgaattagcgattggagggactgctgttggaacaggattaaatgttcctgaaggttttgtagataaagtaatttattatttaaggcaggaaacgggagagccttttattccggcttctaattattttgccgcattgtcgaaccatgatgctttagtgcaggctcatggatccttagctgttttagcttgctctttgattaagatcgccacagatttgagtttcttaggttcaggacctcgttgcgggttaggggaaatttttttcccagaaaacgagccgggatcttccatcatgcctggaaagattaatcctactcagagtgaagctctacagatggtgtgttctcaagttattggtaataaccaatccgttattttctcagggactaaagggaactttgagctaaatgttatgaagcctgtgattatttatgattttttgcagtctgtaaacttgttatcgggagctatgagatcctttgcggattattttgttagcggattaaaggtgaatagaggacaactgcaacaaaatgtggaaagatctttgatgttggttacggctttagctcctgttttaggatatgataagtgttcgaagattgctctaaaagcttttcatgaaaatttgagtctgaaagaggcctgtgtatcattaggttttctgtctgaacaagagtttgatacacatgttgttccgggattgatgctagggaaaagagaaagggaatag

SEQ ID NO: 115481 - protein, 463 aa, Chlamydia muridarum
MRQENDSLGIVMVPEDKLFGAQTGRSKNFFSYGKELMPIEVIQALVKIKKCAAKANGDLQCLDAKRRDMIVAASDEILSGGLEEHFPLKVWQTGSGTQSNMNVNEVIANLAIKRHGGELGSKNPVHPNDHVNKSQSSNDVFPTAMHIAAVQSIKGSLIPALEHLQKNLDAKALEFSRDIKIGRTHLMDAVPMTLGQEFSGYSHQLRSCLERIGFSLTHLYELAIGGTAVGTGLNVPEGFVDKVIYYLRQETGEPFIPASNYFAALSNHDALVQAHGSLAVLACSLIKIATDLSFLGSGPRCGLGEIFFPENEPGSSIMPGKINPTQSEALQMVCSQVIGNNQSVIFSGTKGNFELNVMKPVIIYDFLQSVNLLSGAMRSFADYFVSGLKVNRGQLQQNVERSLMLVTALAPVLGYDKCSKIALKAFHENLSLKEACVSLGFLSEQEFDTHVVPGLMLGKRERE

SEQ ID NO: 115482 - DNA, 1383 bp, Chlamydia pneumoniae
  CDS (1)..(1383): transl_table=11
atgcgacaagaaaaggatagtttaggaatcgtagaagttcctgaggataagttatatggagctcaaactatgcgttctaggaattttttttcttggggacctgagttgatgccttatgaggtaatacgagctctcgtatggattaaaaaatgtgctgctcaggcgaatcaagatttaggatttttggattccaagcattgcgatatgattgttgctgctgccgatgagattttagagggaggttttgaagagcatttccctttaaaagtttggcagacagggagcggcacacaatctaatatgaatgtgaatgaggtgattgcgaatcttgccattcgtcatcacggaggggtgttaggcagtaaggatcctatccatcctaatgatcatgtgaataagtcccaatcgtccaatgatgttttccctacagcaatgcatatcgctgctgtgattagtttaaaaaataagttaattccagctttagatcatatgattcgggtgttagatgctaaagtggaagaatttcgtcatgatgtaaagataggacggacccatcttatggatgcggtgcctatgacgttgggtcaggaattttctggttatagcagtcaattgcgtcactgcttagagagtatagcattttctttagctcatttatatgaacttgcgattggagctactgctgtagggactgggttgaatgttcctgaagggttcgtggaaaagatcatccattatttaaggaaggaaacagatgaaccgtttattccagcttccaattatttttcagcactgtcttgtcacgatgctttagtagatgcccatgggtctttagcaactttagcatgtgctttaactaagatagctacggatttgagctttttaggttcaggacccaggtgtgggttgggtgagttatttttccctgaaaatgaaccaggatcttctatcatgcctggtaaagtcaatcctacgcagtgtgaagctctccaaatggtttgtgctcaagttcttgggaataatcaaacagtgattattggaggaagtcgaggaaattttgagcttaatgtgatgaagcctgtgatcatctataatttcctgcagtctgtggatctcctttctgaggggatgagggctttctctgaattctttgtgaaaggattaaaagtaaataaagctcgtttacaagataatatcaataattctttgatgttggttacagctttagctcctgtattaggttacgacaagtgttcgaaagcagcactgaaagcatttcatgaatctatatctttgaaggaggcgtgtctagctttgggatatctttctgagaaggaatttgatcgtttagtggttcctgagaatatggtgggaaaccattag

SEQ ID NO: 115483 - protein, 460 aa, Chlamydia pneumoniae
MRQEKDSLGIVEVPEDKLYGAQTMRSRNFFSWGPELMPYEVIRALVWIKKCAAQANQDLGFLDSKHCDMIVAAADEILEGGFEEHFPLKVWQTGSGTQSNMNVNEVIANLAIRHHGGVLGSKDPIHPNDHVNKSQSSNDVFPTAMHIAAVISLKNKLIPALDHMIRVLDAKVEEFRHDVKIGRTHLMDAVPMTLGQEFSGYSSQLRHCLESIAFSLAHLYELAIGATAVGTGLNVPEGFVEKIIHYLRKETDEPFIPASNYFSALSCHDALVDAHGSLATLACALTKIATDLSFLGSGPRCGLGELFFPENEPGSSIMPGKVNPTQCEALQMVCAQVLGNNQTVIIGGSRGNFELNVMKPVIIYNFLQSVDLLSEGMRAFSEFFVKGLKVNKARLQDNINNSLMLVTALAPVLGYDKCSKAALKAFHESISLKEACLALGYLSEKEFDRLVVPENMVGNH

SEQ ID NO: 115484 - DNA, 1392 bp, Chlamydia trachomatis
  CDS (1)..(1392): transl_table=11
atgcggcaagagaatgatagcttaggaattgtgttggttcccgaagacaaactatttggagctcagacgggacgttcgcaagagtttttctcttatggtaaagaatccatgcctcttgagattatccatgcattagtaaaaattaaaaaatgtgctgctaaggcgaacggagacttggggtgcttagatgctaaacgcagggatatgattgttgctgctacagatgaaattctctccggagaatttgatgaacacttccctttaaaggtttggcagacaggaagcggcactcaaagcaatatgaatgtcaatgaggtgattgctaatttagcaattcagcgtcatgggggagagcttggaagtaaacatcccgtgcatcccaatgatcacgtgaataaatcccagtcctcaaatgatgttttcccaacggcaatgcatatagctgcggtacaaagtataaaaggatctttaattccggcattggaacatttaaaaaaagttattgatgctaaagctttagagtttgctcgagatataaaaattggaagaacgcatttgatggatgcagttccaatgactcttgggcaagagttttctgggtatagttgtcagttgcataattgtttagagcggataggattttctttaactcacctctatgagttggctattggagggactgctattggaacagggttaaatgttcctgaaggatttgtagagaaggtgattcagtatttgagaagggagacaggagagccctttgttccagcttcgaactactttgctgcgttatcgaatcatgatgctttggtgcaagctcacggatcattgactgtgttagcttgtgctttggttaaaattgctacagatctaagttttttggggtcaggacctcgttgtggattaggggaaattttctttccggagaacgagccaggatcttcgatcatgcctgggaaaattaacccgacgcaaagcgaagctttacagatggtttgttctcaagtaatcgggaacaaccagtccattattttttctggaacaaaagggaacttcgaactgaatgtcatgaaacctgtcattatctatgattttctacagtcagtgaacttattagctggtgctatgagatcttttgccgattattttgtttgcggactcaaggtaaataaggggcaactacagcaaaatgtagaaagatctttgatgttagtaacggcattagctcccgttttggggtacgataaatgttcaaagatcgctttgaaagcttttcatgaaaatttgagtcttaaagaagcatgcgtctctttaggctttttgtctgaaaaagagtttgatgagcatgtgattccaggattgatggtaggaaatagaggacacgaatag

SEQ ID NO: 115485 - protein, 463 aa, Chlamydia trachomatis
MRQENDSLGIVLVPEDKLFGAQTGRSQEFFSYGKESMPLEIIHALVKIKKCAAKANGDLGCLDAKRRDMIVAATDEILSGEFDEHFPLKVWQTGSGTQSNMNVNEVIANLAIQRHGGELGSKHPVHPNDHVNKSQSSNDVFPTAMHIAAVQSIKGSLIPALEHLKKVIDAKALEFARDIKIGRTHLMDAVPMTLGQEFSGYSCQLHNCLERIGFSLTHLYELAIGGTAIGTGLNVPEGFVEKVIQYLRRETGEPFVPASNYFAALSNHDALVQAHGSLTVLACALVKIATDLSFLGSGPRCGLGEIFFPENEPGSSIMPGKINPTQSEALQMVCSQVIGNNQSIIFSGTKGNFELNVMKPVIIYDFLQSVNLLAGAMRSFADYFVCGLKVNKGQLQQNVERSLMLVTALAPVLGYDKCSKIALKAFHENLSLKEACVSLGFLSEKEFDEHVIPGLMVGNRGHE

SEQ ID NO: 115486 - DNA, 1386 bp, Chromobacterium violaceum
  CDS (1)..(1386): transl_table=11
atgacgaaaaccgtacgcagcgaaaccgacaccttcggtccgatcgacgtccccgccgctgcgctgtggggggcgcagacccagcgctcgctggcgcatttccgcatttccagcgagaagatgccgccggagctgatcctggcgctggctcgggtcaagcgcgcctgcgccgaggccaaccgcgggctgggcaagctggacgacgccaaggccgccgccatcgccggcgcggccgacgaggtgctggcgggccgacacgacggcgagtttccgctgtcggtgtggcagaccggctccggcacccagagcaatatgaatatgaacgaggtgctggccaaccgcgcgtcggagctgctgggcggccggcgcgggccgggccggctggtccatcccaacgacgacgtcaatctcggccagtcgtccaacgacatcttccccaccgcgatgcacgtcgccgccgccacgcaggtcaaggaacggctgctgccgtcgctggatctgctgcgccacgcgctcgaatccaaagccgaagccttcgccgacgtcgtcaagataggccgcacccatctgcaggacgccacgccgctgacgctgggccaggagatctccggctgggcggcgcaactggcgctgtccgaacaggcggtgcgcgcggcgctgcccatgctgtgccagctggcggtcggcggcaccgcggtgggcaccggcctcaacaccgatccaagcttcggcgccgcggtggcggcgcgcctggccgagcaaagcggcctgccattcgaaagcgccggcaacaaattcgccgcgctggccggccacgagccgctcgtgttcgcccacggcgcgctgaaaacgctggccgccgcgctgatgaagatcgccaacgacatccgctggctggcttccggcccgcgcagcggcctgggcgagctgtcgctgccggagaacgagccgggcagctccatcatgccgggcaaggtcaaccccacccagtgcgaagcgatgaccatgctgtgctgccaggtgctgggcaacgacgcggcgctggccatcggcgccgcgtccggcaatttcgaactgaacgtgttcaagccgctgatcgcgcacaacttcctgcaaagcgcgcggctgctggcagacggcatggacagcctgcgcgagcactgcgtggacggcatggaagccaaccgcgcgcgcatcgccgaactgatggcgcgctcgctgatgctggtcaccgcgctgaacccgcacatcggctacgacaaggcggccgccatcgccaaacacgcccatcgccacggcaccacgctgcgcgaggcggcgctggcgctgggccacctgagcgccgagcagttcgacgcctgggtgcggccggaagacatggtgtga

SEQ ID NO: 115487 - protein, 461 aa, Chromobacterium violaceum
MTKTVRSETDTFGPIDVPAAALWGAQTQRSLAHFRISSEKMPPELILALARVKRACAEANRGLGKLDDAKAAAIAGAADEVLAGRHDGEFPLSVWQTGSGTQSNMNMNEVLANRASELLGGRRGPGRLVHPNDDVNLGQSSNDIFPTAMHVAAATQVKERLLPSLDLLRHALESKAEAFADVVKIGRTHLQDATPLTLGQEISGWAAQLALSEQAVRAALPMLCQLAVGGTAVGTGLNTDPSFGAAVAARLAEQSGLPFESAGNKFAALAGHEPLVFAHGALKTLAAALMKIANDIRWLASGPRSGLGELSLPENEPGSSIMPGKVNPTQCEAMTMLCCQVLGNDAALAIGAASGNFELNVFKPLIAHNFLQSARLLADGMDSLREHCVDGMEANRARIAELMARSLMLVTALNPHIGYDKAAAIAKHAHRHGTTLREAALALGHLSAEQFDAWVRPEDMV

SEQ ID NO: 115488 - DNA, 1455 bp, Corynebacterium efficiens; identical to SEQ ID NO: 115122
  CDS (34)..(1455): transl_table=11

SEQ ID NO: 115489 - protein, 473 aa, Corynebacterium efficiens
MSDFMTEQEFRIEHDTMGEVKVPAQALWRAQTQRAVENFPISGRGLESAQIRAMGLLKAACAQVNKDSGALDAAKADAIIAAGKEIATGKHDAEFPIDVFQTGSGTSSNMNTNEVIASIAKANGTEVHPNDDVNMGQSSNDTFPTATHVAATEAAVNDLIPGLKVLHESLAKKANEWDSVVKSGRTHLMDAVPVTLGQEFGGYARQIQLGIERIEATLPRLGELAIGGTAVGTGINTSADFGGKVVAELVELTGVTQLQEAANHFEAQANRDALVEFSGAMRVVAVSLYKIANDIRLMGSGPLTGLGEIQLPDLQPGSSIMPGKVNPVLCETATQVSAQVIGNDAAVAFAGSQGQFELNVFIPVMARNVLESARLLANTARVFATRLVDGIVPNEEHMKQLAESSPSIVTPLNSAIGYEAAAKVAKAALAEGKTIRQTVIDMGFVDGEKLTEEELDKRLDVLAMANTDRKQKF

SEQ ID NO: 115490 - DNA, 1422 bp, Corynebacterium glutamicum; identical to SEQ ID NO: 45278
  CDS (1)..(1422): transl_table=11

SEQ ID NO: 115491 - protein, 473 aa, Corynebacterium glutamicum; identical to SEQ ID NO: 45279

SEQ ID NO: 115492 - DNA, 1380 bp, Coxiella burnetii
  CDS (1)..(1380): transl_table=11
atgcgaaaagagtccgacagcatgggtacgattgaagtgcccagtgaaaagtattatggcgcgcaatcacagcgctcattaattaattttgccattgggcgtgaaacgatgccgcctgagctcattcgcgcttttggcgttttgaaaaaagcggctgtgctcaccaatgttgaattgggcaaggtgtctcaagaaaaagctaactttattcttaaagcctgcgaagagctgatcgctggaaaactaaacgatcattttcccttgaaaatttggcaaaccggcagcggcacgcagaccaacatgaatgtgaacgaggttatcagtaatcgcgcgattgagttagctggtggaaagttaggaagcaaagaaccggttcatccgaacgatcacgttaatatgtcgcaatcttcaaatgatacttttccaacggccatgcacattactgctgccgaaatgataacgcatcagcttattcctaatctcactgtcttacgcgataccttggaaaaaaaatccaaggaattttccgaaatcattaaaatcggtcgaacgcatttgcaagacgctgtgccattaacgttgggtcaagaattttcaggttatgtcgctcaactcaaccataacttggaagccattaatgatgtacttccaacgctctatcgtcttgcgctcggcgggacggcggtaggcacggggctaaatacccacccgcaatttgccaaaaaagcggctgaccacattgccgaactgacgggaatacccttttactcggcgtctaataaatttgccgctctggctgccaacgacgaaattgttttagtcagcggcgttctcaaaacccttgcctgttcgttgatgaaaattgcaaacgatattcgttggttggcttccggcccgcgttgcggcatcggggaaattgttatcccagaaaacgagccaggttcttcgattatgccgggtaaagtaaatccaacgcaatccgaagcgatgacgatggtgtgtgttcaggtgataggaaacgatacgaccattaccatcgcgggatcgcaagggaattttgaattgaatgtttacaagcccgtgatggcttataatttaattcaatctatttatttattgtccgatgcttgtcgctcctttaatgatcattgcgccgttggcatcaaacccaatcaagaaaaaattaatgactatctgaataattctctaatgctggtcactgcattaaaccaaatcatcggttacgacaaagcctcagaaattgctaaaaaagcttacaaagaaggcacgacgcttaaagaagcggctcttcaattaggttatttaaccgcaagcgaattcgataaagccgtagaccccaaaaaaatggtcgctatttga

SEQ ID NO: 115493 - protein, 459 aa, Coxiella burnetii
MRKESDSMGTIEVPSEKYYGAQSQRSLINFAIGRETMPPELIRAFGVLKKAAVLTNVELGKVSQEKANFILKACEELIAGKLNDHFPLKIWQTGSGTQTNMNVNEVISNRAIELAGGKLGSKEPVHPNDHVNMSQSSNDTFPTAMHITAAEMITHQLIPNLTVLRDTLEKKSKEFSEIIKIGRTHLQDAVPLTLGQEFSGYVAQLNHNLEAINDVLPTLYRLALGGTAVGTGLNTHPQFAKKAADHIAELTGIPFYSASNKFAALAANDEIVLVSGVLKTLACSLMKIANDIRWLASGPRCGIGEIVIPENEPGSSIMPGKVNPTQSEAMTMVCVQVIGNDTTITIAGSQGNFELNVYKPVMAYNLIQSIYLLSDACRSFNDHCAVGIKPNQEKINDYLNNSLMLVTALNQIIGYDKASEIAKKAYKEGTTLKEAALQLGYLTASEFDKAVDPKKMVAI

SEQ ID NO: 115494 - DNA, 1395 bp, Deinococcus radiodurans
  CDS (1)..(1395): transl_table=11
atgaccaaaacccgccaagaaaccgacacgatgggcaagatggacgtggacgccagccgctactggggcgcacagaccgagcgcagcatccacaacttcccgattgggcgcgacaccttcgtgtggggccgccccgtcatccgggcgctgggcatcctgaaaaagggcgcggcgcaggccaacgccgaactcggtgaactgcccgccgacgtggccgacctcatcgtgaaggccgccgacgaagtgattgccggcaaactcgacgaacactttccgctggtagtgttccagaccggctcgggcacccagagcaacatgaacgccaacgaggtgatttccaaccgcgccatcgaactcgccggcggcgaaatgggcagcaagaagccggtccaccccaacgaccacgtgaaccgcggccagagctccaacgacaccttccccactgccatgcacatcgcggtggtgctggaactcaacgagcggctgtacggcgcggtcggcaagctgcgcgacaccctgcacgccaaggccgagcagtacaaggacctcgtgaaagtgggccgcacccacctgcaagacgccacgcccatcacgctggggcaggaaatcggcggctgggtggcgcaactcgactacgcgctgtccgaagtcaagcacgcgggcgaaggcctgctcgacctcgccatcggcggcaccgccgtgggcaccggcctgaacgcgcaccccaaattcggtgatctggccgccaagaagtacgaagaagaaaccggctaccacttccgcagcgccgagaacaagttcgccgccctgagcgcccacgacgcgctggtgcagacctcggcggccctgcgtaccctggccggcgccctgatgaagatggcgaacgacgtgcgctggctggcgagcggcccgcgcaacggcatcggcgaaatcaccattcccgagaacgagcccggctccagcatcatgcccggcaaggtgaaccccacccagagtgaggccatgacgatggtcgccacccgcgtgttcggcaacgacgccaccgtcgcttttgccggcagccagggcaacttccagctgaacgtgttcaagccagtgatggttcacgccgtgctggaaagcattcgcctgatttccgacgcctgcctggccttcaacgaccactgcgcggtgggcatccagcccaacgaggccaagatcaaggaaaacctcgacaagaacctgatgcaggtgaccgccctcaatcgccacatcggctacgacaaggctgccgcgattgccaagaaggcccacaaggaaggcaccagcctcaaggacgccgcgctggccctgggctacgtgaccgaggacgaattcgcccagtgggtcgtgccgctgggcatgactcacaactga

SEQ ID NO: 115495 - protein, 464 aa, Deinococcus radiodurans
MTKTRQETDTMGKMDVDASRYWGAQTERSIHNFPIGRDTFVWGRPVIRALGILKKGAAQANAELGELPADVADLIVKAADEVIAGKLDEHFPLVVFQTGSGTQSNMNANEVISNRAIELAGGEMGSKKPVHPNDHVNRGQSSNDTFPTAMHIAVVLELNERLYGAVGKLRDTLHAKAEQYKDLVKVGRTHLQDATPITLGQEIGGWVAQLDYALSEVKHAGEGLLDLAIGGTAVGTGLNAHPKFGDLAAKKYEEETGYHFRSAENKFAALSAHDALVQTSAALRTLAGALMKMANDVRWLASGPRNGIGEITIPENEPGSSIMPGKVNPTQSEAMTMVATRVFGNDATVAFAGSQGNFQLNVFKPVMVHAVLESIRLISDACLAFNDHCAVGIQPNEAKIKENLDKNLMQVTALNRHIGYDKAAAIAKKAHKEGTSLKDAALALGYVTEDEFAQWVVPLGMTHN

SEQ ID NO: 115496 - DNA, 1404 bp, Escherichia coli O157
  CDS (1)..(1404): transl_table=11
atgaatacagtacgcagcgaaaaagattcgatgggggcgattgatgtcccggcagataagctgtggggcgcacaaactcaacgctcgctggagcatttccgcatttcgacggagaaaatgcccacctcactgattcatgcgctggcgctaaccaagcgcgcagcggcaaaagttaatgaagatttaggcttgttgtctgaagagaaagcgagcgccattcggcaggcggcggatgaagtactggcaggacagcatgacgacgaattcccgctggctatctggcagaccggctccggcacgcaaagtaacatgaacatgaatgaagtgctggctaaccgggccagtgaattactcggcggcgtgcgcgggatggaacgtaaagttcaccctaacgacgacgtgaacaaaagccaaagttccaacgatgtctttccgacggcgatgcacgttgcggcgctgctggcgctgcgcaagcaactcattccgcagcttaaaaccctgacacagacgctgagtgaaaaatcgcgtgcatttgccgatatcgtaaaaatcggtcgaacccacttgcaggacgccaccccgctaacactggggcaggagatttccggctgggtagcgatgctcgagcataatctcaaacatatcgaatacagcctgcctcacgtagcggaactggctcttggcggtacagcggtgggtactggactaaatacccatccggagtatgcgcgtcgcgtagcagatgaactggcagtcattacctgtgcaccgtttgttaccgcgccgaacaaatttgaagcgctggcgacctgtgatgccctggttcaggcgcacggcgcgttgaaagggttggctgcgtcactgatgaaaatcgccaatgatgtccgctggctggcctctggcccgcgctgcggaattggtgaaatctcaatcccggaaaatgagccgggcagctcaatcatgccggggaaagtgaacccaacacagtgtgaggcattaaccatgctctgctgtcaggtgatggggaacgacgtggcgatcaacatggggggcgcttccggtaactttgaactgaacgtcttccgtccaatggtgatccacaatttcctgcaatcggtgcgcttgctggcagatggcatggaaagttttaacaaacactgcgcagtgggtattgaaccgaatcgtgagcgaatcaatcaattactcaatgaatcgctgatgctggtgactgcgcttaacacccacattggttatgacaaagccgcggagatcgccaaaaaagcgcataaagaagggctgaccttaaaagctgcggcccttgcgctggggtatcttagcgaagccgagtttgacagctgggtacggccagaacagatggtcggcagtatgaaagccgggcgttaa

SEQ ID NO: 115497 - protein, 467 aa, Escherichia coli O157
MNTVRSEKDSMGAIDVPADKLWGAQTQRSLEHFRISTEKMPTSLIHALALTKRAAAKVNEDLGLLSEEKASAIRQAADEVLAGQHDDEFPLAIWQTGSGTQSNMNMNEVLANRASELLGGVRGMERKVHPNDDVNKSQSSNDVFPTAMHVAALLALRKQLIPQLKTLTQTLSEKSRAFADIVKIGRTHLQDATPLTLGQEISGWVAMLEHNLKHIEYSLPHVAELALGGTAVGTGLNTHPEYARRVADELAVITCAPFVTAPNKFEALATCDALVQAHGALKGLAASLMKIANDVRWLASGPRCGIGEISIPENEPGSSIMPGKVNPTQCEALTMLCCQVMGNDVAINMGGASGNFELNVFRPMVIHNFLQSVRLLADGMESFNKHCAVGIEPNRERINQLLNESLMLVTALNTHIGYDKAAEIAKKAHKEGLTLKAAALALGYLSEAEFDSWVRPEQMVGSMKAGR

SEQ ID NO: 115498 - DNA, 1404 bp, Escherichia coli O6
  CDS (1)..(1404): transl_table=11
atgaatacagtacgcagcgaaaaagattcgatgggggcgattgatgtcccggcagataagctgtggggcgcacaaactcaacgctcgctggagcatttccgcatttcgacggagaaaatgcccacctcactgattcatgcgctggcgctaaccaagcgcgcagcggcaaaagttaatgaagatttaggcttgttgtctgaagagaaagcgagcgccattcggcaggcggcggatgaagtactggcaggacagcatgacgacgaattcccgttggctatctggcagaccggctccggcacgcaaagtaacatgaacatgaacgaagtgctggctaaccgggccagtgaattactcggcggcgtgcgcgggatggaacgtaaagttcaccctaacgacgacgtgaacaaaagccaaagttccaacgatgtctttccgacggcgatgcacgttgcggcgctgctggcgctgcgcaagcaactcattccacaacttaaaaccctgacccagacgctgagtgaaaaatcccgcgcatttgccgatatcgtcaaaatcggtcgtacccacttgcaggacgccacgccgttaacgctggggcaggagatttccggctgggtagcgatgctggagcataatctcaaacatatcgaatacagcctgcctcacgtagcggaactggctctgggcggtacagcggtgggtactggactaaatacccatccggaatatgcgcgtcgcgtagcagatgaactggcagtcattacctgtgcaccgtttgttaccgcgccgaacaaatttgaagcgctggcgacctgtgatgccctggttcaggcgcacggcgcattgaaagggttggctgcgtcactgatgaaaattgccaatgatgtccgctggctggcctctggcccgcgctgcggaattggtgaaatctcaatcccggaaaatgagccgggcagctcaatcatgccagggaaagtgaacccaacacagtgcgaagcattaaccatgctctgctgtcaggtgatggggaacgacgtggcgatcaacatgggtggcgcttccggtaactttgaactgaacgtcttccgtccgatggtgatccataatttcctgcaatcggtgcgcttgctggcagatggcatggaaagtttcaacaaacactgtgcagtgggcattgaaccgaatcgtgagcgaatcaatcaattactcaatgaatcgctgatgctggtgactgcgcttaacacccacattggttatgacaaagccgccgagatcgccaaaaaagcgcataaagaagggctgaccttaaaagcggcggcccttgcgctggggtatcttagcgaagccgagtttgaccgctgggtacggccagaacagatggtcggcagtatgaaagccgggggttaa

SEQ ID NO: 115499 - protein, 467 aa, Escherichia coli O6
MNTVRSEKDSMGAIDVPADKLWGAQTQRSLEHFRISTEKMPTSLIHALALTKRAAAKVNEDLGLLSEEKASAIRQAADEVLAGQHDDEFPLAIWQTGSGTQSNMNMNEVLANRASELLGGVRGMERKVHPNDDVNKSQSSNDVFPTAMHVAALLALRKQLIPQLKTLTQTLSEKSRAFADIVKIGRTHLQDATPLTLGQEISGWVAMLEHNLKHIEYSLPHVAELALGGTAVGTGLNTHPEYARRVADELAVITCAPFVTAPNKFEALATCDALVQAHGALKGLAASLMKIANDVRWLASGPRCGIGEISIPENEPGSSIMPGKVNPTQCEALTMLCCQVMGNDVAINMGGASGNFELNVFRPMVIHNFLQSVRLLADGMESFNKHCAVGIEPNRERINQLLNESLMLVTALNTHIGYDKAAEIAKKAHKEGLTLKAAALALGYLSEAEFDRWVRPEQMVGSMKAGG

SEQ ID NO: 115500 - DNA, 1395 bp, Haemophilus ducreyi
  CDS (1)..(1395): transl_table=11
atggaataccgtatcgaaaaagatactatgggcgaagtgaaagtaccggctgatcgttattgggcagcacaaacagaacgttcgcgtaataatttcaggattgggcctgaagcttctatgccggtcgaaattattgaagcatttgcttatttaaaaaaagccgctgcatttgctaatgctgaactaggtgcactcaccactgaaaaacgtgacttaatcgcgatggtttgtgatgaaatcttagcaaataaattagcggacgaatttccgttagtgatttggcaaacaggttctggtacacaatcaaatatgaatcttaatgaagtgattgccaaccgtgcccacgtattacaagggggggcattaggtgaaaaatcgattattcatccaaatgatgatgtcaataaatcgcaatcttcaaacgatacctatccaacggctatgcatattgctgcctataaaaaagtcgttgaagtaaccattccagcaatagaacgcttacaaaaaacatttgccataaaatctgaagcatttaaagatgtggttaaaattggtcgaactcatttaatggatgccaccccgcttacattaggccaagaattctctgcctatgcggcacaattacaatttggtttgttagcccttaaaaataccttgccccatttggcgcagttagcattaggtggcacagctgttggcacaggcttaaatacgcctaaaggttatgatgttaaagtagcagaatatatcgcacaatttactcaacttccttttattactgcggaaaataaatttgaagcattagccactcacgatgcaattattgaaacacacggtgcgctcaaacaaattgctatgtcattattcaaaattgccaatgatattcgtttattagcatcaggtcctcgctctggtattggcgaaattctaattcctgaaaatgaacccggctcctcaattatgcccggtaaagtcaatcctactcaatgtgaggcaatgactatggttgcagcgcaagtgttgggaaatgatactacgatttcatttgcgggtagccaaggccattttcagttaaatgttttcaaacctgttatggcagcaaatttcttacaatcggcacaattacttgctgatgtatgtatttcatttgatgagcattgtgcaagcggtattgaacctaattatccaagaattcaacaacaattagaaaactctttaatgttagtgaccgctttaaatacccatattggttatgaaaatgcggctaaaattgctaaaactgcgcacaaaaatggaacaacactcaaagaagaagcaattaacttaggtctagtcactgctgaacagtttgatcaatgggtacgccctcaaaatatggtcggtagtttaaaataa

SEQ ID NO: 115501 - protein, 464 aa, Haemophilus ducreyi
MEYRIEKDTMGEVKVPADRYWAAQTERSRNNFRIGPEASMPVEIIEAFAYLKKAAAFANAELGALTTEKRDLIAMVCDEILANKLADEFPLVIWQTGSGTQSNMNLNEVIANRAHVLQGGALGEKSIIHPNDDVNKSQSSNDTYPTAMHIAAYKKVVEVTIPAIERLQKTFAIKSEAFKDVVKIGRTHLMDATPLTLGQEFSAYAAQLQFGLLALKNTLPHLAQLALGGTAVGTGLNTPKGYDVKVAEYIAQFTQLPFITAENKFEALATHDAIIETHGALKQIAMSLFKIANDIRLLASGPRSGIGEILIPENEPGSSIMPGKVNPTQCEAMTMVAAQVLGNDTTISFAGSQGHFQLNVFKPVMAANFLQSAQLLADVCISFDEHCASGIEPNYPRIQQQLENSLMLVTALNTHIGYENAAKIAKTAHKNGTTLKEEAINLGLVTAEQFDQWVRPQNMVGSLK

SEQ ID NO: 115502 - DNA, 1395 bp, Haemophilus influenzae
  CDS (1)..(1395): transl_table=11
  misc_feature (994)..(994): s is g or c
  misc_feature (995)..(995): s is g or c
atggcatttcgtattgaaaaagacacaatgggtgaagttcaagttctagcagataaatactgggctgcacaaactgaacgttcacgcaataactttaaaattggcccagccgcatcaatgccacatgaaattatcgaagcttttggctatttgaaaaaagcagccgcatttgctaatcatgatttgggtgtattacctcttgaaaaacgtgatttaattgctctggcttgtgacgaaattttagcaaataaattagatgatcaattcccacttgttatttggcaaactggttctggtacacaatctaatatgaatgtgaacgaagtagttgccaatcgtgctcatgtgttaaacggtggaaaattaggtgaaaaatctattattcacccaaatgatgatgtgaacaaatcacaatcttcaaatgatactttcccaacggcaatgcacattgcggcatataaaaaagtagttgagcacaccattccttgtgttgaacgtttacaaaaaacttttgcggcaaaatctgaagccttcaaaaacgtggtaaaaattggccgcactcacttaatggatgcaacgccactcacattaggtcaagaattttcggcttatgcagctcaattagatttcggcttaaaagcattaaaaaataccctcccacatttaagccaattagcattgggtggaactgcggttggcacaggtttgaacacgccgaaaggctatgatttgaaagtggtagattacattgcaaaattcaccgcacttccgtttgtcacagcagataataaatttgaagcattagccgctcatgatgcgattgttgaaactcacggtgcattacgtcaattagcaatgagtttatttaaaattgcgaacgatattcgtctattagcatctggccctcgttcgggaattggcgaaattttaattcctgaaaatgaaccaggttcttcaattatgccaggtaaagtaaacccaactcaatgcgaassgatgacaatggtctgtgcacaagtatttggtaacgacaccaccatcgcatttgtgggttcacaaggtcacttccaattaaatgtgttcaaccctgtgatgattgcaaacttcttacaatctgctcaattattgggcgatgcttgcgtatctttcgatgaacactgtgcagtgggtattgagccaaactatccacgcattaaacaacaacttgaaaattcattgatgttggtgaccgcacttaatacgcatatcggttatgaaaatgcagctaaaattgcaaaaaccgcacataaaaatggcaccacattacgtgaagaagcgattaatttaggtttagtgtctgccgaagattttgataaatgggttcgcccagaagatatggtgggtagcttaaaataa

SEQ ID NO: 115503 - protein, 464 aa, Haemophilus influenzae
  misc_feature (332)..(332): The Xaa at location 332 stands for Ala, Arg, Gly, or Pro.
MAFRIEKDTMGEVQVLADKYWAAQTERSRNNFKIGPAASMPHEIIEAFGYLKKAAAFANHDLGVLPLEKRDLIALACDEILANKLDDQFPLVIWQTGSGTQSNMNVNEVVANRAHVLNGGKLGEKSIIHPNDDVNKSQSSNDTFPTAMHIAAYKKVVEHTIPCVERLQKTFAAKSEAFKNVVKIGRTHLMDATPLTLGQEFSAYAAQLDFGLKALKNTLPHLSQLALGGTAVGTGLNTPKGYDLKVVDYIAKFTALPFVTADNKFEALAAHDAIVETHGALRQLAMSLFKIANDIRLLASGPRSGIGEILIPENEPGSSIMPGKVNPTQCEXMTMVCAQVFGNDTTIAFVGSQGHFQLNVFNPVMIANFLQSAQLLGDACVSFDEHCAVGIEPNYPRIKQQLENSLMLVTALNTHIGYENAAKIAKTAHKNGTTLREEAINLGLVSAEDFDKWVRPEDMVGSLK

SEQ ID NO: 115504 - DNA, 1413 bp, Halobacterium salinarium; identical to SEQ ID NO: 45282
  CDS (1)..(1413): transl_table=11

SEQ ID NO: 115505 - protein, 470 aa, Halobacterium salinarium; identical to SEQ ID NO: 45283

SEQ ID NO: 115506 - DNA, 1392 bp, Helicobacter pylori J99
  CDS (1)..(1392): transl_table=11
atgcaatttagaattgaacatgacacgatgggcgaaatcaaagtagatgacagccaatattggggggctcaaacgcaacgcagtcttgaaaactttaagatcggcactgaaaaaatgcctaaagaactcattggcgcgttcgccaaactcaaaaggagtttagcggttgtcaatcacaagttagggaaattaagcctggaaaaatcgcaagccattatcaaagcgtgcgattgcattttaaaaggcgagttgtgcggcgaattccccctagcgatatggcaaacagggagcgggactcaaacgaacatgaacctcaatgaagtcattgccaataaggctaccgaaattttagggggtaattttagggagaaaaaactcatccaccctaacgatgatgtgaacatgtctcaaagctccaacgacactttccctaccgcaatgcacgttgtgagcgtgctagaaatcacgcataaactgctgcctagtttagagaatctgttaaaaacctttaaagaaaaaagccaacaatttaaagagattgtcaaaatcgggcgcacgcatttacaagacgctacgcctttaactttggggcaagaatttagcgggtatgcgagcatgctagagcattctaaacaacaaattttagagagtttggagcatttaagggaattagccataggcgggactgccgtaggcacagggctaaacgctcataaggaattgagcgaaaaagtggctgaagaattgagccagtttagcggcgtgaaattcatctctgcacccaataaattccacgcgctcactagccatgacgctatcgcttatgcgcatggggcttttaaggctttagcggcgaatttaatgaaaatcgctaacgatattagatggcttgcgagcgggccgcgctgtggtttgggcgagcttaatatccctgaaaacgagccgggcagttctattatgcccggtaaagtcaatcccacgcaatgcgaagcgatgacaatggtagccgtgcaagtgatggggaatgataccgctattggcattgcggccagtcagggtaattttgaattgaatgtgttcaagccggtgattatttataacttcttgcaaagtttaaggctattgagcgacagcatggaaagtttcaatatccattgcgcgagcggtattgagcctaataaagaaaaaattgattattacttgcaccattctttaatgctagtaaccgcccttaatccgcatgtaggctatgaaaacgccgctaaaatcgctaaaaacgcccacaaaaaaggcatttctttaaaagaaagcgcgctggaactgaaactcttgagcgctgaagactttgaccaattcgtggtgcctgaaaagatgatcggacctaaggcttga

SEQ ID NO: 115507 - protein, 463 aa, Helicobacter pylori J99
MQFRIEHDTMGEIKVDDSQYWGAQTQRSLENFKIGTEKMPKELIGAFAKLKRSLAVVNHKLGKLSLEKSQAIIKACDCILKGELCGEFPLAIWQTGSGTQTNMNLNEVIANKATEILGGNFREKKLIHPNDDVNMSQSSNDTFPTAMHVVSVLEITHKLLPSLENLLKTFKEKSQQFKEIVKIGRTHLQDATPLTLGQEFSGYASMLEHSKQQILESLEHLRELAIGGTAVGTGLNAHKELSEKVAEELSQFSGVKFISAPNKFHALTSHDAIAYAHGAFKALAANLMKIANDIRWLASGPRCGLGELNIPENEPGSSIMPGKVNPTQCEAMTMVAVQVMGNDTAIGIAASQGNFELNVFKPVIIYNFLQSLRLLSDSMESFNIHCASGIEPNKEKIDYYLHHSLMLVTALNPHVGYENAAKIAKNAHKKGISLKESALELKLLSAEDFDQFVVPEKMIGPKA

SEQ ID NO: 115508 - DNA, 1392 bp, Helicobacter pylori
  CDS (1)..(1392): transl_table=11
atgcaatttagaattgaacatgacacgatgggcgaaatcaaagtaaatgatagccaatattggggggctcaaacgcaacgcagtcttgaaaactttaagatcggcactgaaaaaatgcctaaagaactcattggcgcgtttgccaaactcaaaaggagtctggcggtagttaaccacaagttagggaaattaagcctggaaaaatcccaagccattatcaaggcgtgcgattgcattttaaaaggcgagctgtgcggcgagtttcccttagcgatatggcaaacagggagcgggactcaaacgaacatgaatctcaatgaagtcattgccaataaggctaccgaaattttagggggtaatttcagagagaaaaaactcatccaccctaacgatgacgtgaacatgtctcaaagctccaacgacactttccctaccgcaatgcacattgtgagcgtgctagaaatcacgcacagactgctccctagtttggagaatctgttaaaaacctttaaagaaaaaagccaacaatttaaagagattgtcaagatcggacgcacgcatttacaagacgctacgcctttaactttggggcaagaatttagcgggtatgcgagcatgctagagcattctaaacaacaaattttagagagtttggagcatttaagagaattagccataggcgggacggccgtaggcacagggctaaacgctcataaagaattgagcgaaaaagtggctgaagaattgagccagtttagcggcgtgaaattcgtctctgcgcccaataagttccatgcgctcactagccatgacgctatcgcttatgcgcatggggcttttaaagctttagcggcgaatttaatgaaaatcgctaacgatattagatggcttgcgagcgggccgcgctgtggtttgggcgagcttaatatccctgaaaacgagccgggcagttctattatgcccggtaaagtcaatcccacgcaatgcgaagcgatgacaatggtggccgtgcaagtgatggggaatgataccgctattggcattgcggccagtcagggtaattttgaattgaacgtgttcaagccggtgatcatttataatttcttgcaaagtttaaggctattgagcgatagcatggaaagttttaatatccattgcgcgagcggcattgagcctaatagagaaaagattgattattacttgcaccattctttgatgttagtaaccgccctaaacccgcatgtgggctatgaaaacgccgctaaaatcgctaaaaacgcccacaaaaaaggcatttctttaaaagaaagcgcgctggaactgaaactcttgagcgctgaagattttgacaaattcgtggtgcctgaaaagatgatcgggcctaaggcttga

SEQ ID NO: 115509 - protein, 463 aa, Helicobacter pylori
MQFRIEHDTMGEIKVNDSQYWGAQTQRSLENFKIGTEKMPKELIGAFAKLKRSLAVVNHKLGKLSLEKSQAIIKACDCILKGELCGEFPLAIWQTGSGTQTNMNLNEVIANKATEILGGNFREKKLIHPNDDVNMSQSSNDTFPTAMHIVSVLEITHRLLPSLENLLKTFKEKSQQFKEIVKIGRTHLQDATPLTLGQEFSGYASMLEHSKQQILESLEHLRELAIGGTAVGTGLNAHKELSEKVAEELSQFSGVKFVSAPNKFHALTSHDAIAYAHGAFKALAANLMKIANDIRWLASGPRCGLGELNIPENEPGSSIMPGKVNPTQCEAMTMVAVQVMGNDTAIGIAASQGNFELNVFKPVIIYNFLQSLRLLSDSMESFNIHCASGIEPNREKIDYYLHHSLMLVTALNPHVGYENAAKIAKNAHKKGISLKESALELKLLSAEDFDKFVVPEKMIGPKA

SEQ ID NO: 115510 - DNA, 1368 bp, Listeria innocua
  CDS (1)..(1368): transl_table=11
atggaacgaattgaacgtgatacacttggagaaatttcagttgatgcaactaagtactggggagcacaaacagagcgaagtagaagaaactttgctattggtgataattatatgccgaaagaaattatctacgcttttgctcagttgaaaaaagctgcggctaaagtgaatgccttagaaggaaagttatccgaagcgaaatcggtagcaatcggaaacgtttgtgatcaaatcattcaaggtgaactagatgaacattttcccttagtcgtttggcaaacgggaagcggaacgcaaagcaatatgaacgttaatgaagttattgcccacgttgccaatttaactttaggtgaggaaaaagttcatccaaatgatgatgttaacatgtcgcaaagctcgaatgatacatttccgacagcgatgcatatagctgcttatcaagctttagtaacgaaacttttatcagagataactaaaatggaagaagttttaacgacgaagaaaaatcaatatatgcagctcgttaaaattggtagaacgcatttgcaagatgcaactccactcacgcttgggcaagaaattagtggctgggaagcgtgtctgacaaataataaaaactaccttgagtctagcatgaaagcaattttaccacttgcaattggcgggacagcagttggaacgggattaaatgcctccaaagattttggtgataaagttgcagaagaactaaggaaacaaactgggtatccttttacttctgattctaataaatatttcgctttaacgagtcatagcccgattaatttcgtccatggagccattcgcagccttgcttctgatttaatgaaaattgctaacgatattcgtctactagcaagtggtcctcgtagtggcattggtgaactaacgctcccggctaacgaaccaggcagctccatcatgccaggaaaagtcaaccctacacagtgtgaggcaattacgatggtggccgctcaagtaatgggaaatgatacaacgattaatattgctgcaagccaaggtaattttgaattaaatgtttataagcctgtaattatttttaatttcttagaatctatcacattactttctgatagtatgcgctccttccgaattcattgtttagaaggactaactgccaatgaaagcgtgattgaagctaaagtaaatgattcgctgatgcttgttacagccttgaatccacatataggttacgaaaaagctgccaaaattgccaagttagccttcgatgaaaatacgactttaaaagaagcagcaattaaaactggttttgtaacagaaaaagaattcgatttatggatagacccactaaaaatgactaatttgtaa

SEQ ID NO: 115511 - protein, 455 aa, Listeria innocua
MERIERDTLGEISVDATKYWGAQTERSRRNFAIGDNYMPKEIIYAFAQLKKAAAKVNALEGKLSEAKSVAIGNVCDQIIQGELDEHFPLVVWQTGSGTQSNMNVNEVIAHVANLTLGEEKVHPNDDVNMSQSSNDTFPTAMHIAAYQALVTKLLSEITKMEEVLTTKKNQYMQLVKIGRTHLQDATPLTLGQEISGWEACLTNNKNYLESSMKAILPLAIGGTAVGTGLNASKDFGDKVAEELRKQTGYPFTSDSNKYFALTSHSPINFVHGAIRSLASDLMKIANDIRLLASGPRSGIGELTLPANEPGSSIMPGKVNPTQCEAITMVAAQVMGNDTTINIAASQGNFELNVYKPVIIFNFLESITLLSDSMRSFRIHCLEGLTANESVIEAKVNDSLMLVTALNPHIGYEKAAKIAKLAFDENTTLKEAAIKTGFVTEKEFDLWIDPLKMTNL

SEQ ID NO: 115512 - DNA, 1368 bp, Listeria monocytogenes serotype 4b
  CDS (1)..(1368): transl_table=11
atggaacgaatagagcgagatacgcttggagaaatttctgtagatgcgacgaaatattggggagcgcaaacagaacgaagtaaaaggaactttgctattggtgataatcctatgccgatagaaattatatatgcttttgctcaattaaagaaagccactgcaaaagtaaacgcagcagaaggaaaactatccgaagaaaaagcgatagcgattggccaggtttgtgatcaaatcattcaaggagaactagatgagcattttcctttagtcgtttggcaaaccggaagcggaacgcagagcaacatgaatgtcaatgaagttatcgcacatgttgccaacttaactttaggcgaaggacaaattcatccgaatgatgatgtcaacatgtcgcaaagctcgaacgacacatttccaacagcgatgcatatcgctgcatacggggctttagtaacaaaacttttacctgaaataactaaaatggaagctgttttggcagagaagaaaagtaaatacatgcatctcgttaaaattggcagaacacatttgcaagacgcaaccccattaacacttggccaagaaattagtggctgggaagcatgtcttacaaataataaaaactatcttgaaacaagtatgaaagcaattttgccacttgcgattggtgggacggcagttggaactggcttaaatgcctcacgtgattttggtgataaggttgccgaagaattgatgaaacaaacgggatatccttttacttctgattccaataagtattttgctctaactagtcatagtccgattaattttgttcatggatccattcgtagccttgcttcggatctaatgaaaattgctaatgatatccgtttattagcaagtggaccacgtagcggcataggtgagttaacgatcccagttaatgaaccaggaagctccattatgccaggaaaagtaaatcctactcaatgtgaagcaatgacgatggtagcggctcaagtcatgggaaatgatgtgacaattaatgttgctgccagccaaggaaactttgaactcaatgtctacaagccagttatcatttttaatttcttagaatctgtcaaactgctttcagatagcatgcgttcgttccgattgcattgtttggaaggactcactgcgaatgaaaaagttattgaaacaaaagtaaatgactccctaatgcttgtgacagcattgaatccgcatatcggctatgaaaaagctgccaaaattgccaagctggcttttgatgaaaatacgacattaaaagaagcggcaatcaaaaccggttttgtgacagaaaagcaatttgatttatggattgatccgttaaaaatgactaatttgtaa

SEQ ID NO: 115513 - protein, 455 aa, Listeria monocytogenes serotype 4b
MERIERDTLGEISVDATKYWGAQTERSKRNFAIGDNPMPIEIIYAFAQLKKATAKVNAAEGKLSEEKAIAIGQVCDQIIQGELDEHFPLVVWQTGSGTQSNMNVNEVIAHVANLTLGEGQIHPNDDVNMSQSSNDTFPTAMHIAAYGALVTKLLPEITKMEAVLAEKKSKYMHLVKIGRTHLQDATPLTLGQEISGWEACLTNNKNYLETSMKAILPLAIGGTAVGTGLNASRDFGDKVAEELMKQTGYPFTSDSNKYFALTSHSPINFVHGSIRSLASDLMKIANDIRLLASGPRSGIGELTIPVNEPGSSIMPGKVNPTQCEAMTMVAAQVMGNDVTINVAASQGNFELNVYKPVIIFNFLESVKLLSDSMRSFRLHCLEGLTANEKVIETKVNDSLMLVTALNPHIGYEKAAKIAKLAFDENTTLKEAAIKTGFVTEKQFDLWIDPLKMTNL

SEQ ID NO: 115514 - DNA, 1368 bp, Listeria monocytogenes
  CDS (1)..(1368): transl_table=11
atggaacgaatagagcgagatacgcttggagaaatttctgtagatgcgacgaaatattggggagcgcaaacagaacgaagtaaaaggaattttgctattggtgataatcctatgccgatagaaattatatatgcttttgctcagttaaagaaagccactgcaaaagtgaacgcagcagaaggaaaactagccgaagaaaaagcgatagcgattggccaggtttgtgatcaaatcattcaaggagaactagatgagcattttcctttagtcgtttggcaaacaggaagcggaacgcagagcaacatgaatgtcaatgaagttatcgcacacgttgccaacttaactttaggcgaaggacaaattcatccaaatgatgatgttaacatgtcacaaagctcgaacgacacatttccaacagcgatgcacattgccgcatacggggctttagtaacaaaacttttaccagaaataactaaaatggaagctgttttgacagagaagaaaaataaatatatgcatctcgttaaaattggtagaacgcatttacaagatgcaactcctttaacacttggtcaagaaattagtggctgggaagcatgtcttacaaataataaaaactatcttgaaacaagtatgaaagcaattttgccacttgcaattggcgggactgcagttggaacgggcttaaatgcctcacgtgattttggtgataaggttgccgaagaattgatgaaacaaacgggatatccttttacttctgattccaataagtattttgctttaactagtcatagtccgattaattttgttcatggcgccattcgtagccttgcttcggatctaatgaaaattgctaatgatatccgtttattagcaagtggaccacgtagcggcataggtgagctagagataccagctaatgaaccaggaagctctattatgcccgggaaagtaaaccctacccaatgtgaagcaattacgatggtagcggctcaagtcatgggaaatgatgtgacaattaatgttgccgcaagccaagggaactttgagttaaatgtctacaagccggttatcatttttaatttcctagaatctatcaaacttcttgcagatagcatgcgttcgttccgagtgcattgtttggaaggacttactgcgaatgaaaaagttattgaaacaaaagtaaatgactccctaatgcttgttacagcattgaatccgcatatcggctatgaaaaagctgctaaaattgccaaactggcttttgatgaaaatacgacattaaaagaagcggcaatcaaaaccggctttgtgacagaaaaagaatttgatttgtggataaatccattgaaaatgactaatttgtaa

SEQ ID NO: 115515 - protein, 455 aa, Listeria monocytogenes
MERIERDTLGEISVDATKYWGAQTERSKRNFAIGDNPMPIEIIYAFAQLKKATAKVNAAEGKLAEEKAIAIGQVCDQIIQGELDEHFPLVVWQTGSGTQSNMNVNEVIAHVANLTLGEGQIHPNDDVNMSQSSNDTFPTAMHIAAYGALVTKLLPEITKMEAVLTEKKNKYMHLVKIGRTHLQDATPLTLGQEISGWEACLTNNKNYLETSMKAILPLAIGGTAVGTGLNASRDFGDKVAEELMKQTGYPFTSDSNKYFALTSHSPINFVHGAIRSLASDLMKIANDIRLLASGPRSGIGELEIPANEPGSSIMPGKVNPTQCEAITMVAAQVMGNDVTINVAASQGNFELNVYKPVIIFNFLESIKLLADSMRSFRVHCLEGLTANEKVIETKVNDSLMLVTALNPHIGYEKAAKIAKLAFDENTTLKEAAIKTGFVTEKEFDLWINPLKMTNL

SEQ ID NO: 115516 - DNA, 1419 bp, Methylobacterium extorquens; identical to SEQ ID NO: 45284
  CDS (1)..(1419): transl_table=11

SEQ ID NO: 115517 - protein, 472 aa, Methylobacterium extorquens; identical to SEQ ID NO: 45285

SEQ ID NO: 115518 - DNA, 1425 bp, Mycobacterium bovis
  CDS (1)..(1425): transl_table=11
atggccgttgacgccgacagcgccaattaccgcatcgagcacgacaccatgggcgaagtccgggtgccggcaaaagcgttgtggcgcgcgcaaacccagcgcgcggtggagaacttcccgatatccggccgcgggttggagcgcacccagatccgcgcgctaggcctgctgaaaggcgcctgcgcgcaggtgaactccgacctcgggttgctggcgccggagaaagccgacgccatcatcgccgcggccgccgagatcgccgacggtcaacacgacgaccagtttcccatcgacgtcttccagaccggctcgggcaccagctccaacatgaacaccaacgaggtgattgcgtccatcgcggccaagggcggggtcacgttgcatcccaacgacgacgtgaacatgtcgcagtcgtccaacgacaccttcccgacggccacccacatcgcggccaccgaggccgcggtcgctcatctcatcccagcgctgcagcagctgcacgacgcattggccgccaaggctcttgattggcacacggtggtgaagtcgggccgaacgcatctgatggacgccgttccggtgacactcggccaggagttcagcggatatgcccgccagatcgaggccggcatcgagcgggtgcgcgcgtgtctgcccaggctgggcgagctggcgatcggcggcaccgcggtgggtaccggcctcaacgctcccgacgacttcggcgtcagagtggtcgcggtgctggtcgcgcagaccggtctgtcggaattgcgtacggcggctaattctttcgaagctcaggctgcccgcgacgggctggtggaggcgtccggggcgctgcgcacgatcgcggtatcgctgaccaagatcgccaacgacatccgctggatgggatcgggcccattgaccggcctggccgagatccaactgccagatctgcagccgggcagctcgatcatgccgggaaaggtgaatccggttctgccggaggcggttacgcaggtcgccgcgcaggtgatcggaaacgacgccgccatcgcctggggtggggccaacggcgcattcgaactcaacgtctacatcccgatgatggcccgcaacatcctcgagtccttcaagctgctgaccaatgtgtcacggctgttcgcccagcgctgcatagcagggctgaccgccaacgtcgagcacctgcggcggctggccgagtcctcaccgtcgatcgtgacaccgttgaattcggccatcggctacgaggaggcggccgccgtcgccaagcaagcactcaaggaacgcaaaacgattcgccaaaccgtgatcgaccgtggcctgatcggcgacaggctgtcgatcgaggatctggaccgccgtctggacgtgctggcaatggccaaggccgagcagctcgacagcgatcggctatga

SEQ ID NO: 115519 - protein, 474 aa, Mycobacterium bovis
MAVDADSANYRIEHDTMGEVRVPAKALWRAQTQRAVENFPISGRGLERTQIRALGLLKGACAQVNSDLGLLAPEKADAIIAAAAEIADGQHDDQFPIDVFQTGSGTSSNMNTNEVIASIAAKGGVTLHPNDDVNMSQSSNDTFPTATHIAATEAAVAHLIPALQQLHDALAAKALDWHTVVKSGRTHLMDAVPVTLGQEFSGYARQIEAGIERVRACLPRLGELAIGGTAVGTGLNAPDDFGVRVVAVLVAQTGLSELRTAANSFEAQAARDGLVEASGALRTIAVSLTKIANDIRWMGSGPLTGLAEIQLPDLQPGSSIMPGKVNPVLPEAVTQVAAQVIGNDAAIAWGGANGAFELNVYIPMMARNILESFKLLTNVSRLFAQRCIAGLTANVEHLRRLAESSPSIVTPLNSAIGYEEAAAVAKQALKERKTIRQTVIDRGLIGDRLSIEDLDRRLDVLAMAKAEQLDSDRL

SEQ ID NO: 115520 - DNA, 1389 bp, Nitrosomonas europaea
  CDS (1)..(1389): transl_table=11
atggaccagtatcgcgaagaacatgatgcaataggcacagtacaggtgcctgccagcgccctctggggtgcgcagacacaacgatcgctcaacaacttcaatatctcgggcgaacgcatgccgtcagccctgatccacgcactggcgctggtcaaacgcgccgctgccagtgtcaatcatgatctgggattactggacgagaacatcgcccgggcaatcatcaccgctgccgatgaagtgctggcaggagaacacgccggcgaatttccgttggtagtttggcaaaccggttccggcacacaaaccaatatgaacatgaacgaggtgctggccaaccgcgcttcggaaattctgggcggtacacggggcaaaggtcgcaaggtgcaccctaacgaccatgtcaacaaaggacaatcttccaatgacgtttttcccactgccatgcacattgctgccgtggaagccatccgcaaccggttgattccggcactggaagcactacgtaaaacattatcttccaaatcggcagcattttcggatatcgtcaagatcggccgcacacatttgcaggatgccaccccgcttacactggggcaggaattttcaggctatgtttcacagctcgatcatggcctggctcatctcgaatctgcgctgccgcatctgctcgaactggcgctgggggggacagccgtaggtaccggtctcaacacccatccggaatttgcacgccgtgtcgcggcagaaattgcacgcctcagcggctatccttttataacagctgccaataaatttgaggcactggccgcgcatgatgcactggtccatgcgcatggggtgctgaaaacactagcagctatactgatcaaaattgccaatgacgtccgctggctggcatccggcccgcgttgcggtattggtgaaatccttatcccggagaacgaacccggcagttcgatcatgcccggaaaagtcaatcctacccaatcggaagcagttgtcatgcttgcctgtcaggtcatgggcaatgatgttgcaatcaatctgggaggcgccatgggaaatttcgaactcaataccatgaaaccactgatcattcacaattttttacaaagtacacgtttgctcgcagatggtgcagaaagcttcaacacccattgcgcagccggtattacggccaatacagtacgaatcaagcagcatttacaggagtctctgatgctggtaaccgcgctcaatcctcacattggttacgacaaagcagcagaaatagccaaaaaagcccatcatgaaatgctgacattaaaagaagccgcaatcaggctgggttatgtcaccgcagaacaattcgatgtatgggttgacccacaaaaaatgacagaggtgtga

SEQ ID NO: 115521 - protein, 462 aa, Nitrosomonas europaea
MDQYREEHDAIGTVQVPASALWGAQTQRSLNNFNISGERMPSALIHALALVKRAAASVNHDLGLLDENIARAIITAADEVLAGEHAGEFPLVVWQTGSGTQTNMNMNEVLANRASEILGGTRGKGRKVHPNDHVNKGQSSNDVFPTAMHIAAVEAIRNRLIPALEALRKTLSSKSAAFSDIVKIGRTHLQDATPLTLGQEFSGYVSQLDHGLAHLESALPHLLELALGGTAVGTGLNTHPEFARRVAAEIARLSGYPFITAANKFEALAAHDALVHAHGVLKTLAAILIKIANDVRWLASGPRCGIGEILIPENEPGSSIMPGKVNPTQSEAVVMLACQVMGNDVAINLGGAMGNFELNTMKPLIIHNFLQSTRLLADGAESFNTHCAAGITANTVRIKQHLQESLMLVTALNPHIGYDKAAEIAKKAHHEMLTLKEAAIRLGYVTAEQFDVWVDPQKMTEV

SEQ ID NO: 115522 - DNA, 1386 bp, Oceanobacillus iheyensis
  CDS (1)..(1386): transl_table=11
atggattatcgtgttgaaaaagatacaattggggaaattcaagttcctgctgataaatactggggggcgcaaacacagcgtagtaagcaaaattttccaattggaaatgaaaaaatgccagtcgaaattattaaagcgtttgcaattctaaaacgaagtactgctgaagctaattttgaattaggcttaatggaacgagataaaatggaagcaattcaatatgctgctgatcaggtattaaacgattctctaacagatcatttcccactagtcgtttggcaaactggtagtggtacgcaaagtaatatgaatgtaaacgaagtattagcttttgtaggtaataaatggttacaagaacagggaagcgatttaaaattacatcccaatgatgatgtaaataaatctcaaagttcgaacgatacatatccaacggcaatgcatattgcagccgtattgaaattagaagatacggtattaccagctttgagtcagttgaaaaatacttttgcagaaaagcaaagtgcttttgaaaatatcgtgaaaattggtcgtacacatttacaggatgcgactcctctaacactaggccaggaaatcagtgggtggcatcgtatgttagagaaatctgaaacgatgatttcagagagtttagagcatcttcgtgaattagcaataggtggaacagctgtaggcacaggcttaaatgcacatccagatttttcagagaaagtttgtaaggcaattagtacattcacaaacaaaaaattcatatctgcaaaaaataaatttcattcattaacaagtcatgacgaaactgtatatgcacatggtgcactaaagggactagcagcagatttaatgaaaattgcaaatgatgttcgttggttagcaagcggtccacgctgtggcattggagaaattacgattccggcgaatgaaccaggaagttcaattatgccagggaaggtaaatccgactcaaagtgaagctgtaacaatggtagtaactcaagtaatggggaatgatgctgctattggttttgccgctagtcaggggaatttcgaattgaatgtatttaagccagtaattgcatataatttcttacaatcaagtcaattattagcagatagtataatttccttcgatgagcgctgtgcggttggaatcgaaccaaaccacgagcaaatcgaaaagaatcttaatgattctttaatgttggttaccgcattaaatccgcatataggatacgaaaatgcagcaaaaattgctaaaaaagcatttgcagataattcaactttaaaagaaacagctgtagaattaggactattaacagaagaacagtttgatgagtatgttaatccagaggaaatgacatatcctaaataa

SEQ ID NO: 115523 - protein, 461 aa, Oceanobacillus iheyensis
MDYRVEKDTIGEIQVPADKYWGAQTQRSKQNFPIGNEKMPVEIIKAFAILKRSTAEANFELGLMERDKMEAIQYAADQVLNDSLTDHFPLVVWQTGSGTQSNMNVNEVLAFVGNKWLQEQGSDLKLHPNDDVNKSQSSNDTYPTAMHIAAVLKLEDTVLPALSQLKNTFAEKQSAFENIVKIGRTHLQDATPLTLGQEISGWHRMLEKSETMISESLEHLRELAIGGTAVGTGLNAHPDFSEKVCKAISTFTNKKFISAKNKFHSLTSHDETVYAHGALKGLAADLMKIANDVRWLASGPRCGIGEITIPANEPGSSIMPGKVNPTQSEAVTMVVTQVMGNDAAIGFAASQGNFELNVFKPVIAYNFLQSSQLLADSIISFDERCAVGIEPNHEQIEKNLNDSLMLVTALNPHIGYENAAKIAKKAFADNSTLKETAVELGLLTEEQFDEYVNPEEMTYPK

SEQ ID NO: 115524 - DNA, 1395 bp, Pasteurella multocida
  CDS (1)..(1395): transl_table=11
atgacatttcgtatcgaaaaagacactatgggtgaagtacaagttcctgccgataaatattgggcagcacagactgaacgctcacgcaataatttcaaaattggacctgaagcctctatgccaaaagagattattgaagcctttggttatttaaaaaaagcagccgcttatgctaaccatgatttaggtgtattaccagtggaaaaacgggatttaattgcacaggcttgtgatgagatcctcgctaataaattagatgatcaatttcctctcgtcatttggcaaaccggttccggtacacaatccaatatgaaccttaacgaagtcatttcaaaccgtgcccatgttttaaatggtggtaaattaggtgaaaaatccattatccatccaaatgacgatgtgaacaaatctcaatcttcaaacgatacttacccaacagcaatgcacatcgcggcgtataaaaaagtcgttgaagtcactattccttgtgtagaacgtttacaaaaaaccttagcgcaaaaagcagacgcctttaaagatgtggtgaaaattgggcgtactcacttaatggatgcgacaccattaaccttaggtcaagaattctctgcttatgctgcccaattagattttggcttacgcgcattgaaaaacacgctgccacatttagcacaattagcgctaggcggtactgcagtgggtacaggtttaaatacaccgaaaggttatgatgtgaaagtggcagactacattgcaaaatttacaggcttgccatttatcaccgctgaaaataaatttgaagcgttagccacccatgatgccgttgtggaaacgcacggcgcattaaaacaattagcggtatccttatacaaaatcgcaaatgatatccgtttattagcctctggaccacgttctggtattggtgaaattttaattcctgaaaatgagccgggctcttctatcatgccaggtaaagttaacccaacccaatgtgaagccatgacgatggtatgcgcgcaagtactcggtaatgacaccaccatttcctttgcaggtacacaaggtcatttccaattgaacgtatttaaaccagtgatggcggctaacttcttacaatctgctcaattattggcggatgcttgtgtgtccttcgatgaacattgtgcagtcggtattgaaccaaacttccctcgcatcaaaaaacaacttgatgactcattaatgttagtgaccgccttaaatacacatatcggttacgaaaatgcggcgaaaatcgcgaaaaccgcacacaaaaatgggacaacattaaaagaagaagcaatcaacttaggcttagttacagctgaacaatttgatgaatgggtacgtccagaagatatggtcggtagcttaaagtaa

SEQ ID NO: 115525 - protein, 464 aa, Pasteurella multocida
MTFRIEKDTMGEVQVPADKYWAAQTERSRNNFKIGPEASMPKEIIEAFGYLKKAAAYANHDLGVLPVEKRDLIAQACDEILANKLDDQFPLVIWQTGSGTQSNMNLNEVISNRAHVLNGGKLGEKSIIHPNDDVNKSQSSNDTYPTAMHIAAYKKVVEVTIPCVERLQKTLAQKADAFKDVVKIGRTHLMDATPLTLGQEFSAYAAQLDFGLRALKNTLPHLAQLALGGTAVGTGLNTPKGYDVKVADYIAKFTGLPFITAENKFEALATHDAVVETHGALKQLAVSLYKIANDIRLLASGPRSGIGEILIPENEPGSSIMPGKVNPTQCEAMTMVCAQVLGNDTTISFAGTQGHFQLNVFKPVMAANFLQSAQLLADACVSFDEHCAVGIEPNFPRIKKQLDDSLMLVTALNTHIGYENAAKIAKTAHKNGTTLKEEAINLGLVTAEQFDEWVRPEDMVGSLK

SEQ ID NO: 115526 - DNA, 1398 bp, Prochlorococcus marinus
  CDS (1)..(1398): transl_table=11
atggctcaatcatttcggatagagaatgacagtatgggcactataaaagtgccagatcaagcgctatggggcgcccaaacacaaagatctctcattaattttgccattgggcacaataaaatgcccatgaagcttatatattcaattgttcaaatcaaagcttctgcagcgatagtcaattgccgattaggagtactggataagcaaaggaaaaatttcatccttaatgcttgtaacgaaattagtaatggaatgcatgatgaacagtttccattaagcgtttggcaaacgggaagcgggacacaaacaaatatgaatgtcaatgaagtaattagcaatattgcatcccatttaaatggcaataaattaggtagtcatgaaccattgcatccaaatgatcatgtcaatcgctcacaatcaaccaatgatgtatttcccgctgcaattcaaatcgctactgttcaagaaatcttagagaatttattgccggagctagatcaattaattgaaacttttgacaagaaaattattaagtggaatcgcattattaaaacagggcgtacccatcttcaagatgctgtgccgctaaccttggggcaagaagcctccgcatggaaggaacaacttattgcatctcgtaatcgactcaacaaaagcttaaatgaactttaccctcttccgttaggagggactgctataggcacagggctcaatgcaccagcaaaattcgataaagaaattgctcttgagattgcaaagtcaactagaagcccctttgtttcagcacaaaacaagttcgccattatggcaagccatgatgcattagtccatacaatgtctcagttgaaactattagctgtatcactatttaaaatagttaatgatctacgccttttatcctgtgggccaagaggagggctaggagaactaaggcttccagaaaatgagcccgggagttcgataatgcctgggaaagtcaacccaacacaatgcgaagcaatggccatggtttgcacgcaaatcatggcacttgattcagccgtgactatggcaggtagtggtgggcatttacaaatgaattcgtacaaacctttaatcgcgttcaaccttttagaaagtattgatcttcttagcagtgcttgtaaaagttctcgtattttaatgatagaaggaattgaacctaatttagaaaaaatccagaacagtcttcaaaattctctaatgcttatcacaagcttgactccgataatcggttacgaaaaagctagtaagattgcacaatgtgctcatgaaaaagatatcacgcttaaagaggcaacaaaattattgggttatcttaacgaagacgattttgatcgtattgtcaatccacagtcgatgactggtatggagaactag

SEQ ID NO: 115527 - protein, 465 aa, Prochlorococcus marinus
MAQSFRIENDSMGTIKVPDQALWGAQTQRSLINFAIGHNKMPMKLIYSIVQIKASAAIVNCRLGVLDKQRKNFILNACNEISNGMHDEQFPLSVWQTGSGTQTNMNVNEVISNIASHLNGNKLGSHEPLHPNDHVNRSQSTNDVFPAAIQIATVQEILENLLPELDQLIETFDKKIIKWNRIIKTGRTHLQDAVPLTLGQEASAWKEQLIASRNRLNKSLNELYPLPLGGTAIGTGLNAPAKFDKEIALEIAKSTRSPFVSAQNKFAIMASHDALVHTMSQLKLLAVSLFKIVNDLRLLSCGPRGGLGELRLPENEPGSSIMPGKVNPTQCEAMAMVCTQIMALDSAVTMAGSGGHLQMNSYKPLIAFNLLESIDLLSSACKSSRILMIEGIEPNLEKIQNSLQNSLMLITSLTPIIGYEKASKIAQCAHEKDITLKEATKLLGYLNEDDFDRIVNPQSMTGMEN

SEQ ID NO: 115528 - DNA, 1386 bp, Prochlorococcus marinus subsp
  CDS (1)..(1386): transl_table=11
atgaccaagaactttagatttgaaaaagatagtatgggacagataaaagttccttcagaggctttgtggggagcccaaacgcagagatcaattataaatttttctattggtgaggagttaattccaattgaattaatttattcacttacggttataaaaagagcagccgcaatttctaatttcaaattgggtttaataaataatgtaaaaaaagatctcattattgaagcctgtacagaaatccttgatgggaaacatgattctcaattccccttaaaaatatggcaaacaggtagtggtacacaaacaaatatgaatatcaatgaagtcatatctaatattgctgcgttaaaaacaaattcaggacttggaagtcatcatcctattcatccaaatgatgatgttaataaatcgcagtctacaaatgatacttttcctgcggctattcagatatctgttgttactcaaataattaaaaaattagttccatcaataaaggaacttactaaggttcttgatagtaagagtaataaatggaaagatcttataaaaataggtagaactcattttcaagatgcagtgccaatttcccttggtcaagaagtttctgcatggtcaaaacaactaaaggacgctgaagatgctctgataattagtcttaatgaattatgtttcttaccactaggtggtacggcagttggtacaggtattaattgtccaaaagatttttcaaaagaatctataaaatcaatttcagaatatactggtttatttttttataagtcaaagaatcatttctctttaatggcatctcatgatcgattagcccaagtaatgggtcaaataaaaatcctagcaagtgcattatttaagatttctaatgatattaaaatattgtcctcaggacctagatctggcatttatgaattaataattcccaaaaatgaaccagggagctcaatcatgcctgggaaagttaatccaacccaatgtgaagcattatcaatggtatgcactcaagtaatgggttttgaatacgcagtatcaatagctaatgccagcggcactttacaaatgaatgaatataagccactaattggatttaatattctcacgagtataaaattactgaatcatgcgataagtaacttcagactaaaattagttgaagggatacaaccaaacccaaaaactataaaagctaatcttgaaaattcactaatgcttgtaactgcattggttcccaaaataggttatgaaaaagcagcagaaattgcgaatcttgcttttaatgaatcaatcaacttaaaagaagcaacaataaaattaggttacttaactgctaatgaatttgaggatgctataaatactaataaaatgatttaa

SEQ ID NO: 115529 - protein, 461 aa, Prochlorococcus marinus subsp
MTKNFRFEKDSMGQIKVPSEALWGAQTQRSIINFSIGEELIPIELIYSLTVIKRAAAISNFKLGLINNVKKDLIIEACTEILDGKHDSQFPLKIWQTGSGTQTNMNINEVISNIAALKTNSGLGSHHPIHPNDDVNKSQSTNDTFPAAIQISVVTQIIKKLVPSIKELTKVLDSKSNKWKDLIKIGRTHFQDAVPISLGQEVSAWSKQLKDAEDALIISLNELCFLPLGGTAVGTGINCPKDFSKESIKSISEYTGLFFYKSKNHFSLMASHDRLAQVMGQIKILASALFKISNDIKILSSGPRSGIYELIIPKNEPGSSIMPGKVNPTQCEALSMVCTQVMGFEYAVSIANASGTLQMNEYKPLIGFNILTSIKLLNHAISNFRLKLVEGIQPNPKTIKANLENSLMLVTALVPKIGYEKAAEIANLAFNESINLKEATIKLGYLTANEFEDAINTNKMI

SEQ ID NO: 115530 - DNA, 1395 bp, Pseudomonas putida; identical to SEQ ID NO: 45286
  CDS (1)..(1395): transl_table=11

SEQ ID NO: 115531 - protein, 464 aa, Pseudomonas putida; identical to SEQ ID NO: 45287

SEQ ID NO: 115532 - DNA, 1395 bp, Pseudomonas syringae pv
  CDS (1)..(1395): transl_table=11
gtgagccgcaccgaaaccgacagcatcggcccgatcgaagtccctgaagatgcctattggggcgcgcagacccaacgctcactgatcaactttgcgattggcgaccagcgtatgccgttggccgttctgcatgcgttgaccttgatcaagaaagccgccgcacgcgtcaacgaccgcaacggcgacctgccggccgatatcgcccggctgatcgaacaggctgccgacgaggtgctcgacggtcagcacgacgcgcagtttccgctggtggtctggcagaccggcagtggcacgcagagcaacatgaacgtcaacgaagtgatcgccggccgcgccaacgaactggccggccagggccgtggcggcaaatcgccggtccaccccaacgatcacgtcaatcgctcgcaaagctccaacgactgctttccgacagccatgcacattgccactgcgcaagcggtcaaggaacagctgctgccggcgattgccgagctgtccagcgggctggccgaacaggccgcgcgtcacatgaagctggtcaagaccgggcgcacgcacatgatggacgccacgccgatcacctttggccaggagctttcggggttcgtcgcgcaactggattacgcagaaaaagccattcgcgccgccctgcccgccgtctatgaactggcgcaaggtggcaccgcagtcggcaccgggctcaacgcgccgaaaggcttcgctgaagccatcgcggcagaactggctgcactgtcgggcttgccgttcgtcaccgcgccgaacaaattcgccgcactggcgggccacgagccgctggctgcgctttccggcgcattgaaaacgctggccggcaccctgatgaagatcgccaacgacctgcgcttgctgggttccggcccgcgtgccgggttggcggaagtcaggttgccagccaacgagcccggcagctcgatcatgcccggcaaggttaacccgactcagtgcgaggccctgtcgatgctggcctgccaggttatgggcaacgatgtgaccatcggttttgccgccagccagggccatttgcaactgaacgtctataagccggtgatcattcacaacgtattgcagtcgatccgactgctggccgacggttgcagcaatttcaatgaacactgcgtcgccggcatggagccagacgccgaaaaaatggctgagcaccttgaacgcggcctgatgctggtcaccgcgctcaacccgcacatcggctatgacaagtcggcgcacattgccaaaaaagcctacaccgaaggcctgaccctgcgtgaagcagcgctggcgctgggttacctgaccgacgaggagttcgacgcctgggtgcgcccggacaagatgctggaggcgggcagcaatggttga

SEQ ID NO: 115533 - protein, 464 aa, Pseudomonas syringae pv
MSRTETDSIGPIEVPEDAYWGAQTQRSLINFAIGDQRMPLAVLHALTLIKKAAARVNDRNGDLPADIARLIEQAADEVLDGQHDAQFPLVVWQTGSGTQSNMNVNEVIAGRANELAGQGRGGKSPVHPNDHVNRSQSSNDCFPTAMHIATAQAVKEQLLPAIAELSSGLAEQAARHMKLVKTGRTHMMDATPITFGQELSGFVAQLDYAEKAIRAALPAVYELAQGGTAVGTGLNAPKGFAEAIAAELAALSGLPFVTAPNKFAALAGHEPLAALSGALKTLAGTLMKIANDLRLLGSGPRAGLAEVRLPANEPGSSIMPGKVNPTQCEALSMLACQVMGNDVTIGFAASQGHLQLNVYKPVIIHNVLQSIRLLADGCSNFNEHCVAGMEPDAEKMAEHLERGLMLVTALNPHIGYDKSAHIAKKAYTEGLTLREAALALGYLTDEEFDAWVRPDKMLEAGSNG

SEQ ID NO: 115534 - DNA, 1386 bp, Ralstonia solanacearum
  CDS (1)..(1386): transl_table=11
atgacgacccgtaccgaacgcgatacctttggcccgatcgaagtccccgccgaccgcctgtggggcgcgcagacgcagcgctcgctgcagaacttcgacatcgccggcgaccgcatgccgcgcgagctgatcgacgcgctggcccgcatcaagcgcgccagcgccgccgtcaaccagcgcctgggcctgctgccggccgacaaggcgaacgcggtcatcgccgcggccgacgaggtcatcgccggcaagcatccgggcgagttcccgctggtggtctggcagaccggctccggcacgcagagcaacatgaacatgaacgaggtgctcgccaaccgcgccagcgaactgctgggcggcgagcgcggcgaagcccgcctggtgcaccccaacgacgacgtgaaccgcagccagtcgtccaacgacgtgttcccgacggcgatgcacgtggcggccgtcaccgccatcacgcggcacctgctgccgtcgctgcgcgcgctgcgcgagacgctggcgcgcaaggccatcgacttcgacgacatcatcaagatcggccgcacccacctgcaggacgccacgccgctcacgctcggccaggagttctccggctacgcggcccagctgcagcacagcgagacgcacctgaacgccgcgctgccgcacctgtgcgagctggcgctgggcggcacggcggtcggcaccggcctgaatgcgccggccggctatgccgaacaggtggccgccgaactcgccgcgctgaccggcctgcccttcgtcacctcgcccaacaagttcgagaccatggcctcggccgacggcctggtgcacgcgcacggcgccctgaagacgctggccgccagcctgaccaagatcgccaacgacatccgctggctggccagcggcccgcgcagcggcctgggcgagctgtccattcccgagaacgagccgggctcgtccatcatgccgggcaaggtcaacccgacccagagcgaggcgatgacgatgctgtgcgcgcaggtgttcggcaacgatgtcgccgtcaacatcggcggggcctcgggcaacttcgagctgaacgtgttccggccgatgatcgcctacaacttcctgcacagcgcgcgcctgctggccgacggcatgcgcagcttcaacgaccactgcgcggtcggcatcgagcccaaccgcgagcgcatcgccgagctggtgcagcgctcgctgatgctggtgaccgcgctcaacccgcacatcggctacgacaaatcggcgcagatcgccaagaaggcgcacaaggaaggcaccagcctgcgcgaggcggcgctggcgctggggtatgtgacggccgagcagttcgatgcgtgggtgcggccggagcagatggtgggacgctga

SEQ ID NO: 115535 - protein, 461 aa, Ralstonia solanacearum
MTTRTERDTFGPIEVPADRLWGAQTQRSLQNFDIAGDRMPRELIDALARIKRASAAVNQRLGLLPADKANAVIAAADEVIAGKHPGEFPLVVWQTGSGTQSNMNMNEVLANRASELLGGERGEARLVHPNDDVNRSQSSNDVFPTAMHVAAVTAITRHLLPSLRALRETLARKAIDFDDIIKIGRTHLQDATPLTLGQEFSGYAAQLQHSETHLNAALPHLCELALGGTAVGTGLNAPAGYAEQVAAELAALTGLPFVTSPNKFETMASADGLVHAHGALKTLAASLTKIANDIRWLASGPRSGLGELSIPENEPGSSIMPGKVNPTQSEAMTMLCAQVFGNDVAVNIGGASGNFELNVFRPMIAYNFLHSARLLADGMRSFNDHCAVGIEPNRERIAELVQRSLMLVTALNPHIGYDKSAQIAKKAHKEGTSLREAALALGYVTAEQFDAWVRPEQMVGR

SEQ ID NO: 115536 - DNA, 1398 bp, Rhizobium loti
  CDS (1)..(1398): transl_table=11
gtgaccgttgcaaagaccagaaccgaaaccgatacgttcggccccatcgaggttgccgccgaccgttattggggcgcgcaggcgcagcgttccctgggcaatttcaagatcggctgggaaaaacagccggcgtcgatcgtgcgggcgctgggggtcgtcaaacgggcggcggcggaagtgaacatggagatgaagcggctcgatccggtcgtcggcaaggcgatcgtcgacgccgcccaggaagtgatcgacggcaagctcaacgaccatttcccgctggtggtctggcagaccggctcgggcacgcagtccaacatgaacgccaatgaagtgatctccaaccgggcgatcgagatgctgggcggcgtcatgggctcgaagaagccggtgcatcccaacgaccacgtcaatatgagccagtcttcgaacgacacctatccgacggccatgcatatcgcctgtgccgaacaggttgtccatcatctcatcccggcgctgcaccatctgcacaaggcgttggacgccaaggccagggccttcaaccacatcatcaagatcggccgcacccacacgcaggatgccacgccgctgacgctgggccaggaattttccggctatgcggcgcaggtcgcctcctcgatcaagcgcatcgaaatgacgctgcccgggctgcaggagctggcgcaaggcggcaccgccgtcggcaccggcctcaacgcgccagttggttttgctgaaaaggtggccgaccgcatcgccgccatcaccggcatcgccttcgtcaccgcgccgaacaagttcgaggcgctcgcggcccacgattccatggtgttctcgcacggcgccatcaacgccgcggcggcagcactcttcaagatcgccaacgacatccgcttcctcggttcgggcccgcgctcgggcctcggcgaattgtcgctgccggaaaacgaacccggctcgtcgatcatgccgggcaaggtcaacccgacgcagtgcgaagcgatgacgcaggtctgcgtgcaggtgttcggcaacaatgcggccctgaccttcgccggcagccagggccatttcgagctcaacgtctacaaccctttgatggcctacaatttcctgcagtcggtgcagctgctctccgacgcctcggtctccttcaccgacaattgcgtcgtcggcatcgaggcccgcgaagacaacatcaaggccgcactcgaccgctcgctgatgctggtgacggcgctggcgcccaccatcggctacgacaacgccgccaagatcgccaagacggcgcacaagaacggcaccacgctgcgcgaggaagcgctggccaccgggctggtcagcgaggtcgattatgaccggctggtgcggcctgaggacatgacgcatccggggtaa

SEQ ID NO: 115537 - protein, 465 aa, Rhizobium loti
MTVAKTRTETDTFGPIEVAADRYWGAQAQRSLGNFKIGWEKQPASIVRALGVVKRAAAEVNMEMKRLDPVVGKAIVDAAQEVIDGKLNDHFPLVVWQTGSGTQSNMNANEVISNRAIEMLGGVMGSKKPVHPNDHVNMSQSSNDTYPTAMHIACAEQVVHHLIPALHHLHKALDAKARAFNHIIKIGRTHTQDATPLTLGQEFSGYAAQVASSIKRIEMTLPGLQELAQGGTAVGTGLNAPVGFAEKVADRIAAITGIAFVTAPNKFEALAAHDSMVFSHGAINAAAAALFKIANDIRFLGSGPRSGLGELSLPENEPGSSIMPGKVNPTQCEAMTQVCVQVFGNNAALTFAGSQGHFELNVYNPLMAYNFLQSVQLLSDASVSFTDNCVVGIEAREDNIKAALDRSLMLVTALAPTIGYDNAAKIAKTAHKNGTTLREEALATGLVSEVDYDRLVRPEDMTHPG

SEQ ID NO: 115538 - DNA, 1392 bp, Rhizobium meliloti
  CDS (1)..(1392): transl_table=11
atgacatcgacccgcacggaaacagatacgttcggccccatcgaagtggcgagcgaccgctattggggcgcccaggcgcagcgatcgctgggcaatttcaaaatcggctgggaaaagcagcctctggcaatcgtgcgcgcactcggcatcgtcaaacaggcggctgcccgcgccaacatggcgctcggccgcctcgacccggcgatcggcgacgccatcgtcaaggccgcacaggaggtgatcgacggcaagcttgacgagcacttccctctcgtcgtgtggcagacgggctccggaacccagtcgaacatgaatgcgaacgaggtcgtttccaaccgtgcgatcgagctgctcggcggcgtcatgggttcgaagaagccggttcacccgaacgatcacgtcaatatgagccagtcgtcgaacgacacctatcccacggccatgcacatcgcctgtgcggagcgcgtgatccacgatctgctgccggcgctcaagcacctgcacaaggcgctcgaagagaaggtgaaggctttcgatcacatcatcaagatcggccgcacccacacgcaggacgcaacgcccctgacgctggggcaggagttttccggctatgcggcgcaggtcgcctcctcgatcaaacggatcgagatgacgctccccggcctttgcgagctcgcccagggggggaccgcggtcggcaccgggctcaatgcgccggtcggatttgccgagaaggtcgccgaggaaatcgctgccatcaccggcatcggcttcacttccgcgccgaacaagttcgaagcgctggccgcccacgactcgatggtcttcagccacggggcaatcaacgccaccgccgccgcgctcttcaagatcgccaacgacatccgcttcctcggctccggcccccgctccggcctcggcgagctttcactgccggaaaacgagccgggctcgtccatcatgccgggcaaggtcaacccgactcagtgcgaggcgctcacccaggtctgcgtccaggtcttcggcaatcatgcggcgctgacctttgccggcagccagggccacttcgagctcaacgtctacaatccgctgatggcgtacaacttcctgcagtcggtgcaactgctcgccgatgcggctatctccttcaccgacaattgcgtcgtcgggatcgaggcgcgggaggacaacatcaaggcggcgctcgaccgttcgctcatgctggtgactgcgcttgcgccgaagatcggctacgacaacgcggccaagatcgccaagaccgcccacaagaacggtaccacgcttcgcgaggaggccgtcggcggcggttacgtcacggacgaggagttcgacgccgtcgtccgccccgaaaccatgatcggcccggcctga

SEQ ID NO: 115539 - protein, 463 aa, Rhizobium meliloti; identical to SEQ ID NO: 45289

SEQ ID NO: 115540 - DNA, 1392 bp, Rickettsia conorii
  CDS (1)..(1392): transl_table=11
atgaaaaattacagaaccgaaagtgattcttttggagaaattcaaatagaagaaaaattttattggggggctcaaactcaaagatctttagaaaattttaaaataggcaagcaaaaaatgcctgaaattttaattcgtgctcttgctattttaaaaaaatgtgcagcacaggttaatcatgagtttggtgatttagaagctaaaatcgctataagtatagataaagcaacggatagaatcttagaaggcgaatttgaggataattttcctttagtagtttggcaaacaggttcaggaacgcaaacaaacatgaatatgaacgaggttattgcctctattgccaacgaagaattaacaggcaagaaaggcggcaaatctccggtacatcctaacgatcatgttaataaaggacaatcatccaacgactcttttccaaccgctatgcatatagcaaccgtacttgcaactaaacagcaactgataccagctttgaataatatactgacctctttgcaggataagtcaaaagattgggacaaaatcataaaaataggacgtacccacttgcaggatgcaactcctttaactcttaaacaggaattctccggatatattacacaaatagagtatgctttagaacgcatagaaaatgcactacaaaaagtttatctacttgcccaaggaggcacagcagtcggtacaggtattaactcaaaaataggctttgatataaaatttgccgagaaagtggcagagtttactaaacaaccctttaagacggctcctaataaatttgaaagtctagctgctcacgacgcactagtagaattttcaggaactcttaatactatagcagttagcttaatgaaaatagcaaatgatataagactgctcggctccggtccaagatgcggtcttggtgagctacatttacctgaaaatgaacctggttcttctattatgcccggtaaagtaaaccctacacaagtcgaagctttaacaatggtgtgcagtcaggtgatggggaatcatgttacggttactattgccggctcaaacggacatcttgaacttaacgtatttaaacccgtaataatatacaatatcctacaatctatagagctgttatccgatagcgtaaatagctttgttactcactgtgttaaaggattagaacccaatatagcacgcattaatgatttacgtgataaatctctaatgcttgttacagctcttaatccacatataggctatgataatgctgcaaaaattgctaaagaagcacataagcacggaatcactttaaaagaagcagctaaaaaactcaatcttctatcggaagcaaaatttgataaaatagtagtacctgaaaaaatggttagtcaatcttag

SEQ ID NO: 115541 - protein, 463 aa, Rickettsia conorii
MKNYRTESDSFGEIQIEEKFYWGAQTQRSLENFKIGKQKMPEILIRALAILKKCAAQVNHEFGDLEAKIAISIDKATDRILEGEFEDNFPLVVWQTGSGTQTNMNMNEVIASIANEELTGKKGGKSPVHPNDHVNKGQSSNDSFPTAMHIATVLATKQQLIPALNNILTSLQDKSKDWDKIIKIGRTHLQDATPLTLKQEFSGYITQIEYALERIENALQKVYLLAQGGTAVGTGINSKIGFDIKFAEKVAEFTKQPFKTAPNKFESLAAHDALVEFSGTLNTIAVSLMKIANDIRLLGSGPRCGLGELHLPENEPGSSIMPGKVNPTQVEALTMVCSQVMGNHVTVTIAGSNGHLELNVFKPVIIYNILQSIELLSDSVNSFVTHCVKGLEPNIARINDLRDKSLMLVTALNPHIGYDNAAKIAKEAHKHGITLKEAAKKLNLLSEAKFDKIVVPEKMVSQS

SEQ ID NO: 115542 - DNA, 1386 bp, Rickettsia felis
  CDS (1)..(1386): transl_table=11
atgaaaaattacagaaccgaaagcgattcttttggagaaattcaaatagaagaaaaattttattggggagctcaaactcaaagatctttagaaaattttaaaataggcaaacaaaaaatgcctgaaattttaattcgtgctcttgctattttaaaaaaatgtgcagcacaggttaattatgagtttggtgatttagaagctaaaatagctacaagtatcgataaagccactgatagaatcttagaaggcgaatttgaggataattttcctttagtagtttggcaaacaggttcaggtacacaaacaaacatgaatatgaacgaggttattgcctctattgctaatgaagaattaacaagcaagaaaggcggtaaatctccagtacatcctaacgatcatgttaataaaggacaatcatccaacgactcttttccaaccgctatgcatatagcaactgtacttgcaactaaacagcaacttataccggctttgaataatttacttacctctttgcaagacaagtcaaaagattgggataaaatcataaaaataggacgtacccacttgcaggacgcaactcctttaactcttaaacaggaattctccggatatattacacaaatagagtatgctttagaacgcatagaagatgcactaaaaaaagtttatctacttgctcaaggtggaacggcagtcggcacagctattaactcaaaaataggctttgatataaaatttgctgaaaaagtggcagagtttactaaacaaccttttaaaacggctcctaataaatttgaaagtctagctgcccatgacgcactagtagaattttcaggaactcttaatactatagcagttagcttaatgaaaatagcaaatgatataagactgctcggctccggtccaagatgcggtcttggtgagctgcatttacctgagaatgaacccggctcttcgattatgccaggtaaagtaaaccctacccaagtcgaagctttaacaatggtatgcagtcaggtgatgggaaatcatgttacggttactattgccggctcaaacggacatcttgaacttaacgtatttaaacctgtaataatatacaatatcctacaatctatagagctgttatccgatagcgtaaatagctttgttactcactgtgttaaaggattagaacccaatatagcacgcattaatgatttacgtgataaatctctaatgcttgttacggctcttaatccgcatataggctatgataatgctgcaaaaattgctaaagaagcacataagcacggaataactttaaaagaagcagctaaaaaactcaatcttttatccgaagaagaatttgataaaatagtagttcctgaaaaaatgattgggtaa

SEQ ID NO: 115543 - protein, 461 aa, Rickettsia felis
MKNYRTESDSFGEIQIEEKFYWGAQTQRSLENFKIGKQKMPEILIRALAILKKCAAQVNYEFGDLEAKIATSIDKATDRILEGEFEDNFPLVVWQTGSGTQTNMNMNEVIASIANEELTSKKGGKSPVHPNDHVNKGQSSNDSFPTAMHIATVLATKQQLIPALNNLLTSLQDKSKDWDKIIKIGRTHLQDATPLTLKQEFSGYITQIEYALERIEDALKKVYLLAQGGTAVGTAINSKIGFDIKFAEKVAEFTKQPFKTAPNKFESLAAHDALVEFSGTLNTIAVSLMKIANDIRLLGSGPRCGLGELHLPENEPGSSIMPGKVNPTQVEALTMVCSQVMGNHVTVTIAGSNGHLELNVFKPVIIYNILQSIELLSDSVNSFVTHCVKGLEPNIARINDLRDKSLMLVTALNPHIGYDNAAKIAKEAHKHGITLKEAAKKLNLLSEEEFDKIVVPEKMIG

SEQ ID NO: 115544 - DNA, 1386 bp, Rickettsia typhi
  CDS (1)..(1386): transl_table=11
atgaaaaattacagaatcgaaagtgactcttttggagaaattcaaatagaagaaaaattttattggggcgctcaaactcaaagatctttaaacaattttaaaataagcaagcaaaaaatgccgaaaattttaattcatgctcttgctattttaaaaaaatgtgctgcacaggtgaattatgaatttggtgatttagaatataaaatagctacaagtatagataaagcaattgatagaatcttagcaggcgaatttgaagataattttcctttagtagtttggcaaacaggatcaggtacacaaacaaacatgaatatgaacgaggttattgcctctattgctaatgaggaattaactggtaaaaaaggtggtaaatctccagtacatcctaacgatcatgttaataaagggcaatcttccaacgactcttttccaacagctatgcatatagcaactgtacttgcaactaaacagcagcttataccagctttgaataatttacttacatatttacaagacaagtcaaaagattgggataaaataataaaaataggacgcactcacttgcaggatgcaactcctttaactcttaaacaggaattctcaggatatattacacaaatagagtatgctttagaacgcatagaagatgcactaaaaaaagtttatctacttgctcaaggtggaacagcagtcggtacaggtattaactcaaaaataggctttgatataaaatttgctgaaaaagttgcagagtttactcaacaaccatttaagactgctcctaataaatttgaaagtttagccgcacatgatgcattagtagagttttcaggaactcttaatactatatcagttagcttaatgaaaatagcaaatgatataagactcctcggctccggtccaagatgcggtcttggtgaactacatttaccagaaaacgaaccgggctcttctattatgccaggtaaagtaaaccctacacaagttgaagcattaacaatggtgtgcactcaggtgatgggtaatcatgtaactgtgactattgccggctcaaatgggcatcttgaacttaacgtatttaaaccagtaataatatacaatatcctacaatctatagaactattatctgatagcgtaaatagttttgttacacactgtgttaaaggattagagccaaatatagaacgcattaatgctttacgtgataaatctctaatgcttgttacagtgcttaatccacatataggctatgataatgctgcaaaaattgctaaagaagcatataagtatgggatcactttaaaagaagcagctaaaaaactcaattttttatcagaagaagaatttgataaaatagttatacctgaaaaaatgatttcttaa

SEQ ID NO: 115545 - protein, 461 aa, Rickettsia typhi
MKNYRIESDSFGEIQIEEKFYWGAQTQRSLNNFKISKQKMPKILIHALAILKKCAAQVNYEFGDLEYKIATSIDKAIDRILAGEFEDNFPLVVWQTGSGTQTNMNMNEVIASIANEELTGKKGGKSPVHPNDHVNKGQSSNDSFPTAMHIATVLATKQQLIPALNNLLTYLQDKSKDWDKIIKIGRTHLQDATPLTLKQEFSGYITQIEYALERIEDALKKVYLLAQGGTAVGTGINSKIGFDIKFAEKVAEFTQQPFKTAPNKFESLAAHDALVEFSGTLNTISVSLMKIANDIRLLGSGPRCGLGELHLPENEPGSSIMPGKVNPTQVEALTMVCTQVMGNHVTVTIAGSNGHLELNVFKPVIIYNILQSIELLSDSVNSFVTHCVKGLEPNIERINALRDKSLMLVTVLNPHIGYDNAAKIAKEAYKYGITLKEAAKKLNFLSEEEFDKIVIPEKMIS

SEQ ID NO: 115546 - DNA, 1404 bp, Salmonella typhimurium; identical to SEQ ID NO: 45290
  CDS (1)..(1404): transl_table=11

SEQ ID NO: 115547 - protein, 467 aa, Salmonella typhimurium; identical to SEQ ID NO: 45291

SEQ ID NO: 115548 - DNA, 1404 bp, Shigella flexneri
  CDS (1)..(1404): transl_table=11
atgaatacagtacgcagcgaaaaagattcgatgggggcgattgatgtcccggcagataagctgtggggcgcacaaactcaacgctcgctggagcatttccgcatttcgacggagaaaatgcccacctcactgattcatgcgctggcgctaaccaagcgcgcagcggcaaaagttaatgaagatttagacttgttgtctgaagagaaagcgagcgccattcggcaggcggcggatgaagtactggcaggacagcatgacgacgaattcccgctggctatctggcagaccggctccggcacgcaaagtaacatgaacatgaacgaagtgctggctaaccgggccagtgaattactcggcggtgtgcgcgggatggaacgtaaagttcaccctaacgacgacgtgaacaaaagccaaagttccaacgatgtctttccgacggcgatgcacgttgcggcgctgctggcactgcgcaagcaactcattccgcagcttaaaaccctgacacagacgctgagtgaaaaatcgcgtgcatttgccgatatcgtcaaaatcggtcgaacccacttgcaggacgccacgccgctaacactagggcaggagatttccggctgggtagcgatgctcgagcataatctcaaacatatcgaatacagcctgcctcacgtagcggaactggctcttggcggtacagcggtgggtactggactaaatacccatccggagtatgcgcgtcgcgtagcagatgaactggcagtcattacctgtgcaccgtttgttaccgcgccgaacaaatttgaagcgcttgcgacctgtgatgccctggttcaggcgcacggcgcgttgaaagggttggctgcgtcactgatgaaaatcgccaatgatgtccgctggctggcctctggcccgcgctgcggaattggtgaaatctcaatcccggaaaatgagccgggcagctcaatcatgccggggaaagtgaacccaacccagtgtgaagcattaaccatgctctgctgtcaggtaatggggaacgacgtggcgatcaacatgggtggcgcttccggtaactttgaactgaacgtcttccgtccgatggtgatccataatttcctgcaatcggtgcgcttgctggcagatggcatggaaagttttaacaaacactgcgcagtgggtattgaaccgaatcgtgagcgaatcaatcaattactcaatgaatcgctgatgctggtgactgcgcttaacacccacattggttatgacaaagccgcggagatcgccaaaaaagcgcataaagaagggctgaccttaaaagctgcggcccttgcgctggggtatcttagcgaagccgagtttgacagctgggtacggccagaacagatggtcggcagtatgaaagccgggcgttaa

SEQ ID NO: 115549 - protein, 467 aa, Shigella flexneri
MNTVRSEKDSMGAIDVPADKLWGAQTQRSLEHFRISTEKMPTSLIHALALTKRAAAKVNEDLDLLSEEKASAIRQAADEVLAGQHDDEFPLAIWQTGSGTQSNMNMNEVLANRASELLGGVRGMERKVHPNDDVNKSQSSNDVFPTAMHVAALLALRKQLIPQLKTLTQTLSEKSRAFADIVKIGRTHLQDATPLTLGQEISGWVAMLEHNLKHIEYSLPHVAELALGGTAVGTGLNTHPEYARRVADELAVITCAPFVTAPNKFEALATCDALVQAHGALKGLAASLMKIANDVRWLASGPRCGIGEISIPENEPGSSIMPGKVNPTQCEALTMLCCQVMGNDVAINMGGASGNFELNVFRPMVIHNFLQSVRLLADGMESFNKHCAVGIEPNRERINQLLNESLMLVTALNTHIGYDKAAEIAKKAHKEGLTLKAAALALGYLSEAEFDSWVRPEQMVGSMKAGR

SEQ ID NO: 115550 - DNA, 1386 bp, Staphylococcus aureus
  CDS (1)..(1386): transl_table=11
atgtcagtaagaattgaacatgatacttttggagaaatagaagtacctgcagataaatattggggtgctcaaacagaaagaagtaaacgcaatttcccagttggtaaagagcgtatgccaatcgaagtagtttatggttttgcacaactaaagcgtgcagcagcattagctaattttgatttaggaaaattaagcgaggcaaagaaagatgccattgtatacgcatgtgatcaaattttatcaggtgaattagatgaacacttcccactagttgtatggcaaacaggaagcggtacacaaagtaatatgaatgtgaacgaagtagtaagttatgttgctaatatgtatttaaaagatcatcaaattgatgaaagtatccacccaaatgatgatgtaaatgaatcacaaagttcgaatgatacattcccaactgctatgcacgttgcattatatcaagaggttgaaacaaaattagaacctgcattaaaacttttaagaaatactttgaaagaaaaagaagacaaatttgaatcaattattaaaattggtcgtacacatttacaagatgcaacgccgatcaaactaggacaagagattagtggctggcgttatatgcttgaccgttgcgaaataatgttatctgaatctaagaagcacattttaaatcttgccatcggtggtacggctgttggtactggtattaatgcgcatcctgaatttggtgataaggtggcacattatatttcagaaaatacgggttatccatttgtatcttctgaaaataaattccacgcacttacagcgcatgatgaagttgttcaattgcacggaacattgaaggcattagctggagatttaatgaaaattgctaatgatgtgagatggttggcttcaggtccacgagctggtttggcagaaatttccatccctgaaaatgaaccaggttcatcaattatgcctggtaaagttaatcctacacaatgtgaaatgttaacaatggttgcagtccaagtaatgggtaatgatacagttgttggcttcgcaagttcacaaggtaactttgaattgaatgtttataaaccagttattatgcataatacactacaatcaatttaccttttagctgatggtatggaaacatttaataacaattgtgcagtgggcattgagccaatcgaagagaatattgataattatttaaatcaatcattaatgttagttactgcattaaatccacatattggttatgaaaaagcagctcaaattgctaagaaagcccataaagaaggtttaactttaaaagaatctgcaattcaaactggatatgttacagaagaacaatttgaagcatggattaaaccagaagatatggtagatcctcattaa

SEQ ID NO: 115551 - protein, 461 aa, Staphylococcus aureus
MSVRIEHDTFGEIEVPADKYWGAQTERSKRNFPVGKERMPIEVVYGFAQLKRAAALANFDLGKLSEAKKDAIVYACDQILSGELDEHFPLVVWQTGSGTQSNMNVNEVVSYVANMYLKDHQIDESIHPNDDVNESQSSNDTFPTAMHVALYQEVETKLEPALKLLRNTLKEKEDKFESIIKIGRTHLQDATPIKLGQEISGWRYMLDRCEIMLSESKKHILNLAIGGTAVGTGINAHPEFGDKVAHYISENTGYPFVSSENKFHALTAHDEVVQLHGTLKALAGDLMKIANDVRWLASGPRAGLAEISIPENEPGSSIMPGKVNPTQCEMLTMVAVQVMGNDTVVGFASSQGNFELNVYKPVIMHNTLQSIYLLADGMETFNNNCAVGIEPIEENIDNYLNQSLMLVTALNPHIGYEKAAQIAKKAHKEGLTLKESAIQTGYVTEEQFEAWIKPEDMVDPH

SEQ ID NO: 115552 - DNA, 1386 bp, Staphylococcus aureus
  CDS (1)..(1386): transl_table=11
atgtcagtaagaattgaacatgatacttttggagaaatagaagtacctgcagataaatattggggtgctcaaacagaaagaagtaaacgtaatttcccagttggtaaagagcgtatgccaatcgaagtagtttatggttttgcacaactaaagcgtgcagcagcattagctaattttgatttaggaaaattaagcgaggcaaagaaagatgccattgtatacgcatgtgatcaaattttatcaggtgaattagatgaacacttcccactagttgtatggcaaacaggaagcggtacacaaagtaatatgaatgtgaacgaagtagtaagttatgttgctaatatgtatttaaaagatcatcatagtgatgaaagtatccacccaaatgatgatgtaaataaatcacaaagttcgaatgatacattcccaactgctatgcatgttgcactatatcaagaggttgaaacaaaattagaacctgcattaaaacttttaagaaatactttgaaagaaaaagaagataaatttgattcaattataaaaattggtcgtacacatttacaagatgcaacgccgatcaaactaggacaagagattagtggctggcgttatatgcttgaccgttgcgaaacaatgttatctgaatctaagaagcacattttaaatcttgccatcggtggtacagctgttggtacaggtattaatgcacatcctgagtttggtgataaagtggcacagtatatttctgaaaatacgggttatccatttgtatcttctgaaaataaattccatgcattaacagcacatgatgaagtagtacaactacacggaacattgaaggcgctagcaggagacttaatgaaaattgctaatgatgtgagatggttggcttcagggccacgagctggtttggcagaaatttctatccctgaaaatgaaccaggttcatcaattatgcctggtaaagttaatcctacacaatgtgaaatgttaacaatggttgcagtccaagtaatgggtaatgatacagttgttggcttcgcaagttcacaaggtaactttgaattgaatgtttataaaccagttattatgcataatacactacaatcaatttaccttttagctgacggaatggaaacatttaataacaattgtgcagtgggcattgaaccaatcgaagagaatattgataattatttaaatcaatcattaatgttagttactgcattaaatccacatattggttatgaaaaagctgctcaaattgctaagaaagcccataaagaaggtttaactttaaaagaatctgcaattcaaactggatatgttacagaagaacaatttgaagcatggattaaaccagaagatatggtagatcctcattaa

SEQ ID NO: 115553 - protein, 461 aa, Staphylococcus aureus
MSVRIEHDTFGEIEVPADKYWGAQTERSKRNFPVGKERMPIEVVYGFAQLKRAAALANFDLGKLSEAKKDAIVYACDQILSGELDEHFPLVVWQTGSGTQSNMNVNEVVSYVANMYLKDHHSDESIHPNDDVNKSQSSNDTFPTAMHVALYQEVETKLEPALKLLRNTLKEKEDKFDSIIKIGRTHLQDATPIKLGQEISGWRYMLDRCETMLSESKKHILNLAIGGTAVGTGINAHPEFGDKVAQYISENTGYPFVSSENKFHALTAHDEVVQLHGTLKALAGDLMKIANDVRWLASGPRAGLAEISIPENEPGSSIMPGKVNPTQCEMLTMVAVQVMGNDTVVGFASSQGNFELNVYKPVIMHNTLQSIYLLADGMETFNNNCAVGIEPIEENIDNYLNQSLMLVTALNPHIGYEKAAQIAKKAHKEGLTLKESAIQTGYVTEEQFEAWIKPEDMVDPH

SEQ ID NO: 115554 - DNA, 1386 bp, Staphylococcus aureus
  CDS (1)..(1386): transl_table=11
atgtcagtaagaattgaacatgatacttttggagaaatagaagtacctgcagataaatattggggtgctcaaacagaaagaagtaaacgcaatttcccagttggtaaagagcgtatgccaatcgaagtagtttatggttttgcacaactaaagcgtgcagcagcattagctaattttgatttaggaaaattaagcgaggcaaagaaagatgccattgtatacgcatgtgatcaaattttatcaggtgaattagatgaacacttcccactagttgtatggcaaacaggaagcggtacacaaagtaatatgaatgtgaacgaagtagtaagttatgttgctaatatgtatttaaaagatcatcaaattgatgaaagtatccacccaaatgatgatgtaaataaatcacaaagttcgaatgatacattcccaactgctatgcacgttgcattatatcaagaggttgaaacaaaattagaacctgcattaaaacttttaagaaatactttgaaagaaaaagaagacaaatttgattcaattattaaaattggtcgtacacatttacaagatgcaacgccgatcaaactaggacaagagattagtggctggcgttatatgcttgaccgttgcgaaataatgttatctgaatctaagaagcacattttaaatcttgccatcggtggtacggctgttggtactggtattaatgcgcatcctgaatttggtgataaagtggcacattatatttcagaaaatacgggttatccatttgtatcttctgaaaataaattccatgcattaacagcacatgatgaagtagtacaactacatggaacattgaaggcgctagcaggagacttaatgaaaattgctaatgatgtgagatggttggcttcagggccacgagctggtttggcagaaatttctatccctgaaaatgaaccaggttcatcaattatgcctggtaaagttaatcctacacaatgtgaaatgttaacaatggttgcagtccaagtaatgggtaatgatacagttgttggcttcgcaagttcacaaggtaactttgaattgaatgtttataaaccagttattatgcataatacactacaatcaatttaccttttagctgatggtatggaaacatttaataacaattgcgcagtgggcattgaaccaatcgaagagaatattgataattatttaaatcaatcattaatgttagttactgcattaaatccacatattggttatgaaaaagcagctcaaattgctaagaaagcccataaagaaggtttaactttaaaagaatctgcaattcaaactggatatgttacagaagaacaatttgaagcatggattaaaccagaagatatggtagatcctcattaa

SEQ ID NO: 115555 - protein, 461 aa, Staphylococcus aureus
MSVRIEHDTFGEIEVPADKYWGAQTERSKRNFPVGKERMPIEVVYGFAQLKRAAALANFDLGKLSEAKKDAIVYACDQILSGELDEHFPLVVWQTGSGTQSNMNVNEVVSYVANMYLKDHQIDESIHPNDDVNKSQSSNDTFPTAMHVALYQEVETKLEPALKLLRNTLKEKEDKFDSIIKIGRTHLQDATPIKLGQEISGWRYMLDRCEIMLSESKKHILNLAIGGTAVGTGINAHPEFGDKVAHYISENTGYPFVSSENKFHALTAHDEVVQLHGTLKALAGDLMKIANDVRWLASGPRAGLAEISIPENEPGSSIMPGKVNPTQCEMLTMVAVQVMGNDTVVGFASSQGNFELNVYKPVIMHNTLQSIYLLADGMETFNNNCAVGIEPIEENIDNYLNQSLMLVTALNPHIGYEKAAQIAKKAHKEGLTLKESAIQTGYVTEEQFEAWIKPEDMVDPH

SEQ ID NO: 115556 - DNA, 1386 bp, Staphylococcus epidermidis
  CDS (1)..(1386): transl_table=11
atgtcagtcagaattgaacatgatacatttggagaaattgaagtaccagaagacaaatattggggtgcacagactgaaagaagtaaacgaaattttccagtcggcaaagagcatatgcctatacaagtcatttacggatttgctcaactaaaaagaggtgcagccttagcaaatcatgaattaggaaaattgagtgatgaaaaaaagaacgccatcgtttatgcttgtgatcgtattttaaatggagaactagataatcattttccacttgtgatttggcaaacaggtagtggtactcaaagcaatatgaatgtaaatgaagtcgtaagctatgtagctaatgaataccttaagaaacatggaagtaaggaaactatccatccaaatgatgatgtaaataaatctcaaagttcaaatgatacatttcctacagctatgcatgtcgcattgttccatgaagttgaaactaagttagagccagcacttaaccatttacgtcaaacttttaaagaaaaagaagaccaatatcaatcaatcattaaaattggacgcacacatttgcaagatgcaacgcctattaaactaggtcaagagataagtggttggcgctatatgttagaaaaatgtgagcaattactatcagaatcaaaaaagcatattttaaatttagcaattggtggaactgcagtaggaacgggaattaatgctcatccagaatttggtcataaagtagccaaatatatttcccaaaacacagggtatgctttcgtatcatctgaaaacaaatttcatgctttaacttctcatgatgaaattgtacaattacatggaacattaaaagcgctagcgacagatttaatgaaaattgcaaatgatattagatggctagcctctggaccgcgtgcaggtcttgctgagatttcaattccagaaaatgaacctggatcttctattatgccaggaaaagtaaatccaacacaatgtgaaatgttaactatggtagcagtacaagtcatggggaatgatacgacggtaggtatcgcaagttctcaaggtaattttgaactaaatgtatttaaaccggtaattatgcataacactttacaatctatttacttattagcagatggaatgaatacctttaataaaaactgtgcaattggtattcaaccgatagaagaaaatattaataattatttaaatcaatcattaatgctagttacggcactgaaccctcatattggatatgagaaagcagctcaaatagctaaaaaggcacacaaagaaggacttactttaaaagaatctgcaatagaaagtggatatgtaactgaatcacaatttgaagagtggataaaaccagaagatatggtagacccacattga

SEQ ID NO: 115557 - protein, 461 aa, Staphylococcus epidermidis
MSVRIEHDTFGEIEVPEDKYWGAQTERSKRNFPVGKEHMPIQVIYGFAQLKRGAALANHELGKLSDEKKNAIVYACDRILNGELDNHFPLVIWQTGSGTQSNMNVNEVVSYVANEYLKKHGSKETIHPNDDVNKSQSSNDTFPTAMHVALFHEVETKLEPALNHLRQTFKEKEDQYQSIIKIGRTHLQDATPIKLGQEISGWRYMLEKCEQLLSESKKHILNLAIGGTAVGTGINAHPEFGHKVAKYISQNTGYAFVSSENKFHALTSHDEIVQLHGTLKALATDLMKIANDIRWLASGPRAGLAEISIPENEPGSSIMPGKVNPTQCEMLTMVAVQVMGNDTTVGIASSQGNFELNVFKPVIMHNTLQSIYLLADGMNTFNKNCAIGIQPIEENINNYLNQSLMLVTALNPHIGYEKAAQIAKKAHKEGLTLKESAIESGYVTESQFEEWIKPEDMVDPH

SEQ ID NO: 115558 - DNA, 1404 bp, Streptomyces avermitilis; identical to SEQ ID NO: 45292
  CDS (1)..(1404): transl_table=11

SEQ ID NO: 115559 - protein, 467 aa, Streptomyces avermitilis; identical to SEQ ID NO: 45293

SEQ ID NO: 115560 - DNA, 1386 bp, Streptomyces coelicolor; identical to SEQ ID NO: 45294
  CDS (1)..(1386): transl_table=11

SEQ ID NO: 115561 - protein, 461 aa, Streptomyces coelicolor; identical to SEQ ID NO: 45295

SEQ ID NO: 115562 - DNA, 1395 bp, Wigglesworthia glossinidia brevipalpis
  CDS (1)..(1395): transl_table=11
atgttaattaatagaatagaaaaagatactattggcgaagttgaattgccaaaaaaatgtttgtggggatcccaaactcaaagatctatttataattttaatatctctacagagaaaatgccttatgagcttattcacgctttagttcaaataaaacttgtagcagcaaaagttaataaagatctaaaattattagaagaaaaaaaagctgatgctataattaaagcttctgaagagatattatctggaaaatacaaagatagttttcctttggtaatttggcaaactggatctggaactcaaacaaacatgaacgtaaatgaagtaatagctaatattgcaataaaattattaggaggaaagtatggagactattcaataatacatcctaacgatcatgtaaataaaagtcaaagttctaatgatgtatttcctacagcaatgcatatatctgcagttttgtctttaaagaaaaatttattaccgaatttaattaaattaaaaaaatcattttatgataaatctatattatttaaagatattattaaaattggaagaactcacctgcaagatgcaactccattgactttaggccaagaagtttcttcttggtattgtatgttgaaaaaaaacattaaatatataaaaaatagcatactttgtatttctgaaatagctttaggtggtacagccgtaggaactgggttaaatgctcacgaaaaatattcattaaaagcatctaaattattgtcagaaataaataaacataattttattagttctacaaataaatttgaatctttaagtacatgtgatgcaatagtaaaagttcatagcactttaaaaaatttatctatttcaattatgaaaatatcaaatgatatacgttggttatcttctggcccaagatgtggaataggagaattaattattccagaaaatgaaccaggaagttctataatgcccggtaaagttaatccaactcaatgcgaatctatatctatgatatgctgtcaagtaataggaaacgactccgccataggaataggaggattgtctggaaattttcaattgaatgtatttcgacctatgattatttataattttttacaatccgtaagaatattatctgatggaataaaaagctttaacaaaaaatgtgttattggtattaaaccaaatattaaaagaataaaaaaatttcttaaagaatctttgatgctagttacatcattaactcctcatataggatatgataaatctgcaaaaatagcaaaattagctcacaatgaaaatattactttaaaagaagcttgtttgaaattgaattatatttcagagagtcaatttgatattttagttcgtccagaaaacatgattggaaataaaaattaa

SEQ ID NO: 115563 - protein, 464 aa, Wigglesworthia glossinidia brevipalpis
MLINRIEKDTIGEVELPKKCLWGSQTQRSIYNFNISTEKMPYELIHALVQIKLVAAKVNKDLKLLEEKKADAIIKASEEILSGKYKDSFPLVIWQTGSGTQTNMNVNEVIANIAIKLLGGKYGDYSIIHPNDHVNKSQSSNDVFPTAMHISAVLSLKKNLLPNLIKLKKSFYDKSILFKDIIKIGRTHLQDATPLTLGQEVSSWYCMLKKNIKYIKNSILCISEIALGGTAVGTGLNAHEKYSLKASKLLSEINKHNFISSTNKFESLSTCDAIVKVHSTLKNLSISIMKISNDIRWLSSGPRCGIGELIIPENEPGSSIMPGKVNPTQCESISMICCQVIGNDSAIGIGGLSGNFQLNVFRPMIIYNFLQSVRILSDGIKSFNKKCVIGIKPNIKRIKKFLKESLMLVTSLTPHIGYDKSAKIAKLAHNENITLKEACLKLNYISESQFDILVRPENMIGNKN

SEQ ID NO: 115564 - DNA, 1422 bp, Xylella fastidiosa
  CDS (1)..(1422): transl_table=11
gtggagatgcagatgagcaacagtgatcgttacagaattgaacacgacagtatgggtgatctacgggtgccgatcgatgcgttgtggggtgcgcagacgcaacgtgctatcgagaactttccgatttccgggcggtcaatgcctcagggatttatccacgcattggggtttatcaaggcggctgcggcgaaggttaacgctgagctggggttgttaccaaagccaatggccaaggagattgaggccgctgcattggatgtcgctgcgggccgttatgatgcggattttccagtcgatatttaccagactggctcaggaacctcgtcgaatatgaacgctaatgaggtgattgcgacgctggccatgcgtgccaccaaggagcctatccaccccaacgaccatgtcaaccttggccaaagttctaatgatgtggttccaacagcgattcggatttccgcaacgttggcggttcagggacgattattaccggcgctcaagcatttacggaaaatgattaacaagcgtgcccgtggtttgggcagtgtggtgaagaccggccgtacccacctgatggatgcgatgccgctgacgttcgctcaagaattcggtgcctggtcggcacaaattgtctctgcggaggcgcgcttgaatgacaccctgaaacggttgcatcggctgccattgggagggacagcaattggtaccggtatcaatacggatccacatttcggccgcaatgcggtgaaggtactgtcagcattaacagggattcactttgagagtgcgaacaataagttcgagggattggcagcgcaagatgatttggttgagttatccggccagttcaatgcgttagcagtggcgttgatgaagattgctaatgatctacgctggatgaacgctggaccacttgctggcttgggagagattgagttgcccgcgttgcagccgggaagttcgatcatgccaggtaaggtaaatccggtgattccggaagctgtggtgatggtcgcctcgcaagtgattggccatcacactgcagtgaccgtggctgggcagagtggcaattttcagttgaatgtgacgttaccgctgattgcttacaacctattggagtctgcgacgttgcttggaaatgtggtgatgctgttggctgataaagtcatcgttggtctgaaggtgcgtcaggatcgagtgcaggaggtgctggagcggaatccgattttggtgacagcgttgaatccgatcattggctatgagaaagctgcggtgattgctaagcgtgcttataaggagcaccggccagtgcttgaggtcgcctgcgaggagagcaacctaaaccctgtggagttggcgcgcttactggatccgactgcgttgactgagggtgggatttatgtcgtcgggggaggtggtggataa

SEQ ID NO: 115565 - protein, 473 aa, Xylella fastidiosa
MEMQMSNSDRYRIEHDSMGDLRVPIDALWGAQTQRAIENFPISGRSMPQGFIHALGFIKAAAAKVNAELGLLPKPMAKEIEAAALDVAAGRYDADFPVDIYQTGSGTSSNMNANEVIATLAMRATKEPIHPNDHVNLGQSSNDVVPTAIRISATLAVQGRLLPALKHLRKMINKRARGLGSVVKTGRTHLMDAMPLTFAQEFGAWSAQIVSAEARLNDTLKRLHRLPLGGTAIGTGINTDPHFGRNAVKVLSALTGIHFESANNKFEGLAAQDDLVELSGQFNALAVALMKIANDLRWMNAGPLAGLGEIELPALQPGSSIMPGKVNPVIPEAVVMVASQVIGHHTAVTVAGQSGNFQLNVTLPLIAYNLLESATLLGNVVMLLADKVIVGLKVRQDRVQEVLERNPILVTALNPIIGYEKAAVIAKRAYKEHRPVLEVACEESNLNPVELARLLDPTALTEGGIYVVGGGGG

SEQ ID NO: 115566 - DNA, 1422 bp, Xylella fastidiosa
  CDS (1)..(1422): transl_table=11
gtggagatgcagatgagcaacagtgatcgttacagaattgaacacgacagtatgggtgatctacgggtgccgattgatgcgttgtggggcgcgcagacgcaacgtgctatcgagaactttccgatttccgggcggtcaatgcctcagggatttatccacgcattggggtttatcaaggcggctgcggcgaaggttaacgctgagctggggctgttaccaaagtcaatggccaaggagattgaggccgctgcattggatgtcgctgcgggccgttatgatgcggaatttccagtcgatatttaccagactggctcaggaacctcgtcgaatatgaacgctaatgaggtgattgcgacgctggccatgcgtgccaccaaggggcctatccaccccaacgaccatgtcaaccttggccaaagttctaatgatgtggttccaacagcgattcggatttccgcaacgttggcggttcagggacgattattaccagcgctcaagcatttacgcaaaatgattaacaagcgtgcccgtggtttgggcagtgtggtgaagaccggccgtacccacctgatggatgcgatgccgctgacgttcgctcaagaattcggtgcctggtcggcacaaattgtctctgcagaggcgcgcttgaatgacaccctgaaacggttgcatcggctgccattgggagggacagcaattggtaccggcatcaatacggatccacatttcggccgtaatgcggtgaaggtactgtcagcattgacagggattcactttgagagtgcgaacaataagttcgaaggattggcagcgcaagatgatttggttgagttatccggccagttcaatacgttagcagtggcgttgatgaagattgctaatgatctacgctggatgaacgctggaccgcttgctggcttgggagagattgagttgcccgcgttgcagccgggaagttcgatcatgccaggtaaggtaaacccggtgattccggaagcagtggtgatggtcgcctcgcaagtgattggccatcacactgcagtgaccgtggctgggcagagtggcaattttcagttgaatgtgacgttaccgctgattgcttacaacctattggagtctgcgacgttgcttggaaatgtggtgatgctgttggctgataaagtcatcgttggcctgaaggtgcgtcaggatcgagtgcaggaggtgctggagcggaatccgattttggtgacagcgttgaatccgatcattggctatgagaaagctgcggtgattgctaagcgtgcttataaggagcaccggccagtgcttgaggtcgcctgcgaggagagcaacctaaaccctgtggagttggcgcgcttacttgatccggctgcgttgactgagggtgggattcatgtcgtcgggggaggtggtggataa

SEQ ID NO: 115567 - protein, 473 aa, Xylella fastidiosa
MEMQMSNSDRYRIEHDSMGDLRVPIDALWGAQTQRAIENFPISGRSMPQGFIHALGFIKAAAAKVNAELGLLPKSMAKEIEAAALDVAAGRYDAEFPVDIYQTGSGTSSNMNANEVIATLAMRATKGPIHPNDHVNLGQSSNDVVPTAIRISATLAVQGRLLPALKHLRKMINKRARGLGSVVKTGRTHLMDAMPLTFAQEFGAWSAQIVSAEARLNDTLKRLHRLPLGGTAIGTGINTDPHFGRNAVKVLSALTGIHFESANNKFEGLAAQDDLVELSGQFNTLAVALMKIANDLRWMNAGPLAGLGEIELPALQPGSSIMPGKVNPVIPEAVVMVASQVIGHHTAVTVAGQSGNFQLNVTLPLIAYNLLESATLLGNVVMLLADKVIVGLKVRQDRVQEVLERNPILVTALNPIIGYEKAAVIAKRAYKEHRPVLEVACEESNLNPVELARLLDPAALTEGGIHVVGGGGG

SEQ ID NO: 115568 - DNA, 1398 bp, Yersinia pestis
  CDS (1)..(1398): transl_table=11
atggcaactacccgcagtgaaaaggattctatggggtctatcgatgtacctgcaaaccaattatggggggcgcaaactcaacgttcattggcgcattttcgaatttcacaagaaaaaatgccaacagagctaattcatgcattggctctgaccaaacgagcggcagctcaagtgaatatggacctaggcttgctgccagccgagcgtgcaaaagcgattatgcgggccgcagatgaagttctggatggcgctcatccaaccgagttccctctcgccatctggcaaaccgggtcgggtactcagacgaatatgaatatgaatgaggtactggcaaaccgtgcgagtgagttgctcgggggggcgcgggggaataaccgtttggttcatcccaatgatgatgtcaataaaagccaaagttcaaatgatgtcttcccaacggcgatgcatgtcgctgcagtgatgggggtgagtgaacatcttcttcctgaactgaaggtgttacagaaaaccttggccgacaaagcagaagcttatcgcgatattgtaaaaattggccgtacacatttacaagatgcgacccctttaacgttggggcaggaaatttccgggtgggcggcaatgttatctcacagtgtgcggcatattgaggcgacccttcctcacctgtgtgaattagcgcttgggggaacagcggtggggactggcctcaatacgcatcctgaatatgctgtacgagtagctaatgaaatagccacactgacacgccaaccgtttatcactgccccgaataaatttgaatcattgggaacctgcgatgcattggttcatggtcacggtgcgctaaaaggcttagcggcatccctgatgaaaattgccaatgatgtccgttggttatcatcaggccctcgctgtggtattggcgaaatatctattccggaaaatgagccaggcagttctatcatgccaggcaaagtgaatccaacacagtgtgaagcgatgaccatgctatgtgctcaagttatgggtaatgatgtggctatcaatatcggtggggcgtccggcaactttgaattaaacgtgttccgtccattggtcatccataacttcctgcaatctgttcgtttgttggctgatggaatgcgtggttttaatgagcactgcgctttgggaattgaacccaaccgcgaccgtattacgcaattgctcaatgaatcgctgatgttagttaccgcgctcaatacccatattggctacgataaagcagctgaaatcgccaaaaaggcgcataaagaggggctaacactgaaagcagcagctatggcattgggttatcttaccgatgcagagtttgatgaatgggttcgaccggaagatatggtcggcagtatgaagaaatag

SEQ ID NO: 115569 - protein, 465 aa, Yersinia pestis
MATTRSEKDSMGSIDVPANQLWGAQTQRSLAHFRISQEKMPTELIHALALTKRAAAQVNMDLGLLPAERAKAIMRAADEVLDGAHPTEFPLAIWQTGSGTQTNMNMNEVLANRASELLGGARGNNRLVHPNDDVNKSQSSNDVFPTAMHVAAVMGVSEHLLPELKVLQKTLADKAEAYRDIVKIGRTHLQDATPLTLGQEISGWAAMLSHSVRHIEATLPHLCELALGGTAVGTGLNTHPEYAVRVANEIATLTRQPFITAPNKFESLGTCDALVHGHGALKGLAASLMKIANDVRWLSSGPRCGIGEISIPENEPGSSIMPGKVNPTQCEAMTMLCAQVMGNDVAINIGGASGNFELNVFRPLVIHNFLQSVRLLADGMRGFNEHCALGIEPNRDRITQLLNESLMLVTALNTHIGYDKAAEIAKKAHKEGLTLKAAAMALGYLTDAEFDEWVRPEDMVGSMKK

SEQ ID NO: 115570 - DNA, 1485 bp, Rhizopus oryzae; identical to SEQ ID NO: 45296
  CDS (1)..(1485)

SEQ ID NO: 115571 - protein, 494 aa, Rhizopus oryzae [sequence omitted]

SEQ ID NO: 115572 - DNA, 1449 bp, Schizosaccharomyces pombe; identical to SEQ ID NO: 45298
  CDS (1)..(1449)

SEQ ID NO: 115573 - protein, 482 aa, Schizosaccharomyces pombe; identical to SEQ ID NO: 45299

SEQ ID NO: 115574 - DNA, 2489 bp, Saccharomyces cerevisiae; identical to SEQ ID NO: 45300
  CDS (830)..(2296)

SEQ ID NO: 115575 - protein, 488 aa, Saccharomyces cerevisiae; identical to SEQ ID NO: 45301

SEQ ID NO: 115576 - DNA, 1488 bp, Glycine max; identical to SEQ ID NO: 45302
  CDS (1)..(1488)

SEQ ID NO: 115577 - protein, 495 aa, Glycine max; identical to SEQ ID NO: 45303

SEQ ID NO: 115578 - DNA, 1485 bp, Hordeum vulgare; identical to SEQ ID NO: 45304
  CDS (1)..(1485)

SEQ ID NO: 115579 - protein, 494 aa, Hordeum vulgare; identical to SEQ ID NO: 45305

SEQ ID NO: 115580 - DNA, 1485 bp, Triticum aestivum; identical to SEQ ID NO: 45306
  CDS (1)..(1485)

SEQ ID NO: 115581 - protein, 494 aa, Triticum aestivum; identical to SEQ ID NO: 45307

SEQ ID NO: 115582 - DNA, 1497 bp, Zea mays; identical to SEQ ID NO: 45308
  CDS (1)..(1497)

SEQ ID NO: 115583 - protein, 498 aa, Zea mays; identical to SEQ ID NO: 45309

SEQ ID NO: 115584 - DNA, 23 bp, Artificial sequence
  primer
atgaatacagtacgcagcgaaaa

SEQ ID NO: 115585 - DNA, 23 bp, Artificial sequence
  primer
ttaacgcccggctttcatactgc

SEQ ID NO: 115586 - protein, 470 aa, Artificial sequence
  consensus sequence
  Variant (2)..(2): Xaa in position 2 is any amino acid
  Variant (4)..(4): Xaa in position 4 is any amino acid
  Variant (6)..(7): Xaa in position 6 to 7 is any amino acid
  Variant (9)..(11): Xaa in position 9 to 11 is any amino acid
  Variant (14)..(14): Xaa in position 14 is any amino acid
  Variant (15)..(17): Xaa in position 15 to 17 is any or no amino acid
  Variant (23)..(23): Xaa in position 23 is any amino acid
  Variant (25)..(27): Xaa in position 25 to 27 is any amino acid
  Variant (30)..(30): Xaa in position 30 is any amino acid
  Variant (32)..(41): Xaa in position 32 to 41 is any amino acid
  Variant (42)..(44): Xaa in position 42 to 44 is any or no amino acid
  Variant (46)..(49): Xaa in position 46 to 49 is any amino acid
  Variant (51)..(52): Xaa in position 51 to 52 is any amino acid
  Variant (55)..(56): Xaa in position 55 to 56 is any amino acid
  Variant (58)..(60): Xaa in position 58 to 60 is any amino acid
  Variant (62)..(62): Xaa in position 62 is any amino acid
  Variant (64)..(70): Xaa in position 64 to 70 is any amino acid
  Variant (72)..(73): Xaa in position 72 to 73 is any amino acid
  Variant (75)..(80): Xaa in position 75 to 80 is any amino acid
  Variant (82)..(86): Xaa in position 82 to 86 is any amino acid
  Variant (87)..(89): Xaa in position 87 to 89 is any or no amino acid
  Variant (92)..(95): Xaa in position 92 to 95 is any amino acid
  Variant (102)..(103): Xaa in position 102 to 103 is any amino acid
  Variant (107)..(107): Xaa in position 107 is any amino acid
  Variant (111)..(114): Xaa in position 111 to 114 is any amino acid
  Variant (116)..(118): Xaa in position 116 to 118 is any amino acid
  Variant (119)..(119): Xaa in position 119 is any or no amino acid
  Variant (121)..(123): Xaa in position 121 to 123 is any amino acid
  Variant (124)..(130): Xaa in position 124 to 130 is any or no amino acid
  Variant (135)..(135): Xaa in position 135 is any amino acid
  Variant (138)..(139): Xaa in position 138 to 139 is any amino acid
  Variant (145)..(145): Xaa in position 145 is any amino acid
  Variant (150)..(150): Xaa in position 150 is any amino acid
  Variant (152)..(152): Xaa in position 152 is any amino acid
  Variant (154)..(160): Xaa in position 154 to 160 is any amino acid
  Variant (161)..(161): Xaa in position 161 is any or no amino acid
  Variant (163)..(163): Xaa in position 163 is any amino acid
  Variant (165)..(168): Xaa in position 165 to 168 is any amino acid
  Variant (170)..(175): Xaa in position 170 to 175 is any amino acid
  Variant (177)..(184): Xaa in position 177 to 184 is any amino acid
  Variant (185)..(186): Xaa in position 185 to 186 is any or no amino acid
  Variant (188)..(188): Xaa in position 188 is any amino acid
  Variant (193)..(194): Xaa in position 193 to 194 is any amino acid
  Variant (197)..(197): Xaa in position 197 is any amino acid
  Variant (199)..(199): Xaa in position 199 is any amino acid
  Variant (205)..(228): Xaa in position 205 to 228 is any amino acid
  Variant (229)..(229): Xaa in position 229 is any or no amino acid
  Variant (231)..(232): Xaa in position 231 to 232 is any amino acid
  Variant (241)..(241): Xaa in position 241 is any amino acid
  Variant (243)..(258): Xaa in position 243 to 258 is any amino acid
  Variant (260)..(262): Xaa in position 260 to 262 is any amino acid
  Variant (263)..(263): Xaa in position 263 is any or no amino acid
  Variant (265)..(268): Xaa in position 265 to 268 is any amino acid
  Variant (270)..(270): Xaa in position 270 is any amino acid
  Variant (272)..(277): Xaa in position 272 to 277 is any amino acid
  Variant (279)..(280): Xaa in position 279 to 280 is any amino acid
  Variant (282)..(284): Xaa in position 282 to 284 is any amino acid
  Variant (286)..(290): Xaa in position 286 to 290 is any amino acid
  Variant (292)..(293): Xaa in position 292 to 293 is any amino acid
  Variant (295)..(295): Xaa in position 295 is any amino acid
  Variant (301)..(301): Xaa in position 301 is any amino acid
  Variant (303)..(305): Xaa in position 303 to 305 is any amino acid
  Variant (310)..(310): Xaa in position 310 is any amino acid
  Variant (312)..(313): Xaa in position 312 to 313 is any amino acid
  Variant (315)..(317): Xaa in position 315 to 317 is any amino acid
  Variant (319)..(321): Xaa in position 319 to 321 is any amino acid
  Variant (334)..(336): Xaa in position 334 to 336 is any amino acid
  Variant (339)..(340): Xaa in position 339 to 340 is any amino acid
  Variant (342)..(344): Xaa in position 342 to 344 is any amino acid
  Variant (347)..(347): Xaa in position 347 is any amino acid
  Variant (350)..(359): Xaa in position 350 to 359 is any amino acid
  Variant (361)..(363): Xaa in position 361 to 363 is any amino acid
  Variant (367)..(368): Xaa in position 367 to 368 is any amino acid
  Variant (370)..(373): Xaa in position 370 to 373 is any amino acid
  Variant (375)..(375): Xaa in position 375 is any amino acid
  Variant (377)..(377): Xaa in position 377 is any amino acid
  Variant (379)..(380): Xaa in position 379 to 380 is any amino acid
  Variant (383)..(388): Xaa in position 383 to 388 is any amino acid
  Variant (390)..(395): Xaa in position 390 to 395 is any amino acid
  Variant (397)..(409): Xaa in position 397 to 409 is any amino acid
  Variant (410)..(410): Xaa in position 410 is any or no amino acid
  Variant (412)..(413): Xaa in position 412 to 413 is any amino acid
  Variant (419)..(421): Xaa in position 419 to 421 is any amino acid
  Variant (425)..(426): Xaa in position 425 to 426 is any amino acid
  Variant (429)..(430): Xaa in position 429 to 430 is any amino acid
  Variant (433)..(433): Xaa in position 433 is any amino acid
  Variant (435)..(460): Xaa in position 435 to 460 is any amino acid
  Variant (461)..(466): Xaa in position 461 to 466 is any or no amino acid
  Variant (468)..(469): Xaa in position 468 to 469 is any amino acid
RXEXDXXGXXXVPXXXXWGAQTXRXXXNFXIXXXXXXXXXXXXXAXXXXKXXAAXXNXXXGXLXXXXXXXIXXAXXXXXXGXXXXXXXXFPXXXXQTGSGTXXNMNXNEVXXXXAXXXXGXXXXXXXXXXHPNDXVNXXQSSNDXFPTAXHXAXXXXXXXXLXPXXXXLXXXXXXKXXXXXXXXXXKXGRTHXXDAXPXTLGQEXXXXXXXXXXXXXXXXXXXXXXXXXLXXGGTAVGTGXNXXXXXXXXXXXXXXXXTXXXXFXXXXNXFXXXXXXDXXVXXXGXXXXXAXXLXKIANDXRXXXSGPRXGXXEXXXPXXXPGSSIMPGKVNPXXXEAXXMXXXQVXGNXXXXXXXXXXGXXXLNVXXPXXXXNXLXSXXLLXXXXXXFXXXXXXGXXXXXXXXXXXXXXSXXLVTALXXXIGYXXAAXXAKXAXXXXXXXXXXXXXXXXXXXXXXXXXXXXXXXXPXXM

SEQ ID NO: 115587 - protein, 58 aa, Artificial sequence
  protein pattern
  Variant (2)..(4): Xaa in position 2 to 4 is any amino acid
  Variant (5)..(5): Xaa in position 5 is any or no amino acid
  Variant (8)..(8): Xaa in position 8 is Ala, Cys, Gly, Ser or Val
  Variant (11)..(11): Xaa in position 11 is Ile, Leu, Met or Val
  Variant (13)..(13): Xaa in position 13 is any amino acid
  Variant (14)..(14): Xaa in position 14 is Leu or Met
  Variant (15)..(15): Xaa in position 15 is Ala, Gly, Asn or Ser
  Variant (16)..(16): Xaa in position 16 is Ala, Cys or Ser
  Variant (19)..(19): Xaa in position 19 is any amino acid
  Variant (20)..(20): Xaa in position 20 is Ala, Cys, Gly, Asn, Ser or Thr
  Variant (22)..(23): Xaa in position 22 to 23 is any amino acid
  Variant (25)..(25): Xaa in position 25 is Ile, Leu or Val
  Variant (26)..(27): Xaa in position 26 to 27 is any amino acid
  Variant (28)..(28): Xaa in position 28 is Glu, Pro or Gln
  Variant (29)..(30): Xaa in position 29 to 30 is any amino acid
  Variant (31)..(31): Xaa in position 31 is Glu or Gln
  Variant (41)..(41): Xaa in position 41 is Ile or Val
  Variant (44)..(44): Xaa in position 44 is Ser, Thr or Val
  Variant (45)..(46): Xaa in position 45 to 46 is any amino acid
  Variant (48)..(55): Xaa in position 48 to 55 is any amino acid
  Variant (56)..(56): Xaa in position 56 is Ile or Val
  Variant (57)..(57): Xaa in position 57 is any amino acid
  Variant (58)..(58): Xaa in position 58 is Ala or Gly
AXXXXKIXNDXRXXXXGPXXGXXEXXXXXXXPGSSIMPGKXNPXXXEXXXXXXXXXXX

SEQ ID NO: 115588 - protein, 26 aa, Artificial sequence
  protein pattern
  Variant (3)..(3): Xaa in position 3 is Leu or Val
  Variant (4)..(4): Xaa in position 4 is any amino acid
  Variant (5)..(5): Xaa in position 5 is Ile or Val
  Variant (6)..(6): Xaa in position 6 is Phe, Trp or Tyr
  Variant (7)..(7): Xaa in position 7 is any amino acid
  Variant (13)..(13): Xaa in position 13 is Gln or Ser
  Variant (14)..(14): Xaa in position 14 is Ala, Cys, Ser or Thr
  Variant (18)..(18): Xaa in position 18 is any amino acid
  Variant (22)..(22): Xaa in position 22 is Ile, Leu or Val
  Variant (23)..(23): Xaa in position 23 is Ala, Gly, Ser or Val
  Variant (24)..(25): Xaa in position 24 to 25 is any amino acid
FPXXXXXTGSGTXXNMNXNEVXXXXA

SEQ ID NO: 115589 - protein, 26 aa, Artificial sequence
  protein pattern
  Variant (2)..(4): Xaa in position 2 to 4 is any or no amino acid
  Variant (8)..(8): Xaa in position 8 is Asp or His
  Variant (11)..(11): Xaa in position 11 is any amino acid
  Variant (12)..(12): Xaa in position 12 is Ala, Gly or Ser
  Variant (13)..(13): Xaa in position 13 is Ala or Gln
  Variant (15)..(15): Xaa in position 15 is Ser or Thr
  Variant (18)..(19): Xaa in position 18 to 19 is any amino acid
  Variant (21)..(21): Xaa in position 21 is Ala, Ser or Thr
  Variant (22)..(22): Xaa in position 22 is Ala, Cys, Ser or Val
  Variant (23)..(24): Xaa in position 23 to 24 is any amino acid
  Variant (25)..(25): Xaa in position 25 is Ile, Leu, Met or Val
  Variant (26)..(26): Xaa in position 26 is Ala, Gly, Ser, Thr or Val
HXXXPNDXVNXXXSXNDXXPXXXXXX

SEQ ID NO: 115590 - protein, 29 aa, Artificial sequence
  protein pattern
  Variant (2)..(2): Xaa in position 2 is any amino acid
  Variant (3)..(5): Xaa in position 3 to 5 is any or no amino acid
  Variant (10)..(11): Xaa in position 10 to 11 is any amino acid
  Variant (14)..(14): Xaa in position 14 is any amino acid
  Variant (16)..(16): Xaa in position 16 is Ile, Leu, Met or Val
  Variant (18)..(18): Xaa in position 18 is Phe or Leu
  Variant (19)..(19): Xaa in position 19 is any amino acid
  Variant (22)..(23): Xaa in position 22 to 23 is any amino acid
  Variant (24)..(24): Xaa in position 24 is Ala, Cys, Gly or Thr
  Variant (25)..(25): Xaa in position 25 is Phe, Trp or Tyr
  Variant (26)..(28): Xaa in position 26 to 28 is any amino acid
  Variant (29)..(29): Xaa in position 29 is Ile, Leu, Met or Val
KXXXXGRTHXXDAXPXTXXQEXXXXXXXX

SEQ ID NO: 115591 - protein, 40 aa, Artificial sequence
  protein pattern
  Variant (2)..(2): Xaa in position 2 is any amino acid
  Variant (3)..(3): Xaa in position 3 is Phe or Leu
  Variant (4)..(4): Xaa in position 4 is Glu or Gln
  Variant (8)..(9): Xaa in position 8 to 9 is any amino acid
  Variant (11)..(11): Xaa in position 11 is Leu, Met or Val
  Variant (12)..(12): Xaa in position 12 is Ile, Leu, Met or Val
  Variant (13)..(14): Xaa in position 13 to 14 is any amino acid
  Variant (15)..(15): Xaa in position 15 is Ala, Asp, Gly or Asn
  Variant (16)..(16): Xaa in position 16 is any amino acid
  Variant (17)..(17): Xaa in position 17 is Ile or Leu
  Variant (18)..(18): Xaa in position 18 is any amino acid
  Variant (19)..(19): Xaa in position 19 is Ala, Ser or Thr
  Variant (20)..(22): Xaa in position 20 to 22 is any amino acid
  Variant (23)..(23): Xaa in position 23 is Ile, Leu, Met or Val
  Variant (24)..(29): Xaa in position 24 to 29 is any amino acid
  Variant (30)..(30): Xaa in position 30 is Phe or Leu
  Variant (31)..(34): Xaa in position 31 to 34 is any amino acid
  Variant (35)..(35): Xaa in position 35 is Ala, Ile, Leu or Val
  Variant (36)..(36): Xaa in position 36 is any amino acid
  Variant (37)..(37): Xaa in position 37 is Asp, Gly, Ser or Thr
  Variant (38)..(39): Xaa in position 38 to 39 is any amino acid
  Variant (40)..(40): Xaa in position 40 is Ala, Ile, Pro or Val
GXXXLNVXXPXXXXXXXXXXXXXXXXXXXXXXXXXXXXXX

SEQ ID NO: 115592 - protein, 35 aa, Artificial sequence
  protein pattern
  Variant (2)..(3): Xaa in position 2 to 3 is any amino acid
  Variant (4)..(8): Xaa in position 4 to 8 is any or no amino acid
  Variant (11)..(11): Xaa in position 11 is any amino acid
  Variant (13)..(13): Xaa in position 13 is Ala, Asn, Ser, Thr or Val
  Variant (14)..(15): Xaa in position 14 to 15 is any amino acid
  Variant (19)..(20): Xaa in position 19 to 20 is any amino acid
  Variant (21)..(21): Xaa in position 21 is Ala, Cys, Gly or Ser
  Variant (22)..(22): Xaa in position 22 is Ala, Cys, Ser or Thr
  Variant (23)..(24): Xaa in position 23 to 24 is any amino acid
  Variant (25)..(25): Xaa in position 25 is Ala, Ser, Thr or Val
  Variant (26)..(27): Xaa in position 26 to 27 is any amino acid
  Variant (29)..(34): Xaa in position 29 to 34 is any amino acid
  Variant (35)..(35): Xaa in position 35 is Ile, Leu or Val
LXXXXXXXVTXLXXXIGYXXXXXXXXXAXXXXXXX

SEQ ID NO: 115593 - protein, 29 aa, Artificial sequence
  protein pattern
  Variant (2)..(2): Xaa in position 2 is any amino acid
  Variant (4)..(4): Xaa in position 4 is any amino acid
  Variant (6)..(6): Xaa in position 6 is Ala, Ser or Thr
  Variant (7)..(7): Xaa in position 7 is Phe, Ile, Leu or Met
  Variant (9)..(9): Xaa in position 9 is any amino acid
  Variant (10)..(10): Xaa in position 10 is Ile, Leu or Val
  Variant (11)..(11): Xaa in position 11 is any amino acid
  Variant (13)..(13): Xaa in position 13 is Ala, Asp, Asn, Pro or Ser
  Variant (14)..(17): Xaa in position 14 to 17 is any amino acid
  Variant (18)..(18): Xaa in position 18 is Phe, Trp or Tyr
  Variant (19)..(19): Xaa in position 19 is any amino acid
  Variant (23)..(23): Xaa in position 23 is any amino acid
  Variant (25)..(25): Xaa in position 25 is Ala or Ser
  Variant (26)..(28): Xaa in position 26 to 28 is any amino acid
RXEXDXXGXXXVXXXXXXXAQTXRXXXXF

SEQ ID NO: 115594 - protein, 14 aa, Artificial sequence
  protein pattern
  Variant (2)..(2): Xaa in position 2 is Ala or Pro
  Variant (3)..(3): Xaa in position 3 is any amino acid
  Variant (12)..(12): Xaa in position 12 is Ile or Leu
  Variant (14)..(14): Xaa in position 14 is Ala, Cys, Ser or Thr
LXXGGTAVGTGXNX

SEQ ID NO: 115595 - DNA, 1005 bp, Escherichia coli
  CDS (1)..(1005): transl_table=11
atgaaaacagaacgtattctcggtgctctttatgggcaggcgttaggggatgcgatggggatgccctccgagctttggccacgcagccgcgttaaagcacactttggctggattgaccgttttcttcctggaccaaaggagaataacgcggcctgttattttaaccgcgccgaattcaccgacgatacctcgatggcgctgtgtctggcggatgcgttactggaacgtgaaggcaagatcgatccggatctgattgggcgtaatattctcgactgggcgctgcgtttcgacgcctttaacaaaaacgtactaggtccgacctcgaagattgcgcttaacgccattcgcgacggtaaacccgttgctgaactggaaaacaacggcgtgaccaacggcgcagcgatgcgcgtctcgccattaggttgtttgcttccggcgcgtgatgttgattcctttattgatgatgtagcgctggcgtccagcccgacccataaatccgatctggcggttgcaggcgcggtagtcatcgcatgggcgatttctcgtgccattgacggagaaagctggtcagcgattgttgattccctgccttcaattgcgcgacatgcacagcaaaaacgcatcactacgttcagcgcctcactggcggcgcggctggagattgcgctgaaaattgtgcgcaatgccgacggcaccgaatccgccagcgaacagctttaccaggtcgttggcgcaggtaccagcactattgagtccgttccgtgcgccattgcgctggttgaactggcacaaaccgacccgaatcgctgcgccgtcctgtgcgctaaccttggcggcgacacagacaccatcggtgctatggcgacggcaatttgcggcgcgttgcatggcgttaacgctatcgatcctgcgttaaaggcggaactggatgcggtaaatcagcttgatttcaaccgctatgccacagcgctggcgaaatatcgtcaacaacgggaggcggtataa

SEQ ID NO: 115596 - protein, 334 aa, Escherichia coli
MKTERILGALYGQALGDAMGMPSELWPRSRVKAHFGWIDRFLPGPKENNAACYFNRAEFTDDTSMALCLADALLEREGKIDPDLIGRNILDWALRFDAFNKNVLGPTSKIALNAIRDGKPVAELENNGVTNGAAMRVSPLGCLLPARDVDSFIDDVALASSPTHKSDLAVAGAVVIAWAISRAIDGESWSAIVDSLPSIARHAQQKRITTFSASLAARLEIALKIVRNADGTESASEQLYQVVGAGTSTIESVPCAIALVELAQTDPNRCAVLCANLGGDTDTIGAMATAICGALHGVNAIDPALKAELDAVNQLDFNRYATALAKYRQQREAV

SEQ ID NO: 115597 - DNA, 1005 bp, Enterobacter cloacae
  CDS (1)..(1005): transl_table=11
atgaaacaagaccgtattctcggtgctctttacgggcaggcgttaggggatgcgatgggaatgccgtcggagctgtggccgcgcaagcgggtgaaagcgcacttcggctggatcgaccgtttcttacccggcccggctgagaataatgccgcctgttactttaagcaggccgaatttacggatgatacgtcgatggcgctgtgcctggccgatgcgattatcgaatgcgagggggaaattaaccctgacgttatcggtaagcatattctggactgggcgctggattttgacgcgttcaataagaatgtactcggcccgacctccaaaattgccctgaacgccatccgtgacggcaagccggtgagccagctggaaaacaacggcgtcaccaacggtgcggcgatgcgcgcctccccgctgggatgcctgctgccggccacgcgtctggcgcactttgtggaacaggttgcgttagcctccagcccgacccataaatcggatctcgccatcgccggtgcggtggtgatcgcctgggcggtttcacgcgctatcgacggcgagcgctggcagaacatcgccgatgccctgccgggtattgcccgtgcggcacaggaggcgaacacgaccaccttcagcgcatcactttccgctcgtattgagctggccctgaaaaccgtgcgcgaagccaacggtaccgagtccgccagcgagcagatctatcagcttattggcgcgggcacgagcacccttgagtccgttccggcggcgattgcgatggtcgaactcgcgggcaccgatccgaaccgctgcgcggtgttatgcgccaacctgggcggtgatactgacactatcggcgcgatggcaacggccatctgcggtgcgctgcacggtgtacaggccattgatccggcactcaaaaacgaacttgatgccgtaaaccggctcgatttcggccactactgtgaaaaactgctgcacttccgggagcacagggagggcgtatga

SEQ ID NO: 115598 - protein, 334 aa, Enterobacter cloacae
MKQDRILGALYGQALGDAMGMPSELWPRKRVKAHFGWIDRFLPGPAENNAACYFKQAEFTDDTSMALCLADAIIECEGEINPDVIGKHILDWALDFDAFNKNVLGPTSKIALNAIRDGKPVSQLENNGVTNGAAMRASPLGCLLPATRLAHFVEQVALASSPTHKSDLAIAGAVVIAWAVSRAIDGERWQNIADALPGIARAAQEANTTTFSASLSARIELALKTVREANGTESASEQIYQLIGAGTSTLESVPAAIAMVELAGTDPNRCAVLCANLGGDTDTIGAMATAICGALHGVQAIDPALKNELDAVNRLDFGHYCEKLLHFREHREGV

SEQ ID NO: 115599 - DNA, 1035 bp, Mesorhizobium loti MAFF303099
  CDS (1)..(1035): transl_table=11
atggcggataataccattctcgatcgtgccatgggcgcgcttgtcggcggggcgctgggagacgcgctcggcatgccgacgcagctcctgtcgccggcccgcatcgcagagctctacggccatgtcgacgatttcgtcgcgcccttcgccgaccatccggtgtcgaagggattgttggccggcaccatcaccgacgatacggaacaggcgcttctgctcggccgcattctcgtcgagtcaggccaccgtttcgatcatgcacgctgggtcaacgcgctgctcgactgggagcgcgaggtcaaggcgcgcggcagctatgatctgctggggccatcgaccaaacgtgccatcgatgccatcaacaatggcgtgccggccgaggaagcggggcgcagcggtgacaccaatggggctgccatgcgcattgcgccggtcggcatcatgatgccgccggagccgctcgatgcgttcgtcgccaaggtggcggagacctgccgggccacgcacaacacctcgatcgcgatagcctcggccgcagcggttgcggcggccgtcagtcgcggcgttgccggcggcgactggcgtgccgcctccgacagtgccgttgcggcggcgaggcgaggggcaacgcttggccattgggtgaccggcggcgacatcgccgcgcgtatcgtctgggcgcaggatctggtgcgcggcaaggtgacgggggatgcgatccggctgatcaccgacctggtcggcaccggcgttgccagccaggaatcggttccggcggccttcgcggtgctggaagtcgccggcggcgatccctggcaagcggctgtcatcagcgccaatctcggcggcgacaccgacacgatcggcgccatagccgccggcatggccggcgcctgcaccggcttttcactgttgccacagcagcatattgcccggcttgtcggcatcgacatgtcaaaggtgcgcgcgcttgctgccgatctcgtggcggcaagggtgaagaagaccggttccggcaaggatgcggcggcatga

SEQ ID NO: 115600 - protein, 344 aa, Mesorhizobium loti MAFF303099
MADNTILDRAMGALVGGALGDALGMPTQLLSPARIAELYGHVDDFVAPFADHPVSKGLLAGTITDDTEQALLLGRILVESGHRFDHARWVNALLDWEREVKARGSYDLLGPSTKRAIDAINNGVPAEEAGRSGDTNGAAMRIAPVGIMMPPEPLDAFVAKVAETCRATHNTSIAIASAAAVAAAVSRGVAGGDWRAASDSAVAAARRGATLGHWVTGGDIAARIVWAQDLVRGKVTGDAIRLITDLVGTGVASQESVPAAFAVLEVAGGDPWQAAVISANLGGDTDTIGAIAAGMAGACTGFSLLPQQHIARLVGIDMSKVRALAADLVAARVKKTGSGKDAAA

SEQ ID NO: 115601 - DNA, 1041 bp, Salmonella typhimurium LT2
  CDS (1)..(1041): transl_table=11
atgcacgttgatcgaaacaaaatactgggatgcctggtgggcgccgccgccgcggacgcgatgggagccgcgacggaagtacgcacccagcagcaaataaaagactattttggcggctgggtgacgacctttcaaaaaccgccagcggacacgtttggccgctgcaacgaagcggggatgtgcacggatgattttattcaggcgaagtacatcatggatgcgctgctgcgccatcaacgccaggtcagcgacgaggcgatgcgcgaggctttccagcagtggctggattacccgtactacgccaactttaccggcccgacgacgcgtgcggcaatgaaggcaatattcaatgataaccgcgcctctttacagggtgagctggaaggcgagaaacagtcggtacagattattaataagggtaacgcggaggcaacgaacggcgccgccatgaagatttggccagcggcggtgctgcacccgggtgatattgacgcggcgattgaatgcgcgctacagatttgccgctttacccataataacgtgctggcgatgtccggcgcagcggcgatggcggcggcaaccagcgaggcgttaagagcgcagaccaatgcagacagcattattgccgccggtatttacggtgcgcaaaggggctatctgctggcgcaggagcaaggggcgatgatggtcgccgggccttccgttgcccgacgcattgagctggccgtagatatcggtaaacgtcatcgccattgggaaacggcggtggtggaacttgctgatattattggctccgggctgcacgtgagtgaagcggtgccggcggcctttggcctgttcgcgtgttgtccgaattctgccgtagatgctattatctccggcgttaatatcggcaatgatactgatactgtcgccaccatggtcggggcgatttccggcgcattccatggcgtggaggcttttcccgccgattatttaacgactttggatcgtatgaatcatttcgatttggcagaactggccaggcaaatcgcagggtag

SEQ ID NO: 115602 - protein, 346 aa, Salmonella typhimurium LT2
MHVDRNKILGCLVGAAAADAMGAATEVRTQQQIKDYFGGWVTTFQKPPADTFGRCNEAGMCTDDFIQAKYIMDALLRHQRQVSDEAMREAFQQWLDYPYYANFTGPTTRAAMKAIFNDNRASLQGELEGEKQSVQIINKGNAEATNGAAMKIWPAAVLHPGDIDAAIECALQICRFTHNNVLAMSGAAAMAAATSEALRAQTNADSIIAAGIYGAQRGYLLAQEQGAMMVAGPSVARRIELAVDIGKRHRHWETAVVELADIIGSGLHVSEAVPAAFGLFACCPNSAVDAIISGVNIGNDTDTVATMVGAISGAFHGVEAFPADYLTTLDRMNHFDLAELARQIAG

SEQ ID NO: 115603 - DNA, 1005 bp, Escherichia coli CFT073
  CDS (1)..(1005): transl_table=11
  misc_feature (601)..(601): n is a, g, c or t
  misc_feature (613)..(613): n is a, g, c or t
  misc_feature (619)..(619): n is a, g, c or t
  misc_feature (626)..(626): n is a, g, c or t
  misc_feature (643)..(643): n is a, g, c or t
atgaaaacagaacgtattctcggtgctctttatgggcaggcgttaggggatgcgatggggatgccctccgagctttggccgcgcagtcgcgtcaaagcacactttggctggattgaccgttttctgcctgggccaaaggagaataacgcagcctgttattttaaccgcgccgaattcaccgacgatacctcgatggcgctgtgtctggcggatgcgttactggaacgtgaaggcaagatcgatccggatctgattgggcgtaatattctcgactgggcgctgcgtttcgacgcctttaacaaaaacgtactaggtccgacctcgaagattgcacttaacgccattcgcgacggtaaacccgttgctgaactggaaaataacggcgtgaccaacggcgcagcgatgcgcgtctcgccattaggttgtttgcttccggcgcgcgatattgactcttttattgatgatgtggcgctggcctccagcccgacccataaatccgatctggcggttgcgggggcggtagtcatcgcatgggcgatttctcgtgccattgacggagaaagctggtcagcgattgttgattccctgccttcaattgcgngacatgttcaanaaaaangcatcantaccttaagcgcctcantggcagcacgtttggagattgcgctgaaaattgtgcgcaatgctgacggcaccgaatccgccagcgaacagctttaccaggtcgttggcgcaggtaccagtactattgagtccgttccgtgcgccattgcgctggttgaactggcacaaaccgacccgaaccgttgcgccgtcctgtgcgctaaccttggcggcgacacagacaccatcggtgctatggcgacggcaatttgcggcgcgttgcatggcgttaacgctatcgatcctgcgttaaaggcggaactggatgcagtaaatcagcttgatttcaaccgctatgccacggcgctggcgaagtatcgccaacaacgggaggcgatatga

SEQ ID NO: 115604 - protein, 334 aa, Escherichia coli CFT073
  misc_feature (201)..(201): The Xaa at location 201 stands for Stop, Arg, or Gly.
  misc_feature (205)..(205): The Xaa at location 205 stands for Stop, Gln, Glu, or Lys.
  misc_feature (207)..(207): The Xaa at location 207 stands for Arg, Cys, Gly, or Ser.
  misc_feature (209)..(209): The Xaa at location 209 stands for Asn, Ile, Ser, or Thr.
  misc_feature (215)..(215): The Xaa at location 215 stands for Leu, Met, or Val.
MKTERILGALYGQALGDAMGMPSELWPRSRVKAHFGWIDRFLPGPKENNAACYFNRAEFTDDTSMALCLADALLEREGKIDPDLIGRNILDWALRFDAFNKNVLGPTSKIALNAIRDGKPVAELENNGVTNGAAMRVSPLGCLLPARDIDSFIDDVALASSPTHKSDLAVAGAVVIAWAISRAIDGESWSAIVDSLPSIAXHVQXKXIXTLSASXAARLEIALKIVRNADGTESASEQLYQVVGAGTSTIESVPCAIALVELAQTDPNRCAVLCANLGGDTDTIGAMATAICGALHGVNAIDPALKAELDAVNQLDFNRYATALAKYRQQREAI

SEQ ID NO: 115605 - DNA, 1005 bp, Salmonella enterica subsp. enterica serovar Typhi Ty2
  CDS (1)..(1005): transl_table=11
atgaaagcagaacgtattctcggtgctctttacgggcaagcgttaggggatgcgatgggaatgccctctgagctgtggccgagaacgcgcgtcaaagcgcatttcggctggattgaccgctttctgcccggcccaaaagaaaataatgccgcctgctattttaaccgcgcggagtttacggacgataccgcaatggcgctctgcctggccgacgcgctactcgaatgcgaaggcaacattgatcccgagattattgggcgtaacatcctcgcctgggcggaacgctttgatgcgttcaataaaaatgtactcggcccgacgtcaaaaattgcgctgaatgcgattcgcgacggcaaacccatcgcggcgctggaaaataacggcgtgactaacggcgcggccatgcgcgtttcgccgttgggctgcctgttgccgccaactaacctgacagcctttatagcagaagtagcgttagcctccagcccgacgcataaatccgatctggcggtggctggcgccgtggttgtcgcctgggccgtctcgcgagcggttaacggcgacacgtggcaaagtattgccgactcgctccccgccatcgcccatcaggcgcagacagcgcgtattaccacgtttagcgcctcgctatcggcacgtctggaactggcgctaaacattgtccgccacgccgacggcgtcgaatctgccagcgaacagctctatcagatcatcggcgcgggaaccagcaccattgaatcggttccctgcgctatcgccatggtggagctggcgaataccgatcctaaccgctgtgccgtgctgtgcgctaacctcggcggcgataccgacactatcggcgcgatggctaccgccatttgcggcgcgttgcacggggtaagcgccattaacccccagttaaagcaaacgctggacaaggttaatcagctggattttgcgcgctatgccgttgcgctggcgagctatcgtcaacggcgggaggcactatga

SEQ ID NO: 115606 - protein, 334 aa, Salmonella enterica subsp. enterica serovar Typhi Ty2
MKAERILGALYGQALGDAMGMPSELWPRTRVKAHFGWIDRFLPGPKENNAACYFNRAEFTDDTAMALCLADALLECEGNIDPEIIGRNILAWAERFDAFNKNVLGPTSKIALNAIRDGKPIAALENNGVTNGAAMRVSPLGCLLPPTNLTAFIAEVALASSPTHKSDLAVAGAVVVAWAVSRAVNGDTWQSIADSLPAIAHQAQTARITTFSASLSARLELALNIVRHADGVESASEQLYQIIGAGTSTIESVPCAIAMVELANTDPNRCAVLCANLGGDTDTIGAMATAICGALHGVSAINPQLKQTLDKVNQLDFARYAVALASYRQRREAL

SEQ ID NO: 115607 - DNA, 1074 bp, Nasonia vitripennis
  CDS (1)..(1074)
atgacgaagatcgacctttctttgtttcgaagaaagtttcgcggttcgatactcggtgtactgacgggtgattgcttgggaagcccttacgaaaatgaaaagctcagttcaggctccaaacttgttctgcaaaagtcctttgataagcttgaagggccaccatttaaagctcctgttatgcaattcactgatgattctgcgatgacaatgtctttggctgaatctctaattgaaaaaaaggatcttgatctggttgacttggctaaaaagtttgtcaaaagctattatcaggaaccacaacgtggatatggttctggagtcgttacagtgtttcaaaaactcagaggaagtaaattctcagatgttcttttgccagccaaagagcagtttcatggacaaggatcttttggtaatggagccgctatgagagtcgctccggttgctcttttttgttacaatcactacgacaatttaagagagtttgcaaagaagcagtctttgatcacgcatactcacaaaataggagtagatggagcaattttacaggcaattgcaattcagcagagtatacatatacatccggatgatcagttgaatgttatagatttcgtagacgagcttgtgaacaaaatgaactttgtagaagaagatgaggaaggtttagatcttgtagaggctcaaccgtacaaaagccagttaaatttaatcaaaaagctattgcaagaagaaggtgaagaaaatccaatagatgataaagtcataaagaatcttggcaatgatatcagtggattgagatctgtaccaacagcaatattttgctttctaagagctcagaaaccaataaagggtatcaagactgataatccatttaggcgagcagttcaatacgccataagtttaggtggggacacagacaccattggaagcatgacaggtgcaatagctggtgctttttatggtgaggaagtcatttctcccaacattttacagcaccttgaagcctctactgattttaaagatctggctgatgatttgtttcaagttgcaactaaaatggagtggaattcaagctga

SEQ ID NO: 115608 - protein, 357 aa, Nasonia vitripennis
MTKIDLSLFRRKFRGSILGVLTGDCLGSPYENEKLSSGSKLVLQKSFDKLEGPPFKAPVMQFTDDSAMTMSLAESLIEKKDLDLVDLAKKFVKSYYQEPQRGYGSGVVTVFQKLRGSKFSDVLLPAKEQFHGQGSFGNGAAMRVAPVALFCYNHYDNLREFAKKQSLITHTHKIGVDGAILQAIAIQQSIHIHPDDQLNVIDFVDELVNKMNFVEEDEEGLDLVEAQPYKSQLNLIKKLLQEEGEENPIDDKVIKNLGNDISGLRSVPTAIFCFLRAQKPIKGIKTDNPFRRAVQYAISLGGDTDTIGSMTGAIAGAFYGEEVISPNILQHLEASTDFKDLADDLFQVATKMEWNSS

SEQ ID NO: 115609 - DNA, 1050 bp, Anopheles gambiae str. PEST
  CDS (1)..(1050)
atgttggaaaagtcactaatgttatcgaaattcagaggaagtctgctgggcgccctggtaggcgattgctgtggtgcaccattcgaaggtcaactaatggacagtggagcgaagttgattttaaagaaaaatcttgacaaattggaagggcccccatttaacgctccgtacaaaaagtacacggacgatacggcaatgacgatacaaacggcgagagcgctggtcgacccgaacggatactcgcaaaagctgctggcaaagaactttgtggtcgaattcttcaaagaaccgaaccgcggatacggagcagcggtgggggaggtgtttcgcaaactacggcaaaccaagatcgccgatccgacgggtcccgccatggctcagttcaacggtagtggctcgttcggtaacggtgcagccatgcgcatttccccggtcgcactgtactgcgtgaacaagagcatcgacgagctggtccggctggtgaaagaatcgtctgagataacgcacaccaacgtgcttggtgtgaacggggcgattctgcaggcgttggccatccggcagagcttactgttgaatccgaacgaaccgttctgctggaaagcatttcttgccgagctgaagcagcacatggtcgagatagaaaagggaaacgatcccgacctggatgccaatccgaatgcgtacgaaaaacagctgcaaaacatggaaaccctgctagaccatcgggtggacccgtcggacgagaatgtgctgaacctgttgggacacagcgtggcagcgctgtactccgtccccacggcagtgtactgcttcctgcggcacacgcaagacctgctgaaggatacggatcgaaaatcgttccgcaatacgcttgagtatgctatctcgcttggtggggattgtgatacgatcggtagcatggcgtgcgcgatcagtggcgcctactacggtgagcctgccatttcaagcgctttgctgaagcactgcgaaagtgctgacagtgttgcggagcttgcggagcaactgttccaggttgccggcacccagtga

SEQ ID NO: 115610 - protein, 349 aa, Anopheles gambiae str. PEST
MLEKSLMLSKFRGSLLGALVGDCCGAPFEGQLMDSGAKLILKKNLDKLEGPPFNAPYKKYTDDTAMTIQTARALVDPNGYSQKLLAKNFVVEFFKEPNRGYGAAVGEVFRKLRQTKIADPTGPAMAQFNGSGSFGNGAAMRISPVALYCVNKSIDELVRLVKESSEITHTNVLGVNGAILQALAIRQSLLLNPNEPFCWKAFLAELKQHMVEIEKGNDPDLDANPNAYEKQLQNMETLLDHRVDPSDENVLNLLGHSVAALYSVPTAVYCFLRHTQDLLKDTDRKSFRNTLEYAISLGGDCDTIGSMACAISGAYYGEPAISSALLKHCESADSVAELAEQLFQVAGTQ

SEQ ID NO: 115611 - DNA, 1053 bp, Tribolium castaneum
  CDS (1)..(1053)
atgtcgactatcgacaagaatttgctcaaaagcaaattcagaggctctcttctgggctcgttactaggtgactgtttaggttcaccctttgagggtgatgtaataacgccgggggaaaaactcgtaattcagaaatacttcgataaattggaaactccggatttaaaaggcccaaaaagatgttacacagacgacactgcaatgatgaaagaagtggcaaaaaccctaattgacaaacctgagatcgattacaagcacatggcaaaattattcgtgaaggagtacttttcagaacctcacagaggttacggccagaacgttgtcgaggtttttaataaattgaggaaaacaaagtttgaggatatttacaagccggcaaaggaacagtttaacgggtccggctcttttggcaacgggggcgcaatgagaatcgcccccgttgccctctatttccacgataattacgacgcaatgatcaatgttgcaaagcaatcaaccgaaatcacgcacaccaattcattaggggttcacggggctgttttacaatgcattgcggttcatcaggcgttgtctcacgaccctaaaactgcaattacacccaaagacttttgtgacgaacttactaaaaaaattaaagtcgtggaaagtgaaaacgatgacgggttgggtttacacgatcaaaacccgtacgaggataaattaaactttgttaattattttctgggcataaaatgccacgaggagttggacgaggaggttgcgcaaaatttgggaaattcgattgcagcgtatgattccgtccccactgcaatttactcgtttatgcgggctgtgcaaaatgatattcccacaaccgataatttgtttaggaggaccattcaatacgcaattactttagggggtgacactgacaccattgcctgtatggcaggcgccatggccggggcttacttgggggaagaggcaattgataaaaacatggctaagcagtgtgagggttacgaaatgattgtagatttggctgataagttgtacgcagcggctgtgaaataa

SEQ ID NO: 115612 - protein, 350 aa, Tribolium castaneum
MSTIDKNLLKSKFRGSLLGSLLGDCLGSPFEGDVITPGEKLVIQKYFDKLETPDLKGPKRCYTDDTAMMKEVAKTLIDKPEIDYKHMAKLFVKEYFSEPHRGYGQNVVEVFNKLRKTKFEDIYKPAKEQFNGSGSFGNGGAMRIAPVALYFHDNYDAMINVAKQSTEITHTNSLGVHGAVLQCIAVHQALSHDPKTAITPKDFCDELTKKIKVVESENDDGLGLHDQNPYEDKLNFVNYFLGIKCHEELDEEVAQNLGNSIAAYDSVPTAIYSFMRAVQNDIPTTDNLFRRTIQYAITLGGDTDTIACMAGAMAGAYLGEEAIDKNMAKQCEGYEMIVDLADKLYAAAVK

SEQ ID NO: 115613 - DNA, 987 bp, Staphylococcus epidermidis RP62A
  CDS (1)..(987): transl_table=11
atgaaagataaaatattaggaactttatatggccaagctattggagacgctttaggtatgccttcagaattatggaatcgcaacaaagttaaagatttttttgggaaaatcacaacttttttagatggcccttatgaaaataaggtagccagaaattttaccaaaggacagtttacggatgatactgcacaatcactactaatcattgatgcgctaaataaaaatcattttgaaccttcaaaaaaaatcatagcagacgaattgattgaatgggccaatgctacaaacgcatttaaaaataatattcttggcccaagttctaaagcagctttaactgcaataatacaaggagaggattcccaattatatacaaaaaatgcattaactaatgggtcggctatgagaattgctcctattggtactttattttctaaagatcaaaaagtagagcttgtaaattatgttaaggaaattagtgaagctactcacacaagtgatgttgcaatagctggagctagtatgattgcttatgcagtaacattggcagcggaagataagaattggaaagaaattatagaaggcgttttggatattcacgatatagctattaaagaaggagaacaaactttttctgcatcaatagcagaaagattaaaattagcagttcagtttgccaatcatttcgaaagtgaggaggaatattcgctctggctttatgatgtgataggatgcggaacatcattaactgaatcggtccccactgctttggcaattgcttatttttgtaaagaccccaataaatgcgcaattttttgtgcgaatattggtggggatactgacacaattggtgctatggcaactgctatatcgggggctaaatacggatatagtaattttaaaaaactttggatagagactatcgacaaacacaatagtgtgaacttagaacaatatgcaactacgctcgaaaaaaataaaatgttataa

SEQ ID NO: 115614 - protein, 328 aa, Staphylococcus epidermidis RP62A
MKDKILGTLYGQAIGDALGMPSELWNRNKVKDFFGKITTFLDGPYENKVARNFTKGQFTDDTAQSLLIIDALNKNHFEPSKKIIADELIEWANATNAFKNNILGPSSKAALTAIIQGEDSQLYTKNALTNGSAMRIAPIGTLFSKDQKVELVNYVKEISEATHTSDVAIAGASMIAYAVTLAAEDKNWKEIIEGVLDIHDIAIKEGEQTFSASIAERLKLAVQFANHFESEEEYSLWLYDVIGCGTSLTESVPTALAIAYFCKDPNKCAIFCANIGGDTDTIGAMATAISGAKYGYSNFKKLWIETIDKHNSVNLEQYATTLEKNKML

SEQ ID NO: 115615 - DNA, 1014 bp, Pseudomonas syringae pv. syringae B728a
  CDS (1)..(1014): transl_table=11
atgagcgcaacatttctgcaagaccgaggcctgggcgccttttatggcctggccctgggcgacgccttgggcatgccgacgcagtcgctgccgcgcgcgttgatcctgcaacgctatggccgtatcactacgctgatcggcgccgatgccgaccagccgatcgcacccaacatgccggccggcgccatcaccgatgacaccgagcaggccatcctggtggcacagttgctggtggctggcggcggcagcattgacccgacagcattggcccacagcctgatcgagtgggaagccgcgatgaaagccaagggctcctacgacctgctggggccttcgaccaagcgcgcgattgaaatgatccttgacggccacagccctgaagaggctggccgcttcggcaccaccaatggcgcggcaatgcgtatcaccccggtaggcatcgcggccgacgtgagcaaccgcgaggccttcatggcgctggtggtgcaagcctgtcaggtcacccataacaccacgctgggcatctccagcgcggcggcggtcgcggccgtggtgtccgccgggatcaatggcgcgcccctggccgaagcgctggagacaggcgccgaggtagccctgagtgccgaacgccatggccattgggttgcgggtgggcgtatcgccgcgcgcattcaatgggccaaggcactgtgcgctgactgcacagacgaacagctggccgaccgggtgcacgatgtgattggtacctcggtcgcctcacaggaatcagtggtcgctgccttcaccctcgcccaccgcgtggcgagcagccagctcagtccgttcgatgcagtgtgcatggcggccagcctgggcggtgacaccgacacgattgccgccattctcggtgccatgctgggcgcctgcaacggcatgcacgcctggccggcggcgctgatcgagcaaatcgatgcggtcaacgcgctcgacctcgcgcctttggtcgaacaactgctggccctgcgcgccggatga

SEQ ID NO: 115616 - protein, 337 aa, Pseudomonas syringae pv. syringae B728a
MSATFLQDRGLGAFYGLALGDALGMPTQSLPRALILQRYGRITTLIGADADQPIAPNMPAGAITDDTEQAILVAQLLVAGGGSIDPTALAHSLIEWEAAMKAKGSYDLLGPSTKRAIEMILDGHSPEEAGRFGTTNGAAMRITPVGIAADVSNREAFMALVVQACQVTHNTTLGISSAAAVAAVVSAGINGAPLAEALETGAEVALSAERHGHWVAGGRIAARIQWAKALCADCTDEQLADRVHDVIGTSVASQESVVAAFTLAHRVASSQLSPFDAVCMAASLGGDTDTIAAILGAMLGACNGMHAWPAALIEQIDAVNALDLAPLVEQLLALRAG

SEQ ID NO: 115617 - DNA, 999 bp, Oenococcus oeni PSU-1
  CDS (1)..(999): transl_table=11
atgagagataaagacaaaattttaggaacattatacggtcaggcaatcggtgatgcaatgggaatgccgtctgagctatggccaattcaaaaaattagaaaaaaattcgacggaaaaataactgatttcatggatggcacacaagataatgagattgcgctgaatttcagtcgaggtgaatacaccgatgatacaaatcaagcctttgcgattcttgatgctttaatagaagcacattgggaacccaaacaagaaattctggttaagcacattatggaatgggctaataaagttggggcgtggaaaaataatattctaggaccaagcagcaaagccgctctcactctaattaaagaaggaaaagatccaactgaagttacaaaaaaagcgttgactaacggggctggaatgagaatagctccaattggatctctttttgaaacaaatcaaatagataatttggtaaaaatggtatatcaagtcacaaaaataactcactcaagtgacgtttcaataagcggagcaagcatgatcgctggtgcagtaacagccggaattgccaattattcatgggatgacattatcaattatgcaattaaagcaaacaacaaaggactaaaacttgggtcccccacttgggctgccaaaaacaaaaatcgtctggaaataggaattgatatagcggacaaatatgcgaataacgaagacgaattcagcaaacaaatctatgaaactttaggaactgggactatgatttcggagagcattccagcagcagtttcagcggcatattatacaaaagatgttcaaaaatgtgcgatcctatgttcaaatcttggtggcgatacagacacaatcggagcgatggccacagcaatctgtggtgctaaaaatggagcgtcaagcattccaattgaatggaaacaattgatagacaaaaaaaatccgcaacacaacattgaggaacttagcgacaaaataatttcatttaaaaactaa

SEQ ID NO: 115618 - protein, 332 aa, Oenococcus oeni PSU-1
MRDKDKILGTLYGQAIGDAMGMPSELWPIQKIRKKFDGKITDFMDGTQDNEIALNFSRGEYTDDTNQAFAILDALIEAHWEPKQEILVKHIMEWANKVGAWKNNILGPSSKAALTLIKEGKDPTEVTKKALTNGAGMRIAPIGSLFETNQIDNLVKMVYQVTKITHSSDVSISGASMIAGAVTAGIANYSWDDIINYAIKANNKGLKLGSPTWAAKNKNRLEIGIDIADKYANNEDEFSKQIYETLGTGTMISESIPAAVSAAYYTKDVQKCAILCSNLGGDTDTIGAMATAICGAKNGASSIPIEWKQLIDKKNPQHNIEELSDKIISFKN

SEQ ID NO: 115619 - DNA, 984 bp, Listeria monocytogenes str. 1/2a F6854
  CDS (1)..(984): transl_table=11
atgaaaacaaggttttttggagttttagcgggtggagcactcggcgatgcaatgggaatgccgacagaatgttggtcgcaggaaaagataagagccatttatcctaatggggttgaaacgctcttgccttccgacgaaagtgatgcatttggaagaaaactggcggctgggtcgattacagatgatacgataaatgtgttgatgattgctgaaatgattaaaaaaaataatgggcaaatacgcgtggaagactatgttgcggagttggtcgaatggaacgctaattcgggtgtttcggagttcgtctcaggtccgtccacacttagagcattgaaacaaatctcagaaggcgtgccgatcaccaaaacaggtatttctggcacaacaaatggagcatcgatgaaaatagcgccaatcggcataatagctaattatgaagatatggaagacttggtttccaaagtgcatcaaatttgcctgcctacacataatgccaaaattgctattcagggcgcaagtgctgtcgcggctgcaattagttatgtggttcgaggtgggaacatagtggataaaatatgggaattagcttacgaagcaattgaggttgctagtaattacggatatgatttcccttcagcgtcgttaaaatttagaatggacaaggctcgcgaaattattggagaggaaacaggaccagcgactgcactgaaaagactatatgaagaaatcggctcaggaatggaaacaattgaaactattccctgcgcattcgctattgttgaattagcaaaaggtgacccagtagaagcggccaaattgagtgcatgcattggttgggataccgatacaattggagctatcagtgcggggatttgcggtggaatgtcccccacaataccggaaaattatatcgaaatgattgagcgagtaaataacattaatctcacgcaagttagtgaagatttatatatacatgttctttaa

SEQ ID NO: 115620 - protein, 327 aa, Listeria monocytogenes str. 1/2a F6854
MKTRFFGVLAGGALGDAMGMPTECWSQEKIRAIYPNGVETLLPSDESDAFGRKLAAGSITDDTINVLMIAEMIKKNNGQIRVEDYVAELVEWNANSGVSEFVSGPSTLRALKQISEGVPITKTGISGTTNGASMKIAPIGIIANYEDMEDLVSKVHQICLPTHNAKIAIQGASAVAAAISYVVRGGNIVDKIWELAYEAIEVASNYGYDFPSASLKFRMDKAREIIGEETGPATALKRLYEEIGSGMETIETIPCAFAIVELAKGDPVEAAKLSACIGWDTDTIGAISAGICGGMSPTIPENYIEMIERVNNINLTQVSEDLYIHVL

SEQ ID NO: 115621 - DNA, 25 bp, Artificial sequence
  primer
atgaaaacagaacgtattctcggtg

SEQ ID NO: 115622 - DNA, 24 bp, Artificial sequence
  primer
ttataccgcctcccgttgttgacg

SEQ ID NO: 115623 - protein, 355 aa, Artificial sequence
  consensus sequence
  Variant (2)..(2): Xaa in position 2 is any amino acid
  Variant (4)..(4): Xaa in position 4 is any amino acid
  Variant (6)..(8): Xaa in position 6 to 8 is any amino acid
  Variant (11)..(12): Xaa in position 11 to 12 is any amino acid
  Variant (14)..(14): Xaa in position 14 is any amino acid
  Variant (16)..(16): Xaa in position 16 is any amino acid
  Variant (18)..(48): Xaa in position 18 to 48 is any amino acid
  Variant (49)..(53): Xaa in position 49 to 53 is any or no amino acid
  Variant (58)..(66): Xaa in position 58 to 66 is any amino acid
  Variant (68)..(106): Xaa in position 68 to 106 is any amino acid
  Variant (107)..(112): Xaa in position 107 to 112 is any or no amino acid
  Variant (114)..(128): Xaa in position 114 to 128 is any amino acid
  Variant (129)..(143): Xaa in position 129 to 143 is any or no amino acid
  Variant (150)..(151): Xaa in position 150 to 151 is any amino acid
  Variant (153)..(174): Xaa in position 153 to 174 is any amino acid
  Variant (175)..(175): Xaa in position 175 is any or no amino acid
  Variant (178)..(184): Xaa in position 178 to 184 is any amino acid
  Variant (187)..(189): Xaa in position 187 to 189 is any amino acid
  Variant (191)..(191): Xaa in position 191 is any amino acid
  Variant (193)..(255): Xaa in position 193 to 255 is any amino acid
  Variant (256)..(264): Xaa in position 256 to 264 is any or no amino acid
  Variant (266)..(272): Xaa in position 266 to 272 is any amino acid
  Variant (276)..(297): Xaa in position 276 to 297 is any amino acid
  Variant (298)..(307): Xaa in position 298 to 307 is any or no amino acid
  Variant (315)..(319): Xaa in position 315 to 319 is any amino acid
  Variant (321)..(322): Xaa in position 321 to 322 is any amino acid
  Variant (325)..(326): Xaa in position 325 to 326 is any amino acid
  Variant (328)..(351): Xaa in position 328 to 351 is any amino acid
  Variant (352)..(354): Xaa in position 352 to 354 is any or no amino acid
GXLXGXXXGDXXGXPXEXXXXXXXXXXXXXXXXXXXXXXXXXXXXXXXXXXXXTDDTXXXXXXXXXLXXXXXXXXXXXXXXXXXXXXXXXXXXXXXXXXXXXXXXXXXXXXXIXXXXXXXXXXXXXXXXXXXXXXXXXXXXXXNGAAMRXXPXXXXXXXXXXXXXXXXXXXXXXXTHXXXXXXXGAXXXAXAXXXXXXXXXXXXXXXXXXXXXXXXXXXXXXXXXXXXXXXXXXXXXXXXXXXXXXXXXXXXXXXXXXXXXXXXGXXXXXXXSVPXXXXXXXXXXXXXXXXXXXXXXXXXXXXXXXXGGDTDTIXXXXXAXXGAXXGXXXXXXXXXXXXXXXXXXXXXXXXXXXL

SEQ ID NO: 115624 - protein, 28 aa, Artificial sequence
  protein pattern
  Variant (2)..(2): Xaa in position 2 is any amino acid
  Variant (3)..(3): Xaa in position 3 is any or no amino acid
  Variant (5)..(8): Xaa in position 5 to 8 is any or no amino acid
  Variant (10)..(10): Xaa in position 10 is any amino acid
  Variant (12)..(12): Xaa in position 12 is Cys or Thr
  Variant (16)..(16): Xaa in position 16 is Ala or Gly
  Variant (17)..(17): Xaa in position 17 is Ala, Cys or Ser
  Variant (18)..(18): Xaa in position 18 is Ile or Met
  Variant (19)..(19): Xaa in position 19 is any amino acid
  Variant (20)..(20): Xaa in position 20 is Ala, Cys, Gly or Thr
  Variant (21)..(21): Xaa in position 21 is Ala or Gly
  Variant (22)..(22): Xaa in position 22 is Ile or Met
  Variant (23)..(23): Xaa in position 23 is any amino acid
  Variant (25)..(25): Xaa in position 25 is Ala or Gly
  Variant (26)..(27): Xaa in position 26 to 27 is any amino acid
  Variant (28)..(28): Xaa in position 28 is Gly or Pro
AXXLXXXXGXDXDTIXXXXXXXXGXXXX

SEQ ID NO: 115625 - protein, 17 aa, Artificial sequence
  protein pattern
  Variant (2)..(2): Xaa in position 2 is Ala, Ser or Thr
  Variant (3)..(3): Xaa in position 3 is Phe, Ile or Leu
  Variant (4)..(4): Xaa in position 4 is any amino acid
  Variant (6)..(6): Xaa in position 6 is any amino acid
  Variant (7)..(7): Xaa in position 7 is Ala or Leu
  Variant (8)..(8): Xaa in position 8 is any amino acid
  Variant (11)..(11): Xaa in position 11 is Ala or Cys
  Variant (12)..(12): Xaa in position 12 is any amino acid
  Variant (14)..(14): Xaa in position 14 is any amino acid
  Variant (16)..(16): Xaa in position 16 is any amino acid
  Variant (17)..(17): Xaa in position 17 is Glu or Gln
GXXXGXXXGDXXGXPXX

SEQ ID NO: 115626 - protein, 11 aa, Artificial sequence
  protein pattern
  Variant (3)..(3): Xaa in position 3 is Ala, Gly or Ser
  Variant (4)..(4): Xaa in position 4 is Ala or Gly
  Variant (7)..(7): Xaa in position 7 is Ala, Ile or Val
  Variant (8)..(8): Xaa in position 8 is Ala, Ser or Thr
  Variant (10)..(10): Xaa in position 10 is Ile, Leu or Val
  Variant (11)..(11): Xaa in position 11 is Ala or Gly
NGXXMRXXPXX

SEQ ID NO: 115627 - protein, 32 aa, Artificial sequence
  protein pattern
  Variant (2)..(7): Xaa in position 2 to 7 is any amino acid
  Variant (8)..(10): Xaa in position 8 to 10 is any or no amino acid
  Variant (13)..(13): Xaa in position 13 is any amino acid
  Variant (14)..(14): Xaa in position 14 is Ala, Asn, Ser or Thr
  Variant (15)..(15): Xaa in position 15 is any amino acid
  Variant (16)..(16): Xaa in position 16 is Ile, Leu or Val
  Variant (17)..(17): Xaa in position 17 is Ala, Gly or Ser
  Variant (18)..(18): Xaa in position 18 is Ile or Val
  Variant (19)..(19): Xaa in position 19 is any amino acid
  Variant (20)..(20): Xaa in position 20 is Gly or Ser
  Variant (22)..(25): Xaa in position 22 to 25 is any amino acid
  Variant (26)..(26): Xaa in position 26 is any or no amino acid
  Variant (28)..(28): Xaa in position 28 is Ile or Val
  Variant (29)..(30): Xaa in position 29 to 30 is any amino acid
  Variant (31)..(31): Xaa in position 31 is Ala, Gly, Ser or Val
  Variant (32)..(32): Xaa in position 32 is Ala, Gly, Ile, Leu or Val
VXXXXXXXXXTHXXXXXXXXAXXXXXAXXXXX

SEQ ID NO: 115628 - DNA, 660 bp, Escherichia coli
  CDS (1)..(660): transl_table=11
atgccagctttagatttgattcgaccgtctgtcaccgctatgcgggtgattgcctccgttaacgccgattttgcgcgtgaactgaaattgccgccgcatattcgtagcctcggtctgatttctgccgactccgatgacgtcacctacattgccgctgatgaagcgaccaagcaggcgatggtggaagtggtgtatggccgctcgctatatgcgggcgctgcacacggcccgtcaccgactgccggtgaagtgctgattatgcttggtgggccaaacccggcggaagtgcgtgcaggtctggatgcgatgattgcgcatattgaaaatggcgcagctttccagtgggctaatgacgcgcaagatacggcattcctggcacatgtagtttcgcgtaccggttcttatctctcatcaaccgccgggatcacgcttggcgatccgatggcgtatctggtggcaccgccgctggaagcgacctatggcattgatgcagccctgaagtctgccgacgtacagctggcgacctatgtcccgccaccgtctgaaaccaactactcggcagcatttttaaccggtagccaggcagcgtgtaaagcagcctgtaacgcctttaccgatgcagtgctggaaatcgcgcgtaatccaatccagcgtgcgtaa

SEQ ID NO: 115629 - protein, 219 aa, Escherichia coli
MPALDLIRPSVTAMRVIASVNADFARELKLPPHIRSLGLISADSDDVTYIAADEATKQAMVEVVYGRSLYAGAAHGPSPTAGEVLIMLGGPNPAEVRAGLDAMIAHIENGAAFQWANDAQDTAFLAHVVSRTGSYLSSTAGITLGDPMAYLVAPPLEATYGIDAALKSADVQLATYVPPPSETNYSAAFLTGSQAACKAACNAFTDAVLEIARNPIQRA

SEQ ID NO: 115630 - DNA, 654 bp, Listeria monocytogenes
  CDS (1)..(654): transl_table=11
atgaaaaatgataaattacctgcatccgttttaagtgtcaaagttgtatctaacgtagacaatggtctatttaaacaattagacttaaaaccgcatcaaagaagccttggtattattacatctgattgtgatgatgtaacttatacagcgcttgacgaagcaacaaaagcagcagaagtagatgttgtttatgcgaaaagtatgtatgctggtgctgggaatgcttccacaaaattcgctggtgaagttatcggtattattgccggaccaagccctgcagaagtaaaaagtggtcttgctgtagcagtagatttcatcgaaaacggcgctagctttgttagtgcaaatgaagatgatagtgtcccttacttcgcgcactgtgtttcaagaacgggtacattcctttcaaaagaagcaaatgttgcagaaggtgaagcgattgcttacttaatcgcccctccacttgaagcgatgtatgctttagacgcagcgcttaaagcagcagacgtaacaatcggagctttctatggcccaccgtccgaaacaaacttcggcggagcacttttgactggtagccaatctgcatgtaaagcagcttgtgatgcgttcaaaatggcagtagaaaatgtggctgaaaatccacttcaatattaa

SEQ ID NO: 115631 - protein, 217 aa, Listeria monocytogenes
MKNDKLPASVLSVKVVSNVDNGLFKQLDLKPHQRSLGIITSDCDDVTYTALDEATKAAEVDVVYAKSMYAGAGNASTKFAGEVIGIIAGPSPAEVKSGLAVAVDFIENGASFVSANEDDSVPYFAHCVSRTGTFLSKEANVAEGEAIAYLIAPPLEAMYALDAALKAADVTIGAFYGPPSETNFGGALLTGSQSACKAACDAFKMAVENVAENPLQY

SEQ ID NO: 115632 - DNA, 654 bp, Clostridium difficile 630
  CDS (1)..(654): transl_table=11
atgaaaaatgatgtaattcgtcctaatatactaggaattaaaataatttcaaatataagtccagaaatggcacaaaaactagaattaaaatcacatcacaaaagcttaggtttaataactgcagactgtgatgatgttacgtatacagctcttgacgaagcaactaaagcttcagaagttgatgttgtatatgcaaaatcaatgtatgcaggtgctgcaaatgcttcaacaaaacttgctggtgaagtattaggaataatagcaggtccaagcccagcagaagtaagaagtggtctaaatgcagtagttgattttctagagtatggagcaacttttataagtgcaaatgatgatgattcaatagcatactatgctcactgcgtatcaagaacaggtacatacctttcagaggtagcaggaataagagaaggtgaagcattagcttatttagtagcaccaccccttgaagcaatgtatgcactagatgcagcaatgaaagctgcagatgttaagatgtgtgaattatttgcacctccaactgaaacaaactttggtggagcattacttacaggttctcaatcggcttgtaaagcagcatgtgatgcatttgcagaagcagtaaaatcagttgcagacaatccaacaggattttaa

SEQ ID NO: 115633 - protein, 217 aa, Clostridium difficile 630
MKNDVIRPNILGIKIISNISPEMAQKLELKSHHKSLGLITADCDDVTYTALDEATKASEVDVVYAKSMYAGAANASTKLAGEVLGIIAGPSPAEVRSGLNAVVDFLEYGATFISANDDDSIAYYAHCVSRTGTYLSEVAGIREGEALAYLVAPPLEAMYALDAAMKAADVKMCELFAPPTETNFGGALLTGSQSACKAACDAFAEAVKSVADNPTGF

SEQ ID NO: 115634 - DNA, 654 bp, Listeria innocua Clip11262
  CDS (1)..(654): transl_table=11
atgaaaaacgataaattacctgcatccgttttaagcgtcaaagttgtatctaatgtagacaatggtttatttaaacaacttgacttaaaaccgcatcaaagaagtctgggtattattacatctgattgtgatgatgttacatacacagcacttgatgaagcaacaaaagcagcagaagtagatgttgtctatgcgaaaagtatgtatgctggtgctggaaatgcatccacaaaactagctggtgaagtaatcggtattattgccggaccaagcccagctgaagtaaaaagtggcctttcagttgcagtagacttcatcgaaaatggcgctagctttgttagtgcaaatgaagatgatagcgtaccttactttgcacattgtgtatcaagaacaggttctttcctttcaaaagaagcaaatgtagcagaaggacaagcgattgcttacttaatcgcaccgccacttgaagctatgtatgctctagatgcagctcttaaagcagcagacgtagcaattggaactttctacggaccaccatccgaaactaacttcggtggagcacttttaacaggtagtcaatctgcatgtaaagctgcttgtgatgcgttcaaaatggcagtagaaaatgtggctgaaaatccacttcaatattaa

SEQ ID NO: 115635 - protein, 217 aa, Listeria innocua Clip11262
MKNDKLPASVLSVKVVSNVDNGLFKQLDLKPHQRSLGIITSDCDDVTYTALDEATKAAEVDVVYAKSMYAGAGNASTKLAGEVIGIIAGPSPAEVKSGLSVAVDFIENGASFVSANEDDSVPYFAHCVSRTGSFLSKEANVAEGQAIAYLIAPPLEAMYALDAALKAADVAIGTFYGPPSETNFGGALLTGSQSACKAACDAFKMAVENVAENPLQY

SEQ ID NO: 115636 - DNA, 654 bp, Clostridium perfringens str. 13
  CDS (1)..(654): transl_table=11
atgaaaaatgatttaatacgtcctaatgttttaagcgttaagataatatcaaatgttagtccagaaatggctaaaaaattagaattagaaccacatcacaagagtttaggcttaatcacagcagactgcgatgatgtaacttatacagctttagatgaggctacaaaggcagcagaagtagatgtagtttatgctagatcaatgtatgctggagctggaaatgcttcaacaaaattagctggagaagtaattggtatcttagctggaccaagtcctgctgaagttagaagtggattaaatgctactttagatttcattgatagtggagttggatttgtaagtgcaaatgaagatgattcaatttgttactatgctcaatgtgtatcaagaacaggatcatatctttcaaaaacagcaggaataagagaaggtgaagctttagcttacttagtagctcctccattagaagcaatgtatgctttagatgcagcattaaaggctgcagatgttgaaatgtgtgaattttttgcacctccaacagaaacaaactttgcaggagccttacttacaggatcacaatcagcatgtaaagcagcatgtgatgcctttgcagaggcagtacaatcagtagctagtaatccattaggattctaa

SEQ ID NO: 115637 - protein, 217 aa, Clostridium perfringens str. 13
MKNDLIRPNVLSVKIISNVSPEMAKKLELEPHHKSLGLITADCDDVTYTALDEATKAAEVDVVYARSMYAGAGNASTKLAGEVIGILAGPSPAEVRSGLNATLDFIDSGVGFVSANEDDSICYYAQCVSRTGSYLSKTAGIREGEALAYLVAPPLEAMYALDAALKAADVEMCEFFAPPTETNFAGALLTGSQSACKAACDAFAEAVQSVASNPLGF

SEQ ID NO: 115638 - DNA, 654 bp, Fusobacterium nucleatum subsp. nucleatum ATCC 25586
  CDS (1)..(654): transl_table=11
atgataaatgatcctttaagagccagtgtattatctgtaaagttaataccaaatgtagatgctaaaatggcagaagaattaaatcttccaaatggttatagaagtattggaattattactgctgacagtgatgatgttacttatacagcattagatgaagcaacaaaaatggcagaagtagtaattgtatatgctaaatcattctatggaggggcagctaatgctaatacaaaattagcaggagaagtaatagggataatggcagggccaaatccagcagaagtaaaaagtggattaaatgcggcaatagactttattgaaaatggtggatgtttttacagtgctaatgaagatgatacaattccttactatgcacactgcgtatcaagaacaggaagctatttatctaagacagcaggtgtagaagaaggggcagcattagcttatctaatagcaccacctttggaagcaatgtatgcactagatgctgcattaaaagcagctgatgtaacacttgcagctttctttggaccaccttctgaaacaaactttggaggaggattattaacaggaagtcaatcggcttgtaagtctgcttgtgatgcttttgcagaagcagttaagtttgtggcacaaaatcctaaaaagatctaa

SEQ ID NO: 115639 - protein, 217 aa, Fusobacterium nucleatum subsp. nucleatum ATCC 25586
MINDPLRASVLSVKLIPNVDAKMAEELNLPNGYRSIGIITADSDDVTYTALDEATKMAEVVIVYAKSFYGGAANANTKLAGEVIGIMAGPNPAEVKSGLNAAIDFIENGGCFYSANEDDTIPYYAHCVSRTGSYLSKTAGVEEGAALAYLIAPPLEAMYALDAALKAADVTLAAFFGPPSETNFGGGLLTGSQSACKSACDAFAEAVKFVAQNPKKI

SEQ ID NO: 115640 - DNA, 657 bp, Clostridium tetani E88
  CDS (1)..(657): transl_table=11
atgaaaaacgatgcacttcgtccatcggtattaagtgttaaattaatagccaatgtcaatgaggatatggctaaagaattcaacttaaaaccggagcataaaagtataggaataataaccgcagattgtgatgatgttacttatacagctttagatgaagctactaaagctgtagacgttgaagtagtctatgcaaaatcattttatggtggagcggctaatgctagcactaaacttgcaggggaagttataggaataattgcaggaccaagccctgcagaagttaaaagtggactgaatgtaatggttgactttatagaaagtggagtggcaacattctacagtgctaatgatgatgactccattccatactatgcacaatgtatatcaagaacagggtcatacctttctaaaacagcaggaataaaagaaggggaagcattagcttacttaatagcaccaccgctagaggcaatgtatgcattagatgcagctatgaaagccgcttcagttgaactaaaggccttctttggaccaccatcagaaacaaattttggtggaggattattaacaggaagccaatcagcttgtaaggcagcttgtgaagcctttgcagcagcagttaaatttgtagcagaaaatcctaaagaatattaa

SEQ ID NO: 115641 - protein, 218 aa, Clostridium tetani E88
MKNDALRPSVLSVKLIANVNEDMAKEFNLKPEHKSIGIITADCDDVTYTALDEATKAVDVEVVYAKSFYGGAANASTKLAGEVIGIIAGPSPAEVKSGLNVMVDFIESGVATFYSANDDDSIPYYAQCISRTGSYLSKTAGIKEGEALAYLIAPPLEAMYALDAAMKAASVELKAFFGPPSETNFGGGLLTGSQSACKAACEAFAAAVKFVAENPKEY

SEQ ID NO: 115642 - DNA, 654 bp, Enterococcus faecalis V583
  CDS (1)..(654): transl_table=11
atgaaaaatgatcgtctaggcgcaaatgtcctaagtatgaaagtcattcccaatgtcgatccggcattagcaaaagaattatcattgaaaccagaacatcgctcattaggaattgttacttccgattgtgatgatgtcacttatgttgcattagatgaagcaaccaaagccgccgatgttactgtagtttacggtaaaagtatgtatgctggcgcagcaaatgcttcaaccaaattagccggtgaagtgattggcattattgctggtccgagtcctgccgaagtcaatagtggcttgagtgtcattacgcaagtcattgaagaagaagccagcttctatagtgctaacgaagatgacagcattgtttattttgcacatgtagtatcaagaacgggtagctttttatctgaacaagcgaatattcctgaaggtgaagcgattgcttatctgattgcaccaccgctagaagcaatggttggcttagatgcagcaatgaaagctgccgatgttcaaatgggtgtcttttatggcccaccttctgaaacgaactttggcggcgccttattgacaggtagtcaatctgcatgtaaagctgcttgcagtgcgtttgaacaagtcattcaaaatatcgctgacaatccgttgagttattaa

SEQ ID NO: 115643 - protein, 217 aa, Enterococcus faecalis V583
MKNDRLGANVLSMKVIPNVDPALAKELSLKPEHRSLGIVTSDCDDVTYVALDEATKAADVTVVYGKSMYAGAANASTKLAGEVIGIIAGPSPAEVNSGLSVITQVIEEEASFYSANEDDSIVYFAHVVSRTGSFLSEQANIPEGEAIAYLIAPPLEAMVGLDAAMKAADVQMGVFYGPPSETNFGGALLTGSQSACKAACSAFEQVIQNIADNPLSY

SEQ ID NO: 115644 - DNA, 654 bp, Listeria monocytogenes str. 4b F2365
  CDS (1)..(654): transl_table=11
atgaaaaatgataaattacctgcatccgttttaagtgtcaaagttgtatctaacgtagataatggtctatttaaacaattagacttaaaaccgcatcaaagaagccttggtattattacatctgattgtgatgatgtaacttatacagcgcttgacgaagcaacaaaagcagcagaagtagatgttgtttatgcgaaaagtatgtatgctggtgctggaaatgcatccacaaaattcgctggtgaagttatcggtattatcgccggaccaagccctgcggaagtaaaaagtggtctttctgtagcagtagatttcatcgaaaatggcgctagctttgttagtgcaaatgaagatgatagtgttccttacttcgcgcactgtgtttcaagaactggtacattcctttccaaagaagcgaatgttgcagaaggtgaagcgattgcttacttaatcgcccctccacttgaagctatgtatgcgttagatgcagcactaaaagcagcagacgtaacaatcggagctttctatggcccaccatccgaaacaaacttcggcggagcacttttgactggtagccaatctgcatgtaaagcagcttgtgatgcgttcaaaatggcagtagaaaatgtggctgaaaatccacttcaatattaa

SEQ ID NO: 115645 - protein, 217 aa, Listeria monocytogenes str. 4b F2365
MKNDKLPASVLSVKVVSNVDNGLFKQLDLKPHQRSLGIITSDCDDVTYTALDEATKAAEVDVVYAKSMYAGAGNASTKFAGEVIGIIAGPSPAEVKSGLSVAVDFIENGASFVSANEDDSVPYFAHCVSRTGTFLSKEANVAEGEAIAYLIAPPLEAMYALDAALKAADVTIGAFYGPPSETNFGGALLTGSQSACKAACDAFKMAVENVAENPLQY

SEQ ID NO: 115646 - DNA, 648 bp, Desulfitobacterium hafniense Y51
  CDS (1)..(648): transl_table=11
atgatagaggctgttaaacccaaggtattagcgacccgtttaattcccaatgtagcaccggaactggccggccagctcggtttagctcaatatcaaagatccataggcatgatcacttgcaacatagacgattcgacttatgttgctttggatgaggccacgaaaaaggccgatgtcgccgtggtttatgccaagagcttttatgcgggggcggcccatgcctccggaccccgctccggagaagtcatcggcatcctggcagctgccaatcctgccgatgtgcgggcagggattgacgcatgcattgcttatttggaaaatgaagcttttttctatagccatgatggggggaaaaccgcgtggtttcctcatacaatctccagtacggggagctatctttcccaaatagccgggattcctgaaggtgaaccccttgcctatttgatcgcccctcccctggaggctatctatggtatagatgccgccctcaaagcggctgatgtggcgatgaaggtgctttatggtccgcccaccgaaacgaacttcggcggtgccttgctgacgggtacgcaaagcgcctgccgggctgcctgtgaggatttccaacgagcggtcatcgatgtagccgaaaacggaatgaaatattaa

SEQ ID NO: 115647 - protein, 215 aa, Desulfitobacterium hafniense Y51
MIEAVKPKVLATRLIPNVAPELAGQLGLAQYQRSIGMITCNIDDSTYVALDEATKKADVAVVYAKSFYAGAAHASGPRSGEVIGILAAANPADVRAGIDACIAYLENEAFFYSHDGGKTAWFPHTISSTGSYLSQIAGIPEGEPLAYLIAPPLEAIYGIDAALKAADVAMKVLYGPPTETNFGGALLTGTQSACRAACEDFQRAVIDVAENGMKY

SEQ ID NO: 115648 - DNA, 657 bp, Nocardioides sp. JS614
  CDS (1)..(657): transl_table=11
atggcagtcctcgacccgatcaagcccacgatcctcgcggccaagctgatccccaacgtggatcgggccctcgccgccaagctcgacctccgtgacgaccagcgcagcctcgcgctgatcacctgcgacatcgacgacagcctctacgtctcgctcgacgaggcgaccaagatggccgaggtcgaggtcgtctacgcgcacagcttctatgcgggctcggcgcatgcttctggcccgctgtccggtgagatcatcgggatcctcgccggaccgtcgccggccgaggcccgcgccgggatggccgcgtgcatcgactacgccgagcaggaggcgtggttccacgccgcggacgagggcggggacctggcgttcttcgcccacccggtctcgcgcaccggcagctacctgagcaaggaggccgacgtcgccgaggggacgccgctggcctatctgatcgcgccgccgctggaggcgacgtacgccctcgacgcggcactcaaggcggccgacgtcgagttgaaggtgtggttcccgccgccctccgagacgaacttctccggagggttcctggtcggttcccaaagcgccgtggtggccgcgtgcaacgcgttccgcgacggtgttctcgagattgcggcacagccgcgggaggtctga

SEQ ID NO: 115649 - protein, 218 aa, Nocardioides sp. JS614
MAVLDPIKPTILAAKLIPNVDRALAAKLDLRDDQRSLALITCDIDDSLYVSLDEATKMAEVEVVYAHSFYAGSAHASGPLSGEIIGILAGPSPAEARAGMAACIDYAEQEAWFHAADEGGDLAFFAHPVSRTGSYLSKEADVAEGTPLAYLIAPPLEATYALDAALKAADVELKVWFPPPSETNFSGGFLVGSQSAVVAACNAFRDGVLEIAAQPREV

SEQ ID NO: 115650 - DNA, 23 bp, Artificial sequence
  primer
atgccagctttagatttgattcg

SEQ ID NO: 115651 - DNA, 20 bp, Artificial sequence
  primer
ttacgcacgctggattggat

SEQ ID NO: 115652 - protein, 212 aa, Artificial sequence
  consensus sequence
  Variant (2)..(6): Xaa in position 2 to 6 is any amino acid
  Variant (9)..(10): Xaa in position 9 to 10 is any amino acid
  Variant (12)..(14): Xaa in position 12 to 14 is any amino acid
  Variant (17)..(23): Xaa in position 17 to 23 is any amino acid
  Variant (25)..(25): Xaa in position 25 is any amino acid
  Variant (27)..(31): Xaa in position 27 to 31 is any amino acid
  Variant (33)..(33): Xaa in position 33 is any amino acid
  Variant (35)..(35): Xaa in position 35 is any amino acid
  Variant (38)..(38): Xaa in position 38 is any amino acid
  Variant (40)..(40): Xaa in position 40 is any amino acid
  Variant (46)..(46): Xaa in position 46 is any amino acid
  Variant (54)..(54): Xaa in position 54 is any amino acid
  Variant (56)..(56): Xaa in position 56 is any amino acid
  Variant (58)..(58): Xaa in position 58 is any amino acid
  Variant (63)..(63): Xaa in position 63 is any amino acid
  Variant (65)..(65): Xaa in position 65 is any amino acid
  Variant (70)..(71): Xaa in position 70 to 71 is any amino acid
  Variant (74)..(76): Xaa in position 74 to 76 is any amino acid
  Variant (84)..(84): Xaa in position 84 is any amino acid
  Variant (88)..(88): Xaa in position 88 is any amino acid
  Variant (93)..(94): Xaa in position 93 to 94 is any amino acid
  Variant (97)..(103): Xaa in position 97 to 103 is any amino acid
  Variant (105)..(106): Xaa in position 105 to 106 is any amino acid
  Variant (107)..(107): Xaa in position 107 is any or no amino acid
  Variant (109)..(109): Xaa in position 109 is any amino acid
  Variant (111)..(111): Xaa in position 111 is any amino acid
  Variant (115)..(121): Xaa in position 115 to 121 is any amino acid
  Variant (122)..(122): Xaa in position 122 is any or no amino acid
  Variant (125)..(125): Xaa in position 125 is any amino acid
  Variant (131)..(132): Xaa in position 131 to 132 is any amino acid
  Variant (135)..(136): Xaa in position 135 to 136 is any amino acid
  Variant (138)..(140): Xaa in position 138 to 140 is any amino acid
  Variant (143)..(145): Xaa in position 143 to 145 is any amino acid
  Variant (149)..(149): Xaa in position 149 is any amino acid
  Variant (156)..(156): Xaa in position 156 is any amino acid
  Variant (158)..(158): Xaa in position 158 is any amino acid
  Variant (163)..(163): Xaa in position 163 is any amino acid
  Variant (169)..(175): Xaa in position 169 to 175 is any amino acid
  Variant (178)..(178): Xaa in position 178 is any amino acid
  Variant (183)..(183): Xaa in position 183 is any amino acid
  Variant (185)..(185): Xaa in position 185 is any amino acid
  Variant (199)..(199): Xaa in position 199 is any amino acid
  Variant (202)..(203): Xaa in position 202 to 203 is any amino acid
  Variant (206)..(208): Xaa in position 206 to 208 is any amino acid
  Variant (210)..(210): Xaa in position 210 is any amino acid
DXXXXXVLXXKXXXNVXXXXXXXLXLXXXXXSXGXITXDXDDVTYXALDEATKXAXVXVVYAXSXYAGAXXASXXXAGEVIGIXAGPXPAEVXXGLXXXXXXXEXXXAXFXSANXXXXXXXXAHXVSRTGXXLSXXAXXXEGXXXAYLXAPPLEAXYXLDAAXKAADVXXXXXXXPPXETNFXGXLLTGSQSACKAACXAFXXAVXXXAXNP

SEQ ID NO: 115653 - protein, 29 aa, Artificial sequence
  protein pattern
  Variant (2)..(3): Xaa in position 2 to 3 is any amino acid
  Variant (6)..(6): Xaa in position 6 is Asp or Glu
  Variant (7)..(7): Xaa in position 7 is Ala or Asp
  Variant (8)..(8): Xaa in position 8 is Asp or Gln
  Variant (9)..(9): Xaa in position 9 is Asp, Ser or Thr
  Variant (10)..(10): Xaa in position 10 is any amino acid
  Variant (11)..(11): Xaa in position 11 is Ala, Cys, Pro or Val
  Variant (12)..(12): Xaa in position 12 is Phe or Tyr
  Variant (13)..(13): Xaa in position 13 is any amino acid
  Variant (15)..(15): Xaa in position 15 is any amino acid
  Variant (16)..(16): Xaa in position 16 is Cys or Val
  Variant (17)..(17): Xaa in position 17 is Ile or Val
  Variant (22)..(22): Xaa in position 22 is Ser or Thr
  Variant (23)..(23): Xaa in position 23 is Phe or Tyr
  Variant (26)..(27): Xaa in position 26 to 27 is any amino acid
  Variant (29)..(29): Xaa in position 29 is Gly or Asn
FXXANXXXXXXXXAXXXSRTGXXLSXXAX

SEQ ID NO: 115654 - protein, 14 aa, Artificial sequence
  protein pattern
  Variant (3)..(3): Xaa in position 3 is any amino acid
  Variant (4)..(4): Xaa in position 4 is Ala or Ser
  Variant (7)..(7): Xaa in position 7 is Ala, Asp, Asn or Ser
  Variant (8)..(8): Xaa in position 8 is Ala or Val
  Variant (9)..(10): Xaa in position 9 to 10 is any amino acid
  Variant (11)..(11): Xaa in position 11 is Ala, Asp or Gln
  Variant (12)..(12): Xaa in position 12 is any amino acid
  Variant (13)..(13): Xaa in position 13 is Ile or Leu
  Variant (14)..(14): Xaa in position 14 is Asp or Glu
EVXXGLXXXXXXXX

SEQ ID NO: 115655 - DNA, 738 bp, Escherichia coli
  CDS (1)..(738): transl_table=11
atggaaagccctactccacagcctgctcctggttcggcgaccttcatggaaggatgcaaagacagtttaccgattgttattagttatattccggtggcctttgcgttcggtctgaatgcgacccgtctgggattctctcctctcgaaagcgtttttttctcctgcatcatttatgcaggcgcgagccagttcgtcattaccgcgatgctggcagccgggagtagtttgtggattgctgcactgaccgtcatggcaatggatgttcgccatgtgttgtatggcccgtcactgcgtagccgtattattcagcgtctgcaaaaatcgaaaaccgccctgtgggcgtttggcctgacggatgaggtttttgccgccgcaaccgcaaaactggtacgcaataatcgccgctggagcgagaactggatgatcggcattgccttcagttcatggtcatcgtgggtatttggtacggtaataggggcattctccggcagcggcttgctgcaaggttatcccgccgttgaagctgcattaggttttatgcttccggcactctttatgagtttcctgctcgcctctttccagcgcaaacaatctctttgcgttaccgcagcgttagttggtgcccttgcaggcgtaacgctattttctattcccgtcgccattctggcaggcattgtctgtggctgcctcactgcgttaatccaggcattctggcaaggagcgcccgatgagctataa

SEQ ID NO: 115656 - protein, 245 aa, Escherichia coli
MESPTPQPAPGSATFMEGCKDSLPIVISYIPVAFAFGLNATRLGFSPLESVFFSCIIYAGASQFVITAMLAAGSSLWIAALTVMAMDVRHVLYGPSLRSRIIQRLQKSKTALWAFGLTDEVFAAATAKLVRNNRRWSENWMIGIAFSSWSSWVFGTVIGAFSGSGLLQGYPAVEAALGFMLPALFMSFLLASFQRKQSLCVTAALVGALAGVTLFSIPVAILAGIVCGCLTALIQAFWQGAPDEL

SEQ ID NO: 115657 - DNA, 759 bp, Pseudomonas aeruginosa PAO1
  CDS (1)..(759): transl_table=11
atgcgcctgctggcatgctggaccgacgttcaccaccgccatgcccccatgactgcccacgacctgccccgccaagcctttctccgcggcgccgtcgccatcctcccattgtccctggccgtcgcgccctgggggctgctggcgggatcgatggccatcgaagccaacctcaccccggccgagggccagggcctgtccgccatcgtcttcgccggcgccgcccagttggtggcgatcggcatgctcaagggcggtgccgggttcttttcgatcatcttcaccaccctcctcctgacctcgcagcacctgctctacggcatgagcttgcggccggtcctgtcacctctgccgggacgctggcggatcggcctgggattcctgctcaccgacgagttcttcgccctcgccagccagcacgaccggcgcaacttcaaccgctggtacgccctcggcgtcggcctgaccttctatatcgcctggaacctgttcaccctcgccggcatcctgcttggccgcagcattcccggtctcgaacacctgggcctggatttctccatcgccgccaccttcatcgcgctggtcgcgccgctggtgcgcaacgtaccgacgctagtctgcgtggccacctcgctgttctgctcggtgctgttcagccactggcaatggagttcggcgctggtcctcgccggtctcgccgggatggccgccggtttcatctgcaacaagctgtatcgggaggcgccatggtctgggcagtga

SEQ ID NO: 115658 - protein, 252 aa, Pseudomonas aeruginosa PAO1
MRLLACWTDVHHRHAPMTAHDLPRQAFLRGAVAILPLSLAVAPWGLLAGSMAIEANLTPAEGQGLSAIVFAGAAQLVAIGMLKGGAGFFSIIFTTLLLTSQHLLYGMSLRPVLSPLPGRWRIGLGFLLTDEFFALASQHDRRNFNRWYALGVGLTFYIAWNLFTLAGILLGRSIPGLEHLGLDFSIAATFIALVAPLVRNVPTLVCVATSLFCSVLFSHWQWSSALVLAGLAGMAAGFICNKLYREAPWSGQ

SEQ ID NO: 115659 - DNA, 708 bp, Deinococcus radiodurans R1
  CDS (1)..(708): transl_table=11
atgaacttctccacttccttctggcagggcttccgggcgctggtgccgctgtggctgggcacggtgccctttgcgctggcctacgccgtgacggcccgggcggcgggtctgagcgtgggggacacctgcctgatgagcctgaccaccttcgccggggcctcgcagttcgcggcggcggggctgttcggcgcccacgcgggcgggctgagcatcgtcctgaccacctttttgctcaacgcccggcatctgctctacggcctgagcctggcgcgggagctgcggctgaccctgccccagcgcgtggttgccgcgcagtttctgaccgatgaggcgtatggcgtggcggtggtcagcggcgcccggttgcccggcggcctgaccttcgcctttctgctcggcgccgaactcagcctgtacctgtcgtggaatgtcagcaccctgctcggcgcccttgccgggtcggtgctgcccccgcccgagcagctcggggtgggcgtggtctttccgctcgctttcctcgggctgctggtgccgctggtcgtggaccgcctcagcctgctggtggcgctggccgctggcctgggcgggtgggcgctctcgcgggtgctgccgggcgggctggtcatcctgctcgccggggtcggcggggcgctgctgggggcggccctgctcacgcggcgggaacagcgggcgggagtgcgggcatga

SEQ ID NO: 115660 - protein, 235 aa, Deinococcus radiodurans R1
MNFSTSFWQGFRALVPLWLGTVPFALAYAVTARAAGLSVGDTCLMSLTTFAGASQFAAAGLFGAHAGGLSIVLTTFLLNARHLLYGLSLARELRLTLPQRVVAAQFLTDEAYGVAVVSGARLPGGLTFAFLLGAELSLYLSWNVSTLLGALAGSVLPPPEQLGVGVVFPLAFLGLLVPLVVDRLSLLVALAAGLGGWALSRVLPGGLVILLAGVGGALLGAALLTRREQRAGVRA

SEQ ID NO: 115661 - DNA, 708 bp, Listeria monocytogenes EGD-e
  CDS (1)..(708): transl_table=11
ttggaaaaagaaaatgagctcagtttttatgatggtgttaaagcctgtctccctaccgtccttggttatgctgggattggtattgctgcaggagtagtaggaaaagcatcccatttaagccttttagaagtgacattacttgcgattatcgtttacgcaggtgcggcgcaatttattatttctggtttgttattactacagagtccgatatcagcaatcatttttactacttttttaattaattcaaggcattttttaatgagtatggcggaagctcctcattttaagaagtattcattgtggaataatattgggattggttctcttctcacagacgaaacgtttggtgtatcgatgaatcatattggcaataaaaaacctgttagtgctaaatggatgcacggaataaatataactgcctatctggcatggattgtcgcctgtattgttggtgcatttattggtaattggctgccaaatccagaacaatttggtttagattttgctttgtctgctatgtttatcggcttactttatttacaagtagttagcgacaaaagtaaaaaaatgagtacaagtttgttagtgatggtacttgttgcactgtttttgattctgtttatgcgagttatgacacctgaactagctattttaaccgcgacgttacttggatgtttgatgggagtgattttagagagatggcgttaa

SEQ ID NO: 115662 - protein, 235 aa, Listeria monocytogenes EGD-e
MEKENELSFYDGVKACLPTVLGYAGIGIAAGVVGKASHLSLLEVTLLAIIVYAGAAQFIISGLLLLQSPISAIIFTTFLINSRHFLMSMAEAPHFKKYSLWNNIGIGSLLTDETFGVSMNHIGNKKPVSAKWMHGINITAYLAWIVACIVGAFIGNWLPNPEQFGLDFALSAMFIGLLYLQVVSDKSKKMSTSLLVMVLVALFLILFMRVMTPELAILTATLLGCLMGVILERWR

SEQ ID NO: 115663 - DNA, 729 bp, Ralstonia solanacearum GMI1000
  CDS (1)..(729): transl_table=11
atgaccgcctcccgcgccgccgaattccgcgccggcgtcctgacgctcgcgcccatgctggtgggcgtggtgccgttcggcctgatctacggcgtgctggcgaccgccgccggcatgcccgcctggctggcggtggcgatgagcaccatcgtcttcggcggcgcctcgcagatgatcctggtgcagctgtgggcgggcggcgcgccggcgctcatgatggcggcgacggtgtcgatggtcaacctgcggcacgcgctgtattcggccagcatcgcgccggccctggtgcacctgccgcgccgctggaaatggctgatcgcctacctgctgaccgacgaagccttcgccgccatgaaccggcgcgtggtcaatgcgcagccggatgcgcaagaggccacccaccgccactggttcttcctcggcgccggcgtggcgctgtggaccagctggcaggcgtccaccatcgtcggcgtggcgctgggcgcgaaggtgccggccacctggccgctcgacttcttcctgccgctgaccttcatcgccatcgtggtgccgtcgctgcgcacgcgcgcgcagctggccgcggcgctgaccggcgctgcgctggccgtggcctggacgggctggccgcacaagctgggcctgatgggcgcggcctgcgccggcatcgccgtcggcgcgatcgtcgagcggctggttgccgggggcaccggcaagggcgccacggcatga

SEQ ID NO: 115664 - protein, 242 aa, Ralstonia solanacearum GMI1000
MTASRAAEFRAGVLTLAPMLVGVVPFGLIYGVLATAAGMPAWLAVAMSTIVFGGASQMILVQLWAGGAPALMMAATVSMVNLRHALYSASIAPALVHLPRRWKWLIAYLLTDEAFAAMNRRVVNAQPDAQEATHRHWFFLGAGVALWTSWQASTIVGVALGAKVPATWPLDFFLPLTFIAIVVPSLRTRAQLAAALTGAALAVAWTGWPHKLGLMGAACAGIAVGAIVERLVAGGTGKGATA

SEQ ID NO: 115665 - DNA, 705 bp, Agrobacterium tumefaciens str. C58
  CDS (1)..(705): transl_table=11
atgtccacatcggaaaaacgcgcagagttgattgcggggctgaggtccgccgctcctttgctggttgccatggtgccgatcggcgtggtgttcggcgcggttgccatcggcaagggcctgtcgccgctcgaggcctcgctgatgtcgctgttggtctttgccggcggctcgcaattcgtcgccatggatctctggacccacccggccagctggaccgcactcggatttgcggctctactggtcaatctgcgccatgtgctgatgagcgcctccattgccggcaagctggatgatttcaagggctggcggaaatatgcggccatgctggtgctgacggatgaatcctgggcccttgcggaattccgggtcattgccggcaggctcacggcagcctttttcgccggtgccgcgctctccatctatctggtctggaatcttgcaacactcgccggcgcgctactcggtgcggtggtgggggacatgtcggtcatcggtctggatttcgcctttccagccgtcttcatcgtgttgctcatgggcttctggaagggcagggaaaccggcttggtgcttctggcaagcgcatccgctgcctgtcttacccacgcgctggtcccgggcgcctggtatatcgccgccggcgcgatggcggggcttgcggtcgccgccttcggccgtgcggaacaggtggagcagccggcatga

SEQ ID NO: 115666 - protein, 234 aa, Agrobacterium tumefaciens str. C58
MSTSEKRAELIAGLRSAAPLLVAMVPIGVVFGAVAIGKGLSPLEASLMSLLVFAGGSQFVAMDLWTHPASWTALGFAALLVNLRHVLMSASIAGKLDDFKGWRKYAAMLVLTDESWALAEFRVIAGRLTAAFFAGAALSIYLVWNLATLAGALLGAVVGDMSVIGLDFAFPAVFIVLLMGFWKGRETGLVLLASASAACLTHALVPGAWYIAAGAMAGLAVAAFGRAEQVEQPA

SEQ ID NO: 115667 - DNA, 723 bp, Agrobacterium tumefaciens str. C58
  CDS (1)..(723): transl_table=11
atgttcaatgcagattttcgcgagggattgaagagcggtttcccgatcgccctctccgccgcccccttcggtgcgctgttcggcgcggtcgcggtcgataatggcctcagtatcaccgaagccacgatcatgagcggcaccgtctatgctggcgcgagccagctcgtcggtatcgagttgttcggccagaaggttgcgccctggctgatcgttctttccgtcttcgcggtcaatttccgccacatcctctattcggccgccattgcccggatgatctcgaactggtcgcttctgcagaaggctgcgggcttcttcgtgctggtcgatccgcaattcgccgaatcggtcaggaaatacgagaacaccggtacggtcggtttttcctggtacatgggctttgccacaccggtttatgtgctgtggctcgccatgaccattctcggcgcctcgctcggtaatctcgtcggcgatccgaaagccatcgggcttgatgtgcttttgccgatctatttcatgggcatggtcttaagcttccgccaacgggagaatttctaccctgtcatgctggcaagcgctgccggcgcgacggtcgcctatcacttcgtcggttcgccgtggcatgtcagcctcggcgcggttgccggaattgtcgtcgcggtcctctatccgccgaaacagagtgcggaagcggccaatcccgaaagcaaggcggaaacaccatga

SEQ ID NO: 115668 - protein, 240 aa, Agrobacterium tumefaciens str. C58
MFNADFREGLKSGFPIALSAAPFGALFGAVAVDNGLSITEATIMSGTVYAGASQLVGIELFGQKVAPWLIVLSVFAVNFRHILYSAAIARMISNWSLLQKAAGFFVLVDPQFAESVRKYENTGTVGFSWYMGFATPVYVLWLAMTILGASLGNLVGDPKAIGLDVLLPIYFMGMVLSFRQRENFYPVMLASAAGATVAYHFVGSPWHVSLGAVAGIVVAVLYPPKQSAEAANPESKAETP

SEQ ID NO: 115669 - DNA, 876 bp, Methanosarcina acetivorans C2A
  CDS (1)..(876): transl_table=11
gtgcaatttctgtttttcttcttcagacaaaatgaggcaaagagtgaaagaagagatagtatgactgaaaaggaggtaaaaaggtacgaaacaagggaaggggatagggaccttttcctgagtgctctcaagactacggttcccgtgtttctcggatacatacccctcggaatggctttcggatttctgatggacggagccggataccactggatttatgctttccttatgagcctcctcatttatgcgggtgcgggtcagttccttgcagtcgctttacttgctgcaggagccgggcttccggagtttgttatagccacgctgctcctgaacctcaggcatgccttttacggtttgtccctgctggataaattttccgatatcgggaaagtcaagccttaccttatctttgcattaactgacgagacttatgccctcctgaccacagccgaagttccggcaggcgggtcaaaggcaaggttttacttctacatttcagctcttgaccacttctactgggtggcagggtcggtgctcggggcaggacttggctccctgctgaatcttaaccttgaaggcatggcctttgtactgactgccctctttgtggtgctgacaatcgagcagtacttcaactccagcatacgcttccctttcgtagccgcagtgggtgcaggagccgcatcccttatactcttcagccctgaaaacatgctgttaatctcgattattctggggaccctgattctgatagccagggaaaaatttgggcagagagatacgcaattaaatgaaggcatcagacaggtcaaagggatcggacaggctcatgctacagcacagcctgttcaggacagttcacaggaggaaaactga

SEQ ID NO: 115670 - protein, 291 aa, Methanosarcina acetivorans C2A
MQFLFFFFRQNEAKSERRDSMTEKEVKRYETREGDRDLFLSALKTTVPVFLGYIPLGMAFGFLMDGAGYHWIYAFLMSLLIYAGAGQFLAVALLAAGAGLPEFVIATLLLNLRHAFYGLSLLDKFSDIGKVKPYLIFALTDETYALLTTAEVPAGGSKARFYFYISALDHFYWVAGSVLGAGLGSLLNLNLEGMAFVLTALFVVLTIEQYFNSSIRFPFVAAVGAGAASLILFSPENMLLISIILGTLILIAREKFGQRDTQLNEGIRQVKGIGQAHATAQPVQDSSQEEN

SEQ ID NO: 115671 - DNA, 738 bp, Shigella flexneri 2a str. 301
  CDS (1)..(738): transl_table=11
atggaaagccctactccacagcctgctcctggttcggcgaccttcatggaaggatgcaaagacagtttaccgattgttattagttatattccggtggcctttgcgttcggtctgaatgcgacccgtctgggattctctcctctcgaaagcgtttttttctcctgcatcatttatgcaggcgcgagccagttcgtcattaccgcgatgctggcagccgggagtagtttgtgggttgctgcactgagcgtcatggcaatggatgttcgccatgttttgtatggcccgtcactgcgtagccgtattattcagcgtctgcaaaaatcgaaaaccgccctatgggcgtttggcctgacggatgaggtttttgccgccgccaccgcaaaactggtacgcaataatcgccgctggagcgagaactggatgatcggcattgccttcagttcatggtcatcgtgggtatttggtacggtaataggggcattctccggcagcggcttgctgcaaggttatcccgccgttgaagctgcattaggttttatgcttccggcactctttatgagtttcctgctcgcctctttccagcgcaaacaatctctttgcgttaccgcagctttagttggtgcccttgcaggcgtaacgctattttctattcccgtcgccattctggcaggcattgtctgtggctgcctcactgcgttaatccaggcattctggcaaggagcgcccgatgagctatga

SEQ ID NO: 115672 - protein, 245 aa, Shigella flexneri 2a str. 301
MESPTPQPAPGSATFMEGCKDSLPIVISYIPVAFAFGLNATRLGFSPLESVFFSCIIYAGASQFVITAMLAAGSSLWVAALSVMAMDVRHVLYGPSLRSRIIQRLQKSKTALWAFGLTDEVFAAATAKLVRNNRRWSENWMIGIAFSSWSSWVFGTVIGAFSGSGLLQGYPAVEAALGFMLPALFMSFLLASFQRKQSLCVTAALVGALAGVTLFSIPVAILAGIVCGCLTALIQAFWQGAPDEL

SEQ ID NO: 115673 - DNA, 714 bp, Bordetella bronchiseptica RB50
  CDS (1)..(714): transl_table=11
atgcgcagcaagcccattgacgcgcccggcccgccgggcgcgcccgtttccgccggcctgaaggcctgcgtccccgtcatgatcggctacttcccggtggccgtggccttcggcatcgcggggctggccgccggcctgcagcccttgcaggtcatcctgatttcggtgttcgtctacgcgggcgccagccagttcctgctgctggcctcgatcaaggccggcacgccctggctgtgggtcgtggcgctgtgctcgctgctcaatgcgcgccacctgctgtacggccccttgctggcgcgtttcctgcccgagtccctgcgcgagcggctgaggatcgccttcctgctgaccgacgaggtgttcgccacggccttcaaccgcatcggcgcggtcgaaccggccagccgcgggcgctggatcacagcgctgggcctgggcgcctgggcgacctggatcgccggcaccgcggtcggcgtctatgcgggcgaagggctggagcgccattacccggtgctgtcgcaggtcatgcgttttgcgctgccggcgctgttcctggcgctggtgtgccagagcatgcagcccggcatgcggcggccggtgctggccgcgctggcggtgggcggcgcgctggcggcggtcggccagaccacgctggccatcctggccggggccgccgcgggctgcctgtgccatcgtccggagcggcgcgcatga

SEQ ID NO: 115674 - protein, 237 aa, Bordetella bronchiseptica RB50
MRSKPIDAPGPPGAPVSAGLKACVPVMIGYFPVAVAFGIAGLAAGLQPLQVILISVFVYAGASQFLLLASIKAGTPWLWVVALCSLLNARHLLYGPLLARFLPESLRERLRIAFLLTDEVFATAFNRIGAVEPASRGRWITALGLGAWATWIAGTAVGVYAGEGLERHYPVLSQVMRFALPALFLALVCQSMQPGMRRPVLAALAVGGALAAVGQTTLAILAGAAAGCLCHRPERRA

SEQ ID NO: 115675 - DNA, 759 bp, Photorhabdus luminescens subsp. laumondii TTO1
  CDS (1)..(759): transl_table=11
atgcctgtttctgatacatcatcccccttaacgagtaaaaaatcttcttttactgaaggaataatagatagtttacccattgttatcggttatattcccgtcgcctttgcttttggtctcaatgccgtcaaacttggcttcaacccaatggaagccattttcttttcatgcatcatctacgccggtgcaagccagttcgtcatcacagctttactgagtgcggggacatcattatggatttctgccctaacaattatggcaatggatgtccgccatattctttatggtccatctttaaggcaccgtatcaaagataagctaacggagaaaaaaaccgttatctgggctttcggcctgacagatgaagtttttgccgccgcgactgcaaaactcattaaaaaccaccggagctggagtgaaaactggatggttgctattgcaatctgttcttggctggcctggggcgcaggtaccgcagccggtgcatttcttggtaacggttatttggaatcctatcccgctatagaagctgccatgattttcatgttaccagcactatttctcagttttcttcttgcttcttgtagaaaacaaaatagttattgtgttgcaaccgcactaaccggagcacttttagggattacatttttctcaattccagttgctattctggcaggtattgtcggtggttgtatcgcggcactgttacaaccgcaaaacaattgcaatgactcttcagaacaaaaggaaacaccatga

SEQ ID NO: 115676 - protein, 252 aa, Photorhabdus luminescens subsp. laumondii TTO1
MPVSDTSSPLTSKKSSFTEGIIDSLPIVIGYIPVAFAFGLNAVKLGFNPMEAIFFSCIIYAGASQFVITALLSAGTSLWISALTIMAMDVRHILYGPSLRHRIKDKLTEKKTVIWAFGLTDEVFAAATAKLIKNHRSWSENWMVAIAICSWLAWGAGTAAGAFLGNGYLESYPAIEAAMIFMLPALFLSFLLASCRKQNSYCVATALTGALLGITFFSIPVAILAGIVGGCIAALLQPQNNCNDSSEQKETP

SEQ ID NO: 115677 - DNA, 726 bp, Bacillus thuringiensis serovar konkukian str. 97-27
  CDS (1)..(726): transl_table=11
atgagtaaagctgaggcacatgtagctttgcagagcgatgatacatttcagcagggagtaaaagattgtttaccaactgtatttggttatttaagcatcggtatagcagctggtgtaattgcaaaaacagcaggtttctccattattgaaattgcgtttatgtccactttaatttatgcaggttctgcccaatttatattagctggtatgtatgcagctggtgcaccggcttccgcaattatttttactgtattttttgttaacttgcgccaccttcttatgagtgctgcacttgcgccgtactttacgaaactgcctctatttaaaaacttactaattggttctcaaattacagatgaaacgttcggcgttgcagtacagcatgcggcgcaaaaaggatatttaggtgaaagatggatgatcgggcttaacgtaacagcgtatttaaattggattcttgctactatcattggcgggctatttggtgagtggataccagatccgcatacgtatgggatggattatgcattaccagcaatgtttatcggattatttgtacttcagcttataagtagtaaaccgaagctagcaattcatcttactgttgcaattgtagcgattatacttgcatacgtttctcacttatttatgccagatagtatagcggttattatcgcaacattattagctgcgacgattggagtggtgattgaaaaatggaaatga

SEQ ID NO: 115678 - protein, 241 aa, Bacillus thuringiensis serovar konkukian str. 97-27
MSKAEAHVALQSDDTFQQGVKDCLPTVFGYLSIGIAAGVIAKTAGFSIIEIAFMSTLIYAGSAQFILAGMYAAGAPASAIIFTVFFVNLRHLLMSAALAPYFTKLPLFKNLLIGSQITDETFGVAVQHAAQKGYLGERWMIGLNVTAYLNWILATIIGGLFGEWIPDPHTYGMDYALPAMFIGLFVLQLISSKPKLAIHLTVAIVAIILAYVSHLFMPDSIAVIIATLLAATIGVVIEKWK

SEQ ID NO: 115679 - DNA, 732 bp, Erwinia carotovora subsp. atroseptica SCRI1043
  CDS (1)..(732): transl_table=11
gtgaagacattaaccacacctgcaccgacaaagtctgcgtcttttagagagggcgtatttgacagtttgccgattgttatcggctacatgcccgtggcattcgcatttggcatgaacgccgtcaagctaggatttaccccgctggaaggcatttttctctcttgcatcatttacgccggtgccagccagttcgtcatcaccgcgttgctcagcgcaggtatgtccatctgggtagcggcgttgaccgtcatggcgatggatatccgccatgtgctgtatggacctgcgttacgacatcgcattgtacaacagttgccgacccggaaaaccgcactgtgggctttcggcctgacggatgaagtatttgccgcggcagccacccggctggcgaaagacaaccggcgctggtcagaaaactggatgataggcgtatcgcttttagcctggctctcatgggtgctcggcacagtgatcggtgccgtgttcggtaacggcccactggataattaccctgccgtcgaagccgcgttatctttcatgctgcccgcgcttttcttgagttttttactcgcgtccttcaagcggaaacagagtctggttgtagcgtgcgcactaggcggcgcgctgcttgggctgctgctttcctccattccagccgcgatactgctcggcattctcagcggctgtctggcttcgctggttaactccgccacgccacaggtgaacgcatga

SEQ ID NO: 115680 - protein, 243 aa, Erwinia carotovora subsp. atroseptica SCRI1043
MKTLTTPAPTKSASFREGVFDSLPIVIGYMPVAFAFGMNAVKLGFTPLEGIFLSCIIYAGASQFVITALLSAGMSIWVAALTVMAMDIRHVLYGPALRHRIVQQLPTRKTALWAFGLTDEVFAAAATRLAKDNRRWSENWMIGVSLLAWLSWVLGTVIGAVFGNGPLDNYPAVEAALSFMLPALFLSFLLASFKRKQSLVVACALGGALLGLLLSSIPAAILLGILSGCLASLVNSATPQVNA

SEQ ID NO: 115681 - DNA, 774 bp, Yersinia pseudotuberculosis IP 32953
  CDS (1)..(774): transl_table=11
atgccaaacccaaccacagcccctccttctacaacttcagcggccgcgactttcgttgaaggtattacggatagcctgcccattgttatcggctatttacccgtcgctttcgcctttggcctcagtgcggtaaaactgggttttaccccgctggaaagcattttcttttcctgcattatttatgctggtgccagccaatttgtgattaccgccctgctgagcgccgggatgtcattgtgggtatcggcactgacggtgatggcaatggatgtgcgccatattttgtatggcccggcacttaaacaccgcattgtggcaaaactatcaggtaaaaaaacggccttatgggcttttggtttaaccgatgaagtgtttgccgctgcaaccactaaattgatgaaggatcaacggcgctggagcgagaactggatgctcggtatcgcagtgacctcgtggttatcttgggtcttgggaacggccatcggcgcgatgttcggtaatgggccgttggagaactaccccgccattgaagcgtccctctcctttatgctgcctgcattattcctcagttttttgttagcctcgtttaaacgccaatacagcctgacggtgatcgcttcgctttcaggtgccttattaggggttttattgttctcaattccagtggctattttggccgggattgcgggtggttgtctcgcgactttgcttcagcccaccgcctctgtcgtggccaaacaccgtgaggatcacgagcaggagccaacaccatga

SEQ ID NO: 115682 - protein, 257 aa, Yersinia pseudotuberculosis IP 32953
MPNPTTAPPSTTSAAATFVEGITDSLPIVIGYLPVAFAFGLSAVKLGFTPLESIFFSCIIYAGASQFVITALLSAGMSLWVSALTVMAMDVRHILYGPALKHRIVAKLSGKKTALWAFGLTDEVFAAATTKLMKDQRRWSENWMLGIAVTSWLSWVLGTAIGAMFGNGPLENYPAIEASLSFMLPALFLSFLLASFKRQYSLTVIASLSGALLGVLLFSIPVAILAGIAGGCLATLLQPTASVVAKHREDHEQEPTP

SEQ ID NO: 115683 - DNA, 705 bp, Symbiobacterium thermophilum IAM 14863
  CDS (1)..(705): transl_table=11
atggccacaacgcagacgctgcccagtctgccgccggcgaccttcaccgcgggcagccgggctgcgctgcccatcgtcctcggttacctgcccatcggcttcgcgttcggcgtcctcgcccagaccgccggcttctcggtcgcagaggtggggctcatgtcgctgcttgtgtacgccggctccgcgcaattcatcggcgcggagatgttcgccgccggcgccgcggctcccgccatcatctccacgaccttcctggtcaacctgcggcacctcctgctgagcaccgccctcctgccgtcgttccggcggaaccaccccgcggtcaacgccctgctcgcctacggcatcaccgacgagaccttcgcggtgaacgcctccgtgctccgcggacgccccatcggccctggctttgtggcggggctgcacatcacgtctcaggcgagctggatcgccgcgtcggtcgccggggcgctggcgggcggcatcgcgaccaaccaggaggccctcgggctcgacttcgccctctcagcgatgttcatcggcctgctggttcccaacctgcggggcgaggaggcgggcagccgccgggtcgccgccctcgtggccgcggccctggccgtggcgatggggctgctcggccagcccagctggggcgtgatcgtcgcgaccgtcgtcgccgccaccgtgggggtgatgctccggtga

SEQ ID NO: 115684 - protein, 234 aa, Symbiobacterium thermophilum IAM 14863
MATTQTLPSLPPATFTAGSRAALPIVLGYLPIGFAFGVLAQTAGFSVAEVGLMSLLVYAGSAQFIGAEMFAAGAAAPAIISTTFLVNLRHLLLSTALLPSFRRNHPAVNALLAYGITDETFAVNASVLRGRPIGPGFVAGLHITSQASWIAASVAGALAGGIATNQEALGLDFALSAMFIGLLVPNLRGEEAGSRRVAALVAAALAVAMGLLGQPSWGVIVATVVAATVGVMLR

SEQ ID NO: 115685 - DNA, 717 bp, Bacillus licheniformis ATCC 14580
  CDS (1)..(717): transl_table=11
atggaaaagcaggattcactcaactttctagacgggcttcgttcaggggtttcccttgccgtcggctacatcccggtcgccttgacattcgggcttttggcaaaaacaacggggctgtcgctttttgaaacgtttttgatgagcgcccttgttttcggaggagcgtcccagtatatgtctctgagcatgcttgccgttcagacaggaatcatcgaaatcgtcatgacgacgttcattgtgaacatcagacattttttattttcagcgactttgaatcaattggtagaaaaagattcgccttggaaaaaagcgttttactcatttttcgcggtgacagatgaatcgtttgccgtcgctgctttaagaaaggaaaagctgacgaccgggtacatgatcggcctcggctcgatcggctatgtaagctgggttttttggagtgcggccgggcattttgcaggagccgccatgccggctgttcttcaggaaagcatgagcatcgccctttatgccatgtttatcggattgttggtgccgcctttgaaaaaacagcgcaaagtcctgctgctggcgggagctgccgcgctattcaatacggttttccaaatgaacggaatgttgtcggcaggatggtcgatcgtctgcgctacgcttttatccgccatcctgatcgaatggctgtaccaatttagaacagaggggaagagaaactatgtttag

SEQ ID NO: 115686 - protein, 238 aa, Bacillus licheniformis ATCC 14580
MEKQDSLNFLDGLRSGVSLAVGYIPVALTFGLLAKTTGLSLFETFLMSALVFGGASQYMSLSMLAVQTGIIEIVMTTFIVNIRHFLFSATLNQLVEKDSPWKKAFYSFFAVTDESFAVAALRKEKLTTGYMIGLGSIGYVSWVFWSAAGHFAGAAMPAVLQESMSIALYAMFIGLLVPPLKKQRKVLLLAGAAALFNTVFQMNGMLSAGWSIVCATLLSAILIEWLYQFRTEGKRNYV

SEQ ID NO: 115687 - DNA, 726 bp, Bacillus cereus E33L
  CDS (1)..(726): transl_table=11
atgagtaaagctgaggcacacgtagctttgcagagcgatgatacatttcagcaaggagtaaaagattgtttaccaactgtatttggttatttaagcatcggtatagcagctggtgtaattgcaaaaacagctggtttctccattattgaaattgcgtttatgtccactttaatttatgcaggttctgcccaatttatattagctggtatgtatgcagctggtgcacctgcttccgcaattatttttactgtattttttgttaacttgcgccaccttcttatgagtgctgcacttgcgccgtactttacgaaactgcctctatttaaaaacttactaattggttcgcaaattacagatgaaacgtttggcgttgcagtacagcatgcggcgcaaaaaggatatttaggcgaaagatggatgattgggctaaatgtaacggcttatttaaattggattcttgctactatcattggcgggctatttggtgagtggataccagacccgcatacgtacgggatggattatgcattaccagcgatgtttatcggattatttgtacttcagcttataagtagtaaaccgaagctagcaattcatcttactgttgcaattatagcgattatacttgcatacgtttcacacttatttatgccagatagtatagcggttattatcgcaacattactagctgcgacgattggagtagtgattgaaaaatggaaatga

SEQ ID NO: 115688 - protein, 241 aa, Bacillus cereus E33L
MSKAEAHVALQSDDTFQQGVKDCLPTVFGYLSIGIAAGVIAKTAGFSIIEIAFMSTLIYAGSAQFILAGMYAAGAPASAIIFTVFFVNLRHLLMSAALAPYFTKLPLFKNLLIGSQITDETFGVAVQHAAQKGYLGERWMIGLNVTAYLNWILATIIGGLFGEWIPDPHTYGMDYALPAMFIGLFVLQLISSKPKLAIHLTVAIIAIILAYVSHLFMPDSIAVIIATLLAATIGVVIEKWK

SEQ ID NO: 115689 - DNA, 732 bp, Psychrobacter arcticus 273-4
  CDS (1)..(732): transl_table=11
gtgaacactcaatcaaatgagatcaatcaaactcaaatacaaggctatgactgggcagaaggctttaaaaaaagcttaccagttgccatgggttatttgccagcgggtatcgcctttggtgtgcttgcccaagttgctggtataccaatatgggcaacgattatgctcagcgtggtgttatatgcaggcgcggcgcaatatgcctgcctaccgatgctgagtgccggattaccgattggtagtattgctaccaacattgcagcgattaatttgcgtcatgtcttttatggcatgccgttattacaatatctaccacaaaacaaaatagccaaaacctattgtttatttgccctcaccgatgagactttttcggtgatgaccagtttaccgaacgaatcacggcaatcgttgatattaccggtcagcatatttaatcaaggctggtgggtgctagcgagtgccattggcgttttgattggcagcgccctgagtgacttagtgccacatttagattttgccttggtatgtttattcgcgattttggcgtatgaacaatttcaaagcatcaaacgttatttccctattgttattgctgtcattgcgttggctatcgcttcactatttaccagtcattggttactactggtggcaattactatttgtatgatgatgattttggctcgtgggttttttacaccatatagcgtaaaaggagacaataatgatcagtag

SEQ ID NO: 115690 - protein, 243 aa, Psychrobacter arcticus 273-4
MNTQSNEINQTQIQGYDWAEGFKKSLPVAMGYLPAGIAFGVLAQVAGIPIWATIMLSVVLYAGAAQYACLPMLSAGLPIGSIATNIAAINLRHVFYGMPLLQYLPQNKIAKTYCLFALTDETFSVMTSLPNESRQSLILPVSIFNQGWWVLASAIGVLIGSALSDLVPHLDFALVCLFAILAYEQFQSIKRYFPIVIAVIALAIASLFTSHWLLLVAITICMMMILARGFFTPYSVKGDNNDQ

SEQ ID NO: 115691 - DNA, 960 bp, Methanosarcina barkeri str. Fusaro
  CDS (1)..(960): transl_table=11
atggtcagaaatggggagtacaaaagggaagcaggtgaacaaaacaaagatcttttcaccaccgcctttaaaaccacagttcctgtgcttcttgggtacataccccttgggatggcttttgggtttctgcttgacggtgcaggatatcattggatctacgcatttattatgagcctttttgtctatgcaggctctggccagtttctggcagtagctttactttctgcaggcgcaggattaactgagtttgccatagccacgttgcttctgaatttcaggcacgctttttacgggttgtccctgcttgataagttttccgggattggaaaggttaaaccttacctgatctttgcactaactgacgagacatacgctctcctgactacaacagatgtcccacaaggcagctcaaaatcaaagttttacttatatattgcagcccttgaccactcctactggatcgcaggttcagttctgggagctgtactaggctctgtcctggatcttaatcttgagggcatgagtttcgtgctgactgcgctatttgtggtgctgaccatagagcagtatttcagttcagaagcgcgttttcctttcataaccgcagttggcgcaggagccctgtctcttattttattcagctctgacaatatgttgcttgcctcaattgttcttgggactctgatcctgattggcagggaaaggtcagtgcagagaacacaaagaaagcaaaaaacggagaaaacggagaaaacacagaaaacacagaaaactcgggaaacacagaaaactcgggaaacacagaaaactcgggaaacacagaaaacacagaaaacacagaaaacacagaaaactcgggaaacacagaaaatgcagggaaattcacaaataaagaaggaaattcggttgattaatacacccatgcagtctgttgaagacaaaataaaggaggaaaactga

SEQ ID NO: 115692 - protein, 319 aa, Methanosarcina barkeri str. Fusaro
MVRNGEYKREAGEQNKDLFTTAFKTTVPVLLGYIPLGMAFGFLLDGAGYHWIYAFIMSLFVYAGSGQFLAVALLSAGAGLTEFAIATLLLNFRHAFYGLSLLDKFSGIGKVKPYLIFALTDETYALLTTTDVPQGSSKSKFYLYIAALDHSYWIAGSVLGAVLGSVLDLNLEGMSFVLTALFVVLTIEQYFSSEARFPFITAVGAGALSLILFSSDNMLLASIVLGTLILIGRERSVQRTQRKQKTEKTEKTQKTQKTRETQKTRETQKTRETQKTQKTQKTQKTRETQKMQGNSQIKKEIRLINTPMQSVEDKIKEEN

SEQ ID NO: 115693 - DNA, 717 bp, Pseudomonas fluorescens PfO-1
  CDS (1)..(717): transl_table=11
atgaatgaaacatccggcagtgcgccgctgatggtcgaccgtcagccgtcgcgcacctttgccgaagccagcccggtggtggccggttacttcaccgtgtcgttcgtgttcgggctgatggccgtcaacgccgggctgccgttgtggctgccggtggcgatgtgtctgttcgtgtatgccggggcttcgcaatttgcggcgctggcgctgatcagcagtggggcgtcgctgaccaccatcgtgctgaccacgtttctgatcaacgcgcggcacatgctgatgtcggtctacatggcgaaagccctgcgggcgctgggcctgagtcgcatggaacgctggtgttacgccggcggcctgaccgatgaatcgttcgccttccacagcgtcaaactgggcaccggggcgccggtgaacgtccgttatctgattggcttcaacctgttctgccacacctcgtgggtgatcggcggattgctcggcgccctgtgcgcgcagtacgcctcgcacttgatcaaataccagctcgattacgcgctgaccgcgatgatgctctacgtcctggtctcactgtgcaacacccgcaacaaactcatcgccgccttggccgcagtggtctgcatgggcgcactgagcctggtgggcagctcgccattcaacgttttcatcgccacgtttgtgggctgcggagtgggtgtatgcctgaccaaacgttcctga

SEQ ID NO: 115694 - protein, 238 aa, Pseudomonas fluorescens PfO-1
MNETSGSAPLMVDRQPSRTFAEASPVVAGYFTVSFVFGLMAVNAGLPLWLPVAMCLFVYAGASQFAALALISSGASLTTIVLTTFLINARHMLMSVYMAKALRALGLSRMERWCYAGGLTDESFAFHSVKLGTGAPVNVRYLIGFNLFCHTSWVIGGLLGALCAQYASHLIKYQLDYALTAMMLYVLVSLCNTRNKLIAALAAVVCMGALSLVGSSPFNVFIATFVGCGVGVCLTKRS

SEQ ID NO: 115695 - DNA, 924 bp, Desulfovibrio desulfuricans G20
  CDS (1)..(924): transl_table=11
atgagtgaatatgagtgtgcagcagggcagcgggcagagacggacgctgctgccggtccgcagggggccgctgccgcggtgcgcgcgggacggggtatgcgccgtgccgtgcccattgtgctcggatatctgcccgtggggtttgctttcggtgtgctggcggacaaaaccggcctttcaccgctggaggcggtgtttatgtccaccgcggtttttgcgggttccgcacagctgattgccgtaggtatgctggccacggcggccggagccggtgcggccatgttttcggtggtgcttaccacatttgtggtcaacctgcggcatctgcttatggcggcatcgctggctccgtacctgcgccgctggtcacggccgatgcaggcactttttgcttttcagctgactgacgaaacttttgccatgcacgcggtgcattttcagagcagtaaatccgggaacggcgtagcagctttgcagagcgggtatgtgcctgacaaagcggaaactctggggcttaatatgaccgcgcagctgggatgggttgcgggttctgctctgggagcgctgttcggagggctgataggtgatgtgaagcctctggggcttgattatgcgctgcccgccatgtttgtggcgctgctggtggcgcaggtgcgcggcaggctgcatgtggtggtggcggtgacttcggctgctgtttccgtggggctggcgtatgcgggggcaggtcagtggaatgtgattctggccacggtgtttgccgccacgctgggtacggtgctgtcagggcgcggcggcgggccggttgtgtcacaacgcagatcagcggagcctgcggcgggacctgccggcacggcgtcagcagtgcagacccgcggggctgcccgggattgcgcagaacacatgtctgcatcggaggagtaa

SEQ ID NO: 115696 - protein, 307 aa, Desulfovibrio desulfuricans G20
MSEYECAAGQRAETDAAAGPQGAAAAVRAGRGMRRAVPIVLGYLPVGFAFGVLADKTGLSPLEAVFMSTAVFAGSAQLIAVGMLATAAGAGAAMFSVVLTTFVVNLRHLLMAASLAPYLRRWSRPMQALFAFQLTDETFAMHAVHFQSSKSGNGVAALQSGYVPDKAETLGLNMTAQLGWVAGSALGALFGGLIGDVKPLGLDYALPAMFVALLVAQVRGRLHVVVAVTSAAVSVGLAYAGAGQWNVILATVFAATLGTVLSGRGGGPVVSQRRSAEPAAGPAGTASAVQTRGAARDCAEHMSASEE

SEQ ID NO: 115697 - DNA, 723 bp, Moorella thermoacetica ATCC 39073
  CDS (1)..(723): transl_table=11
gtgcatccacaggcagaagcaagtactatagaagagaattttagcttttatttcacccaggggttccgggccgccctgcccattgtccttggttatttacccctgggttttgcctatggtgtcctggcccgggaggcagggttcagcctttgggagacggtacttttgtccgtgtttctctatgccggttccggccagtttatcgccgtcagcctcttcagtaacggcgttgccctggcagctattatttttaccgtcttcctggtaaacctgcggcatcttcttttcagtgcttcctttgttccccacctgcggcgtttcaagccggccgttctagctctcctggcggccgagattaccgacgagacctttgctgtcgccatcagtcactatgccgaccacgatccccgtcttccctatcacttcggtctccacctgacagcccactcgtcctgggtcctggcttctttgctgggcgggctggccggcaacctcataggtgatccggctcgtttcggctttaactttgccctgccggccatgtttatcatcctcctcgttatgcagttaaaggataaaaagacactgctggtcgccgggctggcggccatcttttccgtcgccatcgccatggtttggcctgggaactggaacattatcctggctactgtcctggcagctacactgggggtgatcctggaaccatggacaggcaaatcttga

SEQ ID NO: 115698 - protein, 240 aa, Moorella thermoacetica ATCC 39073
MHPQAEASTIEENFSFYFTQGFRAALPIVLGYLPLGFAYGVLAREAGFSLWETVLLSVFLYAGSGQFIAVSLFSNGVALAAIIFTVFLVNLRHLLFSASFVPHLRRFKPAVLALLAAEITDETFAVAISHYADHDPRLPYHFGLHLTAHSSWVLASLLGGLAGNLIGDPARFGFNFALPAMFIILLVMQLKDKKTLLVAGLAAIFSVAIAMVWPGNWNIILATVLAATLGVILEPWTGKS

SEQ ID NO: 115699 - DNA, 768 bp, Shewanella sp. MR-4
  CDS (1)..(768): transl_table=11
gtgtcagagccgtatattgtccacacccattcatccagtaagaccaaggcctttttcaagggcacactcgccatgttgccactcaccattgccgttgtaccttgggggatcctcgcaggctcattcgcgattgaggtcggactaacaccaatagaaagtcaggccatgtcagcgattatttttgcaggtgccgcgcaattggtcgcgctcggcatggttaaggcggggattggtctgtggagcattttaatcactaccttgctgatcacctcgcgtcacttgctgtacgccatggcgatgcgcagccaaatcagccccttaccactcaaatggcgcctcactctgggctttttattgaccgatgaactctttgccatcgccaaccaaggcaagctgcataaattcgatccttggtacgccttgggcggcggcctaagtttttacctcggttggaacctcgccaccctcctcggcattatcgcgggcaatgctatcgataacttaggcaaattagggctcgactttgccattgccgcgacctttattgcgcttgtagtcccgacggtgaaaaaaccatcaatcctagtctgtgtactggtatcgctcaccttagctgtggtgtgcgccgtgctggatattcaggcgggactgttaattgccgccctatcggggatgagtgctggcgtgctctatgccaaactcacgggcgaggataagccagccccccaaaatgacacgactgccacccaagctgaggaaacactatga

SEQ ID NO: 115700 - protein, 255 aa, Shewanella sp. MR-4
MSEPYIVHTHSSSKTKAFFKGTLAMLPLTIAVVPWGILAGSFAIEVGLTPIESQAMSAIIFAGAAQLVALGMVKAGIGLWSILITTLLITSRHLLYAMAMRSQISPLPLKWRLTLGFLLTDELFAIANQGKLHKFDPWYALGGGLSFYLGWNLATLLGIIAGNAIDNLGKLGLDFAIAATFIALVVPTVKKPSILVCVLVSLTLAVVCAVLDIQAGLLIAALSGMSAGVLYAKLTGEDKPAPQNDTTATQAEETL

SEQ ID NO: 115701 - DNA, 711 bp, Nocardioides sp. JS614
  CDS (1)..(711): transl_table=11
gtgagcgccgcgccttccgaccctgcgccccctgacgccctcgacccctcgacgcggtcgtcgatcatccgcgacagcctcggcgtcggtatcgcgaccggtgcgtacggcgtggggttcggcgcgatctcggtggccgccgggctctcggtggcccagacgtgcgcgctgtccttgctggtcttcaccggcgccagccagttcgccctggtcggcgtggtcgccgccggcggcgcgccactgtccggcgccctgaccgccctgctgctcggcacccgcaacaccctctacggtctgcggatggcgcccctgctcgcctggcgcggctggcgtcgggtgctcggcgcccatgtcctcatcgacgagtcgacggcgatggcggtgacccgggagtcgaggccggcggcccgcctggcgttcacgtggaccggcggctcgatcttcgtgctctggaacgtcgccaccgccgccggggcggtggccggcaacgcgctcggcgacccgcgcacctacggcctcgatgcggccgtcggcgccgcgttcctcgccctgctctggccgcggctgcactcgcgccgcaaccagctggtcggcgcggccgccgcggcggtcgccctcggcgtcgtaccactggttccggccggggtaccggtgctcgccgcggcggcggtggccctggtagcgggcgcgctcgcgcgggaccagcgatga

SEQ ID NO: 115702 - protein, 236 aa, Nocardioides sp. JS614
MSAAPSDPAPPDALDPSTRSSIIRDSLGVGIATGAYGVGFGAISVAAGLSVAQTCALSLLVFTGASQFALVGVVAAGGAPLSGALTALLLGTRNTLYGLRMAPLLAWRGWRRVLGAHVLIDESTAMAVTRESRPAARLAFTWTGGSIFVLWNVATAAGAVAGNALGDPRTYGLDAAVGAAFLALLWPRLHSRRNQLVGAAAAAVALGVVPLVPAGVPVLAAAAVALVAGALARDQR

SEQ ID NO: 115703 - DNA, 708 bp, Listeria monocytogenes str. 1/2a F6854
  CDS (1)..(708): transl_table=11
ttggaaaaagaaaataagctcagtttttatgatggtgttaaagcctgtctccctaccgtccttggttatgctgggattggtattgctacaggagtagtaggaaaagcatcccatttaagccttttagaagtgacattacttgcgattatcgtttacgcaggtgcggcgcaatttattatttctggtttgttattactacagagtccgatatcagcaatcatttttactacttttttaattaattcaaggcattttttaatgagtatggcggaagctcctcattttaagaagtattcattgtggaataatattgggattggttctcttctcacagacgaaacgtttggtgtatcgatgaatcatattggcaataaaaaacctgttagtgctaaatggatgcacggaataaatataactgcctatctggcatggattgtcgcctgtattgttggtgcatttattggtaattggctgccaaatccagaacaatttggtttagattttgctttgtctgctatgtttatcggcttactttatttacaagtagttagcgacaaaagtaaaaaaatgagtacaagtttgttagtgatggtacttgttgcactgtttttgattctgtttatgcgagttatgacacctgaactagctattttaaccgcgacgttacttggatgtttgatgggagtgattttagagagatggcgttaa

SEQ ID NO: 115704 - protein, 235 aa, Listeria monocytogenes str. 1/2a F6854
MEKENKLSFYDGVKACLPTVLGYAGIGIATGVVGKASHLSLLEVTLLAIIVYAGAAQFIISGLLLLQSPISAIIFTTFLINSRHFLMSMAEAPHFKKYSLWNNIGIGSLLTDETFGVSMNHIGNKKPVSAKWMHGINITAYLAWIVACIVGAFIGNWLPNPEQFGLDFALSAMFIGLLYLQVVSDKSKKMSTSLLVMVLVALFLILFMRVMTPELAILTATLLGCLMGVILERWR

SEQ ID NO: 115705 - DNA, 696 bp, Exiguobacterium sibiricum 255-15
  CDS (1)..(696): transl_table=11
atgaacgcttcgtttcaagcaggtatcaaagcctgtctgccgaccgtcctcggttatctcggcatcggattttctgccggcatcgtcggacgcgccgccggactcagtccgcttgaaatcggtctgatgtctcttctgatttacgccggagcggcccagttcatcatcaccagtctgttgctgttaaacagtccgttctctgccatcatcttgacgacattcatcgtcaactcccgtcatttactgatgagtatgacgctcgcaccgcgtgttaaaagccggcatcatttagaccggtttggaatcggcgctctcttaacggatgagtcatttgccgtcgccatgaatacttccttaaaacggccgcttgatgcaccattcatgcatggattgaacataaccgcttatctgagctggattgcctcgaccgtccttggagcactcgttggcagttggttcccggatccggaacgattcggactggattttgctttaacagcgatgttcatcgggttattgtacctgcagtttgaaagtgagcggtcccgcatcgctctaaatggtctgttgctcgtccttgttttcctgttgttgtacatatcaatgcgctatctgtcaccggaactcgccgttttattcgcgacgatgatagctgccagtataggagttgtaatctcacgatggaaatccgcttag

SEQ ID NO: 115706 - protein, 231 aa, Exiguobacterium sibiricum 255-15
MNASFQAGIKACLPTVLGYLGIGFSAGIVGRAAGLSPLEIGLMSLLIYAGAAQFIITSLLLLNSPFSAIILTTFIVNSRHLLMSMTLAPRVKSRHHLDRFGIGALLTDESFAVAMNTSLKRPLDAPFMHGLNITAYLSWIASTVLGALVGSWFPDPERFGLDFALTAMFIGLLYLQFESERSRIALNGLLLVLVFLLLYISMRYLSPELAVLFATMIAASIGVVISRWKSA

SEQ ID NO: 115707 - DNA, 768 bp, Photobacterium sp. SKA34
  CDS (1)..(768): transl_table=11
atgaaaaaacaacttatacaagcaggtttaaaggcaatatttccgctctgcgtaggcgctttccctttctcatttattgtttgggctatcagtattaatgctggtatggacgtactacaaagcacgttatggtcactgactgtttttgcaggctctgcacaaatggtcgcactcggccttattcaatcatcaactgagttaattgtgattgcattaaccacttttgtgattaacttacgccacgttttatacagtgcgtcactatccgaatatgtaaaagaatactcaatgccaacacgtgcattaatggcctacggtttaaccgatgaagtatatgctgcaaccgttggtgaaatgaaagatgaaaaacctggtcgccattggttttatttagcagccatgtttggtttttgggttaactgggttgtcgctgacttctttggtgcagtaattggttcatctttccctcatattgctgattacggtttagattttgcgatggtagcagcctttatagctatcgttattccacaggttaaaaaacgtgagtgtattgtggcagccgttgttgctaccgttacaggtatcttattatcaggcttaccttactctttaggtcttgttgttgcggcaattgttggtgtatacgcgggttataaaatggatttatcaactgagcgtatggaagcagaactgaaagacaaagttcgtcaagaaatcgaaaaagagcaaaaaaacactcaaccaaccaaaacaatcactaaataa

SEQ ID NO: 115708 - protein, 255 aa, Photobacterium sp. SKA34
MKKQLIQAGLKAIFPLCVGAFPFSFIVWAISINAGMDVLQSTLWSLTVFAGSAQMVALGLIQSSTELIVIALTTFVINLRHVLYSASLSEYVKEYSMPTRALMAYGLTDEVYAATVGEMKDEKPGRHWFYLAAMFGFWVNWVVADFFGAVIGSSFPHIADYGLDFAMVAAFIAIVIPQVKKRECIVAAVVATVTGILLSGLPYSLGLVVAAIVGVYAGYKMDLSTERMEAELKDKVRQEIEKEQKNTQPTKTITK

SEQ ID NO: 115709 - DNA, 711 bp, Xanthobacter autotrophicus Py2
  CDS (1)..(711): transl_table=11
atgaccaagccgccccccgttcccctcaccttgcacggcatgctgcatggcgcgcgcgagacccttccgctgatgccggggctcgccgccttcggcatggcgttcggcgccgcctcggtgcagaagggcttctccatgctggagtccgtgctgtccagcggcctcatctttgccggcctcgcccagatggtggcgctcgaagggtggcgggagcagtggacgccggccgcgctcctcgccctcggcctgctgaccatgaccgtcaacatgcgccatgtgctcatgggagcatccatgcggccctggctgtggtccatgcccgcctggaagacctacccttccctgctgctgatggcggacaacaactgggccgccgccatgcgctaccatcaggagggcggcaacgacgccggctacttcgtcgggtcggggctcgtcacctggatgctgtgggtggtctctaccgcggccgggcacgccatcggcggcggcattcccgatcccaaggcggtgggcatcgacttggtggtgccggccttcttcgtggccatgctgctgcccaactggaagggccggcgcgaggcggtgggctggggcgtggccgccgcggtctccatcgcggtgtcgttcgtgctggcggggtggtggttcatcgtcatcggcgctctggccggcgcgttcgcaggcgggttcaccgacgatgagcgttga

SEQ ID NO: 115710 - protein, 236 aa, Xanthobacter autotrophicus Py2
MTKPPPVPLTLHGMLHGARETLPLMPGLAAFGMAFGAASVQKGFSMLESVLSSGLIFAGLAQMVALEGWREQWTPAALLALGLLTMTVNMRHVLMGASMRPWLWSMPAWKTYPSLLLMADNNWAAAMRYHQEGGNDAGYFVGSGLVTWMLWVVSTAAGHAIGGGIPDPKAVGIDLVVPAFFVAMLLPNWKGRREAVGWGVAAAVSIAVSFVLAGWWFIVIGALAGAFAGGFTDDER

SEQ ID NO: 115711 - DNA, 714 bp, marine gamma proteobacterium HTCC2207
  CDS (1)..(714): transl_table=11
atgcgcagtaatagagccctaaaaattgccaccgtgcgtggcgtactcgatatgctacccctgagtttagcggtgttgccttggggcatactatttggctctctggcggtacagcgaggttttagttggctcgaagcacagttgttctcggggatcatctttggcggtgcggtgcagattgttacggtggaattaattgccgataacagctcgttgctgacggtgttgtttaccgcttttattgttagttctagacactttctctatggcttgtcgctgcgcgaacgccttagccctcagccattgcgctggcgtctaagtcttggctttctgcttaccgatgagctgtttgctctgtcaggtcatcgccgcgcctatataggaaaagtgcgcctgtgctacgggttggcagccggcggcagtttctatctggcctggaatctgtggacctttgttggcattgtcgccggtgcttcgcttcccgatttaaccgatttagggttggatttcgccattgctgcgacctttattgcgctggtggttccaggggttaagtcccttgcgacgctggccgctgtgctaacggcagccgcagcttcagtgttttttaccctgtggcattttgagttagggcttatctgcgcggcactgcttgctatgacggttggctacgcggtccataaactcagcggcaacgtgggagttggcgcatga

SEQ ID NO: 115712 - protein, 237 aa, marine gamma proteobacterium HTCC2207
MRSNRALKIATVRGVLDMLPLSLAVLPWGILFGSLAVQRGFSWLEAQLFSGIIFGGAVQIVTVELIADNSSLLTVLFTAFIVSSRHFLYGLSLRERLSPQPLRWRLSLGFLLTDELFALSGHRRAYIGKVRLCYGLAAGGSFYLAWNLWTFVGIVAGASLPDLTDLGLDFAIAATFIALVVPGVKSLATLAAVLTAAAASVFFTLWHFELGLICAALLAMTVGYAVHKLSGNVGVGA

SEQ ID NO: 115713 - DNA, 660 bp, Archaeoglobus fulgidus
  CDS (1)..(660): transl_table=11
atgcattccctcagcaaatctgctatgttcagaaagggactggtttacagctttcccatcgtaatggcttacattcctgtggctttcacctttggcgttttagccagaactctcggcttttcagaagtggaggcaatgcttgcatctctgctgatattcgcgggagcgagtcagtttgccctcatcaccctctacagccagtccttgctaagtgcgattttcatccccatcttcctcaacctcaggcacataatttacagctcgataatagcccagaagctgaaactgcgctttccacacatttcagccttcggcctgactgacgaggtttttgcagtctcggtgaactccgctgaaaatgagagatttctgctcggccttgagctcggctcctactcggcatgggttggggggactgcactgggagttcttgcgggaagcaccttgattctcgacagggacgtttattctgcattggtcttctcaatctcagccctgtttctggttctcctgctcccgaacctgaagggcaggcatgtcagagcggctgttagcggtggagctgttgccttggctttccacctgcttaacctcacttctgttggaataattgcagccgccttagcaggaccgctgctttcggggtgggatggtgagtga

SEQ ID NO: 115714 - protein, 219 aa, Archaeoglobus fulgidus
MHSLSKSAMFRKGLVYSFPIVMAYIPVAFTFGVLARTLGFSEVEAMLASLLIFAGASQFALITLYSQSLLSAIFIPIFLNLRHIIYSSIIAQKLKLRFPHISAFGLTDEVFAVSVNSAENERFLLGLELGSYSAWVGGTALGVLAGSTLILDRDVYSALVFSISALFLVLLLPNLKGRHVRAAVSGGAVALAFHLLNLTSVGIIAAALAGPLLSGWDGE

SEQ ID NO: 115715 - DNA, 22 bp, Artificial sequence
  primer
atggaaagccctactccacagc

SEQ ID NO: 115716 - DNA, 24 bp, Artificial sequence
  primer
ttatagctcatcgggcgctccttg

SEQ ID NO: 115717 - protein, 189 aa, Artificial sequence
  consensus sequence
  Variant (2)..(6): Xaa in position 2 to 6 is any amino acid
  Variant (7)..(11): Xaa in position 7 to 11 is any or no amino acid
  Variant (13)..(24): Xaa in position 13 to 24 is any amino acid
  Variant (26)..(31): Xaa in position 26 to 31 is any amino acid
  Variant (33)..(41): Xaa in position 33 to 41 is any amino acid
  Variant (43)..(46): Xaa in position 43 to 46 is any amino acid
  Variant (49)..(50): Xaa in position 49 to 50 is any amino acid
  Variant (52)..(74): Xaa in position 52 to 74 is any amino acid
  Variant (75)..(80): Xaa in position 75 to 80 is any or no amino acid
  Variant (83)..(83): Xaa in position 83 is any amino acid
  Variant (85)..(105): Xaa in position 85 to 105 is any amino acid
  Variant (106)..(110): Xaa in position 106 to 110 is any or no amino acid
  Variant (114)..(138): Xaa in position 114 to 138 is any amino acid
  Variant (139)..(155): Xaa in position 139 to 155 is any or no amino acid
  Variant (157)..(162): Xaa in position 157 to 162 is any amino acid
  Variant (164)..(166): Xaa in position 164 to 166 is any amino acid
  Variant (168)..(181): Xaa in position 168 to 181 is any amino acid
  Variant (182)..(186): Xaa in position 182 to 186 is any or no amino acid
  Variant (188)..(188): Xaa in position 188 is any amino acid
GXXXXXXXXXXPXXXXXXXXXXXXGXXXXXXGXXXXXXXXXSXXXXAGXXQXXXXXXXXXXXXXXXXXXXXXXXXXXXXXRHXLXXXXXXXXXXXXXXXXXXXXXXXXXXTDEXXXXXXXXXXXXXXXXXXXXXXXXXXXXXXXXXXXXXXXXXXWXXXXXXGXXXGXXXXXXXXXXXXXXXXXXXAXF

SEQ ID NO: 115718 - protein, 28 aa, Artificial sequence
  protein pattern
  Variant (2)..(3): Xaa in position 2 to 3 is any amino acid
  Variant (4)..(4): Xaa in position 4 is Ala, Gly or Ser
  Variant (5)..(8): Xaa in position 5 to 8 is any amino acid
  Variant (9)..(9): Xaa in position 9 is Phe, Ile, Leu or Met
  Variant (10)..(10): Xaa in position 10 is Asn, Pro, Gln, Ser or Thr
  Variant (11)..(17): Xaa in position 11 to 17 is any amino acid
  Variant (18)..(18): Xaa in position 18 is Ala, Cys or Ser
  Variant (19)..(20): Xaa in position 19 to 20 is any amino acid
  Variant (21)..(21): Xaa in position 21 is Ile, Leu or Val
  Variant (22)..(22): Xaa in position 22 is Phe or Tyr
  Variant (23)..(23): Xaa in position 23 is Ala, Gly or Thr
  Variant (25)..(25): Xaa in position 25 is any or no amino acid
  Variant (27)..(27): Xaa in position 27 is any or no amino acid
GXXXXXXXXXXXXXXXXXXXXXXGXAXQ

SEQ ID NO: 115719 - DNA, 450 bp, Escherichia coli
  CDS (1)..(450): transl_table=11
atggcggaaattggtatttttgtcggcaccatgtacgggaattcactgttagtggccgaagaagcggaagcgattctgaccgcgcagggccacaaagcaacggtatttgaagatcctgaattaagcgactggctgccctatcaggataagtatgttctggtggttacgtccacgaccgggcagggcgaccttcctgatagcattgtgccactctttcagggaatcaaagatagtctgggcttccagccgaatctgcgttatggcgtgattgcgctcggcgacagtagttatgtgaatttctgcaatggcggcaaacagttcgatgccttgttgcaggaacagagcgctcagcgggttggcgaaatgctgttgattgacgccagtgagaacccggaaccggaaacggaatcaaatccgtgggtcgaacagtggggcacgctgttgtcctaa

SEQ ID NO: 115720 - protein, 149 aa, Escherichia coli
MAEIGIFVGTMYGNSLLVAEEAEAILTAQGHKATVFEDPELSDWLPYQDKYVLVVTSTTGQGDLPDSIVPLFQGIKDSLGFQPNLRYGVIALGDSSYVNFCNGGKQFDALLQEQSAQRVGEMLLIDASENPEPETESNPWVEQWGTLLS

SEQ ID NO: 115721 - DNA, 444 bp, Shigella flexneri 2a str. 301
  CDS (1)..(444): transl_table=11
atggcagatatcactcttatcagcggcagcaccctcggcggtgccgaatatgtagcagaacacctggctgaaaagctggaagaggtgggttttaccaccgaaacgctgcacggtccgctgttggaagatttatctgcctcggggatctggctggttatcagctccacccacggtgccggagatattccggacaacctttctcctttctatgaagcattgcaggaacagaagcccgatctttctgcggtccgctttggcacaatcggtattggcagtcgtgaatatgacaccttttgtggggctatcgataaactcgaggcagaactcaaaaattccggtgcaaaacagacaggcgaaacactgaagatcaacattcttgatcacgacattccggaagatccggcagaagaatggctgggatcgtggattaatttactcaaataa

SEQ ID NO: 115722 - protein, 147 aa, Shigella flexneri 2a str. 301
MADITLISGSTLGGAEYVAEHLAEKLEEVGFTTETLHGPLLEDLSASGIWLVISSTHGAGDIPDNLSPFYEALQEQKPDLSAVRFGTIGIGSREYDTFCGAIDKLEAELKNSGAKQTGETLKINILDHDIPEDPAEEWLGSWINLLK

SEQ ID NO: 115723 - DNA, 465 bp, Shewanella oneidensis MR-1
  CDS (1)..(465): transl_table=11
atgaaaatagttaatctggtctttggtactgtgtatggtagcgcacaatttacggctgaaaccttagaaaaagcactgacagaactcggttatgacgccaaattgtggcagccgaatgaaatcagtcaatttattcctccacaagatgagctgttaattgtggtgacttcgaccactggtcaaggggatttacccgatgatatccaaccttggtactattaccttaaagaaaccgcgccttatctacctgagctgaaatacagtgtgattgcgttaggtgattcgagttatgacaccttttgcggcgctggcaagtcagtggatgaattactgacagaattaggcgcacagcccattgttgctcgtcttgatattgatgcctgtgaaaccatggaacccgaggtcgaagcgataaaatggctggaaagctggaatcaactcgtcaaatccgagcgcgtcgcttag

SEQ ID NO: 115724 - protein, 154 aa, Shewanella oneidensis MR-1
MKIVNLVFGTVYGSAQFTAETLEKALTELGYDAKLWQPNEISQFIPPQDELLIVVTSTTGQGDLPDDIQPWYYYLKETAPYLPELKYSVIALGDSSYDTFCGAGKSVDELLTELGAQPIVARLDIDACETMEPEVEAIKWLESWNQLVKSERVA

SEQ ID NO: 115725 - DNA, 456 bp, Pseudomonas putida KT2440
  CDS (1)..(456): transl_table=11
atgaaagtcgccattatttccggctcggtctatggcaccgccgaagaagtcgcccgtcatgctgaatcgctgctcaaggcggcggggttcgaggcctggcatgctgcgcgtgccacccttcaggatcttcagggctttgcccccgacgccttgctggccgtgacctctaccaccggcatgggtgagttgccggacaacctcatgccgctgtacagcacccttcgtgacacactgcctgcggcctggcgcggcctgcctggcgcggtgatcgccttgggcgactccagctacggcgatacctattgcgggggtggcgagcagatgcgtgagctgttcgccgaactgggcgtacgcgaagtgcagccaatgctgcgcctggatgcgagcgagacggtgaccccggaggcggatgccgagccttggctggctgagttggcgagcgcactgaacgcctga

SEQ ID NO: 115726 - protein, 151 aa, Pseudomonas putida KT2440
MKVAIISGSVYGTAEEVARHAESLLKAAGFEAWHAARATLQDLQGFAPDALLAVTSTTGMGELPDNLMPLYSTLRDTLPAAWRGLPGAVIALGDSSYGDTYCGGGEQMRELFAELGVREVQPMLRLDASETVTPEADAEPWLAELASALNA

SEQ ID NO: 115727 - DNA, 435 bp, Vibrio vulnificus CMCP6
  CDS (1)..(435): transl_table=11
atgattcacatcatcacaggcagcacactcggtggcgcagaatacgtgggcgatcacttgagtgacctactgcaagaggctgggtttgaaaccaccattcacaatcaccctcagttaagcgaaatccctaatcaaggcacctggttgatcatcacctctacgcatggcgcaggcgaatatccagacaacattcagccttttatccacgctctgcaagcgaccccaccgaaaatgagtgatgttcgttatgctgttgtagcgattggagactccagttatgacactttttgtgccgcgggtctgcacgtccacgcgttactgactgacattggcgccagtgcgatcactcagtgtctgaccattgatgtgctcagccataccgtaccagaagacgccgccgaagtttggctaaaacaacatatcgagcagttttga

SEQ ID NO: 115728 - protein, 144 aa, Vibrio vulnificus CMCP6
MIHIITGSTLGGAEYVGDHLSDLLQEAGFETTIHNHPQLSEIPNQGTWLIITSTHGAGEYPDNIQPFIHALQATPPKMSDVRYAVVAIGDSSYDTFCAAGLHVHALLTDIGASAITQCLTIDVLSHTVPEDAAEVWLKQHIEQF

SEQ ID NO: 115729 - DNA, 453 bp, Pseudomonas syringae pv. tomato str. DC3000
  CDS (1)..(453): transl_table=11
atgaaagtcgccatcgtgtgtggatcggtctacggatcggccgaagaagttgccagacacgcagccacgctgttgcaagcttcaggccacgacaccctcgtcaaccccaggcttgcgctgccagacctgttggcgttcgagccacaggcactgctggcggtcacgtcgaccaccggcatgggcgagctgcccgataacctcatgccactctactcacaattgcgtgacctgctgcccgcagccctgcgcggtttgccggggggcgtaatcgcgctgggtgatgccagctacggcgacaccttttgtgcaggtggcgagcagatgcgcgagctgtttgccgaactggggattgtcgaagtgcaggacatgctgcgtctggacggcagtgaaagcgtcacccctgaaaccgatgccgagccttggctggcgacattcatgatccgactgggctga

SEQ ID NO: 115730 - protein, 150 aa, Pseudomonas syringae pv. tomato str. DC3000
MKVAIVCGSVYGSAEEVARHAATLLQASGHDTLVNPRLALPDLLAFEPQALLAVTSTTGMGELPDNLMPLYSQLRDLLPAALRGLPGGVIALGDASYGDTFCAGGEQMRELFAELGIVEVQDMLRLDGSESVTPETDAEPWLATFMIRLG

SEQ ID NO: 115731 - DNA, 441 bp, Photorhabdus luminescens subsp. laumondii TTO1
  CDS (1)..(441): transl_table=11
atggctactattaccttaatcagcggcagcacaatgggcagtgccgaatatgtagctgaacatatggctgaaattctggaagatgctggtttttccactgaaatgctacatggcccctccttagatgaacttcctcaggaaggaatctggctagtcgtcacatccacacatggagcaggagaattgccagaaaatatacaaccattggccgcagaaatttctgaccaaaaacccgatctcagcaaggtaacgtttggtgctgttggccttggtagttccgaatacgatactttttgcggtgcaataagatcatttgaccaactattgatagaaaatggtgctaaacgtctcggcgatcgtctggaaattgatattcaacaacatgagatccctgaagatccagcaggagaatgggttaaatattgggcaaacacactctaa

SEQ ID NO: 115732 - protein, 146 aa, Photorhabdus luminescens subsp. laumondii TTO1
MATITLISGSTMGSAEYVAEHMAEILEDAGFSTEMLHGPSLDELPQEGIWLVVTSTHGAGELPENIQPLAAEISDQKPDLSKVTFGAVGLGSSEYDTFCGAIRSFDQLLIENGAKRLGDRLEIDIQQHEIPEDPAGEWVKYWANTL

SEQ ID NO: 115733 - DNA, 450 bp, Photorhabdus luminescens subsp. laumondii TTO1
  CDS (1)..(450): transl_table=11
atggcaaagataggtatttttgttggtactgtttatggtaacgcgcttgctgtcgcagaagaagcacagcagatccttgaacaacaaggtcatgatgtagaagtctttgaagaaggggagctggaacagtggcaatcctatcttgatcaaatggttttagttatcacttcaacaaccgggcaaggggatttgcctgataatattcggcctctttactatgctttgcgagatgagcaggggtatcagccagaattacgctatggcgtgatcgctttgggtgatagcagttacgagaatttttgtggtggtggccgcacttttgatgagttgcttcaagagcaaggagcaataagaatcggtgaagttttgatggtggatgcagtggaagaagctgaaccggaagtttttgctcagccttggatcaggcaatggggagaattaattgaataa

SEQ ID NO: 115734 - protein, 149 aa, Photorhabdus luminescens subsp. laumondii TTO1
MAKIGIFVGTVYGNALAVAEEAQQILEQQGHDVEVFEEGELEQWQSYLDQMVLVITSTTGQGDLPDNIRPLYYALRDEQGYQPELRYGVIALGDSSYENFCGGGRTFDELLQEQGAIRIGEVLMVDAVEEAEPEVFAQPWIRQWGELIE

SEQ ID NO: 115735 - DNA, 444 bp, Erwinia carotovora subsp. atroseptica SCRI1043
  CDS (1)..(444): transl_table=11
atggcagacattaccttaatcagtggcagtacccttggcagcgccgaatatgtggcagagcatttggctgaactgctagaaaaggataatttctccactgaaattctgcatggccctacgcttgatgcacttcccgagagcggtatatggctggtggtaacgtcgacacacggcgcaggggagttccctgacaacctaaaagcgctgtttgaacagttggaacagcaaaagcccgatctttctcaggtgaattttggtgcgatagggatcggcagtaaagagtacgacacgttctgtggcgcgatccaaacagcggatcgtctactagcccaattgggggctaaaaggatcggtgaaattctcgagatcgacatcacgcagcatcagattccagaagatccagcagaagaatggctaggatcgtgggttaatttactcaaataa

SEQ ID NO: 115736 - protein, 147 aa, Erwinia carotovora subsp. atroseptica SCRI1043
MADITLISGSTLGSAEYVAEHLAELLEKDNFSTEILHGPTLDALPESGIWLVVTSTHGAGEFPDNLKALFEQLEQQKPDLSQVNFGAIGIGSKEYDTFCGAIQTADRLLAQLGAKRIGEILEIDITQHQIPEDPAEEWLGSWVNLLK

SEQ ID NO: 115737 - DNA, 456 bp, Erwinia carotovora subsp. atroseptica SCRI1043
  CDS (1)..(456): transl_table=11
atggcgcagattggtatttttgttggtacggtctacgggaatgcattgctggtggctgaagaagccgaaaatattctcaaggatcgtggccacgaggttaaggtctttgaggatgcgacgctggaatcctggctggattatcgtgagcatgcgattttagtcgtaacgtcgacgacgggacaaggccaactgcctgattctattgttccgctttatgcgggactgcgtgaaaaaggtggctatcagcccacgctgcgctatggcgtcattgcgctgggcgacagtagctatccgaatttctgcgcgggcggtcatcttttcgatgccttattgcaggaaataggtgctacgcgtctgggtaacgttttggatattgatgctgtcgaaaatcctgaacctgaagtcatttcatgcccgtgggttgaagaatgggcagatttggttgacgcacagtga

SEQ ID NO: 115738 - protein, 151 aa, Erwinia carotovora subsp. atroseptica SCRI1043
MAQIGIFVGTVYGNALLVAEEAENILKDRGHEVKVFEDATLESWLDYREHAILVVTSTTGQGQLPDSIVPLYAGLREKGGYQPTLRYGVIALGDSSYPNFCAGGHLFDALLQEIGATRLGNVLDIDAVENPEPEVISCPWVEEWADLVDAQ

SEQ ID NO: 115739 - DNA, 441 bp, Yersinia pseudotuberculosis IP 32953
  CDS (1)..(441): transl_table=11
atggctgacataacgttgataagtggcagtacgcttggtagtgctgaatatgttgctgaacatttagcggataaattagaagaagctgggttttctacagaaatacttcatggcccagagttggacgaacttacgctgaatggcctgtggttaatcgtgacatccactcatggtgccggggatctacctgataacttgcagccattattagaacagatcgaacaacaaaagcctgatttatcccaagtacgctttggggcggttggtttaggcagctcagaatatgacactttctgcggtgcaatcataaaactggatcaacaattgatcgcacaaggtgctcaacggttgggtgaaatattagaaattgacgtcatccaacatgaaataccagaggatccagcagagatttgggtcaaagattggattaatttactctaa

SEQ ID NO: 115740 - protein, 146 aa, Yersinia pseudotuberculosis IP 32953
MADITLISGSTLGSAEYVAEHLADKLEEAGFSTEILHGPELDELTLNGLWLIVTSTHGAGDLPDNLQPLLEQIEQQKPDLSQVRFGAVGLGSSEYDTFCGAIIKLDQQLIAQGAQRLGEILEIDVIQHEIPEDPAEIWVKDWINLL

SEQ ID NO: 115741 - DNA, 450 bp, Yersinia pseudotuberculosis IP 32953
  CDS (1)..(450): transl_table=11
atggctcaagttgggatttttgttggtactgtctatggtaatgcgttgttagtggcagaagaagctgagaacatcttgaaagatcaagggcatgaggtaaagttatttgacgaaggcacgttagaggactggcagcattaccgtcaacattatgtgttggtcattacctcaaccaccgggcagggcgatttcccagatagcatcacatcactatttgttgctgttcgtgatcaggtggggttccaacccgagttacgctatggcgtcattgcgctcggcgacagtagctatgacaatttctgcggtgctgggcgtacgttcgatgagctattgcaggagcagggcgcgacacggattggcgaacggttagagattgatgctattgagcactcagaaccagaggcgatatctgcgccatgggtggaacaatgggggcgtttgcttcagtaa

SEQ ID NO: 115742 - protein, 149 aa, Yersinia pseudotuberculosis IP 32953
MAQVGIFVGTVYGNALLVAEEAENILKDQGHEVKLFDEGTLEDWQHYRQHYVLVITSTTGQGDFPDSITSLFVAVRDQVGFQPELRYGVIALGDSSYDNFCGAGRTFDELLQEQGATRIGERLEIDAIEHSEPEAISAPWVEQWGRLLQ

SEQ ID NO: 115743 - DNA, 453 bp, Pseudomonas syringae pv. syringae B728a
  CDS (1)..(453): transl_table=11
atgaaagtcgccatcgtgtgtggaacggtctacggatcggccgaggaagttgccagacacgccgctgcactgttgcgtgccgccggccatgagaccctcgtcaatccgcgccttatgctgccggatctgctcgcctttgagcctcaggcgctccttgctgtgacgtcgaccaccgggatgggcgagttgcccgacaacctcatgcctctttatgcagcgctgcgcgacggtctgccaggcgagctgcgtggattgcctggtggggtgatcgcactgggcgatgccagttacggcgacaccttctgcgcaggcggtgagcagatgcgcgaactgttcgctgagttgggcgttagcgaagtgcaggacatgttgcgtctggacggaagcgaaagcgtcaccccggaaaccgacgccgagccgtggctggaagcgttcatcaagtatctgggctga

SEQ ID NO: 115744 - protein, 150 aa, Pseudomonas syringae pv. syringae B728a
MKVAIVCGTVYGSAEEVARHAAALLRAAGHETLVNPRLMLPDLLAFEPQALLAVTSTTGMGELPDNLMPLYAALRDGLPGELRGLPGGVIALGDASYGDTFCAGGEQMRELFAELGVSEVQDMLRLDGSESVTPETDAEPWLEAFIKYLG

SEQ ID NO: 115745 - DNA, 453 bp, Pseudomonas syringae pv. phaseolicola 1448A
  CDS (1)..(453): transl_table=11
atgaaagttgccatcgtgtgtggaacggtttacggatcggccgaagaagttgccagacacgcctctgcactgttgcgtgccgctggtcacgagaccctagtcaaccctcggctcgcgttgcccgacgtactggctttcgagcctcaggccatcctcgcggtgacgtctaccaccgggatgggtgagctgcccgacaacctcatgcctctctattcagagcttcgtgatcttttgcctggccaactgcgtggcttgccgggtggtgtgatcgcattgggtgatgccagctacggcgacaccttctgtgcaggcggcgagcagatgcgtgaattgttcgctgaactgggtgtgaatgaagtgcaggacatgctgcgtctggacggaagtgaaagcgtaaccccggaaaccgacgccgagccttggctggcagcgttcatcaagcacttgggctga

SEQ ID NO: 115746 - protein, 150 aa, Pseudomonas syringae pv. phaseolicola 1448A
MKVAIVCGTVYGSAEEVARHASALLRAAGHETLVNPRLALPDVLAFEPQAILAVTSTTGMGELPDNLMPLYSELRDLLPGQLRGLPGGVIALGDASYGDTFCAGGEQMRELFAELGVNEVQDMLRLDGSESVTPETDAEPWLAAFIKHLG

SEQ ID NO: 115747 - DNA, 456 bp, Pseudomonas fluorescens PfO-1
  CDS (1)..(456): transl_table=11
atgaaagtcgccatcctctccggctcggtgtacggcacggccgaagaagtcgctcgccacgctcagagcctgttgaacgccgccggttttgaaaccttctacaactcgcgcgccagccttgccgatctccaggcttttggccctgaagccctgctgggcgtgacctcgaccaccggcatgggggagcttccggataacctgcaacctttgtattcggccattcgcgatcagttaccggcggcctggcggggcttgcccggcgcggtgatcgccttgggtgacgccaactacggcgacactttctgcggcggcggcgagcaactgcgcgagttgttcggcgaactgggcgtacgcgaggtgcaggacatgctgcgcatcgacgccagcgaaagcgttaccccggaaaccgacgccgagccttggctgcaacagttgatcgccacgctcaagggctga

SEQ ID NO: 115748 - protein, 151 aa, Pseudomonas fluorescens PfO-1
MKVAILSGSVYGTAEEVARHAQSLLNAAGFETFYNSRASLADLQAFGPEALLGVTSTTGMGELPDNLQPLYSAIRDQLPAAWRGLPGAVIALGDANYGDTFCGGGEQLRELFGELGVREVQDMLRIDASESVTPETDAEPWLQQLIATLKG

SEQ ID NO: 115749 - DNA, 450 bp, Saccharophagus degradans 2-40
  CDS (1)..(450): transl_table=11
atgtctcgaccagttcatatagtggtaggtagcgtaatgggtactgcgttaaatgtagccacagaagttgccaaagtactcgaaacactgggacataacgtgcgtataagccctgcctttgatggcaacaacctgtaccaaacagaagatgaagtattgcttatttgcacatccaataccggtatgggcgatttacccgaaaacatattgccgctgtacgcactgcttactcaaacacccccaaatattgcagggcggcactacgggcttattaacctaggcgacagctcttaccctaattttgcccaagccggcaccacgctagatgaagccatggccgacattggcgccacgcgagttggcacaccctgtgtactcgatgcaatttacgtagacgaacccgaagaagaagcctgtgattgggctaaaaagtgggcacaactcctttaa

SEQ ID NO: 115750 - protein, 149 aa, Saccharophagus degradans 2-40
MSRPVHIVVGSVMGTALNVATEVAKVLETLGHNVRISPAFDGNNLYQTEDEVLLICTSNTGMGDLPENILPLYALLTQTPPNIAGRHYGLINLGDSSYPNFAQAGTTLDEAMADIGATRVGTPCVLDAIYVDEPEEEACDWAKKWAQLL

SEQ ID NO: 115751 - DNA, 450 bp, Rhodococcus sp. RHA1
  CDS (1)..(450): transl_table=11
atggcagtggtgattctgtacggcagcgagggcgggacctccgaactggtggccgacaacatcgccgacgtgctcggcgactacggcgacacgtccctgtacgacatgatggagttcgacgcgggcgatctcgaccccgagaatttccacgtcatcgtgtgctccacctacggtgagggcgagctgcccaccggcgcggaacccttcttcgagggtctcgaggaagacgaacccgatctcaccggtttgcagttcgcgctgttcggcctcggcgacaaggtgtacgaggagacctacaaccgcggcggcgagatcatcgcggagaagctcgtctccctcggcgcggtccaggtgggcgaacacggcaggcacgacgggtccagctcgatccgcccgaaggatcaggccgaggagtgggccaagaacatcggcgaggaattcctcggatag

SEQ ID NO: 115752 - protein, 149 aa, Rhodococcus sp. RHA1
MAVVILYGSEGGTSELVADNIADVLGDYGDTSLYDMMEFDAGDLDPENFHVIVCSTYGEGELPTGAEPFFEGLEEDEPDLTGLQFALFGLGDKVYEETYNRGGEIIAEKLVSLGAVQVGEHGRHDGSSSIRPKDQAEEWAKNIGEEFLG

SEQ ID NO: 115753 - DNA, 465 bp, Shewanella sp. MR-4
  CDS (1)..(465): transl_table=11
atgaaaaaagttaatctggtttttggcactgtgtatggtagcgcacaatttaccgccgaaaccttagaaaaagcgctaacagaactcggttatgacgccaaattgtggcaaccgaacgaaattagtcaatttacgccgccacaggatgagttgttagtggtcgtgacttcgaccactgggcaaggggatttacccgacgatattcagccttggtactatcatcttaaggagacagcgccttatctgcctgagctgaaatacagtgtgatagcactcggcgattcgagttacgataccttttgtggtgcgggtaaatcggtagatgaattgctcagcgagctaggcgccaaacccgttgtggcgcgtcttgaaattgatgcctgtgaaaccatggaacccgaggtcgaagcgataaaatggctggaaagctggaatcaaatcgtcaaatccgaacgcgccgcttag

SEQ ID NO: 115754 - protein, 154 aa, Shewanella sp. MR-4
MKKVNLVFGTVYGSAQFTAETLEKALTELGYDAKLWQPNEISQFTPPQDELLVVVTSTTGQGDLPDDIQPWYYHLKETAPYLPELKYSVIALGDSSYDTFCGAGKSVDELLSELGAKPVVARLEIDACETMEPEVEAIKWLESWNQIVKSERAA

SEQ ID NO: 115755 - DNA, 441 bp, Shewanella sp. MR-4
  CDS (1)..(441): transl_table=11
atgaccaagattgcgatattagtcggtaccaccctcggcagcagtgaatatattgcggatgaaatgcaggctcaactcacgcctttaggacatgaagtcgatacctttttgagcccaactttggatgatctgcaaccttattccctttggatcatcgtctcatcgactcacggagccggtgatctacccgacaatttacagccattttgtaaagaactgctgctaaacacaccagatcttacccaagtccaattcgccctatgtgcaattggcgattcgagttatgacaccttttgccaaggccctgaaaaattaattgaagcgctcgaatacagtggtgcaaaagtcattgtggataagatccagatcgatgtacaacaggatccagtgccagaagacccagctttagcctggttggcacaatggcaagatcaaatttaa

SEQ ID NO: 115756 - protein, 146 aa, Shewanella sp. MR-4
MTKIAILVGTTLGSSEYIADEMQAQLTPLGHEVDTFLSPTLDDLQPYSLWIIVSSTHGAGDLPDNLQPFCKELLLNTPDLTQVQFALCAIGDSSYDTFCQGPEKLIEALEYSGAKVIVDKIQIDVQQDPVPEDPALAWLAQWQDQI

SEQ ID NO: 115757 - DNA, 441 bp, Shewanella sp. MR-7
  CDS (1)..(441): transl_table=11
atgaccaagattgcgatattagtcggtaccaccctcggcagcagtgaatatattgcggatgaaatgcaggctcaactcacgcctttaggacatgaagttgatacctttttgagtccaacattggatgatctgcaacctcattccctttggatcatcgtctcatcgactcacggagccggtgagctacccgacaatttacagccattttgtaatgaactgctgctaaacataccagatcttacccaagtccaatacgccctatgtgcaattggcgattcgagttatgacaccttttgccaaggccctgaaaaattaattgaagcgctcgaatacagtggtgcaaaagtcattgtggataagatccagatcgatgtacaacaagatccagtgccggaagacccagctttagcctggttggcacaatggcaagatcaaatttaa

SEQ ID NO: 115758 - protein, 146 aa, Shewanella sp. MR-7
MTKIAILVGTTLGSSEYIADEMQAQLTPLGHEVDTFLSPTLDDLQPHSLWIIVSSTHGAGELPDNLQPFCNELLLNIPDLTQVQYALCAIGDSSYDTFCQGPEKLIEALEYSGAKVIVDKIQIDVQQDPVPEDPALAWLAQWQDQI

SEQ ID NO: 115759 - DNA, 465 bp, Shewanella sp. ANA-3
  CDS (1)..(465): transl_table=11
atgaaaaaagttaatctggtgtttggcactgtgtatggtagcgcacaatttaccgccgaaaccttagaaaaagcgctgacagaactcggttatgacgccagattgtggcaaccgaatgaaattagccaatttacgccgccacaggatgagttgttagtggtagtgacttcgaccactggacaaggggatttacccgacgatattcagccttggtattatcatcttaaggagactgcgccttatctgcccgagctgaaatacagcgtaatcgcacttggtgattcgagttacgataccttttgcggtgcgggtaaatcggtagatgaattgctcagcgagttaggcgctaaacccgttgtggcgcgtctagaaattgatgcctgtgaaaccatggaacccgaggtcgaagcgataaaatggctggaaagctggaatcaaatcgtcaaatccgaacgcgccgcttag

SEQ ID NO: 115760 - protein, 154 aa, Shewanella sp. ANA-3
MKKVNLVFGTVYGSAQFTAETLEKALTELGYDARLWQPNEISQFTPPQDELLVVVTSTTGQGDLPDDIQPWYYHLKETAPYLPELKYSVIALGDSSYDTFCGAGKSVDELLSELGAKPVVARLEIDACETMEPEVEAIKWLESWNQIVKSERAA

SEQ ID NO: 115761 - DNA, 444 bp, Actinobacillus pleuropneumoniae serovar 1 str. 4074
  CDS (1)..(444): transl_table=11
atgaccaaatctatttgtatcatcacaggcagtacccttggcggagcggaatatgttgccgatcatctcgaaagttgtttaaaagcgcaagattttaccgtcgaattatttaatcaagcgaccttagcggatattcaacatcaagcctatttaattgtggtaacttcaacccatggcgcaggcgaattgccggataatatcaaaccgttatttgacgaactggcggcaagcgatttggatctcagcggtatgaaattcggtgtggtcggtttaggcagcaccgattacgatactttctgtcattcggtggatattgttgaaaacggtctaactgccaaaggtgcgaaacaggtatgtgaatcggttcgtattgatgtggcaaataattttgaccacgacggcaccgcagaagcatggttgccaagttttgttgagaaactttaa

SEQ ID NO: 115762 - protein, 147 aa, Actinobacillus pleuropneumoniae serovar 1 str. 4074
MTKSICIITGSTLGGAEYVADHLESCLKAQDFTVELFNQATLADIQHQAYLIVVTSTHGAGELPDNIKPLFDELAASDLDLSGMKFGVVGLGSTDYDTFCHSVDIVENGLTAKGAKQVCESVRIDVANNFDHDGTAEAWLPSFVEKL

SEQ ID NO: 115763 - DNA, 441 bp, Haemophilus influenzae R2846
  CDS (1)..(441): transl_table=11
atgcacatttgcattctttcaggcagcactttaggtggtgcggaatatgttgccgagcatttaaacgatgttttagaaactaaaggtttctccaccgcactttttcacggaccaaatttatctgacattgaaaacgagagaatttggctgattgttacttcaacgcatggtgcaggcgaattgccagacaatttaaaacctctatttgatgaattagcgaatagccaaaaggatttttcagatgttcgctttgcggtcgttggattaggtagttctgattatgatactttttgctatgcagcggacaaagtggagcaaacacttcaagcaaaaagtgcggtaaaaatttgtgagactttaaaaattgacgtgttaaacgtggatgatcaagaaagttatgctgaagaatggttaccgagttttattgagggattgaaatga

SEQ ID NO: 115764 - protein, 146 aa, Haemophilus influenzae R2846
MHICILSGSTLGGAEYVAEHLNDVLETKGFSTALFHGPNLSDIENERIWLIVTSTHGAGELPDNLKPLFDELANSQKDFSDVRFAVVGLGSSDYDTFCYAADKVEQTLQAKSAVKICETLKIDVLNVDDQESYAEEWLPSFIEGLK

SEQ ID NO: 115765 - DNA, 441 bp, Haemophilus influenzae R2866
  CDS (1)..(441): transl_table=11
atgcacatttgtattctttcaggcagcactttaggtggtgcggaatatgttgccgagcatttaaacgatgttttagaaactcaaggtttttccaccgcactttttcacggaccaaatttatctgacattgaaaacgagaaaatttggcttgttgtgacttcaacgcatggtgcaggcgaattgccagacaatttaaaacctctatttgatgaattagcgaatagccaaaaggatttttcagatgttcgctttgcggtcgttggattaggtaattctgattatgatactttttgctatgcagcggacaaagtggagcaaacacttcaagcaaaaagtgcggtaaaaatttgtgagactttaaaaattgacgtgttaaacgtggatgatcaagaaagttatgctgaagaatggttaccgagttttattgagggattgaagtga

SEQ ID NO: 115766 - protein, 146 aa, Haemophilus influenzae R2866
MHICILSGSTLGGAEYVAEHLNDVLETQGFSTALFHGPNLSDIENEKIWLVVTSTHGAGELPDNLKPLFDELANSQKDFSDVRFAVVGLGNSDYDTFCYAADKVEQTLQAKSAVKICETLKIDVLNVDDQESYAEEWLPSFIEGLK

SEQ ID NO: 115767 - DNA, 444 bp, Pseudoalteromonas tunicata D2
  CDS (1)..(444): transl_table=11
atggcagatattacacttatttatggttcggtttttggtggggcagaagccttaacctatacccttaaaactcaagttgaagcaaagggacgcagcgcagaggttctcgatgcacctactattgccgatttacaagccgcaaaagttattttagtggtcacttcaacgactggtctaggtgatttacctgataacttagtaccgctttattatcaattagagtcacaatttccaatgcttacagcgcaaaaatttgcagtcatagccatgggcgatgcaagctatggtgagacgtattgtggtgcaggtcgtaaagttgaagctttatttttagagttacaagcaaaaaagatatgtcaaatgcttgaaattgatgcctgcgaagattttgatcctgagcctgtagcacttaagtggttaaacgatttcttagcggccctgtaa

SEQ ID NO: 115768 - protein, 147 aa, Pseudoalteromonas tunicata D2
MADITLIYGSVFGGAEALTYTLKTQVEAKGRSAEVLDAPTIADLQAAKVILVVTSTTGLGDLPDNLVPLYYQLESQFPMLTAQKFAVIAMGDASYGETYCGAGRKVEALFLELQAKKICQMLEIDACEDFDPEPVALKWLNDFLAAL

SEQ ID NO: 115769 - DNA, 441 bp, Pseudoalteromonas tunicata D2
  CDS (1)..(441): transl_table=11
atgaaaacgatccatattatagttggcagtcaaatgggatctgctgagtacacggcagatcagatccatcaagaacttaacgcaattaatatcgcgaatgaactccatgaatttcccgatccaaccatgatcccatctgaaaatgtgatctggttaatttgcacttcaactcatggagctggtgatttacctgataatttacaagaatttgcagcgtatataactgaagtaaattcattatcagaaatagaatatggcataattggtttaggtgatcgcagttatgacacctttaatctagcctgcaaaacaattgatgatttgctagcacttaaaggtgcaaaacgcatcggccaaaggttagaaatagatgtgcttgatgaacaattacctgaagacagcgcacttgcatggttaccaacttggttaaagcagatctaa

SEQ ID NO: 115770 - protein, 146 aa, Pseudoalteromonas tunicata D2
MKTIHIIVGSQMGSAEYTADQIHQELNAINIANELHEFPDPTMIPSENVIWLICTSTHGAGDLPDNLQEFAAYITEVNSLSEIEYGIIGLGDRSYDTFNLACKTIDDLLALKGAKRIGQRLEIDVLDEQLPEDSALAWLPTWLKQI

SEQ ID NO: 115771 - DNA, 447 bp, Photobacterium sp. SKA34
  CDS (1)..(447): transl_table=11
atgagctcacttagccttattaccggtagtactttaggtggcgcagaatatgtcgccgatcatttagcagaattgctcgaagataatggccaccaagctgaagtcatcaatcaagcagagttttcagagctcgatcaagacactatctggctaatcatttgctcaactcacggtgcaggcgactatcctgataactttttgccatttgtagaacaactcactcaacaacaacccacacttagcggtgttaaatttgctgtcatagggcttggtgatagtaattacgataccttctgcgcggcaggtaagaaaatagaaggattgttactttctttaggtgcaaaccagctcggtgaacgtcttgatattgatgtttcagagacaccagtacctgaagaacctgctgaagcatggtttaatagctggaaaaacttgatcgctgattaa

SEQ ID NO: 115772 - protein, 148 aa, Photobacterium sp. SKA34
MSSLSLITGSTLGGAEYVADHLAELLEDNGHQAEVINQAEFSELDQDTIWLIICSTHGAGDYPDNFLPFVEQLTQQQPTLSGVKFAVIGLGDSNYDTFCAAGKKIEGLLLSLGANQLGERLDIDVSETPVPEEPAEAWFNSWKNLIAD

SEQ ID NO: 115773 - DNA, 447 bp, Photobacterium sp. SKA34
  CDS (1)..(447): transl_table=11
atggctcgattaggtatttttatcggatctgtttatggtggtgcagaagatctggcagaagcattagcagagagtgcggagtcgattgatacgcagatctattttgaacctacgttagatgattttcttgattacaaagatgataatgtacttattatttcatcaacaactggacaaggtgagatccctgaaaacttgttgccgctttatgttgcactgcaagatcaatttccgctcttacctcaacagcaatttggcgtgatagcgttaggagattctagttatggtgaagatcgcttttgcggtgccgggcgtcaatttgatgcattattagcagagttaggcgctaaacctgtacaagatcgccttgatattgatgcgggtatccattttgagcctttagatgtcgcgaaaggttggtttgacacctttattgcacagatataa

SEQ ID NO: 115774 - protein, 148 aa, Photobacterium sp. SKA34
MARLGIFIGSVYGGAEDLAEALAESAESIDTQIYFEPTLDDFLDYKDDNVLIISSTTGQGEIPENLLPLYVALQDQFPLLPQQQFGVIALGDSSYGEDRFCGAGRQFDALLAELGAKPVQDRLDIDAGIHFEPLDVAKGWFDTFIAQI

SEQ ID NO: 115775 - DNA, 456 bp, Oceanospirillum sp. MED92
  CDS (1)..(456): transl_table=11
atggcaaatattaaaattctcgtgggcactgtttatggtaatgcccaggatgtcgcggaaatgtgtcgtgaaaacttagtggcagcaggacatgaggtttcattgcttaggcaagcgacgatcgatgaagttgtagtagacgaaacagaaattttgcttgtgtgcacttctacgacaggccagggtgaaattcctgatagtttgctgcttctatattgccagctgcaggataaacagccggatttaaagcatgttaaatatggcctgatctcattaggtgatagttcatatgacacttatgctgaagctggatggttaatggatgagttgtttcagaagatggaaatgcagcggattggcgagccattgcttatcgatgcatgtgaaacgttaacccctaatgagccggctgaaaattggcttgtaggatgggcagactcaatagcatcaaagtaa

SEQ ID NO: 115776 - protein, 151 aa, Oceanospirillum sp. MED92
MANIKILVGTVYGNAQDVAEMCRENLVAAGHEVSLLRQATIDEVVVDETEILLVCTSTTGQGEIPDSLLLLYCQLQDKQPDLKHVKYGLISLGDSSYDTYAEAGWLMDELFQKMEMQRIGEPLLIDACETLTPNEPAENWLVGWADSIASK

SEQ ID NO: 115777 - DNA, 450 bp, Alteromonadales bacterium TW-7
  CDS (1)..(450): transl_table=11
atggcacatattagtatttttgtgggcactgtaaatggtggtgctgaacgtttaagtgatgatatagctgcaactattgagcaggcgggtcatagtgcagcggtcatcacagaggcttcgcttgacgatattaaaaacgcatcaaacatattaattgttacctcaacgacaggacagggtgacgtgccaagtaacctagctggcttatattatgcgcttaatagtagttttcctatgcttacagataagccatttggagtggtggctatgggcgacagaagctatggtgatactttttgcggtgcaggtcgaagctttgatgaactattacgtgatttacaagcaaaacctgtcggtaaccgtttagaaattgacgcgtgtgaagattttgagccttggccagtgacagagccttggttaaaaacatggcttgaaaagctcccagattaa

SEQ ID NO: 115778 - protein, 149 aa, Alteromonadales bacterium TW-7
MAHISIFVGTVNGGAERLSDDIAATIEQAGHSAAVITEASLDDIKNASNILIVTSTTGQGDVPSNLAGLYYALNSSFPMLTDKPFGVVAMGDRSYGDTFCGAGRSFDELLRDLQAKPVGNRLEIDACEDFEPWPVTEPWLKTWLEKLPD

SEQ ID NO: 115779 - DNA, 444 bp, Escherichia coli
  CDS (1)..(444): transl_table=11
atggcagatatcactcttatcagcggcagcaccctcggcggtgccgaatatgtagcagaacacctggctgaaaagctggaagaggcgggttttaccaccgaaacgctgcacggtccgctgttagaagatttacctgcctcagggatctggctggttatcagctccacccacggtgccggagatattccggacaacctttctcctttctatgaagcattgcaggaacagaagcccgatctttctgcagtccgctttggcgcaatcggtattggcagtcgtgaatatgacaccttttgtggggctatcgataaactcgaggcagaactcaaaaattccggtgcaaaacagacaggcgaaacactgaagatcaacattcttgatcacgacattccggaagatccggcagaagaatggctgggatcgtgggttaatttactcaaataa

SEQ ID NO: 115780 - protein, 147 aa, Escherichia coli
MADITLISGSTLGGAEYVAEHLAEKLEEAGFTTETLHGPLLEDLPASGIWLVISSTHGAGDIPDNLSPFYEALQEQKPDLSAVRFGAIGIGSREYDTFCGAIDKLEAELKNSGAKQTGETLKINILDHDIPEDPAEEWLGSWVNLLK

SEQ ID NO: 115781 - DNA, 444 bp, Pasteurella multocida
  CDS (1)..(444): transl_table=11
atgaaaacaaaaatttgtattatcactggcagtacgcttggtggtgcagaatatgttgcagaacatattgctgaaatattagaacaacaagattatcctgtacgtttagaacatggaccaaattttgaagaagtgatcgatgaaaaatgttggcttgttgtcacctctacccatggtgcaggtgaattaccggataatattaaacctctgtttgaaaaattagcatttcacccaaaacagttagctgacttacgctttgcggtgatcgggttaggtaattcggattatgataccttctgtcacgcagtggatcatgtggaacaattactgctaagcaaagatgctttacaactgtgtgaatcgctaagaatggatatgctaaccattactgatcctgaacacacggccgaacaatggctcccacaatttctcagtcaattataa

SEQ ID NO: 115782 - protein, 147 aa, Pasteurella multocida
MKTKICIITGSTLGGAEYVAEHIAEILEQQDYPVRLEHGPNFEEVIDEKCWLVVTSTHGAGELPDNIKPLFEKLAFHPKQLADLRFAVIGLGNSDYDTFCHAVDHVEQLLLSKDALQLCESLRMDMLTITDPEHTAEQWLPQFLSQL

SEQ ID NO: 115783 - DNA, 435 bp, Vibrio cholerae
  CDS (1)..(435): transl_table=11
atgattcatatcattactggcagcaccctaggcggtgcggaatatgtgggtgaccacctgagtgatttactgcaagaacaaggctttgacaccaaaattcacaaccagcccaacatgagtgagatccctgctaaagggacttggctgatcatcacctcaacccatggggctggtgagtacccggataatatccagccctttattcaagctctgcagaatacaccaccgaatacctctgcactacgttatgccgtggtcgcgattggtgattcaagctacgatactttctgcgcggcaggtaaacatgcctatcagctgctgggggatattggtgctaaacctctggccaactgctttaccatcgatgtacaagagcacccagtgcctgaagatgccgctgaagcttggctcaaacgcgtcatcaatcgcttctaa

SEQ ID NO: 115784 - protein, 144 aa, Vibrio cholerae
MIHIITGSTLGGAEYVGDHLSDLLQEQGFDTKIHNQPNMSEIPAKGTWLIITSTHGAGEYPDNIQPFIQALQNTPPNTSALRYAVVAIGDSSYDTFCAAGKHAYQLLGDIGAKPLANCFTIDVQEHPVPEDAAEAWLKRVINRF

SEQ ID NO: 115785 - DNA, 453 bp, Pseudomonas aeruginosa
  CDS (1)..(453): transl_table=11
atgaaagtcgccattctctccggctcggtctacggcaccgccgaagaagtcgcccggcacgcccagaaattgctgtccgcggccggcctcgaggcctcccatctgccccgcgccagcctcgacgaactcaaggccttcgcccccgaggcattcctggtggtgacctcgaccaccggcatgggcgaactgccggacaacctgcaaccgctgtactacgcgatccgcgaccaactgccggcctggcacggcctgccgggtggggtcatcggcctgggcgattcgagctacggcgacacgttctgcggtggcggcgagcaggttcgcgaactgttcggcgaactgggcgtgcgtgaagtgctgccgatgctgcgcctggatgccagcgaaaccgttacccccgagaccgacgccgagccttggctggccgagttcgccgccgccctcaagggctga

SEQ ID NO: 115786 - protein, 150 aa, Pseudomonas aeruginosa
MKVAILSGSVYGTAEEVARHAQKLLSAAGLEASHLPRASLDELKAFAPEAFLVVTSTTGMGELPDNLQPLYYAIRDQLPAWHGLPGGVIGLGDSSYGDTFCGGGEQVRELFGELGVREVLPMLRLDASETVTPETDAEPWLAEFAAALKG

SEQ ID NO: 115787 - DNA, 25 bp, Artificial sequence
  primer
atggcggaaattggtatttttgtcg

SEQ ID NO: 115788 - DNA, 23 bp, Artificial sequence
  primer
ttaggacaacagcgtgccccact

SEQ ID NO: 115789 - protein, 135 aa, Artificial sequence
  consensus sequence
  Variant (2)..(4): Xaa in position 2 to 4 is any amino acid
  Variant (6)..(6): Xaa in position 6 is any amino acid
  Variant (8)..(10): Xaa in position 8 to 10 is any amino acid
  Variant (12)..(17): Xaa in position 12 to 17 is any amino acid
  Variant (19)..(20): Xaa in position 19 to 20 is any amino acid
  Variant (21)..(21): Xaa in position 21 is any or no amino acid
  Variant (23)..(46): Xaa in position 23 to 46 is any amino acid
  Variant (47)..(48): Xaa in position 47 to 48 is any or no amino acid
  Variant (51)..(51): Xaa in position 51 is any amino acid
  Variant (53)..(53): Xaa in position 53 is any amino acid
  Variant (55)..(56): Xaa in position 55 to 56 is any amino acid
  Variant (59)..(61): Xaa in position 59 to 61 is any amino acid
  Variant (63)..(83): Xaa in position 63 to 83 is any amino acid
  Variant (84)..(85): Xaa in position 84 to 85 is any or no amino acid
  Variant (87)..(89): Xaa in position 87 to 89 is any amino acid
  Variant (91)..(91): Xaa in position 91 is any amino acid
  Variant (92)..(93): Xaa in position 92 to 93 is any or no amino acid
  Variant (97)..(117): Xaa in position 97 to 117 is any amino acid
  Variant (119)..(120): Xaa in position 119 to 120 is any amino acid
  Variant (122)..(127): Xaa in position 122 to 127 is any amino acid
  Variant (130)..(131): Xaa in position 130 to 131 is any amino acid
  Variant (133)..(134): Xaa in position 133 to 134 is any amino acid
GXXXGXAXXXAXXXXXXLXXXGXXXXXXXXXXXXXXXXXXXXXXXXXXSTXGXGXXPDXXXPXXXXXXXXXXXXXXXXXXXXXXXGXXXYXXXTFCXXXXXXXXXXXXXXXXXXXXXLXXDXXXXXXPEXXAXXW

SEQ ID NO: 115790 - protein, 24 aa, Artificial sequence
  protein pattern
  Variant (2)..(4): Xaa in position 2 to 4 is any amino acid
  Variant (5)..(5): Xaa in position 5 is any or no amino acid
  Variant (8)..(8): Xaa in position 8 is any amino acid
  Variant (10)..(10): Xaa in position 10 is any amino acid
  Variant (12)..(12): Xaa in position 12 is Asp or Glu
  Variant (13)..(13): Xaa in position 13 is any amino acid
  Variant (15)..(15): Xaa in position 15 is Asp or Glu
  Variant (16)..(16): Xaa in position 16 is Asp, Asn or Ser
  Variant (17)..(17): Xaa in position 17 is Phe, Ile or Leu
  Variant (18)..(23): Xaa in position 18 to 23 is any amino acid
  Variant (24)..(24): Xaa in position 24 is Ile, Leu or Val
LXXXXSTXGXGXXPXXXXXXXXXX

SEQ ID NO: 115791 - DNA, 2160 bp, Escherichia coli
  CDS (1)..(2160): transl_table=11
atgctttttagcttttttcgaaatttgtgccgtgttttgtatcgcgttcgcgttacgggtgacacccaggcactgaagggcgagcgcgttctaattacgcctaatcacgtctcttttattgatggcattttgcttggactgtttttacctgtgcgtccagtgtttgccgtttacacctcaataagccaacagtggtatatgcgttggctgaaatcatttatcgactttgttcctctcgacccgacgcaacctatggctattaaacatctggtacgtctggtggaacagggccgaccagtggtgattttccctgaaggacgcatcaccacgacaggctcgctgatgaaaatctacgatggcgcgggttttgtcgcggcgaagtctggtgcaacggttattcctgtgcgtattgaaggggcggaacttacgcacttcagccgcctgaaaggtctggttaaacgtcgcttgttcccgcaaattactctgcatattttgccaccaacgcaggtggcgatgccggatgcgccgcgtgcccgtgaccgtcgcaaaatcgctggcgaaatgctgcatcaaataatgatggaagcgcgaatggcggtgcgcccgcgtgaaacgctgtacgaatctttactgagtgcaatgtaccgcttcggagccgggaagaaatgtgtcgaagacgtcaactttaccccagactcctatcgcaaattgcttacgaaaacgctgtttgttggacgcatccttgaaaaatacagtgttgaaggcgaacgcatcggcttaatgctgcccaatgcaggcatcagtgcggcagtgatttttggggccatcgcccgtcgccgcatgcccgcaatgatgaactacactgccggggtaaaagggctgaccagtgctattacggcggctgaaatcaaaaccatcttcacttcccgccagtttctcgataaaggcaaactctggcatctgccggagcaacttactcaggtgcgctgggtctatctggaagatttaaaagcagatgtcaccactgccgacaaagtatggatcttcgctcatttgctgatgccgcgtctggcacaggttaaacagcagccggaagaagaggcgctgatcctttttacctccggttctgaaggccatccgaaaggcgtcgtccatagccataaaagcattctggcgaatgtcgagcagattaaaacgattgccgacttcaccaccaacgatcgctttatgtcggcgttaccgctgtttcactcctttgggctgacggtaggcctgtttacgccactgcttacaggtgcagaagtgttcctttatccaagcccgctgcattaccgcattgtgccggagttggtgtatgaccgcagttgcaccgtgttgttcggcacctcgactttcctcggtcactacgcgcgtttcgccaacccgtatgacttctatcgtctacgctatgtggtggcaggcgcagaaaaattacaagaaagtaccaaacagctttggcaggataaatttggcctgcgcatccttgaaggctacggcgtgaccgaatgcgcgcctgtcgtttctatcaacgtaccgatggcggcgaaacccggtacggtagggcgtattctaccaggaatggatgcgcgcctgttgtcggtccctggtatcgaagagggcggacgcctgcaactgaaagggccgaacataatgaacggctatctgcgggtggagaagccaggtgtactggaagtgcccaccgccgagaatgttcgcggcgaaatggagcgcggctggtatgacactggcgatattgtgcgttttgacgagcagggctttgtgcagattcagggccgcgcaaaacgctttgccaaaattgcaggcgaaatggtgtcgctggaaatggtggaacaactggcacttggtgtttcgccagataaagtccatgccactgcgattaagagcgatgccagcaaaggcgaggcactggtgcttttcaccacagataacgaactgacgcgcgataagttgcaacagtatgcccgcgagcacggcgtgccggagcttgctgtaccgcgcgatattcgctatctgaaacagatgccattacttggcagcggcaaacctgactttgtcacgttgaaaagctgggtagacgaagcggaacaacacgatgagtaa

SEQ ID NO: 115792 - protein, 719 aa, Escherichia coli
MLFSFFRNLCRVLYRVRVTGDTQALKGERVLITPNHVSFIDGILLGLFLPVRPVFAVYTSISQQWYMRWLKSFIDFVPLDPTQPMAIKHLVRLVEQGRPVVIFPEGRITTTGSLMKIYDGAGFVAAKSGATVIPVRIEGAELTHFSRLKGLVKRRLFPQITLHILPPTQVAMPDAPRARDRRKIAGEMLHQIMMEARMAVRPRETLYESLLSAMYRFGAGKKCVEDVNFTPDSYRKLLTKTLFVGRILEKYSVEGERIGLMLPNAGISAAVIFGAIARRRMPAMMNYTAGVKGLTSAITAAEIKTIFTSRQFLDKGKLWHLPEQLTQVRWVYLEDLKADVTTADKVWIFAHLLMPRLAQVKQQPEEEALILFTSGSEGHPKGVVHSHKSILANVEQIKTIADFTTNDRFMSALPLFHSFGLTVGLFTPLLTGAEVFLYPSPLHYRIVPELVYDRSCTVLFGTSTFLGHYARFANPYDFYRLRYVVAGAEKLQESTKQLWQDKFGLRILEGYGVTECAPVVSINVPMAAKPGTVGRILPGMDARLLSVPGIEEGGRLQLKGPNIMNGYLRVEKPGVLEVPTAENVRGEMERGWYDTGDIVRFDEQGFVQIQGRAKRFAKIAGEMVSLEMVEQLALGVSPDKVHATAIKSDASKGEALVLFTTDNELTRDKLQQYAREHGVPELAVPRDIRYLKQMPLLGSGKPDFVTLKSWVDEAEQHDE

SEQ ID NO: 115793 - DNA, 3414 bp, Mesorhizobium loti MAFF303099
  CDS (1)..(3414): transl_table=11
atggaaatcgccatgaacacgcatctgatgttgtcccggcgctttgcgcctctgttctggacgcagttcctgtccgccttcaacgacaatttcctcaagaacacgctggtgttcctgatcctcttcacgctggccgccgaccaggcggcttcgctggtcacgctcgccggggccgtcttcatggcgcccttcctgttgttgtcggcccttggcggcgagatcgccgatcgcttcgacaaggccctcatcgcccggcggctgaaattcgccgagatcgccgcagcggccgtctctgtcgccggcattgcgctgtcttcgatcccggtgctgatgacggcgctgctgatgttcggcatcatctcggcgctgttcggaccgatcaaatacggcatcctgcccgatcacctcgagcgcaaggaactgcccaaggccaacgcctggatcgagtcggccacgtttgccgccatcctaggcggcaccatcgccggcggcgtcgtgtcggccgatggcataggcgtcacggtgttcgggccgatcatgatggccctggccgtcggctgctggttcgtcagccgctacattccgcccacgggttcggcggcacccggcctcgtcatcgacaagaacatcttccgctcgacctggcgccaggtaagcgaattgcgcaccgacacgcggatatggcgcgccggactgatgacctcctggttctggctgatcggcgccatcgtgctttcgatcctgccgaccttgatcaaggattcgctcggcggcaacgaaatcgccgtcaccgtctatctcgcggtgtttgccgtctcgatcgccatcggctcggcgatagcagcatggatgtcgcaggggcgcatcgtgcttctgccggccccggtcggcacggcgctgctggcgctgttcggcctgcatctggcctggaccatatggagcatgcagccttcgccgaaggcgcaaacccttgccctgttcttcgccgggccaaacacgatccgcgtagcgatcgacctcgccgccatggccatcgccagcgccttcctcgtggtgccgaccttcgccgccgtgcaggcctggtcgccggaagcgcgccgcgcccgcgtcgtcgcagcggtcagcatcgtcaatgccggcttcatgacggtcggcggtattgttgtcgccgtgatccagacgaaagtctcgaccggcggcatcctgttcggcttggccgtggccaacgccgtcgcggcctggctgatgctgaaattcctgccgaccaacgccttccgcgatttcgtctcgatcctgttccgcgccttcctgcgcctggaggtcgagggcatggaaaacctcaaggcggccggcaaggcgccgatcctggcgctcaaccatgtcagcttcctcgacggcccactggcgctgacgctgaccgacgaggagccggtcttcgccatcgactacgccatcgcccaggcctggtggatgaaaccgttcatgaagcttgctcgcgccttgccgctcaatccggccaagccgatgtcgacccgcacgctgatcaagatcgtgcagggtggcgatccgctggtcatcttccccgaaggccgcatcaccgtcaccggcgggctgatgaaggtctatgatggcgccgccatggtggcggacaagaccggctcgatggtcgtgccgatccgcatcgacgggctggagaaaagcccgttctcgcggctgacgtcgcagcatgtgcgccgccgcctgttcccgaaggtcaaggtgaccatactggagccggtcaagctgcaagtgccgccggaactgaagggccgcaagcgccgcgccgcggcgggttcggcactctatcaggtcatgtcggatctcgtcttccgcacccaggacatcgacaagacggtgctggaaaagatcatcctgacggcgaatgaacgcggcatgaaacggctcgccgtgcaggatccggtcaccggctcactgagctatggcaagctgctgacggcggccgccgtgcttggcgagaaattccagaacctttatgccggccagcagacgctcggcatcatgctgcccaacgccaacggctcatgcgccacgctgcttggcgtgatgtcggccggcaaggtgccggcgatgatcaacttcaccgcgggtgccgccaacatcctgtccgcctgcaaggcggccgaggtgaggaccgtgctcacgtcccgcgcctttgtcgagcaggcaaaactcggcgcggtggtcgaggagatcggccggtcggttgacatcgtctggctcgacgatctgcgtgcaaccatgggtctcaaggacaagctgcttggcctgttgcgcaagtcgacgccgcgcgcgccgcgcaagcctgacgacccggcggtgatcctgttcacttcgggctcggaaggcacgccgaagggcgtcgtgctcacccaccgcaacatactggccaatgccgcgcaggccgcctcgcgcatcgacttccactcgggcgacaaggtgttcaacgttttgccgatcttccattccttcggcatgacggccggcacggtgctgccgttgatctcgggcgtgccggtctatttctacccgtcgccgctgcactaccgcatcgtgccggaactgatctacgcatccaacgcgacgatcatcttcggcaccgatacgttcctcagcggctatgcgcgcaccgcgcacccctatgacttccgctcgatacgctattgttttgccggcgccgaaccggtcaaggcagcgacgcgcatgacctacatggagaagttcggggtgcgtatcctcgagggctacggcgtgaccgaagcggcgccggtgattgccatcaacacgccgatgtacaacaagtccggcagcgtcggtaaaatcatgcccgggatggaataccgcctggatccggtacccggcgtcgatgaaggcgggcgtctctacgtgcgcggcccgaatgtcatggcgggttatctgcgcgccgagaagccgggcgcgctcgaaccgctggaggacggctggcatgacaccggcgatgtcgtctcggtcgacgagggcggcttcatcaccattcgcggccgcgccaagcgtttcgccaagatcggcggcgagatgatttcgctcgccgccgtcgaggcgctggccggtgaagtgtggaaaggctcgttgtcggcggtcgcttccgtgccggatgcgcgcaagggcgagaagctcattctcatcaccgaggctcccggcgccacacgtgccgagttgcttgccttcgccaaggccaatggcgccatggacctgatggtgccagccgaagtgcgcgtcgtcccgaaagtgccggtgctcggctccggcaagctcgacttcgccggcgtgaccaagctggtgcgggatgcgccagtagccaaggtcgaggccgcctga

SEQ ID NO: 115794 - protein, 1137 aa, Mesorhizobium loti MAFF303099
MEIAMNTHLMLSRRFAPLFWTQFLSAFNDNFLKNTLVFLILFTLAADQAASLVTLAGAVFMAPFLLLSALGGEIADRFDKALIARRLKFAEIAAAAVSVAGIALSSIPVLMTALLMFGIISALFGPIKYGILPDHLERKELPKANAWIESATFAAILGGTIAGGVVSADGIGVTVFGPIMMALAVGCWFVSRYIPPTGSAAPGLVIDKNIFRSTWRQVSELRTDTRIWRAGLMTSWFWLIGAIVLSILPTLIKDSLGGNEIAVTVYLAVFAVSIAIGSAIAAWMSQGRIVLLPAPVGTALLALFGLHLAWTIWSMQPSPKAQTLALFFAGPNTIRVAIDLAAMAIASAFLVVPTFAAVQAWSPEARRARVVAAVSIVNAGFMTVGGIVVAVIQTKVSTGGILFGLAVANAVAAWLMLKFLPTNAFRDFVSILFRAFLRLEVEGMENLKAAGKAPILALNHVSFLDGPLALTLTDEEPVFAIDYAIAQAWWMKPFMKLARALPLNPAKPMSTRTLIKIVQGGDPLVIFPEGRITVTGGLMKVYDGAAMVADKTGSMVVPIRIDGLEKSPFSRLTSQHVRRRLFPKVKVTILEPVKLQVPPELKGRKRRAAAGSALYQVMSDLVFRTQDIDKTVLEKIILTANERGMKRLAVQDPVTGSLSYGKLLTAAAVLGEKFQNLYAGQQTLGIMLPNANGSCATLLGVMSAGKVPAMINFTAGAANILSACKAAEVRTVLTSRAFVEQAKLGAVVEEIGRSVDIVWLDDLRATMGLKDKLLGLLRKSTPRAPRKPDDPAVILFTSGSEGTPKGVVLTHRNILANAAQAASRIDFHSGDKVFNVLPIFHSFGMTAGTVLPLISGVPVYFYPSPLHYRIVPELIYASNATIIFGTDTFLSGYARTAHPYDFRSIRYCFAGAEPVKAATRMTYMEKFGVRILEGYGVTEAAPVIAINTPMYNKSGSVGKIMPGMEYRLDPVPGVDEGGRLYVRGPNVMAGYLRAEKPGALEPLEDGWHDTGDVVSVDEGGFITIRGRAKRFAKIGGEMISLAAVEALAGEVWKGSLSAVASVPDARKGEKLILITEAPGATRAELLAFAKANGAMDLMVPAEVRVVPKVPVLGSGKLDFAGVTKLVRDAPVAKVEAA

SEQ ID NO: 115795 - DNA, 2223 bp, Mesorhizobium loti MAFF303099
  CDS (1)..(2223): transl_table=11
atgatcctgacactggctctgcttgcgggtcttgccctggcctggctgctgatcggcgtggtggaaaaattccgcctcggcctgcgtttcggccaggcgctgctctatgtgccgttcaagctcgcctaccggatcgacgacagccacatcaggatcgcgcgcaaggcgcaggctcccgtcatctatgtcatctcgcaccagtcgcgcttcgaaccggcgctgatgctgtcgctgctgccggatgacacgctgcacattctggacgaggtctcggcgcgctcgccgtggctggaaccctggcgtgagcttggccgcacgattgccttcaatgccgaacatcttttcgtcagccgccggctggtgcgtgtgctgaagggcaagggccggctcgccgtctatctgccggatgcggtcgagcctgacgtcaagacgtttcggctgtttcgcgccgtcacccgcatcgccatgcaggccgatgcccgcatcgtgccgatctttgtcgccggcgcgcgcagcctgcctgtttccctgacgccggcggccagggccccgcggcactggtttccgcagctctcgatgagcgtactggagccgatgaccatcgccgagctggtggcgcgcaatccggaccaggcctccaataccaatgcgctgttcgaccgcgtcgccgaggcccggcttttcggcaacgacctcgaccgcggcctgttcctggccatgcgcgatgccgcggccagggtcggcgcctcgcatccgatcatcgaggacgtgatctcgggtgcgctgagctaccgcaagatgttcatcggcgcccgcgtgctgggcaggcgtttcgaggcggtgaccgcgccaggcgaagcggtgggaataatgctgcccaacgccaatggcgtcgtgctgtcattcgtcggccttctgtcagcgggacgagtggcggcgatgatcaactacacttctgggccggcgagcgtcaccgccgccgtgcgcacggccgtcatccgcaccgtcatctcctcgcgcgccttcgtcgagaaggccgatcttggcgacatcgtcgccgcggtcgagatgggcggcgccaggctgctgtggctggaagatgttcggaccagcgtcaccgcgctggacaagcttgccgccgcgttgctgtggcgtttgccgctgcagcgccaggatgcggccaagccgggtgtgatcctgttcacgtcaggctcggagggcacgccgaaggcggttgtcctgtcgcaaaagaaccttctcgccaatgccatgcaggccgaggcgcgcatcaccatctcgccggccgatatcctgctcaacgtgctgccggtgttccattccttcggcctgacgggcggcaccgtcctgccgctggtcaccggagtgaagcttttcctctacccctcgccgctccactacaagatcatccccgagatcgcccgcaaggtgcagccgacgatcatgttcggcaccgacaccttcctcgccaactatgcgcgcaccgccaaggacggcgacttctccagcctgcgcttcgtcgtcgccggcgccgaggcggtgaagccggaaacccgccgcatctatcgcgagcgcttccaggccgagatcatcgaagggtttgggctgaccgaggccgcacccgtggtcgccgtcaacaccgccatccatgggcgcgatggtacggtcggccggctgttgccggccatgcgcatgaagctggaaccggtcgaaggtatttcggacgccggccagttgtggctcgacggacccaatttgatgatgggctacatgactgcggaccgccccggtgagctgcagccgctgagcggctggcatgacaccggcgacatcgtcgccgtcgaccgcgatggcttcatcaccattcgcggccgcgccaagcgcttcgccaagatcgccggcgagatggtgtcgctgggtgcggtcgagatgctggtgcagtcgctgtggccggaagaacgccatgcggcggtggcggtgcccgacaagaggcgcggcgagcgcatcgtactggtcaccaccgccgacgacgccaatcccgaagaattgcgccagttcggcaagaaagccggggccgccgagctgatggtgcccaacgacatcgtcaaggtggaggaaatcccggtgctcggttccggcaagaccgattatgtctcgaccaggaagctggcgatcgacaggctgggactgggcgtcgcggcctga

SEQ ID NO: 115796 - protein, 740 aa, Mesorhizobium loti MAFF303099
MILTLALLAGLALAWLLIGVVEKFRLGLRFGQALLYVPFKLAYRIDDSHIRIARKAQAPVIYVISHQSRFEPALMLSLLPDDTLHILDEVSARSPWLEPWRELGRTIAFNAEHLFVSRRLVRVLKGKGRLAVYLPDAVEPDVKTFRLFRAVTRIAMQADARIVPIFVAGARSLPVSLTPAARAPRHWFPQLSMSVLEPMTIAELVARNPDQASNTNALFDRVAEARLFGNDLDRGLFLAMRDAAARVGASHPIIEDVISGALSYRKMFIGARVLGRRFEAVTAPGEAVGIMLPNANGVVLSFVGLLSAGRVAAMINYTSGPASVTAAVRTAVIRTVISSRAFVEKADLGDIVAAVEMGGARLLWLEDVRTSVTALDKLAAALLWRLPLQRQDAAKPGVILFTSGSEGTPKAVVLSQKNLLANAMQAEARITISPADILLNVLPVFHSFGLTGGTVLPLVTGVKLFLYPSPLHYKIIPEIARKVQPTIMFGTDTFLANYARTAKDGDFSSLRFVVAGAEAVKPETRRIYRERFQAEIIEGFGLTEAAPVVAVNTAIHGRDGTVGRLLPAMRMKLEPVEGISDAGQLWLDGPNLMMGYMTADRPGELQPLSGWHDTGDIVAVDRDGFITIRGRAKRFAKIAGEMVSLGAVEMLVQSLWPEERHAAVAVPDKRRGERIVLVTTADDANPEELRQFGKKAGAAELMVPNDIVKVEEIPVLGSGKTDYVSTRKLAIDRLGLGVAA

SEQ ID NO: 115797 - DNA, 3513 bp, Campylobacter jejuni subsp. jejuni NCTC 11168
  CDS (1)..(3513): transl_table=11
atgcaaaaaaaatcttttttgaaaatttacggattaattccttttttacttatagcattcatcaatgcttttgtggatttgggacataaaattattattcaaaatactatttataaggcctatgaaggaagtgagcagttatttttaaatgctatagttaatgctttgattttacttccttttattcttatgctttctccttcgggttttttagcggataaatatccaaaaaatattgtaatgaaaatttcagcaattttcaatgttatactcactttaataatttgcatttgttactatagcggtgctttttggatggcttttatttttacttttataatgggagcacaagcagcgatttattcaccaagtaaatacggttttattaaagaactcgtgggaaaagactttcttgctatgggtaatggtgtaattaatgcggtaagcattgtggcaatcttagcgggaatggctttattttctttaagctttgaaagtctttatagttctatgtataatcaaacagatgaaattttaaaagaagtagcgcctttaggaattgtgctaattttattttcttgtatcgaagtattttttgcgtggcgtttacctaagctcaaacaaacaaataaagatttagtttttaataaaaaagactatattcgtggaaaacttctaataaataatcttaagcttgtttttaaaaataaaactatttggctttgtataattggaatttcatttttttgggctatatctcaactttatcttgtcagctttcctgtctttgctaaaaatgaacttttcatagaaaatactttttatgtgcaaatttcactcgctttttctggtataggagtgattttaggctctttagtagctggtaaattttcaaaaaattatatagaacttggatttattccacttggtgcattgggtatgtttttaatggcttttttaatgccttattttataagtttattaagttatagttttttatttttcttttttggattttgcggagccctttttatcattcctttaaatactttaatccaatttcatgctaaagaaaatgaattaggacaaattcttgcaggaaataatttttttcaaaatattgccatgttgggatttttgctcttggcaactttatttgtaaaatttgaaatcaatgtgatttatttgttttattttattgctttggtaacctttataggaagtttttacatacttttaaaactccccttttctttagtgcgtatacttttaagcatagcttttttacaacgataccgtttacttgtggaaggttttgaaaatataccagaaaaaggtggagctttacttttgggtaatcatatttcttttattgattgggctgttgtacaaatggcaattccaagaaaaatttattttgttatggaaagaagtatttattctaaatggtatattaaaatttttcttgataaatttggtattattcctgtatcaagtacaggaagtaagacgagtttagaactgatagcaaagcatattaaagaaggtaatttagtttgcttatttcctgaaggtacactttcgcgacatgggcaattaaatgaatttaaagcaggatttgaattagcttgtgaatgtttaagtgaagatgatggaaaaattattcctttttatataagagggctttggggtagcgctttttcaagaagtgatgaagaattttcagcaagaaaccgcactttaaataaaagaaaaattgctatagcttttggtaaagctatgcctttgcattctaaaaaagatgaagttaaagctaaagtttttgaactttcttttatggcttggaaatcacaatgcgaagctatgcatactatagcaagagcttggatagatacagctaaaaaaaatctaaatcaaatagctattatcgatacactagctggagatatttcttatagaaaaatgttgactcttagtttatttcttaatttttttattaaaagaaaatccaaagagttaaacattaaccttcagcgtggaagttacgctcctaaagaggaagctataggaattttactacctgcttcttttgcaagttctttaaccaatctatctgttttaatcgcagaaaaaattgcagtaaatcttaatttcactgctggagaaaaagctctaaaagcagctataaaaaatgcgcaaatttcacaaatttatacttctaaaacttttttagaaaaattagcaaataaaggtataaacctaaatttcgatacaaatatacatttaatttattttgaagatattgtagaagattttaaaatgcaaaaaactaaaatttttagcatgatgctagcagttagtattatacctagttttatactcaaaagcatcttcactccttcaaaaaacaatcttgccatcgcagctattttatttagtagtggaagtgaaggttctccaaaaggtgttatgctcaataaccgtaatattttaagcaatatagcacaaatttctgatgtgctttgcacaagaaataatgatgtcattctctcatctttaccaccttttcatgcttttggacttaccgtaactacatttttgcctttgcttgaaggtattaaaagcatcactttttcagatccaaccgatgccttaggggttgccaaagctgttgctaaaaataatgtcactattatgtgtggaacttcaacctttttaggaatttatgcaagaaataaaaagcttgatgctttaatgtttgaaagtttaagaatagttgtatcgggcgctgaaaaactaaaaaatgaagtaagaactacttttgaaatgaagtttaaaaaaagcatttttgaaggttacggggctacggaaaccacgcctgtggcgagtgtaaatttaccaaatcattttgatgtggattattggcttatacatcgtgctaataaagaaggaagcgtaggaatgcctctacctggaactgcggtacgtattgttgatccaaataattatgaaaatttaaaaacaaatgaagatggactcatacttataggcggtcatcaagttatggtaggctatcttaatgacaaagaaaaaaccgatgaagtggttaaagaaattgatggcataagatggtacaacacgggagataagggacatttggatgaagatggttttttatatattgtcgatcgttattctcgctttgcaaaaattggcggagagatgatttctttgggtgcaatagaagaagaaattgccaaatttatagacactgaagtggttaaattttgtgccacatctttagaagatgagaaaaaagaggaacaaattgttttactcatagaatgcaataatgaaatttttgaaggagtatgtgaggctataaaaaattctaatatacctacactttttaaacctagatattattttcaaatagaaaaaattcccctcctaggttcaggaaaagttgatcttaaaaaagttaaagaattagctaaaaatttagccatataa

SEQ ID NO: 115798 - protein, 1170 aa, Campylobacter jejuni subsp. jejuni NCTC 11168
MQKKSFLKIYGLIPFLLIAFINAFVDLGHKIIIQNTIYKAYEGSEQLFLNAIVNALILLPFILMLSPSGFLADKYPKNIVMKISAIFNVILTLIICICYYSGAFWMAFIFTFIMGAQAAIYSPSKYGFIKELVGKDFLAMGNGVINAVSIVAILAGMALFSLSFESLYSSMYNQTDEILKEVAPLGIVLILFSCIEVFFAWRLPKLKQTNKDLVFNKKDYIRGKLLINNLKLVFKNKTIWLCIIGISFFWAISQLYLVSFPVFAKNELFIENTFYVQISLAFSGIGVILGSLVAGKFSKNYIELGFIPLGALGMFLMAFLMPYFISLLSYSFLFFFFGFCGALFIIPLNTLIQFHAKENELGQILAGNNFFQNIAMLGFLLLATLFVKFEINVIYLFYFIALVTFIGSFYILLKLPFSLVRILLSIAFLQRYRLLVEGFENIPEKGGALLLGNHISFIDWAVVQMAIPRKIYFVMERSIYSKWYIKIFLDKFGIIPVSSTGSKTSLELIAKHIKEGNLVCLFPEGTLSRHGQLNEFKAGFELACECLSEDDGKIIPFYIRGLWGSAFSRSDEEFSARNRTLNKRKIAIAFGKAMPLHSKKDEVKAKVFELSFMAWKSQCEAMHTIARAWIDTAKKNLNQIAIIDTLAGDISYRKMLTLSLFLNFFIKRKSKELNINLQRGSYAPKEEAIGILLPASFASSLTNLSVLIAEKIAVNLNFTAGEKALKAAIKNAQISQIYTSKTFLEKLANKGINLNFDTNIHLIYFEDIVEDFKMQKTKIFSMMLAVSIIPSFILKSIFTPSKNNLAIAAILFSSGSEGSPKGVMLNNRNILSNIAQISDVLCTRNNDVILSSLPPFHAFGLTVTTFLPLLEGIKSITFSDPTDALGVAKAVAKNNVTIMCGTSTFLGIYARNKKLDALMFESLRIVVSGAEKLKNEVRTTFEMKFKKSIFEGYGATETTPVASVNLPNHFDVDYWLIHRANKEGSVGMPLPGTAVRIVDPNNYENLKTNEDGLILIGGHQVMVGYLNDKEKTDEVVKEIDGIRWYNTGDKGHLDEDGFLYIVDRYSRFAKIGGEMISLGAIEEEIAKFIDTEVVKFCATSLEDEKKEEQIVLLIECNNEIFEGVCEAIKNSNIPTLFKPRYYFQIEKIPLLGSGKVDLKKVKELAKNLAI

SEQ ID NO: 115799 - DNA, 3423 bp, Rickettsia conorii str. Malish 7
  CDS (1)..(3423): transl_table=11
atggacacaaacaaattatatcttttcaaagatagacgatttttaccgaattttatagtgcagttatgcggttgtcttaatgataatatattaaaaaatgctctggtaatccttataacttatggtatttcaggagctttaagtaaatataataatctacttgttttaattgctaatgctacttttgtattaccttttataatattcgcaagcatagcaggacaaattgccgataaatacgagcgtgcaaatcttattaaaattattaagatttgtgaaatcggtataattgcctttgcaatttacggatttcatcataataatctgttaatcctgttttgttctattggcttaatgggtatacattctacttttttcggtccaatcaaatatagcgtattacctgatcacctaaataaagacgaactacttggagctaacggctttgttgaagccggaacttttatcggtatttttatcggtactataatcggcagctattatacaatcagcaataattttataatttattccttaattaccatcgcttttcttggctttattacaagccttttttccccaaaatctaaaaacgtaaatcgtgatattaaaataaattttaatattatagatgaaagcataaatatgattaaatatgccaaagcaaaaaaacagatatatttagctatacttggtatttcatggttttggtttatcggagctgctataatttctcaaatacctttacttgctaagataacttttaaagctgatgagaatgttgctaatttatttttagcggttttctcgcttggtgttggggtcggttcgtttttatgtagcaaaatatttgaagatgagattaccgttaaatatctatttatttcagccctaggcattagtattttcggtattgatttattctttgcaagtagaattagctcagttaactacgaacctactcagctaaaaagtattttagtatttttatcgaaaagacataattggcgcatagttatagatttattgttcttagcggcaataggcggattatatatcgttccgctttttgcgatattacagcattacgcaaaccctgctcatcgtagtcgaattattgccgttaacaatcttatcaattccattttcatggtgggatccacaataattctatctttattattttacctaaatttcactataccctggattatattatttattagcatagctaatataattgttactatacatatttaccgtttaatacctgaagttaaaattattccatttaagctattgcgaagaatattccaaatctgttttgatcttatgtataaggttgaagttaaaggatttgaaaattttcaaaaagcaggtaaaaaagtagtagtggtcgctaaccatatttcatatctagatccgccgctaattgctacttacttacgagaagaaatgacttttgcaattagtcccgatatacaaaaaatatggtggattaaaccgtttttacgtatggcaagaactttgccggttgatccaagtaacccaatggcaataaagactttagtaaaagaagtacaaaaggatcagaaagtagcaattttccctgaaggtagaataagcgttaccggttctttaatgaaaatatacgaaggaccaggaatgatcgccgataaagccggtgctaccgtcttaccggttagaatagacggtactcaatttactcatttatcaaaattaaaaaacatattaaaaagaaaaatatttcctaaaattactataaccgttttaccgccggtaaaattcgctaatatggatgctacaagcaatcaagaacgacgcagttatatatctaggactctttatgatatcatggctgacatgatgtttgaaagttcagactatcaaaatactgtattctcatctcttatagaagctgctaaaattcatggatttaagaaaaaaatagttgatgattttgaaaataatgcggttacttatcgagatttaatattaaaatcttttatcctaggtgatttaatcaaaaagaataatatctttggcagaaatttaggcttaatgttgcctaataccacgaatacgttaattactttttacgctatgcaatctagcggttatgttcctgctataattaactggagcagcggcataagtactattattaactcctgtaaacttgcacaaattaaagtagtttacacttcaaaacaatttattgagaaagcaaatttacatgaattaataactaacttattagatttcggtattaaaataatatatttagaagattttaaaaatcagattggtacagccctaaaactaaaagcaaaaataggaagttattgtgcccaaacttattacaattatttttgtcgtaatcgtgatgacgaaaaaccggcagtgataatttttacttcgggtactgaaggtgaacctaaagccgtattattatctcacagaaatttacaaactaatagatatcaaataactgctaaagtaccttttagccctgaagatatagtatttaatgcgctaccgctatttcattgttttggttttagtggtgcaattattacaactttaaacggtattaagctgtttctatatccttctccactaaattatcgtagcattcctgaagttatatacgatattggagcaactatattaatttctaccgatacttttttaaacggttatgctaattacgctcacccatatgatttttactcattacgctatatatttgccggtagcgagaaattaaaagaatctacacgacaattttggcttaataagtatggcatacgtatttttgaaggatatgggattacagaagcctcacctattatagcttgcaatacccctatgcataataaagcaggcacggtaggaagattattaccgaaaattgattataagcttgagaaagtagagggaataaatgaagggggacgtttattcattaagggtcctaacatcatgcttggttacttggacttagaaggtcaccgtacttataaagaatggtacgacacaggcgatatagtcaaaatcgattctgaaggatatataacaactctaggacgtttaaaacactttgctaaaatagcaggggaaatgatatctcttacaaaaattgaagaacttgcaagcgaacttgatcctgattccttgcacgctgctatttctattcccgataaaacgcacgaagacaagattattttacttactaccggttccaatataaatagagagaactttgcagatgctgtatctaaagctcaaattcctttactacatttaccgaaagtaattattaccgattcagaaatacctctacttacaaacggcaaaattgattatcttgagattatgaaaaacgtggatagattttaa

SEQ ID NO: 115800 - protein, 1140 aa, Rickettsia conorii str. Malish 7
MDTNKLYLFKDRRFLPNFIVQLCGCLNDNILKNALVILITYGISGALSKYNNLLVLIANATFVLPFIIFASIAGQIADKYERANLIKIIKICEIGIIAFAIYGFHHNNLLILFCSIGLMGIHSTFFGPIKYSVLPDHLNKDELLGANGFVEAGTFIGIFIGTIIGSYYTISNNFIIYSLITIAFLGFITSLFSPKSKNVNRDIKINFNIIDESINMIKYAKAKKQIYLAILGISWFWFIGAAIISQIPLLAKITFKADENVANLFLAVFSLGVGVGSFLCSKIFEDEITVKYLFISALGISIFGIDLFFASRISSVNYEPTQLKSILVFLSKRHNWRIVIDLLFLAAIGGLYIVPLFAILQHYANPAHRSRIIAVNNLINSIFMVGSTIILSLLFYLNFTIPWIILFISIANIIVTIHIYRLIPEVKIIPFKLLRRIFQICFDLMYKVEVKGFENFQKAGKKVVVVANHISYLDPPLIATYLREEMTFAISPDIQKIWWIKPFLRMARTLPVDPSNPMAIKTLVKEVQKDQKVAIFPEGRISVTGSLMKIYEGPGMIADKAGATVLPVRIDGTQFTHLSKLKNILKRKIFPKITITVLPPVKFANMDATSNQERRSYISRTLYDIMADMMFESSDYQNTVFSSLIEAAKIHGFKKKIVDDFENNAVTYRDLILKSFILGDLIKKNNIFGRNLGLMLPNTTNTLITFYAMQSSGYVPAIINWSSGISTIINSCKLAQIKVVYTSKQFIEKANLHELITNLLDFGIKIIYLEDFKNQIGTALKLKAKIGSYCAQTYYNYFCRNRDDEKPAVIIFTSGTEGEPKAVLLSHRNLQTNRYQITAKVPFSPEDIVFNALPLFHCFGFSGAIITTLNGIKLFLYPSPLNYRSIPEVIYDIGATILISTDTFLNGYANYAHPYDFYSLRYIFAGSEKLKESTRQFWLNKYGIRIFEGYGITEASPIIACNTPMHNKAGTVGRLLPKIDYKLEKVEGINEGGRLFIKGPNIMLGYLDLEGHRTYKEWYDTGDIVKIDSEGYITTLGRLKHFAKIAGEMISLTKIEELASELDPDSLHAAISIPDKTHEDKIILLTTGSNINRENFADAVSKAQIPLLHLPKVIITDSEIPLLTNGKIDYLEIMKNVDRF

SEQ ID NO: 115801 - DNA, 2178 bp, Yersinia pestis KIM
  CDS (1)..(2178): transl_table=11
ttgagttatagggatatagacatggcttatcgcttattgcgtgctctttttcgtgggttattccgtgtcaccattgatggtgtcaccgaccaatttaagcatgaaaaattaattattacgcccaatcacgtctctttcctcgatggggctttattagcgctatttctaccgatcaagccagtatttgctgtctataccagtattactgacacctggtatatgcgttggctaaagccttatgtggattttgttgcgctggatccgaccaacccgatggccatcaaacatctggtcagaatggtcgaacagggcaggccagtagtcattttccctgaagggcgcatcactgtgaccggctccttgatgaaaatttatgatggggcggcatttgttgcggcaaaatcaggtgcggcggtggtccctatccgtttagatggccctgaatttactcattttgggcgattgcagggcgtgctaaaaacacgctggttcccaaaaatcagtattcatgtgttaccggccaccaccattcctatgccacaagcgccacgctcgcgcgaacggcgagttctggccggtgagcacctgcataccattatgatggcggcccgcatggccacggtgccacgggaaacgctgtttgaagcgttgctatcggcacaaacccgttatggtcgctttaaaccttgcattgaagatgtctcatttaaagaggacagctaccagacgctactgaagaaaacgctcggtgtgagccgtattttgcaacgctttaccgtgccgggtgagcatgtcgggatgttgctgcccaatgccaccattactgcggctgctatttttggcgcatcgttacgtggacgaattccggcactgctcaactacacctcgggtgctaaagggctacagagcgctatcattgcggcttcacttaaaaccatcgtcacctcgcgccagtttttggaaaaaggcaaactgacgcacctgccggaacaggtcaatgaggtgaactgggtctatctggaagatttaaaagacacggtgacactgacggataagctgtggatcttattccacttgtgtttcccgcgtagggcgatgttgccgcagcaggctgatggcagcgcgttaatcttgtttacctctggatcggaaggcaaccctaaaggcgtggtgcattctcatgccagtttgttggctaacgtcgaacaaatccgaaccattgctgacttcacgccacgtgatcgcttcatgtcatcattgccgctgtttcatgcttttggtctgacggtgggattattcacaccactgatgaccggtagccgagtattcctttaccctagtccgctgcattaccgcgtggtacctgaactggtatatgaccgtaactgtaccgtgctctttgggacctcaacattcttggggaattatgcgcgctttgctcatccatatgatttcgcccgcgtgcgttatgtggttgctggcgctgaaaagttggctgaaagcaccaaacagatttggcaggataaatttggtatccgtattctggaagggtatggcgtaaccgagtgcgcgcccgttgtggcgattaacgtaccgatggcggctaaagtgaacacggtagggcgcattttaccggggatggaagcccgattgattaacgtaccggggattgctcaaggtggccgcttacaattacgcggccctaatattatgcgtggttacttacgggtagagaatcccggtgtattggagcagccatcagcagaaaatgctcagggtgaacttgacgctaattggtatgacaccggtgatattgtgaccctcgacgaacaagggttctgcgcgatccgtggccgggtgaaacgttttgctaagttggctggggagatggtatcactggagagcgttgaacaattggcaataagcctttcaccggaagggcaacatgcagcagcggctaaaactgacagtgcgaaaggtgaagcattggtgctgtttaccactgacagtgagataacccgtgaacggttaatcaaagtggcacgggaaaatggtgtgcctgaactggcggtgccgcgcgatatccgggtcgtgaaagctctccccttattaggcagcggtaaacctgacttcgtcacgttgggcaaaatggcacaagatccggagatgagcgtatga

SEQ ID NO: 115802 - protein, 725 aa, Yersinia pestis KIM
MSYRDIDMAYRLLRALFRGLFRVTIDGVTDQFKHEKLIITPNHVSFLDGALLALFLPIKPVFAVYTSITDTWYMRWLKPYVDFVALDPTNPMAIKHLVRMVEQGRPVVIFPEGRITVTGSLMKIYDGAAFVAAKSGAAVVPIRLDGPEFTHFGRLQGVLKTRWFPKISIHVLPATTIPMPQAPRSRERRVLAGEHLHTIMMAARMATVPRETLFEALLSAQTRYGRFKPCIEDVSFKEDSYQTLLKKTLGVSRILQRFTVPGEHVGMLLPNATITAAAIFGASLRGRIPALLNYTSGAKGLQSAIIAASLKTIVTSRQFLEKGKLTHLPEQVNEVNWVYLEDLKDTVTLTDKLWILFHLCFPRRAMLPQQADGSALILFTSGSEGNPKGVVHSHASLLANVEQIRTIADFTPRDRFMSSLPLFHAFGLTVGLFTPLMTGSRVFLYPSPLHYRVVPELVYDRNCTVLFGTSTFLGNYARFAHPYDFARVRYVVAGAEKLAESTKQIWQDKFGIRILEGYGVTECAPVVAINVPMAAKVNTVGRILPGMEARLINVPGIAQGGRLQLRGPNIMRGYLRVENPGVLEQPSAENAQGELDANWYDTGDIVTLDEQGFCAIRGRVKRFAKLAGEMVSLESVEQLAISLSPEGQHAAAAKTDSAKGEALVLFTTDSEITRERLIKVARENGVPELAVPRDIRVVKALPLLGSGKPDFVTLGKMAQDPEMSV

SEQ ID NO: 115803 - DNA, 3405 bp, Bradyrhizobium japonicum USDA 110
  CDS (1)..(3405): transl_table=11
atgatcagggaattgatgtcgtcacgccgcttcgcgccgctgttctgggcgcagttcttctcggcgctcaatgacaacgtgctcaagaacgcactcgtcatcatcctgctttacagtgccgcgaccggccacggcgacgcgctggtgacggtggcaggcgccgtcttcatcttcccctatttcatcctgtccgggctcggcggacagctcgccgacaaatacgtcaaatccgtcgtcgcaaggcgactcaaattcaccgagatcttcgccgcgggctttgccgccgccggcttcttcctgcactcggtgccgctgctgttcgcagcgctcgcgctgttcggcatcatcgccgccctgttcggccccgtgaaatattccatgctgccggaccagctcgagctcggcgagctcgcgaccggcaatgcgctggtcgaaggcgcgaccttcatggccatcctgctcggcaccgtcgccggcggccagttcgtggccggctccgcccatatgggctgggtcgcatccgccgtggtggtgctggctctgctgtcctgggctttcgcttcccgcattccgcagaccacgccctccgcgcccgatctgcccgtcgatgccaatccctggacctcgacgctcggcttactgaagacgctgcacgccgaccaccgtctgtgggacggcaccgtgatcgtctcctggttctggctggtcggcgccatcgtgctgtcgctgctgccggcgctggtcaaggaggtcgtcggcggcaccgaaggcgtggtgacgctgtgtcttgcgatcttcgcgatcggcatcgccatcggctcgctgttcgcggcgcaactgagccacgttcgcccgaacctcgccctggtgccgatcggcgccatcatcatggggtttgccggcctcgatctcgcctgggccatcggcgtgaccaccaagggtcacgacatcaccgcgctcgacttcgcaacctcgttcgcgggcctgcgcatgctgatcgacttcgtcgccttcgcattcggcggcggcctgttcgtcgtcccctccttcgccgcagtccaggcctggtcggtcccctccgagcgcgcccgcatcatcgcggccggcaatgtgctacaggctgccttcatggtggtcggctcgctgttcgtcgcgctgctgcaggccgcaggcctccatgtcggctggatcttcttcggccttggcgtcgccagcttcggcgcggtgtggttcgtgctgacgaaatggggcaaggaaggcgtgcgcgatttcggcgggttgctgttccgcgcactgttccgcaccgagatccgcggcctcgagaacctgccgccatccggcacgcgcatgctgatcgcgccgaaccatgtcagcctgatcgacggcccgctgctgcacgccgtgctgccgatcgacgcgagtttcgcggtcgataccggcatcgccaaggcctggtgggccaagccgttcctgcgggtggtgaagcattacaccatggacccgaccaagccgctggccgcgcgcgacctgatcaagctggttgccgccggcgagccggtggtcatctttccggaaggacgcatcaccgtctccggctcgctgatgaaggtttatgacggcaccgcgatgatcgcggacaaggccgacgccgtggtcgtgcccgtccgcatcgaaggcgcgcagcgctcgcatctcagctacctcaacagcagccagatcaagcgctcgtggtttccgcgggtgacggtcacgatcctgccgccggtcaagcttccggtcgatccggcgctgaagggcaaggcacgccgcaacgccgcgggtgcagcgctccaggacgtgatgatcgacgctctggtcaagaacgccatgctcgatcactcgctgttcgaagcgctcggacacgcctatcgcgaccgcgacaccggcaaggtcatcgtcgaggacgcgctcggcaccaagctgacctatcgcaagctgatcctgggcgcgcaggtcctgagccggaagctggaagacggcactgccgtcggcgagaatgtcggcgtgctgctgccgaactccgcgggcgtcgccgtcgtcttcatggcgctgcaaaacatcggccgggtcccggcgatgctcaacttctccgccggcccggtcaacgtcctcgccgccatgaaggccgcgcaggtcaagaccgtgttgacctcgaaggccttcatcgagaagggcaagctcgacaagctgatggccgcgatctccgcggaggcccgaattgtctatctcgaagatgtccgcgcctcgatcggtgtggccgacaagatcaagggcctgctcgcaggtacagcgccgcgggtcacccgccaggcgaacgatcctgccgtcgttctgttcacgtcgggctcggaaggcacgcccaaaggcgtggtgctgtcccaccgcaacatcctcgccaacgcggcgcaggcgctggcgcgggtcgatgccaacgccaatgacaaggtgttcaacgtgctgccggtgttccactccttcgggctgacaggcgggatgatgatgccgctgctcgcgggcattccgatctacatgtacccgtccccgctgcactataggatcgtgcccgagctgatctaccagaccggcgccaccatcctgttcggcaccgacacgttcctcaccggctacgcgcgctcggcgcatgcttacgacttccgcaccctgcgtctggtgatcgccggcgccgaggcggtcaaggaccgcacccggcaggtgttcatggagcgctacggcatccgcatcctcgagggctatggcgtcaccgagacggcgccggtactggcgatgaacacgccgatggccaaccgccccggcaccgtcggccgcctgtcgccgctgatggaaagccgcctcgatccggtccccggcatcgaggacggcggccgcctctccgtgcgcggaccgaacgtgatgctcggttacctcagggccgaaaatcccggcgtgctcgaagtgctcgcggaaggctggcacgacaccggcgacatcgtcgcaatcgacccggccggcttcatcaccatcaagggccgcgccaagcgctttgccaagatcgcaggcgagatggtctcgctgtccgcggtcgaaagcatcgcggcgacgctgtggccgcaggccggctcggtcgccgtgtcgatccccgaccagcgcaagggcgagcgcatcgtgctgctgacgacggagaagaccgccgagcgcagcgcgatgcagggccaggccaaggcgatcggcgcgtccgagctgaccgtgcccgccgcgatcatggtggtcgacaaggtgccgctgctcggcaccggcaagaccgactatgtcacggcaacgacgatggcccgcgagcaggcgtcttcgccggagcgcgaggtggcgtaa

SEQ ID NO: 115804 - protein, 1134 aa, Bradyrhizobium japonicum USDA 110
MIRELMSSRRFAPLFWAQFFSALNDNVLKNALVIILLYSAATGHGDALVTVAGAVFIFPYFILSGLGGQLADKYVKSVVARRLKFTEIFAAGFAAAGFFLHSVPLLFAALALFGIIAALFGPVKYSMLPDQLELGELATGNALVEGATFMAILLGTVAGGQFVAGSAHMGWVASAVVVLALLSWAFASRIPQTTPSAPDLPVDANPWTSTLGLLKTLHADHRLWDGTVIVSWFWLVGAIVLSLLPALVKEVVGGTEGVVTLCLAIFAIGIAIGSLFAAQLSHVRPNLALVPIGAIIMGFAGLDLAWAIGVTTKGHDITALDFATSFAGLRMLIDFVAFAFGGGLFVVPSFAAVQAWSVPSERARIIAAGNVLQAAFMVVGSLFVALLQAAGLHVGWIFFGLGVASFGAVWFVLTKWGKEGVRDFGGLLFRALFRTEIRGLENLPPSGTRMLIAPNHVSLIDGPLLHAVLPIDASFAVDTGIAKAWWAKPFLRVVKHYTMDPTKPLAARDLIKLVAAGEPVVIFPEGRITVSGSLMKVYDGTAMIADKADAVVVPVRIEGAQRSHLSYLNSSQIKRSWFPRVTVTILPPVKLPVDPALKGKARRNAAGAALQDVMIDALVKNAMLDHSLFEALGHAYRDRDTGKVIVEDALGTKLTYRKLILGAQVLSRKLEDGTAVGENVGVLLPNSAGVAVVFMALQNIGRVPAMLNFSAGPVNVLAAMKAAQVKTVLTSKAFIEKGKLDKLMAAISAEARIVYLEDVRASIGVADKIKGLLAGTAPRVTRQANDPAVVLFTSGSEGTPKGVVLSHRNILANAAQALARVDANANDKVFNVLPVFHSFGLTGGMMMPLLAGIPIYMYPSPLHYRIVPELIYQTGATILFGTDTFLTGYARSAHAYDFRTLRLVIAGAEAVKDRTRQVFMERYGIRILEGYGVTETAPVLAMNTPMANRPGTVGRLSPLMESRLDPVPGIEDGGRLSVRGPNVMLGYLRAENPGVLEVLAEGWHDTGDIVAIDPAGFITIKGRAKRFAKIAGEMVSLSAVESIAATLWPQAGSVAVSIPDQRKGERIVLLTTEKTAERSAMQGQAKAIGASELTVPAAIMVVDKVPLLGTGKTDYVTATTMAREQASSPEREVA

SEQ ID NO: 115805 - DNA, 3492 bp, Helicobacter hepaticus ATCC 51449
  CDS (1)..(3492): transl_table=11
atgaataaaatatggaagattaaaggttttacattttttattcttatagcatttatcaatgcctttatggatttagggcataaaatcactattcaaaatacaatttataaagtctatgatggaagcgaacttacactcttaacaagcgttattaacgcacttatcttacttccttttatatttcttttttctccttctggtttcttggctgataaatatcctaaaaatgttgttatgcgtatatgtgcgtggtttggcttgttgcttagtatcattattgcgttgtgttatttttttggttatttttggtttgcttttatagctactttgtttatggcagctcaatcggcgatttattctcctgcaaaatatggctttatcaaagatttggtaggtaaggatttacttgcgtggggaaatggtgtgatacaggcagtggcgattgtagctattttagcaggtatgagcgttttctcacttctatttgaatctttgtatgctttgagtgatttaggattcctagcacaaaaaggtgagattttgcaaagtgtcgctccgcttggttttgtgcttattgcgtgtgctctaatagaattatatttatgctatacccttcccacacttacgcaacgcacacaagaggtttttgataaggaagcatatttgagaggttctttattaaaagcaaattttaaattactcacttctcatcgtaatatttggttatctgtaataggcatagctgtattttggtctatctctcaattacttttagcgacttttccgacttatgtaaagatgacttttgcggagttaaatacctttaaggtgcagatgattattgcttgttcgggctttggaattattataggctctattattgcggggcgattttcaaagcaatatattgaaacagggcttatccctattggggcaggatttatttgtataactactatgctgattttaagtttttcttctcttacatcttatgctgtgctctttttcttttttggtgtgggtggcgcactttttatagttccgcttaatgctttaatacaattccacgccaaagagggtgagttgggcaagattctagcaggtaataatttcgtgcaaaatattgctatgcttttatttttgcttataggcactcttgtatctttaggtaatattgatgtagtgtatcttttttatttttgtatgattgtcgcattgtgtggggcaatttatgttgtgaagcttttgcccttttcgcttgtaagaatgctcgttactcttgcattttttcaaagataccgcttaaatgtagagggttttgaaaatgtccctgaacgaggcggcgtattattacttggcaatcatatatctttcatagattgggctatggtgcagttggcactaccgcgtaaggtgtattttgtaatggagcggagttattatgataggtggtatatacgcatttttcttgatttttttggtgtgattcctgtctcaaatgccggaagcagaaaagctttagaatctattgcacaaaaactcatacaagggcatatggtatgtatttttcccgaaggtgcaatatcgcgacacgggcatttaaatacctttaaaaatggctttgaacttgctgctaaaaatgtaaatgaaaatcaagctgtaatattgcccttttatatacgcggtttatgggggagtgcattttcacactctcatcaaggattccaagaaagacgcaaaagctttgctaaacgcaatatcacgattgcttttggagaatctttagatattcactctaacgcacagcaggttaaggctaaagtgtttgagttatcttttagcgcgtggaaatctcaatgcgaagtcttgcctacacttggcaaggcgtgggtagattctgcaaagaagtggggaagtgaagtggctattatagatagcctaagtggttctatgagttatacgcgaatgcttagccttacacttattctctctaagctttttgcagagcagacaaaggagcagcaaaatgtgggaattatacttcctgcctcacttgcaagtgcattatgtaatctttctttgcttatggcgacaaaaaccattgtgaatcttaatttcacggctggacaaaaggcgattgatgctgctattaaatccgcacaaattcagacaatttatacttcacaaaaatttatggataaacttgaaggcaagggcgtgagtttaaatttctcgcaaaatgtgagagtgttatatatggaggatttagttgataaggttaaagcaaataagcttgattttgtgtgtaaaatggctcaagcgattttattgccctcttttatgcttaaatggttttatataaaagcgcagaaaaacacagatatagccgcaattctttttagtagtgggagtgagggtaagccaaaaggtgtaatgctttcacatttaaatattatgagcaatattttgcaaatttctgatgtcattcacgcgcgcgatggggattctatgctttcgtctttgccaccatttcacgcctttggtttaaccgttactacacttatgcctttgcttgagggtatgctctctgttacacacgcagacccaactgatgcggtaggcgttgctaaggcaatagcaaaaaacaaagtgagtgtgatgtgcggcacttctacgtttttgggtatttatgcgcgtagtaataaggtagataagcttatgtttgattctttgcgacttgtggtagcaggagcggaaaaactcaaaaaagatgtaaaagaagcctttgtgatgaagtttaataaagaaatctatgagggctatggtgcgacagagactacacctgtggcaagtgtgaatctaccgagtgaatttgatgtggataattgggaattgcataaagcaagtaaggagggcagcgtgggtatgcctttgcccggaagtgccattagaattgttgagccaaatactatgcaggaaatgcctgtgggcgaggacgggctgatacttatcggcggacatcaagtaatggtagggtatctcaatgatgaggaaaaaaccaaagaagtgattgtagaaattgatgggattaggtggtataaaagtggcgataaggggcatttagatgccgatggattcattcatattgtggatagatattcgcgttttgcaaaaattggtggggaaatggtaagtcttggtgggattgaagaggagattgcaaagcttatcaaaaaatatgagattgatgatgggcttaaatatgttgccacagcgatagatgatagcaaaaagggcgagagtgtcattcttcttgtgagctgtgaaaagacagaatgtgaaaaaatagaaaaaattatcaaagaagcgcaaatcccagcactttttaagccatctaagattctaagagtggaatctatccccgtgcttggctcgggtaaggtggatttcaaaggtgcgaaagatttagcacaaaagctcctcaatgtgtga

SEQ ID NO: 115806 - protein, 1163 aa, Helicobacter hepaticus ATCC 51449
MNKIWKIKGFTFFILIAFINAFMDLGHKITIQNTIYKVYDGSELTLLTSVINALILLPFIFLFSPSGFLADKYPKNVVMRICAWFGLLLSIIIALCYFFGYFWFAFIATLFMAAQSAIYSPAKYGFIKDLVGKDLLAWGNGVIQAVAIVAILAGMSVFSLLFESLYALSDLGFLAQKGEILQSVAPLGFVLIACALIELYLCYTLPTLTQRTQEVFDKEAYLRGSLLKANFKLLTSHRNIWLSVIGIAVFWSISQLLLATFPTYVKMTFAELNTFKVQMIIACSGFGIIIGSIIAGRFSKQYIETGLIPIGAGFICITTMLILSFSSLTSYAVLFFFFGVGGALFIVPLNALIQFHAKEGELGKILAGNNFVQNIAMLLFLLIGTLVSLGNIDVVYLFYFCMIVALCGAIYVVKLLPFSLVRMLVTLAFFQRYRLNVEGFENVPERGGVLLLGNHISFIDWAMVQLALPRKVYFVMERSYYDRWYIRIFLDFFGVIPVSNAGSRKALESIAQKLIQGHMVCIFPEGAISRHGHLNTFKNGFELAAKNVNENQAVILPFYIRGLWGSAFSHSHQGFQERRKSFAKRNITIAFGESLDIHSNAQQVKAKVFELSFSAWKSQCEVLPTLGKAWVDSAKKWGSEVAIIDSLSGSMSYTRMLSLTLILSKLFAEQTKEQQNVGIILPASLASALCNLSLLMATKTIVNLNFTAGQKAIDAAIKSAQIQTIYTSQKFMDKLEGKGVSLNFSQNVRVLYMEDLVDKVKANKLDFVCKMAQAILLPSFMLKWFYIKAQKNTDIAAILFSSGSEGKPKGVMLSHLNIMSNILQISDVIHARDGDSMLSSLPPFHAFGLTVTTLMPLLEGMLSVTHADPTDAVGVAKAIAKNKVSVMCGTSTFLGIYARSNKVDKLMFDSLRLVVAGAEKLKKDVKEAFVMKFNKEIYEGYGATETTPVASVNLPSEFDVDNWELHKASKEGSVGMPLPGSAIRIVEPNTMQEMPVGEDGLILIGGHQVMVGYLNDEEKTKEVIVEIDGIRWYKSGDKGHLDADGFIHIVDRYSRFAKIGGEMVSLGGIEEEIAKLIKKYEIDDGLKYVATAIDDSKKGESVILLVSCEKTECEKIEKIIKEAQIPALFKPSKILRVESIPVLGSGKVDFKGAKDLAQKLLNV

SEQ ID NO: 115807 - DNA, 2301 bp, Rhodopirellula baltica SH 1
  CDS (1)..(2301): transl_table=11
gtggagccgctgacggtggacacgtatctgatcatcctgattgttctagtcgccttgttggccatcgcgatcgcaatggccgtctggaagccgcgattgtttgttcgctgcttgttccgtccggtgttagaaattttctaccggaaacgagttgtcggtttagagaacttcccgaccgaaggcggttgtctcttggtcagcaatcacacctcgtggatcgacggcattttgatcctttgggccctgccgcgaaatgttcgcttcgtggtcgacggcagcaatttcacttcgaaaattggcgactacctcggccgagccttcgacacaattttcatgatgggcggtcccaagtcgattgggcgagccattcgtgacgctcgcgaaggcctgaataatggcgacgtggtgggcatttttcctgaaggaaccatcacgcgaaccgggcaattgcaggcgttccgtccgggaatgagcaagattctgaagaacaccgacgcgaagatcgttccggttcatttggaaggaatgtggggcagcattttcagtttttccggcggcaaatacttttggaaatggcccgacaaattccgtcgcaccatcactgtttacgtcggcgaacctctccctgccgacgcccccatttccgccgttcgtggcaaggttcaggcattgggttcaaaggcccaaatcgatcaccgtcgtgaatttcctgttttggcacgacaagtccttcgggtttggcgacgccgaggcaaacgcttgcaagccgccgacaccttgggcaccgaagttggtggccgaaagctgttgatcaacacgctcgctcttcgtcgatgtcttcatcgcgaagtgttcgccaaagatgagcagttcgtcggcatactacttcctccaagtgttggtgccgtcgcggtcaatgttgctcttgccgccgatcgtcgtgtcagtgcgaacctgaactacacggtcagcagcgacgtgatgaaccactgcatccgtgacgtgggaatcaagcacgtgctgacaagcgaccggttcctggaaaagatcgatgtggaactggatgccgagatcgtttcgttggacaagctgaaagagaaagtcagcttggccgacaaagtcatcgctgctctgcaagcgacgatcgtgcccagctggttgcttgaccgaattttggggctcaataaagttcaaagcgacgacctgctgaccgtgatcttcaccagcggttccaccggaatgccaaagggcgttctgctgtccaacgcgaacgtcagccacaacgtcgatgcggtcaatcgcgccattcggctcaacaccgaggacgtcgtcatcggcgtcctgccgttcttccattcgtttggctacgcggtcacgctttgggccgcacaaacgctcggccccgcgggcgtttatcacttcaacccgttggattccaaacaaatcggcaaactcgctgagaagtacaaagccaccgtcttgcttggcacgccaaccttcatgcgtggatatctccgccgcatcacaccggaacaattcaaaacgctgaacgtcgcggtcgttggtgcagaaaaaatgcccgcggatctgtttgacgcatttgaaaaacgctttggcgttcgccccgtcgaaggatacggcacgaccgaaatgagcccattggtcagcgtcaacattccgccctcacgatcggctgcgaaattccaacccgaccgcgttgaaggcagtgtcggacgcccattgcccggcatctcagcacgaatcgtttcgcccgacgatggaaccgaactggacgcgggtgaagatggaatgctgctggtaaccggcccaaatgtgatgcgaggttacgcgaaccgcgatgacctaacgcaaactgccgtcgtcgatggctggtacacaaccggcgatatcgcccacatcgacggcgatggattcctgcacatcaccggtcgtctgagccgtttctcgaagatcgctggcgagatggtgccgcacgttcgcattgaagaagaacttggcaaactgctagccgatggcgatgacgacgaccaagtgcgagtctgtgtcaccgcggttccgtgcgaacgcaaaggggaacgcatcatcgtcttgcatcttccaacatcccagacaccggattcgctgcgagaaggattgaaggccgcaggattggccaatctgttcatcccgtcggccgacagtttctttgaagttgatgagattccattgcttggaaccggcaaattggacctcaagggcgctcgagaccgtgcgagcgaattgacgatggcgagctgctaa

SEQ ID NO: 115808 - protein, 766 aa, Rhodopirellula baltica SH 1
MEPLTVDTYLIILIVLVALLAIAIAMAVWKPRLFVRCLFRPVLEIFYRKRVVGLENFPTEGGCLLVSNHTSWIDGILILWALPRNVRFVVDGSNFTSKIGDYLGRAFDTIFMMGGPKSIGRAIRDAREGLNNGDVVGIFPEGTITRTGQLQAFRPGMSKILKNTDAKIVPVHLEGMWGSIFSFSGGKYFWKWPDKFRRTITVYVGEPLPADAPISAVRGKVQALGSKAQIDHRREFPVLARQVLRVWRRRGKRLQAADTLGTEVGGRKLLINTLALRRCLHREVFAKDEQFVGILLPPSVGAVAVNVALAADRRVSANLNYTVSSDVMNHCIRDVGIKHVLTSDRFLEKIDVELDAEIVSLDKLKEKVSLADKVIAALQATIVPSWLLDRILGLNKVQSDDLLTVIFTSGSTGMPKGVLLSNANVSHNVDAVNRAIRLNTEDVVIGVLPFFHSFGYAVTLWAAQTLGPAGVYHFNPLDSKQIGKLAEKYKATVLLGTPTFMRGYLRRITPEQFKTLNVAVVGAEKMPADLFDAFEKRFGVRPVEGYGTTEMSPLVSVNIPPSRSAAKFQPDRVEGSVGRPLPGISARIVSPDDGTELDAGEDGMLLVTGPNVMRGYANRDDLTQTAVVDGWYTTGDIAHIDGDGFLHITGRLSRFSKIAGEMVPHVRIEEELGKLLADGDDDDQVRVCVTAVPCERKGERIIVLHLPTSQTPDSLREGLKAAGLANLFIPSADSFFEVDEIPLLGTGKLDLKGARDRASELTMASC

SEQ ID NO: 115809 - DNA, 3411 bp, Geobacter sulfurreducens PCA
  CDS (1)..(3411): transl_table=11
atgaactccacagacaccggaactgacacactcccttcatcgttcaaacgcctcaatcttgctcaggcccttggggcgctgaacgacaacgtcatcaagctgatcatagtcttctttctcatcagtcatttcggtcaggagcgggcggcaaccgtggccgccatcggcagcgccgcctttgtggccccgttcctctttttttcggccctggccggttctcttgccgaccggttccccaagggatggatcatcgttcgggtgaaggccttagaggtcgggattgcgctgctggccgtggcaggtctcctgatcgccagcccgttgctgctcggagcggtgatctttttgcttggcacccacagcgccctctttgcgcctgcaaaatacggggtagtgccggagttggtggcgcgggaggagctctcccgggccaatagcctcctggagatgtggtcgttcctggcaatcgtggggggaacggccctggcaccgtttctggttcaactggccggcggccgccatggcgttgcgctactggccggagttgcggtggccttgtgcggactcctggtagcccgcaccctgccggaaaccagtgccgccgcgccggagcgtcaggtggtgttgtccccggccgcctactggcgtaccctgcggagcctgaagcatgacgggtaccttcttctggcggtgcttggcgcagcctatttcctgtttgtgggggccttctgccagctgaatcttttgccctatggcatgaagctgctggggttgcccgaggaacagagcggctatctcttcgtagcggctgccgtggggatcggcgtcggttccctgcttgcggggcgtctctcgggacgtacggtggaattcggcgtagtccccatcggtgccgcggggctcaccctctgctcgttcctgctggcaacgctgccggcacatctcccttctgtcctggtcgcggtgaccctgttcgggatgagtgccggtcttttcatcgtgcccctccaatccttcattcagctccgcgctcccgccgaccggcgcggggagattcttgccgcctcaaccttccttagctgggtcggtgtgctccttgcgtcggcattgctctggaccctcaccggtccgctggggatctcacctgcagggtgtttcggcgtcctgggtgccatcaccctggtgcttaccctggcgacactccgggtgctccccgacttcctgctccgcttcgtggccctggttgccatgcggctttgctaccgccttgccgtcatcgatgaccgccacgtgccggtggaaggaggagcgctcctggtggccaaccacgtttcctggctcgacgcgctgctgctcatcgccacgcagcagcggcggatccgctttgtcatggagcgggaaatctaccgtacccccgttttgaagcagctctgctctctgatgggggtgattccggtgtcgtcaaaggacgggaggaaagggcttctggagttcatcgcgagcgcccgcggagcactggaccagggatacctggtctgcattttcgccgagggggccattacccgcaacggtatgctcaaccagttcaagggcggcttcgagcggatcgtgaggggcacgagccatcccatcatcccggtttacatcggcggagcgtgggggagcatcctctcctatgcccacggcaagctcctttcccgtttcccgtcgcttctcccctaccgggtgacggtcctcttcggtgcgccgctccgggcggggagcagtgtccacgacgtgcgccgggccgtgatggagctttcctgtgcctggttccagacccgcaagtcccggcgtcgtccgctgggagagcttttcgccgaaacagcccgggagaactggcaccgtctcgccgtggccgacaccggcggccgggagctcacctacggcagagccctgaccggcgccgtggccctggcggccagactgaagcctttcactgccgggcaggagatggcaggggtctgtctgccccccaccgtggcgggcgccctggtcaatctcgccctcactctcaacggcaccgtgccggtgaacctcaactacaccgcttcagccgacggcatacgctcatcgcttgaccagtgcggcatcaaggtaaccataacctcccggcgctttcaggagaagctcggttcgttgccggaattccccggcgttctgtacgtggaggatctcctggcaggcctgaccggcggcgacaagtgccaggctttcctgaaggcccgctttctgcctctgcgcctgctggcaggaaaggccggattcagcgccgaccagccggccacggtcatcttctcttcgggcagcaccggtgagcccaaaggggtgatgctgtcgcaccacaacatcatctccaacctggaggcgctccgcatggtcttccgcgctacccggcgggacaatatctgctctgccctgccgttcttccattccctgggattcaccggtacgctctggctgccccttctttccggtttttccgtggtctaccatgccaatcccctggacggcgagaccattgccgcgacggtccgggagcggcggtcgacgctcctcatcgctacccccacctttctgatggcctatctccgtcgggcaaagccggaggatttcgcgtcattgcggctcgtcatcaccggagccgagaaattgaagccgaaactggccgacagcttccaggagaaattcggcatccggcccatggaaggatacggtgccactgagctgtcgccggtcatctccctgtcactgcccgacgtggagatcgacggtgtccgtcaggccggtttccgggaggggagcgtggggctgcccgtccccggcgtggtggtgaagatcgtggagcctgaaacccttgagccggttgccgaaggggtgacggggctgatcctcgtcaaggggcccaacgtcatgctcggctacctcggcaagccggagaagaccgccgaggtcatccgcgatgggtggtacgtcaccggtgacctgggatacctggacgaccatggcttcctccacatcaccgaccgcctttcacgcttcagtaaggtcgccggagagatggttccccatggcgcggtcgaggatgccctccatgtccgcctgggtcaggcggggttggtggcggtgaccggggttccggatgaacggaagggggaaaggattgtagtggtctacacccccgaggcaggggacgccgaaacgctccacaggttcatgacggagagcgagttgcccaatctctggaaaccggcacgggactgttacgttgcagtggagacgctgccggttctcggcaccggcaagctcgatctgcggggggtaagggctgtcgcgctggcggcagtggggctgggcgggggatccgtgtga

SEQ ID NO: 115810 - protein, 1136 aa, Geobacter sulfurreducens PCA
MNSTDTGTDTLPSSFKRLNLAQALGALNDNVIKLIIVFFLISHFGQERAATVAAIGSAAFVAPFLFFSALAGSLADRFPKGWIIVRVKALEVGIALLAVAGLLIASPLLLGAVIFLLGTHSALFAPAKYGVVPELVAREELSRANSLLEMWSFLAIVGGTALAPFLVQLAGGRHGVALLAGVAVALCGLLVARTLPETSAAAPERQVVLSPAAYWRTLRSLKHDGYLLLAVLGAAYFLFVGAFCQLNLLPYGMKLLGLPEEQSGYLFVAAAVGIGVGSLLAGRLSGRTVEFGVVPIGAAGLTLCSFLLATLPAHLPSVLVAVTLFGMSAGLFIVPLQSFIQLRAPADRRGEILAASTFLSWVGVLLASALLWTLTGPLGISPAGCFGVLGAITLVLTLATLRVLPDFLLRFVALVAMRLCYRLAVIDDRHVPVEGGALLVANHVSWLDALLLIATQQRRIRFVMEREIYRTPVLKQLCSLMGVIPVSSKDGRKGLLEFIASARGALDQGYLVCIFAEGAITRNGMLNQFKGGFERIVRGTSHPIIPVYIGGAWGSILSYAHGKLLSRFPSLLPYRVTVLFGAPLRAGSSVHDVRRAVMELSCAWFQTRKSRRRPLGELFAETARENWHRLAVADTGGRELTYGRALTGAVALAARLKPFTAGQEMAGVCLPPTVAGALVNLALTLNGTVPVNLNYTASADGIRSSLDQCGIKVTITSRRFQEKLGSLPEFPGVLYVEDLLAGLTGGDKCQAFLKARFLPLRLLAGKAGFSADQPATVIFSSGSTGEPKGVMLSHHNIISNLEALRMVFRATRRDNICSALPFFHSLGFTGTLWLPLLSGFSVVYHANPLDGETIAATVRERRSTLLIATPTFLMAYLRRAKPEDFASLRLVITGAEKLKPKLADSFQEKFGIRPMEGYGATELSPVISLSLPDVEIDGVRQAGFREGSVGLPVPGVVVKIVEPETLEPVAEGVTGLILVKGPNVMLGYLGKPEKTAEVIRDGWYVTGDLGYLDDHGFLHITDRLSRFSKVAGEMVPHGAVEDALHVRLGQAGLVAVTGVPDERKGERIVVVYTPEAGDAETLHRFMTESELPNLWKPARDCYVAVETLPVLGTGKLDLRGVRAVALAAVGLGGGSV

SEQ ID NO: 115811 - DNA, 2157 bp, Yersinia pestis biovar Microtus str. 91001
  CDS (1)..(2157): transl_table=11
atggcttatcgcttattgcgtgctctttttcgtgggttattccgtgtcaccattgatggtgtcaccgaccaatttaagcatgaaaaattaattattacgcccaatcacgtctctttcctcgatggggctttattagcgctatttctaccgatcaagccagtatttgctgtctataccagtattactgacacctggtatatgcgttggctaaagccttatgtggattttgttgcgctggatccgaccaacccgatggccatcaaacatctggtcagaatggtcgaacagggcaggccagtagtcattttccctgaagggcgcatcactgtgaccggctccttgatgaaaatttatgatggggcggcatttgttgcggcaaaatcaggtgcggcggtggtccctatccgtttagatggccctgaatttactcattttgggcgattgcagggcgtgctaaaaacacgctggttcccaaaaatcagtattcatgtgttaccggccaccaccattcctatgccacaagcgccacgctcgcgcgaacggcgagttctggccggtgagcacctgcataccattatgatggcggcccgcatggccacggtgccacgggaaacgctgtttgaagcgttgctatcggcacaaacccgttatggtcgctttaaaccttgcattgaagatgtctcatttaaagaggacagctaccagacgctactgaagaaaacgctcggtgtgagccgtattttgcaacgctttaccgtgccgggtgagcatgtcgggatgttgctgcccaatgccaccattactgcggctgctatttttggcgcatcgttacgtggacgaattccggcactgctcaactacacctcgggtgctaaagggctacagagcgctatcattgcggcttcacttaaaaccatcgtcacctcgcgccagtttttggaaaaaggcaaactgacgcacctgccggaacaggtcaatgaggtgaactgggtctatctggaagatttaaaagacacggtgacactgacggataagctgtggatcttattccacttgtgtttcccgcgtagggcgatgttgccgcagcaggctgatgacagcgcgttaatcttgtttacctctggatcggaaggcaaccctaaaggcgtggtgcattctcatgccagtttgttggctaacgtcgaacaaatccgaaccattgctgacttcacgccacgtgatcgcttcatgtcatcattgccgctgtttcatgcttttggtctgacggtgggattattcacaccactgatgaccggtagccgagtattcctttaccctagtccgctgcattaccgcgtggtacctgaactggtatatgaccgtaactgtaccgtgctctttgggacctcaacattcttggggaattatgcgcgctttgctcatccatatgatttcgcccgcgtgcgttatgtggttgctggcgctgaaaagttggctgaaagcaccaaacagatttggcaggataaatttggtatccgtattctggaagggtatggcgtaaccgagtgcgcgcccgttgtggcgattaacgtaccgatggcggctaaagtgaacacggtagggcgcattttaccggggatggaagcccgattgattaacgtaccggggattgctcaaggtggccgcttacaattacgcggccctaatattatgcgtggttacttacgggtagagaatcccggtgtattggagcagccatcagcagaaaatgctcagggtgaacttgacgctaattggtatgacaccggtgatattgtgaccctcgacgaacaagggttctgcgcgatccgtggccgggtgaaacgttttgctaagttggctggggagatggtatcactggagagcgttgaacaattggcaataagcctttcaccggaagggcaacatgcagcagcggctaaaactgacagtgcgaaaggtgaagcattggtgctgtttaccactgacagtgagataacccgtgaacggttaatcaaagtggcacgggaaaatggtgtgcctgaactggcggtgccgcgcgatatccgggtcgtgaaagctctccccttattaggcagcggtaaacctgacttcgtcacgttgggcaaaatggcacaagatccggagatgagcgtatga

SEQ ID NO: 115812 - protein, 718 aa, Yersinia pestis biovar Microtus str. 91001
MAYRLLRALFRGLFRVTIDGVTDQFKHEKLIITPNHVSFLDGALLALFLPIKPVFAVYTSITDTWYMRWLKPYVDFVALDPTNPMAIKHLVRMVEQGRPVVIFPEGRITVTGSLMKIYDGAAFVAAKSGAAVVPIRLDGPEFTHFGRLQGVLKTRWFPKISIHVLPATTIPMPQAPRSRERRVLAGEHLHTIMMAARMATVPRETLFEALLSAQTRYGRFKPCIEDVSFKEDSYQTLLKKTLGVSRILQRFTVPGEHVGMLLPNATITAAAIFGASLRGRIPALLNYTSGAKGLQSAIIAASLKTIVTSRQFLEKGKLTHLPEQVNEVNWVYLEDLKDTVTLTDKLWILFHLCFPRRAMLPQQADDSALILFTSGSEGNPKGVVHSHASLLANVEQIRTIADFTPRDRFMSSLPLFHAFGLTVGLFTPLMTGSRVFLYPSPLHYRVVPELVYDRNCTVLFGTSTFLGNYARFAHPYDFARVRYVVAGAEKLAESTKQIWQDKFGIRILEGYGVTECAPVVAINVPMAAKVNTVGRILPGMEARLINVPGIAQGGRLQLRGPNIMRGYLRVENPGVLEQPSAENAQGELDANWYDTGDIVTLDEQGFCAIRGRVKRFAKLAGEMVSLESVEQLAISLSPEGQHAAAAKTDSAKGEALVLFTTDSEITRERLIKVARENGVPELAVPRDIRVVKALPLLGSGKPDFVTLGKMAQDPEMSV

SEQ ID NO: 115813 - DNA, 2202 bp, Legionella pneumophila subsp. pneumophila str. Philadelphia 1
  CDS (1)..(2202): transl_table=11
atgatgacaaaaacaaatgaggaaaatttgacctggaagggaaaacaaaaacagcgggctagggcatggataaaaatttttctggagaaatggtttcgcatagaggttaaaggacaatatcaggcgaacagtcattctgtcattattgccaacagggcttctataattgatgtgttactcctttctgtatttttacccgaacgattaactttagctttacatcctgatatgtttaaaaaaatatgggtaaaaacgttattatttttcgctgatgtcatagtagttgatccaggcagcgctcaggcaacaagaattttaataagagcaatacgggctggcaagcgttgtcttctatttccacaagggttattaagacagcaggaagacagcttaaaggtctttgaaggacctggattgatactccaaagggttggcgccgaggtaatccctgttcgtattgaaggggcggagcacagtattttttctaatagcaaaaataaacatcgaatacggatttttccgaaaattactcttcatatattacctgctcaaaaattgagtcaagctgaaaatacaggtgtcgacagagaaggtatcagtttacgtttatttcaactaataagcgatttatcattcgccaatagttttaagccatatgttttattttctgctttaattgaaggagtaagtataggaactaaaaacaaaactaaaatagaagacaataatcgtattccattaacttacagacagttcttggctcgttgttttattctggggcgccaaattaaaaagcaaacggctgtaggcgaaactgttggagtaatgatgccgactactatagctggcatggtcactttttttgctttacaagcttatagacgaatacctgccatgttaaattttagcatgggtttttataacttatattcagcttgtaatacagcaagaattaaatcaatttataccgcaagacaattcatagaaaccgccaaattagaacccttggtagaagagttccaacaggcgggtataagaattcattatttagaagattttaaatcaaccattcatttaggtaacaagctttccgggatattcaaaggcttctttcctactctaagctaccgttttcttggtgacaaaatatcctctgatacaacaggcataatcctgtttacctctggttctgagggaaaacccaaaggggttgctcttagtcatgccaatatattggctaattgttggcaaatgacttccagagtcgactttactccacgagatgttttatttaattccttacctatattccattgttttggccttacagcaggaagtgtgcttcctttggttaatggtttgaattgttttttctacccttcccctcttcattataaggtaattcctggattgatttatcaaacaagggctactattttgtttggcacagatacttttttaacaggttatgcaagggccgcgggcaaacatgatttcaacagcgtccgctatatcttcgctggcgccgagaaagtgaaaccggaaaccattagatactggagcgaagcgtttggggcaagaatttatgaaggctatggtgctactgaggcatcgccagtcatatcgcttaattgtcctttggcatcagtaccgggtagtgtcggaatgattttaccttttatggatttcaaagtagaaccagtagagggaattgtacaaggcgggcgtttaaaattatgcggacccaatatcatgttaggttatcttgatgaggataaacctggagtaattatagaacctgaagatggttggcatgatacgggagatatcgtcaccgtgaatgcggatggattcattactatagcaggtcgcgccaaacgttttgccaagattgctggtgaaatggtatctcttacagcggtggaaggaattgcagcctcaatttggcctgaattattacatgccgctgttgtgcaaaaatctccaagaaagggggagcaaattttcttatttactgaagcagagtatgcagataaagtatcatttataaaaaaggttaaggagagagggcaatcagaattgctggttcctcatatgatttatccggcatgccaaattcctgtcctgccttcaggaaaaattgattatataacgcttgaaaagcaatttttagaacagaaagaaaccatggaaacagtataa

SEQ ID NO: 115814 - protein, 733 aa, Legionella pneumophila subsp. pneumophila str. Philadelphia 1
MMTKTNEENLTWKGKQKQRARAWIKIFLEKWFRIEVKGQYQANSHSVIIANRASIIDVLLLSVFLPERLTLALHPDMFKKIWVKTLLFFADVIVVDPGSAQATRILIRAIRAGKRCLLFPQGLLRQQEDSLKVFEGPGLILQRVGAEVIPVRIEGAEHSIFSNSKNKHRIRIFPKITLHILPAQKLSQAENTGVDREGISLRLFQLISDLSFANSFKPYVLFSALIEGVSIGTKNKTKIEDNNRIPLTYRQFLARCFILGRQIKKQTAVGETVGVMMPTTIAGMVTFFALQAYRRIPAMLNFSMGFYNLYSACNTARIKSIYTARQFIETAKLEPLVEEFQQAGIRIHYLEDFKSTIHLGNKLSGIFKGFFPTLSYRFLGDKISSDTTGIILFTSGSEGKPKGVALSHANILANCWQMTSRVDFTPRDVLFNSLPIFHCFGLTAGSVLPLVNGLNCFFYPSPLHYKVIPGLIYQTRATILFGTDTFLTGYARAAGKHDFNSVRYIFAGAEKVKPETIRYWSEAFGARIYEGYGATEASPVISLNCPLASVPGSVGMILPFMDFKVEPVEGIVQGGRLKLCGPNIMLGYLDEDKPGVIIEPEDGWHDTGDIVTVNADGFITIAGRAKRFAKIAGEMVSLTAVEGIAASIWPELLHAAVVQKSPRKGEQIFLFTEAEYADKVSFIKKVKERGQSELLVPHMIYPACQIPVLPSGKIDYITLEKQFLEQKETMETV

SEQ ID NO: 115815 - DNA, 3513 bp, Campylobacter jejuni RM1221
  CDS (1)..(3513): transl_table=11
atgcaaaaaaaatcttttttgaaaatttacggattaattccttttttacttatagcattcatcaatgcttttgtggatttgggacataaaattattattcaaaatactatttataaggcctatgaaggaagtgagcagttatttttaaatgctatagttaatgctttgattttacttccttttattcttatgctttctccttcgggttttttagcggataaatatccaaaaaatattgtaatgaaaatttcagcaattttcaatgttatactcactttaataatttgcatttgttactatagcggtgctttttggatggcttttatttttacttttataatgggagcacaagcagcgatttattcaccaagtaaatacggttttattaaagaactcgtgggaaaagactttcttgctatgggtaatggtgtaattaatgcggtaagcattgtggcaatcttagcgggaatggctttattttctttaagctttgaaagtctttatagttctatgtataatcaaacagatgaaattttaaaagaagtagcgcctttaggaattgtgctaattttattttcttgtatcgaagtattttttgcgtggcgtttacctaagctcaaacaaacaaataaagatttagtttttaataaaaaagattatatccgtggaaaacttctaataaataatcttaagcttgtttttaaaaataaaactatttggctttgtataattggaatttcatttttttgggctatatctcaactttatcttgtcagctttcctgtctttgctaaaaatgaacttttcatagaaaatactttttatgtgcaaatttcactcgctttttctggtataggagtgattttaggctctttagtagctggtaaattttcaaaaaattatatagaacttggatttattccacttggtgcattgggtatgtttttaatggcttttttaatgccttattttataagtttattaagttatagttttttatttttcttttttggattttgcggagccctttttatcattcctttaaatactttaatccaatttcatgctaaagaaaatgaattaggacaaattcttgcaggaaataatttttttcaaaatattgccatgttaggatttttactcttagcaactttatttgcaaaatttgaaatcaatgtgatttatttgttttattttattgctttggtaacctttataggaagtttttacatacttttaaaactccccttttctttagtgcgtatacttttaagcatagcttttttacaacgataccgtttacttgtggaaggttttgaaaatataccagaaaaaggtggagctttacttttgggtaatcatatttcttttattgattgggctgttgtacaaatggcaattccaagaaaaatttattttgttatggaaagaagtatttattctaaatggtatattaaaatttttcttgataaatttggtattattcctgtatcaagtacaggaagtaagacgagtttagaactgatagcaaagcatattaaagaaggtaatttagtttgcttatttcctgaaggtacactttcgcgacatgggcaattaaatgaatttaaagcaggatttgaattagcttgtgaatgtttaagtgaagatgatggaaaaattattcctttttatataagagggctttggggtagcgctttttcaagaagtgatgaagaattttcagcaagaaaccgcactttaaataaaagaaaaattgctatagcttttggtaaagctatgcctttgcattctaaaaaagatgaagttaaagctaaagtttttgaactttcttttatggcttggaaatcacaatgcgaagctatgcatactatagcaagagcttggatagatacagctaaaaaaaatctaaatcaaatagctattatcgatacactagctggagatatttcttatagaaaaatgttgactcttagtttatttcttaatttttttattaaaagaaaatccaaagaattaaacattaaccctcagcgtggaagttacgctcctaaagaggaagctataggaattttactacctgcttcttttgcaagttctttaaccaatctatctgttttaatcgcagaaaaaattgcagtaaatcttaatttcactgctggagaaaaagctctaaaagcagctataaaaaatgcgcaaatttcacaaatttatacttctaaaacttttttagaaaaattagcaaataaaggtataaacctaaatttcgatacaaatatacatttaatttattttgaaaatattgtagaagattttaaaatgcaaaaaactaaaatttttagcatgatgctagcagttagtattatacctagttttatactcaaaagcatcttcactccttcaaaaaacaatcttgccatcgcagctattttatttagtagtggaagtgaaggttctccaaaaggtgttatgctcaataaccgtaatattttaagcaatatagcacaaatttctgatgtgctttgcacaagaaataatgatgtcattctctcatctttaccaccttttcatgcttttggacttaccgtaactacatttttgcctttgcttgaaggtattaaaagcatcactttttcagatccaaccgatgccttaggggttgccaaagctgttgctaaaaataatgtcactattatgtgtggaacttcaacctttttaggaatttatgcaagaaataaaaagcttgatgctttaatgtttgaaagtttaagaatagttgtatcgggcgctgaaaaactaaaaaatgaagtaagaactacttttgaaatgaagtttaaaaaaagtatttttgaaggttacggggctacggaaaccacgcctgtggcgagtgtaaatttaccaaatcattttgatgtggattattggcttatacatcgtgccaataaagaaggaagcgtaggaatgcctctacctggaactgcggtacgtattgttaatccaaataattatgaaaatttaaaaacaaatgaagatggactcatacttataggcggtcatcaagttatggtaggctatcttaatgacaaagaaaaaaccgatgaagtggttaaagaaattgatggcataagatggtacaacacgggagataagggacatttggatgaagatggttttttatatattgtcgatcgttattctcgctttgcaaaaattggcggagagatgatttctttgggtgcaatagaagaagaaattgccaaatttatagacactgaagtggttaaattttgtgccacatctttagaagatgagaaaaaaggggaacaaattgttttactcatagaatgcaataatgaaatttttgaaggagtatgtgaggctataaaaaattctaatatacctacactttttaaacctagatattattttcaaatagaaaaaattcccctcctaggttcaggaaaagttgatcttaaaaaagttaaagaattagctaaaaatttagccatataa

SEQ ID NO: 115816 - protein, 1170 aa, Campylobacter jejuni RM1221
MQKKSFLKIYGLIPFLLIAFINAFVDLGHKIIIQNTIYKAYEGSEQLFLNAIVNALILLPFILMLSPSGFLADKYPKNIVMKISAIFNVILTLIICICYYSGAFWMAFIFTFIMGAQAAIYSPSKYGFIKELVGKDFLAMGNGVINAVSIVAILAGMALFSLSFESLYSSMYNQTDEILKEVAPLGIVLILFSCIEVFFAWRLPKLKQTNKDLVFNKKDYIRGKLLINNLKLVFKNKTIWLCIIGISFFWAISQLYLVSFPVFAKNELFIENTFYVQISLAFSGIGVILGSLVAGKFSKNYIELGFIPLGALGMFLMAFLMPYFISLLSYSFLFFFFGFCGALFIIPLNTLIQFHAKENELGQILAGNNFFQNIAMLGFLLLATLFAKFEINVIYLFYFIALVTFIGSFYILLKLPFSLVRILLSIAFLQRYRLLVEGFENIPEKGGALLLGNHISFIDWAVVQMAIPRKIYFVMERSIYSKWYIKIFLDKFGIIPVSSTGSKTSLELIAKHIKEGNLVCLFPEGTLSRHGQLNEFKAGFELACECLSEDDGKIIPFYIRGLWGSAFSRSDEEFSARNRTLNKRKIAIAFGKAMPLHSKKDEVKAKVFELSFMAWKSQCEAMHTIARAWIDTAKKNLNQIAIIDTLAGDISYRKMLTLSLFLNFFIKRKSKELNINPQRGSYAPKEEAIGILLPASFASSLTNLSVLIAEKIAVNLNFTAGEKALKAAIKNAQISQIYTSKTFLEKLANKGINLNFDTNIHLIYFENIVEDFKMQKTKIFSMMLAVSIIPSFILKSIFTPSKNNLAIAAILFSSGSEGSPKGVMLNNRNILSNIAQISDVLCTRNNDVILSSLPPFHAFGLTVTTFLPLLEGIKSITFSDPTDALGVAKAVAKNNVTIMCGTSTFLGIYARNKKLDALMFESLRIVVSGAEKLKNEVRTTFEMKFKKSIFEGYGATETTPVASVNLPNHFDVDYWLIHRANKEGSVGMPLPGTAVRIVNPNNYENLKTNEDGLILIGGHQVMVGYLNDKEKTDEVVKEIDGIRWYNTGDKGHLDEDGFLYIVDRYSRFAKIGGEMISLGAIEEEIAKFIDTEVVKFCATSLEDEKKGEQIVLLIECNNEIFEGVCEAIKNSNIPTLFKPRYYFQIEKIPLLGSGKVDLKKVKELAKNLAI

SEQ ID NO: 115817 - DNA, 2142 bp, Dechloromonas aromatica RCB
  CDS (1)..(2142): transl_table=11
atgcgcaagttgttgcggccgctgttgcgtggcctggcccggttactgtttcgcattgaagtgccgatgcagcaggcgagtttcgatcatcagcgcctgctgatcgttgccaatcatcagtcttttcttgatggtcttttgatcgggttgttcttgccaatcgatccggtgttcgtcgtgcatacgaccatcgccaacagctttttcttccgcatcctgctctcgcaggtcgagtatctggcggtcgatccgaccagtccgatggcgatgaagaaggtcatccgtctgatcgaatccggccggccggtggtcatctttccggaggggcgaatcacgctgactggttcgttgatgaaggtctacgacggcccggccttcgtcgccgccaagaccggtgcgacggtggtgccggtgcgggtcgatggtgcctcacgcagttatttctcgcggctgtcgggcaagcatccaaaggaactgttcccgaaaatccgcctgagcatcctacccgagcgccattttccgatgccggaaggggcgaccgccaaattgcgccgtcggaagtccggcgaggcgatgcgtcgcttgatgcaggaaatgatcttcgcttcccggccgcagcaaacgctttatgccgcgctgtgcgatgcggccgatattttcggtcgccgccgccggctgctggaggacgtcaaacagatcgaatattcgtacaacgacctgctgaaaatggcgctgatcctcggtcgccagatcgagcgcctatcgcagccgggcgagaaggtcggcctgctgctgcccaatctggtgccgaccatcggcctgatatttggcctggctgcccgccgccgtatccctgccatgctcaactacacggccggtctggaggccatgcagtcctccatcgacgcggccgaaatcaagaccatcgttacttcccgtgccttcgtcgagcaagccaaactggcggacaagttggccgggctgagtcgggtgcaactgatctacctcgaagatgtgcgcgaacagatcggcttggccgacaagctgtggctggtcctttacgccattcacttcccgcgtgccttcgaactgcccgcttcgccggaagacgcagcggtcgtgctcttcacctccggttccgaaggcaagccgaagggcgttgtgctgccgcaccgcgccatcctggccaacatcgcgcagattcgttcggtgatcgacttctcggtctacgacaaggtgctcaacgcgctgcccatcttccactccttcggcctgacggccggcgcgctgctgccggtgctgaacggcgccagtctcttcctctacccgtcgccgctgcattaccgggtgattccagagctggcctacgaccgtggctgcacggtgctgtttggcacctcgaccttcctcgccaactacgccaagttcgccaacccgtatgacttttaccgcctgcgctatgtcgtggccggtgccgagaagctgtccgagtcagtgcgcaacgtctggttcgagaagttcggcctgcgtattttcgaaggctacggtgcgacagaaaccgcaccggtgctcgccgtcaacacgccgatggcctaccgcacgggaactgtcggcaacctgcttccaggcgtcgagcacaaactggtgccggtgcctggaatagatcagggcggcctgctgcacgtgcgcggcccgaacgtgatggccggctatctgaagtcggacaagcccggcgtgctgcaaccgccggtctccgatatcggtgagggttggtacgaaacgggcgatatcgtcgaactggatgaggatggtttcatcaagatcgtcggtcgagtcaaacgcttcgccaagattgccggcgaaatggttagcctggaagtcgtcgaaaaactggcgacggcgacctcgccagccttgccccacgccgcctccagccagcccgacccggccaagggcgaagcgctggtgctattcaccactgacggcgaactgacgcgcgacttgctcgccgccaaagcgcgcgaaatcggcgtgcctgaactggccgtgccgcgcaagattcacaaggtggaggcgcttccgctgctgggtaccggcaaggtcgattacgtgacgctgaaacgtctggcggaagcggtatga

SEQ ID NO: 115818 - protein, 713 aa, Dechloromonas aromatica RCB
MRKLLRPLLRGLARLLFRIEVPMQQASFDHQRLLIVANHQSFLDGLLIGLFLPIDPVFVVHTTIANSFFFRILLSQVEYLAVDPTSPMAMKKVIRLIESGRPVVIFPEGRITLTGSLMKVYDGPAFVAAKTGATVVPVRVDGASRSYFSRLSGKHPKELFPKIRLSILPERHFPMPEGATAKLRRRKSGEAMRRLMQEMIFASRPQQTLYAALCDAADIFGRRRRLLEDVKQIEYSYNDLLKMALILGRQIERLSQPGEKVGLLLPNLVPTIGLIFGLAARRRIPAMLNYTAGLEAMQSSIDAAEIKTIVTSRAFVEQAKLADKLAGLSRVQLIYLEDVREQIGLADKLWLVLYAIHFPRAFELPASPEDAAVVLFTSGSEGKPKGVVLPHRAILANIAQIRSVIDFSVYDKVLNALPIFHSFGLTAGALLPVLNGASLFLYPSPLHYRVIPELAYDRGCTVLFGTSTFLANYAKFANPYDFYRLRYVVAGAEKLSESVRNVWFEKFGLRIFEGYGATETAPVLAVNTPMAYRTGTVGNLLPGVEHKLVPVPGIDQGGLLHVRGPNVMAGYLKSDKPGVLQPPVSDIGEGWYETGDIVELDEDGFIKIVGRVKRFAKIAGEMVSLEVVEKLATATSPALPHAASSQPDPAKGEALVLFTTDGELTRDLLAAKAREIGVPELAVPRKIHKVEALPLLGTGKVDYVTLKRLAEAV

SEQ ID NO: 115819 - DNA, 3387 bp, Geobacter metallireducens GS-15
  CDS (1)..(3387): transl_table=11
atgaataccaccgaaccgaccaccctacccgtctccttccgccgcctgaacctggcccaggccctgggggcgctgaacgacaacctcatcaaactgatcatcgtcttctacctcatcggccgctacggccgggaggaggccggcaccattgccgccatggggagcgccgccttcgttgcgccgtttctcctcttctcggccctggccggttccctggccgaccgctttcccaaggggcggatcgtggtgggggtcaaggcgctggaagtggggatcgccctcctggccgtgagtggtctcttcctggcctcccctccacttctctatggggcggtctttctcctgggtacccacagcgccctcttcgctccggctaagtacggggtggtgccggagctggtcccccgggaggggctctcgaaagccaacagcctcttggagatggcttcctttctcgccatcgtcggggggactgctctggcccccttcctcgtgcagctggcaggggggcgccacggcgtggctcttctggcgggggtggccattgccgtggccgggcttctcatcgcccgcaccctccccccgacaccggccgtggccccggaccgggcgatttccttcttgccgaccagctactggcgcaccctccggagcctgaaacgcgacggctatctcctcctggcggtgatcggcgccgcctacttcctctttgtgagggccttctgtcagctgaatctcctcccctacggcatgaagatcctcgccctctccgaagagcagagcggctacctcttcctggccgctgccatcggcatcggcgccgggtcactctgggccggccggctctccgggcgcaccgtggagttcggcgtggtccccatcggggccgtggggctcaccgtctgctccttcgtcctggccatgatgccggcgagcctgtgggcggtcctggccgtggtggctctcttcggcgtcagcgccggcctcttcatcgtgccgctccagtccttcattcagctgcgggcaccggcggaccggcggggggaggtcctggccgcctcgtcgttcctgagctgggtcggggtgcttctggcctcggggctcctctgggtcctctcgggccccctggggttctcccccggcagctgcttcacggttctcggggcgatcaccctcgtcctcacggccgtcaccctccgggtcctccccgatttcctcctccgcttcatcgccttggcggtcatgcggatccgctaccgggtgaccaccatcgacgaccgccacgtgccggtggaagggggggcgttgttggtggcgaaccacgtctcctggctcgacgccctcatcctcctcgccacccagcagcggcggatccgcttcgtcatggaacgggagatctacagcgctcccggcctcaagcagctctgcgccctcatgggggtgatcccggtttcgtcccgggacgggaaaaggggcctcctggagttcatcgccaccgcccgcaaggccctggacgacggctacctggtctgcatcttcgccgagggggagatcacccgcaccggcatgctgaaccggttcaaggggggcttcgagcacatcgtcaaggggacgagccaccccatcatcccggtctacatcggcggcgcctgggggagcgccctctcctacgcccacggcaggctcctctcccgcctcccctccctcatcccctaccgggtgacggtcctcttcggcgcgcccgtgccggccgggagcaccccccacgacgtgcgccgggccgtgatggagctttccgcggcctggttcgaggcccgcaagccccgacgccgcgccctgggggagctcttcgccgagacggcccgggagaactggcaccgccttgccatggctgacaccgggggccgggagctgacttacggcagggccctcaccggcgccgtggccctggcggcgaagctgaaggacgcaactcccggccaggagatggtcggtgtctgcctcccccccaccgtggggggcgccctggtgaaccttgccctcaccctgaacggcatcgtgccggtgaacctgaactacaccgcctcgccggagggtatccgctcggccttggcccagtgcgccattacgaccaccatcacctcccgcgtcttcctggagaagctcggcaccctgccggaatttcccggtgtcctctacgtggaggacctcctcgccggcctcaccgacggcgacaagcgccgggcgtttctcacggcccgcttcctcccgcttcgcaccttcgcccgccccgccgggttcgatgccgaccgcctcgccacggtgatcttttcctccgggagcaccggggagcccaagggggtcatgctctcccaccacaacatcctctccaacctggaggcgctccggatggtctttcgcgccacccagcgggacaacatctgctcggctctccccttcttccactccctggggttcaccggcaccctctggctcccgctcctctcgggcttctcggcggtctaccacaccaaccccctggacggcgaaaccatcgccaaaaccgtgcgggagcggcagtcgaccctcctcatcgccacccccaccttcctcatggcctacctgcggcgagccaaaaaggaggactttgccaccctgcgcctcgtcatcaccggcgccgagaaactgaagccgaagctggccgacaccttccaggagaagttcggcatccgccccatggaggggtacggcgccacggagctgtcgccggtcatctccctgtcgcttcccgacgtggaggtcaacggggtccgccagatcgcctcccggcaagggagcgtggggctcccggtccccggcgtggtggtgaagatagtggaccccgacacctttgccgcgcttcccgagggggaggcggggctcatcctcgtcaaggggcccaacgtcatgctcggctacctccacaagcccgaaaagaccgccgaggtggtaaaggacggctggtacgtcaccggcgacatcggccggctggacaactacggctttctccacatcaccgaccgcctctcccgcttcagcaagatcgccggggagatggttccccacggcgccgtggaagacgctctccacgcccgcctcgggatgaccggcgtcgtggccgtcaccggcatccctgacgagaagcggggggaaaagctcgtggtggtcttcgcccgggaggcaggcgatgccgaaaccctccaccggctcatggccgagagcgacctccccaacctctggaagccggggcgggattgctacgtggccgtggacgccctgccgctgctggggaccgggaagctggacctgcggggggtgaaggaggcggctctggcggtagtggggtga

SEQ ID NO: 115820 - protein, 1128 aa, Geobacter metallireducens GS-15
MNTTEPTTLPVSFRRLNLAQALGALNDNLIKLIIVFYLIGRYGREEAGTIAAMGSAAFVAPFLLFSALAGSLADRFPKGRIVVGVKALEVGIALLAVSGLFLASPPLLYGAVFLLGTHSALFAPAKYGVVPELVPREGLSKANSLLEMASFLAIVGGTALAPFLVQLAGGRHGVALLAGVAIAVAGLLIARTLPPTPAVAPDRAISFLPTSYWRTLRSLKRDGYLLLAVIGAAYFLFVRAFCQLNLLPYGMKILALSEEQSGYLFLAAAIGIGAGSLWAGRLSGRTVEFGVVPIGAVGLTVCSFVLAMMPASLWAVLAVVALFGVSAGLFIVPLQSFIQLRAPADRRGEVLAASSFLSWVGVLLASGLLWVLSGPLGFSPGSCFTVLGAITLVLTAVTLRVLPDFLLRFIALAVMRIRYRVTTIDDRHVPVEGGALLVANHVSWLDALILLATQQRRIRFVMEREIYSAPGLKQLCALMGVIPVSSRDGKRGLLEFIATARKALDDGYLVCIFAEGEITRTGMLNRFKGGFEHIVKGTSHPIIPVYIGGAWGSALSYAHGRLLSRLPSLIPYRVTVLFGAPVPAGSTPHDVRRAVMELSAAWFEARKPRRRALGELFAETARENWHRLAMADTGGRELTYGRALTGAVALAAKLKDATPGQEMVGVCLPPTVGGALVNLALTLNGIVPVNLNYTASPEGIRSALAQCAITTTITSRVFLEKLGTLPEFPGVLYVEDLLAGLTDGDKRRAFLTARFLPLRTFARPAGFDADRLATVIFSSGSTGEPKGVMLSHHNILSNLEALRMVFRATQRDNICSALPFFHSLGFTGTLWLPLLSGFSAVYHTNPLDGETIAKTVRERQSTLLIATPTFLMAYLRRAKKEDFATLRLVITGAEKLKPKLADTFQEKFGIRPMEGYGATELSPVISLSLPDVEVNGVRQIASRQGSVGLPVPGVVVKIVDPDTFAALPEGEAGLILVKGPNVMLGYLHKPEKTAEVVKDGWYVTGDIGRLDNYGFLHITDRLSRFSKIAGEMVPHGAVEDALHARLGMTGVVAVTGIPDEKRGEKLVVVFAREAGDAETLHRLMAESDLPNLWKPGRDCYVAVDALPLLGTGKLDLRGVKEAALAVVG

SEQ ID NO: 115821 - DNA, 3492 bp, Saccharophagus degradans 2-40
  CDS (1)..(3492): transl_table=11
atgaaaaagctaagccaattcgcaggcgcaatccccttcttctgcgcagtcttcctcaacgccttcgtagacctgggccacaaaatagttatccaaaatacggtgtttaaactttacgatggccccacccaagtggtgcttaccgccattgttaacggtttaattttattgccgtttttattgctgcttagcccggcaggctttttgtcggacaggttcgccaagccccgcgttatgcagttggccgcttggatagccgtaggtttgtgcggtggcattacagctttttactacttgggctggttcgaactcgcattcgcgatgacctttttactggccgcgcaatcggccatttattcccccgccaagttcggctttattaaagaattgtttggtaaagaacgcttaggccaagccaacggcatagtgagcgcgctttctattgtggccattctggccggtattttcgccttttctattctgtttgaaatttggtaccccaaaggcagcaacttaaccgacagcgacattttgcaagccatcgcccccattggctgggtgctgttggcttgcgccattgttgagcttgttatgatgtaccgcatccccaacataccagcctcggcagcgccttctaccttaaattggtcgcgctggttaaccggccgtttatttgccgatgacttacaaccccttagccaaagccgcgtaattcgcctttcagtaatcggcctcgccatgttttggagcgtgggccaagtgatgcttgcggcctttcccgcattcataaaagaacaaacccaagtcgacaacaccattttggtacagggtgtattagcctgtgcaggcataggcattgctattgggtcgataattgctgggcgtatgtcgcgtgatcatatcgaaaccggttttttacccataggcgcctgcggtattgccctgggcttattatttttaccccacacagattccctcgcgctggcggccctaacgtttttatggataggcaccatgggcggtttatttatagtgccacttaacgcgcttattcaatttaccgcagccagcaacgctttaggtaaaacccttgccgcaaataactgggtacaaaacctgggcatgctcagctttttaatactcaccgttgtgttttcgcttttggggtggagcagtgaatctctgcttaatttaattgccatagttgcgcttttgggcgggctgtacaccatctaccaattaccacaaagcctcacccgctttgtattaacttgggtgctttcgcgccactacaagctgcaagtacagggcattaaaaacttacctgcgaaaggcggcgtattattactgggcaaccatataagctggatagactgggctattttacaacttgccagcccgcgccctattcggtttgtcatgattaaaaatatttactcacgctggtacttaacatggtttttcgatttattcggttgtattcctatcgagcagggcccacgcagtcgcgaagcgttaaaaaccgtaagcgaaaaacttaacaatggcgatgtggtgtgcctattccctgaaggcaccattagccgcacaggccatttagcagagtttagacgcggtttcgaaaaagcctgcgaagatgtgaacgacgatgtagtgattgtacccttctacttgcgcggcttgtggggcagccaattttcgcgttcatcagagcgtttgcgcaagcagcaatccaatggcatgcaccgcgaccttgtaattgcctttggccaccctatgcctaaaaccgcaagcgccgaagaagtaaaacaacgtgtgctagacgtatctatcgcatcgtggaaagagtacgtcaacaatttacccaccctgccacaacagtgggtacgtgcagcaaaacgtcacagcacgttacccgtagtaagtgacacactgggtacagatctaaacggcctgcaagctttaaccggcagtttactctttgccaagcgtattaaacgccatagccgcaagcaaaccgtaggcttattactgcccactaccgcaggcgccatggtgtgcaatatggcaaccctaatggcaggcaaaacactggttaacttaaattactctgcgggtgccagcgctatgctttcggctatagagcaggcagacatagattgcgtattcacctctgaaaagtttttgcgcaaattagaaggcaaaggactagataccgccgaactaaaagccaaaacacatttagtgtacgtagaagatattaaaacaaatataagcggtgtcgaaaaaatagtaacagcgacagtgtgcaagctattacctgcgcgattactgcaagccttgtattgcccgtgcacaacacttgagagcaccgctgctatagtattttctagtggtagcgagggcgcgcccaagggtattcaacttagccataaaaatattatggccaacgtaaagcaagtggccgacgtgttaaacatggaagccaacgatattatgctggccaatttgccgctgttccacgcgtttggtttaaccgctgcccaattcttaccgctgctagaaggtatacccgttattgctcacccagacccaaccgatgcgctagggtctgccaaggcaattgccaaaaacaacgccaccataatgtttggtaccaccactttcttgcgcatgtatattcgcaacaaaaaagtacatccccttatgctaaacagtatgcgtttaattgtggcgggcgcagagcgcttaaccccagaagtgcgcgaacaatttaaattaaaattcaataaagatatctacgaaggttacggcgctaccgaaaccacgccagtggcaagcgtaaacctgccagatcgcttgagccagcaagattggaaagtacaactaggtaataaactcggcaccgttggaatgcccctgcccggttccagctttaaaatagtcgaccccaatacatttgaagagctacctgttggcgaatcgggcatgattttattaggtggcagccaagttatgcagggctacttaaatcaaccagaaaaaactgccgaagtcattaaacttatcaacgacacgcgctggtacgttaccggtgataaaggccgcctagatgaagacggttttctcaccatcgaagatcgctactcgcgctttgccaaaattggcggtgaaatggtgcctttaggtaagttggagcaagcactacaagtactgctaccccaaatagatgggagtgacgaaacagccacaacgccagaattagtggcagtaaatttacccgatgcggcaaaaggtgaaaaagttattttgctaaccaccagcccgcttgccaaagatgccgtgcgcaactgtattagcgaagcaggcttaaccagcctagccaaccccagcgcaattattgaagtaacggcaatacccaaactaggttcaggcaaaacagattttggcagcgccaaaaaacttgctgccgaacaatgcgaaggtaaatag

SEQ ID NO: 115822 - protein, 1163 aa, Saccharophagus degradans 2-40
MKKLSQFAGAIPFFCAVFLNAFVDLGHKIVIQNTVFKLYDGPTQVVLTAIVNGLILLPFLLLLSPAGFLSDRFAKPRVMQLAAWIAVGLCGGITAFYYLGWFELAFAMTFLLAAQSAIYSPAKFGFIKELFGKERLGQANGIVSALSIVAILAGIFAFSILFEIWYPKGSNLTDSDILQAIAPIGWVLLACAIVELVMMYRIPNIPASAAPSTLNWSRWLTGRLFADDLQPLSQSRVIRLSVIGLAMFWSVGQVMLAAFPAFIKEQTQVDNTILVQGVLACAGIGIAIGSIIAGRMSRDHIETGFLPIGACGIALGLLFLPHTDSLALAALTFLWIGTMGGLFIVPLNALIQFTAASNALGKTLAANNWVQNLGMLSFLILTVVFSLLGWSSESLLNLIAIVALLGGLYTIYQLPQSLTRFVLTWVLSRHYKLQVQGIKNLPAKGGVLLLGNHISWIDWAILQLASPRPIRFVMIKNIYSRWYLTWFFDLFGCIPIEQGPRSREALKTVSEKLNNGDVVCLFPEGTISRTGHLAEFRRGFEKACEDVNDDVVIVPFYLRGLWGSQFSRSSERLRKQQSNGMHRDLVIAFGHPMPKTASAEEVKQRVLDVSIASWKEYVNNLPTLPQQWVRAAKRHSTLPVVSDTLGTDLNGLQALTGSLLFAKRIKRHSRKQTVGLLLPTTAGAMVCNMATLMAGKTLVNLNYSAGASAMLSAIEQADIDCVFTSEKFLRKLEGKGLDTAELKAKTHLVYVEDIKTNISGVEKIVTATVCKLLPARLLQALYCPCTTLESTAAIVFSSGSEGAPKGIQLSHKNIMANVKQVADVLNMEANDIMLANLPLFHAFGLTAAQFLPLLEGIPVIAHPDPTDALGSAKAIAKNNATIMFGTTTFLRMYIRNKKVHPLMLNSMRLIVAGAERLTPEVREQFKLKFNKDIYEGYGATETTPVASVNLPDRLSQQDWKVQLGNKLGTVGMPLPGSSFKIVDPNTFEELPVGESGMILLGGSQVMQGYLNQPEKTAEVIKLINDTRWYVTGDKGRLDEDGFLTIEDRYSRFAKIGGEMVPLGKLEQALQVLLPQIDGSDETATTPELVAVNLPDAAKGEKVILLTTSPLAKDAVRNCISEAGLTSLANPSAIIEVTAIPKLGSGKTDFGSAKKLAAEQCEGK

SEQ ID NO: 115823 - DNA, 3468 bp, Acidobacteria bacterium Ellin345
  CDS (1)..(3468): transl_table=11
atgagcgaaggtaccgtcgcaactccctctgctcccgaacaagtcccaccacccgtgaacgaagctcctcgtccggtcgcgaaaaactggcgcggaggattctgggcactgatcctcacgcagttccaaggtgcgttcaacgagaacgggctgaagaacctggttgtcttcctcgttctcgcctcggtggcagacaaggctcaacgcgacaagctcgttctagtggttggcacgctgttctcgctgccgttcatcctcttctcgatgactggcggcttctttgccgatcgcttcagcaagcgaaccgtcaccatcggcaccaagctcttggaaatgggagtgatgggcttggccatcgccgggctcggcatgcaaaacctgcacgtacaaatggcagcggtgtttctcgcgagcactcaagccgcgctgtttggaccatcgaaatatggcctgctgccggagttgctgccagaagagaagctgtcgtggggcaatggcgtgctggaactgggaacgtttctggcggtgatcgccgggggcgtgatcggagccacgttcgcggaagtctttaaagggcgccaggcatattccggtgcgatcctgctcgggctctcgttgcttggcttgttcttcagtctcgggatcgcgaaggtagcgccggcaaatccgacgaagaagttcaaggcaaatcccctcgcggacctttggtcgcagggcaaactcattcgcggtgaccgggtcttgtggcttgcgatcttcggcaatacatatttctggtttctcggcgcgctgctcacggcaaacattgtgttctatggcgaagacgtactgcacgccaattccacgcgcactggaattctccaagccgcggtggccattggcatcggcgtcggcagcttgaccgcgggatacctgtccagcggaaagatcgagtacggcctgatcccgatgggctcggtcggcatgactgtgtttggtgtgctgctttcgcgtccggggctcagtttcaaccacgtgctcgggctgctcgtggcgctgggatttttcgccggcttcttcgcggtgccggtcaacgctttgatccagcaccgtccagatgacaaggacaagggcggtgtgattgccgccgcaaacctcttgtcgtttgtcggaatcggcgcggcgaccggcgtttattacgtctttcagcactacgtgcacttcagcccaccgcagatcttcttctcagtttcgctggtgacggtggcggcgacagtgtatgtgctcttcttgctacctgacgcactgctccgcctgattctctggatgctcacgcacacgctctatcgcatccatctcgaaggtcgcgaaaacgtgccaagcaaaggcggcgcggtgctggcccctaaccacgtctcgatggtggacgcgattctgctatgggcggcgattgaccggccgatccgattcctgatgttcaaggacaactacgaacatccgctgattaagccgttcgcgaagatcatgggaatcattcccatctcgtcatcgcagcggccacgcgagatgattcactccctgcgcaccgcgacccaagcactcaaagatggcgaaattataggcatcttccccgaaggccaaatgacgcgcattggacagatgctgccgttcaagcgcggcattgagcgcattgtgaaaggcgtagaggtaccgatcattccggtaaacctcggcggagtttggggctcgatcttcagcttcgacaaaggccgattcctctggaaattcccgcgcaaaattccctatcccgtaaccgtgaccttcggcaagccgatgccctcgacttcgactgcgcgcgaggtgcgacaggcagtgcaggaactcggcgccgacgcctacgggttccgcaagcgctacatgcacacgctgcaccgatcttttatcaagacagcacggatgcatccgatgcgctttgcgatggcggacggccgcacgccgaaattgcgatttggcggcgcgctaacaaaggccatcttcctcgcgcgacgcttgcgcggaacctggaaagaccaggaaatggtaggcattctgttgccgccttcggtgccgggtgcgctagtgaatcttgctgcgttaatgatgggcaaggttccggtaaacctgaactacacggcatcgagcgcggtgctgcagtcgtgcgccgagcaatgcaagttaaagacggtcgtcacgtcgaaggcgttcctggaacgcgtacacgtcgagccaccgggaaaggtgatcctgctggaagaattggcggaagcgccacgagcatcggaaaaactgacggcgttgcttatcacgtggctgctcccgaagcggctcatcgaaaaggcctgcggctgcggacgcacgccgactctggacgacaccgctaccgtgatcttctccagcggcagtaccggcgatcccaagggcgtggtgctttcgcactacaacatcgcgtcgaacgttgagcagatgaaccaggtgttcatgctcagcagccacgacaagatccttgggatactgccgttcttccactcgttcggattcaccgggaccctggctctgcctgcgaaggtcgggatgggcgtggtattccatccgaatccgctggaagcccgcgcgattggtgcactggtgagccagtattcagtgacgttcctactggcaacgccgacgtttctcaatgcatatatgcggcgaatcgccccggaagattttggaagtttgcattacgtaatgaccggagccgagaaactgccggaacgcgtctcggtcgcttttgaagacacattcggtatcaagccgctcgaaggctacggatgcacggagtgctctcccactgtcacggtgaatacgcgcgactttcgcgccgcgcaattccggcaagtcgggttcaaacgcgcgagcattggacatccgctcccggggataagcttgcgtgtcgtgaaccccgagacgatgctgcctgcagcacctggtgaaccgggactattgttggttcgcggacccaacgtgatgcagggatatctcgggcgtccgcagaagacggcggaggttctgcacgatggctggtacaacaccggcgacattgcggcaatcgacgacgacggcttcgtgaagatcacagaccgactcagtcgcttcagcaaaatcggcggcgagatggtgccgcacatcagggtcgaagacaagctgcaagagattatcggagcgaccgagcaggtcttcgcggtgactgccgtgcccgacgaaaagaagggcgaacgccttgttgttctgcacacgctgaaggacgagcaggtgcaggagtgcgtctcgcaaattgcgaagtcggacctgccgccactctggaaagttcgtgcagatcaattcgtacatgtggatgcactaccgtatctcggcaccggtaagctcgatttgcggcgactgagagaaattgcactggggacgacggtatga

SEQ ID NO: 115824 - protein, 1155 aa, Acidobacteria bacterium Ellin345
MSEGTVATPSAPEQVPPPVNEAPRPVAKNWRGGFWALILTQFQGAFNENGLKNLVVFLVLASVADKAQRDKLVLVVGTLFSLPFILFSMTGGFFADRFSKRTVTIGTKLLEMGVMGLAIAGLGMQNLHVQMAAVFLASTQAALFGPSKYGLLPELLPEEKLSWGNGVLELGTFLAVIAGGVIGATFAEVFKGRQAYSGAILLGLSLLGLFFSLGIAKVAPANPTKKFKANPLADLWSQGKLIRGDRVLWLAIFGNTYFWFLGALLTANIVFYGEDVLHANSTRTGILQAAVAIGIGVGSLTAGYLSSGKIEYGLIPMGSVGMTVFGVLLSRPGLSFNHVLGLLVALGFFAGFFAVPVNALIQHRPDDKDKGGVIAAANLLSFVGIGAATGVYYVFQHYVHFSPPQIFFSVSLVTVAATVYVLFLLPDALLRLILWMLTHTLYRIHLEGRENVPSKGGAVLAPNHVSMVDAILLWAAIDRPIRFLMFKDNYEHPLIKPFAKIMGIIPISSSQRPREMIHSLRTATQALKDGEIIGIFPEGQMTRIGQMLPFKRGIERIVKGVEVPIIPVNLGGVWGSIFSFDKGRFLWKFPRKIPYPVTVTFGKPMPSTSTAREVRQAVQELGADAYGFRKRYMHTLHRSFIKTARMHPMRFAMADGRTPKLRFGGALTKAIFLARRLRGTWKDQEMVGILLPPSVPGALVNLAALMMGKVPVNLNYTASSAVLQSCAEQCKLKTVVTSKAFLERVHVEPPGKVILLEELAEAPRASEKLTALLITWLLPKRLIEKACGCGRTPTLDDTATVIFSSGSTGDPKGVVLSHYNIASNVEQMNQVFMLSSHDKILGILPFFHSFGFTGTLALPAKVGMGVVFHPNPLEARAIGALVSQYSVTFLLATPTFLNAYMRRIAPEDFGSLHYVMTGAEKLPERVSVAFEDTFGIKPLEGYGCTECSPTVTVNTRDFRAAQFRQVGFKRASIGHPLPGISLRVVNPETMLPAAPGEPGLLLVRGPNVMQGYLGRPQKTAEVLHDGWYNTGDIAAIDDDGFVKITDRLSRFSKIGGEMVPHIRVEDKLQEIIGATEQVFAVTAVPDEKKGERLVVLHTLKDEQVQECVSQIAKSDLPPLWKVRADQFVHVDALPYLGTGKLDLRRLREIALGTTV

SEQ ID NO: 115825 - DNA, 3396 bp, Rhizobium leguminosarum bv. viciae 3841
  CDS (1)..(3396): transl_table=11
gtgcaacataatctgatgacctccaggaaattcgcgccgctgttctggacccagttcctgacggccttcaacgacaatttcctcaagaacaccctggtgttcctcattctcttcaagatgtcggcgagcgaaggcgccgccctggtgacgctcgccggtgtcatcctcatcgtgcccttcctgctgctctcggcgctcggcggcgaactcgccgacaagcacgacaaggcgaaaatcgccgaactgctgaaacgctgcgagatcgcggtcgccgccctggccgtcgtcggcctcgccttttcttccatcttcgtgctgatggcggcgctgttcggcttcggcgtcgtctcggcgctgttcgggccgatcaaatacggcatcctgcccgatcatctcgaacgccgcgacctgcccaaggccaatgcctggatcgagggcggcaccttcatcgccatcctcgccggcacgatcatcgcagcattcgccttttccggcggcgacaatgtgctgatcttcggcacgatgatgatggggctttcggtgctctgctggctggccagccggatgatcccgcccaccggctccaaggcgccggatcttcagatcgaccgcaacgtcatccgctcgagctacaccctcgtcaaggaaatccgcgccgacaaacggctgtggcgttcggcgctgatgaactgctggttctggctggtcggcgccttcgtactgtcaatcctgccgaccatggtgaccgagctgctcggcggctccgagctcgtcgtgcccgcctatctcaccgtctttgccattgccgttgccgtgggatcagcgattgccgcctggatgtcatccggccgcatcgtgctgctgccggcccctgtcggcacggcgctgcttggcctcttcagcctcgatctcgcctggaacctctggggcttggcttccaccagccatgcgacgacgatcgccgacttcttcgctggccagaataccatccgcgtcgccatcgatctcgccggcatggcgatagcaggcgccttcatcgccgtgccgacctttgccgcactgcagacctgggcgcatgaggaccgccgcgcccgcgtcatcggcgccgccaatgtgctctcggcgctgttcatcactgtcggcctcggcctcgttgccgccgtccaggcgctcggcgcttccattcctgagattctgatcggccttggcatcatcaatttcgccgtcgcctggctgatgctgaagacgctgccgaccaatcccttccgcgatttcatctcgatcctgtttcgcgccttcatgcgcctcgaggtcgagggactggagaatatcaagaaggccggccgcgcgccgatcatcgcgctcaaccatgtcagcctgctcgatggcgccttggcgcttgccatcaccgaggaagagcccacctttgccgtcgattacaagatcgcccaggcctggtgggtgcggcccttcctgaagatgtgcaaattcctgccgctcgacccgaccaagccgatggcgacgcgttcgctgatcaaggtggtgcaggacggcaacccgatcggcatcttccccgagggccgcctgacggtgaccggcacgctgatgaaggtctatgatggcgccgccatggtcgccgacaagaccggctcgatggtcgtgccggtgaagatcgacgggctggagaagagctatctctcctatctcgacaacggcaagatccgccgccggctgttccccaaggtcaaggtcaccattctcgagccggtgaagctcgaagtgccgccggagctgaaaggccgcaagcgccgcacggcggcgggtgccgccctctatcaggtgatgtcgaacctgctgttccagaccgccgatacctcgtcgaccgtgctcgaccgcgtcatccaggccggccatgaattcggcatgaaaaagcttgccgtcgaagatccggtcaccggccggctgagctatggcaagctgctcaccggggctgccgtgctcggcgcaaaattccgcacgatgtttccggaacaaaatctcggcgtcatgctgccgaatgccaatggcgccgccgccacgcttctcggcgtgatgacggcgggcaaggtgccggcgatgctgaacttcaccgctggtgccgccaatatcctctccgcctgcaaggcggcgcaagtcaaacatgtgctgacctcgcgcgccttcgtcacccaggcgaaactcgggccggtgatcgccgagatggaaaagcaggtgacgatcgtctggctcgatgatctcagggccgaaatctcactcaaggacaagatccttgggcttctccgcaaggcgcggccgctggtgaagcgccagccggatgatccggcggtgatcctcttcacctcgggctccgaaggcacgccgaaaggcgtggtgctcacccatcgcaacatcctgtcgaacgccgcccaggccgccgcccgcatcgatttccacagcggcgacaaggtgttcaacatcctgccggtgttccactccttcggactgacggccggcacggtgctgccgctgatctcgggcgtgccggtttatttctatccgtcgccgctgcattaccgcatcgtgccggagctgatctatgcctccaacgccacgatcatcttcggcaccgacaccttcctcaacggctattccaggacggcgcatccttacgacttccgctcgatccgctatatcttctccggcgccgagccggtgaaggccgcaacccgccagacctatatggaaaaattcggcctgcgcatcctggaaggctacggcgtcaccgagaccgcgcctgtcatttccatcaacacgccgatgtacaacaagtcaggcacggtcggcaaaatcctgccgggcatggaatggaagctcgaaccggtgcccggcatcgaagagggcggcaggctgcatgtgcgcggcgccaatgtcatggccggctatctccgcgccgaaaagcccggcgtgctcgagccgctggtcgacggctggcacgacaccggcgacatcgtcaccatcgatgaggacggtttcgtcaagatccgcggccgcgccaaacgcttcgccaagatcggcggcgaaatgatctcgctcgccgccgtcgagaccttggccgccgagctctggccgggcgccctctcggtcgtctcctcgctgcccgacgccaagaagggcgagcgcctggtgctcctgaccgacgcccccaccgccacccgcaccgaattcctcgccttcgccaaatccaagggcgccatggacatgatggtgccggccgaggtcaatatcggcaaggtgccggtgctgggctccggcaaggtggatttcgtcgcggcgcgcaagttggcggaaagtgcggtggagggggagcaggcggcgtga

SEQ ID NO: 115826 - protein, 1131 aa, Rhizobium leguminosarum bv. viciae 3841
MQHNLMTSRKFAPLFWTQFLTAFNDNFLKNTLVFLILFKMSASEGAALVTLAGVILIVPFLLLSALGGELADKHDKAKIAELLKRCEIAVAALAVVGLAFSSIFVLMAALFGFGVVSALFGPIKYGILPDHLERRDLPKANAWIEGGTFIAILAGTIIAAFAFSGGDNVLIFGTMMMGLSVLCWLASRMIPPTGSKAPDLQIDRNVIRSSYTLVKEIRADKRLWRSALMNCWFWLVGAFVLSILPTMVTELLGGSELVVPAYLTVFAIAVAVGSAIAAWMSSGRIVLLPAPVGTALLGLFSLDLAWNLWGLASTSHATTIADFFAGQNTIRVAIDLAGMAIAGAFIAVPTFAALQTWAHEDRRARVIGAANVLSALFITVGLGLVAAVQALGASIPEILIGLGIINFAVAWLMLKTLPTNPFRDFISILFRAFMRLEVEGLENIKKAGRAPIIALNHVSLLDGALALAITEEEPTFAVDYKIAQAWWVRPFLKMCKFLPLDPTKPMATRSLIKVVQDGNPIGIFPEGRLTVTGTLMKVYDGAAMVADKTGSMVVPVKIDGLEKSYLSYLDNGKIRRRLFPKVKVTILEPVKLEVPPELKGRKRRTAAGAALYQVMSNLLFQTADTSSTVLDRVIQAGHEFGMKKLAVEDPVTGRLSYGKLLTGAAVLGAKFRTMFPEQNLGVMLPNANGAAATLLGVMTAGKVPAMLNFTAGAANILSACKAAQVKHVLTSRAFVTQAKLGPVIAEMEKQVTIVWLDDLRAEISLKDKILGLLRKARPLVKRQPDDPAVILFTSGSEGTPKGVVLTHRNILSNAAQAAARIDFHSGDKVFNILPVFHSFGLTAGTVLPLISGVPVYFYPSPLHYRIVPELIYASNATIIFGTDTFLNGYSRTAHPYDFRSIRYIFSGAEPVKAATRQTYMEKFGLRILEGYGVTETAPVISINTPMYNKSGTVGKILPGMEWKLEPVPGIEEGGRLHVRGANVMAGYLRAEKPGVLEPLVDGWHDTGDIVTIDEDGFVKIRGRAKRFAKIGGEMISLAAVETLAAELWPGALSVVSSLPDAKKGERLVLLTDAPTATRTEFLAFAKSKGAMDMMVPAEVNIGKVPVLGSGKVDFVAARKLAESAVEGEQAA

SEQ ID NO: 115827 - DNA, 3372 bp, Solibacter usitatus Ellin6076
  CDS (1)..(3372): transl_table=11
atggcacacaacggattcggaaacgtcctcaagaacggcggctttcaggcattcctctggacgcagttcctgggcgcgtttaacgacagcgtctatcagaccatcgtcgcgctgcacgtggggaaagcgaatccggcctatgtgccgttggtgccggcggtattcacattgcccgcgttgctgttcagcggatatgcgggccacttggcggacctggtgagcaagcgcagcgttctgatcggcgtgaaggtcttcgagatcgcgatcatgctgttcggcctggcgacgctgctgcgcgggtggacggaaggcatgctggcggtcgtattcctgatggggctgcacgcgacgatcttcagcccggcgaagtacgggattgtgcccgagatgatttcggatcgcgatctttcgcgaggcaacgcgctgctcgaaatgagcacgttcgtggcgattgtggtggggatcgcgggcggcggcgtgctgttcgcggtatggaagcaggacccgtggcgcatgggggtggtggcgctggctgtatcggcaatcggtctggcgacgagtttcgggatcacgcgagtccccgcgtccggtgcgaggcagattttccggtggaaccccttcggcgagatcgcgggcagcacgcggcacctgctgaacgataagccgctgtggctggcggtgctgggcgtgagctatttctggttcgccggagtgctgctgaagacgaacctgcagtatttcggaaccgaggtcctgaaggtcagcgacaacggcgtctccctgctgtgggccttcctggcgatcgggatcggcgtgggcaatatgctggcggggcggctttccggcgacaaggtggaactcggcctggtccccctgggctccatcttcatgggcctgttcgcgctggcggtggtggcagcccggcactcgctggcgctctcgaccgcggcggtagtgctgctggcgatggcgagcggactcttcgtggtgccgctctacgcgttcatccaacagaaaagcgacagccacgagaagggccgcgtggtggcgacgaacaacttcttccagacgctcggcatgctgctggcgagcgggctgatgtggctgtgctacacgcagctgcatttgagcgccacggtgatcatgctgggcttcggcctctcgctgctggcggtgacggtttacatcgtgaccatcgtgccggactacctggtgcggttcgtgctctggctgctgacgcacagcgtgttccgcatcaggatcaacggcgcggagaatgtgccgttccgcggaccggcgctgctggtggccaaccacatgtcgcacgtggacggattcctgatcggcgcgtgcgtacagcgcttcatccgcttcatggtttggaagccttactacgaactgaaggcattccactggtttttcaaactctcgaaggcgattccggtggggaccgggggaccgcgcgacatggtggaatcgatccgcgccgcgcgcaaggagatcgcggacggacacgtggtgtgtatcttcgcggagggcgcgatcagccggacgggcaacatgctgcccttcaagcgcgggatggagaagatcgtggcaggcacggaggtgccgatcatcccggtgcatctggaccggctatggggcagcattttcagtttcaaaggcggcaaatttttctggaagtggccgacccggattccctatcgcgtgaccgtgagcttcggggcgccgctgccggcgaacacgagcgcccaggccgtacggcaggcgatccaggagctttcggcggatgcgacggcgcaccgcaaacaggcgggagacctgctggaccgccggctgattcaagtggcgcggcgcaactggaagcagttcgcgatggccgacagcacggggcgcacactgacctacggggaaatgctgacgggcgcggtgctgatgagccgtgcggtacagaatgacgagatggtgggggtgctgctgccttcgaccgtggccggcgcgctggcgaatctcggattgacgctgcgcggagtggcgccggtcaacctgaatttcacggcgggacgcgaagccatgaaggcctcggtggggcagtgcggaatccgcacggtaatcacgtcgcgaatgttcctgtccaagctgccggcagggcaggcggacgggctcggcgaattcctgtacgtggaggacatcttcaagagggcgagcggaatcgacaaggcgcgcgcatacctcgcggctcgtttggcgccaatcgcgatgctctcccgcggcggccggacacccgattcgccggcgggcatcatcttctccagcgggtccaccggggttccgaagggcgtggtgctctcgcactacaacctgatcgcaaacatagaggcgatcgcgcagctctttgggatcgggcgcagcgaccggcttgcgggcgtgctgccgttctttcactcgttcggctttacggtcacgctctggttccccctgctcacaggctgcggagtggtctaccacccgaatccgacggaggcgaaggcggtgggagacctggtggagaagtaccacgcgacgctgctgctttccacgccgacgttctgttccacctacacgcgcaaatgcacgccggagcagttcgccagcctgcgctatgtgctggtgggcgcggagaaactgcgacagccggtggccgatgccttccgcgagaagttccacacggagttgctggaagggtacggatgcacggagatgtcgcccgtgatcgcggtcaatgctccgaacttcaacgcgggcaaggacagccagacgggtaccaaggccggcagcgtgggacatccgttgccgggagtggccgtgcgcatcgttgacccggtgacattcgagccgctgccgccgcagacggaggggctgctgctggtgaaggggagcaatcgcatgcttggatatctggggcaagcggagcggacagcagaggtcgtccgcgacgggtggtacattacgggcgacatcgcgctgctggatgatgaaggcttcgtacgggtcacggaccggctctcgcgcttcagcaagatcggtggagaaatggtgcctcacatccgcgtggaagacgcgctgctgaccgcgatgggcgacgctccgtgcgtggtgacggggatccccgacgaacaacgcggggaacggctggtggtgctatacgtgcacgccacgttgtcgccggccgaggtgtgggagcggctggcggcatgcgagatgccgcgtttgtgggtgccgaagcgggaaaatatctatcgagtggaagagttgccccaactcggcaccggaaagctcgatttgcgcagagtgaaggcgctggcgcaggaattgtccgagcaggcttag

SEQ ID NO: 115828 - protein, 1123 aa, Solibacter usitatus Ellin6076
MAHNGFGNVLKNGGFQAFLWTQFLGAFNDSVYQTIVALHVGKANPAYVPLVPAVFTLPALLFSGYAGHLADLVSKRSVLIGVKVFEIAIMLFGLATLLRGWTEGMLAVVFLMGLHATIFSPAKYGIVPEMISDRDLSRGNALLEMSTFVAIVVGIAGGGVLFAVWKQDPWRMGVVALAVSAIGLATSFGITRVPASGARQIFRWNPFGEIAGSTRHLLNDKPLWLAVLGVSYFWFAGVLLKTNLQYFGTEVLKVSDNGVSLLWAFLAIGIGVGNMLAGRLSGDKVELGLVPLGSIFMGLFALAVVAARHSLALSTAAVVLLAMASGLFVVPLYAFIQQKSDSHEKGRVVATNNFFQTLGMLLASGLMWLCYTQLHLSATVIMLGFGLSLLAVTVYIVTIVPDYLVRFVLWLLTHSVFRIRINGAENVPFRGPALLVANHMSHVDGFLIGACVQRFIRFMVWKPYYELKAFHWFFKLSKAIPVGTGGPRDMVESIRAARKEIADGHVVCIFAEGAISRTGNMLPFKRGMEKIVAGTEVPIIPVHLDRLWGSIFSFKGGKFFWKWPTRIPYRVTVSFGAPLPANTSAQAVRQAIQELSADATAHRKQAGDLLDRRLIQVARRNWKQFAMADSTGRTLTYGEMLTGAVLMSRAVQNDEMVGVLLPSTVAGALANLGLTLRGVAPVNLNFTAGREAMKASVGQCGIRTVITSRMFLSKLPAGQADGLGEFLYVEDIFKRASGIDKARAYLAARLAPIAMLSRGGRTPDSPAGIIFSSGSTGVPKGVVLSHYNLIANIEAIAQLFGIGRSDRLAGVLPFFHSFGFTVTLWFPLLTGCGVVYHPNPTEAKAVGDLVEKYHATLLLSTPTFCSTYTRKCTPEQFASLRYVLVGAEKLRQPVADAFREKFHTELLEGYGCTEMSPVIAVNAPNFNAGKDSQTGTKAGSVGHPLPGVAVRIVDPVTFEPLPPQTEGLLLVKGSNRMLGYLGQAERTAEVVRDGWYITGDIALLDDEGFVRVTDRLSRFSKIGGEMVPHIRVEDALLTAMGDAPCVVTGIPDEQRGERLVVLYVHATLSPAEVWERLAACEMPRLWVPKRENIYRVEELPQLGTGKLDLRRVKALAQELSEQA

SEQ ID NO: 115829 - DNA, 2139 bp, Azoarcus sp. BH72
  CDS (1)..(2139): transl_table=11
atgcctgtgatcagattcgtgctgcgcctgctgctcggcactctcttcagcgttcgcgtgcgcggcgacaacgcgtcgctctcggcgcgccgtctgctcatcgtcgccaatcacgagtccttcctcgacggccttctgctgggtctgttcctgccggcggaccccgtgttcgtggttcacaccggcgtcacccgccgcttctggttcaggctcgcgttgaggctggtcgatcatcttgcggtcgacccgaccaacccgatggcgatgaagcgcgtgatccggctgctggaagaaggccgcccggtggtcatcttcccggaggggcgcatcaccgtcaccggcagcctgatgaaggtgtacgagggccccgccttcgtggccgcgaagaccggcgcgaccatcgtgccggtgcgcctcgacggcgccgcccgcagctacttctcgcgcgttgccggccgccatccccgccgcatgctgccgcgcatcacattgagcatccagccgccgacccggatcgagatgccggaagcgcccaccgcgaaggcgcgccgccagaaggcgggcgaggcgatgcggcgcctgatgcaggagatgctgttcgcctcgcggccgtcacagacgctgttcgacgcgctgctcgacaccgcggcgctgcacgggcggcaacgcgccgtggtggaggacgtcaagcaggtggaatacagctacggcgacctgatcaagatgtcgctcgcactcggtcggctcggcagccgactgggcgggccgggcgagcgcatcggcgtcctgctgcccaatctggcgcccacgctcggactggttttcggtctcaatgccttcggccgcacgccggcgatgctgaactacaccgctggaaccgaagggctgcaggcggcctgcaccgcggcgtgcctgcgcacggtcatcacctcacgtgccttcctggagcaggcccggcttacggagcgcgtcacggcgctcgaaggcgtgcgcatcgtctatctcgaagacctccgcgcaaccctggggctggccgacaagctgtggctgatgctgtgggcgctccacttcccgcggctcgccacctgccgccagcagccgggcgatcccgcggtggtgttgttcacatcgggatcggaaggcaagccgaagggcgtcgtactgtcgcatcaggcgctgctggccaacgtcgcccagatccgcgcggtggtggatatctcgcccgacgacaagatcctcaacgccttgccgctgtttcattcgttcgggttgacggcgggttcgttgctgccggtgctgtccggtgccgatgtcttcctctacccctcgcccttgcattaccgggtgattccggaactcgcctacgaccgcggttgcaccgtgctgctgggcaccagcaccttcctcggcaattacgccaggtttgcccacccctacgacttcttccgcttgcgctacgtcatcgccggcgccgaaaagctgtctgaagcggtgcgcaccagctggttcgagaagttcggcatccgcatcttcgaaggttacggcgccaccgagaccgcgcccgtgctggcggtgaatacgccgatggcctaccgcagcggcaccgtcgggcaactgcttcccggtctgcacgccaagttgctcgcggtgcccggcatcgaccgcggcggcatactccacgtcagcgggcccaacctcatgtccggctacctgcgggtcgaacaacccggcgtgctgcagccgccgtcgtccgcagccggcgaagggtggtacgaaaccggcgacgtggtcgatatcgacgacgacggcttcctgcgcatcgtcggccgtgtaaagcgcttcgccaaggtcgcgggtgaaatggtgtcgctcgaatccgtcgagaaactggccgtgcagaccgcgtcggagttcgcccacgcggcctccacccagcccgacccggcacgcggcgaaagcatcgtgctgttctccaccgacccggccctgacccgcgaacgcctgcaggccgcggcgcgcgacggcggctggccggagattgcggtcccccggcgcattgtccccgtcgacgcgctgccgctgctgggcaccggcaagatcgactacgtgacgctcaaacggtgggcggaagcagcgtga

SEQ ID NO: 115830 - protein, 712 aa, Azoarcus sp. BH72
MPVIRFVLRLLLGTLFSVRVRGDNASLSARRLLIVANHESFLDGLLLGLFLPADPVFVVHTGVTRRFWFRLALRLVDHLAVDPTNPMAMKRVIRLLEEGRPVVIFPEGRITVTGSLMKVYEGPAFVAAKTGATIVPVRLDGAARSYFSRVAGRHPRRMLPRITLSIQPPTRIEMPEAPTAKARRQKAGEAMRRLMQEMLFASRPSQTLFDALLDTAALHGRQRAVVEDVKQVEYSYGDLIKMSLALGRLGSRLGGPGERIGVLLPNLAPTLGLVFGLNAFGRTPAMLNYTAGTEGLQAACTAACLRTVITSRAFLEQARLTERVTALEGVRIVYLEDLRATLGLADKLWLMLWALHFPRLATCRQQPGDPAVVLFTSGSEGKPKGVVLSHQALLANVAQIRAVVDISPDDKILNALPLFHSFGLTAGSLLPVLSGADVFLYPSPLHYRVIPELAYDRGCTVLLGTSTFLGNYARFAHPYDFFRLRYVIAGAEKLSEAVRTSWFEKFGIRIFEGYGATETAPVLAVNTPMAYRSGTVGQLLPGLHAKLLAVPGIDRGGILHVSGPNLMSGYLRVEQPGVLQPPSSAAGEGWYETGDVVDIDDDGFLRIVGRVKRFAKVAGEMVSLESVEKLAVQTASEFAHAASTQPDPARGESIVLFSTDPALTRERLQAAARDGGWPEIAVPRRIVPVDALPLLGTGKIDYVTLKRWAEAA

SEQ ID NO: 115831 - DNA, 3423 bp, Rickettsia rickettsii
  CDS (1)..(3423): transl_table=11
atggacacaaacaaattatatcttttcaaagatagacgatttttaccgaattttatagtgcagttatgcggttgtcttaatgataatatattaaaaaatgctctggtaatccttatcacttatggtatttcaggagctttaagtcaatataataatctacttgttttaattgctaatgctacttttgtattaccttttataatattcgcaagcatagcaggacaaattgccgataaatacgagcgtgcaaatcttattaaaattattaagatttgtgaaatcggtataattgcctttgcaatttacggattgcataataataatctgttaatcctgttttgttctatttgcttaatgggtatgcattctacttttttcggtccaatcaaatatagcgtattacctgatcacctaaataaagacgaactacttggagctaacggctttgttgaagccggaacttttatcggtatttttatcggtactataatcggcagctattatacaatcagcaataattttataatttattccttaattaccatagcttttcttggctttattacaagccttttttccccaaaatcgaaaaacgtaaatcgtgatattaaaataaattttaatattatagatgaaagcataaatatgattaaatatgccaaagcaaaacaacagatatatttagctatacttggcatttcatggttttggtttatcggagctgctataatttctcaaatacctttacttgctaagataacttttaaagctgatgagaatgttgctaatttatttttagcggttttctcgcttggtgttggggtcggttcgtttttatgtagcaaaatatttgaagatgagattaccgttaaatatctatttatttcagccctaggcattagtattttcggtattgatttattctttgcaagtagaattagctcagttaactacgaacctactcagctaaaaagtattttagtatttttatcgaaaagacataattggcgcatagttatagatttattgttcttagcggcaataggcggattatatatcgttccgctttttgcgatattacagcattacgcaaaccctgctcatcgtagtcgaattattgccgttaacaatcttatcaattccattttcatggtgggatccacaataattctatctttattattttacctaaatttcactataccctggattatattatttattagcctagctaatataatcgttactatacatatttaccgtttaatacctgaagttaaaattattccatttaagctattgcgaagaatattccaaatctgttttgatcttatgtataaggttgaagttaaaggatttgaaaattttcaaaaagcaggtaaaaaagtagtagtggtcgctaaccatatttcatatctagatccgccgctaattgctacttacttacgagaagaaatgacttttgcaattagtcccgatatacaaaaaatatggtggattaaaccgtttttacgtatggcaagaactttgccggttgatccaagtaacccaatggcaataaagactttagtaaaagaagtacaaaaggatcagaaagtagcaattttccctgaaggtagaataagcgttaccggctctttaatgaaaatatacgaaggaccgggaatgattgccgataaagccggtgctaccatcttaccggttagaatagacggtactcaatttactcatttatcaaaattaaaaaacatattaaaaagaaaaatatttcctaaaattactataaccattttaccgccggtaaaattcgctaatatggatgctacaagcaaccaagaacgacgcagttatatatctaggactctttatgatatcatggctgacatgatgtttgaaagttcagactatcaaaatactgtattctcatctcttatagaagctgctaaaattcatggatttaagaaaaaaatagttgatgattttgaaaataatgcggttacttatcgagatttaatattaaaatcttttatcctaggtgatttaatcaaaaagaataatatctttggcagaaatttaggcttaatgttgcctaataccacggatacgttaattactttttacgctatgcaatctagcggttatgtgcctgctataattaactggagcagcggcataagtactgttattaactcctgtaaacttgcacaaattaaagtagtttacacttcaaaacaatttattgagaaagcaaatttatatgaattaataactaacttattagatttcggtattaaaataatatatttagaagattttaaaaatcagattggtacagccctaaaactaaaagcaaaaataggcagttattgtgcccaaacttattacaattatttttgtcgtaatcgtgatgacgaaaaaccggcagtgataatttttacttcgggtactgaaggtaaacctaaagccgtattattatctcacagaaatttacaaactaatagatatcaaataactgctaaagtaccttttagccctgaagatatagtatttaatgcgttaccgctatttcattgttttggtcttagtggtgcaattattacaactttaaacggtattaagctgtttctatatccttctccactaaattatcgtagcattcctgaagttatatacgatattggagcaactatattaatttctaccgatacttttttaaacggttatgctaattacgctcacccatatgatttttactcattacgctatatatttgccggtagcgagaaattaaaagaatctacacgacaattttggcttaataagtatggcatacgtatttttgaaggatatgggattacagaagcctcacctattatagcttgcaatacccctatgcataataaagcaggcacggtaggaagattattaccgaaaattgattataagcttgagaaagtagagggaataaatgaagggggacgtttattcattaagggtcctaacataatgcttggttacttggacttagaaggtcaccgtacttataaagaatggtacgacacaggcgatatagtcaaaattgattctgaaggatatataacaactctaggacgtttaaaacactttgctaaaatagcaggggaaatgatatctcttacaaaaattgaagaacttgcaagtgaaattgatcctgattccttgcacgctgctatttctattcccgataaaacgcacgaagacaagattattttacttactaccggttccaatataaatagagagaactttgcagatgctgtatctaaagctcaaattcctttactacatttaccgaaagtaattattaccgattcagaaatacctctacttacaaacggcaaaattgattatcttgagattatgaaaaacgtggatagattttaa

SEQ ID NO: 115832 - protein, 1140 aa, Rickettsia rickettsii
MDTNKLYLFKDRRFLPNFIVQLCGCLNDNILKNALVILITYGISGALSQYNNLLVLIANATFVLPFIIFASIAGQIADKYERANLIKIIKICEIGIIAFAIYGLHNNNLLILFCSICLMGMHSTFFGPIKYSVLPDHLNKDELLGANGFVEAGTFIGIFIGTIIGSYYTISNNFIIYSLITIAFLGFITSLFSPKSKNVNRDIKINFNIIDESINMIKYAKAKQQIYLAILGISWFWFIGAAIISQIPLLAKITFKADENVANLFLAVFSLGVGVGSFLCSKIFEDEITVKYLFISALGISIFGIDLFFASRISSVNYEPTQLKSILVFLSKRHNWRIVIDLLFLAAIGGLYIVPLFAILQHYANPAHRSRIIAVNNLINSIFMVGSTIILSLLFYLNFTIPWIILFISLANIIVTIHIYRLIPEVKIIPFKLLRRIFQICFDLMYKVEVKGFENFQKAGKKVVVVANHISYLDPPLIATYLREEMTFAISPDIQKIWWIKPFLRMARTLPVDPSNPMAIKTLVKEVQKDQKVAIFPEGRISVTGSLMKIYEGPGMIADKAGATILPVRIDGTQFTHLSKLKNILKRKIFPKITITILPPVKFANMDATSNQERRSYISRTLYDIMADMMFESSDYQNTVFSSLIEAAKIHGFKKKIVDDFENNAVTYRDLILKSFILGDLIKKNNIFGRNLGLMLPNTTDTLITFYAMQSSGYVPAIINWSSGISTVINSCKLAQIKVVYTSKQFIEKANLYELITNLLDFGIKIIYLEDFKNQIGTALKLKAKIGSYCAQTYYNYFCRNRDDEKPAVIIFTSGTEGKPKAVLLSHRNLQTNRYQITAKVPFSPEDIVFNALPLFHCFGLSGAIITTLNGIKLFLYPSPLNYRSIPEVIYDIGATILISTDTFLNGYANYAHPYDFYSLRYIFAGSEKLKESTRQFWLNKYGIRIFEGYGITEASPIIACNTPMHNKAGTVGRLLPKIDYKLEKVEGINEGGRLFIKGPNIMLGYLDLEGHRTYKEWYDTGDIVKIDSEGYITTLGRLKHFAKIAGEMISLTKIEELASEIDPDSLHAAISIPDKTHEDKIILLTTGSNINRENFADAVSKAQIPLLHLPKVIITDSEIPLLTNGKIDYLEIMKNVDRF

SEQ ID NO: 115833 - DNA, 3396 bp, Magnetospirillum magnetotacticum MS-1
  CDS (1)..(3396): transl_table=11
atgcatgacggttcctttcacctgctgcgttgtcgccgtttcctgcccctcttcgtggcccagttcctgggggcggccaatgacaacgtcttcaagaacgccctggtcatcctgatcgtctaccgcctgggcgaaggcatggcggttgcgccgcagatcctggtgaccgtggcggcggggctgttcatcctgcccttcttcctgctgtcggccaccgccggacaactatccgaccggtttgagaaaagcggcctgatcaagctggtgaaactggccgaggtgggggtgtcggcgctggggctgtgggcgctggtcgcatccagcgtccctgccatgctggccgttctgttttgctttggcatccaggccaccttcttcggcccgctgaaatacgcggtcctgccggagcatctggccgagcgggaactggtgggcggcaatgccctgatcgagggcggcaccttcatcgccatcctcttgggaaccgtggcaggcgggttgctgattctcaccgagaacggcgtggccttggtctcgggcctgatgctgcttctggccctgggcgggttcgccgccagcctgatgctgcccaaggcaagagcgggcaatgcttccgtccgggtttcggccaatatcattgccgagacctgggctgtgctgggcctgatcaaggggcggcgcgacctgttcttgtcggtgctgggcatttcctggttctggctgatgggcgccaccttcctggcccaattccccgccttcgccaaggatgtgctggtggcggaccagcatgtggtgaccttgctgctcaccgtgttttcggtgggaatcggcatcggctcggtctggtgcgggcgtctgctcaacggtgagatttccgcccgccacgttcccttcgccgccctgggcatgacgctgttttccttcgacctctacttcgccagcgcggttcccaatgcggcgggacaactggccaccatcggcgaattcctggcccaccctggaagttggcgggtgctgggcgatctgctggccatcgccatctgcggcggcgtctatatcgtgccgctctacaccatccttcagacccgcagcgacgccgacagccgggcgcgtgccgtggccgccaacaacgtcatgaatgccgccttcatggtcatttcggctgtggcgggagcaggcatgctggcgctgggcttttccgtgccccatgtcttcctggttcaggccgtggccaatctggtggttgccgtctatatctgcggcctgctgcccgaggctttgctgaagggcgtcttcgcctgggtgctgcgccgggcctatggggttcgcatccatggcctggagaaccttatcgggctgggcgacaaggcggtgatcgtggtcaaccacgtctccttcctggatgcggtgctgatggccgccttccttcccggacggcccaccttcgccatcaacaccttcgtggccaaggcctggtgggtgaagccctatctatcggtgatcgacgccttccccatggaccccaccaaccccatgtccaccaagggcctgatccacgcggtgcagtcgggccgcaccctggtgatctttcccgaaggccgcatcactgtcaccggcgccctgatgaagatctacgaaggtcccggcatgatcgccgacaaggccggtgcgccggtggttccggtgcgcatcgaaggcgcccagtacacccccttctcgcgcctgaaaggcaaggtgcgccgcaagctctttccccgtatcaccatcactattctaccgccgcgccgcttcgaggtgccgcccgagatcaagggccgcgtccgccgtgcccgcatcagcgcggcgctttacgacgtcatgtcggggatgatgttcgagaccacgccgcgtcagcacaccctgttccaggccctgcttgaagcaaggcgccgccatggcggttcggccctggcgctggaagacatcaaccgcaaaccgctcagctatacccgcaccatcgccggcagcttcgcgctggggcgtgaactgatcggtggcaccgagttgggcgaagcggtgggcctcttgctgcccaacgccaatgcggcggccgtcagcttctttggcttgcaggcctggggccgggttccggccatgctgaacttctccaccggcaccggcaatgtgctggccgcctgcgagacggcaaaaatcaagaccgtgatcacgtcgcggcgcttcatcgagcaggcgcggctttccgccatggacgaggccctggccgcccgtgtgcggctgatccatctcgaagacatcgcgccaaaggtcagcaagctttacggcctgttcgccgccttgttcaagcagccggtggagcgtcagcctgacgacccggcggtgatcctgttcacctcgggctcggaaggaacgcccaagggcgtggtcttaagccatgccaatatcctggccaattgcaaccagctggccgccagggtggccttcacgccccaggacatggtgttcaacgccctgcccgtcttccactccttcggcctgacgggcgggttgttgctgcccgttctggcggggcttaaagtgttcctttatcccagcccgctgcattaccgcatcgtgcccgagatggtctacgacaccaatgccaccatcgtcttcggcaccgacaccttcctcaccggctatgcccgcgtggcggcgccttacgacttctactcggtgcgttatgtcttcgcgggcgccgagaaggtcaaagacgagacccggcgcgtgtggatggagaagttcggcatccgcatcctggaaggctatggcgccaccgagaccgccccggtcctggcggtcaacacccccatgcattgcaaggcgggaaccgtcggccgcctgctgcccggcatcgagtcgcggctggagccggttcccggcatcgacgagggcgcgcgtctgtcggtcaagggccccaacgtcatgctgggctatatgaaggcggaccagcccggcgtgctgcagccgcccgaggacggctggtacgacaccggcgacatcgtcaccatcgacgagttgggctatgtgcgcatcgtggggcgcgccaagcgcttcgccaagatcgcgggggagatggtctcgctgggcagcgtggagaacgccgtcgccagcctgtggcccggcaaccagcacgcggtgatcgccattcccgacgagaagaagggcgagcaactggtcctggtcaccgaccgcgccgacgccgcgcggcccccgatcctggaacacttccgcgctcaagggctggcggaactgctggtgccgcgcaatttgcgcgtggtggacaaggtgcctgtgctgggtaccggcaagaccgattacgtggcggtcaaggcgctggtggagggaaaggctccatga

SEQ ID NO: 115834 - protein, 1131 aa, Magnetospirillum magnetotacticum MS-1
MHDGSFHLLRCRRFLPLFVAQFLGAANDNVFKNALVILIVYRLGEGMAVAPQILVTVAAGLFILPFFLLSATAGQLSDRFEKSGLIKLVKLAEVGVSALGLWALVASSVPAMLAVLFCFGIQATFFGPLKYAVLPEHLAERELVGGNALIEGGTFIAILLGTVAGGLLILTENGVALVSGLMLLLALGGFAASLMLPKARAGNASVRVSANIIAETWAVLGLIKGRRDLFLSVLGISWFWLMGATFLAQFPAFAKDVLVADQHVVTLLLTVFSVGIGIGSVWCGRLLNGEISARHVPFAALGMTLFSFDLYFASAVPNAAGQLATIGEFLAHPGSWRVLGDLLAIAICGGVYIVPLYTILQTRSDADSRARAVAANNVMNAAFMVISAVAGAGMLALGFSVPHVFLVQAVANLVVAVYICGLLPEALLKGVFAWVLRRAYGVRIHGLENLIGLGDKAVIVVNHVSFLDAVLMAAFLPGRPTFAINTFVAKAWWVKPYLSVIDAFPMDPTNPMSTKGLIHAVQSGRTLVIFPEGRITVTGALMKIYEGPGMIADKAGAPVVPVRIEGAQYTPFSRLKGKVRRKLFPRITITILPPRRFEVPPEIKGRVRRARISAALYDVMSGMMFETTPRQHTLFQALLEARRRHGGSALALEDINRKPLSYTRTIAGSFALGRELIGGTELGEAVGLLLPNANAAAVSFFGLQAWGRVPAMLNFSTGTGNVLAACETAKIKTVITSRRFIEQARLSAMDEALAARVRLIHLEDIAPKVSKLYGLFAALFKQPVERQPDDPAVILFTSGSEGTPKGVVLSHANILANCNQLAARVAFTPQDMVFNALPVFHSFGLTGGLLLPVLAGLKVFLYPSPLHYRIVPEMVYDTNATIVFGTDTFLTGYARVAAPYDFYSVRYVFAGAEKVKDETRRVWMEKFGIRILEGYGATETAPVLAVNTPMHCKAGTVGRLLPGIESRLEPVPGIDEGARLSVKGPNVMLGYMKADQPGVLQPPEDGWYDTGDIVTIDELGYVRIVGRAKRFAKIAGEMVSLGSVENAVASLWPGNQHAVIAIPDEKKGEQLVLVTDRADAARPPILEHFRAQGLAELLVPRNLRVVDKVPVLGTGKTDYVAVKALVEGKAP

SEQ ID NO: 115835 - DNA, 3471 bp, Rickettsia akari str. Hartford
  CDS (1)..(3471): transl_table=11
atgacatcaaaatctaacaaaatcggtattttaaatattaaatataatatggacacaaacaaattatatcttttcaaagatagacgatttttaccgaattttatagtgcagttatgcggttgtcttaatgataatatattaaaaaatgctatagtaatccttattacttacggtatttcaggagctttaagtaaatataataatatacttgttttaattgctaatgctacttttgtattaccttttataatattcgcaagcatcgcaggacaaattgccgataaatacgaacgtgcgagtcttattaagattattaagatttgtgaaatcggcataattgcctttgcaatttatggatttcatcataataatctgctaatcctgttctgttctatttccttaatgggtatacactctacttttttcggtccaataaaatatagcgtattacctgatcacctaaataaagacgaactacttggcgctaacggctttgttgaagccggaacttttatcggtatttttatcggtataataatcggcagttattataccgtcagcaataattttataatttattcattaattaccatcgcttttctcggcttcattacaagcctgttttctccaaaatctcaaaatgcaaatcgtgatgttaaaataaattgtaatattatagatgcaagcataaatatgattaaatatgccaaagcaaaaaaacagatatatttagctatacttggtatttcatggttttggtttatcggagctgctataatttctcaaatacctttacttgctaagataacttttaaagctgatgagaatgttgctaacttatttttagcagttttctcgattggtgttggtgtcggttcatttttatgtagcaaaatatttgaaaatgagattacagttaaatatctctttatttcagccctaggcattagtatttttggtattgatttattctttgcaagtagaattagctcagttaactacgaacctactcagctaaaaagtattttagtatttttatcgaaaagacataattggcgaatagtgatcgatttatttttcttagcatcaataggcggtttatatatcgttcccctttttgcgatattacagcattacgcaaatcctgcgcatcgtagccgaattattgccgttaacaacctcattaattccattttcatggtgggatcaacaatgattctatcgttattattttatctaaatttcactatcccttggattatattatttattagcctagctaatataatcgtcactatatacatttaccgcttaatacctgatgttaaaattattccatttaaactattgcgaagaatattccaaatctgttttgatcttatgtataaggttgaagttaagggatttgaaaattttcaaaaagcaggtaaaaaagtagtagtagtagccaatcatatttcatatcttgaccctccactaattgctacttatctaaaggaagaaatgatttttgcaattagtcccgatatacaaaaaatatggtggattaaaccgttcttacgtatggcaagaactttaccggttgatcccagtaacccaatggcaataaagactttagtcaaagaagtacaaaaggatcagaaagtagcaattttccctgaaggtagaataagcgttaccggctctttaatgaaaatatacgaaggacctggaatgattgccgataaagcctgtgctaccgttttaccggttagaatagacggaactcaatttactcatttatcaaaattaaaaaacatattaaaaagaaaaatatttcctaaaattactataacagttttaccgccggtaaaattcgctaatgtgagtgctgcaagtaatcaagaacgacgcagttatatctctaggactctttatgatatcatggctgatatgatgtttgagagttcagactacaaaaatactttattctcatctcttatagaagctgctaaaattcatggatttaagaaaaaaatagttgatgattttgaaaaaaatacggtcacttatcgagatttaatattaaaatcttttatcctaggtgatttaatcaaaaaaaataatatctttggcagaaatttaggcttaatgttgcctaataccactaatacattaattactttttacgccatgcaatctagcggttatgttcctgctataattaactggagcagcggcataagtactattattaactcctgtaaacttgcacaaattaaagtagtttacacttcaaaacaatttattaagcaagcaaatttacatgaattaataactaacttattagatttcggtattaaaatcatatatttagaagattttaaaaatcaaattagtacatctctaaaactaaaagcaaaaataggaagttatttttctcaaacttattacaattatttttgtcgtaatcgtgatgatgaaaaaccggcagtgataatttttacttcgggcactgaaggtgagcctaaagccgtattactatctcacagaaatttacaaactaatagatatcaaataactgctaaagtaccttttagccccgaagatatagtatttaactcattacctttatttcattgttttggtcttggaggtgcaattattacaactttaaacggtattaagctgtttctatatccttctccactaaattatcgcagcattcctgaagttatatacgatatcggagcaaccatattaatttctaccgatacttttttaaacggttatgctaattatgctcacccatatgatttttactcattacgctatatattttccggtagcgagaaattaaaaaaatctacaagacaattttggcttaacaaatacggtatacgtatttttgaagggtatggaattaccgaagccgcacctattatagcttgcaatacccctatgcataataaagcagacacggtaggaagattattaccgaaaattgattataagcttgagaaagtagagggactaaatgaaggatgtcgtttattcatcagaggtcctaacatcatgcttggttacctagacttagaaggtcaccgtacttatcacgaatggtacgacacaggtgatatagtcaaaatcgattctgaaggatatataacaattttaggacgtttaaaacgctttgctaaaatatcaggggaaatgatatctcttacaaaaattgaagaacttgctagtgaaattgatcctaattccttgtatgctgctatttctatgcccgataaaacgcacggagaaaaaattattttacttactaccggttccgatataaatagagaaaattttgcagatactgtatctaaagctcaaatttctttactacatttaccgcaagtaattattaccgattcagaaatacctttgcttgcaagcggtaaaatagactatcttgagattatgaagaatgtggataaattctaa

SEQ ID NO: 115836 - protein, 1156 aa, Rickettsia akari str. Hartford
MTSKSNKIGILNIKYNMDTNKLYLFKDRRFLPNFIVQLCGCLNDNILKNAIVILITYGISGALSKYNNILVLIANATFVLPFIIFASIAGQIADKYERASLIKIIKICEIGIIAFAIYGFHHNNLLILFCSISLMGIHSTFFGPIKYSVLPDHLNKDELLGANGFVEAGTFIGIFIGIIIGSYYTVSNNFIIYSLITIAFLGFITSLFSPKSQNANRDVKINCNIIDASINMIKYAKAKKQIYLAILGISWFWFIGAAIISQIPLLAKITFKADENVANLFLAVFSIGVGVGSFLCSKIFENEITVKYLFISALGISIFGIDLFFASRISSVNYEPTQLKSILVFLSKRHNWRIVIDLFFLASIGGLYIVPLFAILQHYANPAHRSRIIAVNNLINSIFMVGSTMILSLLFYLNFTIPWIILFISLANIIVTIYIYRLIPDVKIIPFKLLRRIFQICFDLMYKVEVKGFENFQKAGKKVVVVANHISYLDPPLIATYLKEEMIFAISPDIQKIWWIKPFLRMARTLPVDPSNPMAIKTLVKEVQKDQKVAIFPEGRISVTGSLMKIYEGPGMIADKACATVLPVRIDGTQFTHLSKLKNILKRKIFPKITITVLPPVKFANVSAASNQERRSYISRTLYDIMADMMFESSDYKNTLFSSLIEAAKIHGFKKKIVDDFEKNTVTYRDLILKSFILGDLIKKNNIFGRNLGLMLPNTTNTLITFYAMQSSGYVPAIINWSSGISTIINSCKLAQIKVVYTSKQFIKQANLHELITNLLDFGIKIIYLEDFKNQISTSLKLKAKIGSYFSQTYYNYFCRNRDDEKPAVIIFTSGTEGEPKAVLLSHRNLQTNRYQITAKVPFSPEDIVFNSLPLFHCFGLGGAIITTLNGIKLFLYPSPLNYRSIPEVIYDIGATILISTDTFLNGYANYAHPYDFYSLRYIFSGSEKLKKSTRQFWLNKYGIRIFEGYGITEAAPIIACNTPMHNKADTVGRLLPKIDYKLEKVEGLNEGCRLFIRGPNIMLGYLDLEGHRTYHEWYDTGDIVKIDSEGYITILGRLKRFAKISGEMISLTKIEELASEIDPNSLYAAISMPDKTHGEKIILLTTGSDINRENFADTVSKAQISLLHLPQVIITDSEIPLLASGKIDYLEIMKNVDKF

SEQ ID NO: 115837 - DNA, 3456 bp, Oceanospirillum sp. MED92
  CDS (1)..(3456): transl_table=11
atgaaagaccttttaagaattaatggatttattgcctttatctgtgttgcttttatcaacgcgtttgtcgatctagggcataaaataataattcagaacaccctgtttaagtcctttgatggcgacactcagattgttcttacagcgatagtgaacggcttgattcttctccctttcattatgctattcacaccttcaggtttcttagccgataaataccccaaagataaagtcatgcgtgtctccgcctggggggcagtagccatcacgctggcgattaccctctgctattacctgggttggtttgtggctgcttttgcgatgacatttatcttagctattcagagcgcattctactcgcccgctaaatatggctatatcaaagagctcgtaggcgctaacaatctgagtgaaggtaatggttgggtacaggccgttaccatgattgctattctggcgggcattgtggtcttttcattgttgtttgagactagactggccggtttagaagggttatcccctgaagtcgttttagagcaggttgcaccactgggctggattctggtggcaggtgctttgcttgaacttttcctggcttatcgattacctcagttgcaggaaaaatcagcggcagtattggatagaaaagcttacctgaaaggcaagatcttgaagcagaatcttgcacttttacgtggtaaacgacctatttggctctcgataattgggctttctatcttctggtcgatcagccaggtaatgctggcagtctttcccgcctttgctgaagagcatatggggcagggaaatacgtttgttattcaaggtgtgatggcgctagcagggatcggcatcatgattggttcatttctggcggggcgtttttctaaacactacatcaacgtaggattaattccggtgggggcggctggcgttgctatcggattggttttacttcctcagcttgaaacaatggctctgcagtccggcatctttctgatgattggtctgtttggggcgttaatgtgtgttcctttaaacgccctgattcaattccatgcgacagaagatgaaaccggcaaggttttagccggtagcaactttattcagaatttgatgatgctgggcttcctcggtttgacggtggctttcgctgcgatggggatcgatggtatttggttattagctcttctggctattgtcggtatagcgggcgcagtttttgccattgttacattaccccaagcgtttatccgtttgttagtgatggtgttattccgccggaagtataatcttcaggttctgggttttgagaacctgccggaagacggaaaaggaaccttgttactgggtaatcatattagttggctggattgggccatgattcagatgggatcccctcgacacatccattttgtgatggaaagaagtatctatgagcgttggtatctgcgttggttcctggatattttcaaagttatcccaatctctaaggggaatagtcgtcaggcgctggaaaaggtcagggacctcattaacgaaggtcaggttgtatgccttttccctgagggtgcgatcagtcatttaggccagttgagcgagttcaaaaagggcttcgaacgtgcctgtgtggatgcgaagggggtgattttgcctttctacctgcgcggtttatgggggagtcgtttttcccgatcaaccgataaaatgaaaactattcgtcgttcaggtagcaagcgtgatgtggtagtcgcgtttggtaagccaatgccaatatcaagcaatgcggcagaggtgaaaaagaaagttttcgagctttcaattcacacctgggatcaatacaccgcaaccatggaaaccattcccgaagcgtttatcagtagcatgaagcaggctcgctctgggtatgctatcgcagatgttgatggtggtcctttgagccataatcgtttattaaccgcctgtgcgttgttcaaaaagcatattgcacgttctcctggtaagaatattggccttttagttccgacatccagtgcgggggcgattgcaaatattgcttcgctgatggccggtaaaacagtggtaaatatgaacttcaccgcttcaattgaatccgttcattcggcattggagcaatcggatgttcagactattgtcacagcgcataagtttgtgaaaaagcttaaagcgcgaggaattgatgtaagtgagctgttcgcaggcagaactgttttgttcatggaagatatcaaggccagtattgggaaagctgaggcgttatcaacactattgatggtctccgtactgcctgagtttttattaaagaggttgttgctaagcgcttcggaccttgaagatacggcggctattcttttctcctcagggagcgaaggcgcgccaaaaggcgtgatgttgagtcatcgtaatgtcatggctaatttgaagcagacagctgatgtactgaatgtcagagatgatgattgcattatggcgaccttacctttgtttcatgcctttggcttaacagtgacttgctttatgccattgattgagggaatgcctgtcgtttgtcatcctgacccgacagatgcaccaaaaataggtaagggagtttcacgttacaaagccactctgatgtgtgcaacatcgaccttcatgcgtctgtacgcaaagaataaacgattgcatccgttaatgttcgagtccctgcgagcagtcgtggcgggtgcggaaaagcttgatccaaatgtaagggaagatttcgaacaaaaattccatgttcaggttgttgagggttatggttctacggaaacaacaccggtagcaagtactaacctaccggattcactggataccgattggtggactatccagatcggaaataagccgggtacagttggcatggcacttccgggttcaacattcaggattgtagaccccgattccctggaagagctacccgtaggtgaagatggtctgatactgattggtggtacacagattatgcagggatatctgaataaccctgagaaaacagctgatgttgttgtagagatggagggtatccgttggtataaaagtggtgataagggccatcttgatgaagatggcttcctaaccatcgttgatcgttacagcagattcgccaaactgggtggtgagatggtcagtcttacagcggttgaaagcaaagtgcgagaaagccttggcaattcagaaattccgcttgtcgcagtcaacctgccagatgcaaaaaaaggtgagaaaattgtacttctattagaggctgagctggaacctgatgaggtgcgtcagattcttcttgagtctgaaatgcagcctctgagtattccatctgaggtttatatggtcagtcaggtacctgttttgggtagtggtaaaactgacttctgcagtgcaagggcaatggcagaaggtttgtcggttgtcgcttga

SEQ ID NO: 115838 - protein, 1151 aa, Oceanospirillum sp. MED92
MKDLLRINGFIAFICVAFINAFVDLGHKIIIQNTLFKSFDGDTQIVLTAIVNGLILLPFIMLFTPSGFLADKYPKDKVMRVSAWGAVAITLAITLCYYLGWFVAAFAMTFILAIQSAFYSPAKYGYIKELVGANNLSEGNGWVQAVTMIAILAGIVVFSLLFETRLAGLEGLSPEVVLEQVAPLGWILVAGALLELFLAYRLPQLQEKSAAVLDRKAYLKGKILKQNLALLRGKRPIWLSIIGLSIFWSISQVMLAVFPAFAEEHMGQGNTFVIQGVMALAGIGIMIGSFLAGRFSKHYINVGLIPVGAAGVAIGLVLLPQLETMALQSGIFLMIGLFGALMCVPLNALIQFHATEDETGKVLAGSNFIQNLMMLGFLGLTVAFAAMGIDGIWLLALLAIVGIAGAVFAIVTLPQAFIRLLVMVLFRRKYNLQVLGFENLPEDGKGTLLLGNHISWLDWAMIQMGSPRHIHFVMERSIYERWYLRWFLDIFKVIPISKGNSRQALEKVRDLINEGQVVCLFPEGAISHLGQLSEFKKGFERACVDAKGVILPFYLRGLWGSRFSRSTDKMKTIRRSGSKRDVVVAFGKPMPISSNAAEVKKKVFELSIHTWDQYTATMETIPEAFISSMKQARSGYAIADVDGGPLSHNRLLTACALFKKHIARSPGKNIGLLVPTSSAGAIANIASLMAGKTVVNMNFTASIESVHSALEQSDVQTIVTAHKFVKKLKARGIDVSELFAGRTVLFMEDIKASIGKAEALSTLLMVSVLPEFLLKRLLLSASDLEDTAAILFSSGSEGAPKGVMLSHRNVMANLKQTADVLNVRDDDCIMATLPLFHAFGLTVTCFMPLIEGMPVVCHPDPTDAPKIGKGVSRYKATLMCATSTFMRLYAKNKRLHPLMFESLRAVVAGAEKLDPNVREDFEQKFHVQVVEGYGSTETTPVASTNLPDSLDTDWWTIQIGNKPGTVGMALPGSTFRIVDPDSLEELPVGEDGLILIGGTQIMQGYLNNPEKTADVVVEMEGIRWYKSGDKGHLDEDGFLTIVDRYSRFAKLGGEMVSLTAVESKVRESLGNSEIPLVAVNLPDAKKGEKIVLLLEAELEPDEVRQILLESEMQPLSIPSEVYMVSQVPVLGSGKTDFCSARAMAEGLSVVA

SEQ ID NO: 115839 - DNA, 2160 bp, Escherichia coli O157
  CDS (1)..(2160): transl_table=11
  misc_feature (1101)..(1101): r is g or a
  misc_feature (1656)..(1656): r is g or a
atgctttttagcttttttcgaaatttgtgccgtgttttgtatcgcgttcgcgttacgggtgacccccaggcactgaagggcgagcgcgttctaattacgcctaatcacgtctcttttattgatggcattttgcttggactgtttttacctgtgcgtccagtgtttgccgtttacacctcaataagccaacagtggtatatgcgttggctgaaatcatttatcgactttgttcctctcgacccgacgcaacctatggcgattaaacatctggtacgtctggtggaacagggccgaccagtggtgattttccctgaaggacgcatcaccaccacaggctcgctgatgaaaatctacgatggcgcgggttttgtcgcggcgaagtctggtgcaacggttattcctgtgcgtattgaaggggcggaacttacgcacttcagccgcctgaaaggtctggttaaacgtcgcttgttcccgcaaattactctgcatattttgccaccaacgcaggtggagatgccggatgcgccgcgtgcccgtgaccgtcgcaaaatcgctggcgaaatgctgcatcaaataatgatggaagcgcgaatggcggtgcgcccgcgtgaaacgctgtacgaatctttactgagtgcaatgtaccgcttcggagcagggaagaaatgtgtcgaagacgtcaattttaccccagactcctatcgcaaattgcttacgaaaacgctgtttgttggacgcatccttgaaaaatacagtgttgaaggcgaacgcatcggcttaatgctgcccaatgcaggcatcagtgcggcagtgatttttggggccatcgcccgtcgccgcattcccgcaatgatgaactacactgctggggtaaaagggctgaccagtgctattacggcggctgaaatcaaaaccatcttcacttcccgccagtttctcgataaaggcaaactctggcatctgccggagcaacttactcaggtgcgctgggtctatctggaagatttaaaagcagatgtcaccactgccgacaaagtatggatcttcgctcatttgctgatgccgcgtctggcacaggttaaacagcagccggaagaagargcgctgatcctttttacctccggttctgaaggccatccaaaaggcgtcgtccatagccataaaagcattctggcgaatgtcgagcagattaaaacgattgccgacttcaccaccaacgatcgctttatgtcggcgttaccgctgtttcactcctttgggctgacggtaggcctgtttacgccactgctcacaggtgcagaagtgtttctttatccaagcccgctgcattaccgtattgtgccggagttggtgtatgaccgcagttgcaccgtgttgttcggcacttcgactttcctcggtcactacgcgcgtttcgccaacccgtatgacttctatcgtctacgctatgtggtggcaggcgcagaaaaactacaagaaagtaccaaacagctttggcaggataaatttggcctgcgcatccttgaaggctacggtgtgaccgaatgcgcgcctgtcgtttctatcaacgtaccgatggcggcgaaacccggtacggtagggcgtattctaccaggaatggatgcgcgcctgttgtcggtccctggtatcgaagarggcggacgcctgcaactgaaagggccgaacataatgaacggctatctgcgggtggagaagccaggtgtactggaagtgcccaccgccgagaatgttcgcggcgaaatggagcgcggctggtatgacactggcgatattgtgcgttttgacgagcagggctttgtgcagattcagggccgcgcaaaacgctttgccaaaattgcaggcgaaatggtgtcgctggaaatggtggaacaactggcacttggtgtttcgccagataaagtccatgccactgcgattaagagcgatgccagcaaaggcgaggcactggtgcttttcaccacagataacgaactgacgcgcgataagttgcaacagtatgcccgtgagcacggcgtgccggagcttgctgtaccgcgtgatattcgctatttgaaacagatgccattacttggcagcggcaaacctgactttgtcacgttgaaaagctgggtagacgaagtggaacaacacgatgagtga

SEQ ID NO: 115840 - protein, 719 aa, Escherichia coli O157
MLFSFFRNLCRVLYRVRVTGDPQALKGERVLITPNHVSFIDGILLGLFLPVRPVFAVYTSISQQWYMRWLKSFIDFVPLDPTQPMAIKHLVRLVEQGRPVVIFPEGRITTTGSLMKIYDGAGFVAAKSGATVIPVRIEGAELTHFSRLKGLVKRRLFPQITLHILPPTQVEMPDAPRARDRRKIAGEMLHQIMMEARMAVRPRETLYESLLSAMYRFGAGKKCVEDVNFTPDSYRKLLTKTLFVGRILEKYSVEGERIGLMLPNAGISAAVIFGAIARRRIPAMMNYTAGVKGLTSAITAAEIKTIFTSRQFLDKGKLWHLPEQLTQVRWVYLEDLKADVTTADKVWIFAHLLMPRLAQVKQQPEEEALILFTSGSEGHPKGVVHSHKSILANVEQIKTIADFTTNDRFMSALPLFHSFGLTVGLFTPLLTGAEVFLYPSPLHYRIVPELVYDRSCTVLFGTSTFLGHYARFANPYDFYRLRYVVAGAEKLQESTKQLWQDKFGLRILEGYGVTECAPVVSINVPMAAKPGTVGRILPGMDARLLSVPGIEEGGRLQLKGPNIMNGYLRVEKPGVLEVPTAENVRGEMERGWYDTGDIVRFDEQGFVQIQGRAKRFAKIAGEMVSLEMVEQLALGVSPDKVHATAIKSDASKGEALVLFTTDNELTRDKLQQYAREHGVPELAVPRDIRYLKQMPLLGSGKPDFVTLKSWVDEVEQHDE

SEQ ID NO: 115841 - DNA, 2160 bp, Escherichia coli O6
  CDS (1)..(2160): transl_table=11
atgctttttagcttttttcgaaatttgtgccgtgttttgtatcgcgttcgcgttacgggtgacaccaaggcactgaagggcgagcgcgttctaattacgcctaatcacgtctcttttattgatggcatactgctggcattgtttttacccgtacgtccggtatttgccgtttacacctcaataagccaacagtggtatatgcgttggctgaaatcatttatcgactttgttcctctcgacccgacgcaacctatggcgattaaacatctggtacgtctggtggaacagggccgaccagtggtgattttccctgaaggacgcatcaccaccactggctcgctgatgaaaatctacgatggcgcgggatttgtcgcggcgaagtctggtgcaacggttattcctgtgcgtattgaaggggcggaacttacgcacttcagccgcctgaaaggtctggttaaacgtcgcttgttcccgcaaattactctgcatattttgccaccaacgcaggtggagatgccggatgcgccgcgtgcccgtgaccgtcgcaaaatcgctggcgaaatgctgcatcaaataatgatggaagcgcgtatggcggtgcgcccgcgtgaaacgctgtacgaatctttactgagtgcaatgtaccgcttcggagccgggaagaaatgtgtcgaagacgtcaactttaccccagactcctatcgcaaattgcttacgaaaacgctgtttgttggacgcatccttgaaaaatacagtgttgaaggcgaacgcatcggcttaatgctgcccaatgcaggcatcagtgctgcagtgatttttggggccatcgcccgtcgccgcattcccgcaatgatgaactacaccgccggggtaaaagggttgaccagtgctattacggcggctgaaatcaaaaccattttcacttcccgtcagtttctcgataaaggcaaactctggcatctgccggagcaacttactcaggtacgctgggtctatctggaagatttaaaagcagatgtcaccactgccgacaaagtgtggattttcgctcatttgctgatgccgcgtctggcacagttaaaacagcagccggaagaagaggcgctgatcctctttacctccggttctgaaggccatccgaaaggcgtcgtccatagccataaaagcattctggcgaacgtcgagcagattaaaacgattgccgacttcaccaccaacgatcgctttatgtcggcgttaccgctgtttcactcctttgggctgacggtaggcctgtttacgccactgctcacaggtgcagaagtgttcctttatccaagcccgctgcattaccgcattgtgccggagttggtgtatgaccgcagttgcaccgtgttgttcggtacctcgactttcctcggtcactacgcgcgtttcgccaacccgtatgacttctatcgtctacgctatgtggtggcaggcgcagaaaaactacaagaaagtaccaaacagctttggcaggataaatttggcctgcgcatccttgaaggctacggtgtgaccgagtgcgcgcctgtcgtttctatcaacgtaccgatggcggcgaaacccggtacggtagggcgtattctaccaggtatggacgcgcgcctgttgtcagttcctggtatcgaagagggcggacgcctgcaactgaaagggccgaacataatgaacggctatctgcgggtggagaagcctggtgtactggaagtgcccaccgccgagaatgttcgcggcgaaatggagcgcggctggtatgacactggcgatatcgtgcgttttgatgagcagggctttgtgcagattcagggccgcgcaaaacgctttgccaaaattgcaggcgaaatggtgtcgctggaaatggtggaacaactggcacttggtgtttcgccagataaagtccatgccactgcgattaagagcgatgccagcaaaggcgaggcactggtgcttttcaccacagataacgaactgacgcgcgataagttacaacagtatgcccgcgagcacggcgtgccggagcttgctgtaccgcgcgatattcgctatctgaaacagatgccattacttggcagcggcaaacctgactttgtcacgttgaaaagctgggtagacgaagcggaacaacacgatgagtga

SEQ ID NO: 115842 - protein, 719 aa, Escherichia coli O6
MLFSFFRNLCRVLYRVRVTGDTKALKGERVLITPNHVSFIDGILLALFLPVRPVFAVYTSISQQWYMRWLKSFIDFVPLDPTQPMAIKHLVRLVEQGRPVVIFPEGRITTTGSLMKIYDGAGFVAAKSGATVIPVRIEGAELTHFSRLKGLVKRRLFPQITLHILPPTQVEMPDAPRARDRRKIAGEMLHQIMMEARMAVRPRETLYESLLSAMYRFGAGKKCVEDVNFTPDSYRKLLTKTLFVGRILEKYSVEGERIGLMLPNAGISAAVIFGAIARRRIPAMMNYTAGVKGLTSAITAAEIKTIFTSRQFLDKGKLWHLPEQLTQVRWVYLEDLKADVTTADKVWIFAHLLMPRLAQLKQQPEEEALILFTSGSEGHPKGVVHSHKSILANVEQIKTIADFTTNDRFMSALPLFHSFGLTVGLFTPLLTGAEVFLYPSPLHYRIVPELVYDRSCTVLFGTSTFLGHYARFANPYDFYRLRYVVAGAEKLQESTKQLWQDKFGLRILEGYGVTECAPVVSINVPMAAKPGTVGRILPGMDARLLSVPGIEEGGRLQLKGPNIMNGYLRVEKPGVLEVPTAENVRGEMERGWYDTGDIVRFDEQGFVQIQGRAKRFAKIAGEMVSLEMVEQLALGVSPDKVHATAIKSDASKGEALVLFTTDNELTRDKLQQYAREHGVPELAVPRDIRYLKQMPLLGSGKPDFVTLKSWVDEAEQHDE

SEQ ID NO: 115843 - DNA, 2160 bp, Salmonella paratyphi
  CDS (1)..(2160): transl_table=11
atgctgtttggatttttccgtaacctgtttcgcgtgctttatcgtgtgcgcgtcactggcgatgtccgggcgctacaggggaaccgggtcttaattacccccaatcacgtttcatttatcgatggtatgctactggcgctgtttttgccggtacggcctgtctttgcggtatatacctccatcagccagcaatggtatatgcgctggttaacgccgctgatcgattttgtaccgctcgatcccactaaacccatgtccattaaacacctgatgcgtctggtggagcaggggcgtccagtggtgattttcccggaagggcggatttccgtgaccggctcgctgatgaaaatttatgacggcgcaggctttgtggcggcaaaatcgggcgcaaccgtcattccgctccgcattgacggcgcggagcttacccctttcagtcgcctgaaaggtctggttaaacggcgtttgttcccccgtattcagcttcatattttaccgccgacgcaaataccgatgccggaagcgccgcgcgcgcgcgacagacgtaagatagcgggtgagatgctgcaccagatcatgatggaagcgcgtatggcggtgcgcccgcgcgagacgttatacgaatcgttgctggcggcgcaatatcgttacggcgcgggtaaaaactgtattgaggacattaactttacgccggatacgtatcgtaagttactgaccaagacgctttttgttggccggattctggaaaagtacagcgttgagggcgagaaaatcggtttaatgctgccgaatgccgccatcagcgcggcggtgattttcggcgcggtttctcgtcgccgcattccggccatgatgaactacacagcgggggtaaaagggctgaccagcgcgattgccgcggcggaaattaaaacgatttttacctcccgccagttcctcgataaaggtaaattgtggcacctgccggaacagctaacgcaggttcgctgggtttacctggaagatttaaaagcggacgtcacactcgccgacaagctgtggatttttgcccacctcctggcgccgcgactggcgcaggtaaaacagcagccggaagacgcggcgattattctttttacctccggctcggaagggcacccgaaaggggtggtgcacagccataaaagcattctggcgaacgtcgagcagataaaaacgattgcggatttcaccgccaatgaccgttttatgtcggcgctgccgctctttcactcgttcggtttgacggtgggcctgtttacgccgttgttgaccggcgcggaagtgtttctttatccaagtccgctgcactatcgcattgtgccggaactggtctatgaccgtaactgtaccgtgctgtttggtacgtcaaccttcctcggcaactacgcgcgctttgccaatccgtatgatttttatcgcctgcgctatgtggtggccggtgcggaaaaacttcaggagagcaccaaacaactgtggcaggataaattcggtctgcgcattcttgagggctacggggtaacggaatgcgcgccagtagtctcgattaacgtgccgatggcggctaagcctggcactgttggccgcattctgcctggcatggacgcgcgtctgctggcggtgcccggtattgaaaacggcggtcggctacagctgaaagggccgaatatcatgaatggctatctgcgcgtggaaaaaccgggcgtgctggaggtgccgtcggcggaaaacgccagaggcgaaactgagcgcggctggtacgacacgggcgacattgtacgcttcgatgaaaatggttttgtgcagattcaggggcgcgcgaaacgctttgcgaaaattgctggcgaaatggtctcgctggagatggtcgagcaactggcgcttggcgtttcggcggacaaaatgcacgctaccgccattaaaagcgatgccagcaaaggtgaagcgctggtactgtttacgactgacagcgaactcacccgagaaaagttacagcactatgcccgtgaacacggtattccggaacttgccgtcccgcgtgatatccgttatctgaaacagcttcccttgcttggcagcgggaaacccgattttgtgacgctgaaaagttgggtggatgcgccggaacaacatcatgagtga

SEQ ID NO: 115844 - protein, 719 aa, Salmonella paratyphi
MLFGFFRNLFRVLYRVRVTGDVRALQGNRVLITPNHVSFIDGMLLALFLPVRPVFAVYTSISQQWYMRWLTPLIDFVPLDPTKPMSIKHLMRLVEQGRPVVIFPEGRISVTGSLMKIYDGAGFVAAKSGATVIPLRIDGAELTPFSRLKGLVKRRLFPRIQLHILPPTQIPMPEAPRARDRRKIAGEMLHQIMMEARMAVRPRETLYESLLAAQYRYGAGKNCIEDINFTPDTYRKLLTKTLFVGRILEKYSVEGEKIGLMLPNAAISAAVIFGAVSRRRIPAMMNYTAGVKGLTSAIAAAEIKTIFTSRQFLDKGKLWHLPEQLTQVRWVYLEDLKADVTLADKLWIFAHLLAPRLAQVKQQPEDAAIILFTSGSEGHPKGVVHSHKSILANVEQIKTIADFTANDRFMSALPLFHSFGLTVGLFTPLLTGAEVFLYPSPLHYRIVPELVYDRNCTVLFGTSTFLGNYARFANPYDFYRLRYVVAGAEKLQESTKQLWQDKFGLRILEGYGVTECAPVVSINVPMAAKPGTVGRILPGMDARLLAVPGIENGGRLQLKGPNIMNGYLRVEKPGVLEVPSAENARGETERGWYDTGDIVRFDENGFVQIQGRAKRFAKIAGEMVSLEMVEQLALGVSADKMHATAIKSDASKGEALVLFTTDSELTREKLQHYAREHGIPELAVPRDIRYLKQLPLLGSGKPDFVTLKSWVDAPEQHHE

SEQ ID NO: 115845 - DNA, 2160 bp, Salmonella typhimurium
  CDS (1)..(2160): transl_table=11
atgctgtttggatttttccgtaacctgtttcgcgtgctttatcgtgtgcgcgtcactggcgatgtccgggcgctacaggggaaccgggtcttaattacccccaatcacgtttcatttatcgatggtatgctactggcgctgtttttgccggtacggcctgtctttgcggtatatacctccatcagccagcaatggtatatgcgctggttaacgccgctgatcgattttgtgccgctcgaccccactaaacccatgtccattaaacacctggtgcgtctggtggaacaggggcgtccagtggtgattttcccggaagggcggatttccgtgaccggctcgctgatgaaaatttatgacggcgcaggctttgtggcggcaaaatcgggcgcaaccgtcattccgctccgcattgacggcgcggagctgacccctttcagtcgcctgaaaggtctggttaaacggcgcttattcccccgcattcagcttcatattttaccgccgacgcaaataccgatgccggaagcgccgcgcgcgcgcgacagacgtaagatagcgggtgagatgctgcaccagatcatgatggaagcgcgtatggcggtgcgcccgcgcgagacgttatacgaatcgttgctggcggcgcaatatcgttacggcgcgggtaaaaactgtattgaggacattaactttacgccggatacgtatcgtaagttactgaccaagacgctttttgttggccggattctggaaaagtacagcgttgagggcgagaaaatcggtttaatgctgccgaatgccgccatcagcgcggcggtgattttcggcgcggtttctcgtcgccgcattccggccatgatgaactacacggcgggggtaaaagggctgaccagcgcgattaccgcggcggaaattaaaacgatttttacctcccgccagttcctcgataaaggtaaattgtggcacctgccggaacagctaacgcaggttcgctgggtttacctggaagatttaaaagcggacgtcacacccgccgacaagctgtggatttttgcccacctcctggcgccgcgactggcgcaggtaaaacagcagccggaagacgcggcgatcattctttttacctccggctcggaagggcacccgaaaggggtggtgcacagccataaaagcattctggcgaacgtcgagcagataaaaacgattgcggatttcaccgccaatgaccgttttatgtcggcgctgccgctctttcactcgttcggtttgacggtgggcctgtttacgccgttgttgaccggcgcggaagtatttctttatccaagtccgctgcactatcgcattgtgccggaactggtctatgaccgtaactgtaccgtgctgtttggtacgtcaaccttcctcggcaactatgcgcgctttgccaatccgtatgatttttatcgcctgcgctatgtggtggccggtgcggaaaaacttcaggagagcaccaaacaactgtggcaggataaattcggtctgcgcattcttgagggctacggggtaacggaatgcgcgccagtagtctcgattaacgtgccgatggcggctaagcctggcactgttggccgcattctgcctggcatggacgcgcgtctgctggcggtgcccggtattgaaaacggcggtcggctacagctgaaagggccgaatatcatgaatggctatctgcgcgtggaaaaaccgggcgtgctggaggtgccgtcggcggaaaactccagaggcgaaactgagcgcggctggtacgacacgggcgatattgtacgcttcgatgaaaatggttttgtgcagattcaggggcgcgcgaaacgctttgcgaaaattgctggcgaaatggtctcgctggagatggtcgagcaactggcgcttggcgtttcggcggacaaaatgcacgctaccgccattaaaagcgatgccagcaaaggtgaagcgctggtactgtttacgactgacagcgaactcacccgagaaaagttacagcactatgctcgtgaacacggtattccggaacttgccgtcccgcgtgatatccgttatctgaagcagcttcccttgcttggcagcgggaaacccgattttgtgacgctgaaaagttgggtggatgcgccggaacaacatcatgagtga

SEQ ID NO: 115846 - protein, 719 aa, Salmonella typhimurium
MLFGFFRNLFRVLYRVRVTGDVRALQGNRVLITPNHVSFIDGMLLALFLPVRPVFAVYTSISQQWYMRWLTPLIDFVPLDPTKPMSIKHLVRLVEQGRPVVIFPEGRISVTGSLMKIYDGAGFVAAKSGATVIPLRIDGAELTPFSRLKGLVKRRLFPRIQLHILPPTQIPMPEAPRARDRRKIAGEMLHQIMMEARMAVRPRETLYESLLAAQYRYGAGKNCIEDINFTPDTYRKLLTKTLFVGRILEKYSVEGEKIGLMLPNAAISAAVIFGAVSRRRIPAMMNYTAGVKGLTSAITAAEIKTIFTSRQFLDKGKLWHLPEQLTQVRWVYLEDLKADVTPADKLWIFAHLLAPRLAQVKQQPEDAAIILFTSGSEGHPKGVVHSHKSILANVEQIKTIADFTANDRFMSALPLFHSFGLTVGLFTPLLTGAEVFLYPSPLHYRIVPELVYDRNCTVLFGTSTFLGNYARFANPYDFYRLRYVVAGAEKLQESTKQLWQDKFGLRILEGYGVTECAPVVSINVPMAAKPGTVGRILPGMDARLLAVPGIENGGRLQLKGPNIMNGYLRVEKPGVLEVPSAENSRGETERGWYDTGDIVRFDENGFVQIQGRAKRFAKIAGEMVSLEMVEQLALGVSADKMHATAIKSDASKGEALVLFTTDSELTREKLQHYAREHGIPELAVPRDIRYLKQLPLLGSGKPDFVTLKSWVDAPEQHHE

SEQ ID NO: 115847 - DNA, 2160 bp, Shigella flexneri
  CDS (1)..(2160): transl_table=11
atgctttttagcttttttcgaaatttgtgccgtgttttgtatcgcgttcgcgttacgggtgacacccaggcactgaagggcgagcgcgtactaattacgcctaatcacgtctcttttattgatggcattttgcttggactgtttttacctgtgcgtccagtgtttgccgtttacacctcaataagccaacagtggtatatgcgttggctgaaatcatttatcgactttgttcctctcgacccgacgcaacctatggctattaaacatctggtacgtctggtggaacagggccgaccagtggtgattttccctgaaggacgcatcaccactacaggctcgctgatgaaaatctacgatggcgcgggttttgtcgcggcgaagtctggtgcaacggttattcctgtgcgtattgaaggggcggaacttacgcacttcagccgcctgaaaggtctggttaaacgtcgcttgttcccgcaaattactctgcatattttgcctccaacgcaggtggcgatgccggatgcgccgcgtgcccgtgaccgtcgcaaaatcgctggcgaaatgctgcatcaaataatgatggaagcgcgtatggcggtgcgcccgcgtgaaactctgtacgaatctttactgagtgcaatgtaccgcttcggagccgggaagaaatgtgtcgaagacgtcaactttaccccagactcctatcgcaaattgcttacgaaaacgctgtttgttggacgcatccttgaaaaatacagtgttgaaggcgaacgcatcggcttaatgctgcccaatgcaggcatcagtgcggcagtgatttttggggccatcgcgcgtcgccgcattcccgcaatgatgaactacactgccggggtaaaagggctgaccagtgctattacggcggctgaaatcaaaaccatcttcacttcccgccagtttctcgataaaggcaaactctggcatctgccggagcaacttactcaggtgcgctgggtctatctggaagatttaaaagcagatgtcaccactgccgacaaagtatggatcttcgctcatttgctgatgccgcgcctggcgcaggtaaaacagcagccggaagaagaggcgctgatcctctttacctccggttctgaaggccatccaaaaggcgtcgtccatagccataaaagcattctggcgaacgtcgagcagattaaaacgattgccgacttcaccaccaacgatcgctttatgtcggcattaccgctgtttcactcctttgggctgacggtaggcctgtttacgccactgcttacaggtgcagaagtgttcctttatccaagcccgctgcattaccgcattgtgccggacttggtgtatgaccgcagttgcaccgtgttgttcggtacctcgactttcctcggtcactacgcgcgtttcgccaacccgtatgacttctatcgtctacgctatgtggtggcaggcgcagaaaaactacaagaaagtaccaaacagctttggcaggataaatttggcctgcgcatccttgaaggctacggtgtgaccgaatgcgcgcctgtcgtttctatcaacgtaccgatggcggcgaaacccggtacggtagggcgtattctaccaggaatggatgcacgcctgttgtcggtccctggtatcgaagagggcggacgcctgcaactgaaagggccgaacataatgaacggctatctgcgggtggagaagccaggtgtactggaagtgcccaccgccgagaatgttcgcggcgaaatggagcgcggctggtatgacactggcgatattgtgcgttttgacgagcagggctttgtgcagattcagggccgcgcaaaacgctttgccaaaattgcaggcgaaatggtgtcgctggaaatggtggaacaactggcacttggtgtttcgccagataaagtccatgccactgcgattaagagcgatgccagcaaaggcgaggcactggtgcttttcaccacagataacgaactgacgcgcgataagttgcaacagtatgcccgcgagcacggcgtgccggagcttgctgtaccgcgcgatattcgctatctgaaacagatgccattacttggcagcggcaaacctgactttgtcacgttgaaaagctgggtagacgaagcggaacaacacgatgagtga

SEQ ID NO: 115848 - protein, 719 aa, Shigella flexneri
MLFSFFRNLCRVLYRVRVTGDTQALKGERVLITPNHVSFIDGILLGLFLPVRPVFAVYTSISQQWYMRWLKSFIDFVPLDPTQPMAIKHLVRLVEQGRPVVIFPEGRITTTGSLMKIYDGAGFVAAKSGATVIPVRIEGAELTHFSRLKGLVKRRLFPQITLHILPPTQVAMPDAPRARDRRKIAGEMLHQIMMEARMAVRPRETLYESLLSAMYRFGAGKKCVEDVNFTPDSYRKLLTKTLFVGRILEKYSVEGERIGLMLPNAGISAAVIFGAIARRRIPAMMNYTAGVKGLTSAITAAEIKTIFTSRQFLDKGKLWHLPEQLTQVRWVYLEDLKADVTTADKVWIFAHLLMPRLAQVKQQPEEEALILFTSGSEGHPKGVVHSHKSILANVEQIKTIADFTTNDRFMSALPLFHSFGLTVGLFTPLLTGAEVFLYPSPLHYRIVPDLVYDRSCTVLFGTSTFLGHYARFANPYDFYRLRYVVAGAEKLQESTKQLWQDKFGLRILEGYGVTECAPVVSINVPMAAKPGTVGRILPGMDARLLSVPGIEEGGRLQLKGPNIMNGYLRVEKPGVLEVPTAENVRGEMERGWYDTGDIVRFDEQGFVQIQGRAKRFAKIAGEMVSLEMVEQLALGVSPDKVHATAIKSDASKGEALVLFTTDNELTRDKLQQYAREHGVPELAVPRDIRYLKQMPLLGSGKPDFVTLKSWVDEAEQHDE

SEQ ID NO: 115849 - DNA, 2157 bp, Yersinia pestis
  CDS (1)..(2157): transl_table=11
atggcttatcgcttattgcgtgctctttttcgtgggttattccgtgtcaccattgatggtgtcaccgaccaatttaagcatgaaaaattaattattacgcccaatcacgtctctttcctcgatggggctttattagcgctatttctaccgatcaagccagtatttgctgtctataccagtattactgacacctggtatatgcgttggctaaagccttatgtggattttgttgcgctggatccgaccaacccgatggccatcaaacatctggtcagaatggtcgaacagggcaggccagtagtcattttccctgaagggcgcatcactgtgaccggctccttgatgaaaatttatgatggggcggcatttgttgcggcaaaatcaggtgcggcggtggtccctatccgtttagatggccctgaatttactcattttgggcgattgcagggcgtgctaaaaacacgctggttcccaaaaatcagtattcatgtgttaccggccaccaccattcctatgccacaagcgccacgctcgcgcgaacggcgagttctggccggtgagcacctgcataccattatgatggcggcccgcatggccacggtgccacgggaaacgctgtttgaagcgttgctatcggcacaaacccgttatggtcgctttaaaccttgcattgaagatgtctcatttaaagaggacagctaccagacgctactgaagaaaacgctcggtgtgagccgtattttgcaacgctttaccgtgccgggtgagcatgtcgggatgttgctgcccaatgccaccattactgcggctgctatttttggcgcatcgttacgtggacgaattccggcactgctcaactacacctcgggtgctaaagggctacagagcgctatcattgcggcttcacttaaaaccatcgtcacctcgcgccagtttttggaaaaaggcaaactgacgcacctgccggaacaggtcaatgaggtgaactgggtctatctggaagatttaaaagacacggtgacactgacggataagctgtggatcttattccacttgtgtttcccgcgtagggcgatgttgccgcagcaggctgatggcagcgcgttaatcttgtttacctctggatcggaaggcaaccctaaaggcgtggtgcattctcatgccagtttgttggctaacgtcgaacaaatccgaaccattgctgacttcacgccacgtgatcgcttcatgtcatcattgccgctgtttcatgcttttggtctgacggtgggattattcacaccactgatgaccggtagccgagtattcctttaccctagtccgctgcattaccgcgtggtacctgaactggtatatgaccgtaactgtaccgtgctctttgggacctcaacattcttggggaattatgcgcgctttgctcatccatatgatttcgcccgcgtgcgttatgtggttgctggcgctgaaaagttggctgaaagcaccaaacagatttggcaggataaatttggtatccgtattctggaagggtatggcgtaaccgagtgcgcgcccgttgtggcgattaacgtaccgatggcggctaaagtgaacacggtagggcgcattttaccggggatggaagcccgattgattaacgtaccggggattgctcaaggtggccgcttacaattacgcggccctaatattatgcgtggttacttacgggtagagaatcccggtgtattggagcagccatcagcagaaaatgctcagggtgaacttgacgctaattggtatgacaccggtgatattgtgaccctcgacgaacaagggttctgcgcgatccgtggccgggtgaaacgttttgctaagttggctggggagatggtatcactggagagcgttgaacaattggcaataagcctttcaccggaagggcaacatgcagcagcggctaaaactgacagtgcgaaaggtgaagcattggtgctgtttaccactgacagtgagataacccgtgaacggttaatcaaagtggcacgggaaaatggtgtgcctgaactggcggtgccgcgcgatatccgggtcgtgaaagctctccccttattaggcagcggtaaacctgacttcgtcacgttgggcaaaatggcacaagatccggagatgagcgtatga

SEQ ID NO: 115850 - protein, 718 aa, Yersinia pestis
MAYRLLRALFRGLFRVTIDGVTDQFKHEKLIITPNHVSFLDGALLALFLPIKPVFAVYTSITDTWYMRWLKPYVDFVALDPTNPMAIKHLVRMVEQGRPVVIFPEGRITVTGSLMKIYDGAAFVAAKSGAAVVPIRLDGPEFTHFGRLQGVLKTRWFPKISIHVLPATTIPMPQAPRSRERRVLAGEHLHTIMMAARMATVPRETLFEALLSAQTRYGRFKPCIEDVSFKEDSYQTLLKKTLGVSRILQRFTVPGEHVGMLLPNATITAAAIFGASLRGRIPALLNYTSGAKGLQSAIIAASLKTIVTSRQFLEKGKLTHLPEQVNEVNWVYLEDLKDTVTLTDKLWILFHLCFPRRAMLPQQADGSALILFTSGSEGNPKGVVHSHASLLANVEQIRTIADFTPRDRFMSSLPLFHAFGLTVGLFTPLMTGSRVFLYPSPLHYRVVPELVYDRNCTVLFGTSTFLGNYARFAHPYDFARVRYVVAGAEKLAESTKQIWQDKFGIRILEGYGVTECAPVVAINVPMAAKVNTVGRILPGMEARLINVPGIAQGGRLQLRGPNIMRGYLRVENPGVLEQPSAENAQGELDANWYDTGDIVTLDEQGFCAIRGRVKRFAKLAGEMVSLESVEQLAISLSPEGQHAAAAKTDSAKGEALVLFTTDSEITRERLIKVARENGVPELAVPRDIRVVKALPLLGSGKPDFVTLGKMAQDPEMSV

SEQ ID NO: 115851 - DNA, 27 bp, Artificial sequence
  primer
atgctttttagcttttttcgaaatttg

SEQ ID NO: 115852 - DNA, 25 bp, Artificial sequence
  primer
ttactcatcgtgttgttccgcttcg

SEQ ID NO: 115853 - protein, 750 aa, Artificial sequence
  consensus sequence
  Variant (2)..(13): Xaa in position 2 to 13 is any amino acid
  Variant (14)..(16): Xaa in position 14 to 16 is any or no amino acid
  Variant (19)..(19): Xaa in position 19 is any amino acid
  Variant (21)..(22): Xaa in position 21 to 22 is any amino acid
  Variant (24)..(25): Xaa in position 24 to 25 is any amino acid
  Variant (27)..(36): Xaa in position 27 to 36 is any amino acid
  Variant (38)..(78): Xaa in position 38 to 78 is any amino acid
  Variant (79)..(83): Xaa in position 79 to 83 is any or no amino acid
  Variant (85)..(86): Xaa in position 85 to 86 is any amino acid
  Variant (88)..(88): Xaa in position 88 is any amino acid
  Variant (94)..(94): Xaa in position 94 is any amino acid
  Variant (96)..(98): Xaa in position 96 to 98 is any amino acid
  Variant (100)..(100): Xaa in position 100 is any amino acid
  Variant (102)..(106): Xaa in position 102 to 106 is any amino acid
  Variant (108)..(120): Xaa in position 108 to 120 is any amino acid
  Variant (121)..(123): Xaa in position 121 to 123 is any or no amino acid
  Variant (125)..(128): Xaa in position 125 to 128 is any amino acid
  Variant (130)..(135): Xaa in position 130 to 135 is any amino acid
  Variant (137)..(211): Xaa in position 137 to 211 is any amino acid
  Variant (212)..(217): Xaa in position 212 to 217 is any or no amino acid
  Variant (219)..(225): Xaa in position 219 to 225 is any amino acid
  Variant (227)..(246): Xaa in position 227 to 246 is any amino acid
  Variant (247)..(263): Xaa in position 247 to 263 is any or no amino acid
  Variant (265)..(266): Xaa in position 265 to 266 is any amino acid
  Variant (269)..(290): Xaa in position 269 to 290 is any amino acid
  Variant (292)..(294): Xaa in position 292 to 294 is any amino acid
  Variant (296)..(305): Xaa in position 296 to 305 is any amino acid
  Variant (307)..(312): Xaa in position 307 to 312 is any amino acid
  Variant (315)..(316): Xaa in position 315 to 316 is any amino acid
  Variant (318)..(332): Xaa in position 318 to 332 is any amino acid
  Variant (333)..(340): Xaa in position 333 to 340 is any or no amino acid
  Variant (343)..(351): Xaa in position 343 to 351 is any amino acid
  Variant (352)..(353): Xaa in position 352 to 353 is any or no amino acid
  Variant (355)..(371): Xaa in position 355 to 371 is any amino acid
  Variant (372)..(384): Xaa in position 372 to 384 is any or no amino acid
  Variant (386)..(388): Xaa in position 386 to 388 is any amino acid
  Variant (390)..(390): Xaa in position 390 is any amino acid
  Variant (396)..(396): Xaa in position 396 is any amino acid
  Variant (401)..(402): Xaa in position 401 to 402 is any amino acid
  Variant (405)..(409): Xaa in position 405 to 409 is any amino acid
  Variant (411)..(412): Xaa in position 411 to 412 is any amino acid
  Variant (414)..(423): Xaa in position 414 to 423 is any amino acid
  Variant (425)..(429): Xaa in position 425 to 429 is any amino acid
  Variant (432)..(432): Xaa in position 432 is any amino acid
  Variant (435)..(435): Xaa in position 435 is any amino acid
  Variant (438)..(438): Xaa in position 438 is any amino acid
  Variant (440)..(443): Xaa in position 440 to 443 is any amino acid
  Variant (444)..(444): Xaa in position 444 is any or no amino acid
  Variant (446)..(448): Xaa in position 446 to 448 is any amino acid
  Variant (450)..(455): Xaa in position 450 to 455 is any amino acid
  Variant (457)..(457): Xaa in position 457 is any amino acid
  Variant (460)..(473): Xaa in position 460 to 473 is any amino acid
  Variant (475)..(478): Xaa in position 475 to 478 is any amino acid
  Variant (480)..(480): Xaa in position 480 is any amino acid
  Variant (484)..(485): Xaa in position 484 to 485 is any amino acid
  Variant (487)..(487): Xaa in position 487 is any amino acid
  Variant (489)..(494): Xaa in position 489 to 494 is any amino acid
  Variant (495)..(496): Xaa in position 495 to 496 is any or no amino acid
  Variant (498)..(500): Xaa in position 498 to 500 is any amino acid
  Variant (502)..(505): Xaa in position 502 to 505 is any amino acid
  Variant (510)..(520): Xaa in position 510 to 520 is any amino acid
  Variant (523)..(525): Xaa in position 523 to 525 is any amino acid
  Variant (527)..(527): Xaa in position 527 is any amino acid
  Variant (532)..(532): Xaa in position 532 is any amino acid
  Variant (535)..(536): Xaa in position 535 to 536 is any amino acid
  Variant (539)..(541): Xaa in position 539 to 541 is any amino acid
  Variant (543)..(543): Xaa in position 543 is any amino acid
  Variant (545)..(549): Xaa in position 545 to 549 is any amino acid
  Variant (550)..(560): Xaa in position 550 to 560 is any or no amino acid
  Variant (562)..(562): Xaa in position 562 is any amino acid
  Variant (565)..(566): Xaa in position 565 to 566 is any amino acid
  Variant (570)..(583): Xaa in position 570 to 583 is any amino acid
  Variant (584)..(588): Xaa in position 584 to 588 is any or no amino acid
  Variant (590)..(594): Xaa in position 590 to 594 is any amino acid
  Variant (596)..(596): Xaa in position 596 is any amino acid
  Variant (598)..(598): Xaa in position 598 is any amino acid
  Variant (600)..(600): Xaa in position 600 is any amino acid
  Variant (604)..(613): Xaa in position 604 to 613 is any amino acid
  Variant (614)..(626): Xaa in position 614 to 626 is any or no amino acid
  Variant (629)..(629): Xaa in position 629 is any amino acid
  Variant (633)..(636): Xaa in position 633 to 636 is any amino acid
  Variant (638)..(639): Xaa in position 638 to 639 is any amino acid
  Variant (642)..(643): Xaa in position 642 to 643 is any amino acid
  Variant (645)..(646): Xaa in position 645 to 646 is any amino acid
  Variant (648)..(649): Xaa in position 648 to 649 is any amino acid
  Variant (655)..(655): Xaa in position 655 is any amino acid
  Variant (659)..(659): Xaa in position 659 is any amino acid
  Variant (662)..(664): Xaa in position 662 to 664 is any amino acid
  Variant (666)..(683): Xaa in position 666 to 683 is any amino acid
  Variant (684)..(693): Xaa in position 684 to 693 is any or no amino acid
  Variant (695)..(697): Xaa in position 695 to 697 is any amino acid
  Variant (700)..(702): Xaa in position 700 to 702 is any amino acid
  Variant (704)..(725): Xaa in position 704 to 725 is any amino acid
  Variant (726)..(726): Xaa in position 726 is any or no amino acid
  Variant (728)..(729): Xaa in position 728 to 729 is any amino acid
  Variant (731)..(738): Xaa in position 731 to 738 is any amino acid
  Variant (739)..(741): Xaa in position 739 to 741 is any or no amino acid
  Variant (743)..(743): Xaa in position 743 is any amino acid
  Variant (746)..(746): Xaa in position 746 is any amino acid
  Variant (749)..(749): Xaa in position 749 is any amino acid
GXXXXXXXXXXXXXXXNHXSXXDXXLXXXXXXXXXXFXXXXXXXXXXXXXXXXXXXXXXXXXXXXXXXXXXXXXXXXXXXXXXGXXVXIFPEGXIXXXGXLXXXXXGXXXXXXXXXXXXXXXXPXXXXGXXXXXXSXXXXXXXXXXXXXXXXXXXXXXXXXXXXXXXXXXXXXXXXXXXXXXXXXXXXXXXXXXXXXXXXXXXXXXXXXXXXXXXXXDXXXXXXXYXXXXXXXXXXXXXXXXXXXXXXXXXXXXXXXXXXXXXGXXLPXXXXXXXXXXXXXXXXXXXXXXNXXXGXXXXXXXXXXAXXXXXXTSXXFXXXXXXXXXXXXXXXXXXXXXXXEDXXXXXXXXXXXKXXXXXXXXXXXXXXXXXXXXXXXXXXXXXXAXXXFXSGSEGXPKGVXXSHXXXXXNXXQXXXXXXXXXXDXXXXXLPXFHXFGXTXXXXXPXXXGXXXXXXPXPLXXXXXXXXXXXXXXTXXXXTXTFLXXYXRXXXXXXXXFXXXRXXXXGAEKXXXXXXXXXXXKFXXXIXEGYGXTEXXPVXXXNXPXXXXXXXXXXXXXXXXGXVGXXLPGXXXXXXXXXXXXXXXXXXXGXXXXXGXNXMXGYLXXXXXXXXXXXXXXXXXXXXXXXWYXTGDXXXXDXXGFXXIXXRXXRFAKIXGEMXSLXXXEXXXXXXXXXXXXXXXXXXXXXXXXXXXXDXXXGEXXXLXXXXXXXXXXXXXXXXXXXXXXXLXXPXXXXXXXXXXXPXLGXGKXD

SEQ ID NO: 115854 - protein, 54 aa, Artificial sequence
  protein pattern
  Variant (2)..(3): Xaa in position 2 to 3 is any amino acid
  Variant (4)..(6): Xaa in position 4 to 6 is any or no amino acid
  Variant (8)..(9): Xaa in position 8 to 9 is any amino acid
  Variant (10)..(10): Xaa in position 10 is Ile, Leu or Val
  Variant (12)..(13): Xaa in position 12 to 13 is any amino acid
  Variant (14)..(14): Xaa in position 14 is Phe, Ile or Val
  Variant (15)..(15): Xaa in position 15 is Ala, Ser or Thr
  Variant (17)..(17): Xaa in position 17 is Ala or Ser
  Variant (19)..(19): Xaa in position 19 is any amino acid
  Variant (20)..(20): Xaa in position 20 is Leu or Val
  Variant (21)..(27): Xaa in position 21 to 27 is any amino acid
  Variant (28)..(28): Xaa in position 28 is Phe, Trp or Tyr
  Variant (29)..(31): Xaa in position 29 to 31 is any amino acid
  Variant (32)..(32): Xaa in position 32 is Phe or Tyr
  Variant (33)..(34): Xaa in position 33 to 34 is any amino acid
  Variant (35)..(35): Xaa in position 35 is Glu, Arg or Ser
  Variant (36)..(36): Xaa in position 36 is Ile or Pro
  Variant (37)..(37): Xaa in position 37 is any amino acid
  Variant (40)..(40): Xaa in position 40 is Phe or Tyr
  Variant (42)..(42): Xaa in position 42 is Ala, Ile, Leu or Val
  Variant (45)..(45): Xaa in position 45 is any amino acid
  Variant (46)..(46): Xaa in position 46 is Ala, Ser or Thr
  Variant (48)..(48): Xaa in position 48 is Ile or Val
  Variant (49)..(49): Xaa in position 49 is Ala, Ile, Leu or Val
  Variant (50)..(50): Xaa in position 50 is Ala or Ser
  Variant (51)..(51): Xaa in position 51 is any amino acid
  Variant (52)..(52): Xaa in position 52 is Asn or Ser
  Variant (53)..(53): Xaa in position 53 is any amino acid
  Variant (54)..(54): Xaa in position 54 is Ala or Pro
AXXXXXFXXXRXXXXGXEXXXXXXXXXXXXXXXXXXXEGXGXTEXXPXXXXXXX

SEQ ID NO: 115855 - protein, 60 aa, Artificial sequence
  protein pattern
  Variant (2)..(2): Xaa in position 2 is any amino acid
  Variant (3)..(4): Xaa in position 3 to 4 is any or no amino acid
  Variant (6)..(7): Xaa in position 6 to 7 is any or no amino acid
  Variant (10)..(10): Xaa in position 10 is any amino acid
  Variant (13)..(13): Xaa in position 13 is Ala or Gly
  Variant (15)..(16): Xaa in position 15 to 16 is any amino acid
  Variant (17)..(17): Xaa in position 17 is Asn, Pro, Ser or Thr
  Variant (18)..(19): Xaa in position 18 to 19 is any amino acid
  Variant (20)..(20): Xaa in position 20 is Ala, Asn or Ser
  Variant (21)..(21): Xaa in position 21 is Ile, Leu or Val
  Variant (22)..(22): Xaa in position 22 is any amino acid
  Variant (23)..(23): Xaa in position 23 is Ala, Ser or Thr
  Variant (25)..(26): Xaa in position 25 to 26 is any amino acid
  Variant (28)..(29): Xaa in position 28 to 29 is any amino acid
  Variant (30)..(30): Xaa in position 30 is Ala, Asp, Ser or Thr
  Variant (31)..(31): Xaa in position 31 is any amino acid
  Variant (32)..(32): Xaa in position 32 is Ala, Ile, Leu or Val
  Variant (33)..(37): Xaa in position 33 to 37 is any amino acid
  Variant (39)..(39): Xaa in position 39 is any amino acid
  Variant (40)..(40): Xaa in position 40 is Phe, Ile, Leu, Met or Val
  Variant (41)..(41): Xaa in position 41 is Phe, Leu or Met
  Variant (42)..(42): Xaa in position 42 is Ala, Asn or Ser
  Variant (43)..(43): Xaa in position 43 is any amino acid
  Variant (46)..(46): Xaa in position 46 is Ile, Leu, Pro or Val
  Variant (49)..(49): Xaa in position 49 is Ala, Cys or Ser
  Variant (52)..(52): Xaa in position 52 is Phe, Leu or Met
  Variant (53)..(53): Xaa in position 53 is Gly, Ser or Thr
  Variant (54)..(54): Xaa in position 54 is Ala, Gly or Val
  Variant (55)..(55): Xaa in position 55 is Ala, Gly or Thr
  Variant (56)..(56): Xaa in position 56 is any amino acid
  Variant (57)..(57): Xaa in position 57 is Phe, Ile, Leu, Met or Val
  Variant (58)..(58): Xaa in position 58 is any amino acid
  Variant (59)..(59): Xaa in position 59 is Pro or Thr
  Variant (60)..(60): Xaa in position 60 is Leu or Val
FXXXSXXEGXPKXVXXXXXXXXXNXXQXXXXXXXXXXDXXXXXLPXFHXFGXXXXXXXXX

SEQ ID NO: 115856 - protein, 39 aa, Artificial sequence
  protein pattern
  Variant (2)..(2): Xaa in position 2 is His or Tyr
  Variant (3)..(3): Xaa in position 3 is any amino acid
  Variant (4)..(4): Xaa in position 4 is Ser or Thr
  Variant (7)..(7): Xaa in position 7 is any amino acid
  Variant (8)..(8): Xaa in position 8 is Ala, Gly or Val
  Variant (9)..(9): Xaa in position 9 is any amino acid
  Variant (10)..(10): Xaa in position 10 is Phe, Ile, Leu or Val
  Variant (12)..(13): Xaa in position 12 to 13 is any amino acid
  Variant (16)..(17): Xaa in position 16 to 17 is any amino acid
  Variant (19)..(20): Xaa in position 19 to 20 is any or no amino acid
  Variant (22)..(22): Xaa in position 22 is any amino acid
  Variant (23)..(23): Xaa in position 23 is any or no amino acid
  Variant (26)..(26): Xaa in position 26 is Ala or Ser
  Variant (28)..(28): Xaa in position 28 is Ile, Leu or Val
  Variant (29)..(29): Xaa in position 29 is Ala or Gly
  Variant (33)..(33): Xaa in position 33 is Ile or Val
  Variant (34)..(34): Xaa in position 34 is Pro or Ser
  Variant (35)..(37): Xaa in position 35 to 37 is any amino acid
  Variant (38)..(38): Xaa in position 38 is Ile, Leu or Val
WXXXGDXXXXDXXGFXXIXXRXXRFXKXXGEMXXXXXXE

SEQ ID NO: 115857 - protein, 37 aa, Artificial sequence
  protein pattern
  Variant (2)..(2): Xaa in position 2 is Ala, Cys, Gly or Val
  Variant (3)..(3): Xaa in position 3 is Ile or Leu
  Variant (5)..(5): Xaa in position 5 is Ala or Pro
  Variant (8)..(8): Xaa in position 8 is any amino acid
  Variant (9)..(9): Xaa in position 9 is Ile or Leu
  Variant (10)..(10): Xaa in position 10 is Ser or Thr
  Variant (11)..(12): Xaa in position 11 to 12 is any amino acid
  Variant (14)..(14): Xaa in position 14 is any amino acid
  Variant (15)..(15): Xaa in position 15 is any or no amino acid
  Variant (17)..(20): Xaa in position 17 to 20 is any amino acid
  Variant (21)..(21): Xaa in position 21 is any or no amino acid
  Variant (23)..(23): Xaa in position 23 is any amino acid
  Variant (24)..(24): Xaa in position 24 is Ala, Glu, Gly or Ser
  Variant (25)..(25): Xaa in position 25 is any amino acid
  Variant (26)..(26): Xaa in position 26 is Ala, Ile or Val
  Variant (27)..(34): Xaa in position 27 to 34 is any amino acid
  Variant (35)..(35): Xaa in position 35 is Ala, Gly, Ile, Leu or Val
  Variant (36)..(36): Xaa in position 36 is any amino acid
  Variant (37)..(37): Xaa in position 37 is Phe, Ile, Leu or Val
VXXFXEGXXXXXGXXLXXXXXGXXXXXXXXXXXXXXX

SEQ ID NO: 115858 - protein, 26 aa, Artificial sequence
  protein pattern
  Variant (3)..(4): Xaa in position 3 to 4 is any amino acid
  Variant (5)..(5): Xaa in position 5 is Glu, Lys or Arg
  Variant (6)..(6): Xaa in position 6 is any amino acid
  Variant (7)..(7): Xaa in position 7 is Ile or Val
  Variant (8)..(8): Xaa in position 8 is Ala, Gly or Pro
  Variant (9)..(10): Xaa in position 9 to 10 is any amino acid
  Variant (11)..(11): Xaa in position 11 is Ala, Ile or Val
  Variant (12)..(16): Xaa in position 12 to 16 is any amino acid
  Variant (18)..(18): Xaa in position 18 is Phe, Ile, Leu or Val
  Variant (19)..(19): Xaa in position 19 is Ile, Leu, Met or Val
  Variant (20)..(20): Xaa in position 20 is Phe, Ile or Leu
  Variant (21)..(21): Xaa in position 21 is Ala, Gly or Ser
  Variant (23)..(23): Xaa in position 23 is Asp, Pro or Ser
  Variant (26)..(26): Xaa in position 26 is Leu or Met
PLXXXXXXXXXXXXXXTXXXXTXTFX

SEQ ID NO: 115859 - protein, 23 aa, Artificial sequence
  protein pattern
  Variant (2)..(3): Xaa in position 2 to 3 is any amino acid
  Variant (4)..(4): Xaa in position 4 is any or no amino acid
  Variant (6)..(7): Xaa in position 6 to 7 is any amino acid
  Variant (9)..(10): Xaa in position 9 to 10 is any amino acid
  Variant (11)..(11): Xaa in position 11 is any or no amino acid
  Variant (13)..(13): Xaa in position 13 is any amino acid
  Variant (14)..(14): Xaa in position 14 is Asn or Gln
  Variant (15)..(15): Xaa in position 15 is Ile, Leu or Val
  Variant (17)..(17): Xaa in position 17 is any amino acid
  Variant (21)..(22): Xaa in position 21 to 22 is any amino acid
  Variant (23)..(23): Xaa in position 23 is Asp, Glu or Pro
GXXXGXXLXXXGXXXMXGYLXXX

SEQ ID NO: 115860 - protein, 22 aa, Artificial sequence
  protein pattern
  Variant (3)..(3): Xaa in position 3 is any amino acid
  Variant (5)..(5): Xaa in position 5 is any amino acid
  Variant (6)..(6): Xaa in position 6 is Ile, Leu or Val
  Variant (8)..(9): Xaa in position 8 to 9 is any amino acid
  Variant (10)..(10): Xaa in position 10 is any or no amino acid
  Variant (12)..(20): Xaa in position 12 to 20 is any amino acid
  Variant (21)..(21): Xaa in position 21 is any or no amino acid
NHXSXXDXXXLXXXXXXXXXXF

SEQ ID NO: 115861 - protein, 19 aa, Artificial sequence
  protein pattern
  Variant (2)..(2): Xaa in position 2 is any amino acid
  Variant (5)..(5): Xaa in position 5 is Ser or Thr
  Variant (8)..(8): Xaa in position 8 is any amino acid
  Variant (10)..(12): Xaa in position 10 to 12 is any amino acid
  Variant (13)..(13): Xaa in position 13 is Ala, Leu or Val
  Variant (14)..(16): Xaa in position 14 to 16 is any amino acid
  Variant (17)..(17): Xaa in position 17 is Ala or Val
  Variant (18)..(18): Xaa in position 18 is any amino acid
  Variant (19)..(19): Xaa in position 19 is Ala, Asp, Glu, Gly, Asn or Ser
PXLGXGKXDXXXXXXXXXX

SEQ ID NO: 115862 - protein, 14 aa, Artificial sequence
  protein pattern
  Variant (2)..(2): Xaa in position 2 is Ser or Thr
  Variant (5)..(5): Xaa in position 5 is any amino acid
  Variant (6)..(6): Xaa in position 6 is Ile, Leu or Pro
  Variant (7)..(7): Xaa in position 7 is any amino acid
  Variant (9)..(12): Xaa in position 9 to 12 is any amino acid
  Variant (13)..(13): Xaa in position 13 is Lys or Arg
  Variant (14)..(14): Xaa in position 14 is Ile, Leu or Val
GXVGXXXPXXXXXX

SEQ ID NO: 115863 - protein, 19 aa, Artificial sequence
  protein pattern
  Variant (2)..(5): Xaa in position 2 to 5 is any amino acid
  Variant (6)..(6): Xaa in position 6 is any or no amino acid
  Variant (8)..(9): Xaa in position 8 to 9 is any amino acid
  Variant (10)..(10): Xaa in position 10 is His, Lys or Arg
  Variant (11)..(11): Xaa in position 11 is Glu or Gly
  Variant (13)..(13): Xaa in position 13 is any amino acid
  Variant (14)..(14): Xaa in position 14 is Ile, Leu or Val
  Variant (15)..(15): Xaa in position 15 is Ile or Val
  Variant (16)..(16): Xaa in position 16 is Leu or Val
  Variant (17)..(17): Xaa in position 17 is Phe, Ile, Leu or Val
  Variant (18)..(18): Xaa in position 18 is any amino acid
  Variant (19)..(19): Xaa in position 19 is Ala, Asp, Glu, Ser or Thr
AXXXXXDXXXXEXXXXXXX

SEQ ID NO: 115864 - DNA, 2259 bp, Escherichia coli
  CDS (1)..(2259): transl_table=11
atgcgcgtcgatgccattgctaaggtcaccgggcgggcacgatatactgacgattatgttatggcgggcatgtgttatgcgaaatatgtacgtagccctatcgcacatggttatgccgtaagtattaatgatgaacaagccagaagtttgccgggcgtactggcgatttttacctgggaagatgtgcctgatattccattcgctacagctgggcatgcctggacacttgacgaaaacaagcgcgataccgccgatcgcgcactgctaactcgccatgttcgtcatcatggtgacgccgttgccatcgtcgtggcccgcgatgaactcacggcagaaaaagcggcgcaattggtcagcattgagtggcaagaattacccgttatcaccacgccagaagcggcgctggcagaagacgctgcaccaatccataacggtggcaatttactgaaacaaagcacgatgtcgacgggtaatgtccaacaaacaatcgatgccgccgactaccaggtacaggggcactatcagacccccgttattcaacattgtcacatggaaagcgtaacatcgctggcgtggatggaggatgactcgcgaattaccatcgtttccagcacccagatcccgcacattgttcgccgcgtggttggtcaggcgctggatattccctggtcatgcgtacgagtcatcaaaccatttgtcggtggcggttttggtaataaacaggatgtactggaagagccaatggcggcattcctgaccagcaagcttggcggcattccggtgaaagtttcccttagccgtgaagagtgtttcctcgcaacccgtacccgccacgcttttaccattgacgggcaaatgggcgtgaaccgcgacggaacattgaaaggttatagtctggatgttctgtctaacaccggcgcttatgcatctcacgggcactccatcgcttctgcgggggggaataaagtcgcttacctttatcctcgttgtgcctacgcttacagttcaaagacctgctataccaacctcccctcggctggtgcgatgcgtggttatggcgcgccacaagtcgtatttgccgttgagtctatgcttgatgacgccgcgacagcgttaggtattgatcctgttgaaattcgtttacgcaacgccgcccgcgaaggagatgctaatccgctcacgggcaaacgtatttacagcgcagggttgccggagtgtcttgaaaaaggccggaaaatctttgaatgggaaaaacgccgtgcagaatgccagaaccagcaaggcaatttgcgccgcggcgttggcgtcgcctgttttagctacacctctaacacctggcctgtcggcgtagaaatagcaggcgcgcgccttctgatgaatcaggatggaaccatcaacgtgcaaagcggcgcgacggaaatcggtcagggtgccgacaccgtcttctcgcaaatggtggcagaaaccgtgggggttccggtcagcgacgttcgcgttatttcaactcaagataccgacgttacgccgttcgatcccggcgcatttgcctcacgccagagctatgttgccgcgcctgcgctgcgcagtgcggcactattattaaaagagaaaatcatcgctcacgccgcagtcatgctacatcagtcagcgatgaatctgaccctgataaaaggccatatcgtgctggttgaacgaccggaagagccgttaatgtcgttaaaagatttggcgatggacgctttctaccaccctgaacgcggcgggcagctctctgctgaaagctccatcaaaaccaccactaacccaccggcgtttggctgtacctttgttgatctgacggtcgatattgcgctgtgcaaagtcaccatcaaccgcatcctcaacgttcatgattcagggcatattcttaatccactgctggcagaaggtcaggtacacggcggaatgggaatgggcattggctgggcgctatttgaagagatgatcatcgatgctaaaagcggcgtggtccgtaaccccaatctgctggattacaaaatgccgaccatgccggatctgccacaactggaaagcgcgttcgtcgaaatcaatgagccgcaatccgcatacggacataagtcactgggtgagccaccaataattcctgttgccgctgctattcgtaacgcggtgaagatggctaccggtgttgcaatcaatacactgccgctgacgccaaaacggttatatgaagagttccatctggcaggattgatttaa

SEQ ID NO: 115865 - protein, 752 aa, Escherichia coli
MRVDAIAKVTGRARYTDDYVMAGMCYAKYVRSPIAHGYAVSINDEQARSLPGVLAIFTWEDVPDIPFATAGHAWTLDENKRDTADRALLTRHVRHHGDAVAIVVARDELTAEKAAQLVSIEWQELPVITTPEAALAEDAAPIHNGGNLLKQSTMSTGNVQQTIDAADYQVQGHYQTPVIQHCHMESVTSLAWMEDDSRITIVSSTQIPHIVRRVVGQALDIPWSCVRVIKPFVGGGFGNKQDVLEEPMAAFLTSKLGGIPVKVSLSREECFLATRTRHAFTIDGQMGVNRDGTLKGYSLDVLSNTGAYASHGHSIASAGGNKVAYLYPRCAYAYSSKTCYTNLPSAGAMRGYGAPQVVFAVESMLDDAATALGIDPVEIRLRNAAREGDANPLTGKRIYSAGLPECLEKGRKIFEWEKRRAECQNQQGNLRRGVGVACFSYTSNTWPVGVEIAGARLLMNQDGTINVQSGATEIGQGADTVFSQMVAETVGVPVSDVRVISTQDTDVTPFDPGAFASRQSYVAAPALRSAALLLKEKIIAHAAVMLHQSAMNLTLIKGHIVLVERPEEPLMSLKDLAMDAFYHPERGGQLSAESSIKTTTNPPAFGCTFVDLTVDIALCKVTINRILNVHDSGHILNPLLAEGQVHGGMGMGIGWALFEEMIIDAKSGVVRNPNLLDYKMPTMPDLPQLESAFVEINEPQSAYGHKSLGEPPIIPVAAAIRNAVKMATGVAINTLPLTPKRLYEEFHLAGLI

SEQ ID NO: 115866 - DNA, 2307 bp, Clostridium difficile 630
  CDS (1)..(2307): transl_table=11
atgattaataaggggataagaaagatagatagtacagcaattgtcacaggaaaacctctatatactgaagacctcattatgcataaagatgttttgacattaaaactacttagaagtccacatgctcatgctaagataaagaatatagatacatcaaaagccgaaaaaattccaggggttgtgggtatttatacgtataaagatgtaccacaggtcagatattgtgttccaggtcaaacagaaccagaagcatcaccttatgatagagttttacttgaagatacagttagatttattggagatgaagtagctttagtggctgctgaagatgagaaaacagcacttaaagccttaaaaatgataaaggtagattatgaggttttaaagcctgtgtttgatgcaagagaagcagaaggaaatgaagttgttatacatccagaaaaagacatagtagagccatacccttttggattggatgcaaaaaataatatagtatcaaaagaattttttgaatttggagatgttgaagctaagcttaaagaaagtgattttgtggttgaatcttcatacaaaacccaaagtcaatcgcattgcatgatggaaactcataggtcatattcatataaagatataaatgatagaattgttgtagtttcatcattacaatcaccacacaatgtaaagagaatacttagaaaagtattgggtataccgtcttcaaaaataagagtaattaaacctagaataggtggtggatttggaggaaagaatatagcagcaacagatatatttactgcatttgttactatgaaaactggtagaccagcaaaatttgtatttacaagaagtgaaacttttgtaggttctaatagtagacatgaaatgttttttgatgttaaagttggtgcagataaagaaggaaatttaaaagcaatagagctaaagtcattaaacaatacaggtgcttatggtgggaatggtgtctctgtttcttccgaatctggacacaataccttaccaatatataatgatattgatgctgttagatttaatgctagaacagtatatactaataggttaccagcaggagcacttagagggtatggtgctacacagggaatatttgcaatagatagtgctattgatgaattggcacataagattggaatggacccacttgaatttagaattaaaaatataatagataggtataccaatggaaaagcagctgaagacgaaatattaagttgtgagctgagacaatgtatagaaaagggaaagaaattaattaattgggatgataaatatccatgtaaagatataggaaacaacaaagtaagagcagtaggtatggcagtagcaaatcatggttctggtataccacgtgtagatatggcaacagtcactataagaatggatgaagatggcacatataaactattatctggtcttgctgacttaggtcaaggggctgatacaattcaagctcaaattgctgcggaagctttaaatactactgtagatagaatttctgtttatacaggtgattcagatttatgtccctatgatacaggagcatttgcttcttgtacaacaacggttacaggaaatgcaacaataaagacagcaaataaattaaaagatatattactttcagttgcagagtcaaagctaggatttaaaaaagaagatttagagttgggaaaagacagggtttttgttaaaaatgataatagcaagtttgttctattagaggaattgggtagagaatctgttggaggaataggatttgctagtgatgatgtaccagtagttttggaagcaacagaatcttttggcatgttgaaaaaaataaaaccatttatagcaggatttgcagagatagaattagataaaaatacaggcgaatataaagtcataaattttgcatgtgtacctgattgtggaacagttataaatccaactttagctagaatacaagtagaaggtggtgtgatgatgggtatagggtttgcaatgtatgaagaccctgtatttgataaagatgggagattattaacagatagtttcctacagtataaagttcctacaaaaaaagaagttggaaatatattggtagattttgctgagaatttcgacccaggaggtccttatggtgctaaatcattaggagaaatagttatacatacaccagcaccagctatagcaaatgcaatatttaatgctacaggagttcgtttaagagagcttcctatgacttttgaaaaagtttatatgggtatgaaaaataataataaacaattataa

SEQ ID NO: 115867 - protein, 768 aa, Clostridium difficile 630
MINKGIRKIDSTAIVTGKPLYTEDLIMHKDVLTLKLLRSPHAHAKIKNIDTSKAEKIPGVVGIYTYKDVPQVRYCVPGQTEPEASPYDRVLLEDTVRFIGDEVALVAAEDEKTALKALKMIKVDYEVLKPVFDAREAEGNEVVIHPEKDIVEPYPFGLDAKNNIVSKEFFEFGDVEAKLKESDFVVESSYKTQSQSHCMMETHRSYSYKDINDRIVVVSSLQSPHNVKRILRKVLGIPSSKIRVIKPRIGGGFGGKNIAATDIFTAFVTMKTGRPAKFVFTRSETFVGSNSRHEMFFDVKVGADKEGNLKAIELKSLNNTGAYGGNGVSVSSESGHNTLPIYNDIDAVRFNARTVYTNRLPAGALRGYGATQGIFAIDSAIDELAHKIGMDPLEFRIKNIIDRYTNGKAAEDEILSCELRQCIEKGKKLINWDDKYPCKDIGNNKVRAVGMAVANHGSGIPRVDMATVTIRMDEDGTYKLLSGLADLGQGADTIQAQIAAEALNTTVDRISVYTGDSDLCPYDTGAFASCTTTVTGNATIKTANKLKDILLSVAESKLGFKKEDLELGKDRVFVKNDNSKFVLLEELGRESVGGIGFASDDVPVVLEATESFGMLKKIKPFIAGFAEIELDKNTGEYKVINFACVPDCGTVINPTLARIQVEGGVMMGIGFAMYEDPVFDKDGRLLTDSFLQYKVPTKKEVGNILVDFAENFDPGGPYGAKSLGEIVIHTPAPAIANAIFNATGVRLRELPMTFEKVYMGMKNNNKQL

SEQ ID NO: 115868 - DNA, 2292 bp, Clostridium difficile 630
  CDS (1)..(2292): transl_table=11
atggtaaataaagaggtaagaaaaatagatagtgaagccattgttactggaaaaccaatatatacagaagatttaatttttcataaagatgttttaacaattaagcttcttagaagtccacatgcttttgcgaagataaaaaacatagatataaaaaatgcattaaaggtaaaaggtgtagtaaacatattcacttacaaagatgttccaaattatagatattcaatggttggagagtcatatccagaagcatcacctcatgaccaattaatacttgaagacgtagttagatatgtaggagatgaagttgctataatagccgctgaagatgaaagggctgctattaaagctatgaaacttataaaggttgaatatgaagtaatgactcctatattggatgcaagagaatcggaaggaaataaaattttaatccatgaagaagatgatttgttttgtccatttgattttggattggatgctacaaaaaatattgtatcgagagaaaaaatgggtaaaggggatgtagaaaaagagtttaaagaaagtgatgtaatagtagaacattcttatatgactcaatcacaagcccattgtatgatggaaactcatagagcttatacgtatatagatacgaatggcagattagtagtaacttctgcaaaccaatcagcttatcatatgagaagacaggtttctaaagcactgggaatacctctttcaaaagtgagagtaataaaaccaagaataggtggaggttttggtggaaaaaacatagctgtaacagagatatatgcatcatttgtaacttggatgacaaaaagaccagcaaaactaatttatactagagaagaaacttttgcaatgactaatactagacatcagatgttttttgatataaaaattgggtcagataaagaaggaaacataaaagctatagatatgaaagcattgaataatacaggcgcttatggtgataatggaccttcagtttgctctgaatcaggtcataatgtacttccaacatataataatgtacctgcaataaaatttgatgggagaactgtatatactaatttagttccaggaggagcattaagaggatatggagcaacacaaggtacatttgcacttgattgtgcaattgatgaattagcgcataaacttaatatggacccaacagaaataaagttaaagaatattataaaaaaacaaactgaaggcggaataatgaattttccaataagaagttgtgcacttgatgaatgtataattagaggtaaaaaacttattggatgggatgaaaagtaccctgttagggatattggcaacaataaggtgagggctgttggaatgtctgtgggaactcatggttctggtatagccaacatagacatggcaatagtaaatatgaggatggatgaagatggaacttataagttgttttctgggtcttcagacttaggaactggttctgacacaatacttgcacaaatagctgcaaaagcattgaatacatctattgatagaatttccgtttatacaggagatacagatatgtgtccatatgatactggtgcatacgcttcttgtactacttatgtaactggaaatgctacaataaaatctgctgaaagtttaaaacaaaagatattaaaagtagcacagaagaaactcgatttaccaatagatgatttaatactatatgaagacagagtttgttatagtgaagatgtagagcagtttgttttgttaagtgaattaggaaaagaatctgttggtggtggaaatcaagaagttttatattcatctgaatcttatggtatacaagagagtgctaaaccattcttagcaggatttgctgaaatagagttagataaaacaacaggggagtttaaagtaataaattatgcttgttctacagattgtggtacagttatgaatcctgcacttgctagaatacaagttgaaggtggtgtaactcaaggtatagggcttgcaatgtatgaagaccctagacatggttctgatggaaagcttcaaacttctaatctattacaatacaaagttccaacaaaaaaagatataggaaacataattgttgattttgtagataattatgagccaacaggtccatatggagctaaatctttaggagaaatagttattcatacacctgcaccagcaatagcaaatgcaatatacaatgccacaggagttcgtataagagaacttcctataacttctgagaaagtttatatggccatgaaaaaattaaatcagggaggtaaataa

SEQ ID NO: 115869 - protein, 763 aa, Clostridium difficile 630
MVNKEVRKIDSEAIVTGKPIYTEDLIFHKDVLTIKLLRSPHAFAKIKNIDIKNALKVKGVVNIFTYKDVPNYRYSMVGESYPEASPHDQLILEDVVRYVGDEVAIIAAEDERAAIKAMKLIKVEYEVMTPILDARESEGNKILIHEEDDLFCPFDFGLDATKNIVSREKMGKGDVEKEFKESDVIVEHSYMTQSQAHCMMETHRAYTYIDTNGRLVVTSANQSAYHMRRQVSKALGIPLSKVRVIKPRIGGGFGGKNIAVTEIYASFVTWMTKRPAKLIYTREETFAMTNTRHQMFFDIKIGSDKEGNIKAIDMKALNNTGAYGDNGPSVCSESGHNVLPTYNNVPAIKFDGRTVYTNLVPGGALRGYGATQGTFALDCAIDELAHKLNMDPTEIKLKNIIKKQTEGGIMNFPIRSCALDECIIRGKKLIGWDEKYPVRDIGNNKVRAVGMSVGTHGSGIANIDMAIVNMRMDEDGTYKLFSGSSDLGTGSDTILAQIAAKALNTSIDRISVYTGDTDMCPYDTGAYASCTTYVTGNATIKSAESLKQKILKVAQKKLDLPIDDLILYEDRVCYSEDVEQFVLLSELGKESVGGGNQEVLYSSESYGIQESAKPFLAGFAEIELDKTTGEFKVINYACSTDCGTVMNPALARIQVEGGVTQGIGLAMYEDPRHGSDGKLQTSNLLQYKVPTKKDIGNIIVDFVDNYEPTGPYGAKSLGEIVIHTPAPAIANAIYNATGVRIRELPITSEKVYMAMKKLNQGGK

SEQ ID NO: 115870 - DNA, 2217 bp, Clostridium difficile 630
  CDS (1)..(2217): transl_table=11
atggaaaaggtaataggaaaatcataccctctaaaagatgcagctttaaaagttactggtcaaatgaaatacgtggctgatatgaaaccacaaaatgtactttacgctaagatgcttttaagtcctgtagcacatgcaaaaataaaaagtatagatacaagtgaagctgagaaagtagtaggtgttagagctatagctacttatctcaatacatcacaaagaaaatacaatggttcattaagattttatgagcacaaaatacctgaaaatgaagttatattttcagatacagttagatttgttggtgaccgtgttgcagcagtagctgcagagactccagaaatagcagagaaagctgtaaaacttataaaagttgaatatgaagaattgccagctgtatttactatacaagatgcaataaaagaagatgctatctgcatacatggagattcaaatatagtttctcaaaacaacataaatgggggagatgtagaaaaaggcttcaaggaatgtgactatatatttgaagatgaatactctactccagcaatacatcatagtgcaatagagactcatagtgtaattgcacactatgattataatgataaattaactgtacatacaccttgccaaaatacatttggatttagaataatactatctcaaatttttgggatgtcattaaataaagtaagagttataagacctgctattggaggctcatttggtggaaaattagaacttacaattgaaccagtagcagccgcattatcaaaaatgacaagaagaccagttaaaatggttcttacaagaaaggaatctatgatatcaacaagaactcgtcatgggtcttttgtaaaattaaaaactggtgtaaataaagatggtgaagtaatagcacaagatataaaaatatatacaaatacaggagcatatgcatcaagtgctttaaatgttataggagcacttagtcataaagtatttaaagtttataaaataccaaatataaagtttactggtatgcctgtatatacaaatacaccaatagcaggagctatgagaggctatgggtcacctcaaatatttatggctcaacaggctcaatttgcgaaaatagcaaaggaaataggtatggatttagtcgattttcaaaataaaaatgcagtagagccagatgatgtcgatataatcttccacggttctcttggaaatcctagagtattggattgtatagagcaaggtaagaagatgtttaagtgggatgaaaagaaaaaacttccaaaagaagaaggaaaatatttaagaggtataggtatggcaataggtgcacatggtaatggagtttttggtgcacatagagatgttgttacattgactcttaaattaaatgaagatggtacgttgacactactaacaggagctcatgatatgggcaatggtgttgtaactatgcaaacaatgatggtagctgaagttttaggaataacacctgataaagttgatacatttgaaactgatacggatgcatgtacattcaaccttggtgactatgcaagtagaggggtatttgtagaaggtggaggagctaaaaagacagcagagaaattgaaaaatcttatattagaagaagcagaaaaattacttgaaacatcaaaagaagatttatatctagacaatggatatgtaattagtaaacttgatgaaaatgtaaaagcatcactttctgatgtcgcagtatatagtcaaagtaaatcattaagagagttaactgttgttgaagattattcttcaccagctggacgtacttcttatggtgtacattttgctgaagttttagtagataaagaaactaaggatataaaagtagttgattttgtagctgtacatgatgttggtagagttataaatcctctaaatttagaaggacaattagaaggtgggattcatatgggtctaggatacgcattgagtgaagaattggcatttgatgaacaaggtagacctaaagctactgattttaaaacatataaattatttagaactgtagatatgccaaaatgtcaagttgcatttgtagatggttatgaaaaagctgggccttttggtggtaagagtattggagaatgtgccgttgtaccagttgcgccagctgttgcaaatgcagtatataatgcaactgatgtagagatacattcattaccaataaaattaaaatag

SEQ ID NO: 115871 - protein, 738 aa, Clostridium difficile 630
MEKVIGKSYPLKDAALKVTGQMKYVADMKPQNVLYAKMLLSPVAHAKIKSIDTSEAEKVVGVRAIATYLNTSQRKYNGSLRFYEHKIPENEVIFSDTVRFVGDRVAAVAAETPEIAEKAVKLIKVEYEELPAVFTIQDAIKEDAICIHGDSNIVSQNNINGGDVEKGFKECDYIFEDEYSTPAIHHSAIETHSVIAHYDYNDKLTVHTPCQNTFGFRIILSQIFGMSLNKVRVIRPAIGGSFGGKLELTIEPVAAALSKMTRRPVKMVLTRKESMISTRTRHGSFVKLKTGVNKDGEVIAQDIKIYTNTGAYASSALNVIGALSHKVFKVYKIPNIKFTGMPVYTNTPIAGAMRGYGSPQIFMAQQAQFAKIAKEIGMDLVDFQNKNAVEPDDVDIIFHGSLGNPRVLDCIEQGKKMFKWDEKKKLPKEEGKYLRGIGMAIGAHGNGVFGAHRDVVTLTLKLNEDGTLTLLTGAHDMGNGVVTMQTMMVAEVLGITPDKVDTFETDTDACTFNLGDYASRGVFVEGGGAKKTAEKLKNLILEEAEKLLETSKEDLYLDNGYVISKLDENVKASLSDVAVYSQSKSLRELTVVEDYSSPAGRTSYGVHFAEVLVDKETKDIKVVDFVAVHDVGRVINPLNLEGQLEGGIHMGLGYALSEELAFDEQGRPKATDFKTYKLFRTVDMPKCQVAFVDGYEKAGPFGGKSIGECAVVPVAPAVANAVYNATDVEIHSLPIKLK

SEQ ID NO: 115872 - DNA, 2265 bp, Clostridium difficile 630
  CDS (1)..(2265): transl_table=11
atgaatatagttggaaaaggaatcaagaaaatagatggaatgagtatcacaacaggaaagcctgtatatacagatgatttatcagcaaaagatgctttggtggtaaagatacttagaagtcctcacgcttatgcaaaaataaaagatatagagacatcaaaggcagaaatggttgatggtgttgaatgtgttttaacatataaagatgtaccaaaatctcgatttacacttgctggtcaaacatatccagagccatctccatatgatagattaattcttgaagatgttgtaagatatgtaggtgacgaagtagctatagtggcagctatagatgaaaaaactgcaattaaagcaatgaatcttatcaaagtaaagtatgaagtacttacacctgttttggattttgaagaggcaataggaaataaaactatggtacatgatgaagatagacattgtaactttgatataggtatgcaaagagaaaaaaatatagtatcccatcatgattatacaaaaggtgatgtagaaaaagtattaagtaattgtgatgtagtgattgaagaaacttattatactcaagctcaagcacatgcaatgatggagacgtatagggcatacaattatttagaccatatgggaagattggttgtagtaagttcaactcaaataccatttcatgtaaaaagacatttatctcgtgcactagaaataccagctagcaaaattagggttataaaacctagaattggtggcggatttggtggtaaacaaactgcatgtgttgagattttttctgcaattgttactttaaaaacagggaaaccagctaaaataatttatgatagaaaagaaacttttaattgttcaacaagtagacatgcaatgagattaaaagttagactaggtgctacaaatgatggcataataaaggcaatagatataaaagcactttctgatacaggagcatatggagagcatgcttctacaactattggtttggttggagaaaaaactttaccaatgtataataaagttgaagcaacaagatttattgcagatgtggtatatactaataagatgccagcaggagcacttagagggtatggagcatcacaaggatgttttgctgttgaatcaactataaatatgcttgctaataaattaaaaatggacccaacagatttaaggttaaaaaatgtggtaacagaaggtgaaactacatttgcatatggtaaaactttaaatagtgtcgatttaataaaatgtataaataaaggcaaagaacttattggatggaatgaaaaatatccttgtaaacatcttgataatggaaaaattagaagtgtgggtatggcaattactatgcaaggttctggtatacaaggtcttgataagtcttcagctgaaataaaattgaatgactgtggagattatactcttatgataggttctactgatatgggtacaggaagtgatacgattttagctcaaatggctgctgaggttcttgatacaagcattgaaaatataacagttatatcagctgatactgacttagttccatatgacccaggttcatatgcttcaagtactacttatgtaacaggtatggcagtagttaaggcagctcaagacttaagagaaaaaataatttctgctggagcaactaaactaggtgttgagaaggatgaagtagaatttgatggtataaaattaactagtaaaaaaggtagcactttattattcgatatagcagttgattctacaattggtccagatactaatcaattaataggtcttgcttctcatggtagcccagtatctcctcctccttttatagcaggttttgcagaaactgaaattgacacagaaactggaaaagttgatttagtaaattatgtagctgtagtagattgtggaacggttataaataaaaatctagctaagatacaagttgaaggtggaattgttcaagggattggaatggcattatttgaagaagttagatacacagaaaaaggaagcatggacacaaatacatttatgcaatacaagattccagctagatgtgatattggaaatgttaaagtagattttgttgaaacttatgaaccaactggaccatttggtgctaaatctgttggagaagttgttataaatacacctttaccagcaatacaagaagctgtgtttaatggaattggtgtaagaataaatacactccctattacacctgaaaaagtttttatggaaatgaataaataa

SEQ ID NO: 115873 - protein, 754 aa, Clostridium difficile 630
MNIVGKGIKKIDGMSITTGKPVYTDDLSAKDALVVKILRSPHAYAKIKDIETSKAEMVDGVECVLTYKDVPKSRFTLAGQTYPEPSPYDRLILEDVVRYVGDEVAIVAAIDEKTAIKAMNLIKVKYEVLTPVLDFEEAIGNKTMVHDEDRHCNFDIGMQREKNIVSHHDYTKGDVEKVLSNCDVVIEETYYTQAQAHAMMETYRAYNYLDHMGRLVVVSSTQIPFHVKRHLSRALEIPASKIRVIKPRIGGGFGGKQTACVEIFSAIVTLKTGKPAKIIYDRKETFNCSTSRHAMRLKVRLGATNDGIIKAIDIKALSDTGAYGEHASTTIGLVGEKTLPMYNKVEATRFIADVVYTNKMPAGALRGYGASQGCFAVESTINMLANKLKMDPTDLRLKNVVTEGETTFAYGKTLNSVDLIKCINKGKELIGWNEKYPCKHLDNGKIRSVGMAITMQGSGIQGLDKSSAEIKLNDCGDYTLMIGSTDMGTGSDTILAQMAAEVLDTSIENITVISADTDLVPYDPGSYASSTTYVTGMAVVKAAQDLREKIISAGATKLGVEKDEVEFDGIKLTSKKGSTLLFDIAVDSTIGPDTNQLIGLASHGSPVSPPPFIAGFAETEIDTETGKVDLVNYVAVVDCGTVINKNLAKIQVEGGIVQGIGMALFEEVRYTEKGSMDTNTFMQYKIPARCDIGNVKVDFVETYEPTGPFGAKSVGEVVINTPLPAIQEAVFNGIGVRINTLPITPEKVFMEMNK

SEQ ID NO: 115874 - DNA, 4110 bp, Oryza sativa (japonica cultivar-group)
  CDS (1)..(4110)
atggggtcgctcaccagggcggaggaggaggagacggcggcggccgaggagtggtcgggcgaggcggtcgtctacgtcaacggcgtccgccgcgtgctccccgacggcctcgctcacctcaccctgctccaatacctcagagacattggtcttcctggaacaaagcttggatgtggtgaaggtggctgtggagcctgcactgtgatggtctcatgctatgatcaaactacaaagaagacacagcattttgcaatcaacgcatgcttggctccgctttattctgtggaaggaatgcacataatcacagtagagggaattgggaatcgtcagcgaggtttgcacccaatccaggaacgtttagccatggcccacggttcacaatgtggattttgcacccctggttttgtgatgtcgatgtatgcattgctgagatcaagtgaacagcctcctactgaagagcagattgaagatagccttgcaggaaatttatgtcgctgtactggctacagaccaataatagacgccttccgtgttttctcgaaaagagatgatcttttgtacaacaattcatctctgaaaaatgcagatggccgacctatctgcccttcaacaggaaaaccatgttcctgcggagatcagaaagacatcaatggtagtgaatcttcattattgacacctacgaaaagctactcaccttgttcatacaatgagattgatggaaatgcgtacagtgagaaagaactcattttccccccagaacttcagttgagaaaagttacgtcacttaaattgaatgggtttaatgggattcggtggtatagacctcttaaactaaagcaagtattgcatttgaaagcatgctacccaaatgcaaaactaatcattggtaactctgaagtaggagttgaaacaaagttcaagaatgcccagtataaggtcttgatctcagttactcatgttccagagcttcatacccttaaagtgaaagaggatggtatacatattggttcttctgtaagacttgcacagctccaaaatttcctcagaaaggttattttagagcgtgattcacatgaaatttcatcctgtgaggcaatactgcggcaattaaaatggtttgctgggacacaaatcaggaatgttgcttctgttggaggtaacatttgtactgctagtccaatatcagatctaaatccactttggatggctacaggtgcaacgtttgagataattgatgtgaacaataatattaggaccattcctgcaaaagatttttttctgggttatcgtaaagttgacttaaaacctgatgagatattgctctctgttatactgccatggacaaggccatttgaatttgtcaaagaattcaagcaggcacatagaagggaggatgacattgcgttggtgaatgctggaatgcgtgtctatataagaaaagttgaaggtgattggataatttcggatgtttcaattatctatggaggggtagctgcagtttcacaccgtgcttcaaaaactgaaacctttctcactggaaaaaaatgggactatggattgttggataagacttttgatctgttgaaagaagacgtagttctggctgaaaatgcacctggtggaatggttgaatttcgcagttcacttactttgagtttctttttcaaatttttccttcatgttactcatgaaatgaatataaaaggattttggaaggatggattacatgcaaccaatctttcagccatacagtctttcactagacctgtcggtgttggaactcaatgttatgaattggttagacaaggaactgcagttggccaacctgtggttcacacatcagctatgcttcaggttactggtgaagcggaatatactgatgacacaccgacaccccccaataccttgcatgctgctctggtgctgagtacgaaagctcacgcacgcatattatctattgatgcttcacttgccaaatcttcccctgggtttgcgggtctcttcctttcaaaagacgtgcctggcgctaaccatactgggcctgttatccatgacgaggaggtttttgcatctgatgttgttacatgtgttggccagattgttggacttgttgtggcagatacccgtgataatgcaaaagctgctgcaaataaagtcaatattgagtattctgaacttccagcaattttatccatagaggaagctgtgaaagctggtagctttcatccaaatagcaagagatgcctagtaaaaggtaatgttgaacaatgttttctgtcgggtgcatgcgatagaattatagaaggaaaagtacaagttggaggtcaagagcacttctacatggagcctcagagcactcttgtatggccagttgattctggaaatgaaattcatatgatttcatctacccaggctccccagaagcaccaaaagtatgttgctaatgttcttggtcttccacaatcaagagttgtttgcaagactaagcgtattggtggtggatttggtggaaaagaaaccagatcagcaatatttgctgcagcagcatctgtagctgcttattgtttaaggcagcctgtaaagcttgttttggacagggatattgacatgatgacaactggacagaggcacagtttcctagggaagtacaaggtgggatttaccgatgatgggaagatattggccttagaccttgatgtttataacaatggtggtcattcacatgatttgtcccttccagtcctggagcgtgctatgtttcattcagacaatgtctatgatataccaaatgtcagagtcaatgggcaagtatgtttcacaaatttcccaagcaatactgctttcagaggttttggtggtccacaagctatgctgattgcagagaattggattcagcacatggctacagaactcaagcgaagtcctgaggagataaaagaacttaattttcaaagtgagggatctgtgcttcattatggccagttgcttcaaaattgtacaatacattcagtatgggatgaactaaaggtttcttgtaattttatggaagctcgcaaagctgtaattgattttaacaataataaccgttggagaaagcgtggcattgctatggttcccaccaagtttgggatatccttcactacaaaattcatgaatcaggctggtgctttagtgcaagtttacactgatggaactgtccttgtaacgcatggtggggttgaaatggggcagggtttacacacaaaggtagcccaagttgcggcttcatcattcaatatccctcttagctctatatttatctcagaaacaagcactgataaggtaccaaatgcaacaccaacagcagcctctgctagttcagatttatatggtgctgcagttttggatgcttgtcagcaaattatggctcggatggaacctgttgcttcaagaggaaaccacaagtcctttgctgagttggttctagcatgctacctggaaaggatagatctctctgctcatggattttatatcactcctgatgttgggtttgactgggtgtctggcaagggaactccattctactatttcacatacggagcagcatttgcagaagttgaaattgataccctaactggggatttccacacaaggacagtagatattgttatggatcttggctgttcaattaatccggctattgatattggccagattgaaggaggttttatccaaggattaggttgggcggccctggaagaactaaaatggggggatgataaccacaagtggattcgacctggacatcttttcacttgtgggcctggctcttacaaaataccctctgtaaatgatatacctctaaacttcaaggtctcacttttgaagggcgttttgaatccaaaggtcattcactcatccaaggctgtaggagagccaccgtttttcctcggttcagccgtcttgtttgccataaaggatgcgatatctgccgcaagagctgaggagggtcacttcgactggttcccactcgacagcccagcaacaccggaaagaataagaatggcatgcgtggattccatcacaaagaaatttgctagcgtatattaccgtcccaagcttagtgtatag

SEQ ID NO: 115875 - protein, 1369 aa, Oryza sativa (japonica cultivar-group)
MGSLTRAEEEETAAAEEWSGEAVVYVNGVRRVLPDGLAHLTLLQYLRDIGLPGTKLGCGEGGCGACTVMVSCYDQTTKKTQHFAINACLAPLYSVEGMHIITVEGIGNRQRGLHPIQERLAMAHGSQCGFCTPGFVMSMYALLRSSEQPPTEEQIEDSLAGNLCRCTGYRPIIDAFRVFSKRDDLLYNNSSLKNADGRPICPSTGKPCSCGDQKDINGSESSLLTPTKSYSPCSYNEIDGNAYSEKELIFPPELQLRKVTSLKLNGFNGIRWYRPLKLKQVLHLKACYPNAKLIIGNSEVGVETKFKNAQYKVLISVTHVPELHTLKVKEDGIHIGSSVRLAQLQNFLRKVILERDSHEISSCEAILRQLKWFAGTQIRNVASVGGNICTASPISDLNPLWMATGATFEIIDVNNNIRTIPAKDFFLGYRKVDLKPDEILLSVILPWTRPFEFVKEFKQAHRREDDIALVNAGMRVYIRKVEGDWIISDVSIIYGGVAAVSHRASKTETFLTGKKWDYGLLDKTFDLLKEDVVLAENAPGGMVEFRSSLTLSFFFKFFLHVTHEMNIKGFWKDGLHATNLSAIQSFTRPVGVGTQCYELVRQGTAVGQPVVHTSAMLQVTGEAEYTDDTPTPPNTLHAALVLSTKAHARILSIDASLAKSSPGFAGLFLSKDVPGANHTGPVIHDEEVFASDVVTCVGQIVGLVVADTRDNAKAAANKVNIEYSELPAILSIEEAVKAGSFHPNSKRCLVKGNVEQCFLSGACDRIIEGKVQVGGQEHFYMEPQSTLVWPVDSGNEIHMISSTQAPQKHQKYVANVLGLPQSRVVCKTKRIGGGFGGKETRSAIFAAAASVAAYCLRQPVKLVLDRDIDMMTTGQRHSFLGKYKVGFTDDGKILALDLDVYNNGGHSHDLSLPVLERAMFHSDNVYDIPNVRVNGQVCFTNFPSNTAFRGFGGPQAMLIAENWIQHMATELKRSPEEIKELNFQSEGSVLHYGQLLQNCTIHSVWDELKVSCNFMEARKAVIDFNNNNRWRKRGIAMVPTKFGISFTTKFMNQAGALVQVYTDGTVLVTHGGVEMGQGLHTKVAQVAASSFNIPLSSIFISETSTDKVPNATPTAASASSDLYGAAVLDACQQIMARMEPVASRGNHKSFAELVLACYLERIDLSAHGFYITPDVGFDWVSGKGTPFYYFTYGAAFAEVEIDTLTGDFHTRTVDIVMDLGCSINPAIDIGQIEGGFIQGLGWAALEELKWGDDNHKWIRPGHLFTCGPGSYKIPSVNDIPLNFKVSLLKGVLNPKVIHSSKAVGEPPFFLGSAVLFAIKDAISAARAEEGHFDWFPLDSPATPERIRMACVDSITKKFASVYYRPKLSV

SEQ ID NO: 115876 - DNA, 2313 bp, Mesorhizobium loti MAFF303099
  CDS (1)..(2313): transl_table=11
atgaccgttcacaacatcagagttggtgaatcgagacggggcgacgcctccgacggcgcactggcggaagccgttggcggccggctgtcgcgcgtcgacggcccggccaagatcaccggtgccgccaaatacgccgtcgagcagcagctcgagcacctcgcctatgccgtgctggtcgaaagcacgattgcctcgggcaaggtgcgcgcgatcgacactgcgcaggctgaggcggcgccggctgtgctgcaagtgctgacgccggacaccatcatcagcctgaggaccgcatccgactggttcggcacgccgccaccggacaaaccctactgcccgctggcgcgcgacatcaccttctccggccagcatatcgcggcagttgtcgccgaaaccttcgagcaggcggtcgccgcggcggccctcgtcaaggtcagctatgacgagacgccttccatcgtcgatctcagcgacggcaaggccggcgacggcattccgatcgatgccatgaccaaggaatggggcgatgcgcccgcagccttcgccgccgcgccggtgcgcatctgcgccgcctacaacacgccgcgcgaataccaggcgccgatggagccgcatggcctgatcgcgcgctgggagggcgatcatctgaccgtctgggagccgagccagtggttggacggcatggcccgcacctacgccgaatggttcgaagtgccgttcgagaatgtgcggctggtctcgccctatattggcggtggcttcggctccaaggcgctggcgctgagccatggcgcggtggcggcaagtgccgccaaaatgctgggacggccggtgaagctggtgatgacgcggccgcagacctttaccggctatggcggccgcgccgcgacgcgccagacggtgacgatcggcgccaaccacgacggcatgatccagtcgatcgtgcatcgcggcgtcaacgaaacctccatcgacggcatgtgggtcgagccgctcggctcggtcacctcgatcatgtacgcgacgccgaatttctcctcgaagcagaatgtcgtgcgggtcaattccgtggtgccgggcgccatgcgggcgccgggcgaaaatccgtcggccttcggcatcgaaagcgccatcgacgagctcgcctatgaggtcggcatcgacccactggagattcggctcagaaactatgccgagcaggatccgcacgccagaaaagcctggtcgaccaggcagttgcgagaggcttttgccgcgggcgccgagcgcttcggctggtccaggcgctcgtcgaaaccgcgctcgatgcgcgacggcaaccagctgatcggctggggcgtcgccgccggcacctatccggtgcggcgcgcctacggcgaggctctcgtgcgcatcctggccgacggctcggtcgaggtcgaaagctcctcgatcgacatgggccagggcacctacaccatcctggcgcagaccgccgccgagacggtcggcgtgccggccgacgatgttgtggtgaagctcggcgactcccgctttgcccgcgccggcgtcagcggcggctcgcggctggctggcgtgatgacgggggcggtccacaaggccgcgacctcggcgctcgatcaaatggtgggcctggcgatcagcgatccgcgctcgcccttccacgcgctgcaggccaacactctggtcgtcgccaatggccgcatcggctcgccgcgcggcgacggccccgatgtctcgatcgccgaactgctcaagagcgtcggccgcgaccgcatcgaggcgaccggcgacaccatgccggccaactcgacggcggaagaccgctacaagaactacaccaccatcgccatggcgctgccgcacaccgagggcgattattcccgctactcctggtgcgcgcatttcatcgaggtgcgcgtcgacgaggatttcggcacggtgcgcgtgtcgcgcgtggtgtcggcgctggattccggccggctctacaacccgaagctcgccgaaagccaatggaagggcggcatcatcatgggcatcggccaggcgttgctggaagaaggcatcatggatcgtcgccatggccgcatcgtcaacaacaacctcgccgattacctggtgccgaccaatgccgacatcccggacatcgaggtgatctcggtcggcattcccgacccgcactcctcggcgctcggcggcaagggtgtgggtgagcttggcatcgtcggtgtcgcgcccgcgatcgccaatgcggtgttccacgcgacgggaaagagggtgcgggatttgccgatcacgctggagaagctgatctga

SEQ ID NO: 115877 - protein, 770 aa, Mesorhizobium loti MAFF303099
MTVHNIRVGESRRGDASDGALAEAVGGRLSRVDGPAKITGAAKYAVEQQLEHLAYAVLVESTIASGKVRAIDTAQAEAAPAVLQVLTPDTIISLRTASDWFGTPPPDKPYCPLARDITFSGQHIAAVVAETFEQAVAAAALVKVSYDETPSIVDLSDGKAGDGIPIDAMTKEWGDAPAAFAAAPVRICAAYNTPREYQAPMEPHGLIARWEGDHLTVWEPSQWLDGMARTYAEWFEVPFENVRLVSPYIGGGFGSKALALSHGAVAASAAKMLGRPVKLVMTRPQTFTGYGGRAATRQTVTIGANHDGMIQSIVHRGVNETSIDGMWVEPLGSVTSIMYATPNFSSKQNVVRVNSVVPGAMRAPGENPSAFGIESAIDELAYEVGIDPLEIRLRNYAEQDPHARKAWSTRQLREAFAAGAERFGWSRRSSKPRSMRDGNQLIGWGVAAGTYPVRRAYGEALVRILADGSVEVESSSIDMGQGTYTILAQTAAETVGVPADDVVVKLGDSRFARAGVSGGSRLAGVMTGAVHKAATSALDQMVGLAISDPRSPFHALQANTLVVANGRIGSPRGDGPDVSIAELLKSVGRDRIEATGDTMPANSTAEDRYKNYTTIAMALPHTEGDYSRYSWCAHFIEVRVDEDFGTVRVSRVVSALDSGRLYNPKLAESQWKGGIIMGIGQALLEEGIMDRRHGRIVNNNLADYLVPTNADIPDIEVISVGIPDPHSSALGGKGVGELGIVGVAPAIANAVFHATGKRVRDLPITLEKLI

SEQ ID NO: 115878 - DNA, 2265 bp, Mesorhizobium loti MAFF303099
  CDS (1)..(2265): transl_table=11
atgaatttcgatccgcgtttttccgggcgtaaattcgcatccgtcggcacgcgccccatccgccccgacggcgtcgacaaggtgacgggccgcgcccgctacggcgccgacttcaacatggccggccagctggtcggccgcgttctgcgcagcccgcatgcgcacgccaagatcctcaagatcgacacgtcgaaggcggaaaagctgaacggcgtgaaggcggtgatcacggcgaaagacctgcccgacctcaccgatggcgatgccgccatgtacgacatcctcgacaattgcatggcgcgcaccaaggcgctctatgacggccatgcggtggccgcggtcgccgcggtcgatgcccgtacggcaaggcaggcgctgaagctgatcgaggtcgagtacgagatcctgccgcatgtcaccgatgtcgacgaggcgatgcagcaccacgcgccgctgatcaacgacacgatcttcaccgaggggctggaggaaaagccggtaaaaccctccaacgtcaccaagcgcagccagttcggccatggcgacgtccatcagggctttgggcacgccgacttcatcgtcgagcgctccttcaagaccgagcagacgcaccagggctatatcgagccgcatgcctgcgtggcgagcgtctcgtccgacggcaccgccgacctctgggtctgcacgcagggccatttcgtctaccgccagcactgcgcccagctgctcggcatggaagcctcgaagctgcgcgtcacctcgtcggagatcggcggcggcttcggcggcaagacccatgtctgggccgagccggtggcgcttgccttgtcacgcaaggccgggcggccggtgaagctggtgatgacccgcgacgaggtgttccgcgcctcagggccaaccagcgccacctcgatcgacgtcaagatcggcgcccgcaaggacggcaccatcactgccgccgaagcgacgctgcgctacagcgccggcccctatgccggctcctgggccgagatcggcgccatgacggccttcgcctgctacaagctcgataacgtcaagacggtcggttacgaagtgctggtcaaccggcccaagaccgcggcctatcgcgcgccctccgcaccgatggcggccttcgcggtggaaagtgcggtcgacgagctcgccaaggagctcggcatggacccggtcgacttccgcatcaagaacgccgcgcaggaaggaacacgctcgtcctacggcccggtctatggcccgatcggcatcggcccgacgctggaagcggtgaagcaccatccgcacatgaaggcgccgctcaaaaagaaccagggcaggggcatggcctgcggcttctggttcaatttcggcggccagacctgcgtggacctcaacatcggcatggacggctcggtctcgctcgccgtcggcacggtggacgtgggcggttcccgcgcgtcgctgtcgctggtggcggcggaggagctcggtatcgactatgcccagctcaaggcggtggtcgccgacacctcttcgctcggttataacgacatgaccgacggcagccgcggcaccttctcctcctccatggcgaccatctcggccgcccgcaacgcgataaaaatcctgcgcgagcgcgccgcgcagatgtgggacatttccgtcgacgacgtggtctgggaactgggccatgcggtcgccaagggcgagaagcacggcaatctcggcaaactgtcgctgaaggagatcgcggcccagtccggcaagaccggcgggccgatcgccggccacagcgagctcgtcgccgacggcgccggcgtctccttcgccacccacatatgcgacatcgaggtcgaccccgagaccggctcgacccgggtgatccgctacacggtggtgcaggatgccggcaaggcggtgcacccgacctatgtcgagggccagtaccagggcggtgcggcgcaaggcatcggctgggcgctcaacgaggagtatatttacggcaaggacggaaggctgcagaacgccggcttcctcgactaccgcatcccggtgtgctccgacctgccgatgatcgacacgcagatcctggaaatccccaaccccaaccacccctatggcgtgcgcggcgtcggcgaaacctcgatcgtgccgccgctggcggcgatcgccaacgcggtgtcgaacgcggccggcgtgcgcatgacccacatcccgatgtcgccgccacgcatcctggcggccatcgaagcggaacggggagagtag

SEQ ID NO: 115879 - protein, 754 aa, Mesorhizobium loti MAFF303099
MNFDPRFSGRKFASVGTRPIRPDGVDKVTGRARYGADFNMAGQLVGRVLRSPHAHAKILKIDTSKAEKLNGVKAVITAKDLPDLTDGDAAMYDILDNCMARTKALYDGHAVAAVAAVDARTARQALKLIEVEYEILPHVTDVDEAMQHHAPLINDTIFTEGLEEKPVKPSNVTKRSQFGHGDVHQGFGHADFIVERSFKTEQTHQGYIEPHACVASVSSDGTADLWVCTQGHFVYRQHCAQLLGMEASKLRVTSSEIGGGFGGKTHVWAEPVALALSRKAGRPVKLVMTRDEVFRASGPTSATSIDVKIGARKDGTITAAEATLRYSAGPYAGSWAEIGAMTAFACYKLDNVKTVGYEVLVNRPKTAAYRAPSAPMAAFAVESAVDELAKELGMDPVDFRIKNAAQEGTRSSYGPVYGPIGIGPTLEAVKHHPHMKAPLKKNQGRGMACGFWFNFGGQTCVDLNIGMDGSVSLAVGTVDVGGSRASLSLVAAEELGIDYAQLKAVVADTSSLGYNDMTDGSRGTFSSSMATISAARNAIKILRERAAQMWDISVDDVVWELGHAVAKGEKHGNLGKLSLKEIAAQSGKTGGPIAGHSELVADGAGVSFATHICDIEVDPETGSTRVIRYTVVQDAGKAVHPTYVEGQYQGGAAQGIGWALNEEYIYGKDGRLQNAGFLDYRIPVCSDLPMIDTQILEIPNPNHPYGVRGVGETSIVPPLAAIANAVSNAAGVRMTHIPMSPPRILAAIEAERGE

SEQ ID NO: 115880 - DNA, 2325 bp, Mesorhizobium loti MAFF303099
  CDS (1)..(2325): transl_table=11
atggaggcctcctcgcaaacggcaagcctcgatttccgcctgcctcagtccggccatgcgatcggcgcgtcacccgtcaggctggacggtgtgccaaaggtgaccggggctgagaaattcggtggcgattccttcccggccgatgcgcttgccgtgctggttgtccgttcgccgcactatcacgccggcttcgccttcggcgatctcgacgggtggacaaggaagcaccccggcatcgtcggtatcttcacggcggccgacattccggggaaaaattgttttggcgtcatcggcccgttcgccgaccagccggcgctcgccgaagggtttgcgcggctgcgcggcgaggcggtggcgctggtcgccggcgagcgtgaggcgatcctcgatctggacctgtcggattttccgatccgctggaccgaactgccgcatgtcctgcagcccagcgaagcacagggcgagggtgctgccctgatccatccgcaccgcccctcgaacctgctgacctccggcttcgtcgagcgcggcgaccccgaggcggcgctagccaatgcggccgttaccgtgacgggcgcgatcgacacctcctatgtcgagcacgcctatatcgagccggaggccggccatgcctatatggatggcgacacgttggtcgtcgtcgcctgcacccaggcgccctatatggaccgcgacgatatggcgaaggtgcttggtctgcccgtcgacaaggtgcgcatcgtaccgaccgccaccggcggcggcttcggctccaagctcgacgtttcgctgcagccgctgatcggccttgtggcgctgaagaccggccggccggccgccttggcctacacccgcaacgaatcgatgatgtcgaccaccaagcgccatccggccgaaatgaaggcgaccatcggcgccgatgccgacggccatgtcaccggcatgatcttttcaggcgatttcaacacaggagcctacgccagctgggggccgaccgtcgccaaccgcgtgccggtgcatgcttccggcccttatgcgacgccgaactaccgcgccgaaggccgcgccatccacacgcatggcccgatctccggcgccttccgtggcttcggcgtaccgcaggcgacgatcatgcaggagacactttatgacgagctggccggcaagctcggcatcgaccgcctcgactttcgcctgagaaactgccttcggaacggatccgaaacggttaccggccagaggctggaatccggcgtcggcattgcagaatgtctcgaggccttgcggccgcattgggcacgggcgctggctgacgcgggtgctttcaacagtaaccatgcagataaaaagcgcggcgtcggcgtggcgtcctgctggtatggctgcggcaacacctcgctgcccaatccatcgaccatccgggtcggcatcgcggctgacggcaccgtcatcctgcaccagggcgcggtcgacatcggccagggttcgaacaccgtcatctcgcagatttgtgccgacgcgcttggcctgccgctggaaagattccggttgaagagcgccgatacggcgatcagtcccgatgccggcaagacctcggcctcgcgccagacctttgtgaccggcaaagccgccgaaaaagctggccgtgccttgcgcgaaaagatcctgcgctttgccaatgtctccgaaaaggcatctctgcaactggacggcgcggtgatcgtcatccgcgaaggcgaagccacgcgccgcatcgatctcgcctcgctcgacatggatgccgacggcttcgtcttccgcgccgaggagacctacgacccgccgacgctgccgctcgatgccaagggccagggcaagccctatgccgtctatggctatggcgcgcagatcgccgagctcgaggtcgatctcaagctgggcacagtgaagctcctgaaaataactgccgcgcatgatgtcggcaaggcgatcaatccgttgctggtcgagggccagatcgagggcggcatcgcgcaaggcatcggcatggcgctgatggaagagtacattcccggccgcaccgagaatttgcacgactatctcatcccaaccatcggcgacgtgccgccgatcgagaccatcctggtcgaggttcccgatcccgaagggccgttcggcgccaagggcctgggtgagcatgtgctgatcccgaccgcgccggcgatcctcaacgccatccgccatgccaccggcgtgctggtcaccaaggttccggcgacgccgacgcgcatccgcgctggcatccgtgaaaaagatggcatccgcgaaaaggaggcacgcgcatga

SEQ ID NO: 115881 - protein, 774 aa, Mesorhizobium loti MAFF303099
MEASSQTASLDFRLPQSGHAIGASPVRLDGVPKVTGAEKFGGDSFPADALAVLVVRSPHYHAGFAFGDLDGWTRKHPGIVGIFTAADIPGKNCFGVIGPFADQPALAEGFARLRGEAVALVAGEREAILDLDLSDFPIRWTELPHVLQPSEAQGEGAALIHPHRPSNLLTSGFVERGDPEAALANAAVTVTGAIDTSYVEHAYIEPEAGHAYMDGDTLVVVACTQAPYMDRDDMAKVLGLPVDKVRIVPTATGGGFGSKLDVSLQPLIGLVALKTGRPAALAYTRNESMMSTTKRHPAEMKATIGADADGHVTGMIFSGDFNTGAYASWGPTVANRVPVHASGPYATPNYRAEGRAIHTHGPISGAFRGFGVPQATIMQETLYDELAGKLGIDRLDFRLRNCLRNGSETVTGQRLESGVGIAECLEALRPHWARALADAGAFNSNHADKKRGVGVASCWYGCGNTSLPNPSTIRVGIAADGTVILHQGAVDIGQGSNTVISQICADALGLPLERFRLKSADTAISPDAGKTSASRQTFVTGKAAEKAGRALREKILRFANVSEKASLQLDGAVIVIREGEATRRIDLASLDMDADGFVFRAEETYDPPTLPLDAKGQGKPYAVYGYGAQIAELEVDLKLGTVKLLKITAAHDVGKAINPLLVEGQIEGGIAQGIGMALMEEYIPGRTENLHDYLIPTIGDVPPIETILVEVPDPEGPFGAKGLGEHVLIPTAPAILNAIRHATGVLVTKVPATPTRIRAGIREKDGIREKEARA

SEQ ID NO: 115882 - DNA, 2358 bp, Aeropyrum pernix K1
  CDS (1)..(2358): transl_table=11
ttgtctcagggtagaaggtatattggtaagagggttaagcgtaaagaggacccgcgcttcataaccggaaggggcctatacgtcgacgacattaagctcccgggcatggtgtacgccgctttcctgagggcgagctacgcccacgcgaggataaagtctatagacacctctaaggcggagaaaatgccgggggtagtaggagtctacactggagagtacttcaaagataaagttgctcccctcacaacggcctgggcgctggctaacgccgacttgaagcccgttttctggccggtggtagcccacgataaggtgaggtttacaggggatattgtggcggttgtcgtggccgaggacccatacaccgcctacgacgccctggaggccatagatgtcgagtatgagcccctgcccgttgttgtcgacgttgaggaggccataaagcccggtgccccccagctccatgacgaggccccgggtaacatagcctttaaatggaggttctccggcggcgagagctttgacaaggttgcagagaaggctgatgtggttataaagcagaggatggtaaaccagaggctaatacccagcgccatggagactaggggtgctgtagccagcttcaacaggggtctggaggagctgactctatgggtcacctcgcagaatccccatgtccataggctcgtcctctccggcgtgctgggactgccggagcataagatcagggttatagcgcccgatgtaggcggcggcttcggcagcaagatccccgtctacccgggggaggtgatagtatccaggctggctatggacctgggggttccggttaagtgggttgagacgaggagggagaacttcgtcggcacaatccacgggagggaccatgtggagtatgtggaggcggctgccacgagggacgggagactcctcggcgtaagggttaagactctggctaacatgggggcctacctctccacggcggcccccggagtccccaccatactcttcggcctgatgctccagggaccatacaagatcgagtcggtggacgtcgaggtcctgggggtgctgacgaacacgacccccgtcgacgcataccggggtgcagggaggcctgaggcaacctacatcctcgagagggttatggacctggtggcgagaaagctggggctcgaccccgctgaggtcaggaggaggaacctcatcgaggaggctccctacaccactgtgacaggcctcgtctacgacagcggcaggtacaaggaggtgttcgagaaggcgctccagatagctgagtacgagaagtggagggaggagcagatgaaggccaggcaggaggggaggctgataggtatagggatatcgagctacatagagatgtgcggcctagccccctctaggatagcgagggccacgggcttcggccttggcctctacgagagcgtcacaataagggttcaccccactggcaaggtgagcgtctacacaggatcacacccccacggccagggtgaggagacctccttcgcccagatagtggctgaggagctgggcgtcccggtggaggacgtcgagatcatacatggtgacacggacgagacacccttcggcctgggtacctacggcagcaggacgacgcctgtgggcggcggcgctgtggccctcgccgccaggaggataagggagaaggccaggaagatagcggctgccctgctcgaggccagggaggaggatgtagtgttctcggagggcaagttccacgtgaagggccatcccgagaagagtgtgtcgttccaggaggtagccctggaggcctacctggctgacaagcttcccgaggggctggagccggggttggaggcgaccaccttctacgaccccgagaacttcgtgttcccctacggcacccacgtgtgtatagtagaggttgacagggatacgtggaagcctaagatactgaggtatgtggctgtggacgatgcaggcgtgataataaatccgatgctggctgagggccaggttcacggaggcgtcgttcagggcatagcccaggccctcttcgagtatgccgtgtacgatgagagcggcaaccttctcaccgcagggttcaacgactacatgatacccactgccaaggacctccctaacatagaatcctacttcgtcgagactccctcaccccacaacccgctgggcgccaagggcataggggagaccggcactatagcctctacccccgccgtcgtgaacgcggtgctggacgccctcgcccacctgggcgtggagcacatagacatgcccctaacgccccacaacatttggaaggcccttaaggataagggggtggtgaagtag

SEQ ID NO: 115883 - protein, 785 aa, Aeropyrum pernix K1
MSQGRRYIGKRVKRKEDPRFITGRGLYVDDIKLPGMVYAAFLRASYAHARIKSIDTSKAEKMPGVVGVYTGEYFKDKVAPLTTAWALANADLKPVFWPVVAHDKVRFTGDIVAVVVAEDPYTAYDALEAIDVEYEPLPVVVDVEEAIKPGAPQLHDEAPGNIAFKWRFSGGESFDKVAEKADVVIKQRMVNQRLIPSAMETRGAVASFNRGLEELTLWVTSQNPHVHRLVLSGVLGLPEHKIRVIAPDVGGGFGSKIPVYPGEVIVSRLAMDLGVPVKWVETRRENFVGTIHGRDHVEYVEAAATRDGRLLGVRVKTLANMGAYLSTAAPGVPTILFGLMLQGPYKIESVDVEVLGVLTNTTPVDAYRGAGRPEATYILERVMDLVARKLGLDPAEVRRRNLIEEAPYTTVTGLVYDSGRYKEVFEKALQIAEYEKWREEQMKARQEGRLIGIGISSYIEMCGLAPSRIARATGFGLGLYESVTIRVHPTGKVSVYTGSHPHGQGEETSFAQIVAEELGVPVEDVEIIHGDTDETPFGLGTYGSRTTPVGGGAVALAARRIREKARKIAAALLEAREEDVVFSEGKFHVKGHPEKSVSFQEVALEAYLADKLPEGLEPGLEATTFYDPENFVFPYGTHVCIVEVDRDTWKPKILRYVAVDDAGVIINPMLAEGQVHGGVVQGIAQALFEYAVYDESGNLLTAGFNDYMIPTAKDLPNIESYFVETPSPHNPLGAKGIGETGTIASTPAVVNAVLDALAHLGVEHIDMPLTPHNIWKALKDKGVVK

SEQ ID NO: 115884 - DNA, 4086 bp, Arabidopsis thaliana
  CDS (1)..(4086)
atgggttcactgaaaaaggacggcgagatcggagatgagtttacggaggcgttactgtacgttaacggcgttcgtagagtcttgcctgatggattggctcatatgacacttctcgaatatctcagagatttaggattgaccggtacaaagctgggatgcggcgaaggtggttgtggggcttgcacggtgatggtgtctagttatgacaggaagtcaaagacctctgtgcattatgctgtcaacgcttgcctagcacctctctattctgtagaagggatgcatgtaatatccattgagggacttgggcatcgcaaacttggcttgcaccctgtccaggagtctttggcatcttcccatggttcccaatgtgggttttgtactcccgggtttatcatgtccatgtattcgttgttgaggtcaagtaaaaactcaccttctgaggaggagattgaagaatgtcttgcaggaaatctatgtcgttgtactggttatcgacccattgttgatgcgtttcgggtttttgcaaaatctgatgatgctctctactgtggtgtatcttcacttagccttcaagatggttctactatttgcccatctactggcaaaccttgctcttgtggatcaaaaacaacaaatgaagttgccagttgtaatgaagatagatttcagtcaatctcttatagtgatatagatggagctaagtatacagataaggagcttattttcccccctgaacttttgctgaggaagttaactcccttaaagttaaggggaaatggggggattacctggtatagacccgtatgtcttcagaacttgcttgagctcaaagcaaattatcctgatgcaaaactactggtaggtaatacagaggtgggaatcgaaatgagattgaagaggttacagtatcaggtgctgatctctgttgctcaagtcccagaactcaacgcattgaatgtcaatgacaatgggatagaggttggttcagctttgagactttctgaactcctgaggttattcaggaagatagtaaaggagcgtcctgcacatgaaacatcagcatgcaaggcttttatcgaacagctgaagtggtttgctgggacacaaataagaaatgttgcttgcattggtggaaacatctgtacagctagtccaatatctgatttaaatcctctttggatggcttcaagagcagagtttcggataaccaactgcaatggagatgttaggtctatacctgcaaaagatttcttcctcggttatcgtaaagtggatatggggagcaacgagatcttgttgtcggtattccttccatggacaagacccttagagtatgtgaaagaatttaagcaggcccatcgcagggatgatgatatagctattgtcaatggtggaatgcgtgtgtttcttgaagacaagggtcaacaattgttcgtttctgatgcatccattgcttatggaggtgtggctcctctttctttgtgtgcgagaaagactgaagagtttctaattggaaagaattggaataaagatcttctgcaggatgcgcttaaggtcatacagagcgatgtcgtgattaaggaagatgctcctgggggaatggtggagtttcggaaatctctaaccctaagcttcttctttaaatttttcttatgggtttctcataatgtcaataatgcaaattctgcgatagagaccttcccaccctcccatatgtcagctgtgcaacctgttcctcggttatctagaattggaaaacaagactatgagacagtaaagcagggaacatctgttggctcgtcggaggtgcatctttcagcgagaatgcaggtcacaggggaagcggaatatactgatgatactccagtacctcctaataccttacatgctgcctttgtgctaagcaaagtgccacatgcccgcatcctttcaatcgatgattcggcagccaaatcttcatctggttttgttggtctgtttcttgccaaagatattcctggggataatatgattggaccaattgttcccgacgaagaattatttgctacagatgtggtcacgtgtgtgggacaagtcattggtgtggtcgtcgcggatacacatgaaaatgcaaaaactgcagcaggaaaagttgacgttaggtatgaggaactaccagcaatattatcaatcaaggaggctattaatgctaaaagtttccatccgaacacagagaaaaggctaagaaaaggggatgtcgagctgtgttttcaatctggtcagtgtgacagggtaatagagggagaggttcaaatgggtggtcaggaacacttctacttggagcctaatggtagtttggtttggacagtagatgggggcagcgaagttcatatgatttcatccacacaggctcctcaaaagcaccagaaatatgtgtcgcatgttcttggtcttccgatgtctaaagtggtatgcaaaaccaaacgaattggtggtggctttggtggtaaagaaacaagatcagctttcattgctgcggcagcttctgttccttcctacctattgaatcgacctgtgaaactcatactggaccgagatgtggacatgatgataactggtcatcgtcatagttttcttggaaagtacaaggttggatttacgaacgaaggaaaaatattggcgttggaccttgaaatttacaacaatggtggcaactctttggatctctccctttctgttcttgaacgtgccatgtttcactcggataacgtttatgagatcccgcatgtaaggattgttgggaatgtttgctttactaattttcctagcaacactgctttccgagggtttggaggcccccaaggtatgcttataactgaaaactggattcaaagaatcgcagctgagcttaataaaagccctgaagaaatcaaagagatgaactttcaagtggaaggatcagtcacccattactgtcagactcttcagcactgcacattgcatcagctctggaaagagctgaaagtatcgtgcaacttcttaaaggcccgcagagaagctgacgaatttaatagtcataatcggtggaaaaagcgtggtgtagctatggttcccacaaaatttggcatatcatttaccacaaagttcatgaatcaggccggagctcttgttcatgtttacactgacgggactgttttagtgactcatggtggtgtggagatgggtcaaggattgcatacaaaggtcgctcaagttgctgcatccgcctttaacattccacttagctcagttttcgtgtcagagacaagcactgacaaggttcctaatgcgtcaccaactgctgcttctgcgagctctgatatgtatggtgctgcagttttagacgcttgtgagcagattatagcaagaatggaacctgttgcatctaagcacaatttcaacacatttactgagctagtaagtgcctgctactttcaacggatagacctatcagctcatggttttcacatagttcctgatcttgggtttgactggatatctggaaaagggaacgcctttagatattacacatatggagctgcctttgcggaagttgagatagatacattgactggtgatttccacacaagagcagctgatataatgttggacctcggatattctcttaacccagccattgatgttggacaaatagaaggagcgtttgtacaaggactgggttgggtagctttagaagaactcaaatggggagatgcagctcataaatggattaaaccaggaagtttactcacttgcggacccggaaactacaaaataccttccatcaacgacatgccgttcaacctcaatgtttcgcttctcaaggggaatccgaatacaaaggcaatacattcatctaaagcagtgggtgagccaccattctttcttgcatcatcggttttctttgcgataaaggaagctattaaagcggctagaaccgaggtgggtctcacagactggttccctctagagagtccagccactccagagcgtatcaggatggcttgtttcgacgaattttcagctccttttgtaaattcagatttctaccctaatcttagtgtttga

SEQ ID NO: 115885 - protein, 1361 aa, Arabidopsis thaliana
MGSLKKDGEIGDEFTEALLYVNGVRRVLPDGLAHMTLLEYLRDLGLTGTKLGCGEGGCGACTVMVSSYDRKSKTSVHYAVNACLAPLYSVEGMHVISIEGLGHRKLGLHPVQESLASSHGSQCGFCTPGFIMSMYSLLRSSKNSPSEEEIEECLAGNLCRCTGYRPIVDAFRVFAKSDDALYCGVSSLSLQDGSTICPSTGKPCSCGSKTTNEVASCNEDRFQSISYSDIDGAKYTDKELIFPPELLLRKLTPLKLRGNGGITWYRPVCLQNLLELKANYPDAKLLVGNTEVGIEMRLKRLQYQVLISVAQVPELNALNVNDNGIEVGSALRLSELLRLFRKIVKERPAHETSACKAFIEQLKWFAGTQIRNVACIGGNICTASPISDLNPLWMASRAEFRITNCNGDVRSIPAKDFFLGYRKVDMGSNEILLSVFLPWTRPLEYVKEFKQAHRRDDDIAIVNGGMRVFLEDKGQQLFVSDASIAYGGVAPLSLCARKTEEFLIGKNWNKDLLQDALKVIQSDVVIKEDAPGGMVEFRKSLTLSFFFKFFLWVSHNVNNANSAIETFPPSHMSAVQPVPRLSRIGKQDYETVKQGTSVGSSEVHLSARMQVTGEAEYTDDTPVPPNTLHAAFVLSKVPHARILSIDDSAAKSSSGFVGLFLAKDIPGDNMIGPIVPDEELFATDVVTCVGQVIGVVVADTHENAKTAAGKVDVRYEELPAILSIKEAINAKSFHPNTEKRLRKGDVELCFQSGQCDRVIEGEVQMGGQEHFYLEPNGSLVWTVDGGSEVHMISSTQAPQKHQKYVSHVLGLPMSKVVCKTKRIGGGFGGKETRSAFIAAAASVPSYLLNRPVKLILDRDVDMMITGHRHSFLGKYKVGFTNEGKILALDLEIYNNGGNSLDLSLSVLERAMFHSDNVYEIPHVRIVGNVCFTNFPSNTAFRGFGGPQGMLITENWIQRIAAELNKSPEEIKEMNFQVEGSVTHYCQTLQHCTLHQLWKELKVSCNFLKARREADEFNSHNRWKKRGVAMVPTKFGISFTTKFMNQAGALVHVYTDGTVLVTHGGVEMGQGLHTKVAQVAASAFNIPLSSVFVSETSTDKVPNASPTAASASSDMYGAAVLDACEQIIARMEPVASKHNFNTFTELVSACYFQRIDLSAHGFHIVPDLGFDWISGKGNAFRYYTYGAAFAEVEIDTLTGDFHTRAADIMLDLGYSLNPAIDVGQIEGAFVQGLGWVALEELKWGDAAHKWIKPGSLLTCGPGNYKIPSINDMPFNLNVSLLKGNPNTKAIHSSKAVGEPPFFLASSVFFAIKEAIKAARTEVGLTDWFPLESPATPERIRMACFDEFSAPFVNSDFYPNLSV

SEQ ID NO: 115886 - DNA, 4062 bp, Arabidopsis thaliana
  CDS (1)..(4062)
atggagcagaacgagttcatggaggcaataatgtacgttaatggtgttcgtagagttttgcctgatggattagctcacatgacgcttctcgaatatctcagagatttaggattgaccgggacaaagctcggatgcggcgaaggtggttgtgggtcttgcaccgtgatggtgtctagttatgaccgagagtcaaagacatgtgtgcattatgctgtcaacgcttgcctagcacctctctactctgtagaagggatgcatgtaatatccattgaaggagttggtcatcggaaacttggcttgcaccctcttcaggagtcattggcatcttcgcatggttctcaatgtgggttttgtactcccggttttgtcatgtcgatgtatgccttgttgaggtcaagtaaaaactcaccttctgaggaggagattgaagaatgccttgcaggaaatttgtgtcgttgtactggttatagacccatcattgatgcgtttcgggtttttgcaaaatctgatgatgctctatacagtggtttatcttcacttagccttcaggacggttcaaatatttgtccatctactggcaaaccttgttcttgtggatcaaaaacaacaagtgaagcagctacttgtaatgaagatagatttcagtcaatctcttatagtgatatagatggagctaagtatacagataaggagcttatttttccccctgaacttctgctgaggaagttagctcccttaaagttagggggaaatgaggggattacctggtatagacccgtaagtcttcagaacttgcttgaactcaaagcaaattttcctgatgcaaaactactggttggtaacacggaggtgggaatcgaaatgagactaaagaggttacagtatccggtgctaatctctgctgctcaagtcccagaactcaacgcattgaatgtcaatgacaatgggatagaggttggttcagctttgagactttctgaactcctgaggttattcaggaaggtagtaaaggagcgtcctgcacatgaaacatcagcatgcaaggcttttatcgaacagctgaagtggtttgctgggacacaaataagaaatgttgcttgcattggtggaaacatctgtacagctagtccaatatctgatttaaatcctctttggatggcttcaagagcagagtttcggataatcaactgcaatggagatgttagatctatacctgcaaaagatttcttccttggctatcgtaaagtggatatgggaagcaacgagatcttgttgtcggtattccttccatggacaaggcctttagagtatgtgaaagaatttaagcaggcccatcgcagggatgatgatatagctattgtcaatggtggaatgcgtgtgtttcttgaagagaaagggcaacaattgtttgtttctgatgcatctattgtttatggtggtgtggctcctctttcgttgcgtgcaagaaacactgaggaacttctaattggtaagaattggaataaatgtcttctgcaagacgcacttaaggtcatacagagtgatgtcttgattaaggaaggtgctcctgggggaatggtggagtttcgcaaatctctaaccctaagcttcttctttaaatttttcttatgggttactcatcatgtaaataatgtaaatcccactatagagacctttccaccctcgcatatgtcagctgtgcaacttgttcctcggttctctagaattggaaaacaagactatgagacagtaaaacagggtacatctgttggcttgccagaggtccatctttcggcaagaatgcaggtcacaggggaagcagaatatactgatgataccccattgccgccttgtaccttgcatgctgctttagtgctaagtaaagttccacatgcccgcatcctttcagttgatgattcggcagccaaatcttcatctggttttgttggtctgtttcttgccaaagatgttcccgggaataatatgattggaccaattgttgccgacgaagaattatttgctacagacgtggtcacgtgtgtgggacaagtcattggtgtgcttgtcgcggatacacatgaaaatgcaaaaactgcagcaagaaaagttgacgttaggtatcaggaactgccagcaatattatcaatcaaggaggcgattaatgctaaaagtttccatccgaacacagagagaaggcttagaaaaggggatgtcgagctgtgctttcaatctggtcagtgtgacagaataatagagggagaggttcaaatgggtggtcaggaacacttttacttggagcctaatggtagtttggtttggactatagatggaggcaacgaagttcatatgatttcatccacacaagctcctcaacagcaccagaaatatgtgtctcatgttcttggtcttccaatgtctaaagtggtatgcaaaaccaaacgacttggtggtggctttggtggtaaggaaacaagatcagctttcattgctgcagcagcttctgttccttcctacctattgaatcgacccgtgaaactcatactggacagagatgtggacatgatgattactggtcatcgccatagtttcgttggaaagtacaaggttggatttacgaacgaagggaaaatattggcgttggaccttgaaatctacaacaatggtggaaactctatggatctctctctttctaatcttgaacgtgccatgtttcactcggataacgtttatgagatcccacatgtgaggatcgttgggaacgtttgctttactaattttcccagcaacaccgctttccgagggtttggagggccccaaggtatgcttataactgaaaattggattcagagaattgcagctgagctggataaaatccctgaagaaatcaaagagatgaactttcaagtggaaggatcgatcacacattactttcagtcacttcagcactgcacattgcaccaactctggaaagaactgaaagtatccagcaacttcctaaagactcgtagagaagcggacgagtttaatagtcataatcggtggaaaaagcgtggtgtagctatggttcccacaaaatttggcatatcctttaccacaaagttcatgaatcaggccggtgctcttgttcacgtttacaccgatgggactgttttggtgacacatggaggtgttgagatgggccaagggttgcatacaaaggttgctcaagttgctgcaacggcctttaacattctccttagttcggtttttgtgtcagaaacaagcaccgacaaggttcctaatgcgtcacctactgctgcttctgcgagttctgatatgtatggtgctgcagttttagacgcttgtgagcagattatagcaagaatggagcctgttgcatctaaacacaatttcaacacattctctgagctagcaagtgcctgctactttcaacgtatagacctatcagctcacggttttcacattgttccagaacttgaatttgattgggtatctggaaaagggaacgcatatagatattacacatatggagctgcctttgctgaagttgagatagatacattgactggtgattttcacacaagaaaagcagacataatgttggatctcggatattctcttaacccaaccattgatattggacaaatagaaggagcgtttgtacaaggactaggttgggtagctctagaagaactcaagtggggagatgcagctcataaatggattaaaccaggaagtttactcacttgcggacccggaagctacaaaataccttccatcaacgacatgccgttccaactgaatgtttctcttctcaagggtaatccaaatgcaaaggcaatacattcatctaaagcagtgggtgagccaccgttctttcttgcagcatcagccttctttgcaataaaggaagcaatcaaagcggctagaagcgaggtaggtctcaccaactggttccctctggagactccagccactccagagcgtatcaggatggcttgtttcgacgagttttcagctccttttgcaaattcagatttctgcccaaagcttagtgtttga

SEQ ID NO: 115887 - protein, 1353 aa, Arabidopsis thaliana
MEQNEFMEAIMYVNGVRRVLPDGLAHMTLLEYLRDLGLTGTKLGCGEGGCGSCTVMVSSYDRESKTCVHYAVNACLAPLYSVEGMHVISIEGVGHRKLGLHPLQESLASSHGSQCGFCTPGFVMSMYALLRSSKNSPSEEEIEECLAGNLCRCTGYRPIIDAFRVFAKSDDALYSGLSSLSLQDGSNICPSTGKPCSCGSKTTSEAATCNEDRFQSISYSDIDGAKYTDKELIFPPELLLRKLAPLKLGGNEGITWYRPVSLQNLLELKANFPDAKLLVGNTEVGIEMRLKRLQYPVLISAAQVPELNALNVNDNGIEVGSALRLSELLRLFRKVVKERPAHETSACKAFIEQLKWFAGTQIRNVACIGGNICTASPISDLNPLWMASRAEFRIINCNGDVRSIPAKDFFLGYRKVDMGSNEILLSVFLPWTRPLEYVKEFKQAHRRDDDIAIVNGGMRVFLEEKGQQLFVSDASIVYGGVAPLSLRARNTEELLIGKNWNKCLLQDALKVIQSDVLIKEGAPGGMVEFRKSLTLSFFFKFFLWVTHHVNNVNPTIETFPPSHMSAVQLVPRFSRIGKQDYETVKQGTSVGLPEVHLSARMQVTGEAEYTDDTPLPPCTLHAALVLSKVPHARILSVDDSAAKSSSGFVGLFLAKDVPGNNMIGPIVADEELFATDVVTCVGQVIGVLVADTHENAKTAARKVDVRYQELPAILSIKEAINAKSFHPNTERRLRKGDVELCFQSGQCDRIIEGEVQMGGQEHFYLEPNGSLVWTIDGGNEVHMISSTQAPQQHQKYVSHVLGLPMSKVVCKTKRLGGGFGGKETRSAFIAAAASVPSYLLNRPVKLILDRDVDMMITGHRHSFVGKYKVGFTNEGKILALDLEIYNNGGNSMDLSLSNLERAMFHSDNVYEIPHVRIVGNVCFTNFPSNTAFRGFGGPQGMLITENWIQRIAAELDKIPEEIKEMNFQVEGSITHYFQSLQHCTLHQLWKELKVSSNFLKTRREADEFNSHNRWKKRGVAMVPTKFGISFTTKFMNQAGALVHVYTDGTVLVTHGGVEMGQGLHTKVAQVAATAFNILLSSVFVSETSTDKVPNASPTAASASSDMYGAAVLDACEQIIARMEPVASKHNFNTFSELASACYFQRIDLSAHGFHIVPELEFDWVSGKGNAYRYYTYGAAFAEVEIDTLTGDFHTRKADIMLDLGYSLNPTIDIGQIEGAFVQGLGWVALEELKWGDAAHKWIKPGSLLTCGPGSYKIPSINDMPFQLNVSLLKGNPNAKAIHSSKAVGEPPFFLAASAFFAIKEAIKAARSEVGLTNWFPLETPATPERIRMACFDEFSAPFANSDFCPKLSV

SEQ ID NO: 115888 - DNA, 3165 bp, Bacillus halodurans C-125
  CDS (1)..(3165): transl_table=11
atgagtcgaagtattggaaaaagcatttatcgtaaagaggcaatggcaaaagtgacaggggctgcaaaatatacggcagactgggcgacatccgagatgctacatatcaagcttgtcacaagcccttatgcccatgcactcataaaagatattgacttaaccgaagcctatcaagtaccgggtgttcggcgaattgtcatcggacagccatttcctcttactggagaagaactacaagatcgccctccgatcgcctatcataaagtacgttaccacggggagcctgttgcggcggttgttgcagatgatccagtgcaagcaaaaaaagcagcggaacaggttaaggttacctatgaaccccttcccgttgtgaactcggtcaccgatgcgcttcatcccaacgcggtgttggttcatgaccatgtcgaaacctatgaacggattgaacatgtatatcctgaagcaaacagcaacatagcagaccatacaaaaatccgcaaaggaaacatagaagaaggctgggcgcaaagtgatgtgacggtcaatgctcacttttcgttttcaccctcggaccatatcgcgatggaaactcgctgtgttacagcggaaatctgcccagacgggaaagttgtctttacctcatcgacccaatcaccctatatcatcaaaaagttaatgaaaaaatactttgagattgatgaagggagcgtgattgtgcacactccgttagtaggagggggctatggcgggaaggtagcggtccaacttgaactcattgcttatatggcaacgctcgcagtcggtggaagaaaggtgaaacttttaaatacacgggaggaggatatgattacatcgcccgtgcacatcgggctcgaagcagatatcaaactaggagcatcaaaagatggatttttaaaagcagccgaaatcttgtacaagtttgatacaggggcctattctgataaaggggcgacgatcagccgagcggcggctgtcacttgtacaggcccatatcacatcgaaaacatttggtgcgattccctttgcgtctatacaaaccatccgtatgcgacagcttacagaggattcagtcactctgagctactatttgttttcgagagagcgatggatcaactcgcacgaaggctagagatggacccgttagaattacggctgaaaaatgccatcttaccagggcatacaaccccgacgcaaatgcgattaaatcaaagcactgtcggagacttgccgcagtgtatcaataaattgaaaacgttaatgaattggacagaaggccaagttattccaattaatgaccgaaaaatacgggtgaaaggcgtaagctgtctttggaaaacatcaacaattgattcacaggcaagctccggtgttgtcctaatctttaatgcagacggaagcatcaacgtcctatcgggtctagttgaaatcgggacagggacaaaaacaattctggctcaattgcttgcagaaaagttgagcatggatgtggataagatccacgtcaaaatggaagtagacacccaatcgatgccagagcattggaaaaccgtggcaagtagagggacgttaatggcgggaagggcgttattacatgctgcagacgacctcattcgtcaattaaaggatttggcctcacgggttctcatctgctcccctgaggatttagaagttggaaatgagagggtgtacgttcgtgatgaacctgacacatttattaaagtctccgatatttgtcatggctataaatacacgagtggttacgccatcggggcaccgattgttggaagaggtcactacacattaaggcacatcactcacctggagcatgatactggggtcggaaagccaggacctgaatatgctgttggtgcccaaggggtagaagtggaatttgacctgcgagactatacgtataaaattttgaaggcttacgccgtaatcgatatcggaagggtgttaaatgaaaaggcggcaaaagggcaagtaatgggggcgatgagcatggggttaaactttggtagcagtgagacattcgtgttcaatgaggatggtcaagtgttaaatcctcgcctgcgaacctatacaccgtttcgttatggtgaccaccctgaatatatagtggattttgtcgagactccccatattgatggaccctatggcgggcgtggcatcggtgaacacggcttaatcggcatgccggcagcattggccaacagtctgtcacttgctgcaggtgtggatctcaatcagctgccattaactccggagctcatttggcaagagaaaaaggcggtcctcctcatgatttcgtttgaatttgaatattacaaaccagcctccatcatagaagcgacaacattatttcaatcgttggatcaagcggggaaagacccgatgtatgtttcgggcgctaccgaactcattacgctagggcgagtcaaccaactaaaatcaggtgccatcattgatctgaaaggaatttccgaatgcttcgaactaaaaatggacgggacaaatattattttaggtgccgctcaatcattaacaaaaatccgtgatgcggggctctttccgtttttaaataaagcaattgttgaaattgccgatcatacggcacgcaacaaaattacgttaggtgggaacctttgcgcaaatattatttatcgggaaacagccctgccgttactactaacgaatagtcaggttgtgattgccagtcgtacaggcttgaagacgcagcctttcattgagatgttccaaggacggctgaccttagaaaaaggagagtttctcgttcaagtcattgtcccacagtccgagctagatgttccgttcgtctccgtaaaaaaacgaaggcaatgggatgtgggctacccactgcttacgactgctgcggtcaagcggaacgggcaaattcacgttgcgtttagcgggctttgcgcttttccgtttcgagatcaaaccatggagcaatggttaaatgatcatcaattatctacagaacaacggattgaaaaagcgattgagcaagtgccggcgccgattgtaaatgacgtgcatggatcatccgagtaccgaacgtttgtcctaaaaaacacattgactgatgtactgaatgagttggagggcgaaggtcatgtataa

SEQ ID NO: 115889 - protein, 1054 aa, Bacillus halodurans C-125
MSRSIGKSIYRKEAMAKVTGAAKYTADWATSEMLHIKLVTSPYAHALIKDIDLTEAYQVPGVRRIVIGQPFPLTGEELQDRPPIAYHKVRYHGEPVAAVVADDPVQAKKAAEQVKVTYEPLPVVNSVTDALHPNAVLVHDHVETYERIEHVYPEANSNIADHTKIRKGNIEEGWAQSDVTVNAHFSFSPSDHIAMETRCVTAEICPDGKVVFTSSTQSPYIIKKLMKKYFEIDEGSVIVHTPLVGGGYGGKVAVQLELIAYMATLAVGGRKVKLLNTREEDMITSPVHIGLEADIKLGASKDGFLKAAEILYKFDTGAYSDKGATISRAAAVTCTGPYHIENIWCDSLCVYTNHPYATAYRGFSHSELLFVFERAMDQLARRLEMDPLELRLKNAILPGHTTPTQMRLNQSTVGDLPQCINKLKTLMNWTEGQVIPINDRKIRVKGVSCLWKTSTIDSQASSGVVLIFNADGSINVLSGLVEIGTGTKTILAQLLAEKLSMDVDKIHVKMEVDTQSMPEHWKTVASRGTLMAGRALLHAADDLIRQLKDLASRVLICSPEDLEVGNERVYVRDEPDTFIKVSDICHGYKYTSGYAIGAPIVGRGHYTLRHITHLEHDTGVGKPGPEYAVGAQGVEVEFDLRDYTYKILKAYAVIDIGRVLNEKAAKGQVMGAMSMGLNFGSSETFVFNEDGQVLNPRLRTYTPFRYGDHPEYIVDFVETPHIDGPYGGRGIGEHGLIGMPAALANSLSLAAGVDLNQLPLTPELIWQEKKAVLLMISFEFEYYKPASIIEATTLFQSLDQAGKDPMYVSGATELITLGRVNQLKSGAIIDLKGISECFELKMDGTNIILGAAQSLTKIRDAGLFPFLNKAIVEIADHTARNKITLGGNLCANIIYRETALPLLLTNSQVVIASRTGLKTQPFIEMFQGRLTLEKGEFLVQVIVPQSELDVPFVSVKKRRQWDVGYPLLTTAAVKRNGQIHVAFSGLCAFPFRDQTMEQWLNDHQLSTEQRIEKAIEQVPAPIVNDVHGSSEYRTFVLKNTLTDVLNELEGEGHV

SEQ ID NO: 115890 - DNA, 2400 bp, Mycobacterium tuberculosis CDC1551
  CDS (1)..(2400): transl_table=11
atgacaacgatcgagtcacgccctccgtcgccggaagacctagccgacaacgctcagcagccgtgcgggcacggccggatgatgcgcaaagaggacccgcgattcatccgcgggcgcggaacctacgtcgacgacgtcgcgctgccgggcatgttgcatctggccatcctgcgttcgccgtatgcgcatgcccgcatcgtgcgcatcgatgtgactgccgcgcaggcacatccgaaagtcaaggccgtggtgaccggcgccgatctggccgccaagggcctggcttggatgccgacactagccaacgacgtacaagccgtgctggccaccgacaagacgcgcttccagggccaagaggtggcgttcgtggttgccgaggaccggtattcggcccgcgatgcatgcgagttggtcgacgtcgactacgaaccgcgggatcccgtcgtggatgcccgcacggcgctggacccgtcggcgccggtcatccgcaccgatctggagggaaagagcgacaatcacatcttcgactgggagaccggcgacgcggcggcgaccgaggcggtgttcgccaaggccgacgtcgttgtccagcaggagatcgtctacccgcgggtgcacccggcgccgatggaaacctgtggcgcggtggccgatctagatccggtcaccggaaagctgacgctgtggaccaccagccaggcgccgcacgcgcatcgcacgctatacgcgctggtggccgggttgcccgaacacaagattcgggtgatctcgcccgacatcggcggcggcttcggcaacaaggtgccgatctatcccggttatgtctgtgccattgtcgcgtcgctgctgctggacaagccggtcaaatggatggaggaccgcagcgagaacctgacgtccaccggattcgcccgcgactacatcatggtcggcgagattgccgccaaccgtgacggcaagatcctggcgatccggtccaatgtgctggccgaccatggtgcgtttaacgcccaggccgcgccggcgaagtacccagccgggttcttcggggtgttcaccggcagctacgacatcgaggccgcctactgtcacatgaccgcggtgtataccaacaaggcgcccggcggggtcgcctacgcgtgttcgttccgcatcaccgaagcggtctacttcgtcgagcggctggtggactgcctggccttcgagctgaagatggatccagccgagctgcgcttgcggaatctattgcggcccaaccagtttccgtatcagagcaagactggttgggtgtacgactcgggcgactacgagaccacaatgcgtaaggcgatgaacatgatcggctacgaggcgttacgcgccgaacaaaagcagcggcgagcgcgcggcgagctgatgggcatcgggatgtcatttttcaccgaggccgtgggcgccgggccgcgcaaggacatggacatcctcggcctgggcatggccgacggctgcgagctgcgcgtgcacccgacgggcaaagccgtgctgcggctttcggttcagacccagggccagggccacgagacgacgttcgcgcagatcgtcgccgaggagctggggattgcgcccgacgacatcgaggtggtgcacggcgacaccgaccagacaccgttcgggttgggcacctacggcagccggtccacacccgtctcgggtggtgccgcggcgctggtcgcccgcaaggtgcgcgacaaggccaagatcatcgcctcgggcatgctcgaggtttcggtcgccgacttacagtgggagaaagggaagttccacgtcaagggtgacccgtcggccgcggtgaccatcgccgacatcgcgatgcgcgcgcacggcgccggcgatctgcccgagggcatcgagggcgggctggatgccgaggtctgctacaacccgtcgaatctgacctacccgtacggcgcctacttctgtgtggtcgacatcgacccgggcaccgcggtggtgaaggtgcggcgctttttggccgtcgatgattgcggaacccggatcaacccgatgatcatcgagggtcaggtacacggcggcatcgtcgacggcatcggcatggcgctgatggagatgattgccttcgacgaggacggcaactgtctgggcggatcgttgatggactacctgatcccgaccgcgctcgaggtgccacacctagagaccgggcacaccgtgaccccgtcgccgcatcacccgatcggcgccaagggcatcggtgagtcggccacggtgggttccccgccggcggtggtgaacgcggtggtggatgcgttggcgccgttcggggttcggcacgccgacatgccgttgacgccgtcgcgggtctgggaggccatgcagggccgggccacaccaccgatctag

SEQ ID NO: 115891 - protein, 799 aa, Mycobacterium tuberculosis CDC1551
MTTIESRPPSPEDLADNAQQPCGHGRMMRKEDPRFIRGRGTYVDDVALPGMLHLAILRSPYAHARIVRIDVTAAQAHPKVKAVVTGADLAAKGLAWMPTLANDVQAVLATDKTRFQGQEVAFVVAEDRYSARDACELVDVDYEPRDPVVDARTALDPSAPVIRTDLEGKSDNHIFDWETGDAAATEAVFAKADVVVQQEIVYPRVHPAPMETCGAVADLDPVTGKLTLWTTSQAPHAHRTLYALVAGLPEHKIRVISPDIGGGFGNKVPIYPGYVCAIVASLLLDKPVKWMEDRSENLTSTGFARDYIMVGEIAANRDGKILAIRSNVLADHGAFNAQAAPAKYPAGFFGVFTGSYDIEAAYCHMTAVYTNKAPGGVAYACSFRITEAVYFVERLVDCLAFELKMDPAELRLRNLLRPNQFPYQSKTGWVYDSGDYETTMRKAMNMIGYEALRAEQKQRRARGELMGIGMSFFTEAVGAGPRKDMDILGLGMADGCELRVHPTGKAVLRLSVQTQGQGHETTFAQIVAEELGIAPDDIEVVHGDTDQTPFGLGTYGSRSTPVSGGAAALVARKVRDKAKIIASGMLEVSVADLQWEKGKFHVKGDPSAAVTIADIAMRAHGAGDLPEGIEGGLDAEVCYNPSNLTYPYGAYFCVVDIDPGTAVVKVRRFLAVDDCGTRINPMIIEGQVHGGIVDGIGMALMEMIAFDEDGNCLGGSLMDYLIPTALEVPHLETGHTVTPSPHHPIGAKGIGESATVGSPPAVVNAVVDALAPFGVRHADMPLTPSRVWEAMQGRATPPI

SEQ ID NO: 115892 - DNA, 2235 bp, Sulfolobus tokodaii str. 7
  CDS (1)..(2235): transl_table=11
atgaggtatgttggtcaagcagttaaaagactttatgatgataagttcgtaaccggaaaaagtacctatgtggatgatattcaaatatcagcactatatgccggatttgtaagaagtccctattcacatgctaaaataaagagtattgatgttacagacgcgttaaaagtccccggtatagttgctgtatacacttacaaggatttagcaccgttaataaaagacggtataagaatttggaccacatatgaagatccgaggatgtggaagtttgttcccagaaagccattagcagatggtaaagttagatttgccggtgagcctgtagcaatagttattggtgtaaataaatatgttgttagagatgctattgataaagtgaacgttgattatgagaaattaccgccagtagtaaaaatggaagaggctttagaagataaagtaataatccacgaagagttaaaaactaatgtagcctttgatcaaacctttaatggtggaaatgtagaagaagcttttaagcaagcagataaagttatcccagttgaaataaccaataatagattaattccatcaccaatggaaccgagaggtatagtttcacgctatgaaggcggaacgttaacaatatggtattctactcaagttcctcatttagctaggagtgaatttgcgagaatatttggagttccagctagtaaaataagagtaataatgccagatgttggcggagcttttggaagcaaagttaactttatgccagaagaagttagcgttatagcatcctcaataaagttaggaagagctgtaagatggacagctaccagaagcgaggaaatgttagcatcagaggccagacataatacgtttaagggagaagtagcagtaaagaatgacggtacggtattaggtataaggggagacttactagttgatttaggtgcttatttaacgcttactgcaccattacaacctgcaataatcccactaatggtacctggaccttataagattaaaggcgttagtataagaagtagggctgtttatactactacaccaccaattacgatgtataggggtgcgagtagaccagaggcaacatttatcatagagagaattatgagtattgtagccgatgaattaaagttagacgacgtaactattagagagaggaatttggtaagggcaaatgaaatgccatatacaaatccctttgggctgaaatacgattctggtgattacttggctttactaaaggatggaatacagaaacttcaatactatgaattaaagaagtgggctgaagaagagagaaagaagggaagaaaagtaggagttggtatggcgtattacctggaaattagtggttttggtccttgggaatttggagaaatcagagtcgatgaaaacggtgatgtattagttatcactggaggaactcctcacggtcaaggaacagaaacggcaatagcacaagtagttgcagatactttacaaatagacattagtagaataaaggtaatatggggagatacagaaacagtagtagcaagtatgggaacttatggttcaagaacagctgctgctgcagctagtgcggctatggttgcttcaaaggaagtattagaaaaaatgaagagaattgctgctgggttattaaatgcagatgtagaagaaattgagtatgaaagtggagaattctataataagaaagataagagtaaaaaagtaagttggaatgatgtagctagaaacggttattatggtaaagagttgggaatatcagcccaaataatcttacctggtgatgttacattcccgtatggtgttcatgtagcggttgttgaagtcgatgactatggtattcctagagtattaacatacaaagcatatgatgatataggtaatgtaataaatccggcgttagctgaaggtcaaatacacgggggtggcgtgcaagctgttggacaagcattatatgaagaggctatcattaacgaagatggacaactcactgttacttatgctgattactttataccgacagctgttgaagcaccaaagttcgagagctacttcgttgaaaaacctcacacatcaacatggcctacaggtgctaaaggagtaggtgaagccgcattaatagttggaccagcagtaattatcagagcattagaggatgcaacagggaagaggtttacaaagacacccgttagacctgaagagatattatga

SEQ ID NO: 115893 - protein, 744 aa, Sulfolobus tokodaii str. 7
MRYVGQAVKRLYDDKFVTGKSTYVDDIQISALYAGFVRSPYSHAKIKSIDVTDALKVPGIVAVYTYKDLAPLIKDGIRIWTTYEDPRMWKFVPRKPLADGKVRFAGEPVAIVIGVNKYVVRDAIDKVNVDYEKLPPVVKMEEALEDKVIIHEELKTNVAFDQTFNGGNVEEAFKQADKVIPVEITNNRLIPSPMEPRGIVSRYEGGTLTIWYSTQVPHLARSEFARIFGVPASKIRVIMPDVGGAFGSKVNFMPEEVSVIASSIKLGRAVRWTATRSEEMLASEARHNTFKGEVAVKNDGTVLGIRGDLLVDLGAYLTLTAPLQPAIIPLMVPGPYKIKGVSIRSRAVYTTTPPITMYRGASRPEATFIIERIMSIVADELKLDDVTIRERNLVRANEMPYTNPFGLKYDSGDYLALLKDGIQKLQYYELKKWAEEERKKGRKVGVGMAYYLEISGFGPWEFGEIRVDENGDVLVITGGTPHGQGTETAIAQVVADTLQIDISRIKVIWGDTETVVASMGTYGSRTAAAAASAAMVASKEVLEKMKRIAAGLLNADVEEIEYESGEFYNKKDKSKKVSWNDVARNGYYGKELGISAQIILPGDVTFPYGVHVAVVEVDDYGIPRVLTYKAYDDIGNVINPALAEGQIHGGGVQAVGQALYEEAIINEDGQLTVTYADYFIPTAVEAPKFESYFVEKPHTSTWPTGAKGVGEAALIVGPAVIIRALEDATGKRFTKTPVRPEEIL

SEQ ID NO: 115894 - DNA, 2346 bp, Sinorhizobium meliloti 1021
  CDS (1)..(2346): transl_table=11
atgggcgttgaaggcatcggcgcgcgggtggcgcgcaaggaagacaagcgcttcctgaccggcaaggggcgctatacggacgacatggtcgtgcccggcatgaaatatgcggttttcgtgcgcagcccgcatgcgcatgcgaccatcaggagcatcgacgcaacgtcggccaagtccatgcccggcgtgatcgacgtactcgacggcaagcagttgctggcggatgggatcggcaatctcatctgtggctggatgatccactcgaaggacggctcgccgatgcgcatgggcgcctggcggccgcttgcccacgagaccgtgcgctatgtcggcgatgcggtggcgatcgtggtcgccgacagtgttgcgcaagcgcgcgacgcggcggaggctgtggtcgtggattacgaaaccctgccggtcgtcaccgaaacgctccaggcacttggcgagggcgagccgcagatccatccggaagcgccgggcaatctgatcttcgattgggagcttggcgacgcgggcgcggccgatcaggcgatcgctgcggcggcgcacgtcacggaactgaagatcatcaacaaccgcctgtcgccgaatgcgatggagccgcgcgcgacgctcggaatctatgatgccggcgacgaccatttcacctgctacaccaccagccagaacccgcatcttgcccggctggtgatgagcgccttctacaatgtcgcgccggagaacaagctccgggtgatcgctcccgacgtcggtggcggcttcgggtccaagattttcatctatccggaagagatcgtctgtctgtgggcctctaagcgcaccggcgtgccggtgaaatggaccgcggaccgcaccgaggccttcctgacggacgcacacggccgcgaccatgtgtcgacggtgaagatggctttcgacagcagcaaccggatcaccgcgctcaaggtcgacactatagccaatctcggcgcctatatgtctctcttctcctcctgcgtgccgacctacctctatgcgacgctcctctccggacaatatgcaatcccggcgatccatgccaatgtccgcaccgtctataccaataccgcgccggtcgacgcctatcgcggcgccgggcggccggaggccacatacctcctggagcgcacgatcgagacggccgcgcgcgaactcggcatttcccccgcggaactccggcgcatcaacttcatccgcaccttcccccatcagacgccggtgatcatgaactatgacgcgggcgattacgaagcgtcgctcaggggggcgatggaggcggccgactgggacggtttcgccgcgcgcaaggcggaagccgagcggcggggaatgaagcgcggcatcggcatgagctgctatatcgaagcctgcggactggcgccttccgccgccgtcggttcgctcggcgccggcgtcggcctgtgggaatcggccgaggtcagggtcaacgcggtcggcaccatcgaggtgatgaccggctcgcacagccacggccaggggcacgaaacgaccttcgcccaggtggttgcggagcgtttcggcgtgccgatcgacagcgtcaacatcgtccatggcgatacggacaaggtgcagatgggcatgggaacctatggttcccgctccggcgccgtcggcatgtcggccgtcttcaaggcgctcgacaaggtcgaggccaaggcgaaaaggattgcggcccacatgatggaggcggacgagagcgacatcgtcatcgaagacggcgcgctcaaggtggccggtaccgacaggtcagtcccctggtcgcaggtggcgcttgcttcctatacggcccataacctgccgcccggaatggagcccggcctcaaggagggcgccttctacgatccgagcaacttcaccttcccggcgggttgctacatctgcgaagtggaggtggatccggaaaccggccggacgaagatcgtgcagttcgtcgcggcggacgatttcggcaatatcatcaacccgctgatcgtcgagggccaggtgcatggcgggctggcgcagggcatcggccaggcgctgctcgaaggggtgcattacgaccagagcggtcagctgctgacggcgagctacatggactacgcgatgccgcgcgccgacgacctgccttcgttcacggtgacaacctcgaatacgccctgcccgagcaacccgctcggcgtcaagggctgcggcgaggcgggcgcgatcggctcgccgccggcgctgatcaacgccatcacggacgcgatcggcaccaacgagctcaccatgccggcgaccccgcagaaggtctgggtcgcggtgcatagcgcgcattga

SEQ ID NO: 115895 - protein, 781 aa, Sinorhizobium meliloti 1021
MGVEGIGARVARKEDKRFLTGKGRYTDDMVVPGMKYAVFVRSPHAHATIRSIDATSAKSMPGVIDVLDGKQLLADGIGNLICGWMIHSKDGSPMRMGAWRPLAHETVRYVGDAVAIVVADSVAQARDAAEAVVVDYETLPVVTETLQALGEGEPQIHPEAPGNLIFDWELGDAGAADQAIAAAAHVTELKIINNRLSPNAMEPRATLGIYDAGDDHFTCYTTSQNPHLARLVMSAFYNVAPENKLRVIAPDVGGGFGSKIFIYPEEIVCLWASKRTGVPVKWTADRTEAFLTDAHGRDHVSTVKMAFDSSNRITALKVDTIANLGAYMSLFSSCVPTYLYATLLSGQYAIPAIHANVRTVYTNTAPVDAYRGAGRPEATYLLERTIETAARELGISPAELRRINFIRTFPHQTPVIMNYDAGDYEASLRGAMEAADWDGFAARKAEAERRGMKRGIGMSCYIEACGLAPSAAVGSLGAGVGLWESAEVRVNAVGTIEVMTGSHSHGQGHETTFAQVVAERFGVPIDSVNIVHGDTDKVQMGMGTYGSRSGAVGMSAVFKALDKVEAKAKRIAAHMMEADESDIVIEDGALKVAGTDRSVPWSQVALASYTAHNLPPGMEPGLKEGAFYDPSNFTFPAGCYICEVEVDPETGRTKIVQFVAADDFGNIINPLIVEGQVHGGLAQGIGQALLEGVHYDQSGQLLTASYMDYAMPRADDLPSFTVTTSNTPCPSNPLGVKGCGEAGAIGSPPALINAITDAIGTNELTMPATPQKVWVAVHSAH

SEQ ID NO: 115896 - DNA, 2319 bp, Sinorhizobium meliloti 1021
  CDS (1)..(2319): transl_table=11
atgaacacatatgaaaggatcgacagagacctgtccgaccgggacttcaccgtcgtgggcaagagcgtcaagcgttccgatactctggagaaggtcacggggacggccagatatgcaggcgacgtcgccttgcccggcatgctccacgccaagatgaagcgcagcaacatcgctcatgcgcgcatcaggagcatcgacacgagcaaggcgctggcgctcaagggcgtcaaggcggtgctgacgcacgaggacgtgccgcgcgttttgcatgcgggctcaccgcatccgcgctcggcatccgttaccaaggatcagtacatcctggatgacagggtgcgatattggggcgagggcgtcgccgcagtcgctgccgtcagcgaggaaatcgctgagcgcgcggtcgcgctcatcgaggtcgagtacgagcccttgcccggcctcttcaccatcgaagccgcatcggtgcccggcgctccgccgatccatgagaatggtctcgaccggaaccaggtgttgccgccggtcttcgtcacccgcggcgacgtcgataggggtttcgccgaagcggatctgatcctcgagcgcgaatacgatctcggccgcccgacaccggcctatatggagcccaatgtctgtgtcagccagtgggacggcaacggcaagctcaccatgtggacctcgacccagagcgcattcatggtccgcggcacgcttgccgaagtgctcggcgtgccgctgaacaaggtacgcgttatcgtcgatcacatgggcggcggcttcggcgcgaagcaggatctgtttcagaacgagttcctctgcgccctgctcgcgcgacagacggggcgtccggtcaagatggagttcagccgcaaggaaacgttcctcggcggccgctcgcgacaccccggcaagatatggctgaagcagggcttcaccaaagacggccggatcgtcgcacgcgaagccagggtcaccttcaactccggcgcctacggctcgcacggtccaggcgtcaccaatgtcggcaccgcagcgctgacctcgctctaccgttgcgagaatgtccggctggaaggccgctgcatctataccaattcgccgattgccggcgcctttcgcggctatggtgtggttcagacctactatgcgctcgacctcatgatggacgaggcggccgagaagctcggcttcgacccggccgagttcaagttgatgaacgcggtgcgcgagggcgacatcgcaccctccgggcacccgatcgtcggacacggcctgggggattgcatccgccgcgtcatggaggagacgaactggcacgaattgcgcaggcgggagaagccggaaaccgtcaagcgccgcgggatcgggatcggctgcgaaatgcacggatccagtgcctatccgggcatcaaggaacagggcaacgcaatcgtgaagatgaacgaggacggaacggtgacgctgatcaccggcaccgccggcctcggcaccggcgcgcatacggcgctttcgcagatcgtcgccgaggaactcggcgtgcccttcgaagccgtctcggtcgttcaaggggacaccgatatcgtcccctgggatatcggtgccttcgccagccacacgacctatctcggcggacgggcggctcagctcgcggccgccgacgtgcgcagacaagtgctcgaacacgccgcgcccatgctcaaggccgagcccgagaatctcgcgattcgggacggtttcgtggtcgtcaccaacggctccaaccgcagcatccggctttccgaggccgtcgggccgcaacgggggatgccggcggtgcaactggtcggcgtaggcacctacatgccgacgaagtcctactccttcgccgcccatttcgccgaagtcgaggtggacaccgagaccggcgaggtcgccgttctccaggtcgttccggtacatgagatcggcagggtcatccatccgatcgccgcggccggacagatcgagggcggcattcagcagggcatcggccacaccctcagcgaggattacgtcatcgaccttaccgacggacgttccctcaatccgagcttcgtcgattacaagatgcccctgtcgatggacatgccgtccatccgcaccatcatcctcgagacggcgccggatcccggaggtccctacggtgccaagggcgtcggcgaggatccgatcatcgcgatcgggcccgccatcgccaacgccatctacgacgccatcggcgtccgcttccaccactacccgataacgcccgagcaggtgttgaacgctctcaagtccaaagccaacgaaacgaggcagtga

SEQ ID NO: 115897 - protein, 772 aa, Sinorhizobium meliloti 1021
MNTYERIDRDLSDRDFTVVGKSVKRSDTLEKVTGTARYAGDVALPGMLHAKMKRSNIAHARIRSIDTSKALALKGVKAVLTHEDVPRVLHAGSPHPRSASVTKDQYILDDRVRYWGEGVAAVAAVSEEIAERAVALIEVEYEPLPGLFTIEAASVPGAPPIHENGLDRNQVLPPVFVTRGDVDRGFAEADLILEREYDLGRPTPAYMEPNVCVSQWDGNGKLTMWTSTQSAFMVRGTLAEVLGVPLNKVRVIVDHMGGGFGAKQDLFQNEFLCALLARQTGRPVKMEFSRKETFLGGRSRHPGKIWLKQGFTKDGRIVAREARVTFNSGAYGSHGPGVTNVGTAALTSLYRCENVRLEGRCIYTNSPIAGAFRGYGVVQTYYALDLMMDEAAEKLGFDPAEFKLMNAVREGDIAPSGHPIVGHGLGDCIRRVMEETNWHELRRREKPETVKRRGIGIGCEMHGSSAYPGIKEQGNAIVKMNEDGTVTLITGTAGLGTGAHTALSQIVAEELGVPFEAVSVVQGDTDIVPWDIGAFASHTTYLGGRAAQLAAADVRRQVLEHAAPMLKAEPENLAIRDGFVVVTNGSNRSIRLSEAVGPQRGMPAVQLVGVGTYMPTKSYSFAAHFAEVEVDTETGEVAVLQVVPVHEIGRVIHPIAAAGQIEGGIQQGIGHTLSEDYVIDLTDGRSLNPSFVDYKMPLSMDMPSIRTIILETAPDPGGPYGAKGVGEDPIIAIGPAIANAIYDAIGVRFHHYPITPEQVLNALKSKANETRQ

SEQ ID NO: 115898 - DNA, 2250 bp, Sinorhizobium meliloti 1021
  CDS (1)..(2250): transl_table=11
atgcccgacaaggcgccggacccgctcctccacaaacatggttacctcggcacgcccgtcagccgcgtcgacgggcaacggaaggtgaaaggtgaagcgcgcttcgccgcggaattcgagatcgaaaatctggcttatgccgttcccgtctgcagcacgatcgccaaggggcggattaccacgatcgacgcctccgatgccgagaggagcccaggcgtaatagccaccgtcactgcccaaaacgcgccgaagatgaaacggccgccgctgatggatgtaaggcacatggacaagggcttcgcggccagtgacctcgctgtcctgcaggacggcgagatcagttgggatgggcagcccgtcgcggttgtcgttgccgaaacgctggaacaggcggagcatgcggcttcgctcgtgcgtgtcgaatatgttgagaaaacagcgcgcgtctcattcgaggatctcaaggcggaagcgaccgtgccgtccgccgtcatgggcgaagatccggaactcgcgatcggcaaccctgagaaggctttcgcggcggcggcattcaaggtcgacaacgtctatcggacaccgcactacaaccataacgccatagagccgcatgcggcgatcgccgcctgggacgaagacggcaggctgacggttttcgactcgacccaattcgtaaacggctgcaagcatgcactcgccggcatattcggcctcaacgcggagaacgttcgcgtcatcgcgcctttcgtcggcggtggcttcggcggcaaggccgccttgtggaaccacaccgcgctctgtgcggcggcggccaaagtagccaattgccccgtgaagatggcgctctcgcgcgaagaggttttccgcctcatcggcggccgcacgccttcggaacagcgcgttgcgctcggcgccgacgaggatggaaaattcgccgcgatcattcacaccggggtgaccgcgacgacgacccacgccaagtttcccgaacaattttcattgaccccgcggcatctctacgcctcgcggacaatgtccgtcggtcagaaggtcgtcaatctcgataccgtcgccaacacatggatgcgtgcgccgggggaatcgatcggcactttcgctttggaatcggccatcgacgaactcgcctacgagatgaagatcgatccggtcgaacttcgccgcttgaacgagcccgaaaaagatccgacgaagggcacggaattttcgagccgtcatctcgtcgaggcctttcggcgcggcgcggaaaagttcggctggagcgggcggccggccgaaccgtgttcgcagcgcgatggaaagtggctgatcgggcaaggcgtcgcgacggcctattacccagtcttccgctttcccgccgcagttcgccttcgcatttccgccgatggcagtgcagtcgtgcaagcggcggcgaacgaaatgggcatgggaacggcaacggtgcagattcagcacgcagccgaccgtctcggcctgccactcgagatggtttcattccgctacggagactccgacctgccggattcgccaatcatcgccggcggctctagccagaccggcagcattgccgcagcggtgcaggtggccgtcgaaaaggcccatcgcgaactcgtcaaactcgcgggtaacggctcgccgttggcgggcgcgaacgtagagatcgaggcgcgtgacggcgggctcttcgtgtccggcgaggaaagcaggggcgaaacctacgcctcgatcctgaagcgcgccggccgtgacttcattgaagtggaagagacttcgggaatgccattcgaggtgatgaagtactccatggcctcctacggcgcgcaattctgcgaagctcgcgtcaatcatgaatcgggcgaagtgcggatctcgcgctggctcggctccttcgattgcggccggatcctcaatccgaaaacggccgtcagccagcttcgcggcgggatcgtcatggggatcggcatggctctcgccgaggaaaccctgctcgacacgcgccgcgggcggatcatgaatccgtcactggccgaatatcatgtcccggtgcatctcgacgtgccgcatatcgagatcatctacaacgacattcccgacgagcatacgcctctcggcgcacacggggtcggtgaaatcggcataacgggcgcggcggcggcaattgcgaatgccatctttcacgcgactggaaaacgcattcgcgatctgccgataacgctcgacaagctgctatga

SEQ ID NO: 115899 - protein, 749 aa, Sinorhizobium meliloti 1021
MPDKAPDPLLHKHGYLGTPVSRVDGQRKVKGEARFAAEFEIENLAYAVPVCSTIAKGRITTIDASDAERSPGVIATVTAQNAPKMKRPPLMDVRHMDKGFAASDLAVLQDGEISWDGQPVAVVVAETLEQAEHAASLVRVEYVEKTARVSFEDLKAEATVPSAVMGEDPELAIGNPEKAFAAAAFKVDNVYRTPHYNHNAIEPHAAIAAWDEDGRLTVFDSTQFVNGCKHALAGIFGLNAENVRVIAPFVGGGFGGKAALWNHTALCAAAAKVANCPVKMALSREEVFRLIGGRTPSEQRVALGADEDGKFAAIIHTGVTATTTHAKFPEQFSLTPRHLYASRTMSVGQKVVNLDTVANTWMRAPGESIGTFALESAIDELAYEMKIDPVELRRLNEPEKDPTKGTEFSSRHLVEAFRRGAEKFGWSGRPAEPCSQRDGKWLIGQGVATAYYPVFRFPAAVRLRISADGSAVVQAAANEMGMGTATVQIQHAADRLGLPLEMVSFRYGDSDLPDSPIIAGGSSQTGSIAAAVQVAVEKAHRELVKLAGNGSPLAGANVEIEARDGGLFVSGEESRGETYASILKRAGRDFIEVEETSGMPFEVMKYSMASYGAQFCEARVNHESGEVRISRWLGSFDCGRILNPKTAVSQLRGGIVMGIGMALAEETLLDTRRGRIMNPSLAEYHVPVHLDVPHIEIIYNDIPDEHTPLGAHGVGEIGITGAAAAIANAIFHATGKRIRDLPITLDKLL

SEQ ID NO: 115900 - DNA, 2385 bp, Ralstonia solanacearum GMI1000
  CDS (1)..(2385): transl_table=11
atgaacgctcccgcagaacccaaccgccacctgatcggcgcggccgtcaagcgcaaggaggactaccgcttcctgacgggcgcgggccagtacaccgacgacgtggtgcaggcacaccagtcctacgccgtgttcctgcgctcgccgtatgcgcacgcgcgcattgtccgcatcgatgccgaagccgcccgcaagcagcgcggcgtgctcgccgtgctcacgggcgaggaccttgccaccgacaaggtcaacggcttgccgtgcggctggctgatccacagcctcgacggctcgccgatgaaggagccgccccaccccgtgctcgcgcagggcaaggtgcgccacgtgggcgaccaggtcgcgctggtggtggccgagtcggtgaagatcgccaaggatgccgtcgagctgatcgacgtggaatatgaagagctgcccgccgtggtcgaccctgccgcggcaagcaccgccggcaccgcggtccacgacggcgtgcccgacaacacctgctacacctggggccacggcgacaaggctgccaccgacgccgccttcgcccgcgccgcgcatgtcacccggctcgacatcgtcaacaaccggctgatcccgaacgccatcgagccgcgtgccgtgaacgcgagctactcgcggcaggacgacagctacacgctctatgtcgccaaccagaacccgcacgtcgagcggctgctgatgtcggcgttcgtgctggggctgtccgaggccaaggtgcgcgtgatcgcgcccgacgtgggcggcggcttcggctcgaagatcttcctgtacccggaagacgtggcgctgacctgggcatcgaagaaggtcggccggccgatcaagtggacggccgagcgttccgagtccttcctgaccgacgcgcatggccgcgatcacgtcacgcacgcagaactggcgctcgacgcgcaaggcaacttcctcggcatgcgcgtgcacaccatcgccaacatgggtgcgtacctgtcgacgttcgccagcagcgtgccgaccatcctgtatgccacgctgctcgccgggcagtaccggacgcccgccatctacgcggaagtcaaggcggtgttcaccaacaccgcgccggtcgatgcctatcggggtgccgggcggccggaagccacctatgtggtcgagcggctggtcgagaccgcggcgcgcgagctgcagatcgacccggccgaactgcgccgccgcaacttcatccgcagcttcccgtatgccacgccggtcggcctgacgtatgacacgggcgactacgaaccctgcctggaccgcgccatcgaactggccgacgtgccgggcttgcgcgcccgccgcgacgcctcgcgcgccaagggccggctgcgcggcatgggctactcctgctacatcgaggcgtgcgggctggcgccgtccaacatcgccggggcgctgggcgcgcgcgcgggcctgttcgaggtgggcgagatccgcgtgcacccgaccggctccgtcaccgtgttcaccggctcgcacagccacggacaagggcacgagacgaccttcgcgcaggtggtggccgatcgcctgggcgtgccgatcgagaacgtcgagatcgtgcacggcgataccgggcgcatccccttcggcatgggcacgtacggctcgcgctcgatcgcggtgggcggctcggccgtcatgaaggcgctcgacaagatcgaggccaaggccaagaagatcgccgcgcacctgctggaagcctccgccgaggacatcgagttcaaggacggcgtcttccgcgtggccggcaccgaccgcaccaagaccttcggcgaggtcgcgctcacggcctatgtgccgcacaactaccccctcgacaagctcgagccgggcctgaacgaaaacgccttctacgacccggccaacttcacctacccggccggcgcctacatttgcgaggtggaggtcgaccccgagaccggcgaggtgcgcatcgaccgcttcgtggcggtggacgacttcggcaacatcatcaacccgatgatcgtcgagggccaggtgcacggcggactcggccagggcatcggccaggcgctgctggagggctgcgtgtacgacgacagcggccagctgctgaccggctcctacatggactacgccatgccgcgcgccgacgacctgccgagcttcaccgtggagaccgccaagggcacgccctgcacgcacaacccgctgggcgtgaagggctgcggcgaggccggcgcgatcggctcgccgccggcgctgatcaacgccatcgtcgatgccctggcgccgctgggcgtgaaggacatccagatgccggccacgccccaccgcgtctggcgggccatccaatccgcgcgggcgaatgcctga

SEQ ID NO: 115901 - protein, 794 aa, Ralstonia solanacearum GMI1000
MNAPAEPNRHLIGAAVKRKEDYRFLTGAGQYTDDVVQAHQSYAVFLRSPYAHARIVRIDAEAARKQRGVLAVLTGEDLATDKVNGLPCGWLIHSLDGSPMKEPPHPVLAQGKVRHVGDQVALVVAESVKIAKDAVELIDVEYEELPAVVDPAAASTAGTAVHDGVPDNTCYTWGHGDKAATDAAFARAAHVTRLDIVNNRLIPNAIEPRAVNASYSRQDDSYTLYVANQNPHVERLLMSAFVLGLSEAKVRVIAPDVGGGFGSKIFLYPEDVALTWASKKVGRPIKWTAERSESFLTDAHGRDHVTHAELALDAQGNFLGMRVHTIANMGAYLSTFASSVPTILYATLLAGQYRTPAIYAEVKAVFTNTAPVDAYRGAGRPEATYVVERLVETAARELQIDPAELRRRNFIRSFPYATPVGLTYDTGDYEPCLDRAIELADVPGLRARRDASRAKGRLRGMGYSCYIEACGLAPSNIAGALGARAGLFEVGEIRVHPTGSVTVFTGSHSHGQGHETTFAQVVADRLGVPIENVEIVHGDTGRIPFGMGTYGSRSIAVGGSAVMKALDKIEAKAKKIAAHLLEASAEDIEFKDGVFRVAGTDRTKTFGEVALTAYVPHNYPLDKLEPGLNENAFYDPANFTYPAGAYICEVEVDPETGEVRIDRFVAVDDFGNIINPMIVEGQVHGGLGQGIGQALLEGCVYDDSGQLLTGSYMDYAMPRADDLPSFTVETAKGTPCTHNPLGVKGCGEAGAIGSPPALINAIVDALAPLGVKDIQMPATPHRVWRAIQSARANA

SEQ ID NO: 115902 - DNA, 2172 bp, Pyrobaculum aerophilum str. IM2
  CDS (1)..(2172): transl_table=11
atgaagtacgtcggcagaccgatacccaggtttgaggacgacgtaattctcagcggacgggcgcagtacgtcgacgacatagtccttcctggaatgttgtacgcgggatttgtccgctccccctacgcccacgccagagtccttagggttgatctctccgacgcggctaaacaaaagggagttgtggcggtgttcgggccggaggagatgggcttcgcccctgggggcaaggtgagataccagggagaggccgtggccatggtcgtggctggtgaccgctatcttttatacgacgcgttagagaaggtagtagtggattacgagcccctcccggcggtgttagacgtctttgaggccttgaggccaggagcgccgttggtagacgaaaacctcggcactaatatagcacatgaagaggtgtatgaaggaggcgatgttgacagtgcaatgagagaggctgaggtcaagatagaggagaggcttacaatacaacgagtagtgccggcggctatggagccccggggggtggtggcggcttatgacggcgatatgctgactatttggagctctacccaagtgccttttgatataagaaaagaagtggccaaggcgcttgacattccccttgtgaaagtaagagcggtacagccctttgtgggcggcgccttcggctcaaaactgatagtctaccccgaggagatatgggtctccaaggcggcgtatttattgaaaaggcctgtgaagtgggttgcaactagaagcgaggatttcaaaacgactactcacggcagggcgttaatactagattacagagtaggcgccacgcgcgacgggaggattttagctattgaggggactgtatatgccgacgcaggggcttattactggggggaggggctggccgatacggccgcgagaatgctcccggggccttacgatatacgcaacggcagagttaaagccgttgcagtgttgactaataaaactccgcttagcgcgtacaggggggccggcaggcccgaggccacgttttttattgaaagaattatggaccgcctcgccgacgagctcggcatagacagagtggagattagggagaggaatttaattcgacagctgccctatacaaatgtctttggcattacgtacgacaccggcgactacctcaccacgtttaaacaagggctagagaggctgggctattcccagcttaaacagtgggctgaggaggagcttaaacgcggacgcgtcgtaggagtcggcttctcggtatacgtagagattacaacatttggttacgaaacggcaattctcagagctgagagagacggcactttcacgttgtacacggccctcacgccgcacggccagggcctggccactgccctggctcaaatagtcgccgaggagttagacgtgccaattgagtctgttaaagtcgtctggggggacacagccctgatatctgacggcattgggactatgggcagccggtcaataacagctgggggctcggcggcaatacttgcggccaggaggctgaaagaggagcttttaaaagcggcgcggaaagtgttggggtgcgacccggagtacagcggcgggaagtttagttgcgggggcaagtccgctacagttaaagacgtagttagagcagtgtacagaggagaggcggaggcccagctcactgtagaggctatttaccacgcagactcaacctttccattcggcgtgcatttggccgtggtagagctggatcccgagaccggctttgtcaagcccatgctctacaagtcctatgacgacgtgggcgttgtggtcaatccgttactggcgtcaggccagatcaccggcggcgcgttgcagggaatagcccaggcgctgtatgaagaggtcgtttacgacgagagcggcaatttaattacctcaaaccttgccttttattacgtcccgacagcggccgaggcgcctaaatacgaggtttacttcgccgagagtccccacagatcgaaacacccaacgggcacaaaaggaataggcgaggcagcgacaattgcctctacgccggccgtcatcgccgcggtggaagacgcggtaaggagaataaagccgggggttaggattaacaagacgccggtaacgcccgaatttctgtggcgcctcttgaggtga

SEQ ID NO: 115903 - protein, 723 aa, Pyrobaculum aerophilum str. IM2
MKYVGRPIPRFEDDVILSGRAQYVDDIVLPGMLYAGFVRSPYAHARVLRVDLSDAAKQKGVVAVFGPEEMGFAPGGKVRYQGEAVAMVVAGDRYLLYDALEKVVVDYEPLPAVLDVFEALRPGAPLVDENLGTNIAHEEVYEGGDVDSAMREAEVKIEERLTIQRVVPAAMEPRGVVAAYDGDMLTIWSSTQVPFDIRKEVAKALDIPLVKVRAVQPFVGGAFGSKLIVYPEEIWVSKAAYLLKRPVKWVATRSEDFKTTTHGRALILDYRVGATRDGRILAIEGTVYADAGAYYWGEGLADTAARMLPGPYDIRNGRVKAVAVLTNKTPLSAYRGAGRPEATFFIERIMDRLADELGIDRVEIRERNLIRQLPYTNVFGITYDTGDYLTTFKQGLERLGYSQLKQWAEEELKRGRVVGVGFSVYVEITTFGYETAILRAERDGTFTLYTALTPHGQGLATALAQIVAEELDVPIESVKVVWGDTALISDGIGTMGSRSITAGGSAAILAARRLKEELLKAARKVLGCDPEYSGGKFSCGGKSATVKDVVRAVYRGEAEAQLTVEAIYHADSTFPFGVHLAVVELDPETGFVKPMLYKSYDDVGVVVNPLLASGQITGGALQGIAQALYEEVVYDESGNLITSNLAFYYVPTAAEAPKYEVYFAESPHRSKHPTGTKGIGEAATIASTPAVIAAVEDAVRRIKPGVRINKTPVTPEFLWRLLR

SEQ ID NO: 115904 - DNA, 2148 bp, Streptomyces coelicolor A3(2)
  CDS (1)..(2148): transl_table=11
atgaccaccgccaccaccggccgtacggcgctccggggcgtcgtcggcaccgcgcacacccgcgtcgagggccgcgacaaggtcaccggagcggcccgctacgcgggcgagatccccttcgccgacctcgcgcacgggtggctggtcctctccaccgtcgcgcgcggccgcatccgctccctcgacaccgaggccgtcctcgccatgcccggcgtgctcaccgtcctgcaccacggcaacgccccgcgcgtcgacaccgactacgtcggcctgctcggcatcccgccggaccccaccgccgccgtcttccagcaggaccgggtgcaccacgtgggctggccggtcgccctcgtcgtcgccgagacgtccgagcaggcccgggaggccgccgaggccctcgtcgtcgcctacgacgaggaaccgcacgacaccaccctcaccgccgaccacccgggtgcccacccggccggcggggtcatgcccggcgagaccgccaagggcgacctggcggccggcctcgccgcctccgccttcgtcgtggacgaggagtacaccactcccgaagagcaccacagcatgatggagccgcacgccgccaccgcccggtgggacggcggccggctggaggtcgtcgactccaaccagggcaccacctggatccagaccgaactggccagcctgttctccctcgacgcctccgcggtacgggtgcgctccgagcacatcggcggcggcttcggcagcaagggcctgcgcgcccaccaggtcgccgccgtgatggccgcgaccgaactgcagcggccggtgcgcgtggtcatgacgaggcggcagatgttctcgctggccggctaccgcagccccaccgtccagcgcgtccggctcggcgccgacgccgacggccggctgcgcgccctggagcaccgctcgctgaaccagacgtccagcgtctacgagttcgtcgagccgggcgcgggcgtggcccgggtgatgtacgacgccgaggcgcaccacacggccaacgaggtcgcgcccctcgacgtgccgtcgccgacgttcatgcgcgcaccgggcgaggcaccgggctccttcgccatcgaatcggccctcgacgaactcgccgagcgcggcggcatcgaccccatcgcactgcgcctgcgcaacgaaccagaggtcggcccggtctccggtctgcccttcagcagccgcaacctggacgcctgcttccgcgaaggagcccggcggttcggctgggccgggcgcgacccgcgacccggcgtgcgccgtgacgggcgctggttgctgggcacgggcaccgccgccgcctccttccactcgggcgccggtccctccacggccgtcgtgaccgccgaggccgacggcgggttcacggtacggatcgccgccgccgacatcggcaccggcgcccgtacggcgctcaccctggtcgccgccgacgccctcgaggtcgcgcccgaccgggtccgggtccgcatcggtgacagcgacttcggccccgcgatgatcgcgggcggctcgatgggcacgcggtcctgggcctgggcgatcacggaggcggcccgcgaactgcgggagcggctggccctgggcacgacgatcccgccggagggcatcaccgtacggtccgacaccaccgccctgctcggcgccctcgcgcagaaggaacggcactccttcggcgcgcagttcgccgaggtcgccgtggacacggccaccggcgaggtgcgggtgcgccgcatgctcggcatcttcgcggccggccggatcgtcaacccgctcaccgcccgcaaccagctcgtcggcggcatggtctggggcatctccatggccctgcacgaggaggcggtccgggaccggacgagcggcggcctctacgcccccgacctcgccggctaccacgtggccaccaacgccgacgtgggcgacatccaggccgactgggtggacgaccccgacccggacgacccggtcggtatcaagggcgtcggcgagatcggcatcgtgggcgccgcggcggccgtcgccaacgccgtctggcacgcgaccggcgtacgccaccgcaacctgcccatccggccggaccgggtgctgtcggcggtgcccgcgagctcaggagcggcggatgcttga

SEQ ID NO: 115905 - protein, 715 aa, Streptomyces coelicolor A3(2)
MTTATTGRTALRGVVGTAHTRVEGRDKVTGAARYAGEIPFADLAHGWLVLSTVARGRIRSLDTEAVLAMPGVLTVLHHGNAPRVDTDYVGLLGIPPDPTAAVFQQDRVHHVGWPVALVVAETSEQAREAAEALVVAYDEEPHDTTLTADHPGAHPAGGVMPGETAKGDLAAGLAASAFVVDEEYTTPEEHHSMMEPHAATARWDGGRLEVVDSNQGTTWIQTELASLFSLDASAVRVRSEHIGGGFGSKGLRAHQVAAVMAATELQRPVRVVMTRRQMFSLAGYRSPTVQRVRLGADADGRLRALEHRSLNQTSSVYEFVEPGAGVARVMYDAEAHHTANEVAPLDVPSPTFMRAPGEAPGSFAIESALDELAERGGIDPIALRLRNEPEVGPVSGLPFSSRNLDACFREGARRFGWAGRDPRPGVRRDGRWLLGTGTAAASFHSGAGPSTAVVTAEADGGFTVRIAAADIGTGARTALTLVAADALEVAPDRVRVRIGDSDFGPAMIAGGSMGTRSWAWAITEAARELRERLALGTTIPPEGITVRSDTTALLGALAQKERHSFGAQFAEVAVDTATGEVRVRRMLGIFAAGRIVNPLTARNQLVGGMVWGISMALHEEAVRDRTSGGLYAPDLAGYHVATNADVGDIQADWVDDPDPDDPVGIKGVGEIGIVGAAAAVANAVWHATGVRHRNLPIRPDRVLSAVPASSGAADA

SEQ ID NO: 115906 - DNA, 2487 bp, Streptomyces coelicolor A3(2)
  CDS (1)..(2487): transl_table=11
atggctgccaacggcgcacccgccggcctcacccagggctccgggaccaagggcggcatcggcgagtccacgctccgcccggacggcgtcctcaaggtcaccggcgagttcgcgtacgcgtccgacatgtggcacgaggacatgctctggggccagatcctgcgctccaccgtcgcacacgccgagatcgtctccgtcgacaccggcgaggcgctcgccacccccggcgtgtacgccgtcatgacctacgacgacctgcctaccgacgtgcgccactacgggctggagatccgggacaccccggtcctcgcccacggcaaggtccgccaccacggcgagccggtcgcgatcgtcgccgccgaccacccggagaccgcgcgccgcgccgccgccaaggtcaaggtggagtaccgggagctgccgctcgtcaccgacgaggcctccgccaccgcccccggcgcggtcctcgtccacgagcaccgcaccgaccaccacagcggccacgtcccgcaccccaacatcgtgcaccgccagccgatcgtgcgcggcgacgccgccgcggccgccgcacgcgccgacgtgatcgtcacgggcgactaccacttcggcatgcaggaccaggccttcctcggccccgagtcgggtctcgccgtgcccggcgaggacggcggcgtcgacctctacatcgccacccagtggctccactccgacctgcgccagatcgcccccgtgctcggcctgcccgaggacaaggtgcggatgaccctgtccggcgtcggcggcgccttcggcggacgcgaggacctgtcgatgcagatccacgcctgcctgctggccctgcgcaccggcaaacccgtcaagatggtctacaaccgcttcgagtccttcttcggccacgtccaccgccacccggccaggctccactacgagcacggcgccacccgcgacggccggctcacccacgtgaggtgccgcatcgtcctgaacggcggcgcctacgcctccgcctccccggcggtcgtcggcaacgccgcctcgctgtcggtcgggccttacgtgtgcgaggacgtggacatcgaggccctcgccctctactccaacaacccgccctgcggcgccatgcgcggcttcggcgcggtccaggcgtgcttcgcctacgaggcgcagatggacaaggtggcggccggactcggcctggacccggtggagttccgccggatcaacgccatggagcagggcacgctcatgcccaccggacagcccgtcgactccccggcgccggtcgccgaactcctgcgccgcgtcaaggcgatgccgatgccgccggagcgccagtgggagtccagcgagggcgccgacgtacggcagctgcccggcgggctgtccaacaccacgcacggcgagggcgtcgtacgcggcgtcggctacgccgtcggcatcaagaacgtcggcttctccgagggcttcgacgactactccaccgcccgggtccgcctggaggccgctggcggccgccccgtcgtcaccgtgcacacggcgatggcggaggtcggacagggcggtgtgaccgtccacgcgcagatcgcccgcaccgagctgggcgtcacccaggtcaccatccggcccgccgacacgcgggtgggctcggccggctccacctccgcctcccggcagacctacgtcaccggcggcgccatcaagcacgcctgcgagctggtgcgggaacgggtcctggagctcgggcgccgcaggttcggctcgtaccaccccgcctgggccaccgccggactgctcctggagggcggcaaggtcgtcaccgacggcggcgaggtcctcgccgacctcgtggacgtcctggaggacgaggcggtcgaggtcgaggaggagtggcggcaccggccgacccaacccttcgacccgcgcaccggccagggcgacggacacgtccagtactccttcgccgcgcaccgcgccgtcgtcgaggtcgacacggaactcggcctggtcaaggtgatcgagctggcctgtgcccaggacgtcggcaaggcgctgaaccccctctccgtggtcggccagatccagggcggcaccgtccagggcctgggcatcgcggtgatggaggagatcgtcgtggacccggtgaccgccaaggtccagaacccgtccttcacggactatctcctccccacgatcctcgacacgccggccctaccggtcgacgtgctcgaactcgccgacgaccacgcgccctacgggctgcgcggcgtcggcgaggcgcccaccctgtcgtccaccccggcggtcctcgcggccatcagggacgcgaccgggctggcgctcgaccgcacgcccgtacgaccggaacacctcaccggcacggcgggctccgatcggcacccccaggaccctccgggcggcgcacggaacgtcacaccctccgcgccgcccggagcaccggccaagtcccgctccgctcgcggcacttga

SEQ ID NO: 115907 - protein, 828 aa, Streptomyces coelicolor A3(2)
MAANGAPAGLTQGSGTKGGIGESTLRPDGVLKVTGEFAYASDMWHEDMLWGQILRSTVAHAEIVSVDTGEALATPGVYAVMTYDDLPTDVRHYGLEIRDTPVLAHGKVRHHGEPVAIVAADHPETARRAAAKVKVEYRELPLVTDEASATAPGAVLVHEHRTDHHSGHVPHPNIVHRQPIVRGDAAAAAARADVIVTGDYHFGMQDQAFLGPESGLAVPGEDGGVDLYIATQWLHSDLRQIAPVLGLPEDKVRMTLSGVGGAFGGREDLSMQIHACLLALRTGKPVKMVYNRFESFFGHVHRHPARLHYEHGATRDGRLTHVRCRIVLNGGAYASASPAVVGNAASLSVGPYVCEDVDIEALALYSNNPPCGAMRGFGAVQACFAYEAQMDKVAAGLGLDPVEFRRINAMEQGTLMPTGQPVDSPAPVAELLRRVKAMPMPPERQWESSEGADVRQLPGGLSNTTHGEGVVRGVGYAVGIKNVGFSEGFDDYSTARVRLEAAGGRPVVTVHTAMAEVGQGGVTVHAQIARTELGVTQVTIRPADTRVGSAGSTSASRQTYVTGGAIKHACELVRERVLELGRRRFGSYHPAWATAGLLLEGGKVVTDGGEVLADLVDVLEDEAVEVEEEWRHRPTQPFDPRTGQGDGHVQYSFAAHRAVVEVDTELGLVKVIELACAQDVGKALNPLSVVGQIQGGTVQGLGIAVMEEIVVDPVTAKVQNPSFTDYLLPTILDTPALPVDVLELADDHAPYGLRGVGEAPTLSSTPAVLAAIRDATGLALDRTPVRPEHLTGTAGSDRHPQDPPGGARNVTPSAPPGAPAKSRSARGT

SEQ ID NO: 115908 - DNA, 2208 bp, Xanthomonas axonopodis pv. citri str. 306
  CDS (1)..(2208): transl_table=11
atgaaattcgacactcccgccggcaccaatcccatcgatcagcttacggtcgtcggcaagcccgtcgaccgtatcgacgggccactcaagaccaccgggcaggcgccgtatgcctacgaacatcatgacttgccgggccaagccgcttacgggcatgtggtgggcgcaggcatcgccaagggcaccatccgcagtatcgatctgagtgcggcacgcaaggcgccaggcgtgctgggcatcgtgactgcgcagaacgccggcaagctgcaaaagggcaagttcaacaccgccaagctcttgggcggacccgagatcgcgcattaccaccaggccattgcagtggtggtggcggagaccttcgagcaggcgcgtgcggccggccagttgatcaaggtcgattacggccgtcacgtgggcgcctacgacctggaaaaggcccgcgccggcgccacggtgaccaagaagggcgacgcgcccaacagcaacgtcggcaacttcgacgctgccttcgcgacggcgccagtgcaactggatgccgaatacagcacacccgatcattcgcacgcgatgatggagccgcacgcttccatcgcgatgtgggatggcgacaagctcagcgtgtggacctccaatcagatgatcaactggggagccggcgatctggccaggacgctgggcatcccgcgcgagaacgtgcggatcatgtcgccgtacgtcggcggcggtttcggcggcaagctgttcctgcgtgccgatgcagtgctggcatcgctggccgcgcgtcaggtcggacggccggtcaaggtgatgttgccgcggccgctgatcgccaataacaccacccaccgcccggccacgctgcaacgcatccggcttgcggccgggcgcgacggcaagctcacggcgatcgcgcatgaaagctggtcgggcgacttgcccgacggcagcccggaaatcgccgccgcgcagacgcaattgctctacgccggtgctaaccgcctgatcacgacccgtctggccgtgctcgatctgcccgaaggcaacgccatgcgcgcgccgggcgaggcaccagggttgatggcgttggaaatcgccatggacgagatggccgaaaagctcgacatggacccggtcaagttccgcatcgtcaacgacacccaggtggacccggaaaatccgcagcgaccgttctcgcagcgtcagctggtcacgtgcctggaagatggcgcaaggcgattcgggtggtccaagcgcaaggccaagccggccagtacgcgcgatggtcgttggctggtcggcatgggtgttgcggcggcatttcgcaacgcgccggtcatgacctccggcgcacgcatgcggctggagcagggcggacgcgtggtggtggaaaccgacatgaccgatatcgggaccggctcctacaccatcattgcgcagaccgctgcggaaatgctgggcgtcccactcaactgggtcgatgtgctcctgggcgattcgagctttccggcctctgcaggctccggcgggcagtggggcgcgaacagttctaccgcaggcgtctatgcagccgcagtcaaattgcgcgaagcggtggccaagcaactgggcctggatccggccagtgccgagtttgccgatggctatgtgcgtgccggcggcaagcgcgttgcgctcggcgatgccgcggccaatggcgcgctggtggtggaagacaagatcgaattcggcgacctcagcaaaacgcaccagctctccacgttcggcgcgcatttcgtcgaagtgggcgtggatatcgcaaccgccgaagtgcgcatccggcgcatgcttgccgtgtgcgccgcggggcgcatcctcaatcccaaatccgcacgcagccaggtcatcggcggcatgaccatgggcgccggcgcggcactgatggaagagctggcagtggacaaacgcctgggcttcttcgtcaaccacgacctggccggctatgaagtgccggtgcatgcggatatcccgcatcaggaggtggtgttcctggaagaaaacgacccgttgtcgtcgccgatgaaggccaagggcgtgggcgagctgggtatctgcggcgtggcagcggcgatcgccaatgcggtctacaacgcaaccggcgtgcgtgtgcgcgactacccggtcaccctcgacaaactgctgccgcacctgcccgagatgctgcgcgcgtga

SEQ ID NO: 115909 - protein, 735 aa, Xanthomonas axonopodis pv. citri str. 306
MKFDTPAGTNPIDQLTVVGKPVDRIDGPLKTTGQAPYAYEHHDLPGQAAYGHVVGAGIAKGTIRSIDLSAARKAPGVLGIVTAQNAGKLQKGKFNTAKLLGGPEIAHYHQAIAVVVAETFEQARAAGQLIKVDYGRHVGAYDLEKARAGATVTKKGDAPNSNVGNFDAAFATAPVQLDAEYSTPDHSHAMMEPHASIAMWDGDKLSVWTSNQMINWGAGDLARTLGIPRENVRIMSPYVGGGFGGKLFLRADAVLASLAARQVGRPVKVMLPRPLIANNTTHRPATLQRIRLAAGRDGKLTAIAHESWSGDLPDGSPEIAAAQTQLLYAGANRLITTRLAVLDLPEGNAMRAPGEAPGLMALEIAMDEMAEKLDMDPVKFRIVNDTQVDPENPQRPFSQRQLVTCLEDGARRFGWSKRKAKPASTRDGRWLVGMGVAAAFRNAPVMTSGARMRLEQGGRVVVETDMTDIGTGSYTIIAQTAAEMLGVPLNWVDVLLGDSSFPASAGSGGQWGANSSTAGVYAAAVKLREAVAKQLGLDPASAEFADGYVRAGGKRVALGDAAANGALVVEDKIEFGDLSKTHQLSTFGAHFVEVGVDIATAEVRIRRMLAVCAAGRILNPKSARSQVIGGMTMGAGAALMEELAVDKRLGFFVNHDLAGYEVPVHADIPHQEVVFLEENDPLSSPMKAKGVGELGICGVAAAIANAVYNATGVRVRDYPVTLDKLLPHLPEMLRA

SEQ ID NO: 115910 - DNA, 2298 bp, Shigella flexneri 2a str. 301
  CDS (1)..(2298): transl_table=11
atggaagcgcgggaagcaaccgctacgggtgaatcatgcatgcgcgtcgatgccattgctaaggtcaccgggcgggcacgatatactgacgattatgttatggcgggcatgtgttacgcgaaatatgtacgtagccctatcgcacatggttatgccgtaagtattaatgatgaacaagccagaagtttaccgggcgtactggcgatttttacttgggaagatgtgcctgatattccattcgctacagctgggcatgcctggacacttgacgaaaacaagcgcgataccgccgatcgcgcactgctaactcgccatgttcgtcatcatggtgacgccgttgccatcgtcgtggcccgcgatgaactcacggcagaaaaagcggcgcaattggtcagcattgagtggcaagaattacccgttatcaccacgccagaagcggcgctgacagaagacgctgcaccaatccataacggcggcaatttactgaaacaaagcacgatgtcgacgggcaatgtccaacaaacaatcgatgccgccgactaccaggtacaggggcactatcagactcccgttattcaacattgtcacatggaaagcgtaacatcgctggcgtggatggaggatgactcgcgaattaccatcgtttccagcacccagatcccgcacattgttcgccgcgtggttggtcaggcgctggatattccctggtcatgcgtacgagtcatcaaaccgtttgtcggtggcggttttggtaataaacaggatgtactggaagagccaatggcggcattcctgaccagcaagcttggcggcattccggtgaaagtttcccttagccgtgaagagtgtttcctcgcaacccgtacccgccacgcttttactattgacgggcaaatgggcgtgaaccgcgacggaaccttgaaaggttatagtctggatgttctgtctaacaccggcgcttatgcatctcacgggcactccatcgcttctgcgggggagaataaagtcgcttacctttatcctcgttgtgcctacgcttacagttcaaagacctgctataccaacctcccctcggctggtgcgatgcgtggttatggcgcgccacaagtcgtatttgccgttgagtctatgcttgatgacgccgcgacagcgttaggtattgatcctgttgaaattcgtttacgcaacgccgcccgcgaaggagatgctaatccgctcacgggcaaacgtatttgcagcgcagggttgccggagtgtcttgaaaaaggccggaaaatctttgaatgggaaaaacgccgtgcagaatgccagaaccagcaaggcaatttgcgccgcggcgttggcgtcgcctgttttagctacacctctaacacctggcctgtcggcgtagaaatagcaggcgcgcgccttctgatgaatcaggatggaaccatcaacgtgcaaagcggcgcgacggaaatcggtcagggtgccgacaccgtcttctcgcaaatggtggcagaaaccgtgggggttccggtcagcgacgttcgcgttatttcaacacaagataccgacgttacgccgttcgatcccggcgcatttgcctcacgccagagctatgttgccgcgcctgcgctgcgcagtgcggcactattattaaaagagaaaatcatcgctcacgccgcagtcatgctacatcagtcagcgatgaatttgaccctgataaaaggccatatcgtgctggttgaacgaccggaagagccgttaatgtcgttaaaagatttggcgatggacgctttctaccaccctgaacgcggcgggcagctctctgctgaaagctccatcaaaaccaccactaacccaccggcgtttggctgtacctttgttgatctgacggtcgatattgcgctgtgcaaagtcaccatcaaccgcatcctcaacgttcatgattcagggcatattcttaatccactgctggcagaaggtcaggtacacggcggaatgggaatgggcattggctgggcgctatttgaagagatgatcatcgatgctaaaagcggcgtggtccgtaaccccaatctgctggattacaaaatgccgaccatgccggatctgccacaactggaaagcgcgttcgtcgaaatcaatgagccgcaatccgcatacggacataagtcactgggtgagccacccataattcctgttgccgctgctattcgtaacgcggtgaagatggctaccggtgttgcaatcaatacactgccgctgacgccaaaacggttatatgaagagttccatctggcaggattgatttga

SEQ ID NO: 115911 - protein, 765 aa, Shigella flexneri 2a str. 301
MEAREATATGESCMRVDAIAKVTGRARYTDDYVMAGMCYAKYVRSPIAHGYAVSINDEQARSLPGVLAIFTWEDVPDIPFATAGHAWTLDENKRDTADRALLTRHVRHHGDAVAIVVARDELTAEKAAQLVSIEWQELPVITTPEAALTEDAAPIHNGGNLLKQSTMSTGNVQQTIDAADYQVQGHYQTPVIQHCHMESVTSLAWMEDDSRITIVSSTQIPHIVRRVVGQALDIPWSCVRVIKPFVGGGFGNKQDVLEEPMAAFLTSKLGGIPVKVSLSREECFLATRTRHAFTIDGQMGVNRDGTLKGYSLDVLSNTGAYASHGHSIASAGENKVAYLYPRCAYAYSSKTCYTNLPSAGAMRGYGAPQVVFAVESMLDDAATALGIDPVEIRLRNAAREGDANPLTGKRICSAGLPECLEKGRKIFEWEKRRAECQNQQGNLRRGVGVACFSYTSNTWPVGVEIAGARLLMNQDGTINVQSGATEIGQGADTVFSQMVAETVGVPVSDVRVISTQDTDVTPFDPGAFASRQSYVAAPALRSAALLLKEKIIAHAAVMLHQSAMNLTLIKGHIVLVERPEEPLMSLKDLAMDAFYHPERGGQLSAESSIKTTTNPPAFGCTFVDLTVDIALCKVTINRILNVHDSGHILNPLLAEGQVHGGMGMGIGWALFEEMIIDAKSGVVRNPNLLDYKMPTMPDLPQLESAFVEINEPQSAYGHKSLGEPPIIPVAAAIRNAVKMATGVAINTLPLTPKRLYEEFHLAGLI

SEQ ID NO: 115912 - DNA, 2130 bp, Streptomyces coelicolor A3(2)
  CDS (1)..(2130): transl_table=11
atgaccgccaccgatgccgtcctgggcgctccggtcgagcgccgggaggggcgggagaaggtcaccggcaccgcccggtacgccgccgagtacccgcagccgggccgcgcccaggcctggccgatacccgcgacggtcgtacggggccgggtgaccggcgtcgacaccgcggccgcgctcgcgctgcccggcgtgctcgcggtgctcacgcacgagaacgcgccccggctcggcgccccggacgacccgacgctggccgtgctgcagggtcctcacgtaccgcaccggggctggttcgtgggcctggtggtggccgagtcgctggaggcggcccgggccggtgccgccgccgtccggatcacctacgagaccgagccccacgacgtggcactcaccgcctcgcactccggggcctacgtcccggactccgccaacggcggtttcccggccgtcaccgagcacggcgacccggacggtgccttcgccgcctcggcgacccgggtggacgtggcgtacacggtgccgccgctgcacaaccatcccatggagccgcacaccagtacggcgcactgggacggcgagcggctgaccgtgcactcctccagccagggcacctcggcggtgcgggcggagctggcgcgcctgttcgccctgcccgaggaccggatcacggtgcgcgcggagcacgtgggcggcggtttcggctcgaagggcacgccgcggcctgaggtggtgctggcggcgatggcggcgcgggagaccgggcggccggtcaccgtcgcgctgccgcgccgctacctgcccgccgtcgtcggacaccgcgcgccgaccctgcaccggctgcgcctgggcgcggacgccggcggccggctcacgtcgctggtgcacgaggtgacgacgtacacctcgcgggtgaaggagttcgtggagcaggccgcggtcccggcccgcgtcatgtacggcacgcccgccctgcgcacggcccaccgcgtggcggcgctggacgttcccacgccgtcctggatgcgcgcccccggcgagtgccccggcatgtacgccctcgagtccgccatggacgagctggccgccgagctgggcgtcgacccggtggagttgaggatccgcaacgaaccggagagcgagccggacagcggaaagccgttcagcagcaggcatctggtggagtgtctgcgcgagggcgcccggcgcttcggctgggaggaccgcgacccccggccccggtcccgcgaggaggggcccctgctgatcggcagcggcgtggcctcggccacctatccggtgctggtctccccgtgcgtcgcctcggcgcgtgccctgcccgacggcggcttcctggtgcgggtcaacgccaccgacatcggtacgggtgcccggacggtgctcgcgcagatcgcggccgacgccctcggcaccccgctggaccgggtgcggctcgacgtcgccgacagcggcatcgggttcgccccgatggccggcggttcctcgggcaccgcgtcctgggggtcggccgtccacgcggcgtgcgtgcggctgaacggccggctggcggagcactcggggcggctgccggacgaggggatcgcggccgaggccgacacctccggcacggcgggcgccgaaagccccttcgcccggcacgcgttcggcgcccatttcgccgaggtgggcgtggacaccgtctcgggcgaggtccgggtgacgcggctgctgggtgtcttcgccgcgggccgcatcctcaacgcgcgcacggcccgttcccagttcatcggcggcatgacgatggggctcggcatggcgctgaccgaggacagcacgatggatccggtgttcggcgacttcgtgcagcgtgacctggcggcgtaccacgtgcccgcgcacgcggacgtcaccgacctggaggcgcactgggtcgaggaggaggacgaccacctcaaccccatgggcagcaaggggatcggcgagatcgggatcgtgggctcggcggcggccgtcggcaacgccgtccaccacgccaccggcatccgcttccgggagctgccgctcactccggaccgggtgctcaccgcgctgctcgcccacgagcaccccgccggcatgctgggcgtctga

SEQ ID NO: 115913 - protein, 709 aa, Streptomyces coelicolor A3(2)
MTATDAVLGAPVERREGREKVTGTARYAAEYPQPGRAQAWPIPATVVRGRVTGVDTAAALALPGVLAVLTHENAPRLGAPDDPTLAVLQGPHVPHRGWFVGLVVAESLEAARAGAAAVRITYETEPHDVALTASHSGAYVPDSANGGFPAVTEHGDPDGAFAASATRVDVAYTVPPLHNHPMEPHTSTAHWDGERLTVHSSSQGTSAVRAELARLFALPEDRITVRAEHVGGGFGSKGTPRPEVVLAAMAARETGRPVTVALPRRYLPAVVGHRAPTLHRLRLGADAGGRLTSLVHEVTTYTSRVKEFVEQAAVPARVMYGTPALRTAHRVAALDVPTPSWMRAPGECPGMYALESAMDELAAELGVDPVELRIRNEPESEPDSGKPFSSRHLVECLREGARRFGWEDRDPRPRSREEGPLLIGSGVASATYPVLVSPCVASARALPDGGFLVRVNATDIGTGARTVLAQIAADALGTPLDRVRLDVADSGIGFAPMAGGSSGTASWGSAVHAACVRLNGRLAEHSGRLPDEGIAAEADTSGTAGAESPFARHAFGAHFAEVGVDTVSGEVRVTRLLGVFAAGRILNARTARSQFIGGMTMGLGMALTEDSTMDPVFGDFVQRDLAAYHVPAHADVTDLEAHWVEEEDDHLNPMGSKGIGEIGIVGSAAAVGNAVHHATGIRFRELPLTPDRVLTALLAHEHPAGMLGV

SEQ ID NO: 115914 - DNA, 2400 bp, Pseudomonas putida KT2440
  CDS (1)..(2400): transl_table=11
atgtctaaccatcacgtagccaagagccaggccgagatggccgaactgttcagccaggacctgaccaccggggtcggccgcggcgtcaagcacgacagcgccgacaagcatgtatcgggggaggcgctgtacattgacgatcgcctggaattccctaaccagttgcatgtgtatgcacgtaccgccgaccgcgcccatgcgcgcatcctgcgcatcgacaccacgccgtgctatgccttcgagggtgtgcgtatcgccatcacccacgaagacatccccggcctgaaggacatcggcccggtggtggccggcgacccgctgctggccatcgacaaggtcgagttcttcggccagccggtgctcgctgtcgctgcccgcgatcttgaaaccgcacgcaaagcggccatggccgccatcgtcgagtacgaagacctggaaccggtgctggacgtggtcgaggcgctgcgcaagaagcacttcgtgctcgatagccacacccatcagcgcggcgattcggctgccgccctggccagcgccccgcatcgcattcagggcaccctgcacatcggcggccaggagcacttctacctggaaacgcagatttcctcggtcatgcctaccgaagacggcggcatgatcgtctactgctccacacagaaccccaccgaagtgcagaaactggtcgccgaagtactcgacgtgccgatgaacaaggtggtgctggacatgcgccgcatgggcggcggttttggcggcaaggaaacccaggccgccagcccggcatgcttgtgcgcggtaattgcgcgcctgaccggccagccaaccaagatgcgcctgccgcgggtcgaagacatgaccatgaccggcaagcgccacccgttctacgtcgagtatgacgtgggcttcgacgacaacggccggctgcacggtatcaatttcgacctggctggcaactgtggctattcgcccgacctgtccggttcgatcgtcgaccgtgccatgttccactccgacaacgcttactacctgggcgatgccaccgtccacggccaccgctgcaagaccaacaccgcctccaacactgcctaccgcggctttggcggcccacagggcatggtcgccatcgagcaggtgatggaccatatcgcccgtcatctgggccgcgacccgctggccgtgcgcaaggccaactattacggcaagaccgaacgcaacgtcacccactactaccagaccgtcgagcacaacatgctcgaagagatgaccgccgagctggaggccagcagcgactacgccgagcgacgcgagtcgatccgccgcttcaacgccaacagcccgatcctgaagaaaggcctggcactgacaccggtcaagttcggcatttcgttcaccgccaccttcctcaaccaggccggtgcactgatccatatctacaccgacggcagcattcacctgaaccacggcggcaccgaaatgggccagggcctgaacaccaaggtggcccaggtggtggcgcagatcttccaggtggatttcagccgcatccagatcaccgctaccaacaccgacaaggtgcctaacacctcgcctacggctgcttccagcggcgccgacctgaacggcaaggcggcgcagaacgccgccgaaatcctcaagaaacgcctgaccgagtttgccgcacggcactatcaagtgaccgaggaagacgtcgaatttcgcaacggccatgtgcgggtgcgcgaccagatcgtcagcttcgagcaactggtgcagcaggcctacttcgcccaggtgtcgctgtccagcaccgggttctaccgcacgccgaagatcttctacgaccgcagccaggcccgcggccggccgttctactacttcgcctttggcgctgcctgcgtggaagtgatcgtcgatacgctgaccggcgaatacaagatgttgcgcgccgacatcctgcacgacgtgggcgattcgctgaaccctgcgatcgacatcggccaggtggagggtggtttcatccagggcatgggctggctgaccaccgaagagctggtgtggaacgccaaaggcaagctgatgaccaacggcccggccagctacaagatcccggccgtggccgacatgccactggacttgcgggtgaagctggtggagaaccgcaagaacccggaagacaccgtgttccactccaaggccgtgggcgagcccccgttcatgctcggcattgctgcctggtgtgcaatcaaggatgccgtggccagcctggctgattaccgcgtgcagccgcaggtggatgcgccggcaacgccggagcgggtgctgtggggctgcgagcagatgcgcaaggcagtggctgaaacacagtcgcgcgaacgggaactggaaaccatcaccccctga

SEQ ID NO: 115915 - protein, 799 aa, Pseudomonas putida KT2440
MSNHHVAKSQAEMAELFSQDLTTGVGRGVKHDSADKHVSGEALYIDDRLEFPNQLHVYARTADRAHARILRIDTTPCYAFEGVRIAITHEDIPGLKDIGPVVAGDPLLAIDKVEFFGQPVLAVAARDLETARKAAMAAIVEYEDLEPVLDVVEALRKKHFVLDSHTHQRGDSAAALASAPHRIQGTLHIGGQEHFYLETQISSVMPTEDGGMIVYCSTQNPTEVQKLVAEVLDVPMNKVVLDMRRMGGGFGGKETQAASPACLCAVIARLTGQPTKMRLPRVEDMTMTGKRHPFYVEYDVGFDDNGRLHGINFDLAGNCGYSPDLSGSIVDRAMFHSDNAYYLGDATVHGHRCKTNTASNTAYRGFGGPQGMVAIEQVMDHIARHLGRDPLAVRKANYYGKTERNVTHYYQTVEHNMLEEMTAELEASSDYAERRESIRRFNANSPILKKGLALTPVKFGISFTATFLNQAGALIHIYTDGSIHLNHGGTEMGQGLNTKVAQVVAQIFQVDFSRIQITATNTDKVPNTSPTAASSGADLNGKAAQNAAEILKKRLTEFAARHYQVTEEDVEFRNGHVRVRDQIVSFEQLVQQAYFAQVSLSSTGFYRTPKIFYDRSQARGRPFYYFAFGAACVEVIVDTLTGEYKMLRADILHDVGDSLNPAIDIGQVEGGFIQGMGWLTTEELVWNAKGKLMTNGPASYKIPAVADMPLDLRVKLVENRKNPEDTVFHSKAVGEPPFMLGIAAWCAIKDAVASLADYRVQPQVDAPATPERVLWGCEQMRKAVAETQSRERELETITP

SEQ ID NO: 115916 - DNA, 2298 bp, Escherichia coli CFT073
  CDS (1)..(2298): transl_table=11
atggaagcgcgggaagcaaccgctacgggtgaatcatgcatgcgcgtcgatgccattgctaaggtcaccgggcgggcacgatatactgacgattatattatggcgggcatgtgttacgcgaaatatgtacgtagccctatcgcacatggttatgctgtaaatattaatgatgaacaagccaggagtttgccgggcgtcctggcgatttttacctgggaagatgtgccagaaatcccattcgccacggcagggcatgcctggacacttgacgaaaacaagcgcgataccgccgatcgtgccctgctaacgcgtcatgttcgtcatcatggtgacgccgttgccatcgtcgtggcccgcgatgaactcacggcagaaaaagcggcgcaattggtcagcattgagtggcaagaattacccgttatcacctcgccagaagcggcgctggcagaagacgctgcaccaatccataacggtggcaatttactgaaacaaagcacgatgtcgacgggtaatgtccaacaaacaatcgatgccgccgactaccaggtacaggggcactatcagactcccgttattcaacattgtcatatggaaagcgtgacatcgctggcatggatggaggataactcgcgaattaccatcgtttccagcacccagatcccgcacattgttcgccgcgtggttggtcaggcgctggatattccctggtcatgcgtacgagtcatcaaaccgtttatcggtggcggttttggtaataaacaggatgtactggaagagccaatggcggcattcctgaccagcaaacttggcggcattccggtgaaagtttcccttagccgtgaagagtgtttcctcgcaacccgtacccgccacgcttttactattgacgggcaaatgggcgtgaaccgcgacggaacattgaaaggttatagtctggatgttctgtctaacaccggcgcttatgcatctcacgggcactccattgcttctgctggggggaataaagtcgcttacctttatcctcgttgtgcctacgcttacagttcaaagacctgctataccaacctcccctcggctggtgcgatgcgtggttatggcgcgccacaagtcgtatttgccgttgagtctatgcttgatgatgccgcgacagcgttaggtattgatcctgttgaaattcgtttacgcaacgccgcccgcgaaggagatgctaatccgctcacgggaaaacgtatttacagcgcagggttgccggagtgtcttgaaaaaggccggaaaatctttgaatgggaaaaacgccgtgcagagtgccagaaccagcaaggcaatttacgtcgtggcgttggcgtcgcctgttttagctacacctctaacacctggcctgtcggcgtagaaatagcaggcgcgcgcctgttgatgaatcaggatggaaccatcaacgtgcaaagcggcgcgacggaaatcggccagggtgccgacaccgtgttctcgcaaatggtggcagaaaccgtgggagttccggtcagcgatgttcacgttatttcaacccaagataccgacgttacaccattcgaccccggcgcatttgcctcacgtcagagctatgttgccgcgcctgcgctgcgcagtgcagcactgttattaaaagagaaaatcatcgctcacgccgcagtcatgctacatcagtcagcgatgaatctgaccctgataaaaggccatatcgtgctgattgaaagaccggaagaaccgttaatgtcgttaaaagatttggcgatggacgctttctaccaccctgaacgcggcgggcagctctctgccgaaagctccatcaaaaccaccactaacccaccggcgtttggctgtacctttgttgatctgacggtcgatattgcactgtgcaaagtcaccatcaaccgcatcctcaacgttcatgattcgggccatattcttaatccgctgctggcagaaggtcaggtacacggcggaatgggaatgggcattggctgggcgctatttgaagagatgatcatcgatgcgaaaagcggcgtggtccgtaaccccaatctgctggattacaaaatgccgaccatgccggatctgccacaactggaaagcgcgttcgtcgaaatcaatgagccgcaatcagcatacggacataagtcactgggtgagccccccataattcctgtagccgctgctattcgtaacgcggtgaagatggctaccggtgttgcaatcaatacactgccgctaacgccaaaacgattatatgaagaattccatctggcaggattgatttga

SEQ ID NO: 115917 - protein, 765 aa, Escherichia coli CFT073
MEAREATATGESCMRVDAIAKVTGRARYTDDYIMAGMCYAKYVRSPIAHGYAVNINDEQARSLPGVLAIFTWEDVPEIPFATAGHAWTLDENKRDTADRALLTRHVRHHGDAVAIVVARDELTAEKAAQLVSIEWQELPVITSPEAALAEDAAPIHNGGNLLKQSTMSTGNVQQTIDAADYQVQGHYQTPVIQHCHMESVTSLAWMEDNSRITIVSSTQIPHIVRRVVGQALDIPWSCVRVIKPFIGGGFGNKQDVLEEPMAAFLTSKLGGIPVKVSLSREECFLATRTRHAFTIDGQMGVNRDGTLKGYSLDVLSNTGAYASHGHSIASAGGNKVAYLYPRCAYAYSSKTCYTNLPSAGAMRGYGAPQVVFAVESMLDDAATALGIDPVEIRLRNAAREGDANPLTGKRIYSAGLPECLEKGRKIFEWEKRRAECQNQQGNLRRGVGVACFSYTSNTWPVGVEIAGARLLMNQDGTINVQSGATEIGQGADTVFSQMVAETVGVPVSDVHVISTQDTDVTPFDPGAFASRQSYVAAPALRSAALLLKEKIIAHAAVMLHQSAMNLTLIKGHIVLIERPEEPLMSLKDLAMDAFYHPERGGQLSAESSIKTTTNPPAFGCTFVDLTVDIALCKVTINRILNVHDSGHILNPLLAEGQVHGGMGMGIGWALFEEMIIDAKSGVVRNPNLLDYKMPTMPDLPQLESAFVEINEPQSAYGHKSLGEPPIIPVAAAIRNAVKMATGVAINTLPLTPKRLYEEFHLAGLI

SEQ ID NO: 115918 - DNA, 2724 bp, Bradyrhizobium japonicum USDA 110
  CDS (1)..(2724): transl_table=11
atgagcttcgagatcaacggcaagacgtttccgcaggagccgcgtgccggccagtgcctccgcacgttcctgcgcgagctcggtcatttcggcgtcaagaagggctgcgatgccggcgattgcggcgcctgcaccgtgctgctcgacggcgagccggtgcacagctgcctgatcccggcgttccgcgccgaggggcgcactgtgaccacgatcgagggcctcggcggcgagctcggcgcgcatccgatgcagcaggccttcctcgatgcgcagggctttcaatgcggcttctgcaccgccggcatgatcctgacctgcgcctcgctgaaccaggcgcagcgcaccgatctcggcgccgcgctgaaaggcaatatctgccgctgcaccggctatcgcgcgatcgaggacgcgctgctcggcaagatcaacgtcgaggagagcgtcgaggccggcgccgccttcggccgcagccttccggcgccagcaggtcccgatgtcgtgcgcggcaaggcacgctacacgttcgacacgcagattgacggcctgctgaacatcaagctgctgcgctcgcctcacgcgcacgccagaatcaccgcgatcgacaagtctgcggcgctcagcgttcccggcgtgcatgcggtgctgacgcatgaggacgcgccatcggtgctgatctcgaccgcgcggcacgagaaggactggatggaccccgaggacacccgcatcctcgacgacgtcgtgcgcttcatcggccagaaggtcgcggcggtcgtcgccgaaagcgaaggcgccgccgaggaagcctgccggaggctcaaggtcacttacgaggtcctgcctgcgctgatcgatccagagcaggcgatggcgcccggcgcgcccatcattcatcccgaccgcaccaccgagaaccgcgtcgccgacgccaggcgcaaccttgcggctgagacccatggcgagttcggcgatgtcgcagcagcactcgccacatccgccgtcacctacgaagccaccttccacagccatcgcgtgcagcacgccgcgctggagacccatggcggcctcgcctggctcgacgcctccggtgtgcttaacgtccgcacctcgacgcaggtgccgttcctgacccggcgcgcgctgtcggacatcttccagctgcccatggacaaggtccgcgtgttctgcgagcgcgtcggcggcggctttggcggcaagcaggagatgttcgtcgaggatatccttgcgctcgccgcgctgaagaccggacgccccgtgaagctggagctcacccgcgaggagcagttcatcgcgacgtcgacgcggcatccgatgcgggtccacatcaaggccggtgccgatgccgacggcaagctcaccgcactccagctcgacgtgctctccaacaccggcgcctacggcaatcacgccggcccggtgatgttccactcgctgtccgagtccatcgccgtctacaattgtccgaacaagcgggtcgacggctacgccgtctacaccaacacggtgccatcgggtgcgtttcgcggctatggcctgccgcagacgctgatcgcgatcgaggccgcaatcgacgagctggccgggcagctcggcatcagcccctacgacatgcgccggcgcaacatcgtcaagccaggcgaccccatgctgtcgccgccgccatccgaatttcacgacgtgctctatggctcctacgggctcgaccagtgcctcgatctcgtcgagcgcgcgatgcaggcggatggcccgcggccggagctgtcgccggaatggctgatcggcgatggcatcgcgctgaccatgatcgacaccgtgccgcccgccggccacatcgcggacgccatgatcgcgctcaacgacgacggcggcttcgatctcaccgtcggcaccgccgagttcggcaacggcaccagcacggtccaccgccagatcgcggcgacgacgctggcgaccaccgtcgacaggattcgcctgcgccagtccgacaccgcccatggcggccacgacaccggcgcctatggcagcgcgggcaccttcgtcgccggcaaggcgacgcatgcagccgccatgcagcttgccacggacttgagggcggccgcggccggcgcctggctttgcgatgtcggaagctgcgcgctcgaggacgagttcgtcgtgagcggcgtcaggcgcatgtcctttgtggagcttgcgaagcttgcgcgcgaacgcggccagccgctcgcagcacaaggcaattccggcggcacgccgcgctcggtcggcttcaacgtgcagggctttcgcgtggcggtgaacaagggcaccggcgagctcaagattctcagaagcgtgcaggccgccgacgccggcgtcgtcgccaatcccatgcagtgccgcggccaggtcgagggcggcgtcgcgcaggcgcttggtgctgcgctctacgaggagatggtgatcgacgcggacggccgcgtcaccaacgccaagttccgcgactaccacctgccctccttcgcggacgtgccgcgcaccgaagtcttcttcgccgagacctccgacaccatcggccccttgggcgcgaagtcgatgagcgagagtccgtacaatccggtcgccgcggcgctcggcaacgcgattgcagacgccaccggcatccgcttcacggcgccgccgttcaagccggaccggctgtttccggcgctgcacgataaatttggttag

SEQ ID NO: 115919 - protein, 907 aa, Bradyrhizobium japonicum USDA 110
MSFEINGKTFPQEPRAGQCLRTFLRELGHFGVKKGCDAGDCGACTVLLDGEPVHSCLIPAFRAEGRTVTTIEGLGGELGAHPMQQAFLDAQGFQCGFCTAGMILTCASLNQAQRTDLGAALKGNICRCTGYRAIEDALLGKINVEESVEAGAAFGRSLPAPAGPDVVRGKARYTFDTQIDGLLNIKLLRSPHAHARITAIDKSAALSVPGVHAVLTHEDAPSVLISTARHEKDWMDPEDTRILDDVVRFIGQKVAAVVAESEGAAEEACRRLKVTYEVLPALIDPEQAMAPGAPIIHPDRTTENRVADARRNLAAETHGEFGDVAAALATSAVTYEATFHSHRVQHAALETHGGLAWLDASGVLNVRTSTQVPFLTRRALSDIFQLPMDKVRVFCERVGGGFGGKQEMFVEDILALAALKTGRPVKLELTREEQFIATSTRHPMRVHIKAGADADGKLTALQLDVLSNTGAYGNHAGPVMFHSLSESIAVYNCPNKRVDGYAVYTNTVPSGAFRGYGLPQTLIAIEAAIDELAGQLGISPYDMRRRNIVKPGDPMLSPPPSEFHDVLYGSYGLDQCLDLVERAMQADGPRPELSPEWLIGDGIALTMIDTVPPAGHIADAMIALNDDGGFDLTVGTAEFGNGTSTVHRQIAATTLATTVDRIRLRQSDTAHGGHDTGAYGSAGTFVAGKATHAAAMQLATDLRAAAAGAWLCDVGSCALEDEFVVSGVRRMSFVELAKLARERGQPLAAQGNSGGTPRSVGFNVQGFRVAVNKGTGELKILRSVQAADAGVVANPMQCRGQVEGGVAQALGAALYEEMVIDADGRVTNAKFRDYHLPSFADVPRTEVFFAETSDTIGPLGAKSMSESPYNPVAAALGNAIADATGIRFTAPPFKPDRLFPALHDKFG

SEQ ID NO: 115920 - DNA, 2376 bp, Bradyrhizobium japonicum USDA 110
  CDS (1)..(2376): transl_table=11
atgagcgcgcctctgacctcgctcgaccgcccgaactcttatatcggccgttcagtgccacgcccgaacgccaagcggttgcttgccggccgcggccgttatgtcagcgatctccgcctgccgcgcatgctgtacgctgcgttcctgcgcagcccgcatgcgcacgccaagatcgtcgccgtcaacaccgagcagacccgtgcgctcgaaggcgtgcatcttgtcgccacaggtgaggacctcgcaaaaatctgcacgccctggaccggcacgctcgatcatttcaagggtatgacctcggcgccgcaattgccgttaccgctggatcgcgtggtctgggccgggcaggccgtggtcgccgtcgtcgccgagagccgggcgatcgcggaagacgcgctggaactgatcgagatcgattacgaggatcttcccctcgttgtcgatatcgacagtgcgcgggaagcgggcgggccggtgatcaatcccggcagtgccaacaacacctgcttccgcgctcagctcgacaacggcaccgtcgacgaggccttcgcgcatgcggcccacgtggtggaggaggaattctccttcggccgccacaccgcggtgacgctggagccacgcgcgatcgtcgccgactatgatcccgctgccggcgcgctcacggtgcatcacgggacgcagacgccttaccagttccaggatctctattcgcgccactacggcatccccgaggcccgcgttcgcgtcatcgcaaccgacatcggcggttccttcgggatgaagcttcatgtctatcacgaggacatggcggtggtcggcctttcgatcctgctcggccgccccgtcaaatatgtcgccgaccgcattgaatcctttgtctccgacatccatgcccgcgaccatcgcgtccgggcccgcatggcggtcgatgccaagggcgaaatcctggcgatggacgtccttgacctgaccgcgatcggcgcgttctcgacctatccgcgcaccagcgtggtcgaaggcaatcaggtgatccgcctgatgggcgcgccctatcgcttcaggaactatcgcgccacgctggaggtgctcttccagaacaaggtgcagaccagccagtatcgcgctgtcggccatcccatcgcttgcgccgtcaccgagcggctggtggatatggccgcagccaaggtcgggctcgatccctttgccatccgcgcacagaacgtgatcgccgatgatgcctatccgcagacctcgccgaccggctaccgcttcgaggcgctgtcccatcaggcctgcctgaagcgcctgcatgagatgatggattatgacgcgcttcgtgccgagcaggcgaatttgcgcaagcgcggcatctatcggggcattggcatcgccacctttgtcgagatcaccaacccgagcccggccttctatggcgtcggaggcgcgcggatctcctcgcaggacggcgccattctcagcctgacgccgtcgggcgaggtgcgctgcctgatctcggtcaccgagcaggggcagggcaccgaggcgatcatcagccagatcgtggctgaccagctcggcctcgcgcaggagcgcgtcaaggtcatcaccggcgataccgaggtgacgccgcatggcggcgccacctgggcctgccgcggcgccggcatcggcggcgaaaccgcgctccaggccacgcgtgcgctcaagcgcaatattctggagatcgccgcgctgatcctccaggagcagccatctgcgctcgacatcatcgatggcgaggtcgtcgatgcggtgacgcggaaccagcgaatgccgatcgcggagatcgcgcgcatcgcctatttccgctccgacacgctgccgccgggcacgcaggcgcagctcacggtaagccatcacttcgccccgcagggttatcccttcgccttcaccaacggcattcagggctgttcgctggaggtcgatgtcgagaccggcttcatcaaggtgctgaagcatttcatcgtcgaggattgcggccgcgtcatcaatccgatgctggtggacgagcagctccgcggcggcgtcgtgcaggggctgggtgccgcgctgttcgaggaatgccgctacagcgaaaccggtcagctcatgaatggctcgctcgccgactacctcgttcccatgccgatggagatgcccgacatcgtcatcggccatgtcgagacgccgaccgccgacaccgtgctcggcgccaagggcgtcggcgaggccggcacggcggcggcgtcagcttgcgtgctcaacgcggtcaacgacgcgctcgcgccgttcggcgccacgatcaactcgattccgatcacgccgacaaaagtcctgaaagccctgaagcgtttctag

SEQ ID NO: 115921 - protein, 791 aa, Bradyrhizobium japonicum USDA 110
MSAPLTSLDRPNSYIGRSVPRPNAKRLLAGRGRYVSDLRLPRMLYAAFLRSPHAHAKIVAVNTEQTRALEGVHLVATGEDLAKICTPWTGTLDHFKGMTSAPQLPLPLDRVVWAGQAVVAVVAESRAIAEDALELIEIDYEDLPLVVDIDSAREAGGPVINPGSANNTCFRAQLDNGTVDEAFAHAAHVVEEEFSFGRHTAVTLEPRAIVADYDPAAGALTVHHGTQTPYQFQDLYSRHYGIPEARVRVIATDIGGSFGMKLHVYHEDMAVVGLSILLGRPVKYVADRIESFVSDIHARDHRVRARMAVDAKGEILAMDVLDLTAIGAFSTYPRTSVVEGNQVIRLMGAPYRFRNYRATLEVLFQNKVQTSQYRAVGHPIACAVTERLVDMAAAKVGLDPFAIRAQNVIADDAYPQTSPTGYRFEALSHQACLKRLHEMMDYDALRAEQANLRKRGIYRGIGIATFVEITNPSPAFYGVGGARISSQDGAILSLTPSGEVRCLISVTEQGQGTEAIISQIVADQLGLAQERVKVITGDTEVTPHGGATWACRGAGIGGETALQATRALKRNILEIAALILQEQPSALDIIDGEVVDAVTRNQRMPIAEIARIAYFRSDTLPPGTQAQLTVSHHFAPQGYPFAFTNGIQGCSLEVDVETGFIKVLKHFIVEDCGRVINPMLVDEQLRGGVVQGLGAALFEECRYSETGQLMNGSLADYLVPMPMEMPDIVIGHVETPTADTVLGAKGVGEAGTAAASACVLNAVNDALAPFGATINSIPITPTKVLKALKRF

SEQ ID NO: 115922 - DNA, 2574 bp, Enterococcus faecalis V583
  CDS (1)..(2574): transl_table=11
atgtattcaattattgtaaatggtcaaagtgaaacctgtgaaacaaacaaaaaattaatggactttttgcgggaggatctgggcctaactggaacaaaagatggctgtaaccaaggctcttgcggtgcatgtacggtgttagtaaatggaaaggcttccaaagcatgtttgtttactctagaaaaattagctggtaaagaagtcacgacaatcgaaggtttaagccaacggcaaaaagatgtctatgcctatgcgtttgcaaaaacgggtgcagttcagtgcgggtattgcatccctgggatggttatttcggcacaaggattattgaacaagaaacccgaacccacaaaagaagacattcagaaagctatacgaggaaacatttgtcgttgtacaggatatgtgaaaataatagaagccattcagttagctgctaaaatgttttgtgaagaagcgagcattccagaagaacattcaaatggtaaattaggggaagacttccaacgggtcgatgcagtggagaaaaccttaggaacagggatttatgtagatgacattgacatagaaggaatgcttcatgcatctgctttgcggagtgcctatcctcgcgcaaaagttctatcaatcgatagtacccaagcattggcgcatcctgactgtgtggctgtgttcacagctaaagacgttccaggaaataataaaattggtcatttagaatttatttccgattgggatgtaatgattccagaaggagaaataacacggtatgttggggatgcagtagcactcgttgtttcaaaaagaaaagaaaccttaccagagataaaaaatttagtggaagttgattacgaagaaatgataccgcttacttcttgtgaagctgctttagcagaaggtgcaccagctattcatgaaaagggcaatatcttgtctcatgaacacttggtacgtggcaatgcagaggaagtgttagaaaattctgcgtttgtagtgacagaacattattccgtaccaattaatgaacatgcctttatggagcccgaatgtgcgattgcacaacctgaaggtgagggcattttactctttagtgcgggtcaaagtatctatgatgaacaacgggaagtggctcggatgctagggctagacaaggaaaaaattcatgttcaatcaaaacttgttggtggtggttttggtggaaaagaagacatgagtgttcagcatcatgcatccttagccgcttggttattgaagaaaccagtaaaagtactgctaagccgtgaagaaagtttgatggttcatcccaaacgccatggcatggaaatggactttacgaccggctgtgatgaagaaggcaatttaactgcaatgaaagcagtgatttatgcggatactggggcctatgcttctttaggaggaccggtattgcaacgggcttgtacacatgcggcaggtccctacaagtatcaaacgattgatgtggaagggtttgctgtatatactaataatccgccagcaggtgcatttcgcggatttggtgtttgccaaacggcttttgcaattgaaagtaatttaaacttgttagcagaaaaagtcggactatcaccatgggaaatacgctttaaaaatgccgtcgccccaggagatactttaccgaatggacaattggtctcgaaaaatgcagcgttaaaagaagccttgttagcggttaaagacgtctatgaacaagcggaagttgctggaatttctagtttctttaaaaatagtggcgtgggtgtggggctacctgatacagggcgttgtattatttctgttgaagaaggaaaaatacatgtccgcacaagtgctgcttgtatcggtcaagggatggcaaccgttacgacgcaaattgcctgtgaaacattaaatttaccaccagaaatgattgttgcggaagcccctgatacaagaagaacaccgaattcaggaacgacaacggcttcgaggcagtcactcttcacaggagaagcaactagaagagcggcaatgcaattacggtatgagcttgatatgggacgtgctttaagcgatttggaaggcgaagaattttatggggaatattcagcgaaaacggatccattaattaatgataaaaaaagtccagttagtcatgctggttatggttatgctgctgaagtagctattctagatgacaaaggaaaagtagctaaatttgtggctgcgtatgatatggggcaagtggtgaatccacgagctgctgaaggtcaaattgaaggtgggattgcaatgggcatggggtatgctttaactgaaaaatttgccttagaagaaggctatgttaaagcaaaatatgcaacgctaggattagtgaacgccactcaagtaccaccaatcgaaacaattttggttcatgctgacaatcttcacgaaggtttagcttatggaattaaaggcgtaggtgagttagcaacgatccctaccgcaccagctttagcaggcgcatattttgccttggatggtcagctccgaccaagtctgcctttagaaaataccccttatcaaaagaaaaaaagataa

SEQ ID NO: 115923 - protein, 857 aa, Enterococcus faecalis V583
MYSIIVNGQSETCETNKKLMDFLREDLGLTGTKDGCNQGSCGACTVLVNGKASKACLFTLEKLAGKEVTTIEGLSQRQKDVYAYAFAKTGAVQCGYCIPGMVISAQGLLNKKPEPTKEDIQKAIRGNICRCTGYVKIIEAIQLAAKMFCEEASIPEEHSNGKLGEDFQRVDAVEKTLGTGIYVDDIDIEGMLHASALRSAYPRAKVLSIDSTQALAHPDCVAVFTAKDVPGNNKIGHLEFISDWDVMIPEGEITRYVGDAVALVVSKRKETLPEIKNLVEVDYEEMIPLTSCEAALAEGAPAIHEKGNILSHEHLVRGNAEEVLENSAFVVTEHYSVPINEHAFMEPECAIAQPEGEGILLFSAGQSIYDEQREVARMLGLDKEKIHVQSKLVGGGFGGKEDMSVQHHASLAAWLLKKPVKVLLSREESLMVHPKRHGMEMDFTTGCDEEGNLTAMKAVIYADTGAYASLGGPVLQRACTHAAGPYKYQTIDVEGFAVYTNNPPAGAFRGFGVCQTAFAIESNLNLLAEKVGLSPWEIRFKNAVAPGDTLPNGQLVSKNAALKEALLAVKDVYEQAEVAGISSFFKNSGVGVGLPDTGRCIISVEEGKIHVRTSAACIGQGMATVTTQIACETLNLPPEMIVAEAPDTRRTPNSGTTTASRQSLFTGEATRRAAMQLRYELDMGRALSDLEGEEFYGEYSAKTDPLINDKKSPVSHAGYGYAAEVAILDDKGKVAKFVAAYDMGQVVNPRAAEGQIEGGIAMGMGYALTEKFALEEGYVKAKYATLGLVNATQVPPIETILVHADNLHEGLAYGIKGVGELATIPTAPALAGAYFALDGQLRPSLPLENTPYQKKKR

SEQ ID NO: 115924 - DNA, 2382 bp, Streptomyces avermitilis MA-4680
  CDS (1)..(2382): transl_table=11
atgggaaccacgggtacgcccaccaaaatcacgcagggcaccaagtccaagggcggcatcggcgagtccacgctccgtccggacggcaccctcaaggtcaccggcgagttcgcgtactcgtccgacatgtggcacgaggacatgctctggggccagatcctgcgttccacggtcgcgcacgccgagatcgtgtcgatcgacacctccgaggccctcgcgcagcccggcgtctacgccgtcatgacgtacgacgacctgccgaccgacgtgaagaactacggtctggagatccaggacaccccggtcctcgcccacggcaaggtgcgccaccacggagagccggtcgcgatcgtcgccgccgaccacccggagaccgcgcgccgcgccgccgccaagatcaaggtggaataccgcgaactgccggtcatcacggacgaggcgtccgcgacggcgcccgacgcgatcctggtccacgagggccgcaccgaccaccacatcggccatgtctcgcacccgaacatcgtgcaccgccagccgatcgtccgcggcaacgccgaagaggccgccaagaaggccgacttcatcgtccggggcgagtacaccttcggcatgcaggaccaggccttcctcggaccggagtccggcctcgccgtgcccgcagaggacggtggcgtcgacctctacgtcgccacccagtggctgcactccgacctgcgccagatcgcgccggtcctcggcctgcccgaggacaaggtccgtatgacgctctccggtgtcggcggcgccttcggcggccgcgaggacctgtcgatgcagatccacgcctgcctgctggcgctgcgcaccggcaagccggtcaagatcgtctataaccggttcgagtccttcttcggccatgtgcaccgccacccggcgaagctctcctacgagcacggggccacgcgcgacggcaagctcacacatctgaaggcgcgcatcgtccttgacggcggcgcctacgcgtcggcctccccggcggtcgtcggcaacgcgtcctcgctgggggcgggcccgtacgtcatcgacgacgtcgacatcgaggccatcgcgctctacaccaacaacccgccgtgcggcgccatgcgcggcttcggcgcggtgcaggcgtgcttcgcgtacgaggcccagatggacaagctcgccgacaaggtgggcatggaccgggtcgagttccgtcagctgaacgcgatggagcagggcacgctcctgccgaccggacagccggtcgactccccggcgccggtcgccgaactcctgcgccgcgtcaaggcgatgccgctgccgcccgagcgtcagtgggagagcagcgagggcgccgacgtgcggcagctgccgggcggtctgtccaacaccacgcacggcgaaggcgtcgtacgcggtgtcggctacgcggtcggcatcaagaacgtcggcttctccgaagggttcgacgactactcgaccgccaaggtgcggatggaggtggtcggtggcgagccggtcgccaccgtgcacaccgcgatggcggaggtcggccagggcggtgtcaccgtccacgcgcagatcgcccgcaccgagctgggcgtcacacaggtgacgatccagccggccgacacccaggtgggcagcgccggttcgacatccgcgtcgcgtcagacgtacgtcaccggcggcgccgtcaagaactcctgcgagctggtccgcgagaaggtcctggagctgggccgccgcaagttcggtacgtaccaccccgcctgggcgaccgccgagctgctcctggagggcggcaaggtcgtcaccgacgcgggcgaggtcctcgccggcctcgtggacgtactcggcgacgagtccgtcgaggtcgaggccgagtggcggcaccgcccgaccgaggccttcgacctgcggaccggacagggcttcggccacgtccagtactcgttcgccgcgcaccgtgcggtggtcgaggtcgacaccgagctgggtctggtgaaggtcatcgaactggcctgcgcccaggacgtcggcaaggcgctcaacccgctgtccgtcatcggccagatccagggtggtacgacccagggcctgggcatggcggtcatggaggagatcatcgtcgacccgaagacggcgaaggtcaggaacccctccttcacggactacctgatccccaccatcctcgacacgccgaccatcccggtcgacgtgctcgaactcgccgacgaccacgctccctacgggctgcgcggcatcggcgaggccccgaccctgtcgtcgaccccggccgtcctcgcggcgatccggaacgcgacgggtctggaactcaaccggacgcccgtacggccggagcacctgaccggtaagtaa

SEQ ID NO: 115925 - protein, 793 aa, Streptomyces avermitilis MA-4680
MGTTGTPTKITQGTKSKGGIGESTLRPDGTLKVTGEFAYSSDMWHEDMLWGQILRSTVAHAEIVSIDTSEALAQPGVYAVMTYDDLPTDVKNYGLEIQDTPVLAHGKVRHHGEPVAIVAADHPETARRAAAKIKVEYRELPVITDEASATAPDAILVHEGRTDHHIGHVSHPNIVHRQPIVRGNAEEAAKKADFIVRGEYTFGMQDQAFLGPESGLAVPAEDGGVDLYVATQWLHSDLRQIAPVLGLPEDKVRMTLSGVGGAFGGREDLSMQIHACLLALRTGKPVKIVYNRFESFFGHVHRHPAKLSYEHGATRDGKLTHLKARIVLDGGAYASASPAVVGNASSLGAGPYVIDDVDIEAIALYTNNPPCGAMRGFGAVQACFAYEAQMDKLADKVGMDRVEFRQLNAMEQGTLLPTGQPVDSPAPVAELLRRVKAMPLPPERQWESSEGADVRQLPGGLSNTTHGEGVVRGVGYAVGIKNVGFSEGFDDYSTAKVRMEVVGGEPVATVHTAMAEVGQGGVTVHAQIARTELGVTQVTIQPADTQVGSAGSTSASRQTYVTGGAVKNSCELVREKVLELGRRKFGTYHPAWATAELLLEGGKVVTDAGEVLAGLVDVLGDESVEVEAEWRHRPTEAFDLRTGQGFGHVQYSFAAHRAVVEVDTELGLVKVIELACAQDVGKALNPLSVIGQIQGGTTQGLGMAVMEEIIVDPKTAKVRNPSFTDYLIPTILDTPTIPVDVLELADDHAPYGLRGIGEAPTLSSTPAVLAAIRNATGLELNRTPVRPEHLTGK

SEQ ID NO: 115926 - DNA, 2382 bp, Bordetella pertussis Tohama I
  CDS (1)..(2382): transl_table=11
atgactgatgcgacaagccccggactgggccgcagcgcgccccgtatcgaggacgatgcgctgctgcgcggccaggcgcgcttcctggacgatatcgaggtcgagggcgtgctgcatgcctgcttcgtgcgtagcccgcatgcccatgcgcgccttgtctcgatcgacctgtcggccgcccgcgcggtgccgggcgtggccgcggtctatggggcgcgcgacctgttcggccagttgacgtcctggcgcatgccgctggggttcccgctggcggcgctgcccgatgacacgacgccgttcgtgctggccgagcgcgaggtggcgttcgtcggcgaggccatcgcggtggtggtggccgacagccgccacatcgccgaggacgcggcggcgcgggtggcgatcgaatatgaagtgctgggcgcggtggtggattgccgcgatgcgttgcggcccgatgcgccgctggtgcgcggcgagctcgcgtcgaacattctgcagcagtacacgctggcctatggcgactgcgagacggctttcgcgcaggcgcaccgggtgctggaagacgatttctgggtgcatcggggctgcgcgcatcccatggaagggcgcggcgtgctggcgcgcatggaccgcgccaccgacacgctgaccgtgtggtcctcgacccagatggcccacgaactgcattacacgctggccctgatgctgggccagcccgaggaccgcctgcgcgtggtgacgcccgacgtgggcggcgggttcggcgccaagttcatgatttatcccgaggaaatggcgattcccgccgccgcgcgcaagctgggccgcccggtcaagtgggtggaggaccggcgcgagcatttcacgacctcgatccaggagcgcgaccagtactggaaggtggcgatggccatcgacgaccagggccatgtgctcggcatacgcggcaacttcgtgcacgacaacggcgcgtatacgccgcagggcaccaatgtgccgtacaacgccgcctcgtccatgaccggcccctacgtggtgccggcgttctcgctcgatgtgagcgtggcctataccaacaaggtgccggtggccacggtgcgcggcgcgggatatccgcaggcggccttcgtcatggagcgcatgatggacagggtggcggccgagttgggcatcgacccgggcgaatgccgccgccgcaacctgatcggcccggccaagattccctacaccaagccgttgaagtcgcgcgcgggaatgccgctgaccatagacagcggcgattttcccgccctgcaggcatgcgcgctgcaggcgtccgattatgacggcttcgcggtgcggcgcgatgcggccctggcgcgcggccgctggcgcggcatcgcggtggccaacagcgtcgagcccaccgggcgcggcccgttcgaggtggcgcgcgtgcgcgtccagccgtcgggccaggtgtcgatctacaccggcgccctggccatgggccagggcatcaagacgacgctggcgcagatctgcgccgggcacctgggcgtgccggtcgcggcggtcgaggtgcaggccggcgataccgcctacgtgggctacggcatgggcggtttcgccagccgccaggccatcatggccggttcggcggtcgaccaggccgccgcccaggtgcggcggcaggcgctggagacggcggcggcggtgctcaaggccgaggccgaaacgctggaactggccgatggcgaagtgcgcgcgcccgacggacagtcggtgtcgctggcgcggcttgccatgctgcgcaaaggggtgccgggctatgcgctggtcagcccgggcgatcccgggctggacgccaccgcgtacttccactgcgacgcgcagacctacgccggcgcctcgcatgtatgcgaggtcgaggtcgaccccgccaccggggccatagagatcgtgcgctatgtggcggcgcaggacagcggccgcatcatcaatccgcagctggccgagggccaggtgcacggcggggtcgtgcacggcatcggcaatgccttgttcgagtggatgggctatgacgccgccggccagcccctgagcactacgtttgccgaatacctgctgcccaccgcgccggaagtgccgcccatcgaggtggtgttccagccctctcccacccccttgaacccgctgggcgtcaagggcgtgggagagtgcgccaccattccggtggccgtggccgtggtcggcgccgtggagcacgccgtggcccattgcggggtgcgcgtgaccgagtttccgcttacgccggtgcgactgctggagctgctgacgcaggccgaagcgcgcgccgccgcgcctactgattcaggggagtttgtcgatggagttcactaa

SEQ ID NO: 115927 - protein, 793 aa, Bordetella pertussis Tohama I
MTDATSPGLGRSAPRIEDDALLRGQARFLDDIEVEGVLHACFVRSPHAHARLVSIDLSAARAVPGVAAVYGARDLFGQLTSWRMPLGFPLAALPDDTTPFVLAEREVAFVGEAIAVVVADSRHIAEDAAARVAIEYEVLGAVVDCRDALRPDAPLVRGELASNILQQYTLAYGDCETAFAQAHRVLEDDFWVHRGCAHPMEGRGVLARMDRATDTLTVWSSTQMAHELHYTLALMLGQPEDRLRVVTPDVGGGFGAKFMIYPEEMAIPAAARKLGRPVKWVEDRREHFTTSIQERDQYWKVAMAIDDQGHVLGIRGNFVHDNGAYTPQGTNVPYNAASSMTGPYVVPAFSLDVSVAYTNKVPVATVRGAGYPQAAFVMERMMDRVAAELGIDPGECRRRNLIGPAKIPYTKPLKSRAGMPLTIDSGDFPALQACALQASDYDGFAVRRDAALARGRWRGIAVANSVEPTGRGPFEVARVRVQPSGQVSIYTGALAMGQGIKTTLAQICAGHLGVPVAAVEVQAGDTAYVGYGMGGFASRQAIMAGSAVDQAAAQVRRQALETAAAVLKAEAETLELADGEVRAPDGQSVSLARLAMLRKGVPGYALVSPGDPGLDATAYFHCDAQTYAGASHVCEVEVDPATGAIEIVRYVAAQDSGRIINPQLAEGQVHGGVVHGIGNALFEWMGYDAAGQPLSTTFAEYLLPTAPEVPPIEVVFQPSPTPLNPLGVKGVGECATIPVAVAVVGAVEHAVAHCGVRVTEFPLTPVRLLELLTQAEARAAAPTDSGEFVDGVH

SEQ ID NO: 115928 - DNA, 2382 bp, Bordetella bronchiseptica RB50
  CDS (1)..(2382): transl_table=11
atgactgatgcgacaagccccggactgggctgcagcgagccccgtatcgaggacgatgcgctgctgcgcggccaggcgcgcttcctggacgatatcgaggtcgagggcgtgctgcatgcctgcttcgtgcgcagcccgcatgcccatgcgcgccttgtctcgatcgacctgtcggccgcccgcgcgatgccgggcgtggccgcggtctatggggcgcgcgacctgttcggccagttgacgtcctggcgcatgccgctggggtttccgctggcggcgctgcccgatgacacgacgccgttcgtgctggccgagcgcgaggtggcgttcgtcggcgaggccatcgcggtggtggtggccgacagccgccacatcgccgaggacgcggcggcgcgggtggcgatcgaatatgaagtgctgggcgcggtggtggattgccgcgatgcgttgcggcccgatgcgccgctggtgcgcggcgagctcgcgtcgaacattctgcagcagtacacgctggcctatggcgactgcgagacggctttcgcgcaggcgcaccgggtgctggaagacgatttctgggtgcatcggggctgcgcgcatcccatggaagggcgcggcgtgctggcgcgcatggaccgcgccaccgacacgctgaccgtgtggtcctcgacccagatggcccacgaactgcattacacgctggccatgatgctgggccagcccgaggaccgcctgcgcgtggtgacgcccgacgtgggcggcgggttcggcgccaagttcatgatttatcccgaggaaatggcgattcccgccgccgcgcgcaagctgggccgcccggtcaagtgggtggaggaccggcgcgagcatttcacgacctcgatccaggagcgcgaccagtactggaaggtggcgatggccatcgacgaccagggccatgtgctcggcatacgcggcaacttcgtgcacgacaacggcgcgtatacgccgcagggcaccaatgtgccgtacaacgccgcctcgtccatgaccggcccctacgtggtgccggcgttctcgctcgatgtgagcgtggcctataccaacaaggtgccggtggccacggtgcgcggcgcgggatatccgcaggcggccttcgtcatggagcgcatgatggacagggtggcggccgagttgggcatcgacccgggcgaatgccgccgccgcaacctgatcggcccggccaagattccctacaccaagccgttgaagtcgcgcgcgggaatgccgctgaccatagacagcggcgattttcccgccctgcaggcatgcgcgctgcaggcgtccgattatgacggcttcgcggtgcggcgcgatgcggccctggcgcgcggccgctggcgcggcatcgcggtggcaaacagcgtcaagcccaccgggcgcggcccgttcgaggtggcgcgcgtgcgcgtccagccgtcgggccaggtgtcgatctacaccggcgccctggccatgggccagggcatcaagacgacgctggcgcagatctgcgccgggcacctgggcgtgccggtcgcggcggtcgaggtgcaggccggcgataccgcctacgtgggctacggcatgggcggtttcgccagccgccaggccatcatggccggttcggcggtcgaccaggccgccgcccaggtgcggcggcaggcgctggagacggcggcggcggtgctcaaggccgaggccgaaacgctggaactggccgatggcgaagtgcgcgcgcccgacggacagtcggtgtcgctggcgcggcttgccatgctgcgcaaaggggtgccgggctatgcgctggtcagcccgggcgatcccgggctggacgccaccgcgtacttccactgcgacgcgcagacctacgccggcgcctcgcatgtatgcgaggtcgaggtcgaccccgccaccggggccatagagatcgtgcgctatgtggcggcgcaggacagcggccgcatcatcaatccgcaactggccgagggccaggtgcacggcggggtcgtgcacggcatcggcaatgccttgttcgagtggatgggctatgacgccgccggccagcccctgagcaccacgtttgccgaatacctgctgcccaccgcgccggaagtgccgcccatcgaggtggtgttccagccctctcccacccccttgaacccgctgggcgtcaagggcgtgggagagtgcgccaccattccggtggccgcggccgtggtcggcgccgtggagcacgccgtggcccattgcggggtgcgcgtgaccgagtttccgcttacgccggtgcgactgctggagctgctgacgcaggccgaagcgcgcgccgccgcgcctactgattcaggggagtttgtcgatggagttcactaa

SEQ ID NO: 115929 - protein, 793 aa, Bordetella bronchiseptica RB50
MTDATSPGLGCSEPRIEDDALLRGQARFLDDIEVEGVLHACFVRSPHAHARLVSIDLSAARAMPGVAAVYGARDLFGQLTSWRMPLGFPLAALPDDTTPFVLAEREVAFVGEAIAVVVADSRHIAEDAAARVAIEYEVLGAVVDCRDALRPDAPLVRGELASNILQQYTLAYGDCETAFAQAHRVLEDDFWVHRGCAHPMEGRGVLARMDRATDTLTVWSSTQMAHELHYTLAMMLGQPEDRLRVVTPDVGGGFGAKFMIYPEEMAIPAAARKLGRPVKWVEDRREHFTTSIQERDQYWKVAMAIDDQGHVLGIRGNFVHDNGAYTPQGTNVPYNAASSMTGPYVVPAFSLDVSVAYTNKVPVATVRGAGYPQAAFVMERMMDRVAAELGIDPGECRRRNLIGPAKIPYTKPLKSRAGMPLTIDSGDFPALQACALQASDYDGFAVRRDAALARGRWRGIAVANSVKPTGRGPFEVARVRVQPSGQVSIYTGALAMGQGIKTTLAQICAGHLGVPVAAVEVQAGDTAYVGYGMGGFASRQAIMAGSAVDQAAAQVRRQALETAAAVLKAEAETLELADGEVRAPDGQSVSLARLAMLRKGVPGYALVSPGDPGLDATAYFHCDAQTYAGASHVCEVEVDPATGAIEIVRYVAAQDSGRIINPQLAEGQVHGGVVHGIGNALFEWMGYDAAGQPLSTTFAEYLLPTAPEVPPIEVVFQPSPTPLNPLGVKGVGECATIPVAAAVVGAVEHAVAHCGVRVTEFPLTPVRLLELLTQAEARAAAPTDSGEFVDGVH

SEQ ID NO: 115930 - DNA, 2334 bp, Rhodopseudomonas palustris CGA009
  CDS (1)..(2334): transl_table=11
atgagcggtcccgcattccaaggcggtctcgaccgcgccggcgtgccgctggtcgacggtattgataaggtcacggggcgggcgcggtacaccgccgatctcgatcataccggagcattagttgctcgcatcctacgtagcccgatcagtcatggcgatatcgtccggctcgatgtcagcaaggcgttggcactcgacggtgtcgcggcgatcgtcaccggcgaggactgcgcaatcacctatggcgtgctgccgatcgcgatgaacgagtatccgatggcgcgcgatcgcgtccggtatcgcggtgaaccggttgcggcagtggccgcggtcgatgcagagacggcacggcaggcgctcgacctgatcgaactcgagctgcgtgaattgccggcttactacgagtcggaggccgcccgcgccccggatgcctggctgctgcacgacaacaagccgggcaatatcgagcgagaggttcacaatgagttcggcgatcttgccgcaggcttcgaagccgccgatctgatccgcacccacacgcatcattgtgccgaggtcaatcacgcgcagatcgagccgcacgcctgcctgatggattacgatccggtcaccgggcggctcaccgcccagagcgtgtcgcaggtcggctattatctgcatctgatgctggcgcgctgcctcgagatcgatccgtcgcgggtgcgggtgatcaagccgttcgtcggcggcggcttcggcgcccgcgtggaagtcttgaatttcgaggtgatcgccgcactgctcgcccgtaaggccagtggcagagtgttgatgcggctgagccgcgaggaaaccttcatcacccatcgcgcccggccgcagaccgacatcaccttgacgatcggaacgcggcgcgacggccggttcaccgcctgctcgtgcgaagtggtgcagcgcggcggcgcctatgcgggttacggcatcgtgaccatcctgtatgccggcgcgctgctgcaggggctctacgacatccccgccgtcaaatacgacggctaccgcgtctacactaacctgccaccctgcggcgcaatgcgcgggcacggctcggtcgacgttcgtcacgccttcgagaatctggtcgatcggatggcgcgcgaactcggtctcgatccttttgcggtgcgccgcgccaatctgctggccgcgccgacgcgcaccctcaacgatctgatggtcaacagctatggtctcgccgaatgcctcgacaaggtcgagcgcgccagcggttggcatgagcgaattggccggctgccgccgggcaagggtctcggcatggcgtgttcgcactatgtcagcggttcggccaagccgatccatttcaccggcgagccccatgcagtggtggcgctgcggctcgatttcgacggcggcatcacggcccttaccggcgccgccgacatcggccagggctcgtcgactgtggtggcgatcactgttgctgaaaccctgggcgtcgcgctgaaccgggtccgggtaatttccggcgactctgcaattaccccgaaggacaatggcgcgtattcgtcgcgcatcaccttcatggttggcaacgccgcaatcgatgcggcgaccaagctgaaacagatcctgatcgcggcggcagcgcggaaactcgaagccgtgccggagcagatcgagtgtgccggcgagagcttcttcatcggcagcggtgcccaggccgcgctcggcttcgccgaggtggtgaaagccgcgctggtcgacgagggcgccatcaccgtcaagggcatcttcacctgcccgccggagtcgcagggcggccaacatcgcggcggggcggtcggctcaacgatgggatttagctacgcagcccaggttgtcgaggtcagcgtcgacgacgcgaccggtctgatcaccgtcgataaggtctgggcggcgctcgattgcggccgcgccatcaatccgctcgccgtggtcggacaggtacagggcgccgtatggatggggatggggcaggcgatgtgcgaagagacgcgctatctcgacgggctgcctgcgcatgccagctttctcgaatatcggatgccgacgatgatcgaatcgccgccgatcgaggtcgcgatcgtcgagagcgtcgatccgttcgggccgttcggcgccaaggaggccagtgaaggcgcactcgccggtttcccgccggcgatggtgaatgccgtcgccaatgcgatcggtatcgatctcgatgatttgccggcaacgcccgatcgggtcgtcgaggcgctggcacggcggcggcgcgaggcaaagcgggcggtggcggtgagggcagcctcatga

SEQ ID NO: 115931 - protein, 777 aa, Rhodopseudomonas palustris CGA009
MSGPAFQGGLDRAGVPLVDGIDKVTGRARYTADLDHTGALVARILRSPISHGDIVRLDVSKALALDGVAAIVTGEDCAITYGVLPIAMNEYPMARDRVRYRGEPVAAVAAVDAETARQALDLIELELRELPAYYESEAARAPDAWLLHDNKPGNIEREVHNEFGDLAAGFEAADLIRTHTHHCAEVNHAQIEPHACLMDYDPVTGRLTAQSVSQVGYYLHLMLARCLEIDPSRVRVIKPFVGGGFGARVEVLNFEVIAALLARKASGRVLMRLSREETFITHRARPQTDITLTIGTRRDGRFTACSCEVVQRGGAYAGYGIVTILYAGALLQGLYDIPAVKYDGYRVYTNLPPCGAMRGHGSVDVRHAFENLVDRMARELGLDPFAVRRANLLAAPTRTLNDLMVNSYGLAECLDKVERASGWHERIGRLPPGKGLGMACSHYVSGSAKPIHFTGEPHAVVALRLDFDGGITALTGAADIGQGSSTVVAITVAETLGVALNRVRVISGDSAITPKDNGAYSSRITFMVGNAAIDAATKLKQILIAAAARKLEAVPEQIECAGESFFIGSGAQAALGFAEVVKAALVDEGAITVKGIFTCPPESQGGQHRGGAVGSTMGFSYAAQVVEVSVDDATGLITVDKVWAALDCGRAINPLAVVGQVQGAVWMGMGQAMCEETRYLDGLPAHASFLEYRMPTMIESPPIEVAIVESVDPFGPFGAKEASEGALAGFPPAMVNAVANAIGIDLDDLPATPDRVVEALARRRREAKRAVAVRAAS

SEQ ID NO: 115932 - DNA, 2322 bp, Rhodopseudomonas palustris CGA009
  CDS (1)..(2322): transl_table=11
atggttccaaccaagttggctcccgccaagttcggtgtcggtcagagcgtgctgcgcaaagaggacgatcctctgattcgcggcaaaggccgctacaccgatgacgtcgctccggcctcgaccgcttatgcgctgatgctgcgctcgccgcatgcccatgccaccttcaagctggacgcgacggcggcgcgcgcgctgcccggcgtgctgacgattttgactgcggacgacgtcgccgatctcggcggcctgccgtgcctgttcaatctgccggacaccccgttcaaggggccggactatccaatcctggcgcgcgacgaggtgcgccatgtcggcgatgcgatcgcgttcgtggtcgccgacacgattgcgcatgcgcgcgatgcactcgaggcgattgcggtggagtggtcgccgctgccggcggtgatcggggctgcgcgtgccgtcgagccgggagcgccgcaggtgtggcccgaccatgccggcaacgtgctgttcgacgccggcatcggcaacaagaaggcaaccgaagaggcgttcgccaaagcccatgcgatcgcggaaatccgcatcgtcaatccgcgtatcgtcaccaactacatggaaacccgcgcggcggtctgtgagtacgacgccaagcgcgatcacttcacgctgacggtcggcagccagggtagccatcggctgcgcgatatcctgtgccagaccgtgctgaagatcccggtcgaaaagatgcgggtgatctgtccggatgtcggtggcgggttcggcaccaagctgtttccctatcgcgaatacgcgctgctcgcggtggccgccaagaagctgcgcaagacggtgaagtggaccgccgatcgcggcgatcacttcgtcggcgactcgcaaggtcgcgacaacgtcacgacggcacggatggcgctggccgaagacggcaagtttctcggcatggacgtcgatctgatcggcgacgtcggcgcctatctgtcgaccttcggcccgtacattccttacggcggcgccggcatgttgccggggctctatgacatccaggcgttctactgtcgcatccgcaccgtgttcacccacaccgtaccggtcgatgcctatcgcggcgccgggcgtcccgaagcggcttacgtggttgaacgtctcgtcgatgcctgcgcgcggaagctggcgatgtcgccggatgcgatccggcgcaagaacttcattccgccgcgcaagctcccctacaagaccgcgaccggcaaggtgtacgactccggcgacttcactgcgcatctgaagcgcgcgatggagatcggcgactggaaggacttcggcaagcgcgccaaggccgccaagaagcacgggctggtgcgcggcatcgggctcgcctcctacgtcgaggtctgcggtaccatgggcgaggagaccgccaaggtggtgcttgatccggatggcgacatcactgtgctgattggcacgcagtcgagcgggcaaggccaccagaccgcttatgcgcagatcgtcgccgagcagttcggcgtgccgcaggagcgggtgcgggtggtgcagggcgacaccgacaggatcgccaccggcctcggcaccggcggctcggcatcgatcccgtccggcggcgtcagcgtgcagcgcgccacccatcagctcggcgagcagcttcgcgacatcgcggccgacgcgctggagaccagcaccgccgacctcgaaatcagcgacggcacgatccgcatcgccggcactgaccgctccatcaccttcgccgatctcgccaagcggtccggcgtcgatccggccaagctcaacgccagcgcggcgttctccagtgccgacggcacctttcccaacggcacgcatttggtcgagattgaactcgatccggcgactggcaagatcaggatcgtcaactatgtcatcgtcgatgatttcggcgtcacgttgaacccgctgctgctcgccgggcaggtccatggcggaaccattcagggcatcggccaggcgctgatggagcaggcggtgtacaacgccgaggacggccagctcatcaccggttcgttcatggactacgcgctgccacgcgcggccgatggcgcgccgatcactttcgaaacccacaacgtgccctgcgccaccaacccgatgggcgtcaaaggtgcaggcgaggcgggggcgatcggctcctgcccggcggtgatgaatgcgatcatcgacgcgctctggcgtgaatatcggatcgaccatatcgacatgccggcgacgccggagcgggtgtggatggcgatccgcgagcatgagcgccggcaccgtctgtga

SEQ ID NO: 115933 - protein, 773 aa, Rhodopseudomonas palustris CGA009
MVPTKLAPAKFGVGQSVLRKEDDPLIRGKGRYTDDVAPASTAYALMLRSPHAHATFKLDATAARALPGVLTILTADDVADLGGLPCLFNLPDTPFKGPDYPILARDEVRHVGDAIAFVVADTIAHARDALEAIAVEWSPLPAVIGAARAVEPGAPQVWPDHAGNVLFDAGIGNKKATEEAFAKAHAIAEIRIVNPRIVTNYMETRAAVCEYDAKRDHFTLTVGSQGSHRLRDILCQTVLKIPVEKMRVICPDVGGGFGTKLFPYREYALLAVAAKKLRKTVKWTADRGDHFVGDSQGRDNVTTARMALAEDGKFLGMDVDLIGDVGAYLSTFGPYIPYGGAGMLPGLYDIQAFYCRIRTVFTHTVPVDAYRGAGRPEAAYVVERLVDACARKLAMSPDAIRRKNFIPPRKLPYKTATGKVYDSGDFTAHLKRAMEIGDWKDFGKRAKAAKKHGLVRGIGLASYVEVCGTMGEETAKVVLDPDGDITVLIGTQSSGQGHQTAYAQIVAEQFGVPQERVRVVQGDTDRIATGLGTGGSASIPSGGVSVQRATHQLGEQLRDIAADALETSTADLEISDGTIRIAGTDRSITFADLAKRSGVDPAKLNASAAFSSADGTFPNGTHLVEIELDPATGKIRIVNYVIVDDFGVTLNPLLLAGQVHGGTIQGIGQALMEQAVYNAEDGQLITGSFMDYALPRAADGAPITFETHNVPCATNPMGVKGAGEAGAIGSCPAVMNAIIDALWREYRIDHIDMPATPERVWMAIREHERRHRL

SEQ ID NO: 115934 - DNA, 2778 bp, Strongylocentrotus purpuratus
  CDS (1)..(2778)
atgatacaaaatgagtactttaatggttacaagcaatcacctcgacgtgaagacgacatcgccattgtgaatgctggtatgagagtggtgttggatgaagagagtaacataatccaggatgtgagtctagcatatggaggcatggcagctactactgtactagctctcaagaccatgcagaaactacttggaaagaagtgggatgagtcgatgcttgaagccactttctcgtcccttgctcacgatctacccctccctgctggttcccctgggggtatggagtcttacaggaaatctctaaccgtcagtttcttcttcaagttttatctcatggttttggaacagatttcagccaatcaggtaaataatggtttaataccgtcaatcaccagtgaaagcattccatccaactttaaatcggctacttcagtacaccaccagcaagaaataaatgctacacaattctatcaggaggttgccccaggacaacccaaacaagatcctgttggacgtccacttgtccacaagtctgcttacaaacagaccaccggggaagcaatctacattgatgatatgcctagtatagcaggtgagctgtatctggcttttgtcatgagccagaaagcacatgcaaaaatcatatcggttgatccgtccaaggcgctgtcactagagggcgtgcatgattttgtaagccacaaggatgtgttggggagtaatcaagtaggatctgtgttccgtgacgaagagctgctggcatcaacagaggttcaccatgtaggacagccaataggagctatagtagcagacacacaggccttggcacagagaggagcaaaactagtacagatacagtatgaggaattagaacctattattactattgaggatgccattgccaagcagtctttcttccctatcaccaaaggcttacagaacggcaatgttgcagaggccttggagaagtccgatcatgtgatcgagggtgagatgaaggtcggaggtcaagagcatttctaccttgagacgcagtgtgcctttgccatccctaaaggagaggatggagagatggagatcttcctatcgacacaacatcccacagaagctcaaaaaatcacctccatagctctgggtatcccattcaatcgtgttgtatgtcgtaccaagcggatcggaggagggtttggaggcaaggaaagtagaagctcgatgctagctgcaataagtgctctggctgcaaacaaactgaaccgacctgtgaggtttatgatggacagagatgaggacatgatgtcaacaggaggtaggaatcccttcctgggtcgctacaaggttggttttaccaacgagggcaaactcactgctttggacattgagatgtatggcaatgctggattcagctatgatctctctgctgctgtactggaaagagcagtgactcatattgacaatgtctaccacttccctgtcacgcgggtctatggtcgtctctgtcggaccaacctaccgtccaacacagcattccgaggctttggtgggccacaggcgatggtcatctgtgaatccttcatgacagacatcgccatcaagttagggctctcacaagaaaaggtgagagagttgaacttctatacggaaggtgatgtgaccccatgtaagcaggtattgactggatgccagctgacacgatgctgggaccagtgccttgagaagagcaactatgaaaccagaaggaagaatgtggatatttttaacagtgagaacagatggaagaagagaggtcttgccataactccaaccaagtttggtatagcctttactgctcgcttcctgaaccaggccggtgctcttgtccacatctacaccgatggttccgtcctggtgacccacggtgggattgagatgggtcaggggcttcataccaagatgatccaggtcgcatcaagaactctaggtatcccggagagtaagattcacctgtcagagactgacaccagtaaggtacccaacacctcacccacggccgccagcactgggtctgatctcaacggcagggctatcgagaatgcttgtcagactcttgtacagagattagagccttacatgcatgccagccctaaaggcaactgggatgagtgggttgatgcagcatatagggacagagtgagcctatctagtacaggtttctacaagacccctgatctgacgtatgactgggagaagaacgaaggcaagctgttcaattatttctcttggggtgtgggtgtgtccgaagtggagatcgactgcctgactggagatcatcgcactctcaggacggacatcgtcatggatgtcggaaacagcatcaaccctgccatcgacatcggccagattgaaggtgcctttacccagggctatggattgttcacccttgaagaccaccgatggagtcctaagggtcaccttctgaccaggggaccaggcttctacaagataccaggctttggtgatgtacctccagagttcaacgtgtccctcctgcagaacgccgcaaaccataacaacacttgttcttcaaaggctgttggtgagcctcctctcttccttggctcctctgtcttcttcgccatcaaggatgccatcttggcggccagatctgatgaaggcctgggaaacttcatgctccacagtccagcagtggctgaacgaattagactagcctgtgtcgaccaattcacaaaatggtttccagatgccgaaccaggaacgtacacacctttctttgtgagaccctag

SEQ ID NO: 115935 - protein, 925 aa, Strongylocentrotus purpuratus
MIQNEYFNGYKQSPRREDDIAIVNAGMRVVLDEESNIIQDVSLAYGGMAATTVLALKTMQKLLGKKWDESMLEATFSSLAHDLPLPAGSPGGMESYRKSLTVSFFFKFYLMVLEQISANQVNNGLIPSITSESIPSNFKSATSVHHQQEINATQFYQEVAPGQPKQDPVGRPLVHKSAYKQTTGEAIYIDDMPSIAGELYLAFVMSQKAHAKIISVDPSKALSLEGVHDFVSHKDVLGSNQVGSVFRDEELLASTEVHHVGQPIGAIVADTQALAQRGAKLVQIQYEELEPIITIEDAIAKQSFFPITKGLQNGNVAEALEKSDHVIEGEMKVGGQEHFYLETQCAFAIPKGEDGEMEIFLSTQHPTEAQKITSIALGIPFNRVVCRTKRIGGGFGGKESRSSMLAAISALAANKLNRPVRFMMDRDEDMMSTGGRNPFLGRYKVGFTNEGKLTALDIEMYGNAGFSYDLSAAVLERAVTHIDNVYHFPVTRVYGRLCRTNLPSNTAFRGFGGPQAMVICESFMTDIAIKLGLSQEKVRELNFYTEGDVTPCKQVLTGCQLTRCWDQCLEKSNYETRRKNVDIFNSENRWKKRGLAITPTKFGIAFTARFLNQAGALVHIYTDGSVLVTHGGIEMGQGLHTKMIQVASRTLGIPESKIHLSETDTSKVPNTSPTAASTGSDLNGRAIENACQTLVQRLEPYMHASPKGNWDEWVDAAYRDRVSLSSTGFYKTPDLTYDWEKNEGKLFNYFSWGVGVSEVEIDCLTGDHRTLRTDIVMDVGNSINPAIDIGQIEGAFTQGYGLFTLEDHRWSPKGHLLTRGPGFYKIPGFGDVPPEFNVSLLQNAANHNNTCSSKAVGEPPLFLGSSVFFAIKDAILAARSDEGLGNFMLHSPAVAERIRLACVDQFTKWFPDAEPGTYTPFFVRP

SEQ ID NO: 115936 - DNA, 4068 bp, Nasonia vitripennis
  CDS (1)..(4068)
atggaatcgaaacaactgtacgatgtaaaagagaacgaagataaccatcaaattgaaaaaataagcaactttttaatattctatgtgaacggtaaaatgattaaagactgcaacattgagccagaatggacattaatttattacctgcgaaataaattaggattatgcggaacaaaacttggatgctcggaaggtaactgcggagcctgcacagtaatgatatcaagatttgatagaaagaacaacaaaataattcatttagcagcgaatgcatgtttaacaccagtgtgtgcaatgcatggcatggctgtcactactgttgagggcatcggtagtacaagaaacaaacttcacccagtacaagagcgccttgctaaagctcatggatctcaatgcgggttttgtacgccaggcatcgttatgtcaatgtatgctttactaagaagtaatccaaaacctacgatgaatgacatagatatagcttttcaaggtaatttatgcagatgtactggctatagacctataattgaaggattaagaacttttaccaaagaatgggaacaatcacgtatgtcaaagctcaaaaatcatgaggaaaaattatgtgccttaggaaatgcttgttgtaaaaaggctttcacatcagaaccaaccgctttatttgattctaaggaattcacaccgtacgattcttcacaagaacctatttttccgccaagtttacagttatcgtcgaacttagatgatgagtatttaataatcagtggaaaagaagttacttggtatagaccaacgcaattaaagaagctgcttattttaaaaaatcaatatccaaatgcaaaaataatagtaggcaacacagaagtaggtgtggaagtgaaaatcaaacacctaatgtatccagttctaattcaatcaactgcaataaaagaattaaaaatcattgaagaaatgaatgatggaattaaaataggagctagtgtcacgttagtggagatggaatctgcccttcggcatcaaattagtactaaacatgaatccagaacaagaatatttggaagcatcgttaaaatgttacattggtttgctggtcatcaaataagaaatgttgccgcagtaggagggaacatcatgacaggaagtccaatttcggatttgaatccaatttttttggctgtcggtattaaattaaatttgtgtagtcttaacaacggccatagatctgttatcatggataatacattttttcttggttaccgacgcaacatcgttgctccggatgaagtattattatccattgaagtaccttttaacacgccgaatcagtattttgtttcatataaacaatccaaacggcgtgatgacgatattacaatagttaacatggctatgaatgtattttttaaacctaatactaacattgttcagaaaataaatctaacttttggcggcatggctcctattactgtattggcaaaaaaaacttgtgaatctttggtgggaaagaattgggatgaaagtattttagaggctgtaaccaacaatttagttgcggaattgactcttcccgggaatgcaccaggtgggatgatactgtatcgacgttcattaactttgagtttatttttcaaaggtttcataagcatatggaaaaaattacacaaagacatcccaaacatagcaccagtattaaaagaattggaatctgcttctgatggttttcattacttacctcctaagagttctcaatattaccaaatggtttccaaagatcagtcatcgattgatttgattggaaggcctctaatacacgccagtgcatttaaacaagcaagtggagaagcaatctattgtgatgatatccctcgaataacgggcgaactttatttagctctcgtgttatcaacaagggctcatgccaggataacagggatcgataattctaaagctgttgctttagatggcgtagtggcctattttgatgcaaaagatattccggagcatcgccgattcgtcggtcccattataaaagatgaagaagtttttgtttcggaaaaagtaacatgtcatggccaagtgattgcagcaatagtagctgttgatcaagtgacagctcaaaaagcagctaggatggttaaaattgattacgaagaactgcaacctgtacttttgacgattgaggatgctattgaggcaaaatcatttctcgaaaaagatggaagaagtatcaccaaagggaacgtcgacgaagcgtttaccaatgtagatcacatactcgagggagaaataagaatgggaggtcaagagcatttttatttggaaactcagtgctccattgctataccaaaagaagaacatgaaatggaaatcatagcatcaacacaagatcttgcagaaatgcaacgactcattgctcatgttcttgacattccaattaacagagttacagtacgtactaagagattaggtggtggctttggtggtaaagaatcgcgcagtatgcttgctgcactgccagttgcgtttgctgcgcacagcttacaaaaacctgtgcgatgtatgctagatagagatgaggacatgatgatcactggaaccaggcatccatttttgttcaaatacaaagtgggattttctaatgaaggattaataaaagtcctcgaagtatatgtttacgctaatgttggttgttcgtgggatttatcaggcccagctatatcacgtacaatggcccatatagaaaacgcttataggataccagctatcagagtcatcgggtacttatgcaaaaccaatttgccttcaaatacagcctttcgtggttttggaggacctcaaggaatgttttgcgctgaaactataatacgacacattgcggattatcttgatcgagatgttgtgcagctttctgaaataaatttatacaaagaaggcgacatcacacattataaccaaaaactagaaaattgcacgatgcaacggtgttggattgaatgtcttgcattctcaaactatgaacaaagattagcagctgtacaaaaatttaatagtgaaaacagatataaaaaaaaaggaataaccgtgattcccacaaaattcggcatagcatttgagacgctgtttcttaatcaaggtggtgcgcttgttcatatttatactgacggatccgttcttttaacgcatggaggcatagaaatggggcaaggagtacacactaaaatgattcaagttgctagtagaattttgaaagtacatcctgacaaaattcttatcacagagacagctacagacaaagttccaaatgcgactgctacagccgcaagtactgggtctgatttaaatggaatggctattatggatgcatgcaataaaataatgaaacgaatcaaatatataatagatgctaatcccgaaggcacttgggaaagttggatagaaaaagcttatttcgaccgagtaagtctttctgcaactggattttacagaacgcccgatataggatacgattttgcaacaaactcgggcactttatatgattattttacatacggggtagcatgttctgaagtaatcattgatagtcttaccggagaccaccaggtcttaagaactgatatcgttatggatttgggagaaagtttaaatcctgcgatcgatatcggacaagtggaaggaggatttattcaaggttatggactttttacaatggaagagatgatttactcgccaactggaatagtttatagtcgaggtccaggagtttataaaatccctggttttgcagatataccacaagagttcaacgtttcattgttaaagggttcatccaatccaagagcagtatattcatcgaaggccataggcgaaccaccgctatttttatcttcgtcaattttctttgcaataaaaaatgcgatcaaagctgctcgcaaagatatgaacttgcatgggtattttagattcgattcgccagcgactgccgctcgcatccgaatggcttgcactgatgattttacaaaaaagattggagatggtgatggaaaaaaaccttggaatataaccccctaa

SEQ ID NO: 115937 - protein, 1355 aa, Nasonia vitripennis
MESKQLYDVKENEDNHQIEKISNFLIFYVNGKMIKDCNIEPEWTLIYYLRNKLGLCGTKLGCSEGNCGACTVMISRFDRKNNKIIHLAANACLTPVCAMHGMAVTTVEGIGSTRNKLHPVQERLAKAHGSQCGFCTPGIVMSMYALLRSNPKPTMNDIDIAFQGNLCRCTGYRPIIEGLRTFTKEWEQSRMSKLKNHEEKLCALGNACCKKAFTSEPTALFDSKEFTPYDSSQEPIFPPSLQLSSNLDDEYLIISGKEVTWYRPTQLKKLLILKNQYPNAKIIVGNTEVGVEVKIKHLMYPVLIQSTAIKELKIIEEMNDGIKIGASVTLVEMESALRHQISTKHESRTRIFGSIVKMLHWFAGHQIRNVAAVGGNIMTGSPISDLNPIFLAVGIKLNLCSLNNGHRSVIMDNTFFLGYRRNIVAPDEVLLSIEVPFNTPNQYFVSYKQSKRRDDDITIVNMAMNVFFKPNTNIVQKINLTFGGMAPITVLAKKTCESLVGKNWDESILEAVTNNLVAELTLPGNAPGGMILYRRSLTLSLFFKGFISIWKKLHKDIPNIAPVLKELESASDGFHYLPPKSSQYYQMVSKDQSSIDLIGRPLIHASAFKQASGEAIYCDDIPRITGELYLALVLSTRAHARITGIDNSKAVALDGVVAYFDAKDIPEHRRFVGPIIKDEEVFVSEKVTCHGQVIAAIVAVDQVTAQKAARMVKIDYEELQPVLLTIEDAIEAKSFLEKDGRSITKGNVDEAFTNVDHILEGEIRMGGQEHFYLETQCSIAIPKEEHEMEIIASTQDLAEMQRLIAHVLDIPINRVTVRTKRLGGGFGGKESRSMLAALPVAFAAHSLQKPVRCMLDRDEDMMITGTRHPFLFKYKVGFSNEGLIKVLEVYVYANVGCSWDLSGPAISRTMAHIENAYRIPAIRVIGYLCKTNLPSNTAFRGFGGPQGMFCAETIIRHIADYLDRDVVQLSEINLYKEGDITHYNQKLENCTMQRCWIECLAFSNYEQRLAAVQKFNSENRYKKKGITVIPTKFGIAFETLFLNQGGALVHIYTDGSVLLTHGGIEMGQGVHTKMIQVASRILKVHPDKILITETATDKVPNATATAASTGSDLNGMAIMDACNKIMKRIKYIIDANPEGTWESWIEKAYFDRVSLSATGFYRTPDIGYDFATNSGTLYDYFTYGVACSEVIIDSLTGDHQVLRTDIVMDLGESLNPAIDIGQVEGGFIQGYGLFTMEEMIYSPTGIVYSRGPGVYKIPGFADIPQEFNVSLLKGSSNPRAVYSSKAIGEPPLFLSSSIFFAIKNAIKAARKDMNLHGYFRFDSPATAARIRMACTDDFTKKIGDGDGKKPWNITP

SEQ ID NO: 115938 - DNA, 4080 bp, Nasonia vitripennis
  CDS (1)..(4080)
atggaatcacatacttataaggaacagatggaaaacgaactgaaggcgaacaatgatgcacttaacgatatcaatagtataaaaattagtaatactttagttttcttcgtgaatggaaaagaagtaagggacagcagagtcgagccagaatggacgctattatactatctacgaaacaaactaaatctttatggaaccaaactgggatgcgcggaaggaggatgcggggcctgtactgttatggtctcacgatacgatcgtaaacaagataaaattattcacgttgctgtaaatgcatgtttgactcccgtatgtgcaatgcacggcatggctgtaactactgtcgagggcatcggtagcacgagaacaaaacttcatcctgtgcaagagcgtattgcgaaagctcacggatcacaatgtggtttttgcactccgggtattgttatgtcaatgtacgcattactgagaacgaaaccgttgccgtcaattcaagatatcgaagttgcttttcaaggaaacctgtgccgatgtactggataccgaccaattatcgaaggctacaagacatttaccgaagaatgggaaaagtcgcgattgtccagaaatgacgagggtaaagatagaacttgcgctatgggcgatgcttgctgtaggcgtgtcttcacatcagaaccacaggaagtttttgacaccaacacttttacaccatacgacccttctcaagaaataattttccctccaaaattacaactttcttcagaattcgatgacgagtattttattatgaaaggcaaggaggtcacctggtatcgaccaattcatttgagagaaatcttagcattgaaacaacaatacccgaattcgaaaatcatagttggaaatactgaagttggagtcgaagtgaagtttaaacatttcgtgtaccctgtgcttatacaaccaatcaaaataaaagaacttcgtgatataaccgaactaaatgatgcaataagaataggtgctagtgtaacacttattgaaatggaggaggctttacgtcaccaaattcaaactaaaccagaagagaaaacaagaattttcgattcaatagtgggaatgcttaattggtttgctggaaaacaaatacgaaatgttgctgccataggaggtaatattatgaccggcagtcctatatctgacatgaacccagtattgatggcagcaggaattaaattaaacgtgtgcagccttgaaagaggtgtcagatcgattacaatggatcattctttttttgttggatatcgacgtaacgttgttgcaccggatgaagtattactctctattgaaattccttactctactcctaatcaatattttgtatcttataaacaagccaaaagaagagatgatgatatcgctattgtcaatttagccttaaacgtattttttgagccccgaacgagcattgtggccaaatcttatatggcttttggtggtatggcaccaacaacgattttagcgagaaaaagttgtgaagctatgattggaaaaaaatggaatgaacaattggtagagactgttacggattctttagttaatgagttgcccttgagcggtgacgcacctggtggtatggttctatatcgtcgatctcttacactaagtttattttttaagggtttcgtttgtattaccaagaagcttcgtattagtgttaacgacgttgaccctctgccaaaggaacttgaaactgcaggagaaggtttccacttccaagcaccaaaaagttctcaatactttcaagttgttcctaaggatcaaagctcgattgatttaattgggaggcccataattcatatcaatgctttcaaacaggcaactggcgaagcaatttattgtgatgatatacctcgcataactggagaattgtacttagctttggtgctatcgacaaaagctcatgctaagattgtgaaaatcgatccttctcaagcgttagctatggaaggagttgaagcatttttgagtgcggaagatattccagaaaagcagagaattataggtcacaaatgctttgacgaagaagtatttgtttccaaaatagttacgagtcaagggcaatcacttggtgctattttggcagttgatcaaataactgcacaaaaagcagtcaaattagttaaagtcgaatatgaagaattacaaccaatcataattactatcgaggatgctataaagcataaatcgttcttccatgaacgtccaacagtaatatgcaatggagacgttgacaaagtttttgctgaatctgatcacgttatagaaggcgaagtaagaatgggtggccaagaacatttctacttggaaactcaagcatcattagcaaacttccgcgaagaaggagaattggaactattttcttcaacacagaatcctacagaaattcaaaaactcactgcacacgttctgaatctaccgatcagcagaataaacgtccgtgtaaagcgacttggtggtggctttggtggtaaagaaacacgagaagcactagtagcattgcctgttgctattgcagcttacaaatatagaaaacctgtgagatgtatgttagaccgagatgaagatatgatgataacaggaacaagacatccatttctcataaaatacaaagttggatttactaaagacggactaattactgccgctgaagtttgcctttacaacaattgtggttactcaacggacctttcacctgcggttcttgaatgtgctatgttttacgttctcaatgggtacaaagtaccggttgctaaagtatcaggttacatgtgtaaaacaaatctaccttcaaatacagctttccgaggatttggaggaccacagggaatgttttgcgctgaaaatataattcgacaaatagctgattatttgggacttgatcacgttaagatatccgaaaaaaatttgtatagagaaggagacattacattttacaatcaaccactaattaaatgtacactcagaagatgttgggaagagtgcttgttttcgtcaaactacaaagaacgagtaacggaagtgaatcaattcaataaagagcacaggtacaaaaaacgaggaatagctgttgtaccagtgatgttcggaataggatatgaagtagcttttcttaatcaaggtggagcacttgtacatgtatataccgatggatctgttcttttaaatcatggtggtgtcgagatggggcaaggcttatatacaaaaatgattcaaatagcaagtcgtattctaaaagttaagccagataaaatttatactgccgaaacaggcaccgataaagttccaaatacaattgcaactgcagctagtcttggttctgacctcaatggaatggctgttttggatgcctgcacaaaaataatggaacgaattaaatacataattgatgatgatcctgaaggcacttgggaagattgggtaaagcgcgcatattttgaccgaatcagtctttcagctactggatattaccggaccccagaaattggttatgactttgacactaactcaggaaggcgattcaattactacacatatggcactgcctgcacagaagtagaacttgattgtttgacaggagatcacgaggttttacggagtgatgttgttatggatcttggggaaagtttaaatcctgctattgatattggccaagtagaaggtggattcatgcaaggttatggattattcacaatggaagaaatggtgtattctccaacaggagttgtatttagtcgcggaccaggagtatataaaataccgagttttacgaatataccgagagagtttaatgtatcattacttaaggcttcatccaatccacgagcagtattttcttcaaaagctactggtgaaccccctctatttttggcatcttctgcattcttcggcatcaaggaagctattagagctgctcgaaaagacatgggaatccacgggtattttagacttgattcgccagctactgcagcccgcattcgtatggcttgtgttgatcaacttactaaaaaggtcattcaaagcttaatgaaatactataattaa

SEQ ID NO: 115939 - protein, 1359 aa, Nasonia vitripennis
MESHTYKEQMENELKANNDALNDINSIKISNTLVFFVNGKEVRDSRVEPEWTLLYYLRNKLNLYGTKLGCAEGGCGACTVMVSRYDRKQDKIIHVAVNACLTPVCAMHGMAVTTVEGIGSTRTKLHPVQERIAKAHGSQCGFCTPGIVMSMYALLRTKPLPSIQDIEVAFQGNLCRCTGYRPIIEGYKTFTEEWEKSRLSRNDEGKDRTCAMGDACCRRVFTSEPQEVFDTNTFTPYDPSQEIIFPPKLQLSSEFDDEYFIMKGKEVTWYRPIHLREILALKQQYPNSKIIVGNTEVGVEVKFKHFVYPVLIQPIKIKELRDITELNDAIRIGASVTLIEMEEALRHQIQTKPEEKTRIFDSIVGMLNWFAGKQIRNVAAIGGNIMTGSPISDMNPVLMAAGIKLNVCSLERGVRSITMDHSFFVGYRRNVVAPDEVLLSIEIPYSTPNQYFVSYKQAKRRDDDIAIVNLALNVFFEPRTSIVAKSYMAFGGMAPTTILARKSCEAMIGKKWNEQLVETVTDSLVNELPLSGDAPGGMVLYRRSLTLSLFFKGFVCITKKLRISVNDVDPLPKELETAGEGFHFQAPKSSQYFQVVPKDQSSIDLIGRPIIHINAFKQATGEAIYCDDIPRITGELYLALVLSTKAHAKIVKIDPSQALAMEGVEAFLSAEDIPEKQRIIGHKCFDEEVFVSKIVTSQGQSLGAILAVDQITAQKAVKLVKVEYEELQPIIITIEDAIKHKSFFHERPTVICNGDVDKVFAESDHVIEGEVRMGGQEHFYLETQASLANFREEGELELFSSTQNPTEIQKLTAHVLNLPISRINVRVKRLGGGFGGKETREALVALPVAIAAYKYRKPVRCMLDRDEDMMITGTRHPFLIKYKVGFTKDGLITAAEVCLYNNCGYSTDLSPAVLECAMFYVLNGYKVPVAKVSGYMCKTNLPSNTAFRGFGGPQGMFCAENIIRQIADYLGLDHVKISEKNLYREGDITFYNQPLIKCTLRRCWEECLFSSNYKERVTEVNQFNKEHRYKKRGIAVVPVMFGIGYEVAFLNQGGALVHVYTDGSVLLNHGGVEMGQGLYTKMIQIASRILKVKPDKIYTAETGTDKVPNTIATAASLGSDLNGMAVLDACTKIMERIKYIIDDDPEGTWEDWVKRAYFDRISLSATGYYRTPEIGYDFDTNSGRRFNYYTYGTACTEVELDCLTGDHEVLRSDVVMDLGESLNPAIDIGQVEGGFMQGYGLFTMEEMVYSPTGVVFSRGPGVYKIPSFTNIPREFNVSLLKASSNPRAVFSSKATGEPPLFLASSAFFGIKEAIRAARKDMGIHGYFRLDSPATAARIRMACVDQLTKKVIQSLMKYYN

SEQ ID NO: 115940 - DNA, 3990 bp, Anopheles gambiae str. PEST
  CDS (1)..(3990)
ctggtctttttcgtcaatggcaagaaggttaccgatgatggtccggatccggagtgcaccctgctggtgtatctgcgggaaaagttacgcctctgcggcacgaaactcggatgtgccgagggaggatgcggagcatgtacggtgatggtgtcgaaggttgatcgtaaaacgggctcgctgcatcatctggcagtcaacgcttgtctgacgcccgtttgtgccgtgcacgggatggctgtgacgacggtcgagggtatcggaagtactcggacgcgcctccaccccgtccaggagcgcatcgccaaagcgcacggctcgcagtgtggcttctgtactcctggtatcgtcatgtcgatgtactcgttgctgcgcagctctcccgttccctcgatgaaagagctggaggttgccttccaggggaatctgtgtcgctgcaccggctatcgaccaatcctggaggggtacaaaaccttcaccaaggagttcggctgcgccatgggagacaaatgctgtcgcaacggcaatggtaacggatgtggacagaacggcaacggagagctagacaccgagctgttccagccgaacgagttcgttccttacgatccatctcaagagcccatttttccaccggaattgaagctttccgacaagctcgactctgaatcgctggtctttcgtacctcccgtgccgcttggtatcgaccaacaacgctcaacgatctgttggccctcaagaaagcccatccagagacgaagattgtcgtcggtaacacggaagtgggcgtggaagtgaaattcaaacactttgagtatcccgtcctctcccatccaaataaaggagttgacgacgatcgagcgacaagtggactcaaaataggatccgccgtcacgttgatggaaatggagatcgcgctgcggaaagaaatcgaaaccggtcctgaaaccgagactcgcctgtaccaagcgatcgtcgacatgctgcactggttcgctggaaagcaaatccgtaatgttgcctcggttggaggaaacatcatgacgggaagccccatttcggatctaaatcccatcttcacggcagccgcgatcgagctggaagtggccagcctcgacggaggcttccgcaaggtacgcatgggcgatggattcttcactggctaccggaagaacgtcattcaaccgcaagaagcgctcgtttcgctgtttattccacgcaccaccaaggatcaatacttcatcgcgcacaagcaggccaaacgccgcgatgatgatattgccatcgtgaatggagccttcaatgtgcgtttccgacccggtacggatatcgtcgatgagatccatctggcttttggtggaatggcgccaacgacagttctggccaagaagacggccaccgctctagtcgggacgagatgggacgcacaactcgtggagcgttgcaatgatttgttggtggaagagcttcctctgagtccttcggctccgggcggcatgatcgtgtatcgtcgttcattgactttgagtctctttttcaaggcttatcttgccattgcacaatcgctcgataagcaatccattccccacaggacacccattggggagcgggaaaaaagtggagccaatacgttccatacgttggtacccaagagcactcagctgttcgagaaggtttctggtgatcaaccggccacggatcctattcgtcgaccgcaagtgcacgcttccgctttcaaacaagtcaccggagaagctatctattgtgacgacattccaaagtttgccaacgagctgtatctagcatttgtgtacagtacaaaggcacacgccaagattctgtcgatcgatgcatcggaagcactgaaacaggagggtgtgcatcggttctttagcgcagatgacttgaccgaagagcaaaacaaggctggtccagtgttccacgatgaatttgtctttgtgaaagatgtcgtcactacgcagggacaaataattggagctattgtggccgacaatcaaacaattgcccaaagagccgctcgccaggtgaaagtcacttacgaagaactgcaaccggtaatcgttacgctggaggatgctatcagactggagtcgttctatcccggattccccagaatcattgccaagggagacgttgagaaggctctgtccgaggcggatgttatcatcgaaggcgattgtcgcatgggtggacaggagcacttctacctagaaacgcaagcatgtctggctgtgccgaaggattcagacgaaatcgaggtgattagcagcacccagcatcctaccgagattcaacaccacgtggcgcaaactctgggcatacccgcctcgaaggttgtttctcgtgtgaagcgtcttggaggtggttttggtggcaaggaatcgcgtgccgccattgtggccattccggttgccttggccgcgcaccgcatgggcagacccgtccgctgcatgctcgacagagacgaagatatggcagtgtccggtacgcgacatcctttctacttccattacaaagtgggagtcagcaaggacggcaagctgttggccggcgatttccgcgcttacaacaatgccggccattcgatggacctgtcctttgccgtgctggagcgttcaatgttccacatccaaaacgcatatcgtatcccgtctgcgtgtccgtggatgggtttgtcgcacaaaccttcaaacaccgctttccgcggtttcggcggtccgcagggtatgatggcggcagaaacaatgatgcgccatgtggcccgcacactgaaccgggactatgtcgagctgatcgagctgaacatgtaccgggaaggcgatacaacgcactacaaccagcagatcgagggctgtaatgttggtaagtgctggagtgaggttttgcaatcggccgattttgccaaacgccgggaagcggtcgaaaagttcaacgaagaacaccgttggcgcaaacgcggcattcacgtcgtaccgacaatgttcggcatcgctttcaccgtgctgcacctgaaccaaagcggcgccctgattcacgtgtaccaggatggcacggtgctgctaacccatggcggtaccgagatgggccagggactgcacacgaaaatgattcaggttgctgccacggcgctaggaattcctttcgatcgcatccacatttccgagacgtctaccgataaggttccgaacacttcggctacggcggccagtgctgggtcggatctaaacggcactgcggtgctgaatgcttgcctcaccatccgcgagcgattggaacccatccgcaaagagttccccgacaaggactggaacttctgggtcagtaaggcgtacttcagccgagtgtcactgtcggccactggattctatgcgacgcccgatctgggctacgattttggcaccaattcgggcaaagcgttcaactactacacttacggtgcggcttgctcggaggtagagatcgactgtctgactggagaccatcaggtcatccgaaccgacgtcgtaatggacttgggctccagcattaatcctgccatcgatatcggccaaatcgaaggtggattcatgcaaggctacgggctattcacgctggaagaaatggtctactcgccccagggtcaggtgttttcccgcggtcctggcatgtacaaattgcccggttttgccgacatccctggggagttcaacgtttcactgctcactggggcgcccaatccgcgcgcaatttactcatcgaaggccgttggtgaaccgccacttttccttgcctcgtccatattcttcgcaatccgcgatgctattgccgcggctcgaaaggaggaaaaactgtccgacgattttacattagtttcaccggccacttcgtcgcgcatccgcacagcttgtcaggataaatttgtagaacgctttacgaagcagcaaagcaatggagcagaagcagctcgcgtcgttccatggaatgtaatgccttaa

SEQ ID NO: 115941 - protein, 1329 aa, Anopheles gambiae str. PEST
LVFFVNGKKVTDDGPDPECTLLVYLREKLRLCGTKLGCAEGGCGACTVMVSKVDRKTGSLHHLAVNACLTPVCAVHGMAVTTVEGIGSTRTRLHPVQERIAKAHGSQCGFCTPGIVMSMYSLLRSSPVPSMKELEVAFQGNLCRCTGYRPILEGYKTFTKEFGCAMGDKCCRNGNGNGCGQNGNGELDTELFQPNEFVPYDPSQEPIFPPELKLSDKLDSESLVFRTSRAAWYRPTTLNDLLALKKAHPETKIVVGNTEVGVEVKFKHFEYPVLSHPNKGVDDDRATSGLKIGSAVTLMEMEIALRKEIETGPETETRLYQAIVDMLHWFAGKQIRNVASVGGNIMTGSPISDLNPIFTAAAIELEVASLDGGFRKVRMGDGFFTGYRKNVIQPQEALVSLFIPRTTKDQYFIAHKQAKRRDDDIAIVNGAFNVRFRPGTDIVDEIHLAFGGMAPTTVLAKKTATALVGTRWDAQLVERCNDLLVEELPLSPSAPGGMIVYRRSLTLSLFFKAYLAIAQSLDKQSIPHRTPIGEREKSGANTFHTLVPKSTQLFEKVSGDQPATDPIRRPQVHASAFKQVTGEAIYCDDIPKFANELYLAFVYSTKAHAKILSIDASEALKQEGVHRFFSADDLTEEQNKAGPVFHDEFVFVKDVVTTQGQIIGAIVADNQTIAQRAARQVKVTYEELQPVIVTLEDAIRLESFYPGFPRIIAKGDVEKALSEADVIIEGDCRMGGQEHFYLETQACLAVPKDSDEIEVISSTQHPTEIQHHVAQTLGIPASKVVSRVKRLGGGFGGKESRAAIVAIPVALAAHRMGRPVRCMLDRDEDMAVSGTRHPFYFHYKVGVSKDGKLLAGDFRAYNNAGHSMDLSFAVLERSMFHIQNAYRIPSACPWMGLSHKPSNTAFRGFGGPQGMMAAETMMRHVARTLNRDYVELIELNMYREGDTTHYNQQIEGCNVGKCWSEVLQSADFAKRREAVEKFNEEHRWRKRGIHVVPTMFGIAFTVLHLNQSGALIHVYQDGTVLLTHGGTEMGQGLHTKMIQVAATALGIPFDRIHISETSTDKVPNTSATAASAGSDLNGTAVLNACLTIRERLEPIRKEFPDKDWNFWVSKAYFSRVSLSATGFYATPDLGYDFGTNSGKAFNYYTYGAACSEVEIDCLTGDHQVIRTDVVMDLGSSINPAIDIGQIEGGFMQGYGLFTLEEMVYSPQGQVFSRGPGMYKLPGFADIPGEFNVSLLTGAPNPRAIYSSKAVGEPPLFLASSIFFAIRDAIAAARKEEKLSDDFTLVSPATSSRIRTACQDKFVERFTKQQSNGAEAARVVPWNVMP

SEQ ID NO: 115942 - DNA, 4107 bp, Gibberella zeae PH-1
  CDS (1)..(4107)
atggcgcctagcgctgtatcgcctacgagggagtccaaccctgaacctctggcaaccctaacatccaaattcgacgacactctacgattttaccttaatggaaccaaggttgtcctggatgagatagatccagaagttacagtcttggaatacctaagagggatcggcctcacaggaacaaaacttggctgtggcgagggtggttgcggagcttgcacaatcgtggtcagccagtataaccctactaccaagcagatttaccatgccagtgtaaatgcctgcttggcgcccctggtcagtttggacggtaaacatgtcgttaccgttgaaggcatcggcaattcccagaaaccccaccctactcaggagcgtatcgccaagtccaatggcagccaatgtggcttttgtactcctggtattgtgatgagcttgtatgccttactacgtaacaacgactctccttccaaagatgacattgaagaggcgttcgacggcaacttgtgtcgatgtaccggctataggtccatcctggatgcggctcaaacctttagtgttgataagcccggtagcaagttcaagaaagcaggtggcagtggatgttgcatggaaaacggtaacggaccacctagcggtggctgctgtatggacaaggcaaacttggacgacacacctatcaaacgattcacacccccgggatttattgagtaccaacccgacacggagctcatcttcccgcctgctttgaagagacacgaactacggcctttggccttcggtaacaagaggcgtagatggtatcgacctgtcactaccgaacaactcttgcagatcaagagtgctcatccccaggccaaaatcattggtggaagtacggaaactcaaatcgaaaccaagttcaaggcgctggagtatcctgtttccgtctacgtcggtgatatcgccgagttgcggcagtacagtttcaaggatgaccaccttgaggttggcggtaatgttgtcctgactgatctggaaagcatctgtgaacatgctattccgcattacggacgagagcgcgcccaggtcttcgaggctatgctcaagcagcttaagttctttgctggtcgacaaatccgaaatgttggtactccagcaggaaaccttgttacggcttcaccaatctcggatcttaaccctgttttatgggcggcgaacgctgtgttggtggcaaagtcatcgactaaggagatagagatccccgtctcccaattctttaccggctaccgaaagacagcacttgctcaggatgcgattattgcttcaatacgcattcccgtcgcccaaggcaagggtgaattctttagggcatacaagcaggccaagcgaaaagacgacgacattgccattgttaccggtgcactgagagttcgtctggacgatgaaggtattgtccaagaagcaaacctcatctacggtggcatggctgctatgactgtagccgccaaaacggctggagaatacttggtcggacgacgtttcgccgacctggaaacgttggagggaacaatgagtgcactcggtcgagactttgacctacaattcagtgttccaggtggtatggcgtcttatcgaaagtctttggcattcggattcttctatcgattctatcatgacgtcctgacgataaccgatggaagttctgagcaagttgacaaggaagctattgacgaaatcgagcgagatatttcgaatggcgaggtagatcaccatgctgcggcagcttacgaaaaggaagtaactggaaagtccaaccctcatctggcagctctcaaacagacgactggcgaagcgcaatacaccgacgatatgcccgcgttaaagaatgagcttcatgcctgctatgttctttcgaaacgagcacatgccaagcttctctctgtcgattactcggctgctcttgatatacctggagtagttgatgttgttgacaaagacgatatgccctcaccagaagccaacaagtttggcgctcctcactttgacgaggtattcttcgcagaaggtgaggtattgacagtgggccaaccaattgctctggttctagcaacatctcctcaaagggctcaggaggcagcgcgggcagtcaaggtcgaatacgaagatcttccatcggtactttctatagaagatgctatcgccgctgacagctatcataacttctaccgagagatcaagaaaggagatgcggagaaagccttccaggaatgtgaccatgttttcaccggaacagtgagaatgggtggccaagaacacttttatctcgagacaaatgcttgtttggttgttcctaagcctgaggacggagaaatcgagatcttcgccagtacacagaacgccaacgaaacgcaagtttttgcttcaagagtgtgcgatgtgcaatcgaacaaggttgtcgtccgcgtgaagcgactgggcggtggttttggtggaaaagaatcgcgatcagtggtactcagctcagcattggcacttgcagcaaagaagaccaagagaccggtccggtacatgctaactcgagaggaagacatggttatcagtggccaacgacatcctttccttggccggtacaaggttggtgtgaacaaggacggtaaactccaagctctggattgcgatgtcttcaacaatgcaggatggactttcgacctcagcgcagccgtatgcgaacgagccatgacccacattgacgggtgctacgacatacccaatgtacacattcgcgggcgcttgtgcaagacgaacacaatgtccaatacggccttccgtggatttggtggccctcagggcatgttcatcgcagagtcgtatatggaagaagtggctgatcggctgggaatgcctgtcgagacactgcgacaaatcaacttgtatgagagtgatggagtgactcatattggacagggcttgggagattggcatgtgccgctcatgtacaagcaggtgcaagatgaggctatgtacaccgcacgccgacactttatcacacagttcaacgagaccaacaagtggcggaagaggggcttggcactgattccaaccaagtttggtatctctttcaccgctttgtttctgaaccaggccggagcattggtacacatctaccatgatggatctgttctggtagcccatggtggtacagagatgggacaaggcttgtacaccaagctcactcaaattgctgcacaagcattgggtgtgccactggacaatgtcttcatctcggaaacgtcgacaaatacggtggctaacgcatctgcaacagcggcgtcagcttcgtcagatctgaacggatatgccatctttaatgcatgcgaaatgttgaacgagcgattggcaccgtatcgaaagaagctgggtcccgacgcaacgatgaaagacctcgcccacgccgcttactttgaccgcgttaacctctcggcgcagggtttctacaagacccctgaaattggttatgactggactactggcaagggcaagatgttcttctacttcactcaaggagttgctgcagccgaggttgaggtcgatttactgactggaacctggacatgtatccgggcagacatcaagatggatgttggccagtccatcaatccagcaatcgactacggccagatccagggtgctttcatccaaggcctcggcctcttcacgatggaggaatcgctctggttaagaaacggcccaatggcaggtcatctcttcacgcggggacctggagcatacaagatccctggtttcagagatattccccagacattcaatgtgtcgcttctcaaggacgtggagtggaaagaattgcgcacgattcagaggagtcgtggtgtaggtgaaccacccttctttatgggaagctctgtcttctttgccatccgagatgcactcaaagcagctcgggcacagtcaggagtcaaagccaaggttggcgagaacgactctgagggactcctcaggcttgagagtccagcaacgcccgagaggatcagactggcttgtgaggacgagatcatgcgcaaggcaagggttgtgcccaaagaaggagaaaagagcttctttgtggcgatctga

SEQ ID NO: 115943 - protein, 1368 aa, Gibberella zeae PH-1
MAPSAVSPTRESNPEPLATLTSKFDDTLRFYLNGTKVVLDEIDPEVTVLEYLRGIGLTGTKLGCGEGGCGACTIVVSQYNPTTKQIYHASVNACLAPLVSLDGKHVVTVEGIGNSQKPHPTQERIAKSNGSQCGFCTPGIVMSLYALLRNNDSPSKDDIEEAFDGNLCRCTGYRSILDAAQTFSVDKPGSKFKKAGGSGCCMENGNGPPSGGCCMDKANLDDTPIKRFTPPGFIEYQPDTELIFPPALKRHELRPLAFGNKRRRWYRPVTTEQLLQIKSAHPQAKIIGGSTETQIETKFKALEYPVSVYVGDIAELRQYSFKDDHLEVGGNVVLTDLESICEHAIPHYGRERAQVFEAMLKQLKFFAGRQIRNVGTPAGNLVTASPISDLNPVLWAANAVLVAKSSTKEIEIPVSQFFTGYRKTALAQDAIIASIRIPVAQGKGEFFRAYKQAKRKDDDIAIVTGALRVRLDDEGIVQEANLIYGGMAAMTVAAKTAGEYLVGRRFADLETLEGTMSALGRDFDLQFSVPGGMASYRKSLAFGFFYRFYHDVLTITDGSSEQVDKEAIDEIERDISNGEVDHHAAAAYEKEVTGKSNPHLAALKQTTGEAQYTDDMPALKNELHACYVLSKRAHAKLLSVDYSAALDIPGVVDVVDKDDMPSPEANKFGAPHFDEVFFAEGEVLTVGQPIALVLATSPQRAQEAARAVKVEYEDLPSVLSIEDAIAADSYHNFYREIKKGDAEKAFQECDHVFTGTVRMGGQEHFYLETNACLVVPKPEDGEIEIFASTQNANETQVFASRVCDVQSNKVVVRVKRLGGGFGGKESRSVVLSSALALAAKKTKRPVRYMLTREEDMVISGQRHPFLGRYKVGVNKDGKLQALDCDVFNNAGWTFDLSAAVCERAMTHIDGCYDIPNVHIRGRLCKTNTMSNTAFRGFGGPQGMFIAESYMEEVADRLGMPVETLRQINLYESDGVTHIGQGLGDWHVPLMYKQVQDEAMYTARRHFITQFNETNKWRKRGLALIPTKFGISFTALFLNQAGALVHIYHDGSVLVAHGGTEMGQGLYTKLTQIAAQALGVPLDNVFISETSTNTVANASATAASASSDLNGYAIFNACEMLNERLAPYRKKLGPDATMKDLAHAAYFDRVNLSAQGFYKTPEIGYDWTTGKGKMFFYFTQGVAAAEVEVDLLTGTWTCIRADIKMDVGQSINPAIDYGQIQGAFIQGLGLFTMEESLWLRNGPMAGHLFTRGPGAYKIPGFRDIPQTFNVSLLKDVEWKELRTIQRSRGVGEPPFFMGSSVFFAIRDALKAARAQSGVKAKVGENDSEGLLRLESPATPERIRLACEDEIMRKARVVPKEGEKSFFVAI

SEQ ID NO: 115944 - DNA, 4092 bp, Aspergillus nidulans FGSC A4
  CDS (1)..(4092)
atggctcccggtgtcttattacaaccgtcgcaatcggagcttgaggcagcttccccgccgaaagctgcggcctcgttattgcaactcactgaagaatgggacgataccattcgcttctatcttaatggcaccaaggttatcttggactctgttgaccccgaaatcacattgctggaatacctgaggggtattggcttgacagggacaaaactagggtgtgcagaaggtggttgtggtgcttgcacggttgtcgtttcgcaaatcaatccgactaccaagaagctttaccatgcctccatcaacgcctgcattgcgccgctggttgctgtcgatgggaaacacgttattacggtggagggcattgggaacgttaagaatccccatgcgattcagcaacggctagcaatcggaaacggaagccagtgcggtttctgtacaccgggaattgtgatgagtctctatgcgctcttacgaaatgaccctaagccctctgagcatgcggtggaagaagcttttgacggaaacctttgtcgctgtactggatatcgaccgattttggacgctgcccaaagctttacaagcccaatcggctgtggcaaagctcgagcaaacggtggctctggatgctgtatggaagaacagaaaggcacaaatggatgttgcaaagggtcttccgaggagactaccgaagacgttaagcacaagtttgcgtctcccgactttattgagtacaaaccagacacggaactaatatttcctccgtcgctctggaaacacgagttgcgccctctcgcttttggtaacaagagaaagaagtggtatcggccggtcaccgtacagcagctcctggagatcaagagtattcatcctgatgcaaaattgataggtggcagcaccgagacgcagatcgagatcaaattcaagcagatgcgttatggagcatctgtctaccttggagacctcgctgaactccggcaatttgcctttcatgacaactacttggaaattggtgccaacatttcattaactgatcttgaatctgtctgtgatcaggccatcgagcgctacggctcagctcgcggccagccctttgccgctataaagaaacagcttcgctactttgctgggagacagatcagaaatgtggcttcgccagctgggaacctggccactgcatccccgatatccgatctcaacccagtttttgtcgctacaaacacgactcttgtcgccaggtcgttagataaggaaaccgagattccaatgacacagttcttcagaggttaccgatctacggcccttccgccagacgctatcatttcaagtctacgtatacctaccgcatctgagaaaggcgagtatttgcgggcttataaacaatctaagaggaaggatgatgacattgcaattgtgaatgccgctttgcgggtttcactctcgtcatcgaacgatgtcactagcgtgagcctagtttttggcggtatggcgcctttgacggtatctgcgcggaacgcggaggccttcctcaccgggaagaagttcactgatccggcaactctagaaggtactatgggtgctttggagcaggatttcaacctgaagtttggtgttccaggtggtatggcgacttaccgaaagtcacttgctctcgggttcttctaccgattctaccatgacgtattatcacagatcgaggccaggagtagtgatctggataacagtgtggtcgctgaaattgagcgagcaatttcaactggagagaaagataacgaggcttcagcggcttaccagcagagggttctaggccgagccgggccgcacctctcggcattgaaacaggctaccggagaagctcagtacaccgacgacattcccgcgcaaaagaacgaactgtacggatgtatggttttgtccacaaaggctcacgccaagctgctcagtgtcaacacagaagccgctttggaaattcctggtgtcatcgattatgtagatcataaagaccttccatcaccgagagcgaactggtggggtgctccaaattgtgacgaggtcttctttgctgtcgataaagtcacaactgccggacagccaattggtatgattcttgcaaacacagccaaggctgcagaagagggtgcaagagccgtcaaagttgaatatgaagaattgccagtaatcctcagcatcgaagaggcaatcgaagcgcaatccttcttcgaacgcttccgttatatcaagaatggagacccggaaagcgccttcagagacgctgaccatgtctttgagggtgtatctcgaatggggggccaggaacatttttatttagaaacacaagcttgtgtggctatccctaaagcagaagacggcgaaatggaaatctggagcagtacccagaatccgacggaaacgcaatcatatgtagcacaggttactggcgtggctgccaacaagatcgtgtcaagggtcaagcgccttggaggaggctttggtggtaaagagacgcggtcagtccagctcgcaggtatatgcgccacagcagccgcaaaagtcaggcgtccagtgcggtgtatgctcaatcgcgatgaagacattgcgacttctggacagcgtcacccattctattgtaaatggaaagtcggggtgacaagggagggcaagctgcttgcacttgatgcggacgtgtacgcaaatggtggacatacacaggatctttcaggtgctgttgtggagcgaagtctttcacacattgacaacgtatatcgattcccgaacatttacgtccggggcaggatatgcaagacgaacaccgtctcaaatacggcattccggggctttggtggccctcaaggtctcttttttgccgagtcaatcatctcagaagtcgcagatcatctagaccttcaggtggaacagctccggatactcaacatgtacgaaccgggtgacatgactcatttcaaccaagaacttaaggactggcatgtcccgttgatgtacgatcaggttctacaggagagcgagtattttgagcgccgcaaggccgtggaggaatataaccgcacgcacaagtggtccaagcgtggcatggccattatccccaccaagtttggtatctctttcacggccctctttctcaaccaagcgggcgccctcgttcatatctaccacgacggaagcgtcctcgtcgcccacggcggcgtggaaatgggccaaggtctccacacaaagatgaccatgatagcagccgaagccctaggcgttcccttgtcggacgtcttcatctccgaaacagccaccaacaccgtcgcaaacacatcctctacagcggcttctgccagctccgacctcaacggctatgccatctataacgcctgcacccaactgaacgaacgtctcaagccctaccgtgaaaagatgcccaacgcaaccctgaaagacctcgcccacgctgcttacttcgaccgtgtcaacctttctgcccaaggctactaccgcaccccagacatcggctatacctggggtgagaacaagggtcaaatgttcttctacttcacgcagggcgttacagccgctgaagtcgaaatcgatacgctcaccggcgactggacgcccctccgggcagatatcaaaatggatgtcggccgcacaatcaacccctccatcgactacggtcagatagaaggcgcatacattcagggccagggtctcttcacaacagaagaaagcctttggcaccgcacaactggccaaatattcactaaaggtcctggaaactacaaaattccgggcttccgtgacattccgcaaatattcaacgttagtctccttaaggacgtagagtgggagaacctgcggacgatccagcgcagtagaggcgtcggcgagccaccgcttttcatgggcagcgcggcgtttttcgctattcgggatgcactgaaggctgccaggaaggagtggggggttactgatgtgctgagtcttgtcagtccggctacaccggagagaattagggttagttgtgcggatcccattattgaaagggcgagagtgaaggcggaggaaggggaaaagagcttcttcgttgcgatatag

SEQ ID NO: 115945 - protein, 1363 aa, Aspergillus nidulans FGSC A4
MAPGVLLQPSQSELEAASPPKAAASLLQLTEEWDDTIRFYLNGTKVILDSVDPEITLLEYLRGIGLTGTKLGCAEGGCGACTVVVSQINPTTKKLYHASINACIAPLVAVDGKHVITVEGIGNVKNPHAIQQRLAIGNGSQCGFCTPGIVMSLYALLRNDPKPSEHAVEEAFDGNLCRCTGYRPILDAAQSFTSPIGCGKARANGGSGCCMEEQKGTNGCCKGSSEETTEDVKHKFASPDFIEYKPDTELIFPPSLWKHELRPLAFGNKRKKWYRPVTVQQLLEIKSIHPDAKLIGGSTETQIEIKFKQMRYGASVYLGDLAELRQFAFHDNYLEIGANISLTDLESVCDQAIERYGSARGQPFAAIKKQLRYFAGRQIRNVASPAGNLATASPISDLNPVFVATNTTLVARSLDKETEIPMTQFFRGYRSTALPPDAIISSLRIPTASEKGEYLRAYKQSKRKDDDIAIVNAALRVSLSSSNDVTSVSLVFGGMAPLTVSARNAEAFLTGKKFTDPATLEGTMGALEQDFNLKFGVPGGMATYRKSLALGFFYRFYHDVLSQIEARSSDLDNSVVAEIERAISTGEKDNEASAAYQQRVLGRAGPHLSALKQATGEAQYTDDIPAQKNELYGCMVLSTKAHAKLLSVNTEAALEIPGVIDYVDHKDLPSPRANWWGAPNCDEVFFAVDKVTTAGQPIGMILANTAKAAEEGARAVKVEYEELPVILSIEEAIEAQSFFERFRYIKNGDPESAFRDADHVFEGVSRMGGQEHFYLETQACVAIPKAEDGEMEIWSSTQNPTETQSYVAQVTGVAANKIVSRVKRLGGGFGGKETRSVQLAGICATAAAKVRRPVRCMLNRDEDIATSGQRHPFYCKWKVGVTREGKLLALDADVYANGGHTQDLSGAVVERSLSHIDNVYRFPNIYVRGRICKTNTVSNTAFRGFGGPQGLFFAESIISEVADHLDLQVEQLRILNMYEPGDMTHFNQELKDWHVPLMYDQVLQESEYFERRKAVEEYNRTHKWSKRGMAIIPTKFGISFTALFLNQAGALVHIYHDGSVLVAHGGVEMGQGLHTKMTMIAAEALGVPLSDVFISETATNTVANTSSTAASASSDLNGYAIYNACTQLNERLKPYREKMPNATLKDLAHAAYFDRVNLSAQGYYRTPDIGYTWGENKGQMFFYFTQGVTAAEVEIDTLTGDWTPLRADIKMDVGRTINPSIDYGQIEGAYIQGQGLFTTEESLWHRTTGQIFTKGPGNYKIPGFRDIPQIFNVSLLKDVEWENLRTIQRSRGVGEPPLFMGSAAFFAIRDALKAARKEWGVTDVLSLVSPATPERIRVSCADPIIERARVKAEEGEKSFFVAI

SEQ ID NO: 115946 - DNA, 4383 bp, Ustilago maydis 521
  CDS (1)..(4383)
atgccagtacccgcaccaacgactacggtcgttgatggcttcaaactgcctagccaattcacccaaaccgcctccaaactcgtcttcaccgtcaacaacatccgcttccagctttccccagccaaaggtgatgatcttgaccttacgctcctcgaattcattagaagcaaaggcttcaccggaaccaaactcggatgcggtgaaggcggctgtggtgcctgtactgtcgttgttggcaagtacgacacccatcttgccacctcgtcatcttcctcgtcctccaaagctccatacagatacaagtcggtcaatgcatgcttgctcccactcgtcgcagtgcatggctgccacgtcctcacagtagaaggcatcggctcgtcgtccaaccctcatccgatccaagagcgcatcggaaagctgtttggctcgcaatgcggtttctgcactcctggtatcgtcatgtcgctctatgctaccgttcgaaacggctatggccaccttaccgaacaagacatcgagcattcactcgatggctgtctctgccgctgcacaggttatcgtcccattcttgatgctgccaagtcctttgctaccgtcaaaagcaccaaaatcggctcgagctcctcctcaagcaacgtctacagcgatgactcggacgacgcagagcctacaacgcctcccgaggccgatctcatcacaagaacaccctgtgccaagggcgccgactgctgcatggtcaacggcaagtccaaaggctgcacacccagcacaacttccactgccccaggcatctccaccaccgcacatgcgattcagaaggtgcttgaccctacccaattcaaaccctacgatgcggcctccgagctcatcttcccttcctacctcgccaaggacacgtttgactcgcaagacctcgtctttatcgagcagcccccacagttggacgatctcgagagcgagagtgagagcgagaccgttgcagcaaaatccgactcgacacgacaggtatggcttcgaccgggctctctccaatcgctcattgactgcatgaagctctacggtctcgatgctggcggaaaaattcgcagtggtaacaccgaaactggtatcgaggtcaagttcaagcatctcaagtacagtgtctcgatctttgtctcggaccacatcaaggaccttgccttctatcgctcggatgagcgtggtatcaccgtcggcgctaatctgagtctgaccgacctcgtccgccagctcaaggccgaacgtccctcctcagcctatgctcagcaggtcaagcgttccatcctcgacaacctcgcctactttgcctcgaaccagatccgaaatgtggcaaccctggcgggtaacattgccacggcgtcacccatctcagatctcaaccctgtctgggtggctaccggtgccgagctcttctatgtcgacactacttcgtctcaagagaagagcgtcaacatgcgcagtttctttctgggctaccgcaagactgctttgcctgcaggcgccgtcatcaccaagctctttgttccttggtccgatgacgctggcagcgtggttcaggccttcaagcagtcgaagcgcaaggatgatgacattgccatcgtcaatgcctgtcttcgagtctctgttcgcgaggacaaaattattgatgcgacactggcatttggcggtatgggcccaactaccatgcagagtgtagaagtgcaaaggtttctgcagggcaggcagtttagcgccccagagaccctagccgaagcattgcagattttggcaaagcaggacttcccactttcgtatggtgtgcctggtggcatgcccattttccgcaagacgcttgcactcggtttcctgacccgcttctggggtcttgcggcgcctcgtctcggtctgccgaagctggcaacggctctcgagttgctgccggacctcgaggagcttgcgaccagcactgtagaacgacctaccactactggacagcaagatctcgagaacgtcgccatcaaacagcctgtcggcgactcgattccacatctctcggccatgaagcaggtgacgggtgaagccgtctacattgacgatctgcctcccgtcgccaacgagcttcatgccggctttgtcctgtctcagcgtgcccatgccgtactgaagaaggttgatgcgagcgaggcgcttcagatgcccggtgtcgtcgactttatcacctacaaggacattcccgaaggtggtagcaacatctggaacccgccgtccatggatgagacgttctttgccgaagataaagtctacactgtgggtcagattatcggtctcattgtcgccgataccaaacgccatgcccaagctgcagcacacaaggtcaagatcgagtaccaagacttgccgcacatcttgacgatcgaagaggcgattgcggccggaagcttcttcaagcctcgtcccgtcatccatcacggagactcttcggaagaaagctggtcgcagtacgatcatgtactcgaaggcgagacacgtatgggaggccaagagcatttctacctcgagacgaacgcatgtctggtgattccaggcaaagaagattccgagatcgaggtgatttcttcgacgcagaacccctcggagacgcaaatcttttgcgcctcgattctgggtatcccgaacaaccgtgtggtgacgcgtgtcaagcgaatgggtggaggctttggtggaaaggaatcgcgtacgatcgcatttgcagcaccgctcacgttggcagccaagaaactcggacgtcccgtgcgtgttatgctggaccgtgacgaagacatgctcaccaccggtcagcgacatcctttcctgtgcaagtggaaactcggcttcaactcttccggaaagctcgagcgtctggacgccaaggtgtacaacaatggtggctggagtcaagacctttcgcaggcagtgctcgagcgtgccatgttccacatcgacaactgctacaacatccctcatatccacgtcgagggattcatctgcaagaccaacaccatgtccaatacggcgtttagaggatttggtggtcctcaaggcatgtttttcaccgaagactttgtcagcaaagcggcagcggtgattgggatgcgacccgagacaatgcgcgaaatgaatctgtacaaggagaacgacaagacgcacttccggcaaaagctgatcgattggaacgtgcccacgctttgggaacagttgaaatcgtctggtgacttggaggcgaggagtagagcggtggacgagttcaactcgacgcaccgatacaagaagagaggtattgctatgatcccgaccaagttcggtatttcattcaccgcgattttcctgaatcaggcgtacggtgtggtgcacgtgtatcatcacgatggcagtgtcctcttttctcacggtggaaccgagatgggtcaaggcttgcatactaagatggcgcaggtggtggctacggagctcgagattcccgtctcaatggtacatctgaccgagaccaacacgtcacaggcgtccaacacgtcggctaccgctgcatcggcttcgtctgatctcaacggaatggcgctcaaggatgcgtgtgtgcagattaacgagtccatcgctccattccgcgcggatgctgctgccaaaggcttggcaggcgtggaggcgtggaaggatgctattcacgccgcctactttaatcgcgtacagctgtctgcgattggtcattaccgcacaccgggaatcgggtacaattggaccaacggcacaggtacgccgttctactactttactcagggcgtggcgatctcggaggtggaattggacacgatcacgggcgatcaccgtatcgtgcgtgcggacgtccacatggatattggtcgatcgatcaacccttcgatcgacgtgggtcagatcgaaggggctttcacgcaaggatttggtctcttcacaatggaggaaacgctgtatttgaacaacggacagcttgcgacgcgtgggccgggtaactacaagatcccggcgttcctggatacgcctacggacatgcgcgtgtcgttcctcaaggtccaagatgcgaatgacgccaaggtggccaagcataataagcacctaggtacaattcagagtagtaagggcatcggcgaaccaccgttgttcttgggcagctcggtgttctttgcgctgcgtcatgcgattggagcggctagagcgcagtatggtggagatggaagcaaggatggtttccatctggtggcacccgcgacggctgagaggatcagggttgcgatcaacgatcctcttgtcaggttggcgcacgagtctacgccgaggacggatgcggaaaagccgttcttcgtcagcatttcatag

SEQ ID NO: 115947 - protein, 1460 aa, Ustilago maydis 521
MPVPAPTTTVVDGFKLPSQFTQTASKLVFTVNNIRFQLSPAKGDDLDLTLLEFIRSKGFTGTKLGCGEGGCGACTVVVGKYDTHLATSSSSSSSKAPYRYKSVNACLLPLVAVHGCHVLTVEGIGSSSNPHPIQERIGKLFGSQCGFCTPGIVMSLYATVRNGYGHLTEQDIEHSLDGCLCRCTGYRPILDAAKSFATVKSTKIGSSSSSSNVYSDDSDDAEPTTPPEADLITRTPCAKGADCCMVNGKSKGCTPSTTSTAPGISTTAHAIQKVLDPTQFKPYDAASELIFPSYLAKDTFDSQDLVFIEQPPQLDDLESESESETVAAKSDSTRQVWLRPGSLQSLIDCMKLYGLDAGGKIRSGNTETGIEVKFKHLKYSVSIFVSDHIKDLAFYRSDERGITVGANLSLTDLVRQLKAERPSSAYAQQVKRSILDNLAYFASNQIRNVATLAGNIATASPISDLNPVWVATGAELFYVDTTSSQEKSVNMRSFFLGYRKTALPAGAVITKLFVPWSDDAGSVVQAFKQSKRKDDDIAIVNACLRVSVREDKIIDATLAFGGMGPTTMQSVEVQRFLQGRQFSAPETLAEALQILAKQDFPLSYGVPGGMPIFRKTLALGFLTRFWGLAAPRLGLPKLATALELLPDLEELATSTVERPTTTGQQDLENVAIKQPVGDSIPHLSAMKQVTGEAVYIDDLPPVANELHAGFVLSQRAHAVLKKVDASEALQMPGVVDFITYKDIPEGGSNIWNPPSMDETFFAEDKVYTVGQIIGLIVADTKRHAQAAAHKVKIEYQDLPHILTIEEAIAAGSFFKPRPVIHHGDSSEESWSQYDHVLEGETRMGGQEHFYLETNACLVIPGKEDSEIEVISSTQNPSETQIFCASILGIPNNRVVTRVKRMGGGFGGKESRTIAFAAPLTLAAKKLGRPVRVMLDRDEDMLTTGQRHPFLCKWKLGFNSSGKLERLDAKVYNNGGWSQDLSQAVLERAMFHIDNCYNIPHIHVEGFICKTNTMSNTAFRGFGGPQGMFFTEDFVSKAAAVIGMRPETMREMNLYKENDKTHFRQKLIDWNVPTLWEQLKSSGDLEARSRAVDEFNSTHRYKKRGIAMIPTKFGISFTAIFLNQAYGVVHVYHHDGSVLFSHGGTEMGQGLHTKMAQVVATELEIPVSMVHLTETNTSQASNTSATAASASSDLNGMALKDACVQINESIAPFRADAAAKGLAGVEAWKDAIHAAYFNRVQLSAIGHYRTPGIGYNWTNGTGTPFYYFTQGVAISEVELDTITGDHRIVRADVHMDIGRSINPSIDVGQIEGAFTQGFGLFTMEETLYLNNGQLATRGPGNYKIPAFLDTPTDMRVSFLKVQDANDAKVAKHNKHLGTIQSSKGIGEPPLFLGSSVFFALRHAIGAARAQYGGDGSKDGFHLVAPATAERIRVAINDPLVRLAHESTPRTDAEKPFFVSIS

SEQ ID NO: 115948 - DNA, 2382 bp, Acinetobacter sp. ADP1
  CDS (1)..(2382): transl_table=11
atgaatcagtccgtagaacatttaaacattcaaaaaaaatcggcgaaagctggggactcgattccacacgaaagcgcacatctacatgtgacgggtcaagccacttatatcgatgacttaccagaacttgaaaatacactgcatctggcagtgggtttctcgcaatgtgcaaagggtaaaattgtccaatttgatttagatgcagtgcgtcaggcagaaggtgtttatgctgtttatactgcagcagatatagcagtcaaaaataattggggcccaattgtcaatgacgatccaatttttgctgatggcgaagttgagttttatggtcaggcactgtttgtggtggcagctaaaacctatcagcaggcaagacgtgcagtacgactggccaaaatcgaatatgaagcagaaacccccattttaagtattcaagatgcgattgagcagcaatcttgggtcttgccacctgtcgattttagtcatggcgaagtggaacaagcctttcaaaccgcatcgcatcagttaagtggttcaattgagctcggcgggcaagagcatttttatctggaaggccagatttcttatgcggtgccacaagaagatcagacactgaaggtttattgttcaacccaacatccaaccgagatgcaattacttatctgccatgcattgggctaccacatgcatcaggtcagtgttgaagcacgtcgtatgggcggtggatttggtgggaaagaatcgcaatcggcacaatgggcgtgtattgcttcgctcgccgcacaactttcggggcatccatgtaaactgcgtctggatcgtgatgatgatatgagttcgacgggtaagcgacatggctttgcgtatgaatggtcagttgcatttgatgaattgggtgtattacagggattaaaagtgcaattggcatccaattgtggtttttctgcagatttatcaggccctgtcaatgaacgtgctatttgtcatattggtaatgcgtattatctaaatgcggttcagttgcgcaatttacgctgtaagaccaataccgtatcgaatacagcgtatcgaggatttggcggccctcaaggcatgtttgtcattgagaatattttggatgatattgcccgttatttaaagtgtgatcctgttttggtgcgtcagcgtaatttttttgcagaaaagccaggcaatggtcgtgatcatatgcattatggtgctgaagttcgagataatgttgcgcccaaaattgtagacgaattactggcgacaagtcattaccacgcacgtcgagcctcaattgcgcaatttaatcagcacaatgcaatcattaaacgtggtattgctttaacaccactcatgtttgggatctcttttaatgctgttcattacaatcaggctggtgcgctggtctatgtgtatatggatggcacggtcgcaatcacgcatggtggtacagagatgggtcaagggctttataccaaagttcgtcaggttgccgcacatgaattaggactaccgattgatcgggtacgtttaattgccaccgatacctctcgtgttccgaatacttccgccacagccgcttcgagtggtgcagatttaaacgggaaggcggtacaaaatgcgtgtattaagattcgtgaacgtttagccaaacttgcggctgaaattagccaaagtgatgcagaccagattcactttgaaaatagtacggtgactacaaataatggacaatcatggagttttaatgatttggtcaatcgtgcctatatggcgcgggtacaattgtgggatagcggtttttataagacccctgaaattcactatgatcaagtcaaccatttaggtcgtccatttttttactatgcatatggcgctgcggtcagtgaagttgcaattgatactttgacgggggaaatgaaagtcttacgtaccgatattcttcatgatgtcggacgttcgattaaccctgcgatagacattgggcagattgaaggtgggtttattcaaggcatgggatggttaaccactgaagaactgtattggcaaccgcaagggccgcatgctgggcgattatttacgcatgcaccatcgacctataagattccgaccagtgccgatattccgcatgtctttaatgtcaaattatttgataaccagaatgctgctgataccatttatcgttccaaagctgtgggtgagccgccgtttatgttagggctatcggtattctctgcgattcgccaagcggttcaggcggcaattcctgaggatgcaccgcttgagttaaatgcacctgcaacagcagaagaaatcctgcgcgcgattgcgattggtcgtgggcaggcacttgcagatcagccacagccaagattacgctag

SEQ ID NO: 115949 - protein, 793 aa, Acinetobacter sp. ADP1
MNQSVEHLNIQKKSAKAGDSIPHESAHLHVTGQATYIDDLPELENTLHLAVGFSQCAKGKIVQFDLDAVRQAEGVYAVYTAADIAVKNNWGPIVNDDPIFADGEVEFYGQALFVVAAKTYQQARRAVRLAKIEYEAETPILSIQDAIEQQSWVLPPVDFSHGEVEQAFQTASHQLSGSIELGGQEHFYLEGQISYAVPQEDQTLKVYCSTQHPTEMQLLICHALGYHMHQVSVEARRMGGGFGGKESQSAQWACIASLAAQLSGHPCKLRLDRDDDMSSTGKRHGFAYEWSVAFDELGVLQGLKVQLASNCGFSADLSGPVNERAICHIGNAYYLNAVQLRNLRCKTNTVSNTAYRGFGGPQGMFVIENILDDIARYLKCDPVLVRQRNFFAEKPGNGRDHMHYGAEVRDNVAPKIVDELLATSHYHARRASIAQFNQHNAIIKRGIALTPLMFGISFNAVHYNQAGALVYVYMDGTVAITHGGTEMGQGLYTKVRQVAAHELGLPIDRVRLIATDTSRVPNTSATAASSGADLNGKAVQNACIKIRERLAKLAAEISQSDADQIHFENSTVTTNNGQSWSFNDLVNRAYMARVQLWDSGFYKTPEIHYDQVNHLGRPFFYYAYGAAVSEVAIDTLTGEMKVLRTDILHDVGRSINPAIDIGQIEGGFIQGMGWLTTEELYWQPQGPHAGRLFTHAPSTYKIPTSADIPHVFNVKLFDNQNAADTIYRSKAVGEPPFMLGLSVFSAIRQAVQAAIPEDAPLELNAPATAEEILRAIAIGRGQALADQPQPRLR

SEQ ID NO: 115950 - DNA, 2334 bp, Desulfotalea psychrophila LSv54
  CDS (1)..(2334): transl_table=11
atgagtaaatttaaggttgttggccaaaatatcaagagacgtgatggggtggataagaccacgggcagggggctttttaccagtgatatgtccttgccgggtatgttgcacgcaaaggtgttacgcagtccccatcctcacgctaaaattgtcagtattgatgtttcagcagcagaaaagatgatcggtgtccgggccataatgacccatgaaaatggacctaaaaatctgtttaatgcggccgcgccaatgtttcttaccgctcctcatcttgaaagagttctggatcagtacctctttgatgatattgtccgttatgtgggcgacgaggttgctgctgttgccgccaccaccgaggccattgccgagcaggcgataaagcttattcgggtggaatatgagattttgcctgcggttcttgatcttgaggaggccatgggcccggatgctccggaattgcatggtgacaagggatgtacgcccgagggcaagaacattcccggtgaaatcatcaggattccctatggtgatattgagaagggcttggcggaatctgaggtaattattgagaaatcctttaagcttcccattgtcaagcaggtacagatggagacccagagcgccgtggctcaggttgatggtaacggtgaggtcactgtctggtctaccactcagactccccatccgactaaggcaatcctcggtaagatttttgctatgccggcgagcaaaatacgtgttttggcacctccctatgtcggtggcggttttggggtgcgtattggcttgagtggtctggctgaacccattgccatggctctggcaatgcttgccaaaaaacctgtaaagcttgtctatagtcgtaaggaagattttatcgcttccgatacacgtcatcctgccgtggtcaccgttaagcttggtgctgacagggatggaacgttccgggctctggatgtgaaggctctttttggtacgggcgcttactgtagctttggggcagagcttcccggtgtttgtggggcaatgaccctggccatttaccgcataccgcaccaacgctactacgggcacagtgtttataccaatcagactattggcggagccatgcgtggctttggtaatccacagggaaatctggcccttgagcaggttgtggatttgatggccattgaacttggtatggacgcctatgaattgcggatgaaaaatatcacgcaggttggagataagtggtgtctacccttcccttgtctgagcagcgaacttgcagagtgtatgcgacagggagcggagagtatcggttggaaacgtcgcggtagcctgaacagcccgggcagcaaaaaggtgcgtggtttgggaatggccgttggtacccatgtaagtaacgcttggcccttttgtgttgactacgacaatgcctatgtgacaatccagtccgacggcacagccaatgttgcctctggtgttcctgaattgggaacaggggtatgtacctcattggtacaaattgctgctgaaaccctgagtatggatgtagataaaatttcactgacctatggtgatacccagagcacgccttttgacattggcagtcacgccagtcgtacctgttatgccgccggattggctattcagatagctgctacggatgcaaagaaacagatgctggaatacgcggcccccctttttagtgttaccccggaagatctgcagataaaggatgacagggtagagttagtggatgctacggttgcctcagagcactgttcgctggatgatatagcggggggcaagggaaattccgttacccttgaagagttggtttatcatgcccatgtccgtaataagcagtttatcggtgtggcaagaaatgtaccggcaaatgccgccccttggcatgcatgttttgccgaggtcgaggtggacaaagagacaggacaggttgaggtgattaagcttgccgccgcccatgatgtagggactgccattaatccgatgattgtagagggacagattgagggaggggctgttcaaggtatcggttacgccctcactgaagagattcgctacaacaatcgtggcggccaggttaacagcagtatgcataattatatgctacccacagcagaagatattccccccattgatgccattattgtggaggcaagtgatcctactggccccttcggcgccaagggggccggagagtgtagtctggtttgtccggcatcggcaatcgccaatgccgtggctgatgcaaccggcattagatttgttgagttgccgatcaccccagaacgagtgtttgcggctcttcatttagagaattag

SEQ ID NO: 115951 - protein, 777 aa, Desulfotalea psychrophila LSv54
MSKFKVVGQNIKRRDGVDKTTGRGLFTSDMSLPGMLHAKVLRSPHPHAKIVSIDVSAAEKMIGVRAIMTHENGPKNLFNAAAPMFLTAPHLERVLDQYLFDDIVRYVGDEVAAVAATTEAIAEQAIKLIRVEYEILPAVLDLEEAMGPDAPELHGDKGCTPEGKNIPGEIIRIPYGDIEKGLAESEVIIEKSFKLPIVKQVQMETQSAVAQVDGNGEVTVWSTTQTPHPTKAILGKIFAMPASKIRVLAPPYVGGGFGVRIGLSGLAEPIAMALAMLAKKPVKLVYSRKEDFIASDTRHPAVVTVKLGADRDGTFRALDVKALFGTGAYCSFGAELPGVCGAMTLAIYRIPHQRYYGHSVYTNQTIGGAMRGFGNPQGNLALEQVVDLMAIELGMDAYELRMKNITQVGDKWCLPFPCLSSELAECMRQGAESIGWKRRGSLNSPGSKKVRGLGMAVGTHVSNAWPFCVDYDNAYVTIQSDGTANVASGVPELGTGVCTSLVQIAAETLSMDVDKISLTYGDTQSTPFDIGSHASRTCYAAGLAIQIAATDAKKQMLEYAAPLFSVTPEDLQIKDDRVELVDATVASEHCSLDDIAGGKGNSVTLEELVYHAHVRNKQFIGVARNVPANAAPWHACFAEVEVDKETGQVEVIKLAAAHDVGTAINPMIVEGQIEGGAVQGIGYALTEEIRYNNRGGQVNSSMHNYMLPTAEDIPPIDAIIVEASDPTGPFGAKGAGECSLVCPASAIANAVADATGIRFVELPITPERVFAALHLEN

SEQ ID NO: 115952 - DNA, 2304 bp, Desulfotalea psychrophila LSv54
  CDS (1)..(2304): transl_table=11
atgcaatatataggaaagagcattgccaagatagacggtcttgccctggttaagggtacacctgcctataccagtgatttggatactaataacagcgccctggtggtaaagattcttcgcagtcctcatgctgcggccagaattctctccattgatagctcccttgccgaggccatgcccggggtggagtgtgtccttacccataaggatgtgccggaaaaaagtttcacccttgccggtcagtcttttcctgagccatcgccctatgatagaagaattcttgaggacagggttcgctatgtgggtgatgaggtggccattgttgctgctgttgatgagattaccgcccttgaggctatcgataagatcaaggtgaagtatgaggttactactccagttttaagcctggaagaggccctggataacgctgttcaggtacatgagagccagccctatactcactttgatatcggtaacgatgccctgcgtaatattgctgccagccaggatgtcggtcggggtgatgtggaggctgaacttgctgcctccgaggtgattattgatcggacctataatacccaggcccaggcccatggcatgatggagacctatcgggcctctacttccttggatgttcatggtcgtctgcaggtgatgacctccacccaggtgccctttcatattcgccgtcatctggctcatatctttgatatccctcggagcaagataaagatgctcaaacctcgggttggtggtggctttggtggtaagcagagcgcgcccgtggagatatttcccgcccttgtcactctcaagaccggaaaaccggctcgaattgtctatagccgtgaggagacctttaccagtaccagtactcggcatgccatgcagatgcgggtacgattgggtgctgatctggccggtaatatcaatgccgttgatatctactgcctctctgataccggggcctatggtgagcatgcggccactgttttttgggtggcgggagagaagaccatgcctctttatggcaaggcccgtgcctgtcgttatcatggtcatgccctctatactaataaaacccctgctggcgcctttcgtggttatggcgcgactcagggcacctttgccttggaatcggcgataaatgagcttgccgaaaagctcggtatggacccggcggccctgcgtttgcagaacctcatcgccgaaggtgagagtagtgccatgctctgcggttcaacgcctgaaaagcccgtggtattaaagagtagttctctgggcagctgcataagaaggggtaaggagctgatcggttgggaggaaaattatcccgccaaaaggatcagtgcaacgaagatgcgtggctacggtatggctgttaccatgcagggttcaggaattgccaaaattgatacctcaacggtactgataaagctcaatgaggatggtttttttaccctcagtcattcggccgcagacatcggtcagggctcggatacggtacttaatcagattgccgccgaggttctggaggtgggaatggatcagattaatgtcaccagttttgatctggacaccctgccctatgatccgggtgcctatgcctccagtggcacctatgtcacaggtaatgccacaatcaggtcggccgaagatctccttagacagatgagggaaactgcggccaggcatatggactgttcgctgacagatatcagctatcatgaaggtgtcttcagcgctgaggccggtcaagagatttctctttctgagttggcggccattctttcttcttttgccggcatggatcagctcgtgggtaagggcagctttggtggcgatacctctccccctccatttattgcaggttttgccgaggtggaggtggatctcgaaaccggagagtcccaggtcacagactatgttgccgtggttgattgcggtactgttatcaataagaatctggcgaccattcaggtggaaagtggggtggtgatgggtattggtctggccctctacgaagaggtgcgttattcagccaagggtcgccttaccactaactcctttatggaataccgtatgccatgtcgtcaggatgtccatggtattcaggtcgcctttgaagagagctatgagccgacgggtccctatggagccaaatcggtgggcgaggtggtctgtaatgcccccgctccggcaattattcaggcaatttacaatgcgacggggttcttttgtcgtgatctaccggcaactgctgaaaaggtgctattggggatgaatgatggaaaactggcatag

SEQ ID NO: 115953 - protein, 767 aa, Desulfotalea psychrophila LSv54
MQYIGKSIAKIDGLALVKGTPAYTSDLDTNNSALVVKILRSPHAAARILSIDSSLAEAMPGVECVLTHKDVPEKSFTLAGQSFPEPSPYDRRILEDRVRYVGDEVAIVAAVDEITALEAIDKIKVKYEVTTPVLSLEEALDNAVQVHESQPYTHFDIGNDALRNIAASQDVGRGDVEAELAASEVIIDRTYNTQAQAHGMMETYRASTSLDVHGRLQVMTSTQVPFHIRRHLAHIFDIPRSKIKMLKPRVGGGFGGKQSAPVEIFPALVTLKTGKPARIVYSREETFTSTSTRHAMQMRVRLGADLAGNINAVDIYCLSDTGAYGEHAATVFWVAGEKTMPLYGKARACRYHGHALYTNKTPAGAFRGYGATQGTFALESAINELAEKLGMDPAALRLQNLIAEGESSAMLCGSTPEKPVVLKSSSLGSCIRRGKELIGWEENYPAKRISATKMRGYGMAVTMQGSGIAKIDTSTVLIKLNEDGFFTLSHSAADIGQGSDTVLNQIAAEVLEVGMDQINVTSFDLDTLPYDPGAYASSGTYVTGNATIRSAEDLLRQMRETAARHMDCSLTDISYHEGVFSAEAGQEISLSELAAILSSFAGMDQLVGKGSFGGDTSPPPFIAGFAEVEVDLETGESQVTDYVAVVDCGTVINKNLATIQVESGVVMGIGLALYEEVRYSAKGRLTTNSFMEYRMPCRQDVHGIQVAFEESYEPTGPYGAKSVGEVVCNAPAPAIIQAIYNATGFFCRDLPATAEKVLLGMNDGKLA

SEQ ID NO: 115954 - DNA, 2412 bp, Azoarcus sp. EbN1
  CDS (1)..(2412): transl_table=11
atgaatgttgcagagaagacccatttcatcgaggccgacacgctgatcggcaagcgcatccagaaaaaggacgcgcccgagaaggcggccggcaagacgcgctacatccaggacatggtgctgccgggccagctgcacgcgaagatcctgcgctcggcgcgcgtgcatgcgcgcatcgtctcgatcgacacgtccgcggcgaaagcgctgcccggcgtgcatgtcgtgctgaccgcagcggacgtgccggaccagcagccgatcggcgtcgcgcgcgaccacctgccgctcaaaggcgagcgcgtgcgcagcctgcgcgacgagatcgccgcggtcgccgccgactccgaggagatcgccgaagccgcgctgaaactgatccgcgtcgaatacgaggatctgccgatcatcagcgacccgcaggacgcgctgaagcccggcgcgccgctgatccatccggaaccgcacggccccgacggcaagcatcttcatctgaagccgaacgcgccgatcgcattcgccggcaagcccgacaacatcgcgatgcagttcgactacacgcacggcgacatcgcgcaggccgaagccgagtccgacgtggtgttcgaggacacgttcaagctgcattacgtgacgcattgctgcatgggcgtgtcgggcatcatcgccgagttcgacgcgtccgggaatctcctgatgtactcgaacacgcaggtgccgttcctgcacaagcgcgagttcgccgaatacctgcacatggacccgagccgcatccgcatcatccagccgccgatcggtggcggcttcggctcgaagctcgacatctacccgttcgaagtcatctgcatcttcctcgcgcgcgccgcgcagcggccggtgaagatggtgttctcgcgcgaagaggagttcctcgcgtcgccgacgcgccagccggtgctgctgacgctgcgctcgggctgcaagaaggatggcacgctgacgttccgccaggtgcacacgctgcacgacaacggcgcctacacgtcgtggggcgcgacgacgccgttcgtcatgatgcagacgttctcgtcgctgtatcgcgtgccggcatgcgactaccacaccaccgcggtgtacacgaacaacccgtacgccgggtcgttccgcggctacggcaacctgcaggcgacgttcgcgatcgagcagcacatggacatgctcgccgaagcgatccagatggatccgctcgagttccgcctgaagaacgcgcaggacgccggcgaagtcaccggccagggcatggtgttcaagagctgcggcttcaaggaatgcctgacgaccgcggccgaacgcagcgactaccaggcgaagcaccgcgacaacatcgcgcatcgcggcgacgccggcccgatcaagcgcggcatcggcatcgcgtcgatgctgcacgtcggcggcggcgcgaagatttatccgtcggacggctgcggcacgatcctgaagctcgacgacttcgcgaacgtcacgctgatcaccggcgcgtccgagatcggccaaggctcggagacggtgctgtcgcagctcgtctgcgaggagctcggcctgccgatctcggcggtcacggtcgtcaacaacgacaccgcgatcacgccgtgggacgtcggcgtgcatgcgagccgcacgactttcatcgccggcaattcggcgatcggcgcggcgaagaaggcgaaagcgaagatcctcgcggcggcggcgaagaagcacggctgtgacgagacctcgctcgacctgcgcggcggctttgtcatccacgccgataccggcgagccggtcgtcgagcttgcgcggctgatgcgcaacctgcacttctccgacaaggccgagctcgtcatgacgacgttctactacgagccgcccagcgtgcatcaggacaagggcttcaagggcgacgtgtcggcggcgtacgcgtgggcgacgcaggtcgtcgaagtcgaggtcgacaccgacaccggcatcgtgaagatgacgaaagtcaccggcgcgcacgacgtcggccgcgtgctgaaccgcctcggcatcgaaggccagatcgaaggcggcgtcgtcatgggccagggctacgcgctgaccgagaacctgatcgtcgacaacggcgtcacgcgcaatccgaacttccgcgactacaagctcgtcaccgcgccggaaatccccgagatggacatctcgttcatcgagtcgatggacggcgaaggcccgcagggcgcgaaaggcgtcggcgaagcgccgtcgatctgcatcgccgcagctgccgcgaacgcgatctacaacgcgaccggcgtgcgcatcttcgcgctgcctttcacgccggaagcggtctaccgggcattgcgcggcaaaacaccgaaaccccattggcaagcgtggagaccggcatga

SEQ ID NO: 115955 - protein, 803 aa, Azoarcus sp. EbN1
MNVAEKTHFIEADTLIGKRIQKKDAPEKAAGKTRYIQDMVLPGQLHAKILRSARVHARIVSIDTSAAKALPGVHVVLTAADVPDQQPIGVARDHLPLKGERVRSLRDEIAAVAADSEEIAEAALKLIRVEYEDLPIISDPQDALKPGAPLIHPEPHGPDGKHLHLKPNAPIAFAGKPDNIAMQFDYTHGDIAQAEAESDVVFEDTFKLHYVTHCCMGVSGIIAEFDASGNLLMYSNTQVPFLHKREFAEYLHMDPSRIRIIQPPIGGGFGSKLDIYPFEVICIFLARAAQRPVKMVFSREEEFLASPTRQPVLLTLRSGCKKDGTLTFRQVHTLHDNGAYTSWGATTPFVMMQTFSSLYRVPACDYHTTAVYTNNPYAGSFRGYGNLQATFAIEQHMDMLAEAIQMDPLEFRLKNAQDAGEVTGQGMVFKSCGFKECLTTAAERSDYQAKHRDNIAHRGDAGPIKRGIGIASMLHVGGGAKIYPSDGCGTILKLDDFANVTLITGASEIGQGSETVLSQLVCEELGLPISAVTVVNNDTAITPWDVGVHASRTTFIAGNSAIGAAKKAKAKILAAAAKKHGCDETSLDLRGGFVIHADTGEPVVELARLMRNLHFSDKAELVMTTFYYEPPSVHQDKGFKGDVSAAYAWATQVVEVEVDTDTGIVKMTKVTGAHDVGRVLNRLGIEGQIEGGVVMGQGYALTENLIVDNGVTRNPNFRDYKLVTAPEIPEMDISFIESMDGEGPQGAKGVGEAPSICIAAAAANAIYNATGVRIFALPFTPEAVYRALRGKTPKPHWQAWRPA

SEQ ID NO: 115956 - DNA, 2385 bp, Azoarcus sp. EbN1
  CDS (1)..(2385): transl_table=11
atgaacgcgcccgatcgcgaactgcgcaagctcggcgcagccaacgctgcgccgcgcggcgtcggcgcgcgcctgccgctcatcgacggcgtcgagaaagtcaccggcacggcgcgctacaccgccgacctgccggcccagggtgcgctggtcggcaagctcctgcgcagcccgtacgcgcacgccgaactgctcgaagtcgacatcagcgaagcgctgaagctgcccggcgtgcgcggcatcgtcaccggcaacgactgcgacacgccctacggcgtgatcccgattgcgcagaacgaattcccgctcgcgcgcggccgtatccgctacgtcggcgagccggtcgcggccgttgccgcggtcgacgaggcgaccaccgacgccgcgctcgcgctgatccggctgaaagtgcgcgaactgccggcgtatttcgacgcggccgacgcgcgcaaggctgacgtagtgctgctgcacgacaacaagaaaggcaacatcgagcgcgaggtgcacaacgagttcggcgacgctgcggccggtttcgcagccgccgacctcatttgcgaggaaaccttcgaatgcgccgaagtccatcacgcgatgatggagccgaacgcatcgctcgcagcgtgggacaacgagcgcgggcacctgacgctgtggtcggtgacgcaggtgccgtattacgtacacgaatcgctcgcgcgctgcatgaagctcgacgcggcctatatccgcgtcatcaagccgttcgtcggcggcggcttcggtcaccgcgtcgagacgctgaacttcgagatcatcgccgggctgctcgcccgcgcggcgcgcggcaccgtgcgcctgctgcagacgcgcgaggaagcgtttctcacgcaccgtggccggccgcagacatacgtgcgcatgaagctgggcctcacgcgcgacggtcgcatgaccgcgtgcgaggccgaagtcgtgcagcgcggcggcgcgtatggcggctacggactggtgacgatcctctacgcgggggcgttattgaacggcctctacgacctgcccgcggtcaagtacgacggttaccgcgtgtatacgaacacgccgccgtgcggcgcgatgcgcgggcacggcacggtcaacatccgcttcgcgttcgagtcgctgctcgacatgatggccgccgagctcggcctcgacgctttcgcagtgcgccgccgcaacctgctgaaggcgccgaccgagacgatcaacgggctgaaagtgatgagctacgggttgcccgagtgcctcgactgggtcgagcaggcgagcggctggcgcgagcgcgcagcgcggctcgaggccaacagcgacggcccgatcaggcgcggcatcggcatcgcgtgctcgcacttcgtcagcggctcggcgaagccggtgcatttcaccggccagccgcacgcgacgatcgcgctgcgcgtcgatttcgacgccggcatcacgatcctgaccggagcctccgacatcggccagggctcgtcgacgatcatcacccaggtcgtcgccgagatcctcggcgtcgagtaccgccgcctgcgcctcatcgcgaccgactccgcgctgacgccgaaggacaacggctcgtattcgtcgcgcgtcactttcatggtcggcaacgccgcggcggatgcggcgcgcaacctcaaggcagtgctcgtcgccgctgcggcgaagcggctgcaggttgccgaagccgacgtcgactggctcggcgaggccgccgcggtcgtcggcgatgcgtcgcgccagatcccgttccacgacatcgtcgaggaagccctcgtcgacgtcggcatgctgaccgtcaagggcacgttcacgtgcccgcccgagttccagggtggcaagcagcgcggcggcgcggtcggctcgacgatgggcttctcgtacgccgcgcaggcggtcgaagtcagcgtcgacaccgagctcggcaaagtcaccgtcgaaaaagtctggtcggcgatcgactgcggcttcgcgatcaacccgatgtcggtcgaaggccaggtccagggcgcgatctggatgggcatggggcaggcgatctcggaggaaaccgtctatgagaacggccgccacaaggcggtcagcctgctcgactaccgtgtgccgacgatcatcgagtcgcccgacatcgcagtgcatatcgtcgagagcctggacccgaacggcccgttcggcgcgaaggaagcgagcgaaggaccgctcgccggcgtgatgtccgcgatcgccgccgcgatcgaggacgccaccggcacccgcatccgtgcgacacccttcaccccggaccgcgtgttcgacgcgctcaaccgcaaaccccgccccggcgcccacgtggcggccgctgcaaaaggagccgcatga

SEQ ID NO: 115957 - protein, 794 aa, Azoarcus sp. EbN1
MNAPDRELRKLGAANAAPRGVGARLPLIDGVEKVTGTARYTADLPAQGALVGKLLRSPYAHAELLEVDISEALKLPGVRGIVTGNDCDTPYGVIPIAQNEFPLARGRIRYVGEPVAAVAAVDEATTDAALALIRLKVRELPAYFDAADARKADVVLLHDNKKGNIEREVHNEFGDAAAGFAAADLICEETFECAEVHHAMMEPNASLAAWDNERGHLTLWSVTQVPYYVHESLARCMKLDAAYIRVIKPFVGGGFGHRVETLNFEIIAGLLARAARGTVRLLQTREEAFLTHRGRPQTYVRMKLGLTRDGRMTACEAEVVQRGGAYGGYGLVTILYAGALLNGLYDLPAVKYDGYRVYTNTPPCGAMRGHGTVNIRFAFESLLDMMAAELGLDAFAVRRRNLLKAPTETINGLKVMSYGLPECLDWVEQASGWRERAARLEANSDGPIRRGIGIACSHFVSGSAKPVHFTGQPHATIALRVDFDAGITILTGASDIGQGSSTIITQVVAEILGVEYRRLRLIATDSALTPKDNGSYSSRVTFMVGNAAADAARNLKAVLVAAAAKRLQVAEADVDWLGEAAAVVGDASRQIPFHDIVEEALVDVGMLTVKGTFTCPPEFQGGKQRGGAVGSTMGFSYAAQAVEVSVDTELGKVTVEKVWSAIDCGFAINPMSVEGQVQGAIWMGMGQAISEETVYENGRHKAVSLLDYRVPTIIESPDIAVHIVESLDPNGPFGAKEASEGPLAGVMSAIAAAIEDATGTRIRATPFTPDRVFDALNRKPRPGAHVAAAAKGAA

SEQ ID NO: 115958 - DNA, 2262 bp, Silicibacter pomeroyi DSS-3
  CDS (1)..(2262): transl_table=11
atggcgctcgacgatcgcaaatccgacggtttcacctttgtcggcacccgcccgaaccggcccgacgggctggacaaggtcaccggccgcgcccggttcggtgccgatgcccatgcccccggcatgctgcatggcgccatcctgcgcagcccgcacgcccatgcccgcatcttgcgcattgacacctccaaggccgaggcactgaaggatgtgaaggcagtggtcacccgcgccgatttctcggacaaggtggaatttgcgccggggctggagggtgatttctggaacatccttgaaaacgtcatggccggcgacaaggcgctttatgacgggcatgcggtggccgctgttgccgccacctcggcgctggcggcgcgtgatgcgctcaagctgatcgaggtggactacgaggtcctgccgcatgtgaccgatgtggacaaggcgatgctgatggatgcgccggtgatccgtcagggggccgcggactattccgtgcccgaggggatgcatcccaacgtggtgcgcaaacacgaaagcggccatggcgatgtcgaggcgggctttgccgaagccgacctggtgatcgaggatcatttcaccaccgaggcgacccaccagggttatatcgaaccgcatgcctgcctggccacgctgggtgcggacggcaagggagagctgtggtgttgcacccagggacactggatcgtgcagaaaacctgtgccgcgcttctggggatcgaaaccgccaacctgcgggtgaccgcctcggagatcggtggcggctttggcggcaagaccaccgtgttcatcgagccggtggcgctggcgctgtcgcgcaaggccaacaaaccggtaaaactggtgatgagccggtccgaggtgttccgcgccaccgggccgaccgcctcggcctcgatggatatcaggatcggcatgaagaaggacggcacgctgaccgccgcccagggcacgttccgcctgcagggcggcgcctttcccggcggcccggcggatttcaccgccatgtgcgcctttgccccctataacctgccgcatgtgcgccaggtgggctatgacgtgatgaccaaccggcccaaacaggccgcctatcgcgcgcccggatcgcccatggcggcctttgcggtggaatcggtgatcgacgagctgtgcaatcagctggggctcgacccgatcgaggtgcggctcaagaatgcctcgcgcgaggggaccaaggcgagctatgggcccaggttccagcgggtcggcctggtcgaaacgctggaagcggccaaggcccatccccattacaccgcgccgctgaaaccggggcaggggcggggaatttcctgcgggttctggttcaaccatggtggcgaaacctcggtctcgctggcgctgagcgaggatggctcggcccaggtcatggtgggcacgcccgatatcggcggcagccgcgcctcgatggcgctgatggcggccgaggtgctgggcatcccgtacgagaacatccgggtgaccatcgccgacaccgccacgctgggttacaacgacgtgagccacggcagccgggtgacctatgccagcgggctggccaccatcaaggcggcgcgccacgcggtcgagaaactgtgcgagcgggcggccaagaaatggggcatcccggtggatgcggtgaaatgggaaaacggctgcgcggtgccttcgggcccgaatgcgggcgaattcgacccgctgccgctggccgatatcaccgccgatatggggcgcacgggcgggccgatctcgggccatttcgaggcgacacccgaaggcgcgggcgtcagctttgccacccatatcgtggatgccgaggtggaccccgagacgggcaagaccaaggtcgtgcgctatacggtggtgcaggacgccggcaaggcgatccatccgacctatgtcgaagggcagttccagggcggcgcggcgcaaggcatcggctgggcgctgaacgaggaatacatctatggcgccgacgggcggctgcagaacagcgtcttcctcgattaccgcatcccggtggccagcgacctgccgatgatcgacacggtgatcgtcgaggtgcccaatcccggccacccgttcggggtgcgcggggtgggtgaaacgtcgatctgcccgccgctggcggccatcgccaacgcggtctcggccgccgccggcgcgcggatgcggcaattgccgatgtcgccgccgcgtatcctggcggcgctcaaggcggatggttga

SEQ ID NO: 115959 - protein, 753 aa, Silicibacter pomeroyi DSS-3
MALDDRKSDGFTFVGTRPNRPDGLDKVTGRARFGADAHAPGMLHGAILRSPHAHARILRIDTSKAEALKDVKAVVTRADFSDKVEFAPGLEGDFWNILENVMAGDKALYDGHAVAAVAATSALAARDALKLIEVDYEVLPHVTDVDKAMLMDAPVIRQGAADYSVPEGMHPNVVRKHESGHGDVEAGFAEADLVIEDHFTTEATHQGYIEPHACLATLGADGKGELWCCTQGHWIVQKTCAALLGIETANLRVTASEIGGGFGGKTTVFIEPVALALSRKANKPVKLVMSRSEVFRATGPTASASMDIRIGMKKDGTLTAAQGTFRLQGGAFPGGPADFTAMCAFAPYNLPHVRQVGYDVMTNRPKQAAYRAPGSPMAAFAVESVIDELCNQLGLDPIEVRLKNASREGTKASYGPRFQRVGLVETLEAAKAHPHYTAPLKPGQGRGISCGFWFNHGGETSVSLALSEDGSAQVMVGTPDIGGSRASMALMAAEVLGIPYENIRVTIADTATLGYNDVSHGSRVTYASGLATIKAARHAVEKLCERAAKKWGIPVDAVKWENGCAVPSGPNAGEFDPLPLADITADMGRTGGPISGHFEATPEGAGVSFATHIVDAEVDPETGKTKVVRYTVVQDAGKAIHPTYVEGQFQGGAAQGIGWALNEEYIYGADGRLQNSVFLDYRIPVASDLPMIDTVIVEVPNPGHPFGVRGVGETSICPPLAAIANAVSAAAGARMRQLPMSPPRILAALKADG

SEQ ID NO: 115960 - DNA, 2748 bp, Silicibacter pomeroyi DSS-3
  CDS (1)..(2748): transl_table=11
gtgatggaccgtcccttgtccacgacaacggatttcaccctgaacggcgcgctcacaagcgccagcccgcaaccgggtgagcgcctgtcgcggatgctgcgcgagcgttgcggcgcgcgcgaggtcaaggtgggctgcgacgcgggcgattgcggcgcctgtaccgtgctggtcgacggcgccccggtctgcgcctgcctgacgcccgcgcatcaggtggcaggccgccgggtggacaccctcagggggctgtcgaacgatccggtggcagagcgcctttccgacagtttcctcgcccatggcgcggcgcaatgcggcatctgcacgccgggcatgatggtggccacgaccgctctgctgcgcgaaaccccggagccgaccgagacgcaggtgctggatgcgcttggcggcgtgctgtgccgctgcaccggttatcgcaagatcatccaggcggtgatgcgggcgggcgcgcctctgctcgccgcccctgcgggggacgggcattccggcacggccatcccccggctcgacggcgcgggcaaggtggcggggaccgaggcttatggcgacgatgtcgcccccgccggaacgctggaaatcctgctggtcggcgcgccctacccccgcgcgggtttcacactgggcgatattgagagctggcgcagcgctcacgcgggcgtggtctcggtattgactgccgctgacctaccgggccgcaaccggttcggcgtgatgccggggttcgaggatcagcccgtgtttgccgaaacggaaacccggtttcgcggcgaacccgtcgccgccatcgtcgccccgcccgaggtggccgcgacgctcgacctcgccctcttcccggtgacatggacccggctcgacgcggtggaaaacatcgcggacgcaaccgcccccggcgcgccccagctgcaccccgaccgcgcgggcaatgtcatggtcaccggttttgtcgcctgcggcgatgccgaggcggcgctggccgcaagcggcgtggtggtcgaggcgcgctatgccaccccctttgtcgaacacgcctatatcgagcccgaggcgggctatgcctatctcgacggcgacaaggtggtggtgcatgcctgcacccaggccccggtgctggaccgcgacggcttgcagatggtgctgggccttggccctgatcgcatccgcatcatccccaccggcgtcggcggcggtttcggcgccaagcttgatatgtcggtgcagccctatctggcgattgccgcgctgaagacgggtcagccggtgcggctggcctatagccgggtgcagtcgatgcagatgagcaccaagcgccacccctccgagctgcacctgcgcatcggcgccagcaccgacgggcggctcaaagggttctccctgcaaggccgcttcaacaccggcgcctatgccagctgggggccgaccgtggccaaccgggtaccggtgcacggctccggcccctattttatccgcgattaccgggccgaggcgcagggcgtccacacccattgcccgccctcgggcgcgttccgcggctttggcgtgccgcaggccgccattgcgcaggaaaccctgttcgacgagctggccgagaaactggggctggatccgctggagtttcgcctgatcaacgcgctggcaaccggccagccgaccgtctgcggccaggtctttacccagggcgtcggcatccgggcctgtttgcaggccctgaaacccgactggacccgcgaacgcgccgcggccgaggcgttcaacgccgggaacaccgtcctgaaacacggtgtcggcatcgccgcgggctggtatggctgcggcaacacttcgctgcccaacccctcgaccatcaaatgcggtatccgcgccgacggcacactcgtgctgcatcagggcgcgatggatatcggccagggcgccaataccgtcatcacccagctatttgccaccgcgcttggcatcccgacccaccggattgaactgatcggccccgataccgacctgacgcccgacgcgggcaagacctcggcctcgcgccagacctttgtcaccggcaatgcggcaaggctggcaggggcggcgctgcgcgccgcgatcctgacccgcgtcaatgcggggcccgaggcgaccctgacgctcgaccagggccggatccatgtcaccgacacggaccgcgcccatgtgatcgacctcaccgacctacccgctgacgccgacggctatgtgctgggcgctaccgagacctatgacccgcccaccaagccgctggacaagaacggccagggcgtgccttacgcccagttcggctatgccgcccatctggcggtggtcgagatcgacacgcggctgggcacaatccgcccgctccgcttcaccgccgcccatgacgtgggccatgcggtcaaccccgctctggtcgagggccaggtcgagggcggcatcgcccagggtctcggcatggcactgatggaggaatacatccccggccgcaccgataacctgcatgactacctgatccccaccatcggcgacgtgccgcccatcgagacgctgatcatcgaggacccggacgagcacggcccctatggcgccaagggcctgggcgaacacgccctgatccccaccgcgcctgcgctcctcaacgcgatacgccacgccaccggcgttgccatccgccagaccccggtcacccccgcccgcctgcgcgccgcgctgaaggaggccggacatgactga

SEQ ID NO: 115961 - protein, 915 aa, Silicibacter pomeroyi DSS-3
MMDRPLSTTTDFTLNGALTSASPQPGERLSRMLRERCGAREVKVGCDAGDCGACTVLVDGAPVCACLTPAHQVAGRRVDTLRGLSNDPVAERLSDSFLAHGAAQCGICTPGMMVATTALLRETPEPTETQVLDALGGVLCRCTGYRKIIQAVMRAGAPLLAAPAGDGHSGTAIPRLDGAGKVAGTEAYGDDVAPAGTLEILLVGAPYPRAGFTLGDIESWRSAHAGVVSVLTAADLPGRNRFGVMPGFEDQPVFAETETRFRGEPVAAIVAPPEVAATLDLALFPVTWTRLDAVENIADATAPGAPQLHPDRAGNVMVTGFVACGDAEAALAASGVVVEARYATPFVEHAYIEPEAGYAYLDGDKVVVHACTQAPVLDRDGLQMVLGLGPDRIRIIPTGVGGGFGAKLDMSVQPYLAIAALKTGQPVRLAYSRVQSMQMSTKRHPSELHLRIGASTDGRLKGFSLQGRFNTGAYASWGPTVANRVPVHGSGPYFIRDYRAEAQGVHTHCPPSGAFRGFGVPQAAIAQETLFDELAEKLGLDPLEFRLINALATGQPTVCGQVFTQGVGIRACLQALKPDWTRERAAAEAFNAGNTVLKHGVGIAAGWYGCGNTSLPNPSTIKCGIRADGTLVLHQGAMDIGQGANTVITQLFATALGIPTHRIELIGPDTDLTPDAGKTSASRQTFVTGNAARLAGAALRAAILTRVNAGPEATLTLDQGRIHVTDTDRAHVIDLTDLPADADGYVLGATETYDPPTKPLDKNGQGVPYAQFGYAAHLAVVEIDTRLGTIRPLRFTAAHDVGHAVNPALVEGQVEGGIAQGLGMALMEEYIPGRTDNLHDYLIPTIGDVPPIETLIIEDPDEHGPYGAKGLGEHALIPTAPALLNAIRHATGVAIRQTPVTPARLRAALKEAGHD

SEQ ID NO: 115962 - DNA, 2367 bp, Silicibacter pomeroyi DSS-3
  CDS (1)..(2367): transl_table=11
atgcccaaggacagtggcatcggagccagcagcaagcgacgcgaggacgtccgtttcctgaccggcgccggcaattacaccgacgatatcaatcttcacggccaggcctatgtgcatttcctgcgctcggacatggcgcatgggcggatcgtgtcgctggacacggccgctgcggcggcgatgcccggggttgtgcgcatctttaccggcgccgatttcgagggcgtgggcggtctgccctgcggctggcaggtgaccgacaagcatggcgagccgatgcaggagccgggccatccggtcctggcccagggcaaggtgcgccatgtgggcgacccgatcgcggcggttgtggccgagacccccgatcaggcgcgtgacgcggccgaggcgatcggggtcgagatcgaggaactgccggcggtgatcgacatgaaggccgctttggccgagggcgcggccaaggtgcatgacgacctcagttcgaacctttgctatgactggggcttcgtcgaagagaacaagggcgcggtggacgcggcctttgccgaggcggcgcatgtcaccacgctggagctggtgaacaaccggctggtggccaacccgatggaaccgcgggtggcgatcggcgattatgcccgggcaacgggggactcgacactttacaccaccagccagaacccgcatgtgatccgcctgttgatgggggccttcgttctgggcatccccgagcacaagctgcgggtggtggcacccgatgtggggggcggcttcggctcgaagatcttccactatgccgaggaggccttctgcacctttgcggccaaggcgctggcgcggccggtcaaatggacctcgtcgcggtcggaggcgttcatgtcggatgcacatgggcgtgaccatgtgaccaggatcgagctggcgctggacgcgcagaacaacttcaccgcgctccggaccgagacgctggccaatatgggcgcctatctgtcgacctttgcgccaagcgtgccgacctggctgcacggcacgctgatggcaggcaattacaagacgccgctgatctatgtgaacgtcaaggcggtgttcaccaacacggtgccggtggatgcctatcgcggcgctggccggcccgaggcgacctatcagctggagcgcgtgatcgacaaggcggcgcgcgagctgggggtcgacccgatcgcgctgaggcggcagaacttcgtgaccgagttcccctatcagacgccggttgcggtggtctatgacaccggcgactacaacgccacgatggacaagctggaagagattgccgatctgtcgggctttgcggcgcggcgggcggaatccgaggcacgcggcaagctgcggggcctgggcatcaactgctatatcgaggcctgcggcatcgcgcccagcaaccttgtggggcagctgggcgcgcgcgccggtctttacgacgcggcgacggtgcgggtgaacgccaccggctcgatctcggtgatggtgggggcgcatagccacggccagggccacgagacagcgtttccgcaggtggtggccgagatgctgggcatcgacgagagcatgatcgagatcgtgcatggcgattccagcaagatcccgttcggcatgggcacctatggttcgcgcagccttgcggtctgcggctcggccatggtgcgggcgaccgaaaagatcatcaacaaagccaaaaagatcgcggcgcatctgatggaggccagcgaggccgatatcgagctgaaggacggccagttcagcgttgcgggcacggacaagtccgtggcctggggcgacgtgacgctggcggcttatgtgccgcacaactacccgctggaggatatcgagccggggctggaggagacggcgttctacgacccgtcgaacttcacctatccggccggggcctatgcctgcgaggtggaggtggaccccgacaccggcaaggtgacggtggagcggttcagcgcggccgatgatttcggcaatatcgtcaacccgatgatcgtgtcgggacaggtgcatgggggtctcggccagggcatcggccaggcgctgctggagaactgcgcctatgatcccgagaccgggcagctgctcagcgcatcctacatggattacgcgatgccgcgcgccgacgatgtgccgttctatgcggtggatcattcctgcgccacgccctgcacccacaacccgctgggggtgaagggctgtggcgaggccggggccatcggcagcccgccggcagtggtcaatgcggtgatcgacgcgctgcaatcgggcggcaagaccgtcacccatatcgacatgccgatgagcccctcgcgggtctggtcggcgatgcagggctga

SEQ ID NO: 115963 - protein, 788 aa, Silicibacter pomeroyi DSS-3
MPKDSGIGASSKRREDVRFLTGAGNYTDDINLHGQAYVHFLRSDMAHGRIVSLDTAAAAAMPGVVRIFTGADFEGVGGLPCGWQVTDKHGEPMQEPGHPVLAQGKVRHVGDPIAAVVAETPDQARDAAEAIGVEIEELPAVIDMKAALAEGAAKVHDDLSSNLCYDWGFVEENKGAVDAAFAEAAHVTTLELVNNRLVANPMEPRVAIGDYARATGDSTLYTTSQNPHVIRLLMGAFVLGIPEHKLRVVAPDVGGGFGSKIFHYAEEAFCTFAAKALARPVKWTSSRSEAFMSDAHGRDHVTRIELALDAQNNFTALRTETLANMGAYLSTFAPSVPTWLHGTLMAGNYKTPLIYVNVKAVFTNTVPVDAYRGAGRPEATYQLERVIDKAARELGVDPIALRRQNFVTEFPYQTPVAVVYDTGDYNATMDKLEEIADLSGFAARRAESEARGKLRGLGINCYIEACGIAPSNLVGQLGARAGLYDAATVRVNATGSISVMVGAHSHGQGHETAFPQVVAEMLGIDESMIEIVHGDSSKIPFGMGTYGSRSLAVCGSAMVRATEKIINKAKKIAAHLMEASEADIELKDGQFSVAGTDKSVAWGDVTLAAYVPHNYPLEDIEPGLEETAFYDPSNFTYPAGAYACEVEVDPDTGKVTVERFSAADDFGNIVNPMIVSGQVHGGLGQGIGQALLENCAYDPETGQLLSASYMDYAMPRADDVPFYAVDHSCATPCTHNPLGVKGCGEAGAIGSPPAVVNAVIDALQSGGKTVTHIDMPMSPSRVWSAMQG

SEQ ID NO: 115964 - DNA, 3039 bp, Ralstonia eutropha JMP134
  CDS (1)..(3039): transl_table=11
atgaaaagattcgatgccggcgaaacgaccggcacggtacaggagacacaggagacccggcaggcaccccacgtcggtcgcccaatggcgcgcgtcgaggacgccgccatcctgaccggccgcggccgctatgccgacgacctcggcgtcaggcccggtacgctgcacgccgccatcctgcgctcgccgcacgcgcacgccgagctcggcgccatcgacttcgcggcggcactgaaggtaccgggcgtgcgcgcggtgttgacggccgctgacctgcccgcctggtcccggcccttcgtggtcggcgtgaaggcgccgatggagcagtgggcgctggcgatggatcgcgtgcgctacgtaggcgaaccggtggccgtagtcgtggccgaaagccgcgcgctggccgaggatgcgctcgacctcgtgcgcgtggattaccgcgcgctgccaccggtggtgtcgatcgaggctgccgtggcaggcgacgcccccgtgctgcactccggcctcggcagcaacgtcgccagcgaccgccatttctgctacggcgaccccgaggccgcattcgccgccgcgccgcaccgcgtgacactgaccgcgcactacccgcgcaacacctgcacacctatcgagtgtggcgtggtaattgccgaacacttgccgggcgacgagggctaccaggtcacctccaacttcatggggccgttctcgctgcacgccgtcatggcgatggccctgcaggtgcccgctaaccgcctgcgccacgtcgctccgcgcgactcgggcggcagcttcggcgtcaagcaggcggtgtttccctacgtagtgctgatgtgcctcgcttcgcgcaaggccggcgcgccggtgaagtgggtggaggaccggctcgagcatctgagcgccgccacctcggccaccgcgcggctctccaccctggaagctgccgtcgaggccgatggccgcatcgttgccctatcgtacgatcagctcgaggactgcggcggctacctgcgcgcgccggagcccgctaccttctaccgcatgcatggcctgttgaccggcgcctacgcgatccccaacctgctggtgcgcaaccgcgtggtgttgaccaacaagacaccgactggccttgtgcgcggcttcggcgggccgcaagtgtacttcgcgctggagcggctggtacagcggatcgctgtggaactcggcctcgatccgctcgacgtctaccgccgtaacttcgtgcccgccgacgcctttccgtttcgcgcggcggccggcgcgttgctcgattccggcaactaccaattggcgatgtctcgcgccctggaagcgggggcttacgatgaactgaagcgccgtcgcgatgccgcgcgcgccgagggccggctgtacggcattggctttgctgccatcgtcgagccgtcggtgtcgaacatgggctacatcaccaccgccacaccggccgaggcacgccgcaaggctgggccaaagaacggcgctatcgccagcgctacagtcagcgtcgacctgctcgggggcgtggtagtgaccgtcgcctccacgccagcaggacagggccacatgaccgtatgtgcacaggtcgtggctgatgtactcggcatcgatcccgcggacgtggcggtcaacgtcgaatttgatacccacaaggacgcgtggtccgtcgctgcgggcaactactccagtcggtttgccggcgccgtggccggaaccgtgcacctggccgctacgcgtgtgcgcgacaagctggcgcgcatcgtggcttcccacctccgttgcgacccggccgaactggtcttcaccaacggctgcattgcccgcaagagcgcttcgccagacaccgcactacccttcgcccgcgccgccagcaacgcgccgcactggtcgccgcaactcctgccagccggtgaggaacccggcctgcgtgagaccgtgttctggtcaccgcccaacctcgacgcgccggacgaacaggatcgcgtcaacacgtccgcttgttacggcttcgcctttgacctgtgcggcgtggagatcgaccgtgccaccggccgcgtgcgcatcgaccgctacatcaccgcgcacgatgccggcaagctgctcaatccggcactggccgacggccagatccgcggcgccttcgcgcagggactcggcgcggcgctgatggaggagttccgctatggccccgacggcagcttccagtccggcacgctggccgactacctgatgcccaccacatgcgaagtgcccgacccgatcatcgttcatctggaaacgccgagcccgttcacgccgctcggggccaaggggctcggcgagggcaacaacatgagcacaccgccctgcgtcgctaacgccgtggcggacgcactcggcgtgcgcgacatccgcctgccacttacgcccgccaaggtgatggcgatgatcggctttgacgatccgccaccgtcgcggcccgaactggccgaagcggcgaacgaggcagcacctgcaaacggcaaaggcggcaaggccgcgaaggccctgagcgcacgcggggccgtcgatctcgacgccacaccggaagccgtcttcgccgtcctgctcgacccgaaggcgctggcccaggtcgtgcccggctgccacgcgctcgaacgcatcggcgagaaccgttaccgcgcagacgtaaccgtgggcgtgggcatgatcaaggcgcgctacgaagccgagatcgcgctgtccgacctggagccgccgcaccggctacggctggcaggcgccggcctgtcctcgctcggcagcgcacgcggctccggaatggtagagctgaccccgcacggcgacggcacccgtctcgcgtacgactacgaagccgaggtgtccggcaaggtggcggccgtcggcggccgcatgctcgaaggcgcggccaaagtggtgctgcgccagttgttcgaatcgctcggccggcaggcaggcggcaagccggtgcgcagtcccggctggatcgctcgcctgctggcgctcctgggagtccgtcgatga

SEQ ID NO: 115965 - protein, 1012 aa, Ralstonia eutropha JMP134
MKRFDAGETTGTVQETQETRQAPHVGRPMARVEDAAILTGRGRYADDLGVRPGTLHAAILRSPHAHAELGAIDFAAALKVPGVRAVLTAADLPAWSRPFVVGVKAPMEQWALAMDRVRYVGEPVAVVVAESRALAEDALDLVRVDYRALPPVVSIEAAVAGDAPVLHSGLGSNVASDRHFCYGDPEAAFAAAPHRVTLTAHYPRNTCTPIECGVVIAEHLPGDEGYQVTSNFMGPFSLHAVMAMALQVPANRLRHVAPRDSGGSFGVKQAVFPYVVLMCLASRKAGAPVKWVEDRLEHLSAATSATARLSTLEAAVEADGRIVALSYDQLEDCGGYLRAPEPATFYRMHGLLTGAYAIPNLLVRNRVVLTNKTPTGLVRGFGGPQVYFALERLVQRIAVELGLDPLDVYRRNFVPADAFPFRAAAGALLDSGNYQLAMSRALEAGAYDELKRRRDAARAEGRLYGIGFAAIVEPSVSNMGYITTATPAEARRKAGPKNGAIASATVSVDLLGGVVVTVASTPAGQGHMTVCAQVVADVLGIDPADVAVNVEFDTHKDAWSVAAGNYSSRFAGAVAGTVHLAATRVRDKLARIVASHLRCDPAELVFTNGCIARKSASPDTALPFARAASNAPHWSPQLLPAGEEPGLRETVFWSPPNLDAPDEQDRVNTSACYGFAFDLCGVEIDRATGRVRIDRYITAHDAGKLLNPALADGQIRGAFAQGLGAALMEEFRYGPDGSFQSGTLADYLMPTTCEVPDPIIVHLETPSPFTPLGAKGLGEGNNMSTPPCVANAVADALGVRDIRLPLTPAKVMAMIGFDDPPPSRPELAEAANEAAPANGKGGKAAKALSARGAVDLDATPEAVFAVLLDPKALAQVVPGCHALERIGENRYRADVTVGVGMIKARYEAEIALSDLEPPHRLRLAGAGLSSLGSARGSGMVELTPHGDGTRLAYDYEAEVSGKVAAVGGRMLEGAAKVVLRQLFESLGRQAGGKPVRSPGWIARLLALLGVRR

SEQ ID NO: 115966 - DNA, 2274 bp, Ralstonia eutropha JMP134
  CDS (1)..(2274): transl_table=11
atgacccacgccgtgatcggacacagcgtcaagcgcaccgacctgctcgacaaggtcaccggcaatgcgaagtacgttgccgacatgccgttcgccggcctgctgttcggcaagatcaagcgctgcgaagtcgcgcacgcaaagatccgccgcatcgacacatcgcgcgcgcttgcgctgcccggcgtcaaggccgtgctcacccacgagaacgtgccgcgcgtgttgcatgccggatcgccgcatccgcgctctgcgtcagtgacgtgcgaccagtacatcctcgacgacaaggtgcgctactggggcgaaggcgtggccgccgtggccgcgactagcgaggacatcgcggcgcatgcgatcgaactgatcgaagtcgaatacgagacgctgcccgccgtattcacgacagaagatgccgaacgttccgacgcgccgcgcatccacgaccgcgaacccggcggcaacctggtgttgccgcctgtcatcgtcaagcgcggtgatgtcgaagccggctttgccgaagcggatttcatcctcgaaggcatctatgaaggcggccgccctaccccggcctacatggaaccgaacgtctgcacctgcaactgggacggcaacggcaatctgaccgtgtggatttccacgcagaccgcgttcatggtacgcggcatcatggccgaagtgctgggcctgccgctgcacaaggtacgcgtgctggtcgaccatatgggcggcggctttggtgcgaagcaagacctgtttcagcatgagtttctgtgcgcattgatggcgcgcgagacgcgccggccggtgcgcatggaatacacgcgcgaggaaaccttcctcggcggacgcacacgccatccggccaggatctggctcaagcagggcttccgcaacgacggcaccatcactgcgcgccaggcgaaggtggtgttcaactcgggcgcgtatggctcgcatggtcccggcgtcaccaacgtcggcaccgcagccatggtctcgctgtaccgctgcgacaacgtgctgctcgaagggcgttgcgtctacaccaacagcccgatcgcgggcgcgttccgtggctatggcgtggtgcagacctactatgcgctcgatgtccagatggacgaggcggccgaacatctcggcatggaccccgccgacctaaaactgaagaacgccgtgcgcgaaggcgatatcgcaccgtccaatcacccgctcatcggccacgggctggaagcatgcatcagcaagggcatggaagccacccgttgggccgcactgcgacagcgcccacgcgatacggaaggcccgatccgcaccggctggggcatcggttgcgagatgcacggcagcagcgcctatccgggcatcaaggagcagggcaacgcgatcatcaagatgaacgaggatggcaccgtcgtgctgctgacgggtgctgcaggccttggcacgggagcgcatacggcgctcgcgcaaatcgtggcagaggaactgacgctgccgttcgagtcggtgtctgtggtccacggcgataccgatgtggtgccgtgggacatcggcgccttcgcgagccatacgacgtacatggtcggcaaggctgcgcagatggcggcgggcgagatcaagcggcaactgttcgatcgcgcggcgaagctgctcgaatgcacccctgatgcattgatgctcacggctggcgtgatcgcggtgcgcgaccgcgaaggtccaacgctgacggtgcgcgaagcagtcatgccacgcaagggtattcctgccgcgcaactggtcggcaccgccacataccacccgaccaagtcgtattcgttcgccgcgcatttcgtgcaagtcgaagtcgacacggaaacgggcttcattaccgtgaagcaggtagtgcccgtgcatgacgtcggcaaggtgatccaccccgtggcggcggccggccagatcgagggtggcatccagcaaggcatcggccatacgctgtacgaggactaccagatcgacatgcgcaccggccgctcgctcaatgccaacttcgtcgactacaagatgccgctcgcgatggacatgccggagattcacaccatcatccttgaagcggcccccgatcctggcggaccgttcggcgccaagggcgtaggggaggatccgatcgtcgcgatcggaccggccatttccaacgccgtgttcgatgcgatcggcgtgcgcttccggcactacccgatccggccggagcaggtgctgcaggcgcttgccaaaaaggcggcggcatga

SEQ ID NO: 115967 - protein, 757 aa, Ralstonia eutropha JMP134
MTHAVIGHSVKRTDLLDKVTGNAKYVADMPFAGLLFGKIKRCEVAHAKIRRIDTSRALALPGVKAVLTHENVPRVLHAGSPHPRSASVTCDQYILDDKVRYWGEGVAAVAATSEDIAAHAIELIEVEYETLPAVFTTEDAERSDAPRIHDREPGGNLVLPPVIVKRGDVEAGFAEADFILEGIYEGGRPTPAYMEPNVCTCNWDGNGNLTVWISTQTAFMVRGIMAEVLGLPLHKVRVLVDHMGGGFGAKQDLFQHEFLCALMARETRRPVRMEYTREETFLGGRTRHPARIWLKQGFRNDGTITARQAKVVFNSGAYGSHGPGVTNVGTAAMVSLYRCDNVLLEGRCVYTNSPIAGAFRGYGVVQTYYALDVQMDEAAEHLGMDPADLKLKNAVREGDIAPSNHPLIGHGLEACISKGMEATRWAALRQRPRDTEGPIRTGWGIGCEMHGSSAYPGIKEQGNAIIKMNEDGTVVLLTGAAGLGTGAHTALAQIVAEELTLPFESVSVVHGDTDVVPWDIGAFASHTTYMVGKAAQMAAGEIKRQLFDRAAKLLECTPDALMLTAGVIAVRDREGPTLTVREAVMPRKGIPAAQLVGTATYHPTKSYSFAAHFVQVEVDTETGFITVKQVVPVHDVGKVIHPVAAAGQIEGGIQQGIGHTLYEDYQIDMRTGRSLNANFVDYKMPLAMDMPEIHTIILEAAPDPGGPFGAKGVGEDPIVAIGPAISNAVFDAIGVRFRHYPIRPEQVLQALAKKAAA

SEQ ID NO: 115968 - DNA, 2325 bp, Ralstonia eutropha JMP134
  CDS (1)..(2325): transl_table=11
atgcaacacaagacgcaggaggcgggcatgagcgagtccatcgtgggagcgtccacgccgcaggtgaccgcgcgggagaaggtcatgggacgcgcgcagtatgccggcgatatcaagctacccggcatgctgcatgcgaaggtgctgcgcagcccgcacccgcatgcgcgcatcgtcagcatcgataccgcggcggcgaaggcgctgcccggtgtcaagctggtggtgaccgggcgcgatacgcccacgcgcctgtgggggccgcaccgcaaggagcagcgcatcctcgctgtcggcgtggtgctccacgtcggcgaggaagtggcggccgtggtcgcggtcagcgaggaaatcgcgcgcgatgcgctcgacctgatccgcgtcgcgtacgaggaactgcctgcgctgctgagccccgaggctgccctggccgacggggcgccggaagtccatgccggcacgcgcaatatcggccatgagatgcatatcgagcgcggcgacgtggaggccggttttgccgaggccgccgcggtgtacgaggccacgtacgacatgcattcgcagtacccgggctatctggagccgatggcctccgtcgcgacgcaggacggcaacgggcgcctgacggtgtacgcgtcgacgcagtcggtgttcctcgcgcgcagccgcctggcagaggcgctcgaccgtccggcctcgacaatccgcgtggtgcaggcgactacgggcggcggcttcggcgcgaagatcgtcgaggagaacaacagcctgatctgcgcgttcctggcgacgaagctcgatcgcccggtgcggatggtcaacaaccgcctcgaagatttccagggcgcgcgcgcaagcgtgccggcaaaggtgtggctgcgcatcggcctgtcggccaacggcatgatcgtggccaaggatgtgcgtatcacggccgagtgcggcgcgtatgcgggcctggccggcgacgtcatgcacgtcagcgccatgcgcagcgacaacatgcatcgcgtgaccaacgtgcgatcgcatgcggtgctcgcgtacaccaacaacccgccgcgaggtgcattccgcggcttcggtgggcaacagatgcagttcccgctgaactgccatctgacggtgctggcagggatgatcggcatggacccgattgaagtgcacaagcgcaatgcgatcggccgcggcgagaccagcgtgcatggctggcagatcggcagcacgggcatgcaggaatgcctggagatgacgcgcaaggcaatcggctgggatgcgaagcgagaggccccgcgtggcaccggcacgcgccggcgcggcgtgggcatcgccgccgcgatgcacgtcagcggcaaccgcacgctcggcaactgggatggctcgaccatcctgctcaagctcaatgaagatggccgcgtgatgctgcagaccagcgaatgcgacatggggcagggcgccaacacgatgctgagtcagatctgcgcgcaggagatgggcattccgctgtcgcacgtgaccgtgatggcgccggataccgatacctcgccgttctgcctgggctcgctggcgtcgcgcgtgacgatcatctcgggcaatgccgtgctgcgtgctgcgcgcgaagcgaagcagaaggtgatggcgctggcggccgagaagttcggcgtggatgcggacagcctggtgtttgccgatggccgcatcagcgtgccgggccagccggacaagtcggccacgctcgctgaaatcgcacggctccatatcttccgccatggcggcgagggcatccatgtgcgcgccacctatgacgcgcccaccgtgatgcacgacgccaactactacggcaacattgcgcccgcctattcgttcgcggcgcaggcggtggaagtggaggtcgatacctgcacgggccgcgtgaccgtgatcgacagctttgtcgccgatgactgcggcaaggccatcaacccgctcgcggtgcacggccagacgcacggtgccacggtgcaggcaatcggctggacgctctacgagcacctgcgctacgaagacggccggctgcagaacggcaacttcgccgactacaccatggccacggccgatgcgctgccgatgctgcgcaccgacctcgtcgagtcgaacgatcccaatggcccgttcggcgccaagggcgcaagcgagacggcaatcctgcccggcgcggcggcgattgccaacgcggtgtatcacgcgatcggcgtgcgcatccattcgctgccgatcacgcccgagaaggtgctggccgcattgcgcgagcgcgaagagatggagaaggagagcgcccatgcgtga

SEQ ID NO: 115969 - protein, 774 aa, Ralstonia eutropha JMP134
MQHKTQEAGMSESIVGASTPQVTAREKVMGRAQYAGDIKLPGMLHAKVLRSPHPHARIVSIDTAAAKALPGVKLVVTGRDTPTRLWGPHRKEQRILAVGVVLHVGEEVAAVVAVSEEIARDALDLIRVAYEELPALLSPEAALADGAPEVHAGTRNIGHEMHIERGDVEAGFAEAAAVYEATYDMHSQYPGYLEPMASVATQDGNGRLTVYASTQSVFLARSRLAEALDRPASTIRVVQATTGGGFGAKIVEENNSLICAFLATKLDRPVRMVNNRLEDFQGARASVPAKVWLRIGLSANGMIVAKDVRITAECGAYAGLAGDVMHVSAMRSDNMHRVTNVRSHAVLAYTNNPPRGAFRGFGGQQMQFPLNCHLTVLAGMIGMDPIEVHKRNAIGRGETSVHGWQIGSTGMQECLEMTRKAIGWDAKREAPRGTGTRRRGVGIAAAMHVSGNRTLGNWDGSTILLKLNEDGRVMLQTSECDMGQGANTMLSQICAQEMGIPLSHVTVMAPDTDTSPFCLGSLASRVTIISGNAVLRAAREAKQKVMALAAEKFGVDADSLVFADGRISVPGQPDKSATLAEIARLHIFRHGGEGIHVRATYDAPTVMHDANYYGNIAPAYSFAAQAVEVEVDTCTGRVTVIDSFVADDCGKAINPLAVHGQTHGATVQAIGWTLYEHLRYEDGRLQNGNFADYTMATADALPMLRTDLVESNDPNGPFGAKGASETAILPGAAAIANAVYHAIGVRIHSLPITPEKVLAALREREEMEKESAHA

SEQ ID NO: 115970 - DNA, 2292 bp, Anabaena variabilis ATCC 29413
  CDS (1)..(2292): transl_table=11
atggcaagatacatcggaaaagaaatgagccgcgtagacggcatcgccaaagtgacgggcaaggcaaaatacgccgcagaatttcaggtttccaatctcgcttacggttttatcgtgctgggaaccgtagcaaagggcacgattaaatcaatcgacacgggtgaggctgaacgcgctgcgggcgtaattcgcgtcttcacgcacctgaacacaccaaagctcgatccgaagttttctatggtgcaggctccgtcgcgcgctaccgatgagcaagacaagtcgtttcgggcgctccagtccgacaaaatcttcttcaatatgcagcctgtggcactcgtcgttgctgagacatacgagcaggcgcgttatgcggcacgtctggtcaaagtctcctacaacacagagccgcacacgaccgacaccgaggcggtgcgagcgatcgcgcgcgtccccacccaagcgccgcctctaaagccgcgcggtaatcccgaagagacgatgcgtacagcggcgattgagactcagccgttagttgttgaacatactttaacgcgcggtaatccggaagagacgatgcgtacagcggctgtgaaggtagaggccgagtaccgcattcctatcgagcaccacaaccccatagagccgcacgcggccatcgcggtctggcaaggcgacaagctcacgatcttcgacaagacgcagggggtctatggcgtgcgtgcacatttggcttcgagcttcggcgtgcctgaggaaaacgtgagcgtgctttcacccttcgtcggcggggctttcggatcgtcgctgcgcccgaactattatccggcgctgacagcgatggcggcccgggaactcaaacgcccagtcaaggtcgtttatacgcgcacacaaatgttcactggccacggctatcgtccgtacacgattcagaaggtcgcgctcggcgcagagcgatcgggaaagctctccacgatgattcatgaagtcgtacacaacacctccaacatcgaggagttctcagacgaaaccacacttttcacgcgccaggtctacgcctgcccgaacctctacgcgccgctgaagattaccaacactgacctccccaccccgacctggatgcgtgcaccgggggccgttagcggtatgtttgcgctcgaatgcgcgatggacgagctggcctacgcgctcaagatcgacccgctcgaactacggctgatcaactacgccgaagtagaccccgagagcggcaagccattttcgagtaaggcgttgcgggagtgctatcggctcggcgcggaaaaattcggttggaagaagcgccagtttgagccgcgctcaatgcgcgacggacgcctactcgtcggttggggtatggcaaccggcgtctggggcgctttccagatgcctgctgccgccctcatcacgctgcgggtggatggcacggcgcaagttgctagtgcgaccagtgacatcggccccggcacctacaccgtgatgaccatgatcgctgctgagtatctggggctgaagttggagcaggtgaaatttgaactcggcgacacgaagttccctcgctcaccgtcgcaggggggatcttggacgacggcgagcgtcggctcggccgtgcgcggcgcggctctggccatcggcacgaagttgctcgcactcgcaaaccaggaaccgaattctccgctcaagggggcagccgccgccgatgtcgagatgctcgacgggagactgcgactaaaaagcgacccgtcgcgtttcgtcaatatctctggagtgatgaagcgtaatggtctcaccgcaatcacggaaacattcgagtcgcgtccctcagaggagcgcgagaagtatgcgacgttggcgcacggcgcgcagttcattgaagtgaaggtcgatccagatgtggggactgtccacgttacgcgggccattgaagtgactgccagcggcaagatcatgaatccgaaggcctcgcacagccaggaatttggcggcgttgtctggggcatcggcatggcactgcaagaggcgactgaaatcgaccatcgttacgggcggatcatgaacccgaatttgcagcactaccatgtgccggttaatgccgatatcttggagatcgaaacgatctttgttgaggaggacgataaaatcgtcaatccgctcggtgttaaaggcatgggcgaactcggtatggtcggaattccggcagcgatcgccaatgcggtttttcacgcgaccggcaagcgaatcagagatttgcccatcacgcctgacaaactcttgtag

SEQ ID NO: 115971 - protein, 763 aa, Anabaena variabilis ATCC 29413
MARYIGKEMSRVDGIAKVTGKAKYAAEFQVSNLAYGFIVLGTVAKGTIKSIDTGEAERAAGVIRVFTHLNTPKLDPKFSMVQAPSRATDEQDKSFRALQSDKIFFNMQPVALVVAETYEQARYAARLVKVSYNTEPHTTDTEAVRAIARVPTQAPPLKPRGNPEETMRTAAIETQPLVVEHTLTRGNPEETMRTAAVKVEAEYRIPIEHHNPIEPHAAIAVWQGDKLTIFDKTQGVYGVRAHLASSFGVPEENVSVLSPFVGGAFGSSLRPNYYPALTAMAARELKRPVKVVYTRTQMFTGHGYRPYTIQKVALGAERSGKLSTMIHEVVHNTSNIEEFSDETTLFTRQVYACPNLYAPLKITNTDLPTPTWMRAPGAVSGMFALECAMDELAYALKIDPLELRLINYAEVDPESGKPFSSKALRECYRLGAEKFGWKKRQFEPRSMRDGRLLVGWGMATGVWGAFQMPAAALITLRVDGTAQVASATSDIGPGTYTVMTMIAAEYLGLKLEQVKFELGDTKFPRSPSQGGSWTTASVGSAVRGAALAIGTKLLALANQEPNSPLKGAAAADVEMLDGRLRLKSDPSRFVNISGVMKRNGLTAITETFESRPSEEREKYATLAHGAQFIEVKVDPDVGTVHVTRAIEVTASGKIMNPKASHSQEFGGVVWGIGMALQEATEIDHRYGRIMNPNLQHYHVPVNADILEIETIFVEEDDKIVNPLGVKGMGELGMVGIPAAIANAVFHATGKRIRDLPITPDKLL

SEQ ID NO: 115972 - DNA, 2199 bp, Unknown
  Unidentified
  CDS (1)..(2199)
atgaaattcgacacgcccgccacgaccaacccgattgatcagctgaacgtcatcggcaaacccaccgaccgcatcgaaggcccgctgaagaccagcggccaggcgccttacgcctacgagcaacatgaagccgtgaaaaatcaggcctacggcgtgatggtcggctcggccatcgccaagggtcgcatcacccgcatcgatctggatgccgcccgcgccgcgccgggggtgctgaccatcgtcaccgccgccaacgccggcaagctcggcaaaggccaatacaacgccgcgcacctgctggccgggccgcaagttcagcactatcaccaggctgtggcgctggtggtcgccgaaaccttcgaacaggcgcgggccgccgcgcagttggtcaacgtcgaatacgcggccgacaaaggtcagtttgatctggccagcgtgcgcgatcagggtgtggaaccgaaagacgatctgccggacgtcaagcacggcgacttcgccagcgccttcgccgccgcgccggtgcagttcgaccagacctacaccacgccggatcagtcccacgcaatgatggagcctcacgcgacactcgccgcctggaaaggcgatcaggtgacgctctggacttccaaccagatgatcgcctggagcgtcggcgacatcgccgccaccctcggcctgcccaaggaaaacgtgcggttgatctcgccgtacattggtggcggtttcggcggcaagctgttcattcgtgccgacgcgatcctcgccgccctcggcgcacgcctggcgaaccggccagtgaaggtcgccctcgcccgtccgcagatcgccaacaacaccacccaccgccccgccaccattcaacgcattcgcatgggcgccacggcggacggcaaactcaccgccatcgcccatgaaggctggtcgggcaacctcgccgacggcaaggtcgaggttgcagcgcagccgagtcagttgctctacgccgccgaaaatcgtttggtgaccatgcgcctggcgccgttggatctgccggaaggcaacgccatgcgcgcgcccggtgaaacgccggggctgatggcgctggagatcgccatggacgagatggccgaacagctcaaactcgatccgatccagttccgcatcctcaacgacacccaggttgatccggtgaaaaccgagcggccgttctcccagcggcgcctgatcgaatgcctgcaaaccggtgccgaacgcttcggctgggataagcgcaatgcgacgcccggcagccgtcgcgaaggtcgctggctgatcggcatgggcgtcgcggcggcgattcgcaacaacctgctggtgaagtccggcgcgcgagtacggctggagcgcgacggcaagatcaccgttgaaaccgacatgacggacatcggcactggcagctatacgatcattggtcagactgcagcggaaatgatgggggtcagcctggacgatgtggtggtgcgactcggcgattcgaatttcccggtgtcggcaggctccggcggacagttcggcgccaactgctcgaccgccggggtctacgcagcgtgcatgaagctgcgcgaagcggtcgcggccaaactgggcatgaacgcgggtgaagcgcagtttgtcgacggcctcgtgcgactgggcaaccagaacgtgccgctgcgtgacgccgcgcaacacgccgcgatcgaagtcgaggacagcatcgaattcgccgatctcgccaagcagtaccagcaatcgaccttcggcgcgcacttcgtcgaagtcgccgtcgatgccgccaccggcgaagtccgcgtgcgccggatgctcgcagtctgcgccgccgggcggattctcaatccgaaatcagcccgcagccaggtgatcggcgccatgaccatgggcgttggcgcggccttgatggaagagctcgcggtggacaaacgccagggctttttcgtcaaccatgacctggccggctacgaagtgccggtgcatgccgacatcccgcatcaggaagtgattttcctcgatgaaaccgacccgatttcctcgccgatgaaagccaagggggtcggtgaactggggatttgcggcgtgagtgcggcggtggcgaatgcgatctacaacgccacgggcgcgcgggtgcgagagtatccgattaccctggacaagattcttgatgcgttgcccccgatgatctga

SEQ ID NO: 115973 - protein, 732 aa, Unknown
  Unidentified
MKFDTPATTNPIDQLNVIGKPTDRIEGPLKTSGQAPYAYEQHEAVKNQAYGVMVGSAIAKGRITRIDLDAARAAPGVLTIVTAANAGKLGKGQYNAAHLLAGPQVQHYHQAVALVVAETFEQARAAAQLVNVEYAADKGQFDLASVRDQGVEPKDDLPDVKHGDFASAFAAAPVQFDQTYTTPDQSHAMMEPHATLAAWKGDQVTLWTSNQMIAWSVGDIAATLGLPKENVRLISPYIGGGFGGKLFIRADAILAALGARLANRPVKVALARPQIANNTTHRPATIQRIRMGATADGKLTAIAHEGWSGNLADGKVEVAAQPSQLLYAAENRLVTMRLAPLDLPEGNAMRAPGETPGLMALEIAMDEMAEQLKLDPIQFRILNDTQVDPVKTERPFSQRRLIECLQTGAERFGWDKRNATPGSRREGRWLIGMGVAAAIRNNLLVKSGARVRLERDGKITVETDMTDIGTGSYTIIGQTAAEMMGVSLDDVVVRLGDSNFPVSAGSGGQFGANCSTAGVYAACMKLREAVAAKLGMNAGEAQFVDGLVRLGNQNVPLRDAAQHAAIEVEDSIEFADLAKQYQQSTFGAHFVEVAVDAATGEVRVRRMLAVCAAGRILNPKSARSQVIGAMTMGVGAALMEELAVDKRQGFFVNHDLAGYEVPVHADIPHQEVIFLDETDPISSPMKAKGVGELGICGVSAAVANAIYNATGARVREYPITLDKILDALPPMI

SEQ ID NO: 115974 - DNA, 2373 bp, Rhodobacter sphaeroides 2.4.1
  CDS (1)..(2373): transl_table=11
atgccgaaggacggaggcatcggcgcgagcacgctgcgccgcgaggatatccggttcctgaccggaaagggccgctacaccgccgacatcagcctgcgcggacaggcccacgcctgcttcctgcgctcggaagtggcgcatggccgcatccgctcgatcgacaccagcgccgccgaggagatgccgggcgtgcttgcggtgctgacgggcgaagacttcaccgaagtgggcggcaacccgaccggctggctggtccagagccggaacggcgccacgatgaaggagccgaagcgcccggtgctggcgcacggcaaggtccgccatgtgggcgatgcctatgcgatggtggtggccgagacctacgagcaggccaaggatgcctgcgaggccatcgaggccgacatcgaggagctgcccgccatcgtcgacatggcgcaggcggtggccgacagttcgaaccgggtgcatgacgagatcgaggacaatgtggtcttcgactggggctggatcgaggagaaccgcgccgccgtcgatgccgccttcgagacggcgccgcatgtcaccacactggaactggtgaacaaccgcctctcgcccaacgcgatggagccgcgcgcctcgatcggcgatttcgacagcgggacgggcgactacaagctctacaccacctcgcagaacccgcacctcacgcggctcttgatctcggccttcgtcatggggatccccgagaacaagctgacggtgatcgcgcccgacgtgggcggcgggttcggctcgaagatctaccattacggcgaggaagcggcggtgctcgcggcctcgaagcggctgaaccggccggtgaaatgggtctgcgaccgctccgaggccttcctgtcggacgcgcacggccgcgaccatgtgacgaagatccagctcgcgaccgacatggaggggaacttcctcgcgctcaggaccgagacgctggccaacatgggggcctatctctcgaacttcgccacctgcacgcccaccttcctgcatggcacgctgatggcggggccctacaagaccccgctcgtctatgtgaatgtgaaggcggtgctgacgaacacggtgccggtcgatgcctatcgcggcgcggggcggcccgaggccacctattcgctggagcgggtggtcgacaaggcggccgacgagctggggctcgacaagtgggagatccggcgcaggaacttcatcgatcccggcgccttcccctatacgacgccggtgggcctcgtctacgacaccggcaactatcacgccacgatggacaagctgcacgagctgtcggacgcggcgggcttcgaggcgcgggccgaagagagccgccagcgcggcaagtggcgcggcttcggcctctcgacctggatcgaggcgtgcgggatcgcgccctcgaacctcgtgggggtgctcggctgccgcgtgggcctctacgatgcggcaaccatccgggtgaatgccacgggcaacatctcggtgctggtgggtgcgcacagccacgggcaggggcatgagacggtctttgcccagctcatcgccgagaagctgggggtggacgcgaactcggtcgagatcgtccacggcgacacgtcgaagatcccgttcgggatgggcacctacggctcgcgcagcctcgccgtctgcggctcggccatgatgaaggccgccgacaagatcatcgacaagggcaagaagatcgcggcccacatgctggaagcggccgagggcgacatcgagttcaccgacggcagcttctcggttgcgggcaccgaccggcagaagagcttcgccgagatcgccttctcggcctatgtgccgcacaactacccgctcgagacgctggagccgggtctcgaggagaccgccttctacgatccggcgaacttcacctatcccgccggcgcctatggctgcgaggtcgaggtggacccggagacgggcggcgtcgacatcgtgcgcttcacctgcgcggacgatttcggcaatgtcatcaatccgatgatcgtgcagggtcaggtgcatggcggggtggcgcagggcatcggccaggcgctgctggaaggggtggtctataacgaggacggtcagctcctgaccggctcctacatggattacgccatgccgcgcgcggacgatgtgccctccttcacggtggaccattcctgcgtcacgccctgcacccacaatccgctgggcgccaagggctgcggcgaggcgggggccatcgggacgccacccgcggtggtcaatgcggtggtggatgcgctgcggcgcgcgggccacggtcacgtcacccatatcgacatgccgctgacgccctcgcgcgtctggacggcgatgcagggctga

SEQ ID NO: 115975 - protein, 790 aa, Rhodobacter sphaeroides 2.4.1
MPKDGGIGASTLRREDIRFLTGKGRYTADISLRGQAHACFLRSEVAHGRIRSIDTSAAEEMPGVLAVLTGEDFTEVGGNPTGWLVQSRNGATMKEPKRPVLAHGKVRHVGDAYAMVVAETYEQAKDACEAIEADIEELPAIVDMAQAVADSSNRVHDEIEDNVVFDWGWIEENRAAVDAAFETAPHVTTLELVNNRLSPNAMEPRASIGDFDSGTGDYKLYTTSQNPHLTRLLISAFVMGIPENKLTVIAPDVGGGFGSKIYHYGEEAAVLAASKRLNRPVKWVCDRSEAFLSDAHGRDHVTKIQLATDMEGNFLALRTETLANMGAYLSNFATCTPTFLHGTLMAGPYKTPLVYVNVKAVLTNTVPVDAYRGAGRPEATYSLERVVDKAADELGLDKWEIRRRNFIDPGAFPYTTPVGLVYDTGNYHATMDKLHELSDAAGFEARAEESRQRGKWRGFGLSTWIEACGIAPSNLVGVLGCRVGLYDAATIRVNATGNISVLVGAHSHGQGHETVFAQLIAEKLGVDANSVEIVHGDTSKIPFGMGTYGSRSLAVCGSAMMKAADKIIDKGKKIAAHMLEAAEGDIEFTDGSFSVAGTDRQKSFAEIAFSAYVPHNYPLETLEPGLEETAFYDPANFTYPAGAYGCEVEVDPETGGVDIVRFTCADDFGNVINPMIVQGQVHGGVAQGIGQALLEGVVYNEDGQLLTGSYMDYAMPRADDVPSFTVDHSCVTPCTHNPLGAKGCGEAGAIGTPPAVVNAVVDALRRAGHGHVTHIDMPLTPSRVWTAMQG

SEQ ID NO: 115976 - DNA, 2220 bp, Rhodobacter sphaeroides 2.4.1
  CDS (1)..(2220): transl_table=11
atgaccgctcatctcgtattcgacgagcccgacaagcgtaaccggctggatgccatggcgcaggaggtggtcgggcgccccatcgaccgctctgaaggcgcgctgaaagtgtccggacgggccgtctatgcggccgaacaggcgtcgagcctttggtccgagaagcgcgccgactgcgcttacggcgtcttcgtgcgggccaccgtgcccttgggccgggtcgcttcgcttgcctccgacgcggcgcgcgcggttcccggcgtgctgaaggtgctgcaggatccccgcctcgtgcgccatccggcgcagggcatggcgcggaagtcgccgccgcaggatccgtccgaggtcacctatttcggccagcccctcgcgctggtggtggcggagagcttcgaggccgcccgcgaagccgcgcggctggtgcgggtggactacgagacctcggccgacgccgagctcgaccccgcccaggcgccgtccgaattccccgagaagaagcagtcggcgcagggggatctggaggccgccctgcgcgaggccgccgtttcgctcgatgcgacctacagcaccccctcgatggccgccgccgcgatggaaccgcacgcggccctcgcctggtgggagggcgaccgggtgacgctctgcggcgcctatcagatggtgtcgcagaatgccgaggaactggccgatgcgctggggatcgcgcccgagaaggtgcgggttctcgcgcccttcatcggcggcggcttcggctcgaagctcgggatcgcgcccgaggccgtggcggcggccgtggcgtccgagacgctcggccggccggtgatggtgacgctcgcccggcagcgggagttcgagattgcccaccgccgctccgaaaccgagcagcgggtgcgcctcgccctcgacgcggacggacggctcaccgggatcgggcacgaggcgcgggtgtcgaacctcgacggggagagcttctccgagcccgtgcagcaggcgacccatttcacctatcgcggcgagcatcgtcagatccggcacgaggtggcgcgggtgaacctcacctgcgcggggtcggtgcgcgcgccgggcgaggcggtgggggtcacgatcttcgagatggcgctggacgagctggccgagaaggcgggcctcgatccgctcgagctgcggcttcgcaatattcccgaagaggatcccgagaccggcaagcccttcacctcgcacatgctggccgaggcgctgcgggacggcgccgaccgcttcggctggtcggaccggcgcgcgccgggcgagcggcggcagggcgagtggctgatcgggatgggcatggcctcggccgtgcgggtgaacatgctgcacaaggcgcgcgtgcgcgtcacgctgacgggcgagggcgccctcgtcgagagcagcatgaccgacatcgggacgggcacctacacgatcctcacccagatcgtggccgagatgctgggcctcgcgcccgaccgggtgcgcaccgtcctcggcgacaccgatctgccggagggctccggctcgggcggctcgatcggcgcggcctcgaacggctcggccgcgttcctcgcctgcgaggagattcgccggcagatcgcggcggggatgggctgccccgaggaggagttgaccctgaaggacgggcgcgccacctgcggcaaccggacccgcgatctggccgagatcgtgacccagccgctgtcggccgagggccatttcgagcccggcaaggccttgaagggcgtccgcagctcgacctttggcgcgcatttcgccgaagtggcggtcaacgagatcacgggagaggtgcgcgtgcgccggatgctgggcgcctttgccgccgggcggatcctgaacgagaagaccgcccgctcgcaatgtctgggcgggatgaccttcggcatcggcatggcgctgatggaagagatggtgcacgaccgccgcttcggtcaggtggtgagccgggatctggcgaactaccatatccccgcccatgccgacgtgcccgcattggaggttcacttcctcgaagagcgcgacagctacggcggcacgcttcaggccaaggggatcggggaactcgggatctgcggatcgggggccgccgtcctcaacgcgatccacaacgcctgcggcgtccgggtgcgcgatctgccggccacgccggacaaggtgctggacggcctctgcgccctcgggcggtag

SEQ ID NO: 115977 - protein, 739 aa, Rhodobacter sphaeroides 2.4.1
MTAHLVFDEPDKRNRLDAMAQEVVGRPIDRSEGALKVSGRAVYAAEQASSLWSEKRADCAYGVFVRATVPLGRVASLASDAARAVPGVLKVLQDPRLVRHPAQGMARKSPPQDPSEVTYFGQPLALVVAESFEAAREAARLVRVDYETSADAELDPAQAPSEFPEKKQSAQGDLEAALREAAVSLDATYSTPSMAAAAMEPHAALAWWEGDRVTLCGAYQMVSQNAEELADALGIAPEKVRVLAPFIGGGFGSKLGIAPEAVAAAVASETLGRPVMVTLARQREFEIAHRRSETEQRVRLALDADGRLTGIGHEARVSNLDGESFSEPVQQATHFTYRGEHRQIRHEVARVNLTCAGSVRAPGEAVGVTIFEMALDELAEKAGLDPLELRLRNIPEEDPETGKPFTSHMLAEALRDGADRFGWSDRRAPGERRQGEWLIGMGMASAVRVNMLHKARVRVTLTGEGALVESSMTDIGTGTYTILTQIVAEMLGLAPDRVRTVLGDTDLPEGSGSGGSIGAASNGSAAFLACEEIRRQIAAGMGCPEEELTLKDGRATCGNRTRDLAEIVTQPLSAEGHFEPGKALKGVRSSTFGAHFAEVAVNEITGEVRVRRMLGAFAAGRILNEKTARSQCLGGMTFGIGMALMEEMVHDRRFGQVVSRDLANYHIPAHADVPALEVHFLEERDSYGGTLQAKGIGELGICGSGAAVLNAIHNACGVRVRDLPATPDKVLDGLCALGR

SEQ ID NO: 115978 - DNA, 2307 bp, Geobacter metallireducens GS-15
  CDS (1)..(2307): transl_table=11
atgagcgacaatcataaagtcatcggccgcagcgttccccgcatcgacgggcccgagaaggtaaccggcgcggcaaagtataccggggatctcaagttccccaacatgctctacggcaagatcctcaccagcccccatgcccacgccaggatcatctccatcgacacctccgaggcggagaagctgccgggggtgaaggcggtcatcacccacaaggatgtgccggagctgaagtatggcctgagcccggcccggtgggacgaaaacatcttctgcatcgacaaggtgcgcttcgtcggcgacaaggtggcggcggtcgcctgcgtagacgaggatacctgctaccgggccatgaagctcatcaaggtggaatacgaagagctccccgcagtgctcgatttccgtcacgccatggacgaggggcagcctctggtccacgaggagtacgagcggaacatcaacaccgagattcaccaggagttcggcgacgtggcaaaggccctggcagaggcccaccatgtccgtaccgacgtcttcgtgggccagcggacctatcaggcccccatcgagccccactccgccatctccatgtgggaaggggaaaaactcaccatctattccagcacccagtccccccactacttccagtactacatcgcccgggagttcggcatgcccatgggggacgtgcggatcatcaagccatacctggggggaggtttcggcggcaagctggagcccacgggcctggagtttgccggagcggtgctggcgaagcggaccggccggccggtgcggaccttctacgaccgggccgaaatgtttgcccacaaccgggggcgccacgcccagtacatggagatcaccaccggggtggacaaggacggcaagatcctggccgccaaggccaacttcatcatggacggcggcgcctacacgagcctcgggatcgccagcgcctactacgccggcgcgctccttcccatgacctacgaattcgacaactaccagttcgacatgttccgggtctacaccaacctccccgcctgcggcgcccagcggggccacggcgctccccagcccaagtacgccttcgagagccatctggacaacgtggccgccgacctggggatcgaccccatggacatccggatccgcaatgcccgccgtcccgacaccgtcacccccaatgacttccgggtcaactcctgcatgatgcgggagtgcctggaacaggtccggcagatctcggactgggacgagaaaaagaaaaacctcccccacggacgcggcatcggcgtcgccaccggcagcttcgtcaccggcgcggggtaccccatctaccgcaccgacctcccccacgccgccgccttcatcaaggtgcatgaggacggcaccgcagccaccctctacaccggctctgtcgacatcggccagggatctgataccattctctgtcagatggcggccgaggccatggggtatcgctacgagcagatgaagatcgtggccgccgacacggagatcacaccgctcgatttcggcgcctacgccagccgccagacctacatgtcaggggcggccgtcaagcaggcgggggaagaggtcaagaagcagctcctcgacctggcgtcgaccatgctttccctccctgccgacgaccttgagtgcgcggaaggggttattttctccaagtcgcgggaagggaagacactgacgttcgaggaagtggcacggaaacacttcgtcctcaagggcccgctcctgggacgcggcgcctacacgccgccgaaacttggcggaagcttcaagggggccgcggtcggcacgtcgcccgcctacagcttcggcgcccaggtgggagaggtttccatcgacgaggaaacgggagaaatcaccgtggtgggcatctgggacgtccacgactgcggcaaggtcatcaacccgcggctgctccacggccaggtccacggcgccctctacatggggatgggggaatcggtctgggaagaggtgctcttcgacgacaagggacggatcaagaatgcggaactggccaattaccggctcctcaccgccgtggacatgccccccatccagtcggaggtggtgaacagctacgaaccgaccgggccgtggggggtgaaggaagtgggcgaaggggccaccaaccctaccctggggatgttcagcaatgccatcttcgacgccatgggggtcagggtgaacagtctgccgctcacctacgagaaggtctggcgggcactgaaggaaaagcgggagcgggaagagaccaaggcggcataa

SEQ ID NO: 115979 - protein, 768 aa, Geobacter metallireducens GS-15
MSDNHKVIGRSVPRIDGPEKVTGAAKYTGDLKFPNMLYGKILTSPHAHARIISIDTSEAEKLPGVKAVITHKDVPELKYGLSPARWDENIFCIDKVRFVGDKVAAVACVDEDTCYRAMKLIKVEYEELPAVLDFRHAMDEGQPLVHEEYERNINTEIHQEFGDVAKALAEAHHVRTDVFVGQRTYQAPIEPHSAISMWEGEKLTIYSSTQSPHYFQYYIAREFGMPMGDVRIIKPYLGGGFGGKLEPTGLEFAGAVLAKRTGRPVRTFYDRAEMFAHNRGRHAQYMEITTGVDKDGKILAAKANFIMDGGAYTSLGIASAYYAGALLPMTYEFDNYQFDMFRVYTNLPACGAQRGHGAPQPKYAFESHLDNVAADLGIDPMDIRIRNARRPDTVTPNDFRVNSCMMRECLEQVRQISDWDEKKKNLPHGRGIGVATGSFVTGAGYPIYRTDLPHAAAFIKVHEDGTAATLYTGSVDIGQGSDTILCQMAAEAMGYRYEQMKIVAADTEITPLDFGAYASRQTYMSGAAVKQAGEEVKKQLLDLASTMLSLPADDLECAEGVIFSKSREGKTLTFEEVARKHFVLKGPLLGRGAYTPPKLGGSFKGAAVGTSPAYSFGAQVGEVSIDEETGEITVVGIWDVHDCGKVINPRLLHGQVHGALYMGMGESVWEEVLFDDKGRIKNAELANYRLLTAVDMPPIQSEVVNSYEPTGPWGVKEVGEGATNPTLGMFSNAIFDAMGVRVNSLPLTYEKVWRALKEKREREETKAA

SEQ ID NO: 115980 - DNA, 2412 bp, Rhodospirillum rubrum ATCC 11170
  CDS (1)..(2412): transl_table=11
atgcccagcgattcagcgaccgtgaccgatctgcagagcgccgcccagcgcagcggcatcggcgtatccgtgcgccgcaaggaagaccgccgcttcctgaccggccagggcacctataccgatgatatcgtccgcccgggcatggttcatgccttcctgctgcgctcgccccatgcccatgcccgcatcgccgccctcgatgtcggcccggcccgcgccgccaaaggggtgctcgccgtgttcaccggggccgatatggccgccgacaaggtggggtcgatcccctgcggctgggcggtcgccaataaggacggcacgccgatggccgaaccgccccatccggcgctggcggtcgatcgggtccgtcacgtcggcgatgcggtggccgtggtcatcgcccgcaccctggcccaggccaaggacgccgccgagctgatcgagatcgattatcaggatcttcccgtcgtcgtcgatccggcccaggccctgaacagcccggccatccacgatcaggcgccgggcaatctgtgctatgactgggagatcggcgacgccgccgccgtcgaggccgccttcgcccgcgcccatcacatcacccggctggatctgatcaacaaccgcctggtgcccaacgccatggagccgcgcagctatatcggcgaatatgaccgggcgacgggggaatacaccctgaccaccaccagccagaacccccatgtcatccgcctgctgatgggcgccttcgtgctcaacatccccgagcacaagctgcgcgtcgtctcgcccgatgtcggcggcggcttcggctcgaagatctatcattacgccgaggaggccatcgtcacctgggcggcgcccaaggtcggcaagccgatcaaatggacctcggaccgctcggaggcctttttgtccgatgcccatggccgcgaccatgtcagccatgccgaactggccctggccgaggatggcacctttctggcgctgaaggtcgacaccatcgccaatctcggcgcctatctgtcgaccttctcgacggcggtgccgacctatctatatgcgacgctgctggccggggtctatcgcacgccggccatccattgccgggtgcgcagcgtctttaccaatacggtgcccgtcgacgcctatcgcggggcggggcggccggaagccacctatctgatcgagcgcatcgtcgacaaggccgcccgcgagatcggcatggaccgggtggccttgcgccgcaagaacttcatccccgccgatgccttcccctatcaaacgcccgtcgccttgcaatacgacagcggcgattacgaggcgaccttgggcaaggccctggtgctggccgatgtcgagggcttcgccgcccggcgggccgaggcggaggcgcgggggaaggtgcgcggcctgggctattccacctatctggaggcgtgcggcatcgccccctcggcggtggtcggctcgctgggcgcccgggcgggcttgttcgaatgcgccgtggtccgcgttcatcccaccggcagcgtcaccgtgctgaccggatcgcacagccacggccagggccatgaaacgaccttcgcccagttggtttccgacaccctggggctgcccatcgaaaatgtcgagatcagccatggcgacaccaataaggtgccctttggcatgggcacctatggctcgcgctcgctggccgtgggcggcgaggccttgatgaaggccatgggcaaggtggtggacaaggcgcgcaagatcgccgcccatgccctggaggccgcggtcgaggatgtggagttcaaggacggcagcttcaccatcgccggcaccgacaaggcgatgaccttcgcccaggtcgcgcttaccgcctatgtcccccacaatttcccccatgaccagcttgaaccggggcttgaggaacaggccttctacgatccgatgaacttcacctatcccggcggctgccacatctgcgaggtcgagatcgacccgcaaaccggcgtagtcgaggtcgtggcgatgacggcggtcgatgatgtcgggcgggtgatcaatccgatgatcgttcacggccagatccatggcggactggcccagggcatcggtcaggcgctgatcgagggctgcgcttacgacgccaacggccagttggtcaccggcagtttcatggattacgccatgccgcgcgccgaccgcctgcccagcttccgcgtcgataacgccgttaccctttgcgcccataactcgctgggggtgaagggctgcggtgaggtcggggccatcggcagtccgcccgccgtcatcaacgccgtgctcgacgccctggcgcccttgggcgtgagcgatatcgccatgccggccacgcccttccgggtttggcgggcgatcgaggcggcgcgcgccgccgcccagtag

SEQ ID NO: 115981 - protein, 803 aa, Rhodospirillum rubrum ATCC 11170
MPSDSATVTDLQSAAQRSGIGVSVRRKEDRRFLTGQGTYTDDIVRPGMVHAFLLRSPHAHARIAALDVGPARAAKGVLAVFTGADMAADKVGSIPCGWAVANKDGTPMAEPPHPALAVDRVRHVGDAVAVVIARTLAQAKDAAELIEIDYQDLPVVVDPAQALNSPAIHDQAPGNLCYDWEIGDAAAVEAAFARAHHITRLDLINNRLVPNAMEPRSYIGEYDRATGEYTLTTTSQNPHVIRLLMGAFVLNIPEHKLRVVSPDVGGGFGSKIYHYAEEAIVTWAAPKVGKPIKWTSDRSEAFLSDAHGRDHVSHAELALAEDGTFLALKVDTIANLGAYLSTFSTAVPTYLYATLLAGVYRTPAIHCRVRSVFTNTVPVDAYRGAGRPEATYLIERIVDKAAREIGMDRVALRRKNFIPADAFPYQTPVALQYDSGDYEATLGKALVLADVEGFAARRAEAEARGKVRGLGYSTYLEACGIAPSAVVGSLGARAGLFECAVVRVHPTGSVTVLTGSHSHGQGHETTFAQLVSDTLGLPIENVEISHGDTNKVPFGMGTYGSRSLAVGGEALMKAMGKVVDKARKIAAHALEAAVEDVEFKDGSFTIAGTDKAMTFAQVALTAYVPHNFPHDQLEPGLEEQAFYDPMNFTYPGGCHICEVEIDPQTGVVEVVAMTAVDDVGRVINPMIVHGQIHGGLAQGIGQALIEGCAYDANGQLVTGSFMDYAMPRADRLPSFRVDNAVTLCAHNSLGVKGCGEVGAIGSPPAVINAVLDALAPLGVSDIAMPATPFRVWRAIEAARAAAQ

SEQ ID NO: 115982 - DNA, 2292 bp, Moorella thermoacetica ATCC 39073
  CDS (1)..(2292): transl_table=11
atggcttctacagcagtggggaagagtgtcaccagggttgatgctgtggccaaagttaccgggcaagcaaagtataccggggattttatgttcagggacatgctggtcggtaaggtcttaagaagtccctatgcccatgccatcgttaaaaacattgatgtcagccaggccagggctttacccggcgtggaaggggtcctgacttataaggatgtaccgcggaataaattccccactgccgggcatccctattccctggatccggcccacggcgataaggccgaccgtaccatcctgaccgataaagcccgcttcgtcggtgacgccatcgcggcggtaatagccagggatgagctgacggccgccgaggccctgaagcttattaaggtagagtacgaggtgttagaacccctcctcaccccggaggcagccatgcgggagggcgcgcccctgattcatgaggattgccctggcaacatcctcagtgccagtggctatgccatcggcgacgtcgacgaggcttttaaagaagccgactatatctttgaggatgaactggaaactagcattgttcagcattgccagctggaaaatcatatatcctgcgcttatgtcgacagcgacggccgcatagtgattataacctccacccagatcccccatattgtcaggagaatcgtcggccaggccttgggtatcccttggggcaggatccgggtaatcaagccctacgtcgggggcggctttggtagcaaacaggatgtctgcaccgaacccctggccgcagccatgaccctggccgtggggggaaggccggtaaaactggaactttcccgggaagaatgcatgattgccacccgcacccgccatgccttcaagtttaagatcaaaaccggggtttcccgggacggcaggttaatcgggatgcatatcaaggccatttccaataccggggcctatgcctcccacggtcattccatcgccatggccggtggttccaaattcaggattctttatcccatgaaggctttgaaatatgaaccatttacagtttacaccaacctgccggtggcgggagccatgaggggttatggatcgccccagataacctttgccgtggaaagccatctggataacatcgccagcaaactcaatatcgatcctattgagttccgtctgaaaaacctggttaaagagggttatgtcgatcctttaaatggcaacgcggtgcggagttgcggcattcgcgagtgcattgcccggggcaaagagttgatcaagtgggacgagaaaaaagcgcggtataaaaaccaaaccggcagcagacgccggggcctgggcatggcctgcttcagctacggttccggcacttacccggtggggctggaaataggaggggcgcggatcgtcctgaaccaggacggttccgtccagctacaggttggagctacagaaataggtcagggcagcgataccgtctttgcccagatggtagccgaggtcctgggtattccggtggatatggtccatgtcctttccacccaggatacagatatttccccctttgataccggtgcctatgcttcccggcagacctatatcaccggtatggcggtggccagggcggccgcggaggtcaaggagaagatcctggattttgcctgggggatgaccgatatcccagcccatgccctggatattaaagatgccaatatcgtctataaacactcgggcgaagtggtcatgcccctggccgaggtggccctgcacacctattacgacaccgttttcgccaaaccgataacgagcgatacctccaataatgcccgggtcaacgcctttgtttttggcgttacctttgccgaggtggaagtagacctgaaaaccggccggatcgaggtcctggagatatataacgtccacgattccggcaggattatcaaccgccagctggcggcagcccaggtccacggcggcgtgggcatgggcataggttatgccctctccgagcaattgctctttgacgagaagaccggccaaccactgaataacaatctgctggattacaaactgcctacgattatggatattcccgcaatcggcgtagattttgtggaaacctttgaacctaccagcccctttggctgcaaggctttaggcgagccgccgattattcctgtggccccggccattcgtaatgccgttttcgacgccacgggcgtggcttttgacaggttgcccatgaatccccaacgggttttcgaaaagttcaaggaagccgggttaatatag

SEQ ID NO: 115983 - protein, 763 aa, Moorella thermoacetica ATCC 39073
MASTAVGKSVTRVDAVAKVTGQAKYTGDFMFRDMLVGKVLRSPYAHAIVKNIDVSQARALPGVEGVLTYKDVPRNKFPTAGHPYSLDPAHGDKADRTILTDKARFVGDAIAAVIARDELTAAEALKLIKVEYEVLEPLLTPEAAMREGAPLIHEDCPGNILSASGYAIGDVDEAFKEADYIFEDELETSIVQHCQLENHISCAYVDSDGRIVIITSTQIPHIVRRIVGQALGIPWGRIRVIKPYVGGGFGSKQDVCTEPLAAAMTLAVGGRPVKLELSREECMIATRTRHAFKFKIKTGVSRDGRLIGMHIKAISNTGAYASHGHSIAMAGGSKFRILYPMKALKYEPFTVYTNLPVAGAMRGYGSPQITFAVESHLDNIASKLNIDPIEFRLKNLVKEGYVDPLNGNAVRSCGIRECIARGKELIKWDEKKARYKNQTGSRRRGLGMACFSYGSGTYPVGLEIGGARIVLNQDGSVQLQVGATEIGQGSDTVFAQMVAEVLGIPVDMVHVLSTQDTDISPFDTGAYASRQTYITGMAVARAAAEVKEKILDFAWGMTDIPAHALDIKDANIVYKHSGEVVMPLAEVALHTYYDTVFAKPITSDTSNNARVNAFVFGVTFAEVEVDLKTGRIEVLEIYNVHDSGRIINRQLAAAQVHGGVGMGIGYALSEQLLFDEKTGQPLNNNLLDYKLPTIMDIPAIGVDFVETFEPTSPFGCKALGEPPIIPVAPAIRNAVFDATGVAFDRLPMNPQRVFEKFKEAGLI

SEQ ID NO: 115984 - DNA, 2346 bp, Frankia sp. CcI3
  CDS (1)..(2346): transl_table=11
atgagtctggggatcggtcgtccggtgcgtcgtccggatgggccggacaaggtgaccggtagcttctcctacgttggtgatctgcgtgttccggggatggtgcacgcccgcaccctgcgatcgccccatgcccgggcgcggatccggcgcgtcgacgtcgacgccgcgcgccggctgcccggcgttgtggggatggtgaccgccgccgacgtccccggcatggccacctacgggctgatcgtcgccgaccagccggtgttcgccgcgaccgagattcggtacgcaggggagccggtcgccgccgtggccgcggttgacgtccggaccgcgcgccgggcgctcgccgcgatcgaggtggactacgagccgctggcaccttcgaccgaccccgaccgggtatggcagccggatgccgagccgctgcatccggcgggcaacctgtaccgcgagatcgagctgcgccacggggatcccgacgcgctcggcccggtggtggtcgaggaccagtacctcgtcgggatgcaggaccaggcgtttcttgctcccgaggcggccctggcgatgccggccgccgatggtggggtggacctgcgggtggcgacccagtggctgcattcggaccgggagcagatcgcggcctgcctcggtctcccggaggagctcgtccgtctcaccctggccggtgtggggggtgccttcggcggccgggaggacgtcacccttcagatccacggcgccctgctcgcccgggctacggggcttccggtgcggatcgcctacgaccgggttgagtccttcctgggccatccgcaccggcatccggcccggatgtggttccagcacagcgccaccgccgacggaaacctggtcagcgtgcgggcacggctggtgctggatggcggtgcctacgcgtcgtcctcgccggcggtgctggcgaacgcggtcacccatgccgcgggtccgtaccgggtcccgaacgcccacctgcacggagtcgtcgtgcggaccaacaaccccccgtgcggcgccatgcgggggttcggggtgccgcaggtgaccatcggtcacgaggcccagatggaccggctggccgacgccctcggcatggatccggtggacctgcgcgtccgcaatgccgtccgaccgggggatgtgctgcccactggtcaggtgatgggcgcaccgctgccggcgcgggaggtcatcgaggcggtggcctcgcgtccgctcccgccggcgatgccggcgaacgtcgcggtgaccgcgttgcccggcggccgaccggccgcggccgaaccgagccgggtccgtcggggggtcggctacgccctggcctacaagaacctgctcttctcggagggcatggacgactcctccgtcgcccgtgcccgcctggagctggctgaggacggaacggtacgggtccggctgcacagcgcgtgcgccgaggtgggccaggggtttgtgacgatcgcggggcagatcgcccgcaccgagctcggcgtcgaacaggtcgtgttggcgcccgcggacaccgcggtcggcagtgccggatcgaccagcgcgtcccggcagacctggatgagcggaggcgccgtgcgcggagcctgcgccgcggtcgccgatcgcctgctcgcccgggtcgcccgcaccgcggggctgcccgcggaggtcgtcgaggcacctcgacggacgctgaccgtcaacgccggggagatcgtcggggtggaggccgggttgcgggttccgctcgccgaggcgctggccgacgggccgatcgaagcggagtacaccttccaccaccggcgtacctccgcgctggacgccgacggacagggcgatccgcacgtggccttcgccgccgcggcgcaccgcgcggttgtcgatgtcgatgtcgacctcggtctcgtgcgggtcgtgtcgatggcgctggcccaggactgcggtacggtgctcaaccccctggcgctgcgtggtcaggtcgaggggggaactgcccaggggctgggcctcgccgtcatggaggagctggtcacggtggacggggtggtggtcaatcccacgtttcacgactatctgctgccgaccatcgccgacgtcccggacctcgatttcgtcgccgtcacccatccgcagccggatgcgccctacggggtgaagggcgtgggggaggcgcctacctgtaccgcgaccccggcgatcatcgcggcgatccgggtcgccgtcggacgggatctgcggcgcgttccggtacgacccgaggacctcgtcaccatctctccgatgaccgcgcctccgacgaccgcgcctccgacgacgccgggacaaggtgttccggcggcatga

SEQ ID NO: 115985 - protein, 781 aa, Frankia sp. CcI3
MSLGIGRPVRRPDGPDKVTGSFSYVGDLRVPGMVHARTLRSPHARARIRRVDVDAARRLPGVVGMVTAADVPGMATYGLIVADQPVFAATEIRYAGEPVAAVAAVDVRTARRALAAIEVDYEPLAPSTDPDRVWQPDAEPLHPAGNLYREIELRHGDPDALGPVVVEDQYLVGMQDQAFLAPEAALAMPAADGGVDLRVATQWLHSDREQIAACLGLPEELVRLTLAGVGGAFGGREDVTLQIHGALLARATGLPVRIAYDRVESFLGHPHRHPARMWFQHSATADGNLVSVRARLVLDGGAYASSSPAVLANAVTHAAGPYRVPNAHLHGVVVRTNNPPCGAMRGFGVPQVTIGHEAQMDRLADALGMDPVDLRVRNAVRPGDVLPTGQVMGAPLPAREVIEAVASRPLPPAMPANVAVTALPGGRPAAAEPSRVRRGVGYALAYKNLLFSEGMDDSSVARARLELAEDGTVRVRLHSACAEVGQGFVTIAGQIARTELGVEQVVLAPADTAVGSAGSTSASRQTWMSGGAVRGACAAVADRLLARVARTAGLPAEVVEAPRRTLTVNAGEIVGVEAGLRVPLAEALADGPIEAEYTFHHRRTSALDADGQGDPHVAFAAAAHRAVVDVDVDLGLVRVVSMALAQDCGTVLNPLALRGQVEGGTAQGLGLAVMEELVTVDGVVVNPTFHDYLLPTIADVPDLDFVAVTHPQPDAPYGVKGVGEAPTCTATPAIIAAIRVAVGRDLRRVPVRPEDLVTISPMTAPPTTAPPTTPGQGVPAA

SEQ ID NO: 115986 - DNA, 2223 bp, Burkholderia xenovorans LB400
  CDS (1)..(2223): transl_table=11
atgaatctgatcggtcaaccgttcgaccgcaccgacggtctgctcaaagtcaccggcgaggcgcgctatgccggcgaatttcctgaagcacgtctcgcgcatgcggtactcgtcaccagcacgattgcgcgcggcaccattgcgtcgatcgatgcgagccgcgcagaggcgctgcccggcgtgctgctcgtgatgacgtatcagaacgcgccgcgcttgcccaacggcggcaagcccgcgctggcgccgccggccggacgccgcctgtcgctgcttcaggacaaccaggttcattacagcaacgagccggtcgccgtggtggtggccgatacgctcgaacatgccaccgacgccgcccgccagttgcgcatcgcctatcagagcggcgccgcggtcacggacttcgcgcaggccaaaccgaacgctcacgcccccgacaagcctcaaggccggcaaaccgacacgcagcgcggcagcttcgacgacggcatgcaaagcggcacggtgcacgtggacgcgacctataccacgccgatcgaacatcacaacccgatggagccgcacgccacgatggcgcgctgggacggcccgcaactcacgctctacgattcgacccaaggcgtcagcagcgcggcgcaggcggtcgcgaagacgctcggcatttcgcccgccgacgtgcgcgtgatttcgccgttcgtgggtggcggcttcggttgcaagggctcgtcgtggtcgcatgtgtcgttgtgcgcaatggcggcgaaacagaccgggcggcccgtgcggctcgtgctcgaacggccgcagatgttcggcccggtcggcgcgcgtccgcacaccgagcagcacttcgtgctcgccgcacggcgcgacggcacgctgaccgccatgcgtcacgacagcatttcgaacacgtcggtgatcgaagactggaccgagacctgctgcatggtcacacgcatgctgtacgcggtgcccaatcaggtgaccacgcaccgcatcgtgccgctcaatctgggcacgccgaccttcatgcgcgcgccgggagaaacaaccggttcgttcgcgctcgaatcggcaatggacgaactcgcggcggccttgaaaatggatccgctcgcgctgcgcatcaagaattacgccgatgccgacccgcaggaaaacaagccgtggtcgagcaagtccttgcgcgagtgctatcagatcggcgccgagaaattcggctggtcgcggcgcacgagcgccccgcgctcgatgcgcaatggcggcacgctgatcggcatgggcatggccaccgcgacctatccggccaatcgcagcgaagccagcgcgattgcgcgaatcttgccggacggcaccgcgatggtcgcctccggcacccaggatatcggcacgggcacctacaccgtgatgacccaggtggccgcggacgcgctcggcttcgcgccggaaaacatccacttcgcgctcggcgattcgtcgctgcccagagcgcctgtgtcgggcggctcgcaatcggccgcgagcgtctcgcccgccgtgcacgacgcggcgagccaggcgcgcagccagttgatcgcgctggcgctcgccgatcgggcctcgcccgtgcacggcatcgcgctcgacgacatcaccgtggaaaacggctgggtgacgagccgctcgcaaccgggcaagcgcgatccggcggcggcgatcatcgcgcgctcgggcggcaagccgatcgaggcgatcgcaaccgtcaagcccggcgacgaaaagcagaagtactcgttccactcgttcggcgcggtgttcgtcgaggtgcatgtcgatgccgagctcggcacgatccgggtggcgcgcgtggtgggcgtgtacgacgtgggacgcgtgctcaaccagaaaacggcgcgcagccagttgatgggcggcatcgtgtggggcgtcggggcggcgctgcaggaagagagttcggtcgatacccgctatggccgcttcaccaacgcgaatctcgccgagtatcacgtgccggtcaatgccgatatcggttcgctggacataacctttatcgaccggccggatccgtttatcaactcgctcggggtacgcggcatcggcgagatcggcattacgggcgtgcccgcggcgattgcgaacgcggtgtatcacgccaccggcgtgcgcgtgcgcgacctgcccgtcacgctcgacaaggtgatgggcacgatgcaggtttga

SEQ ID NO: 115987 - protein, 740 aa, Burkholderia xenovorans LB400
MNLIGQPFDRTDGLLKVTGEARYAGEFPEARLAHAVLVTSTIARGTIASIDASRAEALPGVLLVMTYQNAPRLPNGGKPALAPPAGRRLSLLQDNQVHYSNEPVAVVVADTLEHATDAARQLRIAYQSGAAVTDFAQAKPNAHAPDKPQGRQTDTQRGSFDDGMQSGTVHVDATYTTPIEHHNPMEPHATMARWDGPQLTLYDSTQGVSSAAQAVAKTLGISPADVRVISPFVGGGFGCKGSSWSHVSLCAMAAKQTGRPVRLVLERPQMFGPVGARPHTEQHFVLAARRDGTLTAMRHDSISNTSVIEDWTETCCMVTRMLYAVPNQVTTHRIVPLNLGTPTFMRAPGETTGSFALESAMDELAAALKMDPLALRIKNYADADPQENKPWSSKSLRECYQIGAEKFGWSRRTSAPRSMRNGGTLIGMGMATATYPANRSEASAIARILPDGTAMVASGTQDIGTGTYTVMTQVAADALGFAPENIHFALGDSSLPRAPVSGGSQSAASVSPAVHDAASQARSQLIALALADRASPVHGIALDDITVENGWVTSRSQPGKRDPAAAIIARSGGKPIEAIATVKPGDEKQKYSFHSFGAVFVEVHVDAELGTIRVARVVGVYDVGRVLNQKTARSQLMGGIVWGVGAALQEESSVDTRYGRFTNANLAEYHVPVNADIGSLDITFIDRPDPFINSLGVRGIGEIGITGVPAAIANAVYHATGVRVRDLPVTLDKVMGTMQV

SEQ ID NO: 115988 - DNA, 2943 bp, Burkholderia xenovorans LB400
  CDS (1)..(2943): transl_table=11
atgcaacgtctggaagatcccgcgattctcaccggccgcggccgttacggcgacgatatcggcgtgcggcccggcacgctgcacgccgcgatcctgcgctcgccgcacgcgcatgcggagctggtgtcgatcgacacggacgccgccgcgaaactgcccggtgtgcgcgcgatcctgacacgcgacgacctgcgcgcctggtcgcggcccttcgtggtcggcgtgaaatcgccgatggaacagtgggcgctggcgattgaccgcgtgcgctacgtgggcgaaccggtggcagtggtgctggcgcaatcgcgcgccatcgccgaagacgcgctcgatctgctcaaggtggagtacgcgacactcgatccggtcacgtcgatcgaacaggcggcgagcgaccagtcgccggtcttgcacgagaaagtgggcagcaacgtgatcagcgaccggcacttccgctacggcgagccggaagccgcgttcgcgaaggcgccgcatcgcgtgaaactggtcgcgcattatccgcgcaacagctgcgcgccgatcgaatgcggcgtggtgatcgcggagtatctggcgggcgatgaaggctacgacgtcacgtcgaatttcatgggcccgttctcgctgcacgcggtgatggcgatggcgctgaacgtgcccgccaaccgtctgcgccacaaggcgccgcgcgattcgggcggcagcttcggcgtgaagcaggcggtgtttccgtatgtcgtgctgatgtgcctcgcgtcccgcaaggccggcgcgccggtgaaatgggtcgaggaccggctcgaacatctgagcgcggcgacctccgcgaccgcgcgcgtctcgacgctcgaagcggccgtggaaagcgacggccgcattacggcgctcgcctacgatcaactcgaagattgcggcggctacctgcgcgcgccggaacccgccacgttctatcgcatgcatggctgcctgaccggcgcgtacgcgatcgacaatctgctggtgcgcaatcgcgtcgtgctgaccaacaagacgccgacgggtctggtgcgcggctttggcggaccgcaggtgtacttcgcgctcgaacggctgatccagcgtatcgcgctcgaactgcaactcgatgtgctcgacgtgtaccgccgcaatttcgtcgccgccgacgcgttcccgtatcgcgccgcagcgggtgcgctgctcgattccggcaactatcaggaagcgctgcgccgcgcgctggacgaaggcggctatgccgaactgctggcgcgccgcgaggcggcgcgccaggaagggcggctgtacggcatcggcttcgcggcgatcgtcgaaccgtccgtatcgaacatgggctacatcacgaccgtgatgcccgccgaggcgcgcaggaaagccggaccgaagagcggcgcgattgcgagcgcgacggtgagcgtcgatctgctcggcggcgtggtggtgacgattgcgtcgacgcccgcgggccaggggcatatgacggtgtgcgggcaggtggttgcggatgtgctcggtgtcgcgccgcaggacgtggtggtcaatgtcgaattcgatacgcacaaggacgcgtggtcggtggcggcgggcaattattcgagccgctttgccggcgcggtggcgggcacggtgcatctggccgccgtgcgcgtgcgcgacaagatcgcgcgcatcgtgtcgaagcagttgggctgcgcgccggaagatgtctgtttcgaagcaggccgcatctatgcaaagggcgccgaggatcgcgcgcagccgttcggccgcgtcgccgccaatgcgccgcattgggcgcccgcgttgttgcccgaaggcgaagagccgggcctgcgcgagacggtgttctggaatccgccgaacatggccgcgccggacgggaacgatcgcatcaacacatcggcggcttacggttttgtgttcgacatgtgcgggatcgaagtggatcgcgccaccggccgcgtgcggatcgaccgctacgtgagcgcgcacgacgccggcacgctgctcaatcccgcgctcgccgacggccagattcgcggcgccttcgcgcaaggactcggggcggcgttgatggaggaattccgctacggcgcggacggcagcttccagtccggcacgctcgccgactatctgatgccgaccacctgcgaagtgcccgatccggtgatcgtgcatctgcaaacgccgtcgcccttcacgccgttgggcgcgaaaggactcggcgagggcaacaacatgagcacgccgccttgcatcgcgaatgcagtggcggacgcgctcggcgtcgccgatatccgcttgccgctgacgccttcgaaagtgatggcgctcgtgggcatggacgacccgccgccgtcgcgtcccgagctgcgtgaagcgcccgcggccaaaccggcgatgccgggcggcggcaaggcgctcaccgcgcagggcagcgtcgatctgccggcgtcgccggaagcgatctttgccgtgctgctcgatccggccgcgctcgccagagtgattcccggttgccatgcgctcgaagccgaaggcacgaaccagtatcgcgccgacgtgacagtgggtgtcggcatgatcaaggcgcgcttcgaagcgaagatcggcttgtcggaaatcgacgcgccgcatcggctgcgtttggcaggagctggcatgtcgtcgctcggcagcgcgcgcggcagcggcctggtcgaactgacaccgatcgaaaacggcacacgtctttcgtacgactacgaagcccaggtgtcgggcaaggtcgcggcggtgggcggacgcatgctcgaaggcgcggccagggtcgtgttgcggcaactgttcgaatcgctgggccgccaggcggcgggcaaaccggttcacgcgggcggctcgtggttctcgcgcctcctggcccgtttcaggagacaggcatga

SEQ ID NO: 115989 - protein, 980 aa, Burkholderia xenovorans LB400
MQRLEDPAILTGRGRYGDDIGVRPGTLHAAILRSPHAHAELVSIDTDAAAKLPGVRAILTRDDLRAWSRPFVVGVKSPMEQWALAIDRVRYVGEPVAVVLAQSRAIAEDALDLLKVEYATLDPVTSIEQAASDQSPVLHEKVGSNVISDRHFRYGEPEAAFAKAPHRVKLVAHYPRNSCAPIECGVVIAEYLAGDEGYDVTSNFMGPFSLHAVMAMALNVPANRLRHKAPRDSGGSFGVKQAVFPYVVLMCLASRKAGAPVKWVEDRLEHLSAATSATARVSTLEAAVESDGRITALAYDQLEDCGGYLRAPEPATFYRMHGCLTGAYAIDNLLVRNRVVLTNKTPTGLVRGFGGPQVYFALERLIQRIALELQLDVLDVYRRNFVAADAFPYRAAAGALLDSGNYQEALRRALDEGGYAELLARREAARQEGRLYGIGFAAIVEPSVSNMGYITTVMPAEARRKAGPKSGAIASATVSVDLLGGVVVTIASTPAGQGHMTVCGQVVADVLGVAPQDVVVNVEFDTHKDAWSVAAGNYSSRFAGAVAGTVHLAAVRVRDKIARIVSKQLGCAPEDVCFEAGRIYAKGAEDRAQPFGRVAANAPHWAPALLPEGEEPGLRETVFWNPPNMAAPDGNDRINTSAAYGFVFDMCGIEVDRATGRVRIDRYVSAHDAGTLLNPALADGQIRGAFAQGLGAALMEEFRYGADGSFQSGTLADYLMPTTCEVPDPVIVHLQTPSPFTPLGAKGLGEGNNMSTPPCIANAVADALGVADIRLPLTPSKVMALVGMDDPPPSRPELREAPAAKPAMPGGGKALTAQGSVDLPASPEAIFAVLLDPAALARVIPGCHALEAEGTNQYRADVTVGVGMIKARFEAKIGLSEIDAPHRLRLAGAGMSSLGSARGSGLVELTPIENGTRLSYDYEAQVSGKVAAVGGRMLEGAARVVLRQLFESLGRQAAGKPVHAGGSWFSRLLARFRRQA

SEQ ID NO: 115990 - DNA, 2379 bp, Silicibacter sp. TM1040
  CDS (1)..(2379): transl_table=11
atgcctaaggatattgaagccaaggaaagcggcataggggccgccaccaaacggcgcgaagacgtaaggttcctgacgggaaccgggaattatgctgacgacatcaatgtaaacggtcaggcctatgtgcatttcctgcgctcggatgtggcgcatgggcggatcacctcgcttgagactgccgcagcggcggcgatgccgggcgtgctgcgggtgttcaccggggcagatttcgaaggcgtcggaggactgccctgcggctggcaggtgacggatcgctttggtgaggtgatgcaggaacctgcccacccggtgctggcgcagggcaaggtgcgccatgtgggtgatccgatcgccgcggtggtggccgagagcgccgaattggctcgcgatgccgccgaggcgatcgaactggagatcgaagagcttccggcagtgatcgacatgaaggccgctcttgctgaggaggccccgaaggtacatgacgatctgacgtcaaacctctgttatgattggggctttgtcgaagagaacaaggatgcggtggccaaggcctttgatgaggccgcccatgtaaccacgctcgagttggtcaacaatcgtttggtcgccaacccgatggagccgcgcgtggcggtgggcgatttcaaccgcgctaccggcgaaagcacgctttatactacaagccagaacccgcatgtgatccggctcctgatgggcgcctttgtgctcggcattccggagcataaattgcgcgtggtggccccggatgtggggggcggttttggctccaagatcttccactacgccgaagaagcgttttgcacctttgccgccaaggcgctcaaccgcgcggtgaaatggacctcctcgcggtccgaggccttcatgtctgatgcccatggccgcgatcatgtgaccaagatcgaactggcgctggacgcagacaacaacttcaccgctctgcgcaccgaaacttacgccaatatgggggcgtatctctcgaccttcgcgccctcggtgccgacctggctgcatggcacgctgatggcgggcaactacaagacgccgctcatttatgtgaacgtcaaggcggtctttaccaatacggtgccagtcgatgcctatcgcggcgctgggcgtcccgaggcgaccttccagttggagcgcgtcatcgacaaggccgcgcgcgagctggatgtcgacccggtcgcgctccggcggcagaactttgtcaccgagttcccctatgccacgcctgtggcggtggaatatgacaccggcgactatgtggcgacgatggataagcttgaagagattgcggatatcgcaggctttgccgcgcgccgcgccgagagcgagaaaagcggcaaactgcgtggtctgggtgtcaactgctatatcgaagcctgtggtatcgcgccctcgaacctcgtgggtcaacttggtgcgcgcgcagggctctatgagagtgcgacggtacgcgtcaatgcaactggcggtatcgtggtgatgaccggcagtcacagccatgggcaagggcatgagacgtcctttccgcaggtgatcgccgagatgatcggcatccccgaggatatggtggagatcgagcacggcgacaccaacaacgcgccgatgggcatgggcacctatggctcgcgttccttggcggtgggcggctctgccatggtgcgcgcgaccgaaaagatcatcagcaaggccaagaagatcgcggcgcatctgatggaggcttcggacgccgatattgagcttaaggacgggaggttctcggtggcaggcacggataaatccgtggcctggggcgatgtgaccttggcggcttatgtgccacataactacccgctcgaagagatcgaaccggggctggaggagacggcgttctatgatccggcgaactttacctacccggctggcgcttatgcctgtgaggtcgaagtggatcccgagactggcaaagtcaccatcgagcgctttgccgctgccgatgactttggcaatatcgttaacccgatgattgtggacggtcaggtccacggcggaattggacagggcattgggcaggcgcttctggagggctgtgtttatgacgaggatggtcagctcttgtccgcgagcttcatggattacgccatgccgcgcgcggatgatgtgccgttttatcaggtggatcattcctgccagaccccctgcacgcataaccctcttggggtgaaaggctgcggagaggcaggggcaattggatctccgccagcggtggtcaatgcggtggtggatgcgctgcgctctgccgggaaggatgtcacccacatcgacatgccgctgacgccggcgcgggtctgggcggcgatgcaaggttga

SEQ ID NO: 115991 - protein, 792 aa, Silicibacter sp. TM1040
MPKDIEAKESGIGAATKRREDVRFLTGTGNYADDINVNGQAYVHFLRSDVAHGRITSLETAAAAAMPGVLRVFTGADFEGVGGLPCGWQVTDRFGEVMQEPAHPVLAQGKVRHVGDPIAAVVAESAELARDAAEAIELEIEELPAVIDMKAALAEEAPKVHDDLTSNLCYDWGFVEENKDAVAKAFDEAAHVTTLELVNNRLVANPMEPRVAVGDFNRATGESTLYTTSQNPHVIRLLMGAFVLGIPEHKLRVVAPDVGGGFGSKIFHYAEEAFCTFAAKALNRAVKWTSSRSEAFMSDAHGRDHVTKIELALDADNNFTALRTETYANMGAYLSTFAPSVPTWLHGTLMAGNYKTPLIYVNVKAVFTNTVPVDAYRGAGRPEATFQLERVIDKAARELDVDPVALRRQNFVTEFPYATPVAVEYDTGDYVATMDKLEEIADIAGFAARRAESEKSGKLRGLGVNCYIEACGIAPSNLVGQLGARAGLYESATVRVNATGGIVVMTGSHSHGQGHETSFPQVIAEMIGIPEDMVEIEHGDTNNAPMGMGTYGSRSLAVGGSAMVRATEKIISKAKKIAAHLMEASDADIELKDGRFSVAGTDKSVAWGDVTLAAYVPHNYPLEEIEPGLEETAFYDPANFTYPAGAYACEVEVDPETGKVTIERFAAADDFGNIVNPMIVDGQVHGGIGQGIGQALLEGCVYDEDGQLLSASFMDYAMPRADDVPFYQVDHSCQTPCTHNPLGVKGCGEAGAIGSPPAVVNAVVDALRSAGKDVTHIDMPLTPARVWAAMQG

SEQ ID NO: 115992 - DNA, 3822 bp, Myxococcus xanthus DK 1622
  CDS (1)..(3822): transl_table=11
atgagcaatatgttcgagttccagctcaatggcgcgacggtccgcgtcgatggcgtctcccccaacaccacgctgctcgacttcctgcgtgcccgcggcctcactggcaccaagcagggctgcgccgagggcgactgcggcgcgtgcaccgtggccctggtggaccgggacgcccagggcaaccggtgcctgcgcgccttcaacgcctgcatcgccctggtgcccatggtggccggccgtgagctggtgacggtggaaggcgtgggcagctgcgagaagccccacccggtgcagcaggccatggtgaagcactacggttcgcagtgtggcttctgcacgccgggcttcatcgtctccatggcggaggcgtactcccgaaaggatgtctgtaccccgtcagccgtggcggaccagctctgtggcaacctctgtcgctgcaccggctaccgccccattcgcgacgcgatgatggaggcgctggcccagcgcgacgaaggaccgtcgcctgccacggcgatcccctccgcgccgctcggaggtcccgccgagcccctgtccccgctgcgctacgaggccggtggacagaccttcctgcgccccacgtcgtgggaggagttgctcgacctgcgcgcgaagcacccggaggcccacctggtggcgggcgccactgaattgggcgtggacatcaccaagaagtcccgccgctaccccttcctcatctccaccgagggcgtggagtccctgcgcgcggtccgccgtggggaggatggctggtacgtgggcggcgccgcctcactggtggcgctggaagaggccttgggtgacgagctgcccgaggtgaagaagatgctcaacgtcttcgcctcccggcagattcgccagcgcgccacgctggcgggcaacctggtgaccgcgtcgcccattggcgacatggcgccggtgttgctcgccctggatgcctcgctcgtcctgggctcggtgcggggcgagcgcacggtggcgttgtccgacttcttcctcgcctaccggaagacggcgctccaatcggacgaggtcgtccgccacatcctcatcccccacgctgccgtgcccgagggcggccggcggctctccgactccttcaaggtgtccaagcggcgcgagctggacatcagcatcgtcgccgcgggcttccgcgtggagctggacgcgggcggattggtgaagctggcgcgcctgggctacggcggcgtcgcggccacgccggtgcgggcgcgccgcgcggaggcggtgctcaccgggcagccctggacggccgagacggtggcgcgcgtgctgcccgtgctcgcggaggaaatcacgcccatcagcgacctgcgcggcagcgcggagtaccggcggggactggtggcgggcctgctggagaagttcttctccggctcgcacagcccggccctggacgccgcgccgggcttcgacgcgggtgaggtccaggcccccgcggacgcgggacgcgcgctgcggcacgagagcgcgctgggccacgtgacgggcagcgcgaggtacgtggacgacatggcgcagaagcggcccatgctggaggtctggccggtgtgctcgccccatgcgcacgcccgcatcctcaagcgagatcccaccgcggcgcgcaaggtgcccggcgtggtgaaggtgctcatggccgaggacatccccggcatgaacgacaccggccccatccgccacgacgagccgctgctggcggaccgcgaggtgctcttccacgggcagattgtcgcgctggtcgtgggcgagtccgtggaggcctgccgcgcgggcgcccgcgccgtggaggtggagtacgagcccctgcccgccatcctcacggtggaggacgccgtggcgcggagcagctaccacaccgagccgcacgtcatccgccggggcgacgtggacgccgcgctggacagcagcccccaccgcctgtcgggcacgctggccattggcgggcaggagcacttctacctggagacgcaggccgccttcgccgagcgcggtgacgacggcgacatcaccgtcgtgtcctccacccagcacccgtccgaggtacaggccatcatctcccacgtgctgcacctgccgcgcagccgcgtggtggtgcagtccccccgcatgggcggcggcttcggcggaaaggagacgcagggcaacgcgcccgccgcgttcgtcgcgctggccgcgtggcacacgggacgctcggtgcggtggatgctggaccgcgacgtggacatggcggtgacgggcaagcgccacccgttccataccgcctatgaggtgggcttcgacgaccaggggcggctgctggccctgcgcgtccagttggtatccaacggtggctggtccctggacctgtccgagtccatcctggaccgtgcgctgttccacctggacaacgcgtactacgtgccggcgctggcgtactcggggcgggtggcgaagacccacctcgtctccaacaccgccttccgcggcttcggtggtccgcagggcatgctggtgacggaggaggtcctggcccgcgtggcccgggccgtggggctgccggcggacgaggtccgcgagcgcaacctctaccgcggcaccggggagacgaacaccacgcactacggccaggagctggaggacgagcgaatcctccgcgtctgggaggagctcaagaagtcgtcggagttcgagcgccggcaacgcgacgtggcggcgttcaacgcccaatcccccttcatcaagcggggactggccatcaccccgatgaagttcggcatctccttcaccgccaccttcctcaaccaggccggcgcgttggtgcacgtgtaccgggacggctcggtcatggtgtcccacggcggcacggagatgggccagggcctgcacaccaaggtgctgggcgtggtcatgcgcgaactgggcgtcacggtggacgccgtgcggatggcgaagacggcgacggacaaggtgcccaacacctccgccaccgcggcctccagcggctccgacctgaacggcgccgccgtgcgggtggcctgcgtcacgctgcgggagcggctggccccggtggccgtgcggctgatgtcggaccggcacgggcgcagcgtgacgccggatgccctgctgttcagcgatgggaaggtgggcctgcgcggtgagcccgagctctccttgtccttcgcggacgtggtggaggcggcgtacctgtcccgggtgggcctgtcctcgacgggctactaccagacgccgggcatcggctacgacaaggccaagggccgcggacgccccttcctctacttcgcctacggcgcggcggtgtgcgaggtggaggtggacggccacacgggcatcaagcgcgtgctgcgcgtggacctgctggaggacgtgggcgattcgctcaaccccgccgtggaccgcgggcagattgaaggcggcttcgtccagggcctgggctggctcacaggcgaggagcttcgctgggacgcgaatggccggctgctcacgcactccgccagcacctacgcggtgccggccttcagcgacgcgcccatcgacttccgggtgcggctgctggagcgggcgcaccagcacaacaccatccacggcagcaaggccgtgggcgagccccccctgatgctggccatgtccgcgcgagaggccctgcgggaggcggtggccgcgttcggccaggccggtggcgacgtggagctggcctcccccgccacgcacgaagcgctgttcctcgccatccagaagcggctggcgcgcgcggcggcggagggcgggcgcgaggcggcctga

SEQ ID NO: 115993 - protein, 1273 aa, Myxococcus xanthus DK 1622
MSNMFEFQLNGATVRVDGVSPNTTLLDFLRARGLTGTKQGCAEGDCGACTVALVDRDAQGNRCLRAFNACIALVPMVAGRELVTVEGVGSCEKPHPVQQAMVKHYGSQCGFCTPGFIVSMAEAYSRKDVCTPSAVADQLCGNLCRCTGYRPIRDAMMEALAQRDEGPSPATAIPSAPLGGPAEPLSPLRYEAGGQTFLRPTSWEELLDLRAKHPEAHLVAGATELGVDITKKSRRYPFLISTEGVESLRAVRRGEDGWYVGGAASLVALEEALGDELPEVKKMLNVFASRQIRQRATLAGNLVTASPIGDMAPVLLALDASLVLGSVRGERTVALSDFFLAYRKTALQSDEVVRHILIPHAAVPEGGRRLSDSFKVSKRRELDISIVAAGFRVELDAGGLVKLARLGYGGVAATPVRARRAEAVLTGQPWTAETVARVLPVLAEEITPISDLRGSAEYRRGLVAGLLEKFFSGSHSPALDAAPGFDAGEVQAPADAGRALRHESALGHVTGSARYVDDMAQKRPMLEVWPVCSPHAHARILKRDPTAARKVPGVVKVLMAEDIPGMNDTGPIRHDEPLLADREVLFHGQIVALVVGESVEACRAGARAVEVEYEPLPAILTVEDAVARSSYHTEPHVIRRGDVDAALDSSPHRLSGTLAIGGQEHFYLETQAAFAERGDDGDITVVSSTQHPSEVQAIISHVLHLPRSRVVVQSPRMGGGFGGKETQGNAPAAFVALAAWHTGRSVRWMLDRDVDMAVTGKRHPFHTAYEVGFDDQGRLLALRVQLVSNGGWSLDLSESILDRALFHLDNAYYVPALAYSGRVAKTHLVSNTAFRGFGGPQGMLVTEEVLARVARAVGLPADEVRERNLYRGTGETNTTHYGQELEDERILRVWEELKKSSEFERRQRDVAAFNAQSPFIKRGLAITPMKFGISFTATFLNQAGALVHVYRDGSVMVSHGGTEMGQGLHTKVLGVVMRELGVTVDAVRMAKTATDKVPNTSATAASSGSDLNGAAVRVACVTLRERLAPVAVRLMSDRHGRSVTPDALLFSDGKVGLRGEPELSLSFADVVEAAYLSRVGLSSTGYYQTPGIGYDKAKGRGRPFLYFAYGAAVCEVEVDGHTGIKRVLRVDLLEDVGDSLNPAVDRGQIEGGFVQGLGWLTGEELRWDANGRLLTHSASTYAVPAFSDAPIDFRVRLLERAHQHNTIHGSKAVGEPPLMLAMSAREALREAVAAFGQAGGDVELASPATHEALFLAIQKRLARAAAEGGREAA

SEQ ID NO: 115994 - DNA, 2391 bp, Mycobacterium sp. MCS
  CDS (1)..(2391): transl_table=11
atgaccgcggtggacgaacgcccggacgcgcaggcggacaacgacaggaaaccgtgcggttacggccggatgctgcgcaaggaggatccgcgcttcgtccgcggccggggcaactacgtcgacgacgtcacgctgcccggcatgctgcacctggcgatcctgcgctcaccgtatgcccatgcgcggatcgcgaacatcgacatctcggccgcggaggcgcatccgaaggtcaaggcggtcgtcaccggcgccgacctggcggagaagggcctggcctggatgccgaccctgtccaacgacgtgcaggccgtcctcgccaccgacaaggtgcgattccaggggcaggaggtggcattcgtcgtcgccgaggaccggtattcggctcgtgacggtgtcgagttgatcgacgtcgactatgagcctctcgacccggtcatcgacgtccgccgggcactggatcccgacgcggcggtgatccgcaccgacctcgacggtaagaccgacaaccactgcttcgactgggagaccggcgacgccgccgccaccgacgcggcgttcgccaaggccgacgtcgtggtcaaacaggagatggtctatccgcgtgtgcatcccgcgccgatggagacctgcggcgcggtcgccgacctcgacccggtcagcggcaagctcaccctgtggtcgaccacgcaggcgccgcacgcacaccgcaccctctacgccctggtggccgggctgcccgaacacaagatccgggtcatctcaccggacatcggcggcggcttcggcaacaaggtgccgatctatccgggatacgtctgcgccatcgtgggttcgctgctgctgggtaagccggtcaagtggatggaggaccgcagcgagaacctgacctcgaccggattcgcccgggactacatcatggtcggcgagatcgccgccacgtccgacggcaagatcctggccgtccgctccaacgtgctggccgaccacggtgcattcaacggcgttgcggcgccgacgaagtaccccgcgggcttcttcggggtgttcaccggcagctacgacctcgaggccgcgtactgccacatgaccgcggtctacaccaacaaggcgcccggcggcgtggcctacgcgtgttcgttccggatcaccgaggcggtgtacttcgtcgagcggttggtggactgtctggcctacgagatgaagatggacccggccgacctgcggctgcggaacctgctgaaacccgaccagttcccgtaccactcgaaaaccggctggacctacgactccggcgactacgagaccaccatgcgcaaggccatggacatgatcggctacgagcagttgcgcgccgagcaggccgccaagcgggagcgcggtgagctgatggggatcggcatggcgttcttcaccgaggccgtcggcgccggaccgcgcaaggacatggacattctgggactcggcatggccgacggctgtgaactgcgggtgcatcccaccggcaaggccgtggtccggttgtcggtgcagacccaggggcagggccacgaaaccaccttcgcgcagatcgtcgccgaggagttggggatcccacccgacgacatcgacgtggtgcacggcgacaccgaccagacgccgttcgggctgggcacctacggcagccgttcgacccccgtatccggtgccgcggccgcgttggtcgcgcgcaaggtgcgggacaaggccaagatcatcgcctcggggatgttggaggcgtcagtcgccgacctcgaatgggacaagggcgccttccacgtcaagggtgacccggcggcgtcggtcaccatccaggacatcgcgatgcgcgcgcacggcgccggtgacctcccggagggcatcgagggcggcctggacgcccagatctgttacaaccccgagaatctcacctatccgtacggcgcctacttctgcgtggtcgacgtcgatccgggcaccgcggtggtcaaggtccggcggttcctcgcggtcgacgactgtggcacgcggatcaacccgatgatcatcgagggtcaggtgcacggcggcatcgtcgacgggatcgggatggcgctgatggagatgatcgcgttcgacgaggaaggcaactgcctcggcgggtcgctgatggactatctgatccccaccgcgctcgaggtgccggagctggagaccggtcataccgtcacgccgtccccgcaccacccgatcggcgccaagggcatcggggagtccgccaccgtcggctcaccccccgcggtggtgaacgccgtcgtcgatgcgttggcgccgttcggaatccggcacgccgacttgccgctgaccccctcccgggtgtgggaggccatgcagggccggcccaccccgccgatctga

SEQ ID NO: 115995 - protein, 796 aa, Mycobacterium sp. MCS
MTAVDERPDAQADNDRKPCGYGRMLRKEDPRFVRGRGNYVDDVTLPGMLHLAILRSPYAHARIANIDISAAEAHPKVKAVVTGADLAEKGLAWMPTLSNDVQAVLATDKVRFQGQEVAFVVAEDRYSARDGVELIDVDYEPLDPVIDVRRALDPDAAVIRTDLDGKTDNHCFDWETGDAAATDAAFAKADVVVKQEMVYPRVHPAPMETCGAVADLDPVSGKLTLWSTTQAPHAHRTLYALVAGLPEHKIRVISPDIGGGFGNKVPIYPGYVCAIVGSLLLGKPVKWMEDRSENLTSTGFARDYIMVGEIAATSDGKILAVRSNVLADHGAFNGVAAPTKYPAGFFGVFTGSYDLEAAYCHMTAVYTNKAPGGVAYACSFRITEAVYFVERLVDCLAYEMKMDPADLRLRNLLKPDQFPYHSKTGWTYDSGDYETTMRKAMDMIGYEQLRAEQAAKRERGELMGIGMAFFTEAVGAGPRKDMDILGLGMADGCELRVHPTGKAVVRLSVQTQGQGHETTFAQIVAEELGIPPDDIDVVHGDTDQTPFGLGTYGSRSTPVSGAAAALVARKVRDKAKIIASGMLEASVADLEWDKGAFHVKGDPAASVTIQDIAMRAHGAGDLPEGIEGGLDAQICYNPENLTYPYGAYFCVVDVDPGTAVVKVRRFLAVDDCGTRINPMIIEGQVHGGIVDGIGMALMEMIAFDEEGNCLGGSLMDYLIPTALEVPELETGHTVTPSPHHPIGAKGIGESATVGSPPAVVNAVVDALAPFGIRHADLPLTPSRVWEAMQGRPTPPI

SEQ ID NO: 115996 - DNA, 2328 bp, Mycobacterium sp. MCS
  CDS (1)..(2328): transl_table=11
atgaccgacaccgtcgccacccgctactcgggaacccgggtcgcgagggtcgaggacaaccgcctgctgaccgggcgcgggaccttcgtcgacgacatccagcgccccggcatgctgcacgcgtgcttcgtccgcagcccgttcgcccgggccaaggtcaacgggatcgatgcctccgccgcgctggcgatgcccggcgtgtacgcggtgttcaccgccgaggacctcaacggcgacgccgtcgagtcgtggcacgccgtcgccggtaaggacgtccccgacaccccgcgcccgccgttggccgagggcgaggtgaagttcgtcggcgatcccgtcgcgctcgtcgtggccgaatcccgttacctggccgaggacgccgccgacgccgtccaggtcgactacgagcccctgcccgcggtggccgacttccgcaccgcggtgaacgccgaaaccgtcgtccacgagcagtaccccgacaacgtcgcgggcgggatgggtggcgcgcctccggacgaggagacgttctcgtcggccccatgcgtggtgagcgagaacatctaccagcagatgtacgtgcccgtcccgatcgagacccggggcatggtcgtcgaatgggagcccaccacaggcgaattgacgctgtgggcgtccacgcagacacctcacgagctccgcgcgttcaccgctcggctgctcggcatccccgcccagaaggtccgggtcatcatgcgcgacaccggcggcgggttcgggcagaaggtcgtgccgatgcgcgaggacatggtcatcatgctggccgcgcgcaaggtccccggtgcgctgaagtggatcgaggaccggcgcgagaacctcatgtcggccggccagtcccgccacgtcgacggcaccgcccggatggcgttcgacgaggacggcacgatcctcgccgtcgacatcgacttcaaccaggacgtcggcgcgtatcccaccccgtacccggtgctcaccaccgcggcgatcggcatgttcttccccgggccgtaccgcgtcccgaaggccagcttcaactacaagacggtgttctccaacaccgccggcctgcacgcctaccgcggcccgtggcagtacgagactctggcccgagagatcatgttcgacatcgccgcccgcaagctgggcatcgatccggtcgagttgcgccgcaagaacatcctgcgcggcgacgagatgccgtacttcaaccccaacggcatgccgtatgaccacgtcgcccccgccgacaccttcgaacaggccgtcaagatcctcgaccacgagggtttccgcaaggagcaggccgaggcgctcgcccagggccgctacatcgggctcgggttctccgcgtacatcgagccgaccggcgccgcgaccggccatctgggcaccgaaggctgcaccatccggatggagccgaccggcaagatcaacgtctacgtcaacggcgggtcgaccggcaacagcctggagacgacggtcattcagctcaccgccgacgcgctcggcgccgacatcgacgacgtcgccaccatccagggcgacaccgcgatcaccccttacggggcgggcacgcaaggcagtaggagtgccccgatgaccgcgggcgcggtcaacgaggccggcggcatcctgcgcgcacaactgatccgcatggccgcccaccacctgggcgtggaagtcgacgacatcgaactcggcgggtcgaaggcctacgtacgcgaagaccccaccaagagtgtgagtttcgccgacatcgcctaccgcgcgcactaccagcccgagcacctgccaccgggcggaacggcgacgctggaggccaccgcgcgcttcacctcgatggcgatgatccactgggccaacgccactcacgcctgcacgtgtgaggtcgacgtggagaccggacaggtgacgctgacccgttacatcgtcagcgaggacgtcggcccgatgatcaaccccaacgtggtcgaggggcaggtggccggcggcacggtgcagggcatcggcggcgcgctgctggagagcctggtctacgacgccgacggcaacccgctgtcgtcgacgttcgtcgactatctgctgccaacggcgaccgaggtgccgccgatcgagttcggccacgtcgagatccccggcccgggcgtcggcggctacaagggcgccggcgaaggtggcgcgatcggctcgacacccgccgtgatcaacgcgatcaacgacgcgctcgccccgctgggtgtgaccgtcacccggttgcccgccacccccgcgaccatcgtcgaactgctcgaacaagcgaaccgagaggaccactag

SEQ ID NO: 115997 - protein, 775 aa, Mycobacterium sp. MCS
MTDTVATRYSGTRVARVEDNRLLTGRGTFVDDIQRPGMLHACFVRSPFARAKVNGIDASAALAMPGVYAVFTAEDLNGDAVESWHAVAGKDVPDTPRPPLAEGEVKFVGDPVALVVAESRYLAEDAADAVQVDYEPLPAVADFRTAVNAETVVHEQYPDNVAGGMGGAPPDEETFSSAPCVVSENIYQQMYVPVPIETRGMVVEWEPTTGELTLWASTQTPHELRAFTARLLGIPAQKVRVIMRDTGGGFGQKVVPMREDMVIMLAARKVPGALKWIEDRRENLMSAGQSRHVDGTARMAFDEDGTILAVDIDFNQDVGAYPTPYPVLTTAAIGMFFPGPYRVPKASFNYKTVFSNTAGLHAYRGPWQYETLAREIMFDIAARKLGIDPVELRRKNILRGDEMPYFNPNGMPYDHVAPADTFEQAVKILDHEGFRKEQAEALAQGRYIGLGFSAYIEPTGAATGHLGTEGCTIRMEPTGKINVYVNGGSTGNSLETTVIQLTADALGADIDDVATIQGDTAITPYGAGTQGSRSAPMTAGAVNEAGGILRAQLIRMAAHHLGVEVDDIELGGSKAYVREDPTKSVSFADIAYRAHYQPEHLPPGGTATLEATARFTSMAMIHWANATHACTCEVDVETGQVTLTRYIVSEDVGPMINPNVVEGQVAGGTVQGIGGALLESLVYDADGNPLSSTFVDYLLPTATEVPPIEFGHVEIPGPGVGGYKGAGEGGAIGSTPAVINAINDALAPLGVTVTRLPATPATIVELLEQANREDH

SEQ ID NO: 115998 - DNA, 2445 bp, Rubrobacter xylanophilus DSM 9941
  CDS (1)..(2445): transl_table=11
atgaccgagacagcccagaggtacgtcggcggcggcgtgctccgcaaggaggacccggcgctcgtgaccgggcgggccacctggacggacaacataaagctgcccgggatgctgcacttcgcgctggtgcgcagccccatggcccacgcgaagataaaccggatcgacgtctcggcggcccgggagcagcccggggtcgtggccgtcttcacggccgaggatctcaaggacgagtgggccgctcccatcccctgcggctggcaggtgaccgaggatctgcgggttcccgagcactggccgctcaccggcgacaaggtccgctacctgggggatccggtcgcggtggtggtggccgaggaccggtatgcggccaaggatgccctggagttcgtcgaggtggactacgagccgctggacgtggtcaccgacatgcaggaggccctcaaggagggggccccgttggtgcacgaggagctcggcaccaacgagtgctacacctggccgatgcagaacggggacatcgacgaggccttcggcagggccgacgtggtggtcaaggagcgctacatccagcagcggctcatccccaacgccatcgagccgcgggcggtcgtcgcccagcccgagcccggcgggtccttcaccgtctactcctccacgcaggtgccccacatcctcaagagcgtgctctccgcgatctgcggggtgcccgagcaccggctgcgggtggtggcgccggacgtgggcggggggttcggctccaagctcaacgtctacccggaggaggccctggcgctggcgctctcccgcaggctcggggtgccggtcaagtgggtcgaggagcgctccgagaactacctggccaccgtccacgggcgtgaccagatccaggacatcgaggtcgcggccaccagcgacggcaagatcctggggatgaaggtggagctgctggcggacatgggggcctacctgcagctcggcaccaccgtcgtgccgctgctgggggcgttcatgtaccccgggctctacgacttcgacgcctactccttcaagtgcaccgcggtctacaccaacaagacgccgacggacgcctaccggggggcagggcgccccgaggcggcctacgccgtcgagcggatagtcgacgcgctggcccgccgcctcggcatggacccggcggaggtccgcaggaagaacttccacccgcccttcgacgagccgcgcacccagcccgcgggcatccagtacgactccggcaactacgagatggtcctcgaccgggtgatggagctcgcggactacgaggggctgcgggaggagcagcgcaggaggcgggaggccggggacccggtgcagcttggaatcggcttctccacctacaccgagatctgcggcatcgccccctcacaggtggccgcggccctgggtggcggcggcgccggctgggaggcggcctccgtgcgggtgctctccagcggcaaggtggaggtggtgaccggcacctcgccgcacggccagggacacgtcaccagctggtcgcagatagccgccgacgccctgggcgtctccccggacgacgttgaggtgatccacggcgacaccgactcggcgccctggggccgggacacctacggctcaaggagcctccccgtgggcggcgtggccgtctacctcgcggcccagaaggtcgtcgagaaggccaagaagatagcggcgcacatgctggaggccgccgagggcgacatagagttcgagggcgggcgcttctcggtgcggggctcccccgaccgcaacgtcaccctccagcaggtggccggagccgccttcctggccgcggatctgcccgagggtatggagcccggcctctctgcggagaccttcttcgacccgccgaacttcaccttcccgttcggggcccacatctgcgtggtggaggtggataccgagaccggcaaggtgagaataagggactacttcgccgtggacgactgcggtccggtggtcaacccgcagatagtggacgggcagctgcacggcgggatagcccagggcgtggcccaggctctttatgaggaggccgtctacgacgaggacggcaacctggtcaccggctccatggtcgactacctggtccccggcgcgcccgaggttccgcgctacaccctggagcgcacggtgaccccctcgccctccaaccccatgggggtgaagggcgtcggcgaggccgggaccatcggctcgccgccggcggtcataaacgccgtcatcgacgcgctctcccacctcggggtcacccacatagacatgcccgccacccccgcccgcgtctggcaggccatccaggaggcccggggccgggaggccagcgccggcgaggccagccgcaccgggcgtccggcgcaggcgccggaccacgaggagcacccgggaggtgagtcgctgtga

SEQ ID NO: 115999 - protein, 814 aa, Rubrobacter xylanophilus DSM 9941
MTETAQRYVGGGVLRKEDPALVTGRATWTDNIKLPGMLHFALVRSPMAHAKINRIDVSAAREQPGVVAVFTAEDLKDEWAAPIPCGWQVTEDLRVPEHWPLTGDKVRYLGDPVAVVVAEDRYAAKDALEFVEVDYEPLDVVTDMQEALKEGAPLVHEELGTNECYTWPMQNGDIDEAFGRADVVVKERYIQQRLIPNAIEPRAVVAQPEPGGSFTVYSSTQVPHILKSVLSAICGVPEHRLRVVAPDVGGGFGSKLNVYPEEALALALSRRLGVPVKWVEERSENYLATVHGRDQIQDIEVAATSDGKILGMKVELLADMGAYLQLGTTVVPLLGAFMYPGLYDFDAYSFKCTAVYTNKTPTDAYRGAGRPEAAYAVERIVDALARRLGMDPAEVRRKNFHPPFDEPRTQPAGIQYDSGNYEMVLDRVMELADYEGLREEQRRRREAGDPVQLGIGFSTYTEICGIAPSQVAAALGGGGAGWEAASVRVLSSGKVEVVTGTSPHGQGHVTSWSQIAADALGVSPDDVEVIHGDTDSAPWGRDTYGSRSLPVGGVAVYLAAQKVVEKAKKIAAHMLEAAEGDIEFEGGRFSVRGSPDRNVTLQQVAGAAFLAADLPEGMEPGLSAETFFDPPNFTFPFGAHICVVEVDTETGKVRIRDYFAVDDCGPVVNPQIVDGQLHGGIAQGVAQALYEEAVYDEDGNLVTGSMVDYLVPGAPEVPRYTLERTVTPSPSNPMGVKGVGEAGTIGSPPAVINAVIDALSHLGVTHIDMPATPARVWQAIQEARGREASAGEASRTGRPAQAPDHEEHPGGESL

SEQ ID NO: 116000 - DNA, 2388 bp, Rubrobacter xylanophilus DSM 9941
  CDS (1)..(2388): transl_table=11
atgacgggtaactgtacatcgtgcagaccggagcggtgggtcggccagtccgttcccagggtcgaggacgctcgccacctcactggcaggggcatgttcgtggatgacatcgaacgcccgtggatcctctacgctgctttcgtccgatcacccttcagtgcagcacacattcaagaggtgtcggtcgaagaggccctgaaggtgcccggcgtggaaacggtgataaccgccgccgatctcgacggtttccccggcatcaaacccctactccatcgtcccgagttcgtcccggtcgagatgccattgctttgcggaagggaggtccggcacgccggcgagcccgtggctttggtgctggcggattgcccacatgtagcagaggatggggccgaagccgttgtggtcaagtacgaacgccgggaacctgtggtctcgctagatggagcccttgccgagggtgcaccgagggtgcacgaagaaatgaaagacaacgtgcttctcgacgtgagtgatcctgaaaacccggagcttgacaagatcttcgagcaagcccctgtcgtcgtcgcagccacgttcgatacgggacggctctcggcggttcccatggagggacgggcctgcctcgccgagtgggacgcgcgggaagacacactgatcctgtacacctccacacaggttccgtttatagtgcgtaccgccgttgctgatgccctcaaactcccgcagcaacgcgtccgcgtcatagctcccgacgtaggcgggggcttcgggcagaagtgcgtcgtcagccgcgaagagttgctggtgtccatcgccgccctgcgtctgggtcgtccggtgaagtggaccgaggaccggcaagagaacctcacggcggcgttccacgggcacgagcagcagtacaaagcgtccgccgccttcgacgagaagggaaagctgctgggtctgaaagtggatatcctgtgcgacgtgggggcttactcgtgctatcccttcacctgcggggtagagccgctcatggcggcgacggagatgcctggtgtctatcagttggaacactaccaatctcgggcacgcgcggtagcgacaaacaaagccccgatggctccgtaccggggtgtgtcgcgtcctcagttcaccttcgtcatggaacgtctgatgcagaaggcggccaaacgcctggggctggacgctgtcgagatccggagacgcaaccttccttccttagaggactttccctatgagagccctacgggtgtagtttacgaccccggcagctacgtcgaatccctcgagaagtgcgccaaggtgttcaattttagcacctggaaagagagacaggaaaaagcaagacgtgcagggcggctgattgggatcggcttctcctgttttggagagcggaccggttacgggacgcgcgcgttcgcgctcaggaagatggctattaccccgggcgcagataatgctcgcctgaggatggatccttcggggaacgtcaccctcacggtcggcacgtgcggtcacggacagggacatcagactactcttgcccagatcgccgccgacgagctcggcttaccccttgagaagatagtggtgcgccaaggagacactgaagctgcgccctacggctgggggaccttcgccagccgctcggcggtcgtcggaggtggagctacgaagagggctgccgcactccttgcagagcggatcaaggaggtcgcgagctacctactcgaggctgccagcagggatctcgagatcaaggagggcagggttttcgtggttggatcgcctgaccgctacgtcacggtggagcaggtggcacgcgcggtccaccttgaagcccacctgctgcccgagggagaggcgggaatgctggacgccagcgccggtttcgaccctcctggcacgttctcgaacgctacccacggcgtcgtggtcgaggtggacccggaaaccggcgacgttcgaatcgaacgctacgtagtggtggaggactgcgggatcatgatcaaccctatgatagtcgagggccaggtgcggggaggcgtggcccaggggatcgctgcagctctctatgaacagtttgtctacgacgatgaagggcagcccgtgacctccacactgatggactatctcgtcccgaccacgacggagataccaccaatcgagatccttcacctggagacgccctgcgaatacacagagacgggagccaaaggtatgggagagggcggaaccatgggagcgcccgccgccgtagccagcgcggtggccgacgccctgtcacacctcgatatcgagatcgaccacctccccatcacgccagaccgtctgcgtgctgccatcaaggagtcgagagcctatggagggagcgctaaatga

SEQ ID NO: 116001 - protein, 795 aa, Rubrobacter xylanophilus DSM 9941
MTGNCTSCRPERWVGQSVPRVEDARHLTGRGMFVDDIERPWILYAAFVRSPFSAAHIQEVSVEEALKVPGVETVITAADLDGFPGIKPLLHRPEFVPVEMPLLCGREVRHAGEPVALVLADCPHVAEDGAEAVVVKYERREPVVSLDGALAEGAPRVHEEMKDNVLLDVSDPENPELDKIFEQAPVVVAATFDTGRLSAVPMEGRACLAEWDAREDTLILYTSTQVPFIVRTAVADALKLPQQRVRVIAPDVGGGFGQKCVVSREELLVSIAALRLGRPVKWTEDRQENLTAAFHGHEQQYKASAAFDEKGKLLGLKVDILCDVGAYSCYPFTCGVEPLMAATEMPGVYQLEHYQSRARAVATNKAPMAPYRGVSRPQFTFVMERLMQKAAKRLGLDAVEIRRRNLPSLEDFPYESPTGVVYDPGSYVESLEKCAKVFNFSTWKERQEKARRAGRLIGIGFSCFGERTGYGTRAFALRKMAITPGADNARLRMDPSGNVTLTVGTCGHGQGHQTTLAQIAADELGLPLEKIVVRQGDTEAAPYGWGTFASRSAVVGGGATKRAAALLAERIKEVASYLLEAASRDLEIKEGRVFVVGSPDRYVTVEQVARAVHLEAHLLPEGEAGMLDASAGFDPPGTFSNATHGVVVEVDPETGDVRIERYVVVEDCGIMINPMIVEGQVRGGVAQGIAAALYEQFVYDDEGQPVTSTLMDYLVPTTTEIPPIEILHLETPCEYTETGAKGMGEGGTMGAPAAVASAVADALSHLDIEIDHLPITPDRLRAAIKESRAYGGSAK

SEQ ID NO: 116002 - DNA, 2328 bp, Rubrobacter xylanophilus DSM 9941
  CDS (1)..(2328): transl_table=11
atgagcgttatcggacagcgtatcggacgcctcgaagaccggcgtctgttgcgtggcctcggccacttcgtcgacgacgtcgaccgggcgggacagttgtggatgagggtgctcagggctccgctcgctcatgcccggatcttgagcatcaaggcggagaaggcgctcgcgctccctggggtcgagatggttctcaccggggacgacctcgcctgggtaaaacccattcctgtccgcacgcgcaccgagcacccactcgacgacttcctgcagcctgtactcgcgcgggagagggtgcgctacgtgggagagcccgtcgccgtggtactggcggatgacgcttacctcgccgaggacgcagcggagttggtcgaggtggagtacgaggaactacccgtcgtgctggacgcccgagaggctattcgatctgatgccccgcaactcagggacgaggttgggaatgaagcggctacgctatccatgggctacggagacatcgaagaggcgttccggaacgcctcgcgggtcatagaggcagagttcaagatcggacgtcactcgggagtcccactagaaaccaggggacttgtagccgaatacgatcgcggcagcgatcacctcaccatctggggctcgaccaaggtgccgcatttcaaccggcgagtgctcgcgcagcttctggacatgcccctcagcaggataagcataaaaaagactgacgcagggggcggcttcggtgtcagaggtgagttctacccagaggactttctcgttccctatctcgctcgcaagaccggtcggccggtcaagtggatcgaggatcgagctgaacatctcatagcaacgaaccattccagggagcaacgtcaccgtctccaagctgctttcgataacgagaatcggctgctggccctgcgtgacgaggtgtggcacgacaacggtgcctacgtccgcacccacggcgttatcgtagccgacctgacgctggcgatgctaccagggccctacagagtgccggcgtacgaaggcacggcgcatgttgcgctgacgaacaagaccccgtgcggcaccttccgcgggccgggccgcttcgagtcgacgtttgcccgtgagcacttgctcgatgtggccgccgcagagcttggcgtcgaccggctggagttgcggagaatcaacctcctcgacccttcagagataccgcacgtcagaccgttgtcgacactcagcaccgatgtgatcctcgatgccggggattacgggggcctgttggacaaggcactgcaacactccggcttcgaggattgggtggaagaggcgcgggagttgcgcgatcaggggcgcctagtcgggaccggcattggctacttcctggagaagagcggtctgggcccctacgaggaggccaccgtcgaggtcgatcccaccggctccgtccgggtgctcaccggcggcgcgtcgcttggacagggcatcgagacggtcctagctcagatcgccgcagaccagctgagtgttcctccggaggagatcgaggttatccacaccgacaccgacttgctccccgacggggtcggctcgtgggcgagccgatccaccgtagtgggaggcagcgcagtgatgctggcggcgaaggcaacggtggagaaggcgttgagggtcgcggccgaggtgctagaagcctcgaccgaagatctgtttctggagtcatcagaggtgaaggtagcgggttcacccgacaaggccttaaccctaggaaagttggcggaggcatgtgatccccaacgcagcgctgccatgggagaggaaccaggactcggcgctcgccgcaccttttcggtggaacacatgacctacccatacggagtgcatctggcgcaggtggaggtagatccagaaaccggaggggtagaggtcaggcgttactttgtcgcctacgagatcggccgcgctattaatcccacgctcgtcgaggggcagctaatagggggagcggcgcagggtatcggagggtcactgttcgaagagttccgctacgacgagtcgggacagcctctcgcctcgacctttatcgactacttggagccgacggtcgctgagattccccaagtgaggaccctcatctgcgaagacgcgccatcgcccggcaaccccctagggctcaagggagccggcgagggaggggccgtaggatgcggagcggccatagccggtgctgtcgaagacgcgctgaggacgccgggggcgatcacagagttgcccataacccccgataggatacgcggcctcgcgcgccgcagagacaggccgacccgcctcggggctacgtaa

SEQ ID NO: 116003 - protein, 775 aa, Rubrobacter xylanophilus DSM 9941
MSVIGQRIGRLEDRRLLRGLGHFVDDVDRAGQLWMRVLRAPLAHARILSIKAEKALALPGVEMVLTGDDLAWVKPIPVRTRTEHPLDDFLQPVLARERVRYVGEPVAVVLADDAYLAEDAAELVEVEYEELPVVLDAREAIRSDAPQLRDEVGNEAATLSMGYGDIEEAFRNASRVIEAEFKIGRHSGVPLETRGLVAEYDRGSDHLTIWGSTKVPHFNRRVLAQLLDMPLSRISIKKTDAGGGFGVRGEFYPEDFLVPYLARKTGRPVKWIEDRAEHLIATNHSREQRHRLQAAFDNENRLLALRDEVWHDNGAYVRTHGVIVADLTLAMLPGPYRVPAYEGTAHVALTNKTPCGTFRGPGRFESTFAREHLLDVAAAELGVDRLELRRINLLDPSEIPHVRPLSTLSTDVILDAGDYGGLLDKALQHSGFEDWVEEARELRDQGRLVGTGIGYFLEKSGLGPYEEATVEVDPTGSVRVLTGGASLGQGIETVLAQIAADQLSVPPEEIEVIHTDTDLLPDGVGSWASRSTVVGGSAVMLAAKATVEKALRVAAEVLEASTEDLFLESSEVKVAGSPDKALTLGKLAEACDPQRSAAMGEEPGLGARRTFSVEHMTYPYGVHLAQVEVDPETGGVEVRRYFVAYEIGRAINPTLVEGQLIGGAAQGIGGSLFEEFRYDESGQPLASTFIDYLEPTVAEIPQVRTLICEDAPSPGNPLGLKGAGEGGAVGCGAAIAGAVEDALRTPGAITELPITPDRIRGLARRRDRPTRLGAT

SEQ ID NO: 116004 - DNA, 2358 bp, Rubrobacter xylanophilus DSM 9941
  CDS (1)..(2358): transl_table=11
atgagcggaacagagaccgtacccaaggcgccgccgcgcggcatgcccggggcggcggagtccaggccgggggacatcggggagagcacccggcgcgcggacggcgtgcccaaggtccggggggagttcgggtactcctcggacctgtggatggaggacatgctgtggggggccaccctcaggagcccccacccgcacgccaacatctggtccatagacacctccgaggcggaggccatgcccggggtctacgcggtgctcacccacgaggacgtccccgggcgcaaggtctacggcatggaggtgcccgaccagccggtgctcgcctgggagaaggtccgctaccagggcgagccggtcgcgctggtggcggccgaccacccggagacggcccggcgggcgctgcagaagataaaggtcgagtacgaggtgctggagccgctcaccgacgccgaggaggcgatgaaggagggcgcgcccaggctccacctctccggcaacctcctgcggcacatccacgtccggcacggcgagcccgagagcgcaaaggccgaggtggtcgtgagcggggagtacgaggtcgggatgcaggaccaggcctttctggggccggagtccgggctcgccgtccccgacgggcagggcggggtggacctgtacatctccacccagtggctgcacatagaccgggaccaggtagccgagtccctggggctgccgcccgagcgggtgcggctcgtgctctccggcgtcggcggggccttcggggggcgggaggacctcagcatgcagatccacgcctgcatgctcgccctggagacggggcggccggtgaagatggtctacaaccgggaggagtccttcttcgggcacgtccaccggcacccgtgcaggatgcgctacgagcacggggccagaaaggacggcaccctcgtctacgtgaaggcccgcatcgtcctcgacggcggggcctacgcctccagctccaacgccgtgtgcctgaacgcggccaccttcgcctgcggcccctacaaggtgccgcacgccgaggtcgactcctacatgctctacaccaacaacccaccgtgcggggcgatgcggggctttggggccgtgcaggtctgcttcgcctacgaggcgcagatggacaagctcgccagggagctggggatggaccccgtagagctgcgcgtgaagaacgccatagccccgggcgaccgcttccccttcgggcaggaggtgcccgagcccgcgccggtggccgagcttctggagcgggtgaggcggatgccgctgcccgaggaggaggcgctcgcggggagggacctgcgcgagcttccgggcggggtctccaacgtcacccacggcgagggggtcaggcggggcgtcggctacgccgtgggcttcaagaacatcggctactccgccggcttcgacgactactcgacggcgcgggtgatcctctcggtcgaggagggcgagccggtggcgcaggtgcacaccgccgcctgcgaggtcgggcagggggtcatcaccgtgcaggcccagatcgcgcgcagagagctcggggtggagcgggtgcgggtgctcccggcggacacccgggtcggttctgcgggctcctcctccgcctcccgccagacctacatgaccggcggggcggtccggctggcctgccgggcggtgcgcgagagggtccttgcgcgggtgcgggaggagctcggggagggaccggaggggctctccgtccggggcggcaacgtcgtcgacgctgcggggagggtggtggtgccgctcgccgagctgctcggcgaggagggcatcgaggagaccgtcgagttccaccaccggcccacccacccgctcgacgagaacggccagggcgacgcccacgtgcagttcgcctacgccgcccaccgggcggtggtggaggtggacaccgagctggggctcgtgcgggtggtggaggtcgcgaccgcccaggacgtgggcaaggccataaacccgcaggcggtggagggccagatagagggcggcatagcccagggcctggggctcgcgctcatggaggagatccaggtgcgggagggcaaggtgcagaacgcctccttcaccgactacctgatcccgaccatcctggacatgccctcggtgagggcggagatcctggagctcgccgacccggaggccccctacggcctcaagggggtgggcgagccgccgaccatagcctccaccccggcgatcgtggccgccctgcgcgacgccaccggaagggagctcaaccgggttccggtgcggccggagcagatcgtggggatagccgagaggccggcagcgccggagaggatccgctag

SEQ ID NO: 116005 - protein, 785 aa, Rubrobacter xylanophilus DSM 9941
MSGTETVPKAPPRGMPGAAESRPGDIGESTRRADGVPKVRGEFGYSSDLWMEDMLWGATLRSPHPHANIWSIDTSEAEAMPGVYAVLTHEDVPGRKVYGMEVPDQPVLAWEKVRYQGEPVALVAADHPETARRALQKIKVEYEVLEPLTDAEEAMKEGAPRLHLSGNLLRHIHVRHGEPESAKAEVVVSGEYEVGMQDQAFLGPESGLAVPDGQGGVDLYISTQWLHIDRDQVAESLGLPPERVRLVLSGVGGAFGGREDLSMQIHACMLALETGRPVKMVYNREESFFGHVHRHPCRMRYEHGARKDGTLVYVKARIVLDGGAYASSSNAVCLNAATFACGPYKVPHAEVDSYMLYTNNPPCGAMRGFGAVQVCFAYEAQMDKLARELGMDPVELRVKNAIAPGDRFPFGQEVPEPAPVAELLERVRRMPLPEEEALAGRDLRELPGGVSNVTHGEGVRRGVGYAVGFKNIGYSAGFDDYSTARVILSVEEGEPVAQVHTAACEVGQGVITVQAQIARRELGVERVRVLPADTRVGSAGSSSASRQTYMTGGAVRLACRAVRERVLARVREELGEGPEGLSVRGGNVVDAAGRVVVPLAELLGEEGIEETVEFHHRPTHPLDENGQGDAHVQFAYAAHRAVVEVDTELGLVRVVEVATAQDVGKAINPQAVEGQIEGGIAQGLGLALMEEIQVREGKVQNASFTDYLIPTILDMPSVRAEILELADPEAPYGLKGVGEPPTIASTPAIVAALRDATGRELNRVPVRPEQIVGIAERPAAPERIR

SEQ ID NO: 116006 - DNA, 2346 bp, Mesorhizobium sp. BNC1
  CDS (1)..(2346): transl_table=11
atgggcatcgaaggcatcggcgcgcgggtcacgcgcaaggaggaccagcggttcgtcaccggtctcggccgttacgtggacgacatggtcgtccccggcatgaaatatgcggtttttgtgcgcagcccgcacgcacacgcgacgataaaggcaatcgatacggcctcggcaaaagctatgcccggcgtgattggcgtgctcaccgggccggagctcaagagcgacgggatcggcaatatcatttgcggctggatgatccactccaaggatggcagtcccatgaagatgggagcctggtcgccgctcgccaccgataaagtgcgctatgtgggcgatgctgtcgcgatcgtcgtggccgaaacgcgaggacaggcccgcgacgcggcggaggcggtagcggtcgattatgacgagcttcccgccgtcaccgatgcgcaaaaggcgctggaagcaggcgcgccgcaaatccatccggaagccccgaacaatctcatcttcgattgggagctcggcgattccgcggatgctgagcgggcgcttgcgggcgcggcccacgtcacccgcatgcggatcgtcaacaaccgcctcattcctaacgcaatcgagcctcgcgcggctctcgggcattatgacaaggcggaggaccatttcacgctctggacaacgagtcagaacccgcatttggcccgcctcgtcatgagcgccttctacaatgtcgcgccggaaaacaagctgcgcgtcatcgcgccggatgtgggcggcggtttcggctccaagatctacatctatccggaggagatcgtctgcctctgggcttcgaaacgcaccggcgtaccggtgaaatgggtggcggaccgcacggagagcttcctctgtgatgcccatggacgcgatcatgttacggaagtctcgatgggcttcgacgcggacaaccgaatcgtgggcctgaaggtcgacaccattgccaatctcggcgcctatatgtcgctcttctcctcctgcgtgcctacctatctctacgccaccttgctttccggccagtacgaaatcccgcatattcactgcaacgtgcgcaccgtctacaccaacaccgcacctgttgacgcctatcgcggcgcgggacggccggaggcaacttaccttttggagcgggtgatggagaccgccgcgcgcgagcttggcgtctcgccggcggaattgcgccgcaagaatttcatccgcgaattcccgcatcaaacgccggtgatcatgaattatgacgccggggattatgaggcgtcgctcgaagctgccatgcgagctgccgattatgcaggcttccccgcccgccgcgaggaggcgaagcggcgcggcaagctgcgcggcatcggcatgagctgctacatcgaggcctgcggtcttgcgccctcgcaggcggtgggcagccttggcgctggcatcgggctttgggaatcggctgaggtgcgcgtgaacgccgccggcacgatcgaggtgctcactggctcgcacagccacggccagggccacgagaccacctttgcccaggtggtggcggacaggctgggcgtgccgcttgattcggtgtccgtcgtccatggcgataccgacaaggtgcagatgggcatgggcacctatggctcgcgctccggggctgttggcatatcggccatcgtgaaggctctggacaaggtggaggcaaaggcgaagaagatcgccgcccacctgctcgaggcggacgagggcgacatcgtcatcgagaacggcgaggtgaaggtggccggcacggaccgcagcctgccctggttacaggtggcgctcgccgcctatacggcgcacaacctgccggctggcatggagccgggcctgaaggagacctccttctatgatccgaccaatttcaccttccccgcgggctgctatatctgcgaggtggaggtcgatcccgagacgggcgtgacggagatcgtgcagttcgttgcggcggacgatttcggcaccatcatcaatccccttatcgttgaggggcaggtccatggcggcatcacgcagggcgtgggacaggcactgctcgaaggctgcgtttacgaaccgtcttccggccagctcgtcacggcgtcctatatggactacaccatgccgcgtgcgagtgacgtgccctccttcctcgtttcgacaaccgtcacgccaagcccgagcaatccactgggcatcaagggctgtggagaggcgggcgctatcggctccccgcctgccgtgatcaatgcgataacggatgccatcggcaacaacgacctgaccatgccggccacgccgcaaagggtgtggacggcgctccggaagcactga

SEQ ID NO: 116007 - protein, 781 aa, Mesorhizobium sp. BNC1
MGIEGIGARVTRKEDQRFVTGLGRYVDDMVVPGMKYAVFVRSPHAHATIKAIDTASAKAMPGVIGVLTGPELKSDGIGNIICGWMIHSKDGSPMKMGAWSPLATDKVRYVGDAVAIVVAETRGQARDAAEAVAVDYDELPAVTDAQKALEAGAPQIHPEAPNNLIFDWELGDSADAERALAGAAHVTRMRIVNNRLIPNAIEPRAALGHYDKAEDHFTLWTTSQNPHLARLVMSAFYNVAPENKLRVIAPDVGGGFGSKIYIYPEEIVCLWASKRTGVPVKWVADRTESFLCDAHGRDHVTEVSMGFDADNRIVGLKVDTIANLGAYMSLFSSCVPTYLYATLLSGQYEIPHIHCNVRTVYTNTAPVDAYRGAGRPEATYLLERVMETAARELGVSPAELRRKNFIREFPHQTPVIMNYDAGDYEASLEAAMRAADYAGFPARREEAKRRGKLRGIGMSCYIEACGLAPSQAVGSLGAGIGLWESAEVRVNAAGTIEVLTGSHSHGQGHETTFAQVVADRLGVPLDSVSVVHGDTDKVQMGMGTYGSRSGAVGISAIVKALDKVEAKAKKIAAHLLEADEGDIVIENGEVKVAGTDRSLPWLQVALAAYTAHNLPAGMEPGLKETSFYDPTNFTFPAGCYICEVEVDPETGVTEIVQFVAADDFGTIINPLIVEGQVHGGITQGVGQALLEGCVYEPSSGQLVTASYMDYTMPRASDVPSFLVSTTVTPSPSNPLGIKGCGEAGAIGSPPAVINAITDAIGNNDLTMPATPQRVWTALRKH

SEQ ID NO: 116008 - DNA, 2499 bp, Rhodococcus sp. RHA1
  CDS (1)..(2499): transl_table=11
atgagcgtcacgaaaccccgcaccgagcccgcgcccaccacgggtgccgacgcgcccgccgcgtcggagaagttgttcggcaagccgattccccgcacggaggacgcccggctcctgtccggcaacggccgctacctcgacgatctgggtcacaacgcgctcatcgccgcgttcgtccggtcaccgcacgcgcatgcccgcatcacggggatcgacatcgatgccgcgctcgacctgcccggtgtgcacgcgatctacacgtacgacgacctcgtggacgactccccggagatggcggagaatctccccctcctgatcccgcatccggcgatcaccgccccgcgcaacgggtatccgctcgccaaggacgaggtgaatcatgtcggcgaggcgatcgcgatggtggtcgccgacaaccggtacgtcgccgaggacgcgtgcgccaagatcgacgtcacgtacgagatgctcccaccggtcgtgggtatcgacgtggcgcggcaggcggacaacgcggtgcacgcggacgtccccgacaacgtcgcggcgcacctgcagcacggattcggcgacgtggacgcggaactggcgaatgcgccgcaccggctgacgctgaacctcgagatcgagcggtcggcgtcgatgccgatggagggcaagggcgtctacgcgcgctgggacaccgacgagcaggcgctcacgttctggacgtccacgcagacatcgacgtcggctcgcgccgcgatcgcggcacgactgaagatggcgcacaacaaggtccactgcatcgcgcccgatgtcggtggcggattcggcgtcaagatcgtccacccgtggccggaggaggtcatggtcacctgggccgcgcggcggctcgggacggcgggcatctcgagcgaggtcaaatgggtcgaggaccggcgcgagcatttcgtgtcgagcgcgcacgagcgcggccagatccaggaggtgacggtcggattcgacgacgacggcacactcctcgcgttcgacttcacgttctggcacgacaacggcgcctacctgccgtacggcatcatcgtcatgctgaacacgtcgacgcaggtgctcgggccgtacaagccgaaatcgttccgggtggacgcgtactcgctctacacgaacaccgtcatcgtcacgccctaccgcggcgccggccgaccgcaggccgtgttcgcgatggaacgggcaatggacgcgatcgcgaaatacctcggcaaggacgtcatcgaggttcgcgaacacaacttcatccggcccgaggaaatgccgtacgacttccacctcaccttccaggacggccgcccgctgatctacgacaccggcgactaccaggccgggatcgacaagctcaagaagctcatcgactgggacgggttcgccgagtacaagaaacaggcgaaggccgaaggccgggccgtgggcatcgggatcggcgcctacgtggaaggcaccggaccgggcccgtacgagggcgcccacgtcctcgtcgagacgtccgggaaggtcaaggccgcaacgggtctgaccacccaggggcagggccaccagacggcgttcgcgcagatcgtcgcggacgacctcggcgtgccggtcaccgacgtggagatcgtcaccggcgacacccgtcgattcggttatgccgtcggcacgttcgcgtcccgcggcgccgtgatgtccggttcggcgttccacgtggccgcgcagatggtggcggagaaggcccgcacgatcgccggtgaggcgctgaacctcgaccccgccgaactggaacttcgcggtgggcacgtgtgcaagatcggcacgctgcccggcgccgagggcacgtccatctcgctgggtgtggtcgccgtgctgtcgaatccgctgcgctacgcgttcgacgacgcgtcgcggcaggccaccggattcgcgaaagccgatacggacatgacgattccgccggtccgggagggtgaacaacccgggctcgaggccaccggctactactcgcccccgacgtcgacgttcgcgtccggtgtgcacgcggcgatcgtcgaaaccgatccggtgacggcggagatccacgtgcggcggtacgccgtgatccacgactgcggcaacgtcatcaacccgcggatcgtcgagggccaggtcatgggcgccgtcgcgcagggtgtcggcggcgcgctgtacgagaagatcgtctacgacgagcacggccagatgctcaacgcgtcgtacatggatttcctgatgccgttcgtcaccgagatgcccgactcgctcgagatggaccacaccgtcaccccgtccggtctcaatcccctcgggatgaagggcgcaggcgaggcgggcgtgatcccgacgtccgccgtcatcgcggcagcgatcgaggacgccgaaggcatcccgatcacctccatgccgatatccccttcagagttgttcgagcttcgcctcgcacacgcgtcgtcacagagcaaggagaacgaatga

SEQ ID NO: 116009 - protein, 832 aa, Rhodococcus sp. RHA1
MSVTKPRTEPAPTTGADAPAASEKLFGKPIPRTEDARLLSGNGRYLDDLGHNALIAAFVRSPHAHARITGIDIDAALDLPGVHAIYTYDDLVDDSPEMAENLPLLIPHPAITAPRNGYPLAKDEVNHVGEAIAMVVADNRYVAEDACAKIDVTYEMLPPVVGIDVARQADNAVHADVPDNVAAHLQHGFGDVDAELANAPHRLTLNLEIERSASMPMEGKGVYARWDTDEQALTFWTSTQTSTSARAAIAARLKMAHNKVHCIAPDVGGGFGVKIVHPWPEEVMVTWAARRLGTAGISSEVKWVEDRREHFVSSAHERGQIQEVTVGFDDDGTLLAFDFTFWHDNGAYLPYGIIVMLNTSTQVLGPYKPKSFRVDAYSLYTNTVIVTPYRGAGRPQAVFAMERAMDAIAKYLGKDVIEVREHNFIRPEEMPYDFHLTFQDGRPLIYDTGDYQAGIDKLKKLIDWDGFAEYKKQAKAEGRAVGIGIGAYVEGTGPGPYEGAHVLVETSGKVKAATGLTTQGQGHQTAFAQIVADDLGVPVTDVEIVTGDTRRFGYAVGTFASRGAVMSGSAFHVAAQMVAEKARTIAGEALNLDPAELELRGGHVCKIGTLPGAEGTSISLGVVAVLSNPLRYAFDDASRQATGFAKADTDMTIPPVREGEQPGLEATGYYSPPTSTFASGVHAAIVETDPVTAEIHVRRYAVIHDCGNVINPRIVEGQVMGAVAQGVGGALYEKIVYDEHGQMLNASYMDFLMPFVTEMPDSLEMDHTVTPSGLNPLGMKGAGEAGVIPTSAVIAAAIEDAEGIPITSMPISPSELFELRLAHASSQSKENE

SEQ ID NO: 116010 - DNA, 2712 bp, Rhodococcus sp. RHA1
  CDS (1)..(2712): transl_table=11
atgaagttgacggtcgacggacagtcggtggatgccgacccccggcccggtcagtgcctgcgcaccttcctgcgggaacagcagcggttcgcggtcaagaagggctgcgacgccggcgattgcggcgcctgttccgtactgctcgacggcgtcccggtgcactcgtgtgtggtgccggcgcaccgcgccgagaaccgcgaggtgaccactgcggccggtctcggcagtcccgaccgactccaccccgtgcagcagcagttcgtcgacgcggcgggcttccagtgcgggttctgtacacccgggattgtcgtgaccgcgtccgcgctcgactccggtcaacgcgccgacctgccgcgctcactgaagggaaatctgtgccgctgcaccggctatcgcgccattcgcgacgctgtcggcggcgtgtgcaccaccgaatcggaccgtgccggtgagtcgttcggccggtccattcccgcgcccgccgccgcccgggtggtgtgcggcgccgagccctacacactcgacctggccgtcgagggtctgacgcacatccagatactcggcagcccgcatgcgcacgcccgcatcacccgactcgacacgtccgccgcggagaggctgcccggcgtccacgcggtgctcacccaccgcgacagtcccgacgtcgccttctccacggcccgccacgagttccgcaccgacgaccccgacgacacctacgtgttcgacacgatcctccggttccgggggcaacgggtcgcggccgtcgtggccgactccgtcgacatcgcccggcgtgcagtggaactgatcgacgtggagtacgaagtactggaagcggtcttcgatcccgacctggcacgccgtcccggtgcccccctgctgcacggtgacaagggcgccgattcccggatcgcggacccggcccggaacctggtggcggaagtccacggcgaagtcggcgacctcgctgccgggctcgcggcggcgcgggacacgggtgccgtggtggagggcacgtggcagacgcaacgcgtgcagcacgcgcatctcgaaacccactcggccatcggctggctcgactccgacgggcgtctcaccctccgcagcagcacccaggtgcccttcctcgtccgcgacgaactcgcccacctgttctcgcgcgaccgctcacaggtccgggtgttcaccgcccgcatcgggggcggcttcggcgccaaacaggaaatgctggtcgaggatctcgtcgccctcgccgttctgcgtaccggcagaccggtccagtacgagttcacccgctccgaccagttcacgatcgccccgtgccggcatcccatgcgggtctcggtgaaggtcggcgccgacggcgacggaaagctgacggcgctcgccgtcgacgtgctctcggacgccggtgcgtacggcaatcattcggtgggcgtgatgttccacggctgcagcgaatccgttgccctgtaccggtcgccgaacaagcgggtggacgcccaggccgtctacaccaacaacctgccgtccggggcgttccgcggctacggtctgggccaggtcatcttcgcggtggaatccgcgctcgatcagctggcgacgcagctgggcatcgatccgttcgaactgcgccgccgcaacgtggtcgttccgggtgacgatttcgtcgacgccgaggtggagcacggcgacctcacatacggcagttacggactcgatcaatgcctcgacctggcggaggccgcgctgcgccgcggcaacgacgtgcgcccgccggacggcccgcagtggcgggtcggtgagggcatggcggcgtcgatgatcgcgaccattccgccgcgggggcacttcgcggacgtgtcctgcaccctcgtcgaaggtggccggtacgaactgcgggtgggcaccgcggagttcggcaacggcaccaccaccgtccacgcccagctcgccgcgtccgcgttgggcaccaccgccgaccggatcagcgtgctgcagtccgacaccgacgtcgccgcgcacgacaccggcgcgttcggttcggcaggcacggtggtcgccgggaaggcggtccatcttgcgggaacccggttacgggagcagctgttcgaggttgctcgccgcgtcgcgggtgcgaccgaggacgccgactgcgcgctgacacccgaggccgtcgaggtggctgggcgggtcgtcgaactcgacaagctggtgcccgagggaccgatccgcgccgagggcaggcacgatggcaccccccgctcggtggtgttcaacgtgcacgcgttccgggtggccgtcgacaccgtcaccggggaggtccgcatcctgcagtccatccaggcggcggatgcgggtacggtcctcaacccgcagcagtgccgcgggcaggtcgagggcggcgtcgcgcaggcgatcggcagcgcactgtacgaggagatcctgctcgacggcgccgggacggtgctcaacccgcagctccggaattatcacctcccgcagctcgtggacgtgccggacaccgaggtctacttcgcggacacctacgacgaactgggcccgcacggcgccaagtcgatgagcgagtccccgtacaacccggtggcccctgccctggccaatgcgatcgcggacgccaccggcgcccggctccgtcggatcccgatgacccccgccgccgtctggcgtgcgctcccgcgcccgtga

SEQ ID NO: 116011 - protein, 903 aa, Rhodococcus sp. RHA1
MKLTVDGQSVDADPRPGQCLRTFLREQQRFAVKKGCDAGDCGACSVLLDGVPVHSCVVPAHRAENREVTTAAGLGSPDRLHPVQQQFVDAAGFQCGFCTPGIVVTASALDSGQRADLPRSLKGNLCRCTGYRAIRDAVGGVCTTESDRAGESFGRSIPAPAAARVVCGAEPYTLDLAVEGLTHIQILGSPHAHARITRLDTSAAERLPGVHAVLTHRDSPDVAFSTARHEFRTDDPDDTYVFDTILRFRGQRVAAVVADSVDIARRAVELIDVEYEVLEAVFDPDLARRPGAPLLHGDKGADSRIADPARNLVAEVHGEVGDLAAGLAAARDTGAVVEGTWQTQRVQHAHLETHSAIGWLDSDGRLTLRSSTQVPFLVRDELAHLFSRDRSQVRVFTARIGGGFGAKQEMLVEDLVALAVLRTGRPVQYEFTRSDQFTIAPCRHPMRVSVKVGADGDGKLTALAVDVLSDAGAYGNHSVGVMFHGCSESVALYRSPNKRVDAQAVYTNNLPSGAFRGYGLGQVIFAVESALDQLATQLGIDPFELRRRNVVVPGDDFVDAEVEHGDLTYGSYGLDQCLDLAEAALRRGNDVRPPDGPQWRVGEGMAASMIATIPPRGHFADVSCTLVEGGRYELRVGTAEFGNGTTTVHAQLAASALGTTADRISVLQSDTDVAAHDTGAFGSAGTVVAGKAVHLAGTRLREQLFEVARRVAGATEDADCALTPEAVEVAGRVVELDKLVPEGPIRAEGRHDGTPRSVVFNVHAFRVAVDTVTGEVRILQSIQAADAGTVLNPQQCRGQVEGGVAQAIGSALYEEILLDGAGTVLNPQLRNYHLPQLVDVPDTEVYFADTYDELGPHGAKSMSESPYNPVAPALANAIADATGARLRRIPMTPAAVWRALPRP

SEQ ID NO: 116012 - DNA, 2376 bp, Rhodococcus sp. RHA1
  CDS (1)..(2376): transl_table=11
atgaccgccaccgcggaaccggaaatcgggaaggcccgcaagcgcaaggaagacgagcatctggtcacgggccgcacccgctggaccgacaacctggtgctgccgggcatgcagcacctggcgatcctgcgcagcccgttcgcgcacgcccgcatcaccggtgtcgacgcctccgccgcccgtgggatgcccggtgtcgtcgcggtcctcaccggcgccgatctcgccgacgagcagggcagcctgccgtgtgcctggccgatcacaccggacatgaagtcgccgcccgccccgtccctcgcggtcgacgccgtcaattttgcaggcgaggccgtcgcggttgtggtggcgcgcagcgcctacgaggcgcacgacgcactcgaggcgatcgacgtcgagtacgacgacctgccggtcgtgctcgatctcgcggccgcggctgccgacggcgccgacctcgtgcacccggatctcgggacgaacgtcagcgccacctggaccttcgactccgcggaggccggcaccggcggcgacgtcgagcaggccatccgcgacgccgaggtactcgtcgagcgcaccttccgccagcagcggctgatcccggcgttcatggaaccccgctcggtggtggtcgacccgaccggcgcccagatcacgatgtggtcggccacgcagatcccccacatcctgcggctgatgctggcgatgacgctcggcatcccggagcacaaactgcgcgtcgtcgccccggacgtcggcggcggtttcggcggcaagcttcaggtgacgccggaggaagtcatcgcgctgctcgtcgcgcggcgactcggcaagcccgtcaaatacaccgagtcccgcagcgaatcgatggtcgcggcgcatcacggacgcgaccagatccagaaactgacactggccgcccgccgcgacggcaccgtcaccgggatgaaggtggaactgctcgccgacatgggcgcgtacctgcggctggtcacctcgggggtgccgatcctgggcgcgttcatgttcaacggcatctacaagttcccggcgtatcacttcacgtgcaccaacgtgttcaccaacaaggtgcccaccgacgcgtatcgcggggcgggccgcccggaggcgacgttcgcgatcgagcggatgatggacgaactcgcgaccgagctgtcgctggatccgctggaattgcgggcgaagaactggatcacccacgaggagttcccgttcgacaccgtcgcgggcctgacgtacgactccggcaattacgaggccgccaccgcgcatgcgcgggagctgttcgactacgacgggctccggcgcgaacaggcggagcgccgcgagcggaaggacccggtgcaactcggcatcggggtgtccacgttcaccgagatgtgcggtctggcgccgtcgcgcaccctcggcgccctggcctacggtgccggcgggtgggaacacgcggcgatccggatgctgcccaccggcaaggtcgaggtggtcaccggttcctcggcgcacggccaggggcacgagaccgcgtggagccaggtggtcgcggatcagctcggggtgccgttcgaggacgtcgaggtgctgcacggcgacacccagacgtcgccgcggggcatggacacgtacggttcccggtctctggcggtcggggcgatcgcggtggtgaaggccgccgagaaggtgatcgcgaaggccaggcccatcgcggcgcacctgatggagtgcgccgaggacgatctcgagttcaccgagggccggttccgggtgaagggcaccgagaaggcggtcgggatcgccgacgtcgcgctcgccgtgttcgccgcgcacgacctgcccgagggtgtggagccgaatctggactccgaggccgcgtacgacccggagaacttttcgttcccgcacggcacgcacctgtgcgcggtggaggtggacaccgagaccgggaaggtgggcatccgctcgtacgtgtgtgtcgacgacatcgggcacgtggtcaacccgctgatcgtggagggtcaggtgcacggcggactcgcccagggcatcgcgcaggccctgtacgaggaggcattgtacgacgagtcgggcaccctcctgtcgggttccttcgccgagtatcacgtaccgtcggcggcggatctgccgacgttcaccacgggccgcaccgagactcccgccaccggtaatccgctcggcgtcaagggggtcggtgaagcggggacgatcgcgtccaccccggccgtcgtcaatgccgtgctcgacgccgttcgccagttcggggtgcgtgacgtcgagatgccgtgtacgccgatgcgggtctggcatgccatccacaccgctcagggaggtgcccagtga

SEQ ID NO: 116013 - protein, 791 aa, Rhodococcus sp. RHA1
MTATAEPEIGKARKRKEDEHLVTGRTRWTDNLVLPGMQHLAILRSPFAHARITGVDASAARGMPGVVAVLTGADLADEQGSLPCAWPITPDMKSPPAPSLAVDAVNFAGEAVAVVVARSAYEAHDALEAIDVEYDDLPVVLDLAAAAADGADLVHPDLGTNVSATWTFDSAEAGTGGDVEQAIRDAEVLVERTFRQQRLIPAFMEPRSVVVDPTGAQITMWSATQIPHILRLMLAMTLGIPEHKLRVVAPDVGGGFGGKLQVTPEEVIALLVARRLGKPVKYTESRSESMVAAHHGRDQIQKLTLAARRDGTVTGMKVELLADMGAYLRLVTSGVPILGAFMFNGIYKFPAYHFTCTNVFTNKVPTDAYRGAGRPEATFAIERMMDELATELSLDPLELRAKNWITHEEFPFDTVAGLTYDSGNYEAATAHARELFDYDGLRREQAERRERKDPVQLGIGVSTFTEMCGLAPSRTLGALAYGAGGWEHAAIRMLPTGKVEVVTGSSAHGQGHETAWSQVVADQLGVPFEDVEVLHGDTQTSPRGMDTYGSRSLAVGAIAVVKAAEKVIAKARPIAAHLMECAEDDLEFTEGRFRVKGTEKAVGIADVALAVFAAHDLPEGVEPNLDSEAAYDPENFSFPHGTHLCAVEVDTETGKVGIRSYVCVDDIGHVVNPLIVEGQVHGGLAQGIAQALYEEALYDESGTLLSGSFAEYHVPSAADLPTFTTGRTETPATGNPLGVKGVGEAGTIASTPAVVNAVLDAVRQFGVRDVEMPCTPMRVWHAIHTAQGGAQ

SEQ ID NO: 116014 - DNA, 2718 bp, Rhodococcus sp. RHA1
  CDS (1)..(2718): transl_table=11
atgacgtacatcgtgaacggcagggcgttcgacgaggaaccgaatccagggcagtgtctgcgcacgttcgtgcggtcgctcggtcatcacggcgtgaagaaaggttgcgatgcaggcgattgcggagcctgcacggtgtggctcgacggcgatcccgtgcacagttgcatcacgcccgcgttccgcgcggaggggcgggaggtgaccaccatcgagggcctcggttcgccggacgacctgcatccgctgcagcggcagttccgtgacgcccccgggttccagtgcggattctgcaccgcgggcatgatcatgacgtcggcgacgttcaccgacgcccagaaggaagacctgccacgcgcgctgaagggcaatctctgccgctgcaccggctatcgggccatcgaggatgccgtgaacggtgtcgccgcggtggaggtcgccgagccgggccgcgcggtcggggccagcgtcggggcacccgcggccaccgatgtggtgaccggtcgagccgagttcaccatggacaccgagatcgagggcatgctgcacctcaaggtgctgcattctccgcatgcgcacgcccgcatcgtgtcgatcgacacgacggcggcgctcgccgtccccggggtgcaccgtgtgtacacgtgggaggacgtgcctcggaagcggttcacgaccgccatccacaccgatcatctcgtcgaccccgacgacacgtacatcctcgacgacacggtccgcttcgccggtcagcgggtggtagcggtgctggccgacacggtcggcgccgcggaggagggctgccgcgaggtggtcgtcgaatacgacgtgttgcctgcggtgttcgacccggaggaggcgatggccgacggcgcaccgcagttgcacggttcggacgacccgttcgtccgcgatcccgtgcacaacatcctgctcgagctccacggggaggtgggcgacatcgaggcggggttcgccgaggccgacgtgatccacgagggcacctacttcaccccgcgcgtgcagcacgctcatctcgagacgcacgggtcgatcgcctggatggaggacggccgcctgcacgtgcgcacgagttcgcagtcgccgtcgatcgccaaggtcaagttggctcacctgttcgacctgcgccccgaccagctgcgcgtgttctgcaagcgtgtcggtggcgctttcggcggcaagcaggaggtgttctcggaggatctcgtcgcgctcgcgaccctcgacacgggcaggccggtctgcttcgagttcacccgggaggaagaattcacgacggcgtcgccgcggcatccgatgaagctgaccatcacgctcggcgcccggtcggacggcacgctcaccgcgttccaggtgcgcaacgtgtcgaacacgggggcgtacgggaatcacgggggtgagacgttgttcgcggccggtgccgccatctcggcgtaccggtgtctcaacaagaagttcgatgcgtatgccgtctacacgaacagcgtgcccagcggagcgctgcggggctacgggatgacccagcccgctttcgcggtggagtccgcgatgcacgagctggcggtcgccctcgatatcgacccgctcgagttgcggcgccgcaacatcgtccgccccggtgactcactcgtggcgatcgacgacgtccccgacgacgtcgggttcggggaggacggactcgggcagtgcatcgacctcgtcgacgacgcattgcggcggaccgcgaacgggcaggtgctgggcgtcgactggctcgtcggcgagggcaccgcgagttctctgcacgagaccgcgcccccgaccgaacacatctccgaggcgtgggcgacgctcggcgacgattgtgtgtacgaactcgccgtcggcaccgtcgaattcggtgaggggacgtcgactgcgcacgtgcagatcgcggccacccatctcggcaccacacccgcacggatccgtctcgtgcagtccgacaccgaccgtacgggtttcgacacgggagccttcgccagcgccggcctcttcgtcgcgggcaacgccgtgtcgaacgcctccgtcgccctgcgcgaccgcatcctggcgttcgccgccgtgcacaccggagtcgatgtgaccgagtgctcgatggacgacgacggggtgctctgcgggggcacccgagtgccgttgaccgacctcgtcgccgcggcccgtcgccggggcatccggttcaccgaggcgcgcaaggcgtacgggtcgccgcgcagcgtcgtctccaacacccacggtttccgcatcgccgtccaccgggtcacgggcgagatccgaatcctctacagcgttcaggccgcggacgtcggggtcgtcatcaacccggtgcaggtgcgcggccagatcgagggcggcgtcgcccagggaatcggcttcgcgctgaccgagaacttccacgtcgacgacaacggcgtgatgatcaaccccagcctgcgcaactaccgcatccccacctacgccgacattccccgcaccgaagtgctgctggtcgagtcgaatgactccgtcgggccgatgcgggcgaagggaatggcggagtgctgcatcaacccggtggcgcccgcgctggccaacgccctggaaaacgcgaccggtgtgcgttttcgcgagttgccgctcacccccgagcggatctaccaccgaatcggcgagaaccgatcggttccgacgacctga

SEQ ID NO: 116015 - protein, 905 aa, Rhodococcus sp. RHA1
MTYIVNGRAFDEEPNPGQCLRTFVRSLGHHGVKKGCDAGDCGACTVWLDGDPVHSCITPAFRAEGREVTTIEGLGSPDDLHPLQRQFRDAPGFQCGFCTAGMIMTSATFTDAQKEDLPRALKGNLCRCTGYRAIEDAVNGVAAVEVAEPGRAVGASVGAPAATDVVTGRAEFTMDTEIEGMLHLKVLHSPHAHARIVSIDTTAALAVPGVHRVYTWEDVPRKRFTTAIHTDHLVDPDDTYILDDTVRFAGQRVVAVLADTVGAAEEGCREVVVEYDVLPAVFDPEEAMADGAPQLHGSDDPFVRDPVHNILLELHGEVGDIEAGFAEADVIHEGTYFTPRVQHAHLETHGSIAWMEDGRLHVRTSSQSPSIAKVKLAHLFDLRPDQLRVFCKRVGGAFGGKQEVFSEDLVALATLDTGRPVCFEFTREEEFTTASPRHPMKLTITLGARSDGTLTAFQVRNVSNTGAYGNHGGETLFAAGAAISAYRCLNKKFDAYAVYTNSVPSGALRGYGMTQPAFAVESAMHELAVALDIDPLELRRRNIVRPGDSLVAIDDVPDDVGFGEDGLGQCIDLVDDALRRTANGQVLGVDWLVGEGTASSLHETAPPTEHISEAWATLGDDCVYELAVGTVEFGEGTSTAHVQIAATHLGTTPARIRLVQSDTDRTGFDTGAFASAGLFVAGNAVSNASVALRDRILAFAAVHTGVDVTECSMDDDGVLCGGTRVPLTDLVAAARRRGIRFTEARKAYGSPRSVVSNTHGFRIAVHRVTGEIRILYSVQAADVGVVINPVQVRGQIEGGVAQGIGFALTENFHVDDNGVMINPSLRNYRIPTYADIPRTEVLLVESNDSVGPMRAKGMAECCINPVAPALANALENATGVRFRELPLTPERIYHRIGENRSVPTT

SEQ ID NO: 116016 - DNA, 2379 bp, Rhizobium leguminosarum bv. viciae 3841
  CDS (1)..(2379): transl_table=11
atgaataatcccgatcaagaattcaacgtcatcggcaagaacgtcatccgcgaggaaggtccgggaaaagtcaccggccttggcaaatacgccatcgacctcgaatttccacggatgctttgggcaaagatcaagcgcagtacgcgccctcatgccaagatcatcaacatcgatatcagccgcgcgcaagccttgccgggtgttcatgccgtcatcgtcgacaaggactgccctcagacgttgttcgggtttggctgctatgacgagccgctgctcgcccgtggaaaggtccgctatatcggcgagccggtggcagcggtcgcagccgagagtgaggcgattgccgagcaagcctgtgatctgatcgagatcgactatgaggacctgccggcaatcttcgacccgtgggaagccttcgaagccgatcccaaggtgatcatccacgaagaccaggccaactaccgccgcgtgcctatcggacccgcgcaatacgatccgaagcaccccaacgcgttcggttactacaggatccgcaccggcgaggtgtcgcaaggctttgcggaagcggatgtcgtcctggagaagacctattccaacgccatgatggcgcacgccaccatggagcggcacaattcgatctcgctgtgggacgccgacggcaaggtaacggcctggtcgtccgctcaggccgcctatccgctgctgaaccagatcagcgaggcgctggacatcccgcattcgcgcgtccgggtcatcatcccgaaatatgtcgggggcggttttggcggaaagatcgaaatgaaggcagaaggcttatgcgccgtgctttcccgcgccgccggccacagacacatcaagatcatctacacccgggaggaatcactctgctgggcaggggtgcagcatcctttcgagatgcgtatcaaatcgggtgtgcgcaaagatggcgttatcacggcgtgcgagatgttcgtgctcgtcaatggcggcgcctacgctcagcacggcttcctcgtcacccgccaggcgagttacggtccacttggctcttaccgcttccctcatttcaagctcgacaactacgttgtctataccaacaaccctccgggcgtcgcctatcgcggtttcggcaacacccagatccacttcggactggagtctcacatcgatgagctcgcgcacgcaatcggaatggatccttacgagattcgccgcaagaatgtcctcaaggaaaatgagatcaacgcagccggcgaaatccagcattcggtcgcgggcgccgagctgcttgacgagataaaggctggtctggagcgtcacggccccttgcaacgggaagacggaccctggcgccgcggcaggggcatcgcctttgccaacaaggacagcgttgccccgtcggcatcctctgccatcgttaagatccataacgacgaaacagtcgaaatccgccacagcgccggtaatatcggccagggcagctcgacaacgcttatccagatcaccgcggagttcttcaaggtcgggcctgagcgggtcaggacggccgaagtcgacacttgggtcactccttacgaccagctgacggggtcgagccgccttacattcgcggccggcaacgccgtcctgatggcttgcgaggatgtgaagaaccagatcctgacgatggcggcccaaatgatgcaggcaaccccagaagagctcgatctcgccgatatggtcgtcttcgtgaaggagaacccgggtcgctccatgcgggtcaaggacctcttccgcacggtgttctttaccggttccttcctgccgactggcggcgagttgctgggcaaggcgaccttcacagtgccctccagcaagatcgacccggagaccgggcatgccgccaacgacggtatgcgcaagatcttctccttctgcacccgcgcggcccaggccgtggaggtggcggtcaatatcgaaactggccaggtcaagctggagaagatcgcgatcgcaaacgatctcggcaaggcgatcaacccgatgtcgtgcgaaggtcagatgcatgccgcaatctcaatggggctaggccaggcgatctcggaggagctgcagatcagcgagggaagtgtcgccaacggcgacttctcgtcctatcgctttctgacggcaaaagatgcgccgtcgaacgatcacgtttcgacccacatcgtggagatcccccagttcgacggaccttacaaggcaaagggcttctcggaagcaacgacgtcgccgacggcgcccgccatcgcgaacgcgatcttcgacgccgtcggccttcgtctccgacacatgccgatgacgccggagcgcgtcctcgaggggctcgatcgcctgacttctgcagatagagactga

SEQ ID NO: 116017 - protein, 792 aa, Rhizobium leguminosarum bv. viciae 3841
MNNPDQEFNVIGKNVIREEGPGKVTGLGKYAIDLEFPRMLWAKIKRSTRPHAKIINIDISRAQALPGVHAVIVDKDCPQTLFGFGCYDEPLLARGKVRYIGEPVAAVAAESEAIAEQACDLIEIDYEDLPAIFDPWEAFEADPKVIIHEDQANYRRVPIGPAQYDPKHPNAFGYYRIRTGEVSQGFAEADVVLEKTYSNAMMAHATMERHNSISLWDADGKVTAWSSAQAAYPLLNQISEALDIPHSRVRVIIPKYVGGGFGGKIEMKAEGLCAVLSRAAGHRHIKIIYTREESLCWAGVQHPFEMRIKSGVRKDGVITACEMFVLVNGGAYAQHGFLVTRQASYGPLGSYRFPHFKLDNYVVYTNNPPGVAYRGFGNTQIHFGLESHIDELAHAIGMDPYEIRRKNVLKENEINAAGEIQHSVAGAELLDEIKAGLERHGPLQREDGPWRRGRGIAFANKDSVAPSASSAIVKIHNDETVEIRHSAGNIGQGSSTTLIQITAEFFKVGPERVRTAEVDTWVTPYDQLTGSSRLTFAAGNAVLMACEDVKNQILTMAAQMMQATPEELDLADMVVFVKENPGRSMRVKDLFRTVFFTGSFLPTGGELLGKATFTVPSSKIDPETGHAANDGMRKIFSFCTRAAQAVEVAVNIETGQVKLEKIAIANDLGKAINPMSCEGQMHAAISMGLGQAISEELQISEGSVANGDFSSYRFLTAKDAPSNDHVSTHIVEIPQFDGPYKAKGFSEATTSPTAPAIANAIFDAVGLRLRHMPMTPERVLEGLDRLTSADRD

SEQ ID NO: 116018 - DNA, 2331 bp, Solibacter usitatus Ellin6076
  CDS (1)..(2331): transl_table=11
atggccaccaccacaaccaaacccgagaccctcttcggcaaacgagttcgccgccaggaggacccgcggctcatcaccggcaccgcgctctacctggacgatctcaaggtgccagggatgcaccacgcctgcatcgtccgcagtccccacgccgccgctcgcatcagggccatcgagactcgcgccgcgctggccgcccccggagtggtcgccgtcttcaccggcgacgatatcaaggatcttggaccgatcccctgcgccgcctcccttcccggtctgcgccggccgcatcaccacctgcttgcgcaggatcgcgtctattttgtcggccatgccgtcgccgtcgtggtggctaccgaccgctatcttgcgcgcgacgcggctgacctggtcgaggtcgattatgaacgcctccccgccgtggccgaccccgaaaaggcgctcgcgccttccgcgcccgcggtccatccccagtggcccgacaacatcgcgttcaacttccatcaggaggggggcgacacggaaaaggccttccgcgatgccgatctggtgattcgccagcgcatcaccagccagcgcctgctccccacctcgatcgaaactcgaggcgtcctggccgagtggcgcgccggcgagaaatcgttgaccttgcattcttccacccagatcccgcacctgctgcgctccctcttggcgggcatcctcggcatgccggagaaccggctgcgcgtgatcacgccggaggtcggcggaggctttggagcaaaggccgacgtctattgcgaagacgcgctcatggccttcatcgcgatgaggatcaacaagcccgtcaaatgggtggaatcgcgccgcgagaattaccaggccaccatacacggccgcggccacgtcgattacttcgaactcgccgcgcgccgcgacggcaccattctcgggctcaagctgaaactcattcaggacctcggcgcgtaccaccagttgctcacgcccatcattcccactctctccgtcctcatgatgcctggcctctaccgctttcagaacgtcagcgcggacgtcgtcggcgtcttcacgaattgcatgccgaccgacgcgtaccgcggcgcaggacgtccggaagccactcatgggatcgagcgcatggtggatatgctcgcccaggaattgaagatggatccggccgagatccgcctcaagaacttcgtccacgccgatgagttcccctttcccaccgcaaccggactcttgtacgatagcggcgattacgccaagcctctgcacaaggcgatgaacgaggccggctaccagcagctgcgccaggagcaggccgccgcgcgcgccgaggggcgcctggtgggcatcggcatttccacctacggcgagatttgcgcgctggggccatcgatcgccctccccgccggcggctgggaatccgccaccgtcaagatcgagccctccggcaaagtcaccgtgctcaccggctcgtctccccacggccagggcgaggagaccaccttcgcgcagatcgtctccgatgaactcggcgtacccatggacgacgttctcgtggtccatggcgataccgccgtcgtgcagtacggcatcggcaccttcggcagccgcggtacggcggtcgccggcaccgccctcttctacgccctccaggacatcaaggccaagatgaagaagttcggcgccatgatgctgggaacggaggatgtcaacttttccggcggccgctgcgtggatgagacatgcgggaaatccgtaaccttcgcggaaatggccaccgccgcgcatcacgccaagcaacttccgcccaatacggcgccgggcctggtagcgacgcatttctgggagccgccgaatttcactttccccttcggtgcgcacatcgtggtcaccgaagtcgatcgcgagaccggagcgatcgaaatccaacgctacgtttgcgtggacgatatcggccgcatcatcaacccgttgatcgtggatggccaggtgcacggtggagtggcgcaagggctcggccaggcgctctgggagcaggccgtctacgacgacacgggccaattggtcagcggcgaactgaccgactacgcgctgccaaaggcgagcgggatgccgtggatcgagagcagccacaccgagacgccctctcccgtgaatccgttgggagtgaagggcgttggagaggcaggcaccatcggttgttcgcccgcggtcgtcaattcggtggtagacgcgctcgcgccgctgggcgtgaagcacatcgatatgccgctgaccccggagaaaatctggaagctgattcaggaggcacgcgcatga

SEQ ID NO: 116019 - protein, 776 aa, Solibacter usitatus Ellin6076
MATTTTKPETLFGKRVRRQEDPRLITGTALYLDDLKVPGMHHACIVRSPHAAARIRAIETRAALAAPGVVAVFTGDDIKDLGPIPCAASLPGLRRPHHHLLAQDRVYFVGHAVAVVVATDRYLARDAADLVEVDYERLPAVADPEKALAPSAPAVHPQWPDNIAFNFHQEGGDTEKAFRDADLVIRQRITSQRLLPTSIETRGVLAEWRAGEKSLTLHSSTQIPHLLRSLLAGILGMPENRLRVITPEVGGGFGAKADVYCEDALMAFIAMRINKPVKWVESRRENYQATIHGRGHVDYFELAARRDGTILGLKLKLIQDLGAYHQLLTPIIPTLSVLMMPGLYRFQNVSADVVGVFTNCMPTDAYRGAGRPEATHGIERMVDMLAQELKMDPAEIRLKNFVHADEFPFPTATGLLYDSGDYAKPLHKAMNEAGYQQLRQEQAAARAEGRLVGIGISTYGEICALGPSIALPAGGWESATVKIEPSGKVTVLTGSSPHGQGEETTFAQIVSDELGVPMDDVLVVHGDTAVVQYGIGTFGSRGTAVAGTALFYALQDIKAKMKKFGAMMLGTEDVNFSGGRCVDETCGKSVTFAEMATAAHHAKQLPPNTAPGLVATHFWEPPNFTFPFGAHIVVTEVDRETGAIEIQRYVCVDDIGRIINPLIVDGQVHGGVAQGLGQALWEQAVYDDTGQLVSGELTDYALPKASGMPWIESSHTETPSPVNPLGVKGVGEAGTIGCSPAVVNSVVDALAPLGVKHIDMPLTPEKIWKLIQEARA

SEQ ID NO: 116020 - DNA, 2682 bp, Mycobacterium smegmatis str. MC2 155
  CDS (1)..(2682): transl_table=11
atgagcgtccgcgtcaacggcaaacccgtctccggtgccccacagcccgggcagtgtctgcgcaccttcctgcgcgaccacggccacttcgaggtcaagaaggggtgcgacgccggggactgcggcgcgtgctcggtgctgatcgacgacgttgctgtccattcctgtgtatatccggcgttccgcgctgacggtcgcgacgtgaaaaccgttgcgggcctcggcacatccgaagatctgcatccgatgcagcgccggttcgtcgaagcggcgggattccagtgcggcttctgcacggccggcatgatcaccaccgcgtcgacgttcaccgaagaacagcgcgccaacctggccgagcacctcaagggcaacctgtgccgctgcaccggctaccggtccatcaccgatgcgctcgacggcgtcagcaacgtcgagaaatccggtggcacaacagcttcagttggggcaccggcggccgtgcgggtggcgaccggcaccgagccgtacaccatggaccacacaccggaaggcctgctgcaccttgcggtgctgggcagtccggtggcgcacgcgcgcatcgtcgcgatcgacaccagcgccgccgaggccgtacccggcgtgcgcctggtgctgacctacctcgacgcgccgcgcgtcgcgttctccaccgcgcgccacgagatccgtgaggacgatccggacgacacctacgtgctggacagcaccgtgcggttcgtcggccagcgggtcgccgcagtggtcgccgacagcgtcgccgccgccgaaacggcctgccgtgcaatcgccgtggagtacgagcagctgccggcagtgttcgatccggacgaggcgcgctcccccggcgcgccgctgctgcatgccgacaagggtcccgacgcccgcatcgccgacccgtcgcgcaacatcgtcgccgaactgcacggcggcatcggcgatgtgcagcaggccgtggccgccgcgcacaccgtggtccgcgggaggtatcacacgcagcgggtgcagcacgtgcatctggaaacccacggctgcaccgggtgggtcgacgaggacgggcggctgaccatccgcaccagcacccaggtgccgttcctggtacgtgatgaactgtgccgcatcttccggttggaccgcgacgtggtgcgagtgttcgccacgcgtgtgggcggcggtttcggcgccaagcaggagatgctggtcgaggatctggtcgcgttggcggtgctgcggctgggccgccctgtccgctatgagttcagcaggtccgacgagttcaccatggcgccgtgccgccacccgttccgggtcgatgtcaccgtggcggccgacgaggacggcacgttgacggcgctggccgtcgacgtcctcaccgatgccggcgcatacggcaatcacagccccggtgtgatgttccacggttgcgccgaatcggttgcggtgtaccggtgtgcgaacaaacgcatcgacgcgcagtcggtgtacaccaacaatctgccgtcgggcgcgttccggggctacggcctggggcaggtgatcttcgcgatcgagtcggccctcgacgaactcgcgcaacgcctgggcatcgatccgttcgagttgcggcgccgcaacgtggtccgccccggtgaccggctgatcgacgcacacgagcccgaggatctgttgttcggcagctacgggctggaccagtgcctcgacctgacacagaatgcgctcgccgcgggtaacggtgccgtcgcgccccagggctggcaggtcggtgagggcatggcggtcgcgatgatcgcgacgctcccgccgcggggccatttcgccgacgccacggtgacactgaaggatgacggacgctacgagttgtcggtggggacagccgaattcggcaacggcaccaccaccgtgcacgcccaactggtcgcgacgctgatgaacaccaccgtcgaccgggtgagcatccgccagtccgacaccgatgccggtggttacgacaccggggcgttcggatcggcgggcatcgtcgtggccgggcgcgcggtgcatcaagcgtgcgtcgcgctgcgcgccacgatcgaacgcgccgcggccgagctgaccggagtggacgcggtgtcgtgcgtcgtgggtccgcatggtgtgcagtgccgcgaccggttcgtgccgttcaccgagctggcgctgccgttgacggcgaccgggcatcacgacggcacgccccgctcggtggcgttcaacgtgcagggtttccgggtggcggtcaaccccgagaccggcgaggtgcggatcctgcagtcggtgcaggcggccgacgccggtgtggtgctcaaccccgagcagtgccgcggtcaggtggaaggcggtgtggcacaggcgatcggttcggcgctgtacgaggagatgcgggtcggcgccgacggcagggtgctcacccagaccctgcgcaactaccacatcccccagctcgccgatatcccgcagaccaaggtgtatttcgccgacacctacgacgagctcggtccgctcggcgccaagtcgatgagcgaatcaccgtacaaccccgtcgcccccgcgctcgccaacgcgatcgcgcgggccgtcggggttcgtccgcgcgagctgccgatgacgcccgcgcggatctggcgggcgctgcagcaagggcgtgcgtga

SEQ ID NO: 116021 - protein, 893 aa, Mycobacterium smegmatis str. MC2 155
MSVRVNGKPVSGAPQPGQCLRTFLRDHGHFEVKKGCDAGDCGACSVLIDDVAVHSCVYPAFRADGRDVKTVAGLGTSEDLHPMQRRFVEAAGFQCGFCTAGMITTASTFTEEQRANLAEHLKGNLCRCTGYRSITDALDGVSNVEKSGGTTASVGAPAAVRVATGTEPYTMDHTPEGLLHLAVLGSPVAHARIVAIDTSAAEAVPGVRLVLTYLDAPRVAFSTARHEIREDDPDDTYVLDSTVRFVGQRVAAVVADSVAAAETACRAIAVEYEQLPAVFDPDEARSPGAPLLHADKGPDARIADPSRNIVAELHGGIGDVQQAVAAAHTVVRGRYHTQRVQHVHLETHGCTGWVDEDGRLTIRTSTQVPFLVRDELCRIFRLDRDVVRVFATRVGGGFGAKQEMLVEDLVALAVLRLGRPVRYEFSRSDEFTMAPCRHPFRVDVTVAADEDGTLTALAVDVLTDAGAYGNHSPGVMFHGCAESVAVYRCANKRIDAQSVYTNNLPSGAFRGYGLGQVIFAIESALDELAQRLGIDPFELRRRNVVRPGDRLIDAHEPEDLLFGSYGLDQCLDLTQNALAAGNGAVAPQGWQVGEGMAVAMIATLPPRGHFADATVTLKDDGRYELSVGTAEFGNGTTTVHAQLVATLMNTTVDRVSIRQSDTDAGGYDTGAFGSAGIVVAGRAVHQACVALRATIERAAAELTGVDAVSCVVGPHGVQCRDRFVPFTELALPLTATGHHDGTPRSVAFNVQGFRVAVNPETGEVRILQSVQAADAGVVLNPEQCRGQVEGGVAQAIGSALYEEMRVGADGRVLTQTLRNYHIPQLADIPQTKVYFADTYDELGPLGAKSMSESPYNPVAPALANAIARAVGVRPRELPMTPARIWRALQQGRA

SEQ ID NO: 116022 - DNA, 2355 bp, Mycobacterium smegmatis str. MC2 155
  CDS (1)..(2355): transl_table=11
atgacgtcagccgcaccggaaaccgtgacgacgcggtacgcgggacggcgcgtcgagcgcgtcgaggacacccggctgctgaccggccgcggaacgttcgtcgacgacatcgtgcgccccggcatgctgcacgcgtgcttcgtgcgcagcccgttcgcgcacgcaaagatcaacggcatcgacgcgaccgaggcgctcgcgcttcccggtgtgcgtgcggtgttcaccgcggccgacatcaaccctgaggtcaaggaggcctggcacgccgtcgcgggcagggacatgcccgacaccccgcggccgccgctggccgagggtgaggtcaagttcgtgggcgatccggtggccatcgtgatcgccgaatcgcgctacgtcgccgaggacgccgtcgacctcgtagaggtggactacgaaccgctgcccgcggtcgtcgacttccgcaccgcgctcacgtcaccggtcgccgtccacgatgcctacccggacaacaacgccggcggcatggccggcgcgccgccggacgaggagaccttcgactcggcggcacatgtggtcaaagagcacgtgtaccaacaggtgtacgttcccgtgccgatcgagacgcgcggcctcgtggtcgaatggcaggcgtcggccggcgaactcaccatctgggcgtcgacacagacgccgcacgaactgcgcgcgttcgccgcgcgcctgctgggcataccggcccagcacgtgcgcgtgatcatgcgcgacacgggcggcggcttcgggcagaaggtcgtgccgatgcgcgaggacatgtgcatcatgctcgcggcgcgcaagaccgcgggtgcgctcaagtggatcgaggaccgccgcgagaacctcatgtcggccggccaatcccgccacgtcgacggcgacgtccggatggcgttcgaccccgacggcaacatcctggccgccgacatcgacttcgtgcaagacatcggtgcctacccgacgccgtacccggtgctcacgacggccgcgatcggcatgttcttccccggcccgtaccgggtgcccaaggccagcttcaactacaagacggtgttctccaacaccgcgggcctgcacgcctaccgcggcccgtggcagtacgagacgctcagccgcgagatcctgctcgacatcgccgcgcgcaagatcggcatcgaccccgtcgaactgcgccgccgaaacctgttgcggcgcgacgagatgccgtacttcaaccccaacggcatgccgtacgaccacgtggcgcccgccgagacgttcgagcaggccgtcaagatcctcgaccacgagggcttccgcaagcaacaggccgaggcactcgcgcagggccgctacatcgggctgggcttctcggcctacatcgagcccacgggcgcggccacgggccacctggcctccgagggcgcgacgatccgcatggagtccaccggaaagatcaacgtctacgtcaacggcggatcgaccggaaacagcctggagaccacggtcatccagctcaccgccgacgcgctgggcgccgacatcgacgacgtcgccaccatccagggcgacaccgcggtcaccccctacggcgcgggcacgcagggcagtcgcagcgcgccgatgaccgcgggcgcggtcaacgaggcgggcacgatgctgcgcaaccagatcgtcgcgatggccgcggcgtggctgggtgtcgaggagcccgagatcgaactgggcggctccaaggccacggtgcgctcggatccggacaagagcgtgacgttcggtcaactcgcctaccgcgcgtactacgagccgcagcagttgccgcccgggctctcggcgtcgctggaggccaccgcgcgctacaccgcgccgcccaccgcaccgatccactgggccaacgccacccacgcctgcacgtgcgaggtcgacatcgagaccggacaggtcaccctgacgcgctacatcgtcagtgaggacgtcggtccgatgatcaaccccaacgtggtcgagggccagatcgcgggcggcacggtgcagggcatcggcggcgcgctgctcgaacaactggcctacgacgacgcgggcaacccgctgtcctcgacgttcgtcgactacctgctgccgacggccaccgaggtcccggcgatcgagtacggccacgtcgagatccccggcccgggcgtcggcggatacaagggtgccggcgaaggcggcgcgatcggctccaccccggccgtcatcaacgccgtcaacgatgccctggcaccgctcggggtcacgatcaccacgctgcccgcgagcccggccgccatcagcgccgcaatcgaggccgcgatcgaaacacgagggaaggaccactaa

SEQ ID NO: 116023 - protein, 784 aa, Mycobacterium smegmatis str. MC2 155
MTSAAPETVTTRYAGRRVERVEDTRLLTGRGTFVDDIVRPGMLHACFVRSPFAHAKINGIDATEALALPGVRAVFTAADINPEVKEAWHAVAGRDMPDTPRPPLAEGEVKFVGDPVAIVIAESRYVAEDAVDLVEVDYEPLPAVVDFRTALTSPVAVHDAYPDNNAGGMAGAPPDEETFDSAAHVVKEHVYQQVYVPVPIETRGLVVEWQASAGELTIWASTQTPHELRAFAARLLGIPAQHVRVIMRDTGGGFGQKVVPMREDMCIMLAARKTAGALKWIEDRRENLMSAGQSRHVDGDVRMAFDPDGNILAADIDFVQDIGAYPTPYPVLTTAAIGMFFPGPYRVPKASFNYKTVFSNTAGLHAYRGPWQYETLSREILLDIAARKIGIDPVELRRRNLLRRDEMPYFNPNGMPYDHVAPAETFEQAVKILDHEGFRKQQAEALAQGRYIGLGFSAYIEPTGAATGHLASEGATIRMESTGKINVYVNGGSTGNSLETTVIQLTADALGADIDDVATIQGDTAVTPYGAGTQGSRSAPMTAGAVNEAGTMLRNQIVAMAAAWLGVEEPEIELGGSKATVRSDPDKSVTFGQLAYRAYYEPQQLPPGLSASLEATARYTAPPTAPIHWANATHACTCEVDIETGQVTLTRYIVSEDVGPMINPNVVEGQIAGGTVQGIGGALLEQLAYDDAGNPLSSTFVDYLLPTATEVPAIEYGHVEIPGPGVGGYKGAGEGGAIGSTPAVINAVNDALAPLGVTITTLPASPAAISAAIEAAIETRGKDH

SEQ ID NO: 116024 - DNA, 2415 bp, Nocardioides sp. JS614
  CDS (1)..(2415): transl_table=11
gtgaccgccaccgagcccgcaccgaccaccagccgggcgctggacgagatcaagatcggcgggatgggcgcgagccgcaggcgcgtcgaggacaaccgcttcatccgcggccgcggccactacgtcgacgacgtggtgctgcccgggatgctgcacatggagatcctgcgcagcccggtcgcgcacgcgaggatcgtctcgatcgacaccacccgggcgtggaacatgcccggcgtacgcctggtgctgaccggcgagatgatggcgacccgcaacctggcctggatgccgacgctgagctacgacacccaggccgtgctggccaccgacaaggtgcggttccagggccaggaggtcgcctgcgtcatcgccgacgacccctacatcgccaaggacgcgtgcgaggccatcgaggtcgagtacgagcagctgccggtgatcgtgaacccgacccaggcgatggcccccgacgccccgatcatccgggacgacaaggagggccaggccgacaacgtcatcttcgactgggaggtcggcgacaaggagggcaccgaccgcgcgttcgcggaggcggaccacgtctcgacgatccggatgcactacccgcgctcgcacccctcgccgctggagtgctgcggctcggtcgcggacttcgaccgcgcgaccggcaagctcacgatctacatgaccacgcaagcgccgcacatcgtgcgcgccgcggtcgcgctgatcgccgagctgcccgagcacatgatccggatcgtctcgccggacctcggcggcggtttcggcaacaaggtgccggtctacccgggctacgtgatgacgatcctcgcgtcgatcctgctggagcggccggtcaagtggatcgaggaccgcagcggcaacctgatctccaccgggttcggccgcgacgtctacctcgagggtgagctggcgctgcgccgcgacggcaagatcctggcggtgcggatgcacaccgactccgaccacggcgcgttcttcggcgacgcccagccgagcaagttcaagatcgggctgctgcactcgacgttctcctgctacgacatcccgaccgcgcacctgaccgcacgcggcgtctacacgaacaaggcgccgggcggcgtcgcgtaccggtgctcgttccgcgtcaccgaggcgatgttcttccaggagcggatgatgcaggcggctgccgacgagctgggcatcgaccaggcggagttccgccggatgaacttcgtccgcgacgacgacttcccgcaccgcacgccgttcggtttcctcaccgactccgggcagtacgccaagtgcctccaggtcggcctcgacgcgatcgactacgaggggttccggcgcgagcaggccgaggccgcgaagcagggccggctgctcggcatcggcatctcctgcatgaccgagccgctcggcgccggcaacagccgcgagtacgacatcctcggcatcaagatgttcgactccgccgagctgcgggtccacatgaccggcaaggcgatcctacgaaccggcgcgaagacccagggccagggacacgagaccacgtgggcgcagatcgtcgcgcacgagctcggcctccccgccgacgacgtcgtggtcgaggagggcgacaccgacaccgcgccgttcggcatgggcacctacgcctcgcgcagcaccccggtcgcgggcgccgcggtcgcgatggtggcgcggaagatccgggccaaggcccgcaagctcgccgcccacctgctcgaggtctccgaggaggacgtcgagtgggagctcggccggttctacgtccggtccgcgccggaccgcggcgtgacgatccaggagtgcgcgatggcggcgtactccaacatgcccgacggcctcgagcccgggctggaggccaacgcctactacgacccgcccaacctgacctggccgttcggctgctacatcgtcaccgtcgaggtcgacccgatgaccggcgtgtgggacgtgctgcgcgtggtggccgtcgacgactgcggcgtgcgcatcaacccgatgatcgtcgagggccagatcatgggcggcctgaccgaggcctacgcgatgtcgagcatgcagttcatcaccttcgacgccgacggcaactgcatcgggtcgaacttcatggactacctgctcccgaccgcgtgggagacccccggctacgagctgcacgaggtcgtcacgccctgcccgcaccacccgatcggtgccaagggcatcggcgagtgcgcgacggtcggcggcccggcggcgttcgtcaacgccgtcatggacgcactcaagcagtacggcgtgcgcaacgtcgacatgccgctgctgcccgaccgcgtccacgaggcgatcacccagcgccacgacgtgtccggtgccccgccgatcaggaccgacgcatga

SEQ ID NO: 116025 - protein, 804 aa, Nocardioides sp. JS614
MTATEPAPTTSRALDEIKIGGMGASRRRVEDNRFIRGRGHYVDDVVLPGMLHMEILRSPVAHARIVSIDTTRAWNMPGVRLVLTGEMMATRNLAWMPTLSYDTQAVLATDKVRFQGQEVACVIADDPYIAKDACEAIEVEYEQLPVIVNPTQAMAPDAPIIRDDKEGQADNVIFDWEVGDKEGTDRAFAEADHVSTIRMHYPRSHPSPLECCGSVADFDRATGKLTIYMTTQAPHIVRAAVALIAELPEHMIRIVSPDLGGGFGNKVPVYPGYVMTILASILLERPVKWIEDRSGNLISTGFGRDVYLEGELALRRDGKILAVRMHTDSDHGAFFGDAQPSKFKIGLLHSTFSCYDIPTAHLTARGVYTNKAPGGVAYRCSFRVTEAMFFQERMMQAAADELGIDQAEFRRMNFVRDDDFPHRTPFGFLTDSGQYAKCLQVGLDAIDYEGFRREQAEAAKQGRLLGIGISCMTEPLGAGNSREYDILGIKMFDSAELRVHMTGKAILRTGAKTQGQGHETTWAQIVAHELGLPADDVVVEEGDTDTAPFGMGTYASRSTPVAGAAVAMVARKIRAKARKLAAHLLEVSEEDVEWELGRFYVRSAPDRGVTIQECAMAAYSNMPDGLEPGLEANAYYDPPNLTWPFGCYIVTVEVDPMTGVWDVLRVVAVDDCGVRINPMIVEGQIMGGLTEAYAMSSMQFITFDADGNCIGSNFMDYLLPTAWETPGYELHEVVTPCPHHPIGAKGIGECATVGGPAAFVNAVMDALKQYGVRNVDMPLLPDRVHEAITQRHDVSGAPPIRTDA

SEQ ID NO: 116026 - DNA, 2406 bp, Nocardioides sp. JS614
  CDS (1)..(2406): transl_table=11
gtgaagaagctcgacagtcaccagcacatgaagacgccggtcgtcgctgctcggtcggtcgggacccgagtgctgcggtctgaagacccgcggttgctcaccggccgaggtgagttcatcgccgatatcgacctcccgcgccagctccacgtggctttcatacgaagtcctgttgcacacgcacgaatcactaatctcgacttgtccgcaatccgcgacgcggacggcgtggcactggcgtggtccggcaaggacgtcgcccccttctgcgagggcctcgtcggcgagatggcggttgaaggctgctttccgaccacgatgccgctgctcgcgggagatgaagtcgtctacgtcggtgagcctgtcgccgtggtcgtggctgactcgcgctacgcggcagaggacgcttgtgaactgatcgattgggacttcgacgagctgcctgccgtcaccaacgtggacgcagccgccggtggcggtccagtcgcgaacccgcagctgcccgataacatcggactcaacggtggcgcgagcttcggtgacgtttcaggagccttcgaacaggcccaccaggtcgtcgagggtcggttctacacctgccgtgtctcggcggctcctatggagacgcgcggcgtgatcgccgactacgaatgggcgtcgaaggcgctacgtctgtggtcgaacacccagatgccgcactatctgaagtacatgctgacggcgtacctcggtttcccggagcaaagcgtcgaagtcatcactcccgacaccggcggtgggttcggcttgaaggcgcacgtctatcccgaagagatgttgctgccactcatcgccagggaagtcggccggcctgtcaagtggatcgaagaccgtcgagagaacctcatcgccggcgcacacgcgcatgagcagtacgttgacatcgcgtacgcgctcgatgccgacggcaagatcacaggagtccgtacacacgcgctcggtgacggcggggcgtatcacctgccaccatggtcgatggccgtggagccgtggtgtgccgcagtgatgacccccaccggcatctacgacgtaccggctgtggagtacacctacaaggccgcggccaccaacaagacgcccgtcggcgcctaccgcggggtgggctacatggccgggacattcgctcgtgagtgcctcgccgacgatgccgcgcgtgcactgcgcatgtcgcccttcgacttccgtcgacacaatgtcgttcgcgagttcccgtggaccaatcctcagggcattgtttaccaggagggaagctggctgcagacaatcgacgcactcgaggagatggtcgactacccggcctttctgcgtcggcagaccgagctgcgcaaggaggggcgctacatcgggctgggcctcagctgcttcgtcgagagcagcggcgagagtacggcgaccagcctcgagcacggactcggcgacgtttaccatgacaccgccacagtccggctgaaccccaatggcaccgccaacgtgacgatcggtctgtcggcgcagggccaaggactcgccacgaccatggcccagatggcagccgacaccttgggcatcaaggtggaggacgtcagcgtccagacagcgcggtcgacctctcacgcctacggctcaggcaccctcggtagccgcggcgcagtcgttgcaggtggagccgtgtcacgagcagcagacgtcgtcagagagaaggtgcggcaggtagccgcccacatgctcgaagcatcgaccgatgacatcgagctggtagacggtctcgcttcgatcaagggcatctcggacgcctcgttgtccatcgccgacgttgccaccgcaatctatttcgacctcgactcgtggccagaggacttcgagccaaccctcgaagccacccaggcctacgatccttcccaggcgatgttcagcaacggcggccacgcgatcatggtggaactagatgccgagaccggcttcgtgcgcttcgagaagatcttttcagtcgaagactgcggcacggtcatcaaccccaacatcgtagagggacagatccgcggcggagtcatacaaggcatcggtgcatccgtattcgaggaactagcctatgacgagtctggccagattctcactaccactttcctcgactacggactgccgacaatggacgtcgccccgccgttcgagatcaaccacctcgagacgccctcctcgcactccgcctcgggcgtgaaggggatgggagagtcgggcctcatcgcggctcccgctgcggttctgaacgccgtcaacgacgccctttcaccattcggcgtggtgttgcgcgacctgccactgacgcctgagaaggtgcttggtgccatgtctggagcgaaggtagcgaccggtttggcagagcggtcgtga

SEQ ID NO: 116027 - protein, 801 aa, Nocardioides sp. JS614
MKKLDSHQHMKTPVVAARSVGTRVLRSEDPRLLTGRGEFIADIDLPRQLHVAFIRSPVAHARITNLDLSAIRDADGVALAWSGKDVAPFCEGLVGEMAVEGCFPTTMPLLAGDEVVYVGEPVAVVVADSRYAAEDACELIDWDFDELPAVTNVDAAAGGGPVANPQLPDNIGLNGGASFGDVSGAFEQAHQVVEGRFYTCRVSAAPMETRGVIADYEWASKALRLWSNTQMPHYLKYMLTAYLGFPEQSVEVITPDTGGGFGLKAHVYPEEMLLPLIAREVGRPVKWIEDRRENLIAGAHAHEQYVDIAYALDADGKITGVRTHALGDGGAYHLPPWSMAVEPWCAAVMTPTGIYDVPAVEYTYKAAATNKTPVGAYRGVGYMAGTFARECLADDAARALRMSPFDFRRHNVVREFPWTNPQGIVYQEGSWLQTIDALEEMVDYPAFLRRQTELRKEGRYIGLGLSCFVESSGESTATSLEHGLGDVYHDTATVRLNPNGTANVTIGLSAQGQGLATTMAQMAADTLGIKVEDVSVQTARSTSHAYGSGTLGSRGAVVAGGAVSRAADVVREKVRQVAAHMLEASTDDIELVDGLASIKGISDASLSIADVATAIYFDLDSWPEDFEPTLEATQAYDPSQAMFSNGGHAIMVELDAETGFVRFEKIFSVEDCGTVINPNIVEGQIRGGVIQGIGASVFEELAYDESGQILTTTFLDYGLPTMDVAPPFEINHLETPSSHSASGVKGMGESGLIAAPAAVLNAVNDALSPFGVVLRDLPLTPEKVLGAMSGAKVATGLAERS

SEQ ID NO: 116028 - DNA, 2919 bp, Nocardioides sp. JS614
  CDS (1)..(2919): transl_table=11
atgagcaccatgatcgacctcgagctccacctcaacggcgctccgcgcaccgtgacctgcgcgccgggcgactcgctgctgagcgtgctgcggcggctgggctgcttcagcgtgcggttcggctccgagaccggcgagaccggcgccgccgcggtcctggtggacgggcggctgctggccgccgacgtgctgctcgccgcccaggccgccggccacgaggtgacgaccgtggagtcactgaacgtcgccaccggcgagctgcaccccatccaggccgcgttcgtggagtccggcgcgctgcagtccggctactccgccggggccatggtgctcgccacccaggccctgctcgcgcgcgaccccgacccctcggagtgggagatccgcgacgcgttctccgggatcctcgaccgggagacgggctacgtgaaggtcgtcgacgccgtgcagcgcgcggccgcgctgctccgtggcgagaagccggagccgatggcgcccgtcgtcgtcgggcggctcaccgacggcgacggtgggaccgtcccggacgctcccgctgccatgccgcgcctcgtgcccgcggcggacgtcccctccatgcaggtggtcgggacgcccgcgcccaaggtcgacgcgctcaagctggtcaaggggaatccggccttcgtcgacgacatcgagctgcgcgggatgctctacgccaaggtgctgcgcagcccgcacgcgcacgcccggatcgtcgccatcgacgactccgaggcccgcgcgctcccaggcgtgcacgccgtgctgcacaccttcaacacggcccgcgtgaagtacgcctccggcggccagagctggccgaacccgcgcccctgggaccaggtgagcttcgacgacaaggtgcgccacgtcggtgaccgcgtggccgcggtggccgcggagaccgtggcgatcgccgaggaggcctgccggcggatcaaggtgacgtacgacgtcctgccggcggtcttcgacgaggtcgaggcgatcggccccggcgctcccgtcatccacgacgagaccgacacggaggggatcgccgacgcggcccgcaacatcccccgccgggtcaacgggcagacggtcaccgacgacgagctggcggccgcgttcgccgacgccgagcacgtcttcgagcagaccttccacgtccagcagcagcagcagaccccgatcgagccgcacatcaccatcggctggctcgacgcggacgagcggctgacgctgcgcagctccacccaggtcccgttccacacccgccggatggtcgcccctctgctcggcctgccggtcaagcagatccgggtgatcaagccgcggctcggcggtggcttcggcggcaagcaggagatgctgctcgaggacgtggtcgggcacctggtgctcgcgacccgccgaccggtccggctggagctgacccgggaggaggagttcgtctcctcgcggatccgtcacgcccagacgatcaccttccgctccgccgtcgacgccgacggccgactgctcgccctggaccaccacgtggtcggtaacaccggcccgtacgcgacgcatgggttcacggtgcagtccgtctccggccagcgcggcctgtcgcagtacaactgccccgccaagcggtacacggccgacgtcgcctacacgaaccggccggtggccggggcgttccgcggctacggcgcgccccaggcgctgttcgcgctggagtcccacatggacgacatcgcccgcagcctcggcctcgacccgatcgagctccgtcggcggaactgggtgcgcaccggcgaccccctcgacatcctgcccacgctgggcgagcggggcgccgcggagatccagggcgaggtgccccgggtgaccagctgcgcgaccgacgagtgcgtggcgcaggccaggcgcgcgatcggctgggagcggcgcaacgaccccgcgtggaagcagcccgcggaccggccgagcatccgcagggggatcggcttcgcgctgtgcatgcaggccaccgcgatccccaacctcgacatgggtggtgcctcgatcaagatgaacgacgacggctcgttcaacctgctggtcggtgcgacggacctcggcacgggcgccgacacggtgctggcccagatcgccgccgaggtgctcggggtcgaggccagtgacgtggtcgtgtacgccgccgacaccgacctgacgccgttcgacgtcggggcctacgccgactccacgacgtacatctccgggatggcggtcaagaaggccgccgaggccgtgcgcgagcggatcgtgctgcgcgcggcccggctgctcgagctggccggccccgccaaggtcgagctgcggaacaagcaggcctgggcgcccgacgggcgctgcgtgacgctccaggacgtggccctccatgcgctgcacatcgaggaccaggaacagatcatggcgacggcctcgcacgtctcgggtgagtcgccgccgcccttcgccgcccagacggccgagatcgaggtggacgtggagaccggccaggtgaccgtcacgaagctggtgatggccgtcgacgccggggtcgtcatcaacccgaccacggcgagcggccaggtcgagggcgcgatggtgcaggcgctgggctacgcgctcaccgaggacctcgtcctcgacgacgacggccgtgcggtgaacgcccggttcgggccgtactggatcttccggcccgacgacacgcccccgatggaggtgttcctggtgcagaccatggagccgagcgggccgttcggcgccaagtcggtcggcgagatcgccatcgacggggtggcacccgccgtgcgcaacgcgatcctcgacgcgaccggggccaccgtcaacgagctgccgctcacccccgaacgggtctggcgggcgctgcacgcctga

SEQ ID NO: 116029 - protein, 972 aa, Nocardioides sp. JS614
MSTMIDLELHLNGAPRTVTCAPGDSLLSVLRRLGCFSVRFGSETGETGAAAVLVDGRLLAADVLLAAQAAGHEVTTVESLNVATGELHPIQAAFVESGALQSGYSAGAMVLATQALLARDPDPSEWEIRDAFSGILDRETGYVKVVDAVQRAAALLRGEKPEPMAPVVVGRLTDGDGGTVPDAPAAMPRLVPAADVPSMQVVGTPAPKVDALKLVKGNPAFVDDIELRGMLYAKVLRSPHAHARIVAIDDSEARALPGVHAVLHTFNTARVKYASGGQSWPNPRPWDQVSFDDKVRHVGDRVAAVAAETVAIAEEACRRIKVTYDVLPAVFDEVEAIGPGAPVIHDETDTEGIADAARNIPRRVNGQTVTDDELAAAFADAEHVFEQTFHVQQQQQTPIEPHITIGWLDADERLTLRSSTQVPFHTRRMVAPLLGLPVKQIRVIKPRLGGGFGGKQEMLLEDVVGHLVLATRRPVRLELTREEEFVSSRIRHAQTITFRSAVDADGRLLALDHHVVGNTGPYATHGFTVQSVSGQRGLSQYNCPAKRYTADVAYTNRPVAGAFRGYGAPQALFALESHMDDIARSLGLDPIELRRRNWVRTGDPLDILPTLGERGAAEIQGEVPRVTSCATDECVAQARRAIGWERRNDPAWKQPADRPSIRRGIGFALCMQATAIPNLDMGGASIKMNDDGSFNLLVGATDLGTGADTVLAQIAAEVLGVEASDVVVYAADTDLTPFDVGAYADSTTYISGMAVKKAAEAVRERIVLRAARLLELAGPAKVELRNKQAWAPDGRCVTLQDVALHALHIEDQEQIMATASHVSGESPPPFAAQTAEIEVDVETGQVTVTKLVMAVDAGVVINPTTASGQVEGAMVQALGYALTEDLVLDDDGRAVNARFGPYWIFRPDDTPPMEVFLVQTMEPSGPFGAKSVGEIAIDGVAPAVRNAILDATGATVNELPLTPERVWRALHA

SEQ ID NO: 116030 - DNA, 2484 bp, Nocardioides sp. JS614
  CDS (1)..(2484): transl_table=11
atgtctgaccagctgcgcaccgtcggcaccgatgtcccccgcgtggagacggtcgagaagctgaccggcgacgcgctctacaccggcgacctgctgctgccgggcatgctgcacgcgaaggtcaagcacagcccgcacgcccgcgcccggatcctgcgcgtcgacaccgcacgagccgaggcgctcccgggcgtccacgccgtcctcaccggccacgagctcgactacaagatcgggctgtacgtcgtcgacaaggacatcctcgccaaggacgtggtccgccacttcggcgaggcggtcgccgcggtcgccgcggagaccccggagatcgcgagcgcggcggtcgacctgatcgaggtcgagtacgacgtgctcaccccggtgctcgacccgatggaggcgatccgggacggggcgccgctggtgcaccccgacctcggcagctatgcgtacgtcgaggccgcgttcagcccgcagcccggcacgaacgtcgcccacgtccagaaggtccgcaagggcgacctcgaccggggcttcgccgaggcggagtgggtcgtcgagcgcgagtacaccaacccctccgtccagcacgtgccgctggagacccacgtcgcggtcgtgcagtggaaggccggcgaccaggtcacgatctggaccagcgcccagtcgccgttcaccgtgcgcaacctgttctgcaccgcgatgcggctgccgctcaaccaggtccgggtggtcgtcccgcacgtcggcggcggcttcggcggcaaggccggcatccacctcgagccgctggtggcctgcctgtcccgcaaggccggcggccgcccggtgcggctgcaggcgacccgcgaggaggagttcagcctgctcccgtgccgcagcgcgctcacctaccggatccggaccggcgtccgctccgacggcaccatcaccgcccagcagatgacgatgtactgggatgcgggcgcgtacgccgactacgccgtcaacgtgacccgcgcgtcgggctactccgcgggcggcccctacgagatcccgaacgcggcggtcgactcctacgcgatctacacgaacaagccgtacggcacggcgtaccggggcttcgggcacgtggagttcttctggggcctcgagcggcacatggagctggtcgcccaggcgatcggcatggaccccctggagttccggcgccggaacctgctccggccgggctcgctgacgatgaccggcgagcggatcaccgagcacaccggtgacccgcgggcctgcctcgacgcggtcgccgaggcgatcgactacggccggctcacgccggaggaggccgcgcacgagcgcagcaccggtcgccggatcggcaagggcgtcgccacgctgcacaaggcaccggcgatgccgtcgttcaccgcgacggccgcagtggtgaagatgaactccgacgccagcgtggtggtcaacatcgcgttgatggagatcgggcagggctgcaacaccgccctcgcgcagatcgtcgcggagcggctccggttcccggtcgagcgggtcaaggtcgcggtcgagcgggacaccgacaaggacccctacgactggcagacggtggcctccaagggcctgatcctctccggcaacgcctgcctgctggcctgcgacgacctgctccggcaggcctacgaggtcgccggccaggtgctgcgcgccaacgtcgccgacctcgaccacgacgccgaccgggtcttcgtcaagcaccggcccgaggagtcggtcaccttcgccgagctctcggtcggctacgccttcccgaacggcaacggcatcggcgggccgctggtcggggtcgggcgctacatcgcccagggcctgaccaacctcgacaaggagaccgggcagggcctgccggcgctcgactggacgtacggcgcgcacggcgtggtcgtcgacgtcgaccccgagaccggcgagttcgacgtgctggccatctcctcggcgtacgacgtgggccgggtcgtcaacccggggctggtccgcgggcaggcgatcggcgggatggtgcagggcctgggcacggcgctgtgtgagggctacatctacgaccagcagggccgcctgctgaacccgtcgttcaccgacaacaagatcccgaccgcccgggacatcccggcccgcatcgacagcgcggtcgtcgagaccgcccagctcgacggcccgttcggcgcccgcggggtgggggagcacccgatgatctcggtcgcccccgccatcggcaacgccatccagcacgccaccggcgccgagctgctgcacatgccgatgcgcttcgaggacgtgtggcgggcgctgcagcgccacgagcccatcgacaactggatcaccgagacgccggtcggctcctgccgctcggacctgcccggcacgaacgggacggcgcaccccgccgtacccgtcgcggacaccggccccacccacaccccggaggtagcactgccatga

SEQ ID NO: 116031 - protein, 827 aa, Nocardioides sp. JS614
MSDQLRTVGTDVPRVETVEKLTGDALYTGDLLLPGMLHAKVKHSPHARARILRVDTARAEALPGVHAVLTGHELDYKIGLYVVDKDILAKDVVRHFGEAVAAVAAETPEIASAAVDLIEVEYDVLTPVLDPMEAIRDGAPLVHPDLGSYAYVEAAFSPQPGTNVAHVQKVRKGDLDRGFAEAEWVVEREYTNPSVQHVPLETHVAVVQWKAGDQVTIWTSAQSPFTVRNLFCTAMRLPLNQVRVVVPHVGGGFGGKAGIHLEPLVACLSRKAGGRPVRLQATREEEFSLLPCRSALTYRIRTGVRSDGTITAQQMTMYWDAGAYADYAVNVTRASGYSAGGPYEIPNAAVDSYAIYTNKPYGTAYRGFGHVEFFWGLERHMELVAQAIGMDPLEFRRRNLLRPGSLTMTGERITEHTGDPRACLDAVAEAIDYGRLTPEEAAHERSTGRRIGKGVATLHKAPAMPSFTATAAVVKMNSDASVVVNIALMEIGQGCNTALAQIVAERLRFPVERVKVAVERDTDKDPYDWQTVASKGLILSGNACLLACDDLLRQAYEVAGQVLRANVADLDHDADRVFVKHRPEESVTFAELSVGYAFPNGNGIGGPLVGVGRYIAQGLTNLDKETGQGLPALDWTYGAHGVVVDVDPETGEFDVLAISSAYDVGRVVNPGLVRGQAIGGMVQGLGTALCEGYIYDQQGRLLNPSFTDNKIPTARDIPARIDSAVVETAQLDGPFGARGVGEHPMISVAPAIGNAIQHATGAELLHMPMRFEDVWRALQRHEPIDNWITETPVGSCRSDLPGTNGTAHPAVPVADTGPTHTPEVALP

SEQ ID NO: 116032 - DNA, 2205 bp, Nostoc punctiforme PCC 73102
  CDS (1)..(2205): transl_table=11
atgaataaaattatcggtaaaccgcttgatcgcgttgatggcaaactcaaagttaccggagaagcaccctatacagccgatgttgctatagaaaatttaacttatggagtgatttttcaaagtgcgatcgcaagcggtaaagttatccaaatagatacatccgccgccaccgccgtccctggtgttgtagatatcattacctacaaacaaactccatctctggtaaaaatccccttcttttcacctccccagcctcaagcaaccgaaaaagacgataatatttactacgatggtcaacatttgggcattgtaattgcccaaactttagaacaagccgaaaccgctgcctccctagttaaaattatctacgaagaagccactgcgatagtcacagtagcagatgcagagatatttgaacccgaatcaatattttttggcatgatgccaggtaaaatcaccaggggggatgtggaatctgggaaagctcaagcagatgttctggtagagcaaatttataccacgccaatggaacatcataatcccctagagccttctggaacgatcgcaatctgggaaggagataatttgacgctgtatgaaactactcaaggcatttccgcaacccaaaaagcgatcgcatctgttctgaatattcctcaagaaaatgtccgtgttatctctaaatatttaggcggaggatttggttgtaaggcattgttgcgatcgcatactattttagctgcgatcgcatctcgtcaagtaaaacgccctgtaaaagttgtgctaacgcgatcgcaaatgtacactgcttgcgggcacagatcccaaactcagcagcagctaacgttaggtgcaaccaaagagggcagactaaccctgatcgatcacattggtacatctttaacttccctcttcgatgactttgtagaacctgtgggtgcagcaaccacaatgatgtacgcctgtcccaatttggaaattaaataccgtttggcacgcatcaatactgccacaccaacctttatgcggggcccgggagaagcaacgggaatgtttgccttagaatcggcaatggatgaactggcatacaccttaaatattgacccaattgaactaagattaataaatcatgcagatatcgagccgcacaaaggattaccttggtcaactaaatccctgaaagaatgttaccaaaaaggagcagaaatttttggttggttacaacgcaatccagttccccgttccatgcgagatcatcattttttgattggttggggaatggcaagtgcgacgtttcccacgaacattcaaactgcatcagttaaggtaaaaatttttgctactggagaagtgaaagtacaaagtggtactcaagacattgggacaggcacttatacagtgatgacgcaagtagctgctgaagtattaggcttaccagtgcagtttgaactaggtgatactaatcttcctaaagccccgattacagggaactcaattaccgttgccagtgtttccccggcggtacatcaagcagcgatcgccgcacgggatcagataattaaaatggcgatcgcagatccaaattctttgctttacggatcgcaagcagaaggtattattgtcgagtcagggcaaatatttttaaaacaagacccatcgaagcgagacagctacaccgatattctccgccgtcatggattagaaagtttagaagttacagaagaatcttcaatcaatccagagggcaaagaatacgccaaacactcatttggggcaatatttgtggaagttgcagttgatgaattgttgggagaaatcaaagttagacgttgcgtaggcgtttatggtgcagggcgaattctcaacttcaagacagcgcggagtcaagttatcggcgggattacatggggaatcggtatggcgctgatggagaaaactgtaatggatcctaatcagggcagaatagttggtgctaacttttcagattacctgattccggttcatgcagatatcccaaatatggaagtgcaatttgttgaagaacacgatccttatgtgaatgcactaggaaccaaaagtttgggcgaacttccgattgttggggtagcagcagctatatctaatgcagtgtatcatgccacaggtaaacggattcgtgacctaccaattacaccagacaagttgtctgaatccgggattgattag

SEQ ID NO: 116033 - protein, 734 aa, Nostoc punctiforme PCC 73102
MNKIIGKPLDRVDGKLKVTGEAPYTADVAIENLTYGVIFQSAIASGKVIQIDTSAATAVPGVVDIITYKQTPSLVKIPFFSPPQPQATEKDDNIYYDGQHLGIVIAQTLEQAETAASLVKIIYEEATAIVTVADAEIFEPESIFFGMMPGKITRGDVESGKAQADVLVEQIYTTPMEHHNPLEPSGTIAIWEGDNLTLYETTQGISATQKAIASVLNIPQENVRVISKYLGGGFGCKALLRSHTILAAIASRQVKRPVKVVLTRSQMYTACGHRSQTQQQLTLGATKEGRLTLIDHIGTSLTSLFDDFVEPVGAATTMMYACPNLEIKYRLARINTATPTFMRGPGEATGMFALESAMDELAYTLNIDPIELRLINHADIEPHKGLPWSTKSLKECYQKGAEIFGWLQRNPVPRSMRDHHFLIGWGMASATFPTNIQTASVKVKIFATGEVKVQSGTQDIGTGTYTVMTQVAAEVLGLPVQFELGDTNLPKAPITGNSITVASVSPAVHQAAIAARDQIIKMAIADPNSLLYGSQAEGIIVESGQIFLKQDPSKRDSYTDILRRHGLESLEVTEESSINPEGKEYAKHSFGAIFVEVAVDELLGEIKVRRCVGVYGAGRILNFKTARSQVIGGITWGIGMALMEKTVMDPNQGRIVGANFSDYLIPVHADIPNMEVQFVEEHDPYVNALGTKSLGELPIVGVAAAISNAVYHATGKRIRDLPITPDKLSESGID

SEQ ID NO: 116034 - DNA, 2214 bp, Nostoc punctiforme PCC 73102
  CDS (1)..(2214): transl_table=11
atgaatgcaagtgatacaaatatagttgtcggcaaaccactcaaccgagttgatggttatcttaaggtgacaggtgaagcacgctatgcagcagagtttccagttgcaaaaatgacttatggagtcacaattcaaagtgcgatcgctaaagggaagattgcccaaatcgatacaaaggcggcggagcaagtaccgggtgtattagcagttattacccacctcaacgcgcccaaagctgatggagaaaagggcggcggtcataaggtgcaagtgttacaagataacactgtactgtatagcggtcagcatattggtgtcgtcgttgccgatacctttgaacgagcgatgtatgctgcctcactcgtacaagttcgctatgacgaagagaaacccaccatcaatatgcgggagaatctcgctaaagcatactttcctaaaggtaaaatccctagagaggaatcgcctgattcatctcacggcaatgtcaaacagggactagcgaatgctgctgtgcgcgtcgagcaaacctataccactccagtggaaaatcacaatccgatggagcctcatgccacaacagcagtttggcaaggcgatcaattgctgttgtatgacgcaactcagggaattttttcgactcaacaaaaagttgcggaggtattaggaattgagcctgagaaagtccgcattatgtcttactttgtgggcggtggctttggttgcaaagggtcggcttggtcgcacgtaccactagcagcgatcgcagcacggcaggtaaatcgcccagtcaaattagttctgggacggatacaaatgtatgggcctgtcggcttccgaccagagacaattcaacaagtttctttgggtgctacccgcgaaggaaaattaactgcactccgacacactggcacttcacagacttcaacttttgatgaattcattgaacctgttggtaaaagtgcccgcatgatttacgcttgcccgaatatcgaaactagccatcgtctggttcagctagatcagggaacaccaacctatatgcgggccccaggtgaagcttctggatcgttcgccttagagtcggcaatggacgaactcgcttatgcactcaatatcgatccggtggaactgcgtctgcgtaaccatgctgatgtcgatcctagtaaaggactgccttggtcgagcaagtcactcatccagtgctacaagacaggagcagaaaaatttggctggcaaaagcgcaatcctcaaccccgttcgatgcgagacggcaattatttgattggttggggtatggcaacagctacttatcctaccaatcgttctccagcatcagcgatcgctaagattatggcagacggtacagctgtagtgcaaagtggttctcaagatattggtacaggcacttatactgtcatgactcaagttgcagctgaggcgcttggtctagcagttgagaaagttcgctttgaactaggcgatactaagatgccaaaaactcccgtttccggtggttcgcaaaccgccgctagtgtgagttcggctgtacatttagcgggcaatcaagctcgcagtaagcttttgcaactagcacttgccgatgaaaaatcaccgctttatagttcaaatgctgaagatgtgattgcccaaaatggcagctttttcttaaaaaataaatcgtctgtaagcgaaacatatcaggcaatcttggcacggcatggaatgaaaacgatcgaagcacgtgcagatgccaagcttggggacgagcaaaagaagttttcaatgcacgcatttggatcgcaatttgccgaagtccgcgttaaccctgattccggcgaagtgcgagtaacgcgctgggtgggaagctttggtgttggacgtatcctcaacgccaaaacagccaacagtcaactcatcggtgggattgtctacggtatcgggatggcactgatggaacatacgattatagacccgaatctaggacgcgttgtcaaccatgatttagctgaatatcacgtaccagtaaatgcagacgttcctgatattgaggtgttgtttgtcgatgaacacgatccacatatcaacccgcttggtgtcaaggggattggggaaattggcattaccggtactgctgcggcgatcgctaacgctgtttatcatgccacaggtaagcgcgttcgtgatttgccaattacattagataaattgttgtag

SEQ ID NO: 116035 - protein, 737 aa, Nostoc punctiforme PCC 73102
MNASDTNIVVGKPLNRVDGYLKVTGEARYAAEFPVAKMTYGVTIQSAIAKGKIAQIDTKAAEQVPGVLAVITHLNAPKADGEKGGGHKVQVLQDNTVLYSGQHIGVVVADTFERAMYAASLVQVRYDEEKPTINMRENLAKAYFPKGKIPREESPDSSHGNVKQGLANAAVRVEQTYTTPVENHNPMEPHATTAVWQGDQLLLYDATQGIFSTQQKVAEVLGIEPEKVRIMSYFVGGGFGCKGSAWSHVPLAAIAARQVNRPVKLVLGRIQMYGPVGFRPETIQQVSLGATREGKLTALRHTGTSQTSTFDEFIEPVGKSARMIYACPNIETSHRLVQLDQGTPTYMRAPGEASGSFALESAMDELAYALNIDPVELRLRNHADVDPSKGLPWSSKSLIQCYKTGAEKFGWQKRNPQPRSMRDGNYLIGWGMATATYPTNRSPASAIAKIMADGTAVVQSGSQDIGTGTYTVMTQVAAEALGLAVEKVRFELGDTKMPKTPVSGGSQTAASVSSAVHLAGNQARSKLLQLALADEKSPLYSSNAEDVIAQNGSFFLKNKSSVSETYQAILARHGMKTIEARADAKLGDEQKKFSMHAFGSQFAEVRVNPDSGEVRVTRWVGSFGVGRILNAKTANSQLIGGIVYGIGMALMEHTIIDPNLGRVVNHDLAEYHVPVNADVPDIEVLFVDEHDPHINPLGVKGIGEIGITGTAAAIANAVYHATGKRVRDLPITLDKLL

SEQ ID NO: 116036 - DNA, 2310 bp, Magnetospirillum magnetotacticum MS-1
  CDS (1)..(2310): transl_table=11
atgagcccgaaattcccgaagaacggcacggtcggcgcccgcacgcctttggtcgatggtgtcgagaaggtgaccggcaaggccaaatacaccgccgacatcgccgccaacggcgccctggtggggcgcatccttcggagccccgtcgcccatgcccgtatcatctccatcgacacctcggcggccgaggcgctggacggcgtccatgccgtctgcacgggcgctgaaacgccggtcccctatggcgtgctgcccatcgccgagaacgagtatccgctggcccgcgacaaggtccgctatcgcggcgatcccgtggccgccgtcgcggccgttgatgaactgaccgccgagaaggcgatcaacctcatcaaggtcgaatacgaggttctgcccgcctatatgacgcccaaggcggccatgaaggagggggccgtcgcgctccacgacgacaagcccaacaacatcctgcgcgaggtccatgccgagttcggcgatgtggaggcggcctttggcgaagccgatctgatccgcgagaaggtctacaccttcgccgaggtcaatcatgtccacatggaactcaacgccaccctggcggaatacgatcccgtccgcgacatgctgacgctcaacaccaccacccaggtgccctattatgtgcatctcaaggtggcggcctgcctgcagatggactcggcccgtatccgggtgatcaagcccttcctcggcggcggattcggcgcgcgtaccgaatgcctgcatttcgagatcatcgccggtctgctggcccgcaaagccaagggtacggtgaagctggtccagacccgcgaagagaccttcatcgcccatcgcggccgtccctggacggaagtgaagatgaagatcggcctcatgaaggatggcaagatcgccgccctggcgctcgaagccacccaggcgggcggcgcctatgcgggctatggcatcatcaccatcctgtacaccggtgccttgatgcacggcctctatcacatcccggccatcaagcatgacgcctggcgcgtctataccaacaccccgccctgtggcgccatgcgcggccacggcacggtggatacgcgcgccgctttcgaggccctgctcaccgaaatgggcgaggaactgggcatcggttcgctggaaatccgccagatcaatctgctgccccagattccctatacgaccatgtatgctcaaaaggtcatgagctacggcgtgccggaatgcctggagaaggtcaaggaagcctcgggctgggcgacccgcaagggcaagatgcccaagggccgggggttgggtatcgccctgtcccacttcgtctcgggcacctcgaccccaaagcactggaccggcgagccccatgccaccgtcaatctgaagctcgacttcgatggcggtatcacgctcttgaccggggccgccgatatcggccagggctccaacaccatggctactcaagttgcggccgaggtgctgggcgtgcgcatgagccgcatccgggtgatctccgccgactctgccctgacccccaaggataacgggtcgtactcgtcgcgcgtcaccttcatggtgggcaatgcctccatctcggcggcggaggagttgaaatccatcctggtcaaggcggcggccaagaagctggacgccagagaggaagacatcgaggttatcgacgaagtgttcatggtggcgggcagccaggatcccggcctgaccttccaagaggtggtcaaggccgccttgatcgataccggcaccatcacggtgaagggcaccttcacctgccccatcgagttccagggcgacaagaagatcagaggcagcgccatcggcgccaccatgggcttttgctatgccgcccaggtggtcgaagccagcgtcgatgagatcaccggccgcgtcaccgcccacaaggtgtgggtggccgtggatgtgggcaaggcgctcaatccgctcgccgtcgagggccagacccagggcggcgtatggatgggcatgggccaggccctgtccgaggaaacccgctgggacgatggccgcatgatgcacggcaacatcctggattaccgagtgccgaccatggcggaaagccccgatatcgaagtgatcatcgtggaaagcctggaccccaacgggcccttcggcgccaaggaggcgtccgagggcatgctggccggtttcctgcccgccgtccacgaggcggtctatgaggcggtgggggtgcgctctgtcaaattccccttaagcccagagaccatcaccgaactgcttgacgcaagggatgctgcagaatga

SEQ ID NO: 116037 - protein, 769 aa, Magnetospirillum magnetotacticum MS-1
MSPKFPKNGTVGARTPLVDGVEKVTGKAKYTADIAANGALVGRILRSPVAHARIISIDTSAAEALDGVHAVCTGAETPVPYGVLPIAENEYPLARDKVRYRGDPVAAVAAVDELTAEKAINLIKVEYEVLPAYMTPKAAMKEGAVALHDDKPNNILREVHAEFGDVEAAFGEADLIREKVYTFAEVNHVHMELNATLAEYDPVRDMLTLNTTTQVPYYVHLKVAACLQMDSARIRVIKPFLGGGFGARTECLHFEIIAGLLARKAKGTVKLVQTREETFIAHRGRPWTEVKMKIGLMKDGKIAALALEATQAGGAYAGYGIITILYTGALMHGLYHIPAIKHDAWRVYTNTPPCGAMRGHGTVDTRAAFEALLTEMGEELGIGSLEIRQINLLPQIPYTTMYAQKVMSYGVPECLEKVKEASGWATRKGKMPKGRGLGIALSHFVSGTSTPKHWTGEPHATVNLKLDFDGGITLLTGAADIGQGSNTMATQVAAEVLGVRMSRIRVISADSALTPKDNGSYSSRVTFMVGNASISAAEELKSILVKAAAKKLDAREEDIEVIDEVFMVAGSQDPGLTFQEVVKAALIDTGTITVKGTFTCPIEFQGDKKIRGSAIGATMGFCYAAQVVEASVDEITGRVTAHKVWVAVDVGKALNPLAVEGQTQGGVWMGMGQALSEETRWDDGRMMHGNILDYRVPTMAESPDIEVIIVESLDPNGPFGAKEASEGMLAGFLPAVHEAVYEAVGVRSVKFPLSPETITELLDARDAAE

SEQ ID NO: 116038 - DNA, 2751 bp, Kineococcus radiotolerans SRS30216
  CDS (1)..(2751): transl_table=11
gtgaagctcaccgtggacggggtggccgccgaggtggagccgcggccggggcagtgcctgcggaccctgctgcgcgagaacgccgggacgacggtgaagaagggctgcgacaccggggactgcggggcctgcacggtgctcgtggacggttccccggtgcactcgtgcctgtaccccgcgctgcgcgcgggcgaccgggaggtcaccaccgccgcgggcctggccccggcggggagcctgcacccggtgcagcagcgcttcgtggacgcggccgggttccagtgcgggttctgcacgccggggatggtcgtcaccgccgcggcgctggacgaggagcagcgcgccgacctcgacgagcacctcaagggcaacctgtgccgctgcaccgggtaccgcgcggtccgcgaggcggcgggcggacagaccctgcccgcgctcgcccgcagcggggggatcggcgaggccgtcgcggcgccggccgcgcaccgcgtcgtcaccggcaccgagccgtacaccctcgacctcgccgagggcgacgttccggcggggttgctgcacgccgcggtcctgcgcagcccgcacgcgcacgcccgcgtcaccgccatcgacacccgcgccgccgccgcgctgcccggcgtgcacctcgtgctgacccaccacgacgcaccgccggtgctgttctccaccggtcgccaccagaaccgcctcgacgaccccgacgacaccctcgtcctcgaccccgtcctgcgccaccacggccagcgggtcgcggtggccgtcgccgagtcagtggcgctcgccgaggaggcgctggggctgatcgccgtggagtacgaggtgctgcccgccgtcctggacccgcaccgggccaccgctcccggtgcgccgctgctgcacgccgacaaggacgccgacagccgcatcgcggaccccgcgcgcaacctggtcgccgagctgcacagcgaggtcggcgacgtcgaggaggccctggcctccgcccacgccgtcgtcgaggggacctggcgcacccagcgcgtcgcccacgtcgcgctggagacccacgccgcggtcggctggctggacgaggagggacggctggtggtgcgcagcagcacccaggtgccgttcctcgtgcgcgacgagctcgcccgggtcctcggcctggaccgcgcgcgggtgcgggtgctggccgcccgcgtcggcgggggtttcggcggcaagcaggagatgctcaccgaggacctcgtcgccctcgcggtgctgcgcaccggccggcccgtgcagtacgagacgacccgccgcgaggcgctcacggcgttgccgacgcggcacccgatggacgtgcgggtgcgtctgggcgccacggcggacggcaccctgacggcgctggcggtggacctgctctccgacgccggcgcctacggcaaccactccccgggggtgatgttccactccgtgcacgagtcggtggcgacgtaccggtgcgcgaacaagcgcgtcgacgcccgcgcggtctacacgaactccgtcccctccggcgccttccgggggtacggcctgggccaggtcgtcttcgccctcgaatcggcgctggacgacctggcccgcgaactcgggatcgacccgttcacggtgcgccgcaggaacgtcgtcgtccccggcgaccggttcgtcgccacctccgaccccgccgtcaccggcgaggacgacggtctgcgcttcggcagctacggcctggaccagtgcctggacctggtggagcgggaactcccgcgcggcggtgaccccgtccccgacgggcccggctggcgcaccgggtccgggatcgcgctgtcgatgatcgccaccgtgcccccgcgcgggcacttcgcggaggcctccgcccgcctgctggccgacgggacgtgggagctgaacgtcggaaccgcggagttcggcaacggcacgacgaccgtccacacccagatcggcgtgcacgccctgagcaccaccgccgaccggctgcggttgcggcaggccgacaccgacgtcaccggccacgacaccggggcgttcggctcggccggttccgtcgtcgccggcaaggcgctgctcatcgcctgcgagcgcctcgcggggcaggtgcgggcgctgggcgccgacctgctcggcgcggacccggcgacggtcgtgttggaaccggagggggtgcggtgcgggccgcgctccgtcccgctgagcgacgtccacgcccacgcggtgcgcaccgcgggcgccgcgccgcgggccgacggggccgacgacgccgcactgcgttccgtcgcgttcaacgtccagggtttccgcgtcgccgtggacaccagcaccggcgaggtgcggatcctgcggtcggtgcacgccgtcgacgcgggggtcgtcctcaaccccgtgcagttgcgcgggcaggtcgagggcggggtcgcgcaggccatcgggtcggccctgttcgaggaggtgcaccgcgccgacgacggcagccccctcacggtgtcgttgcgggagtaccacgccccgcgggccgccgacctggggacgacggaggttctgttcgccgacaccgtcgacgcggtgggcccgctgggggcgaagtcgatgagcgaagcgccctacaaccccgtcgctcccgctctggccaacgcggtgcgcgacgccgtcggggtgcggctgcggaggttgccgatgcgcccggaccgcgtctggcgcgcgctggccgaggcggccgaccgtgcgtga

SEQ ID NO: 116039 - protein, 916 aa, Kineococcus radiotolerans SRS30216
MKLTVDGVAAEVEPRPGQCLRTLLRENAGTTVKKGCDTGDCGACTVLVDGSPVHSCLYPALRAGDREVTTAAGLAPAGSLHPVQQRFVDAAGFQCGFCTPGMVVTAAALDEEQRADLDEHLKGNLCRCTGYRAVREAAGGQTLPALARSGGIGEAVAAPAAHRVVTGTEPYTLDLAEGDVPAGLLHAAVLRSPHAHARVTAIDTRAAAALPGVHLVLTHHDAPPVLFSTGRHQNRLDDPDDTLVLDPVLRHHGQRVAVAVAESVALAEEALGLIAVEYEVLPAVLDPHRATAPGAPLLHADKDADSRIADPARNLVAELHSEVGDVEEALASAHAVVEGTWRTQRVAHVALETHAAVGWLDEEGRLVVRSSTQVPFLVRDELARVLGLDRARVRVLAARVGGGFGGKQEMLTEDLVALAVLRTGRPVQYETTRREALTALPTRHPMDVRVRLGATADGTLTALAVDLLSDAGAYGNHSPGVMFHSVHESVATYRCANKRVDARAVYTNSVPSGAFRGYGLGQVVFALESALDDLARELGIDPFTVRRRNVVVPGDRFVATSDPAVTGEDDGLRFGSYGLDQCLDLVERELPRGGDPVPDGPGWRTGSGIALSMIATVPPRGHFAEASARLLADGTWELNVGTAEFGNGTTTVHTQIGVHALSTTADRLRLRQADTDVTGHDTGAFGSAGSVVAGKALLIACERLAGQVRALGADLLGADPATVVLEPEGVRCGPRSVPLSDVHAHAVRTAGAAPRADGADDAALRSVAFNVQGFRVAVDTSTGEVRILRSVHAVDAGVVLNPVQLRGQVEGGVAQAIGSALFEEVHRADDGSPLTVSLREYHAPRAADLGTTEVLFADTVDAVGPLGAKSMSEAPYNPVAPALANAVRDAVGVRLRRLPMRPDRVWRALAEAADRA

SEQ ID NO: 116040 - DNA, 2748 bp, Sulfitobacter sp. EE-36
  CDS (1)..(2748): transl_table=11
atggataaaccgaccacgacagaagtgacctctttcaccctgaacggcagcattgcgcaggttgaaccgctgcccggtgaacgcttgtcttacgcgctgcgcgagcggctggaccgcaaggatgtaaagatcggctgcaacgcgggcgattgcggggcctgcactgtgctggtcgatggcgcgccggtctgcgcctgcctgatgcccgtgcagcaggcggtggggcggcaggtggagacgctggcggggctggtgaaaaccgaccacgacgcgcaggcgttgatgcaaagctttcagcaccatcaggccgcgcaatgcgggatttgcacaccggggatgatggtctctgccgtggcgttgttgcgcgaggtgccgcagccgagcgcggcgcaggtgcaggatgcccttggcggcgtgctgtgtcgctgtaccggctatcgcaagatcatcgacgcggtggtcggggcccatgctgccgacgggctgactgtcgcctctaccgcgcttggccagcctgcgcggcggctggacgggcaggccaaggtcgacgggtcagaggcgtttggcgatgacgttgccccagccggtgctttggtcgcgcgggtcatccgcgcgccccatgcctcggccggatttaccttcggcgatcttgaggcatggcgcagcgcgcagcccggtatccattgcatcctgaccgcagatgacgtgcccggcctcaacgcctttggcgtgatcccgggcttcatcgaccagccggttttcgctgtgaaccacatccggttccggggggaggcggttgcttgcgtcgtgggagaggcggaggcgatgatcgcccttgatctggaaagcttccctgtccgttgggtgccacaaactgcgcttgccgataccgatgccgcgaccgccccagacgcgccacagctgttcgaggatcgcaaaggcaacatcatgtgcggcggcttcgtgcaatgcggcgatgtggaggccgcgctcgacgccgccgacgtcactttcgaggcgcaatataccaccagttttgtcgaacatggctatatcgagcctgaggcaggctttgcccaagtgatcgacgggcgcatccatgtacacgcctgcacccaggcaccgggtatggaccgcgaagcactggccgcgatccttgaccgtcccatggccgacatccgcattgtgccgacggcggtcgggggcggtttcggatcaaagatcgacctgtcgttgcagcccttcatcgcgcttgccgcgctcaagacggcgcggcccgtgcgcatgacctatgcgcgcgccgaaacgatgcaatcgaccaccaaacgccaccccgcgcagatcacgatcaaggtcggggccaaggcggacgggacgctgtcggggctgcggttcgacggggatttcaacaccggtgcttatgcaagctggggtccgacggtcgccaatcgcgtgccggtacatgcctctggtccctaccacatccctgattatcgcgcacgcagccgtgccgtgcatacccattgcccccccgcaggtgccttccgcggcttcggcgtgccgcaatcggccatcgcacaggaaaccgcctttgacctgctggccgaaaagctggggcttgatccgctggagttccgtttgaagaacgcgctggcggacggggtgcccacggtctgcgggcaagtgttcgatcagggcgtcggcatcgccccctgcctagaggcgctgcgccccgcgtgggaggaagcgaaagccgaatgcgcccgtttcaatacaaggaatgacacggtgaaacgcggtgtcgggattgcgggggcgtggtacggctgcggcaatacctcgctgccgaacccgtcgaccattctggcgggcgtgcggccggatggcacggttgtgctgcaccaaggtgcaatggacatcgggcagggggccaatacggtgatcccgcaaatctttgcccaagcgcttgggctgtctgtcgaggggatcaagatcctagggggtgacaccgatatcacgccggacgcgggcaaaacctctgcctcgcggcagacctttgtgtcgggcaatgccgcagtgaggaccggagaggcgctgcgggcgcagatcctgcgacaggtcaacgcgggccccgccgcgcagatcggctgccaagacgggcagctcacggtgaccgacggcgggcgcacgcagcgccttgatctgacgcggctgccggtcgatgcgcagggctatgtgctgcaggcgcaagaaagctatgatccgccggtcaaaccgctggatgaaaacggacagggcgtgccctatgcgcagttcggctatgccgcgcatctggtggtggtcgaggtggatatcgcccttggcctgtgccgcccgctgcgctttgtcgccgcccatgacgtgggccgcgcgatcaacccgttgctggtcgaggggcaggtacagggcggcattgcccaagggctcggtatggcgctgatggaggaatatatccccgggcgcaccgagaacctgcatgattatctggtgccgaccatcggcgacgttcccccgatcgagacgctgatcctggaggtggccgacgcccacggcccctacggcgcgaaaggtctgggcgaacatgtgctgatccccaccgcccccgcgatcctcaatgcaatctaccatgccaccggtgcgcgcgtgacgcagacaccggccacgccgacgcgcctgcgcgccgcccttaaggaggccggacatgcctga

SEQ ID NO: 116041 - protein, 915 aa, Sulfitobacter sp. EE-36
MDKPTTTEVTSFTLNGSIAQVEPLPGERLSYALRERLDRKDVKIGCNAGDCGACTVLVDGAPVCACLMPVQQAVGRQVETLAGLVKTDHDAQALMQSFQHHQAAQCGICTPGMMVSAVALLREVPQPSAAQVQDALGGVLCRCTGYRKIIDAVVGAHAADGLTVASTALGQPARRLDGQAKVDGSEAFGDDVAPAGALVARVIRAPHASAGFTFGDLEAWRSAQPGIHCILTADDVPGLNAFGVIPGFIDQPVFAVNHIRFRGEAVACVVGEAEAMIALDLESFPVRWVPQTALADTDAATAPDAPQLFEDRKGNIMCGGFVQCGDVEAALDAADVTFEAQYTTSFVEHGYIEPEAGFAQVIDGRIHVHACTQAPGMDREALAAILDRPMADIRIVPTAVGGGFGSKIDLSLQPFIALAALKTARPVRMTYARAETMQSTTKRHPAQITIKVGAKADGTLSGLRFDGDFNTGAYASWGPTVANRVPVHASGPYHIPDYRARSRAVHTHCPPAGAFRGFGVPQSAIAQETAFDLLAEKLGLDPLEFRLKNALADGVPTVCGQVFDQGVGIAPCLEALRPAWEEAKAECARFNTRNDTVKRGVGIAGAWYGCGNTSLPNPSTILAGVRPDGTVVLHQGAMDIGQGANTVIPQIFAQALGLSVEGIKILGGDTDITPDAGKTSASRQTFVSGNAAVRTGEALRAQILRQVNAGPAAQIGCQDGQLTVTDGGRTQRLDLTRLPVDAQGYVLQAQESYDPPVKPLDENGQGVPYAQFGYAAHLVVVEVDIALGLCRPLRFVAAHDVGRAINPLLVEGQVQGGIAQGLGMALMEEYIPGRTENLHDYLVPTIGDVPPIETLILEVADAHGPYGAKGLGEHVLIPTAPAILNAIYHATGARVTQTPATPTRLRAALKEAGHA

SEQ ID NO: 116042 - DNA, 2244 bp, Roseovarius nubinhibens ISM
  CDS (1)..(2244): transl_table=11
atgaacaagatcacccgagaaaaaggccagttcaaagtcgtcggcacccgtgtcaaacgccccgatggcatcgacaaggtgacgggccgcgcccaatatggcgccgatctcgtcgtgcccggcatgctcaccggcgcgatcctgcgcagcccgcatgcccatgccacgatcaacagcatcgacacctccgaggcccttgccctgcccggcgtcaaggcggtggtcacccgcgccgattttgccgcgctcgacgatgacgagatgatcgacatcgccgacaattgcctcgcccgcgacaaggtgctctaccacggtcacgccgtggccggtgtcgccgccaaggacgcccagaccgcccgcaaggcgctcaagctgatcaaggtcgactacacgcccctgccccatgtcaccgatgtggatgcggcgatgaaaccgggcgcgcccgtggtgcaatcgggccggcaagaggaaaacgtccaacccgagcattccgagaatgtcaccggctattgcgaattcggtcatggcgatgtggaggcgggctttgccaaggccgaccatatcatcgaacgcgacttcaagaccgccgccgcgcatcagggctatatcgaaccccatgcctgcctcgcctcgatgaccaatgacggcaaggccgatctgtggtgctgcacccaaggtcagttcaacgtgcgctcgctctgctcggcgatcctcgacatggaggcgagccagctgcgcgtcactgcgtctgaaatcggcggcggtttcggcggcaagaccaccgtgtttatcgaacccgtggcgctggcgctctcgcgcaaatccggccgcccggtcaagatcgtgatgacccgcgacgaggtgttccgcgccaccgggccgaccgtctcgtcttcctccaccgtcaagatcggcatgaccaaggacggccgcatcaccgccgcccatgccaagttccgctatcagggcggcgcgttcccctgcgccacctatagttttggggcgcaggcggcctttgccgcctatgatctcgaggcggtgaaatccgagggctggaacgcgctcaccaaccgccccaaagaggccgcctatcgcgcccccggcgcgccgatggcgatctatgcggtggaaagcgtggtcgacgagctgacccagcatttcggtctcgacccgctcgaggtgcggctcaagaacgccgcccgcgaaaacaccaaggccgcctatggcccgaccttcgatcagatcggcctcgtcgccaccctggaagcggcgcagaaacacccgcattactccgccccgctgggcgaaaaccaaggccgcggcgtttcctgcggcttctggttcaacttcggcggcaacacctgcgtgacgatgaacctcaatgacgacggcaccgtcggcatcaccgagggcaaccccgacatcggcggctcgcgcgcctcgatctcgatgatggccgccgaggaactgggcatcccctattccgacgtgcgcaccatcatcgcggatacgagctcgctcggccataacgacgtgaccgatggcagccgcgtgacctttgccgtaggcctcgccacgatcgaggccgcccgcgacgcgatccgcaagatgtgcgggcgcgtggcgaaaatctggggcatcgacgaggacgcggtgatctgggaagacggctatgccaagccctcgggccccaatgccggcgatttcgaaccgatgagcatcaaggagattgccgcgatctcgtcgaacaccggcgggccgattgccggccattacgaggtcaatgccgatggcgccggggtgagctttggcgtgcatctcgccgatgtcgaggttgaccccgaaaccggctatacgcaggtgatccgctacaccgtgttccaggacgcgggcaaggcggtgcatcccgattatgtcgaaggccagatgcagggcggtgccgtgcagggcatcggctgggcgctgaacgaggaatatatctatggcgaggatggagtgctgcaaaacgcgggcttcctcgactaccgcgtgccggtggcctccgacctgcccgagatcgacacggtgatcctcgaaatccccaacccgggccacccttacggggtgcgcggcgtgggcgagacctccatcgtgccgccgctcgcggcgctgtcgaacgcggtgagccgcgcggcgggcgtccgtctgcacgaactgccgatgtcgccgccgaagatcctcaaggcgatcaccgaccggggctga

SEQ ID NO: 116043 - protein, 747 aa, Roseovarius nubinhibens ISM
MNKITREKGQFKVVGTRVKRPDGIDKVTGRAQYGADLVVPGMLTGAILRSPHAHATINSIDTSEALALPGVKAVVTRADFAALDDDEMIDIADNCLARDKVLYHGHAVAGVAAKDAQTARKALKLIKVDYTPLPHVTDVDAAMKPGAPVVQSGRQEENVQPEHSENVTGYCEFGHGDVEAGFAKADHIIERDFKTAAAHQGYIEPHACLASMTNDGKADLWCCTQGQFNVRSLCSAILDMEASQLRVTASEIGGGFGGKTTVFIEPVALALSRKSGRPVKIVMTRDEVFRATGPTVSSSSTVKIGMTKDGRITAAHAKFRYQGGAFPCATYSFGAQAAFAAYDLEAVKSEGWNALTNRPKEAAYRAPGAPMAIYAVESVVDELTQHFGLDPLEVRLKNAARENTKAAYGPTFDQIGLVATLEAAQKHPHYSAPLGENQGRGVSCGFWFNFGGNTCVTMNLNDDGTVGITEGNPDIGGSRASISMMAAEELGIPYSDVRTIIADTSSLGHNDVTDGSRVTFAVGLATIEAARDAIRKMCGRVAKIWGIDEDAVIWEDGYAKPSGPNAGDFEPMSIKEIAAISSNTGGPIAGHYEVNADGAGVSFGVHLADVEVDPETGYTQVIRYTVFQDAGKAVHPDYVEGQMQGGAVQGIGWALNEEYIYGEDGVLQNAGFLDYRVPVASDLPEIDTVILEIPNPGHPYGVRGVGETSIVPPLAALSNAVSRAAGVRLHELPMSPPKILKAITDRG

SEQ ID NO: 116044 - DNA, 2742 bp, Roseovarius nubinhibens ISM
  CDS (1)..(2742): transl_table=11
atgactgatccgatcagcaaggtgaaactggggttcaccctcaatggcgcggcggtcgagatcgcgccggaggcgggcgagcgcctgtcgcagagcctgcgcgagaggcttggccggcgcgacgtcaagatcggctgtgacgcgggcgattgcggggcctgttcggtgctcatcgagggcgagaaccattgcgcctgtctggtggcggcgcatcaggtgcaggggctgcgggtcgagacgctcgccggtctggtcgagcgcgagccgatcacccaagggctgatggagcggttccaggatcatggcgcggcgcaatgcgggatctgcacgccggggatgatggtgtcggcgacggcgctgttgcgcgaagagcccgcgccgagcgacacccagatcgaggatgcgctgggcggggttctgtgccgctgtaccggctatcgcaagatcatcgacgcggtggccggacgcgcgccgcggctcgatgggcgggccgaggtcggcggcgcgatccggcggctcgatgggctggccaaggtgcgcggcgaagagcggttcggcgatgatgtggcaccgcaaggcacgctcgagctggtggtgatccgctcgccgcatgcgcgggccgggtttgaatttggcgatctggaggcctgggccgccgcgacgccgggggtggtcacggtgctcaccgctgcggatattcccggcgagaattgtttcggggtgatcccgccctttgccgatcagccggtctttgccgaaggtgaggcacggtttcggggcgaggcagtggcggcggtggtgctgacacccgaggcgcggcgcgactttgcgcagggcgatttcccggtgacctggcaggagcgcccggcggtgatgggcgtggccgaggcgcgggaagagggggcgccgcagcttcatgaggggcgcgcgggcaatctgatgatcaccggttttgtcgcgcggggcgatgccgaggcggcgcttggtcgtgccgaggtcgtggtcgagggccggttcgagagcgggtttgtggaacatgcctatatcgagccggaggcggggtttgcccagatggcgggcgacaaggtggaaatccacgcctgtacgcaagcgccggtgatggatctcgaggcgctggagatcattctcgggatggatcgcagccgcattcgcatcgtgccgacgggcgttggcggcggctttggctccaagctcgatatctcggtgcagcccttcctcgcgctggcggcgctgaagaccgggcagccggtgcgcatcgcctatagccgcacggaatcgatgcaatcgaccaccaagcgccacccgtcgcagattcatctgcggatcggggcggatggcgaggggcggctctgtggctttgcctttgacggggatttcaacaccggggcctatgcgtcctgggggccgactgtggccaaccgggtgccggtccatgcctcggggccctatcagcttggcgattatcgggccgaggcgcggggcattcacacccattgcccgccctcgggggcgtttcgtggctttggcgtgccgcaggcggcgattgcgcaagagagcctgtttgacgaattggcgggcaagcttggtctcgatccgctggagtttcgcattcagaacgcgctgcgcgatggggtgccgacggtctgcgggcaggtgttcgggcagggcgtcggcatcggtgcctgtctcgaggcgctgcgcccggcctgggccgagctgcgcgccgaggcggaggcgttcaacctcgaccaagccgggcctttgcggcgtggcgtcggtgtggcggcgggctggtacggctgtggcaatacctcgctgccgaacccatcgaccattcgcgccgggctgcgcccggatgggcaggtggtgctgcatcagggcgcgatggatatcgggcaaggcgcgaatacggtcatctcgcaggtctttgccagcgccttgggcctcgcggcggatcgccttgtgctgatcggggcggatacggatgtgacgccggatgcgggcaagacctcggcctcgcgtcagacctttgtgtcgggcaatgcggccaagctctgtggcgcggcgctgcgcggcgagatcctgcgcgcgatgaacgcgggcgagggcgcggtgctgcggtttgaggcgggggcggttctggccgaagagaacggacggcagcagcggctcgacctcgcggcgctgccgatggatgatctgggctatgtgatgcgggccgaagagacctatgacccgccgaccaagccgctcgacgagaacgggcagggcgagccctatgcccagttcggctatgccgcgcatctggcgatggtcgaggtggacacgcggctcggcactgtgcgggcgcggaaattcgtggcggcgcatgatgtcgggcgggcgatcaacccgatgctggtcgagggccagatcgagggcggcattgcgcaggggctcggcatggcgctgatggaggaatacctgccggggcggacggaaaacctgcatgattatctgatcccgaccattggggacattcccccggtgcaatcgctcatcatcgaagtgccggatgcgcatgggccctatggggccaaggggcttggcgaacatgtgctgatcccgacggcgcctgcgatcctcaatgcgattgcccatgccaccggggtccggatgcggtcggtgccggtgacgccgtcgaaactggcggctgcgttgaaaggggacaagaatggctga

SEQ ID NO: 116045 - protein, 913 aa, Roseovarius nubinhibens ISM
MTDPISKVKLGFTLNGAAVEIAPEAGERLSQSLRERLGRRDVKIGCDAGDCGACSVLIEGENHCACLVAAHQVQGLRVETLAGLVEREPITQGLMERFQDHGAAQCGICTPGMMVSATALLREEPAPSDTQIEDALGGVLCRCTGYRKIIDAVAGRAPRLDGRAEVGGAIRRLDGLAKVRGEERFGDDVAPQGTLELVVIRSPHARAGFEFGDLEAWAAATPGVVTVLTAADIPGENCFGVIPPFADQPVFAEGEARFRGEAVAAVVLTPEARRDFAQGDFPVTWQERPAVMGVAEAREEGAPQLHEGRAGNLMITGFVARGDAEAALGRAEVVVEGRFESGFVEHAYIEPEAGFAQMAGDKVEIHACTQAPVMDLEALEIILGMDRSRIRIVPTGVGGGFGSKLDISVQPFLALAALKTGQPVRIAYSRTESMQSTTKRHPSQIHLRIGADGEGRLCGFAFDGDFNTGAYASWGPTVANRVPVHASGPYQLGDYRAEARGIHTHCPPSGAFRGFGVPQAAIAQESLFDELAGKLGLDPLEFRIQNALRDGVPTVCGQVFGQGVGIGACLEALRPAWAELRAEAEAFNLDQAGPLRRGVGVAAGWYGCGNTSLPNPSTIRAGLRPDGQVVLHQGAMDIGQGANTVISQVFASALGLAADRLVLIGADTDVTPDAGKTSASRQTFVSGNAAKLCGAALRGEILRAMNAGEGAVLRFEAGAVLAEENGRQQRLDLAALPMDDLGYVMRAEETYDPPTKPLDENGQGEPYAQFGYAAHLAMVEVDTRLGTVRARKFVAAHDVGRAINPMLVEGQIEGGIAQGLGMALMEEYLPGRTENLHDYLIPTIGDIPPVQSLIIEVPDAHGPYGAKGLGEHVLIPTAPAILNAIAHATGVRMRSVPVTPSKLAAALKGDKNG

SEQ ID NO: 116046 - DNA, 2367 bp, Oceanicola batsensis HTCC2597
  CDS (1)..(2367): transl_table=11
atgcccaaagacggcatcggcgccagcaccaagcggcgcgaagacgtgcgtttcctgaccggcacgggccggtacacggatgacatcaatctcggcaagcagctctacgtgcatttcctgcgcgccgacgtggcccatgccaggatcaacggcatcgacacctcggcggccgagggcatgccgggcgttgtccgcatcttcaccgcgaaggatttcgaaggcgtcggcgggctgccctgcggctggcaggtgaccgacaagcatggccagcccatgcaggagcccaagcacccgatcatcgccgagggcaagatccgccatgtcggcgaaatcgtcgccgccgtggtcgccgagaccctcgatcaggcccgcgacgcggccgaggcgatcatgcccgacctcgaggaactgcccgcggtcgtcgacatgaaggaagccgtcagggagggcgcgaccaaggttcacgacgacctgacctcgaacctctgctatgactggggcttcgtcgaggagaacaaggccgccgtggacgaagccttcgaaaaggccgcgcatgtcacgacgctggaactggtgaacaaccgtctcgtcgccaatccgatggagccgcgggtggccgtcggcgactatgccgcgcatagcgacgaatcgaccctgtacaccacctcgcagaacccgcacgtgatccggctgctgatgggcgccttcgtgctcggcattcccgagcacaagttgcgcgtcgtggccccggacgtgggcggcggcttcggcaccaagatcttccactatgccgaagaggccttctgcaccttcgccgcgaaacagctgcggcgcccggtcaagtggacctcgacccggtccgaagccttcatctcggacgcgcatggccgcgaccacgtgtcgaagatccagatcgcgctggatgccgacaacaactttaccgcgctgcgcaccgacacctatgccaacatgggcgcctatctctcgaccttcgcgccctcggttccgacctggctgcacggggtcctgatggcgggcaactatcgcacgccgctgatctacgtgaacgtcaaggcggtcttcaccaacaccgtgcccgtcgacgcctatcgcggggccggtcgccccgaggcgacctatcagctggaacgctgcatcgacaaatgcgcgcgcgaactgggcgtcgacccggccgagctgcggcggcagaacttcatcacgcccgaccagttcccctatgcgaccccggtcgcggtggaatacgacaccggcaactatcacgccacgctcgacaaggcgctggaactggcggacgtggcgggcttcgaggcacgggccgaggagtcgaagcggaccggcaagctgcgcggactgggcatcgccaactatatcgaggcctgcggcatcgcgccctcgaacctcgtcggtcagctgggtgcccgcgccggtctctacgaatccgccaccgtcagggtgaacgcgaccggcggcgtggttgtcatgaccggttcgcacagccacggccaggggcacgagacgacctttccgcaggtgatcgccgacatgatcggcatcgacgccagccaggtcgagatcgtgcacggcgacaccgccaacaccccgatggggatgggcacctacggctcgcgctctctcgcggtcgggggctcggccatgttccgcgcggcggaaaaggtgatcaacaaggccaagaagatcgcggcccacctgatggaggcctccgaaggcgatatcgaactcaaggacggccagttcaccgtcgccggcaccgacaagtcggtggcttggggcgacgtgacccttgccgcctatgtgccgcacaactacccgctggaccagatcgagccggggctggaggaaacggcgttctacgatcccgcgaacttcacctatccctcgggcacctacatctgcgaggtcgaggtggacgagggcaccggccaggtcgaggtgctgagcttcaccgccgccgacgatttcggcaacgtggtgaacccgatgatcgtcgaggggcaggtccatggcggtgtcgcgcagggcatcggccaggcactgctggagaactgcgcctacgatgcggacggccagctcctttcggccacctacatggactatgccatgccgcgcgcggccgacctgccgatgatcacggtcgaccattcctgccagacgccctgcacgcacaacccgctcggcgtgaagggctgcggcgaggccggcgcgatcggtgcgcctccggcgctggtcaatgccgtgctggacgcgctcaaccggaacggccatgctgtcgaccatatcgacatgccgctgtcgccggcccgtgtctggtccgcgatgaacgcttga

SEQ ID NO: 116047 - protein, 788 aa, Oceanicola batsensis HTCC2597
MPKDGIGASTKRREDVRFLTGTGRYTDDINLGKQLYVHFLRADVAHARINGIDTSAAEGMPGVVRIFTAKDFEGVGGLPCGWQVTDKHGQPMQEPKHPIIAEGKIRHVGEIVAAVVAETLDQARDAAEAIMPDLEELPAVVDMKEAVREGATKVHDDLTSNLCYDWGFVEENKAAVDEAFEKAAHVTTLELVNNRLVANPMEPRVAVGDYAAHSDESTLYTTSQNPHVIRLLMGAFVLGIPEHKLRVVAPDVGGGFGTKIFHYAEEAFCTFAAKQLRRPVKWTSTRSEAFISDAHGRDHVSKIQIALDADNNFTALRTDTYANMGAYLSTFAPSVPTWLHGVLMAGNYRTPLIYVNVKAVFTNTVPVDAYRGAGRPEATYQLERCIDKCARELGVDPAELRRQNFITPDQFPYATPVAVEYDTGNYHATLDKALELADVAGFEARAEESKRTGKLRGLGIANYIEACGIAPSNLVGQLGARAGLYESATVRVNATGGVVVMTGSHSHGQGHETTFPQVIADMIGIDASQVEIVHGDTANTPMGMGTYGSRSLAVGGSAMFRAAEKVINKAKKIAAHLMEASEGDIELKDGQFTVAGTDKSVAWGDVTLAAYVPHNYPLDQIEPGLEETAFYDPANFTYPSGTYICEVEVDEGTGQVEVLSFTAADDFGNVVNPMIVEGQVHGGVAQGIGQALLENCAYDADGQLLSATYMDYAMPRAADLPMITVDHSCQTPCTHNPLGVKGCGEAGAIGAPPALVNAVLDALNRNGHAVDHIDMPLSPARVWSAMNA

SEQ ID NO: 116048 - DNA, 2736 bp, Xanthobacter autotrophicus Py2
  CDS (1)..(2736): transl_table=11
gtgacctacagcatcgacgggcggaccgtttccgccgagccgcgtcccggccagtgcctgcgcaccttcctgcgcgagagcggcgcgctgggggttaagaagggctgcgacgcgggggattgcggcgcctgcaccgtgtggctcgacgggcgagcggtgcattcctgcctcatgcccgccttccgggccaaggggcatcaggtcaccaccgtgcagggcctcgcctccggcaatgctctgcatccggtgcagcaggcgtttctggaggcgcaggcgttccagtgcggcttctgcgccgccggcatgatcatgacggtggccgccctcgatgaggaccagcgggccgacctgccgcgcgcgctgaagggcaacctctgccgctgcaccggctatcgctccatcgcggatgcggtccacggcgtcggcgccatcgagcaggacgtggcgggggcggcctgcggcgccagcctgcccaatccgttcagcgccggcatcgtcaccggtcatgcgcgctacaccatggatgtggacacagccgacccggcgctccacggcctgctgcatctcaaggtgctgcgctcgccccatgcccatgcgcgcatcctgcgcatcgacacggcgaaggcgctcgccatccccggcgtggtggcggtgttcacccatgaggacgtgccgaagaagctcttcagcaccgccacccacgaggaccatctggtcgatcccgacgacaccctcatcctcgacgatgtggcccgcttcgtcggccagcgcatcgccgccgtggtggcggacaccgagggagccgccgaggccggctgccgggcgctggaggtggattacgagatccttcccgccgtgttcgatccgctccaagccatggcgccggacgcgccgctgctgcatcccggcaatgacgggctcgccggtggcgcgcggggcaatgtcttcctctgcctcaagggcgaggtgggcagcgtcgccgagggcttcgcggccgccgccgtggtccatgatgagacctattccacctcccgcgtgcagcatgcgcatctggaaacccacggctccatcgcctggcgggacggcgacgggcgcatccatgtgcgcacctccacccaggcgccgttcatcacccacaagaagctctgctatctcttcggcatcttcccccacgacctgcatgtgttcaccgagcgggtgggcggcggcttcggcggcaagcaggagatgctgtcggaagacctgtgcgtgctggcgacgctgaagctcggccggccggtgaagtgggaattcacccggccggaggaattcctcggcgccaccacccgccaccagatgaccacgcgggtgaagatgggcgccacggcagacggcatgctgacggcgctggaggtgcatgtggtgtccaacaccggcgcctatggcggccatggcggggagacgctggcggcggcgctggggagcccgctcgccgcctatcgctgcccggccaagaaggccgagggccacgcggtctataccaatgtcatccccggcggcggctttcgcggttatggcgcctcgcagacctcgttcgccatcgaatcggcgctggatgacctcgccgccaagctcggcatcgaccccttcgccatccgccgcaggaacatgatccggccggacgatgtgatccagtcggtgtgggccgagccgagcgacgtggcctttggcagctacggcctcgaccagtgcctcgacctcgtggaggcggaactcgccagcggcaagggcgatcaggcacccgaaggcgactgggccgagggcaccggcgtggcgctggccgtgctggaggccggcccgcccaccgagcatcgctccggcggcgagatgcggctcctggcggacggcacctatcacctcgccgtgggctccaccgagatgggcaacggctcggtcaccgcccatcgccagatcgcggcagcggtgctgggcacgcgagcggaggccatcgccatcatcaatgcggataccgaccgcgcgccctacgacaccggcaccttcgccagcaccggcacggtggtggccgggcaggcggtggagctgacggcgcgggcgctggcggccgagatcctctcctacgcggcgcggcgcaccaatacggcgccggaggactggcggctgaccgccgacgcggtggaaagcgcaacccagcgcatttcgctcgccgaactctgccggctcgctgccgccgagggccatcacctggaggccaagcgcaaggcctatctctcgccgcgtaccatcggcttcaacgtgcagggggtgcggcttgccgtgcaccgggtgacgggggaggtccgcgtcctccacagcgtgcatgcggcggacatcggccgcctcatcaacccgctgcaatgccggggtcagatcgagggcgcggtggccatggggctgggctgggcgctcaccgagcatatggtgcacgacgctcagggcaacatcctgaacgcggcgctgcgcaactatcacatccccgccttcgccgacatgccgcgcaccacggtgctgttcgccgacacccacgacagcatcggtccgctgggcgccaaggcgcagggcgaatgcgccatcaacgcggtggcgccggcggtggccaacgcgctcgccaacgccaccggcgtgcgcttcgcccatctgcccttcaccccggaccgcatcttcgaccggctcggccgggcggcgggggcgccctcatga

SEQ ID NO: 116049 - protein, 911 aa, Xanthobacter autotrophicus Py2
MTYSIDGRTVSAEPRPGQCLRTFLRESGALGVKKGCDAGDCGACTVWLDGRAVHSCLMPAFRAKGHQVTTVQGLASGNALHPVQQAFLEAQAFQCGFCAAGMIMTVAALDEDQRADLPRALKGNLCRCTGYRSIADAVHGVGAIEQDVAGAACGASLPNPFSAGIVTGHARYTMDVDTADPALHGLLHLKVLRSPHAHARILRIDTAKALAIPGVVAVFTHEDVPKKLFSTATHEDHLVDPDDTLILDDVARFVGQRIAAVVADTEGAAEAGCRALEVDYEILPAVFDPLQAMAPDAPLLHPGNDGLAGGARGNVFLCLKGEVGSVAEGFAAAAVVHDETYSTSRVQHAHLETHGSIAWRDGDGRIHVRTSTQAPFITHKKLCYLFGIFPHDLHVFTERVGGGFGGKQEMLSEDLCVLATLKLGRPVKWEFTRPEEFLGATTRHQMTTRVKMGATADGMLTALEVHVVSNTGAYGGHGGETLAAALGSPLAAYRCPAKKAEGHAVYTNVIPGGGFRGYGASQTSFAIESALDDLAAKLGIDPFAIRRRNMIRPDDVIQSVWAEPSDVAFGSYGLDQCLDLVEAELASGKGDQAPEGDWAEGTGVALAVLEAGPPTEHRSGGEMRLLADGTYHLAVGSTEMGNGSVTAHRQIAAAVLGTRAEAIAIINADTDRAPYDTGTFASTGTVVAGQAVELTARALAAEILSYAARRTNTAPEDWRLTADAVESATQRISLAELCRLAAAEGHHLEAKRKAYLSPRTIGFNVQGVRLAVHRVTGEVRVLHSVHAADIGRLINPLQCRGQIEGAVAMGLGWALTEHMVHDAQGNILNAALRNYHIPAFADMPRTTVLFADTHDSIGPLGAKAQGECAINAVAPAVANALANATGVRFAHLPFTPDRIFDRLGRAAGAPS

SEQ ID NO: 116050 - DNA, 2340 bp, Alteromonadales bacterium TW-7
  CDS (1)..(2340): transl_table=11
atgcgtcactttgaaatggataaactaaaagcccaaggcggaagcgttggccaatctaagtaccacgaaagcgcaataaaacaagtatgtggcaatgcaaactacgccgacgataacccagagcctcatggctgcttacacgcctaccctgtacttgcgcccattaccagcggctttattaaatcaattgatacaagcaaagcgcttgaagtggcaggtgttaagcgtattttatcggctgatgatgtacccggtaagcttgatattggcccaatattcccaggtgatgtgctattaaccaatcacgaaattcaataccacgggcaacctgtgctggtagtggttgccaaaagctacgaaatggcgcgccgcgctgctcgcttagtggttatagagtgcgagcaaaccacccccatacttgatattaaagaagcgataaaaaaagagcactgggtaagaccgccacattcacttaaccgcggtaatagcgagcaagccataaataatgcagcccaccaacttaaaggtgaaatacacataggcgggcaagaacacttttaccttgaggggcaaatagcactcgctcagcccgacaacgatggcgggattcatgtgcaatgttctacgcagcacccaacagaagtgcagcacttagttgccaaaattttaaaaaagccatttagctttgtaaacgtagaaacccgccgaatgggcggtgcttttggcggcaaagaaactcaaggcgcgccgtgggcttgccttgcagcgcttgcggtttatcaccttggctgcgccgttaaaatgcggctagcccgcagcgacgactttaaacttaccggtaaacgccacccattttataatcaataccatgtagggtttgaccaaaatggcctaattgaaggcgctgatgtaaccgtaaatgggttttgtggttattcgcctgacttatccgatgccattgtagaccgcgccatgtttcatgccgataacgcttattactacccagccgccacaattaaagggaatcgctgtaaagttaatactgtaagccacaccgcattcagaggatttggtggcccgcaaggcatgatcatgggcgagctaataatggacgatatagccgctaaattgggtaaagatccgcttgagatccgaaaacttaatttatacaaaaaaggccgcgacaccacgccgtatcatcaaaccgtagagcaacatattttaaaagatatgataagccagcttgaggagtcgggtgattactgggcgcgaaaaaaggcaattaaaacctttaatgcatcatcgcccattatcaaaaaaggccttgcgatgacgccggttaaatacggtatatcgtttaccgtacagcacttaaaccaggcgggtgcactcgtgcatgtatatagcgatggatcaattcatttaaaccatggcggcaccgaaatgggtcaagggcttaatacaaaaatagcgcaaattgtagcccatggctttggcgttgattttgacgcagtaagcataagcgcgacccgtaccgacaaagtaccaaacacctcgccaaccgcggcttctagcggtaccgacttaaacggtatggcggcactaaatgcaataaacaccataaaagagcgcttaataaactttataagcgagcactttgaagtagacagccaaagtattgtatttaaagataaccttattacctttagtaaaggcgaaattagctttagcgaacttgcaaaccttgcttacatgaatcgtatatcgctttcatcaaccggttattacgccacccctaaaattcattacgacagagcgaaaggcgaaggccgaccatttttttactacgcgcacggcgtagcactgagtgaagtagaggtagatacgctgacaggtgaaaatacggtaacccgtgttgatattctgcacgatgtgggcagttcaataaacccagcacttgatatagggcaagttgaaggggcttttgtgcaaggtatgggctggcttaccaccgaagatctacaatggaacgataaaggccagcttgccagctttggccctgctaactataaaatacctgctattggcgatacccctgccgaatttaacgtcaatttatataactctgccaacccagaaaccaccgtttttagatcaaaagcagttggcgagccgccgtttatgttggcctttagtgtttggagcgctattcgtaacgccataagcagtgtggccgattacaaatacaccgccccacttgatacacctgccacaccagagcgtgtacttaatgcaattgagcgaaccgccagctggtttaaggagcagcaacatggctaa

SEQ ID NO: 116051 - protein, 779 aa, Alteromonadales bacterium TW-7
MRHFEMDKLKAQGGSVGQSKYHESAIKQVCGNANYADDNPEPHGCLHAYPVLAPITSGFIKSIDTSKALEVAGVKRILSADDVPGKLDIGPIFPGDVLLTNHEIQYHGQPVLVVVAKSYEMARRAARLVVIECEQTTPILDIKEAIKKEHWVRPPHSLNRGNSEQAINNAAHQLKGEIHIGGQEHFYLEGQIALAQPDNDGGIHVQCSTQHPTEVQHLVAKILKKPFSFVNVETRRMGGAFGGKETQGAPWACLAALAVYHLGCAVKMRLARSDDFKLTGKRHPFYNQYHVGFDQNGLIEGADVTVNGFCGYSPDLSDAIVDRAMFHADNAYYYPAATIKGNRCKVNTVSHTAFRGFGGPQGMIMGELIMDDIAAKLGKDPLEIRKLNLYKKGRDTTPYHQTVEQHILKDMISQLEESGDYWARKKAIKTFNASSPIIKKGLAMTPVKYGISFTVQHLNQAGALVHVYSDGSIHLNHGGTEMGQGLNTKIAQIVAHGFGVDFDAVSISATRTDKVPNTSPTAASSGTDLNGMAALNAINTIKERLINFISEHFEVDSQSIVFKDNLITFSKGEISFSELANLAYMNRISLSSTGYYATPKIHYDRAKGEGRPFFYYAHGVALSEVEVDTLTGENTVTRVDILHDVGSSINPALDIGQVEGAFVQGMGWLTTEDLQWNDKGQLASFGPANYKIPAIGDTPAEFNVNLYNSANPETTVFRSKAVGEPPFMLAFSVWSAIRNAISSVADYKYTAPLDTPATPERVLNAIERTASWFKEQQHG

SEQ ID NO: 116052 - DNA, 2241 bp, marine gamma proteobacterium HTCC2143
  CDS (1)..(2241): transl_table=11
atgaatgatccaaaatatacaggacaggaattcaaggttatcggctcccgagtcaaaaggcctgacggaatagacaaagtgacagggcgagcaaggtacggtgccgatatgaatgcgcctgggcaattagtcgctttgatgctgcgctcgcctcacgcacatgctcgtattaaaaaaattgatatttctaaagctgaaaagttacccggtgtaaaagcggtcattacagcggcagatttgcccgatttgaccgagggcaatgcggggcttttcgatacgctcgaaaactcgatggcacgggatcgtgcactgtatgacgggcatgcggtggctggcgttgctgctatcgataaatctaccgcgaaaaaagcattaaaactgattaaagtcacttatgaaaagctgccccatgtcacagatgtggatgacgctcttgaagatgatgccccaattatacaacctcgatatgcaacggaaggtcaacacggtaatctgatcaataaaggtgaatttggtcaaggcgatatcgaccaaggttttgccgaagctgatgtaattgtagagcgcagttataaaacagggcagacacaccaaggctatattgaacctcacgcttgtctcgcaagtgtcagcccagatggtaccggtgagttgtgggtaacgactcaggggcattattcctatcggaatacctgtgcccaactactgggaatggatattgcgaaattaaaagtgacatcgtctgaaattggtggtggttttggtggcaagacccacgtttggatggagccgattgcattggcactgtcccgcaaggcaaatcgccccgtaaaaatggtgatgagccgcgaagaggttttcaaagcctcggggccgacctgttcaacgtcgatggaaattaaaattggcgccaagaaagacggcactatcgttgctgctcgtgctgaatgccggtatatgaatggggcttttcctggtatgtggggcactttgggtgggatgacggcatttgcctgctacagcattcccaacaataaggcgataggcgtcaacgttttgtgcaatcgtcccaaagtggctgcttatcgtgctccctctgcaccaatgatggcttttggtgttgaaagtacgatagatcaattgtcaaaagagctcggtatagatcctgtagagcttagacttaaaaatgtagcccgagaaggtacgcaggcaccctatggtccggtctggggacccatcggtatcgaaccgacattggaagccgtgcgtgatcatcctcatatgaaagctaagcttggtaagaatcaaggccgcggtgtagcttgcggtttctggttcaatatcggcggtcaaacatgtagtgatctaaatattggtcccgatggtacggttaacttgaccgtaggtacaatcgatgtggggggtgcgcgagcgtcactggcgatgattgcagcggaagaattaggtattacgtatgaggacgttaaggtcaatattggtgatacatcgtcgctgggtcacaatgatacgacagagggaagtcgtggcacattctcatccggtatggcggcaatctttgcagcaagaaaagcggttgatgtattaaaagagcgcgccgccaaaatgtggcaaattccggttgaatcagtgatctgggaagacggttctgctcgagcaaacggtaaagaacacagcaatctgtcgcccttaacattgaaagatattgccaaaaaagcgggtagtactgggggtccaatcgctggtcaccatgaagctaccgccgagggcgcaggtgtttcctttgcatcacacattgttgatgtagaagttgaccctgagacaggtaagacgcagattcttcggtataccgttgtgcaagatgccgggaaggcaattcatcctgactacgttgaaggccaatttcagggcgcagcggctcaaggtattggatgggctcttaatgaggagtacatctatggcaaggacggccgcttgcagaattcgggtttcttggattacaggatccccgtttgttctgatctgccgtcaatagatactaaaattttagagatacctaaccccggccatccctacgggatacgtggtgtgggtgagacatcgattgtgccaccgctgggtgcaatcggtaacgccgtgtctaatgccgtgggtgtcagaatgtacgaagtaccaatgtctcccccgagaatcctaaaagcattggatgaggctggtgtctag

SEQ ID NO: 116053 - protein, 746 aa, marine gamma proteobacterium HTCC2143
MNDPKYTGQEFKVIGSRVKRPDGIDKVTGRARYGADMNAPGQLVALMLRSPHAHARIKKIDISKAEKLPGVKAVITAADLPDLTEGNAGLFDTLENSMARDRALYDGHAVAGVAAIDKSTAKKALKLIKVTYEKLPHVTDVDDALEDDAPIIQPRYATEGQHGNLINKGEFGQGDIDQGFAEADVIVERSYKTGQTHQGYIEPHACLASVSPDGTGELWVTTQGHYSYRNTCAQLLGMDIAKLKVTSSEIGGGFGGKTHVWMEPIALALSRKANRPVKMVMSREEVFKASGPTCSTSMEIKIGAKKDGTIVAARAECRYMNGAFPGMWGTLGGMTAFACYSIPNNKAIGVNVLCNRPKVAAYRAPSAPMMAFGVESTIDQLSKELGIDPVELRLKNVAREGTQAPYGPVWGPIGIEPTLEAVRDHPHMKAKLGKNQGRGVACGFWFNIGGQTCSDLNIGPDGTVNLTVGTIDVGGARASLAMIAAEELGITYEDVKVNIGDTSSLGHNDTTEGSRGTFSSGMAAIFAARKAVDVLKERAAKMWQIPVESVIWEDGSARANGKEHSNLSPLTLKDIAKKAGSTGGPIAGHHEATAEGAGVSFASHIVDVEVDPETGKTQILRYTVVQDAGKAIHPDYVEGQFQGAAAQGIGWALNEEYIYGKDGRLQNSGFLDYRIPVCSDLPSIDTKILEIPNPGHPYGIRGVGETSIVPPLGAIGNAVSNAVGVRMYEVPMSPPRILKALDEAGV

SEQ ID NO: 116054 - DNA, 2238 bp, marine gamma proteobacterium HTCC2080
  CDS (1)..(2238): transl_table=11
atgaatgccaagcaggagttcaaaattgttggcaccaggccgattcgccctgatggcttagacaaagtcaccggtcgggcacgctatggtgcagaccttaatatgcagggccaaatctacgggcacatcctccgcagccctcatgcccatgccaacattaagagcatcgattgcagcaatgccctcgctatggagggtgtcttggcggtcatgacaggagaagacctcgccgagcctggaaatatcgttttaggcagtggggaaggcgccatcgcgctgaaagacttgattcccatggtgatgtcccaagggaaggtcttgtttcacgcccaagcggttgctgctgtcgcagcgacaacagcggctctggcagccgaagcggcggccgccattgaaattgtctacgaggtgctgcccgcagttacagatatgcacgaggcactcgccgatggtgcgcccattttgcatagcgatcgctttcccgacggcaaacctaaagaaccgactaacctggcagcagagatcacgatgcaagtcggggagcccgacgcggcttttgagcgagctgatgtcatcgtagagcgcacctattcggtacctatgtgccatcagggctacatagaaccccatgcctgtgttgtcagggttgatgcggcgaaacgggtcgatctttggtgttgtacccaagggcatttcactgttcgccaatacacagcagcggttaccggtattagtctgggtaacattcgcgtgacaccctcagagataggcgggggctttggcggtaagaccacggtttatctggaaccgattgcagtgatactggcgcagaagtctggaaggccggtgaaaatagtcatggatcgaggcgacgtatttcgtacgacgggccctgctccgggggccacaacccgcgtaaagctgggcgctactaaagatggcaggctaatcgcagccgatgtcgagtgcctcatggattccggagcctataacggtaaccccgcaggcattcctgcctttatggcaaccgcttgttataaattaactgatgcgcgctcctcgggccgttcggtatataccaacaaaccaaaaatacatgcctatcgagcacccagcatgcctcaggtcactttggcctttgagttagtgataaatgaagtggccgccgagctgaaaatcgaccccttagaatttcgtctcaacaacgcagtagaagaaggcgacgtcaatatgatgggcgccccctacaaacgcatcggccttcgtgaatgcctggaggcggcacgcagccacccccactaccaatcgtctgttgcagacggcgcgggtcgagggattgcagcagggtactggattaacgccggcatgcaatcgagtgccacgcttaacgtcagtcccgatggcagtgtatcgcttctcacgggcagcccagatattggtgggtcccgagcctccatggcaatcatgggcgctgaggtgctgggtattcctcttgaaaccatctaccctcaggttgtcgcaaccgatgccgtggggcactgcgatgtcactggcggtagtcgtacaacactggccacgggccaagcggtaattcaagctgcagatgaactggtggcagagttgtgccgtcgagttgcccttgagtgggatgtgccagaagatgaagtcatgtggtcagatggtgctgcgcatcatggtgagaaatctttaagcttcaaagaccttgcgagccgcgccagcgctatgggcgggccgcttacggtatcaagctcgctcaattcgaccagtgcctcaccgggctttggcgtacacatctgcgatgccgaagtcgacaaagaaacgggccgtaccaccattacccgatataccgttgtccaagatgccggtaaggccatccacccaacctatgtcgaaggccaaatgcaaggaggtgccgcccaaggtattggctgggcactcaatgaagaatacgtttataacgaccaaggcgtcctagaaaatgcaggctttctcgattaccgcattcccgttgcctcagacctccctttcatcgatacggtgattgttgaagtcccaaatccattgcacccctatggtgtgaaaggggtgggtgaagtccccatcgtgccgcccatgcccgctgtggcgcaggccgtttttgattctggcaatatcagagtaatggatttgccgttaaacccagccaaagttgcggcagcaatcattgaagccccatag

SEQ ID NO: 116055 - protein, 745 aa, marine gamma proteobacterium HTCC2080
MNAKQEFKIVGTRPIRPDGLDKVTGRARYGADLNMQGQIYGHILRSPHAHANIKSIDCSNALAMEGVLAVMTGEDLAEPGNIVLGSGEGAIALKDLIPMVMSQGKVLFHAQAVAAVAATTAALAAEAAAAIEIVYEVLPAVTDMHEALADGAPILHSDRFPDGKPKEPTNLAAEITMQVGEPDAAFERADVIVERTYSVPMCHQGYIEPHACVVRVDAAKRVDLWCCTQGHFTVRQYTAAVTGISLGNIRVTPSEIGGGFGGKTTVYLEPIAVILAQKSGRPVKIVMDRGDVFRTTGPAPGATTRVKLGATKDGRLIAADVECLMDSGAYNGNPAGIPAFMATACYKLTDARSSGRSVYTNKPKIHAYRAPSMPQVTLAFELVINEVAAELKIDPLEFRLNNAVEEGDVNMMGAPYKRIGLRECLEAARSHPHYQSSVADGAGRGIAAGYWINAGMQSSATLNVSPDGSVSLLTGSPDIGGSRASMAIMGAEVLGIPLETIYPQVVATDAVGHCDVTGGSRTTLATGQAVIQAADELVAELCRRVALEWDVPEDEVMWSDGAAHHGEKSLSFKDLASRASAMGGPLTVSSSLNSTSASPGFGVHICDAEVDKETGRTTITRYTVVQDAGKAIHPTYVEGQMQGGAAQGIGWALNEEYVYNDQGVLENAGFLDYRIPVASDLPFIDTVIVEVPNPLHPYGVKGVGEVPIVPPMPAVAQAVFDSGNIRVMDLPLNPAKVAAAIIEAP

SEQ ID NO: 116056 - DNA, 2871 bp, Escherichia coli B
  CDS (1)..(2871): transl_table=11
atgatcatccactttactttaaatggcgcgcctcaggagctaaccgttaatccaggcgaaaacgtgcaaaagctgttgtttaacatgggaatgcactctgtacgcaacagtgatgatggtttcgggtttgccggttctgacgcaatcatctttaacggtaatatcgttaacgcgtccttgcttattgccgcacagttagagaaggcagatattcgtaccgcagaatctctgggcaaatggaacgagttaagtctggttcaacaggcaatggttgatgttggcgtggtgcagtctggttataacgatccagctgcagctctgattatcaccgatcttctcgatcgcatcgccgcacctacccgcgaagagatcgacgacgcgctttctggtttgttcagccgcgatgctggctggcagcaatactatcaggtcattgaactggcggttgcacgtaaaaataatccgcaggccaccattgatatcgctccgactttccgtgacgaccttgaagtcattggcaagcattatcctaaaactgatgccgcgaaaatggtgcaggcgaaaccctgctatgttgaagaccgcgtaacggctgacgcctgcgtcattaaaatgttacgtagcccacacgctcacgcactgattactcatctggatgtcagcaaagctgaagccttaccgggcgtcgttcacgttattactcacctgaattgccctgatatctactataccccggggggtcagagcgcaccggaaccgtcaccgcttgaccgccgtatgttcggcaaaaaaatgcgtcacgtcggcgatcgcgttgctgcggtggtcgctgaaagtgaagaaattgcgctcgaagcattgaaactcatcgaggttgaatatgaagtgcttaagccggtaatgtcgatcgacgaagcaatggcggaagatgcgcctgtcgtgcacgatgaaccggtggtgtatgttgctggtgcgccagatactctggaagacgataacagccatgcagcccagcgcggcgagcatatgatcatcaacttcccgatcggttctcgccctcgcaaaaatatcgccgctagtattcatggtcatattggcgatatggacaaaggctttgccgatgccgatgtgatcattgagcgaacctataactcaacgcaggcgcagcagtgcccgactgaaacacatatctgctttacccggatggacggcgatcgtctggttatccacgcctccacccaggtaccatggcacttacgccgccaggtcgcgcgcctcgtgggcatgaaacagcataaagttcatgtcattaaagagcgagttggcggcggttttggttccaaacaggacatcctgctggaagaagtgtgcgcctgggcaacctgcgtgaccgggcgtccggtactgttccgctacacccgtgaagaagagtttattgctaacacctctcgtcacgtcgcgaaagtcaccgtcaaactgggagcgaaaaaagatggtcgcctgacggcagtgaagatggatttccgcgccaacactggcccttacggcaaccactcactcaccgtaccgtgtaacggaccggcgctgtcgctgccgttatatccgtgcgataacgtcgatttccaggtcaccacctactacagcaacatttgcccaaatggtgcttatcagggttatggcgcaccgaaaggtaacttcgctatcaccatggcattagcggaactggctgaacagttacagatcgaccaactggaaattatcgaacgtaaccgggtacacgaagggcaagagctgaaaattctcggtgcaatcggtgaaggtaaagcgccgacctccgttccttccgccgccagctgtgcactggaagagatcctgcgtcagggtcgcgagatgatccaatggtcgtcaccgaaaccgcaaaatggtgactggcacatcggtcgcggcgtcgccattatcatgcagaaatcgggtatcccggatatcgatcaggctaactgcatgatcaaactggaatcggacggcacctttatcgttcattctggcggtgcggatattggtactggtctggatactgtggtgacgaaactggcagcagaagtgctgcattgcccaccgcaggacgtgcatgttatctccggtgataccgatcatgcgttgtttgataaaggcgcatatgcctcgtccggtacttgcttctcaggtaacgcggcgcgtttggcagcggaaaatctgcgggagaaaattctgttccacggcgcgcaaatgttgggtgaggcagtggcagatgttcaactggcaacgccgggcgtcgtgcgcggcaagaaaggcgaagtcagcttcggggatattgctcataaaggcgaaaccggcaccggctttggttcactggtgggaactggcagttatatcacgcctgatttcgccttcccgtatggcgcaaacttcgctgaagttgccgtcaacacgcgtacgggtgaaatccgcctggataaattctacgccttgctggactgcggtacaccggtcaacccggaattagcattgggacaaatctacggtgctaccctgcgagctatcggccacagtatgagcgaagagatcatttatgacgccgaaggtcacccgttaacgcgtgatttacgcagttacggcgcaccgaaaattggtgacattccgcgtgatttccgcgctgtgctggtgccgagcgacgataaagtcggcccgttcggggcgaaatcgatctcggaaatcggtgtaaatggcgcagctccggcgattgctaccgcaattcacgatgcctgcggcatctggttacgcgaatggcatttcacaccggagaaaatactcaccgcgctggaaaaaatataa

SEQ ID NO: 116057 - protein, 956 aa, Escherichia coli B
MIIHFTLNGAPQELTVNPGENVQKLLFNMGMHSVRNSDDGFGFAGSDAIIFNGNIVNASLLIAAQLEKADIRTAESLGKWNELSLVQQAMVDVGVVQSGYNDPAAALIITDLLDRIAAPTREEIDDALSGLFSRDAGWQQYYQVIELAVARKNNPQATIDIAPTFRDDLEVIGKHYPKTDAAKMVQAKPCYVEDRVTADACVIKMLRSPHAHALITHLDVSKAEALPGVVHVITHLNCPDIYYTPGGQSAPEPSPLDRRMFGKKMRHVGDRVAAVVAESEEIALEALKLIEVEYEVLKPVMSIDEAMAEDAPVVHDEPVVYVAGAPDTLEDDNSHAAQRGEHMIINFPIGSRPRKNIAASIHGHIGDMDKGFADADVIIERTYNSTQAQQCPTETHICFTRMDGDRLVIHASTQVPWHLRRQVARLVGMKQHKVHVIKERVGGGFGSKQDILLEEVCAWATCVTGRPVLFRYTREEEFIANTSRHVAKVTVKLGAKKDGRLTAVKMDFRANTGPYGNHSLTVPCNGPALSLPLYPCDNVDFQVTTYYSNICPNGAYQGYGAPKGNFAITMALAELAEQLQIDQLEIIERNRVHEGQELKILGAIGEGKAPTSVPSAASCALEEILRQGREMIQWSSPKPQNGDWHIGRGVAIIMQKSGIPDIDQANCMIKLESDGTFIVHSGGADIGTGLDTVVTKLAAEVLHCPPQDVHVISGDTDHALFDKGAYASSGTCFSGNAARLAAENLREKILFHGAQMLGEAVADVQLATPGVVRGKKGEVSFGDIAHKGETGTGFGSLVGTGSYITPDFAFPYGANFAEVAVNTRTGEIRLDKFYALLDCGTPVNPELALGQIYGATLRAIGHSMSEEIIYDAEGHPLTRDLRSYGAPKIGDIPRDFRAVLVPSDDKVGPFGAKSISEIGVNGAAPAIATAIHDACGIWLREWHFTPEKILTALEKI

SEQ ID NO: 116058 - DNA, 2199 bp, Escherichia coli B
  CDS (1)..(2199): transl_table=11
atgaaatttgataaacccgcaggggaaaacccgatcgatcagctgaaggttgtcggtcgtccccatgaccgcatcgacggaccgctgaaaactaccggcacggcacgctacgcctacgaatggcatgaagaagctcccaacgccgcctatggctatatcgtcggttccgccattgccaaaggacgcctcatcgcccttgatacggacgcagcgcaaaaagcgccgggcgtactggctgtcattaccgccagtaacgccggggcactcggcaaaggcgacaaaaacaccgccaggctgttaggcggccccactattgagcactatcatcaggccattgcgctggtagtggccgagaccttcgaacaggcacgagcggcggcctcgctggtgcagccgcactatcgccgtaataaaggagcttactccctggcggacgaaaaacaggccgtcagtcagccgccggaagacacgcccgacaaaaacgtcggtgactttgacggggctttcacctccgctgcggtgaagattgatgctacctacacgaccccggaccagagccatatggcgatggagccgcatgcctcgatggccgtctgggatggaaataagcttactctctggacctcaaatcagatgattgactggtgccgcaccgatctggcaaaaacgctaaaagtgcccgtggagaatgtgcgtattatctccccgtatatcggcggagggtttggcggcaagctgttcctgagaagcgatgcactgctggcggccctcgccgcccgagcggtgaaacgtccggttaaagtgatgctcccccgccccactattcccaataacaccacgcaccgccccgccacccttcaacacctgcgtatcggtgccgaccagagcgggaaaatcaccgctatctcacatgaaagctggtccggaaacctgcccggcggcacgccggaaacggcggtacagcaaagtgaattactctacgcaggggcaaaccgtcataccggcctgcggctcgccacgcttgatttgccggaagggaacgccatgcgtgcgcccggcgaagcccccggtctgatggcgctcgaaatcgcgatcgacgaactggcggaaaaagcgggcatcgatcccgtcgagtttcgcatcctgaatgacactcaggttgaccccgccgacccgacgcgccgcttctctcgccgtcagcttatcgagtgcttgcgcaccggagcggataaatttggctggaagcagcgcaacgccacacccggacaggtgcgcgacggggagtggctagtcggccacggtgttgcggcgggctttcgcaataatctgctggaaaaatcgggggctcgggttcacctcgaaccaaacggcaccgttaccgtggaaacggacatgaccgacattggcaccggcagctacaccattctggcccagacggcagcggaaatgcttggcgtaccgctggagcaggttgcggttcacctcggcgattccagtttcccggtttctgcgggttctggtggacaatggggcgcgaatacctccacctccggcgtttacgccgcctgtgtgaagcttcgcgaaatgattgcctcggcagtcgggtttgatcctgagcagtcgcagtttgccgacggcaagattaccaacggtacccgaagcgccacgctacatgaggccaccgcaggcggcagactgacagcggaagagagcattgaattcggaacactgagcaaggagtaccagcagtcgacctttgccgggcattttgtggaggtcggcgtgcatagcgcgacgggagaagttcgggtccggcgtatgctcgctgtgtgtgctgcaggacgcatcctgaatccgaaaactgcacgcagccaggtcattggcgcaatgactatgggcatgggcgcggcactgatggaggagctggcggtggatgaccgtttgggctacttcgttaatcacgatatggcggggtatgaggtgccggttcatgcggatatcccaaaacaggaggtgattttcctggatgataccgaccccatatcctccccgatgaaggccaaaggtgtcggtgagctgggcctgtgcggcgtgagcgcggctatcgccaacgcggtgtataacgccaccggtattcgggtacgggattatcccatcactctggataagctgctcgataagctgccggatgtggtttaa

SEQ ID NO: 116059 - protein, 732 aa, Escherichia coli B
MKFDKPAGENPIDQLKVVGRPHDRIDGPLKTTGTARYAYEWHEEAPNAAYGYIVGSAIAKGRLIALDTDAAQKAPGVLAVITASNAGALGKGDKNTARLLGGPTIEHYHQAIALVVAETFEQARAAASLVQPHYRRNKGAYSLADEKQAVSQPPEDTPDKNVGDFDGAFTSAAVKIDATYTTPDQSHMAMEPHASMAVWDGNKLTLWTSNQMIDWCRTDLAKTLKVPVENVRIISPYIGGGFGGKLFLRSDALLAALAARAVKRPVKVMLPRPTIPNNTTHRPATLQHLRIGADQSGKITAISHESWSGNLPGGTPETAVQQSELLYAGANRHTGLRLATLDLPEGNAMRAPGEAPGLMALEIAIDELAEKAGIDPVEFRILNDTQVDPADPTRRFSRRQLIECLRTGADKFGWKQRNATPGQVRDGEWLVGHGVAAGFRNNLLEKSGARVHLEPNGTVTVETDMTDIGTGSYTILAQTAAEMLGVPLEQVAVHLGDSSFPVSAGSGGQWGANTSTSGVYAACVKLREMIASAVGFDPEQSQFADGKITNGTRSATLHEATAGGRLTAEESIEFGTLSKEYQQSTFAGHFVEVGVHSATGEVRVRRMLAVCAAGRILNPKTARSQVIGAMTMGMGAALMEELAVDDRLGYFVNHDMAGYEVPVHADIPKQEVIFLDDTDPISSPMKAKGVGELGLCGVSAAIANAVYNATGIRVRDYPITLDKLLDKLPDVV

SEQ ID NO: 116060 - DNA, 2400 bp, Pseudomonas putida GB-1
  CDS (1)..(2400): transl_table=11
atgtctaaccatcacgtagccaaaagccaggccgagatggccgaattgttcagccaggacctgaccaccggggtgggccgcagcgtcaagcacgacagcgccgacaagcatgtatctggcgaggcgctgtacattgacgatcgcctggaatttcccaaccagttgcacgtctatgcgcgcaccgccgaccgtgcccatgcgcgcatcctgcgcatcgacaccacgccgtgctatgccttcgagggcgtgcgcatcgccatcacccacgaagacatccccggcctgaaagacatcggcccggtggtggccggcgacccactgctggccatcgacaaggtcgagttcttcggccagcccgtgcttgccgtcgctgcctgtgaccttgaaaccgctcgccgcgcggccatggccgccatcgtcgaatacgaagacctggagccggtactggacgtggtcgaagcgctgcgcaagaaacacttcgtgctcgacagccacacccaccagcgcggcgattccgctgccgccctggccagcgccccgcaccgtatccaggggaccctgcatatcggcggccaggaacacttctacctggaaacgcaaatttcctcggtgatgcctaccgaagatggcggcatgatcgtctactgctccacgcaaaaccccaccgaagtgcagaaactggtcgccgaagtgctcgacgtgccaatgaacaaggtggtgctggacatgcgccgcatgggtggcggttttggcggcaaggaaacccaggctgccagcccggcgtgcctgtgcgcggtcgtggcgcgcctgaccggccagccgaccaagatgcgtctgccacgggtcgaagacatgaccatgaccggcaagcgccacccgttctacgtcgagtacgacgtgggctttgacgacaacggccggctgcacggtatcaacttcgacctggccggcaactgcggctactcgcccgacctgtccggttcgatcgtcgaccgtgccatgttccactccgacaacgcctactacctgggcgatgccaccgtgcacggccaccgctgcaagaccaacactgcctccaacaccgcctaccgtggctttggcggcccacagggcatggttgccatcgagcaggtgatggaccacatcgcccgccatctgggccgtgatccgctggcagtgcgcaaggcaaactactacggcaagaccgagcgtaacgtcacccattactaccagaccgtcgagcacaacatgctcgacgagatgaccgccgagctggaggccagcagcgactatgccgagcgtcgcgagtcgatccgccgtttcaatgccaacagcccgatcctgaagaaaggcctggcactgacgccggtcaagttcggtatttcgttcaccgccaccttcctcaaccaggccggcgcactgatccatatctacaccgacggcagtattcacctgaaccacggcggcaccgagatgggccaaggcctgaacaccaaggtggcacaggtggtggcgcagatcttccaggtggacttcagccgcatccagatcaccgccaccaacaccgacaaggtgcccaacacatcgccgacagcggcctccagtggcgccgacctgaacggcaaggcggcgcaaaacgctgccgaaatcctcaagcgtcgcctgaccgagttcgccgcacggcactatcaggtgaccgaggaagacgtcgagttccgcaacggccacgtgcgcgtacgcgaccagatcgtcagcttcgagcaactggtgcagcaggcttacttcgcccaggtgtcgctctccagcaccggtttctaccgcacgccgaagattttctacgaccgcagccaggcccgcggccggccgttctactacttcgcctttggcgctgcctgcgtggaagtgatcgtcgacaccctgaccggcgagtacaagatgctgcgcgccgacatcctgcacgacgtgggcgattcgctgaacccggcgatcgacatcggccaggtggaaggcggattcatccagggcatgggctggctgactaccgaagagctggtgtggaacgccaagggcaagctgatgaccaacggcccggccagctacaagatcccggcagttgccgacatgccgctggacttgcgggtgaagctggtggaaaaccgcaagaacccggaagacaccgtgttccactccaaggccgtgggcgagccaccgttcatgctcggcatcgctgcctggtgtgcgatcaaggacgccgtggccagcttggccgattaccgggtgcagccgaacatcgacgcgccggcgacaccggagcgggtgctgtggggttgtgagcagatgcgcaaggcgctggctgaaacccaacctgccgaacaggaactggaaaccgtcacccactga

SEQ ID NO: 116061 - protein, 799 aa, Pseudomonas putida GB-1
MSNHHVAKSQAEMAELFSQDLTTGVGRSVKHDSADKHVSGEALYIDDRLEFPNQLHVYARTADRAHARILRIDTTPCYAFEGVRIAITHEDIPGLKDIGPVVAGDPLLAIDKVEFFGQPVLAVAACDLETARRAAMAAIVEYEDLEPVLDVVEALRKKHFVLDSHTHQRGDSAAALASAPHRIQGTLHIGGQEHFYLETQISSVMPTEDGGMIVYCSTQNPTEVQKLVAEVLDVPMNKVVLDMRRMGGGFGGKETQAASPACLCAVVARLTGQPTKMRLPRVEDMTMTGKRHPFYVEYDVGFDDNGRLHGINFDLAGNCGYSPDLSGSIVDRAMFHSDNAYYLGDATVHGHRCKTNTASNTAYRGFGGPQGMVAIEQVMDHIARHLGRDPLAVRKANYYGKTERNVTHYYQTVEHNMLDEMTAELEASSDYAERRESIRRFNANSPILKKGLALTPVKFGISFTATFLNQAGALIHIYTDGSIHLNHGGTEMGQGLNTKVAQVVAQIFQVDFSRIQITATNTDKVPNTSPTAASSGADLNGKAAQNAAEILKRRLTEFAARHYQVTEEDVEFRNGHVRVRDQIVSFEQLVQQAYFAQVSLSSTGFYRTPKIFYDRSQARGRPFYYFAFGAACVEVIVDTLTGEYKMLRADILHDVGDSLNPAIDIGQVEGGFIQGMGWLTTEELVWNAKGKLMTNGPASYKIPAVADMPLDLRVKLVENRKNPEDTVFHSKAVGEPPFMLGIAAWCAIKDAVASLADYRVQPNIDAPATPERVLWGCEQMRKALAETQPAEQELETVTH

SEQ ID NO: 116062 - DNA, 4077 bp, Aspergillus niger
  CDS (1)..(4077)
atggccccaggcattttagaatcaccaaagccaacggtggctgccagtaaggctgtcaccttggctcagctcacggaggactgggatgacactattcgcttctatctcaacggcacaaaagtagtcctcgactcgatcaatccggaagtcacgctattggagtatctgcggggtatcggtctgacaggtacgaagctgggctgtgcggaaggtggctgtggtgcttgcacagtggttgtatcgcatttcaatacgacgacaaagaagctttatcatgcttcagtcaacgcttgcctcgcacccttaatcagtgtagacgggaaacatgttataacggtggaaggtatcggcgatgtgaagaatccccatgctgtccaacagcgacttgcggttggtaatggaagccagtgcggtttctgtacgccaggaattgtcatgagcctctatgccctcctacgcaataactctgcgccgactgaacacgacgttgaagaagcatttgacgggaatctttgtcgttgcaccgggtacaggcccatattggatgctgcccagagcttcacagctcccaagggctgcgggaaatccctggcgaacggaggcacaggttgttgcatggataaacagaacggcgctgggggttgctgcaagcggtcatcggcagacacaacagatggagatggtccgaaattcacgccgccagagttcatagagtacactccgggcacggagctgattttcccgcctcagctccacaagcacgaattccgccctttggtccttggtaacaagaaaaagaagtggtatcgcccggtcactctcgaacaattattggagatcaaagctgtacatcctgatgctaagatcattggagggagcacagagacacagattgaggtcaaattcaaggctatgaggtacagcacctctgtctacgtcggtgatattccggaactccgtcagtattcgctcaaggatgaccatttggagattggggccaatgtctccttgaccgatctcgaatcaatctgtgatgaggccctcgaacgctatgggcctttgcgaggccagccatttaacgccatcaagaagcaactccgctattttgctggaagacaaattcgcaacgtcgcgtcaccagcaggaaatctggctacagcatctccaatctctgacctaaatccagtctttgtggctaccaacactgtccttgtagccatgtcgttgggtgaagttatcgaaatccctatgagccagttcttcaagggctaccgatccactgcgctcccgcctgacgctattatcgcttgtttacggatcccagttgcgtccgagaagggggaatatctgcgtgcctacaagcagtcaaagaggaaggatgatgacatcgcgatcgtgaacgcagctttgcgggtctcactttctccttcccacgatgtgcagagcgtaaacttggtctttggagggctagctccaatgaccgtgtccgcacgcaatgcagaggcctatttggctggcaagaagttcaccaaccctgctacccttgagggtaccatgggtgccttagagcaggactttgacttgaagtttggtgtccctggaggaatggcgacttacagaaagtctctcgccttgggattcttctaccggttctaccacgatgtactgtcctccatccaggtcacggacgcagatgtcgatgaagatgtcattgccgagattgaaagggccatttcctctggagagaaagatcacgaggcttctgcagcatatcaacagaagattctcggaaaggctagtcctcatgtttctgcactgaagcaagctactggagaagcacagtacaccgacgacatgccgatgatgaaaaacgagctttatggctgcatggttctttcgaccaaggcgcatgctcggatacttagcgtggatacttcggccgctctcgatattcctggcgttgctcattatgtggatcataccgatctccctaaccccaaggccaattggtggggagctccgaactgcgatgaagttttcttcgcagtcgatgaagtcacaactgctggccagcccattggtatgatcctcgcaacatcggccaagattgcggaggagggtgcaagagcggtcaaggtagaatatgaggagctgccggcaatcttgagtatggaagaagccattgaggccgagtcgttctttgaacactcccgctttatcaagtgtggggacccagagagggccttcaaagaagcagactatgtctttaccggacagtcaagaatgggtggtcaggaacacttttacctggaaactcaggcttgtgttgctatccccaagcttgaggatggagagatggagatctggagtgggacacaaaacccaacggaaacgcaaacttacgttgcacaagtaactggtgtagctgccaacaagattgtgtctcgggtaaagcgccttggaggcggctttggtggcaaagagacgcgttcagtccagctggctggtatttgtgctactgctgctgcgaaggcgaagctacctgtgcggtgcatgctcaatcgcgatgaggatattgctacttcgggccagcgccatccattcttctgccgctggaaggtgggagtgacaaaagaaggtaaactgcttgcatttgatgcggatgtatacgccaacggtggccacacccaagatctgtctggtgcagtagttgaaagagcgctttcacacattgatggagtgtacaacataccgaatatgcacgtccgtggtcgtatctgcaagacgaacaccgtttcaaacaccgcgttccgtggcttcggcggccctcagggcatgttcttcgccgagtgcatggtatcggaggttgcggatcatcttcagataccggtcgaacaactccgctggcagaacatgtacaagcctggagacaagacccactacaaccaggagcttaaggactggcatgtgccgttgatgtataagcaggttatggatgagagctcgtacgaggagcgacggaaggccgtggaggaatataataagaagcacaagtggtccaagcgcggaatggctctcattcctaccaagtttggtatctctttcacagccctatttctgaaccaggctggcgcactggtgcatatttaccacgacggaagtgttcttgtggctcacggtggagtggagatgggccaaggactacataccaagatgactatgatcgctgctgaagctttaggtgtgccccaatccaacgtctttatctccgagactgccacaaatactgtggccaacacatcgtccacggctgcgtcggccagttctgatctcaatggctacgccatctacaacgcttgtgagcagctcaatgaacgtcttaagccgtaccgggagaaaatgccgggagccactatgaaagacctcgctcacgcagcctactttgaccgggtcaacctctccgcgcagggatactaccgtactcctgacattggctacgtgtggggcgaaaacaagggccagatgtttttctacttcacacagggtgtaacggccgctgaagtacagattgacacgctcacaggcgactggactcctttgcgtgctgacatcaagatggatgttggtcgtaccatcaacccatcgatcgactacggacagatcgaaggcgctttcatccaaggccagggtcttttcaccaccgaagagagtctgtggcaccgggcgtcgggacagatcttcaccaagggccccggaaactacaagatccctggattccgagatatccctcagatcttcaacgtcagtctactgaaggacgtggagtgggagaacctgcggactatccagcgatcccgtggtgttggcgaaccgccgctgttcatgggcagcgctgtcttctttgctatccgcgatgcgctcaaggcggcgcgccagcaatggaacgtcaaggaagtattgcggctagagagtccagcgactccggagcggatccgggtcagctgtgctgatccgattattgaacgggcacgcgtggtgccgaaggagggcgagaagagtttctttgtagcgatataa

SEQ ID NO: 116063 - protein, 1358 aa, Aspergillus niger
MAPGILESPKPTVAASKAVTLAQLTEDWDDTIRFYLNGTKVVLDSINPEVTLLEYLRGIGLTGTKLGCAEGGCGACTVVVSHFNTTTKKLYHASVNACLAPLISVDGKHVITVEGIGDVKNPHAVQQRLAVGNGSQCGFCTPGIVMSLYALLRNNSAPTEHDVEEAFDGNLCRCTGYRPILDAAQSFTAPKGCGKSLANGGTGCCMDKQNGAGGCCKRSSADTTDGDGPKFTPPEFIEYTPGTELIFPPQLHKHEFRPLVLGNKKKKWYRPVTLEQLLEIKAVHPDAKIIGGSTETQIEVKFKAMRYSTSVYVGDIPELRQYSLKDDHLEIGANVSLTDLESICDEALERYGPLRGQPFNAIKKQLRYFAGRQIRNVASPAGNLATASPISDLNPVFVATNTVLVAMSLGEVIEIPMSQFFKGYRSTALPPDAIIACLRIPVASEKGEYLRAYKQSKRKDDDIAIVNAALRVSLSPSHDVQSVNLVFGGLAPMTVSARNAEAYLAGKKFTNPATLEGTMGALEQDFDLKFGVPGGMATYRKSLALGFFYRFYHDVLSSIQVTDADVDEDVIAEIERAISSGEKDHEASAAYQQKILGKASPHVSALKQATGEAQYTDDMPMMKNELYGCMVLSTKAHARILSVDTSAALDIPGVAHYVDHTDLPNPKANWWGAPNCDEVFFAVDEVTTAGQPIGMILATSAKIAEEGARAVKVEYEELPAILSMEEAIEAESFFEHSRFIKCGDPERAFKEADYVFTGQSRMGGQEHFYLETQACVAIPKLEDGEMEIWSGTQNPTETQTYVAQVTGVAANKIVSRVKRLGGGFGGKETRSVQLAGICATAAAKAKLPVRCMLNRDEDIATSGQRHPFFCRWKVGVTKEGKLLAFDADVYANGGHTQDLSGAVVERALSHIDGVYNIPNMHVRGRICKTNTVSNTAFRGFGGPQGMFFAECMVSEVADHLQIPVEQLRWQNMYKPGDKTHYNQELKDWHVPLMYKQVMDESSYEERRKAVEEYNKKHKWSKRGMALIPTKFGISFTALFLNQAGALVHIYHDGSVLVAHGGVEMGQGLHTKMTMIAAEALGVPQSNVFISETATNTVANTSSTAASASSDLNGYAIYNACEQLNERLKPYREKMPGATMKDLAHAAYFDRVNLSAQGYYRTPDIGYVWGENKGQMFFYFTQGVTAAEVQIDTLTGDWTPLRADIKMDVGRTINPSIDYGQIEGAFIQGQGLFTTEESLWHRASGQIFTKGPGNYKIPGFRDIPQIFNVSLLKDVEWENLRTIQRSRGVGEPPLFMGSAVFFAIRDALKAARQQWNVKEVLRLESPATPERIRVSCADPIIERARVVPKEGEKSFFVAI

SEQ ID NO: 116064 - DNA, 4071 bp, Bombyx mori
  CDS (1)..(4071)
atgggattattgaatgctgaggaagatccgaataaaatatgcaaagaacttgttttctacgtaaatggtaaaaaggttatagaatctagtcctgatccagaatggacattattatggtatttgcgaaagaaacttcgactgacgggcacaaaattaggttgtgcggaaggtggatgtggtgcttgcactgttatggtctccaaatataaccgacaagaaaataaaattattcatctggcagtaaatgcttgtctcgcaccagtatgtgctatgcacggtttggctgtgaccacagttgaaggtatcggatcaaccaaaactaagctgcatccagttcaagaaagaatagccaaagcccacggatcacagtgcggtttctgtacgcctggaatcgtaatgtccatgtatactttactgagaagctgtaaaaatattcaatattctgatttggaggtcgcgtttcaaggtaatttatgtaggtgtacaggttatcgcgccataatagagggctacaaaacgtttatcgaagattgggagactcaacgaattgtcaagaatggaccacagaacggaacttgtgcgatggggaaagactgttgcaaaaataaatcggatagctgtgaagaagcagatagtgaatcacaatatatttttgacaagtcgtcgttcttaccgtacgattccagtcaagaaccaatttttccaccggaactgaaattatcttcaatatacgatagtcagtacgtaatatatcgtggaaaacaaacaacgtggtatcggccaactaacatagaaacagttttatcgttgaaagataagttcccgaatgcaaaagtggtagtgggaaatagtgaagttggtgttgaagttaaattcaaacgttgtgtgtatccaataataataatgcctaattgcgttcccgaattgaatactattactgaaaatgagcatggtttaacggttggagcttcagtaacactcaatgacatcgaaaaaacttttagagagtatataaagaaactaccaccatacaaaactagagtcttaactactatagtagaaatgttgaattggtttgctggaaaacaaatcagaaatgttgctgccattggcgggaatgtaatgacgggcagtccgatatctgatttgaatccgattttaatgtctctcaaggttaaacttaatctgctcagtcaagaaaacggccatcgtaccgtgctaatggatgaaacgtttttcactgggtatagaaagaatgtcgtcaaatcaaatgaaatattactttcaatagagataccgttttcaaccaaatttcaatacctgaaggctattaagcaagcgaaaagaagagaggatgatatatccatagtaacttcagctgttaatgttgaattcgaagagaacacaaatgttataaaatatataaatttggcattcgggggaatggctcccgtaacaaagattgcaacaaacactggaaatgtgttaaaagggcttaaatggaatgaaaacatgttagaaaaagcgtattcgttactgatagatgaactgccattagatccatcggcaccaggtggaaatatacaatttcggcgtgcattgactatgagtttgtttttaaagtcgtatttggctattggaaaagcaatgtcaactgattatttttacggagatcttatcgaatcgtactacggtagcggtgcagatagttttcacggaaatgtgccgaaaagttctcaatactttgaattggtcggagaaaaacagcataaaagtgatgctgttggaaggccgatacagcacatgtcagcatataagcaggctacaggcgaagcaatatattgcgatgatatgcccattgcagaaggtgagctatatttagcatttgttttgagttcaaaagctcatgcaaaattagtatcagtagatgcaaaaaaagcgctagccgaacctggtgttatagcattttattcagcaaaagacttaacagaagaacaaaatagcattggccctatatttcacgatgaagaattgtttgcaagagataaagtgttgagtcaaggtcaaactattggcgttatagtagctgtggatcaagcgactgcacaagctgctgcaagaatggttaaagttgaatacgaggagatacagcccattatagttactatagaagacgctataaaatataactcattttatccacaattccctaaaacaataaaacggggaaatgtaaaagccgtgtttgacgataaaaataatattataatagaaggacagtgtcgtatgggaggtcaagaacatttttatttggagactcatgctgcgtttgctattccaaagaaagaagacgacgagctagaaatattttgttccagccaacatccctcagagatcgcaaaactggttagtcacatcctgcacgtaccgatgaatagaatagtggcgagagtgaaacgtatgggtggtggttttggtggaaaagagtcacggggtatgttagtggcattaccggttgcattagctgctcataaactcaacaggcccgtgcggtgcatgctcgatagagacgaagatatgcagatgacgggcactagacatccattcctgataaagtataaagcagcggcaactaaagaaggaaaaattgttggagctgttgtcaatatttataacaacggaggctattccactgatctgtcaggtccagttgtcgaacgagcaatgttccattttgaaaatgcttattacatcccaaattgtgaagtgaccggatatgtctgcagaactaatttaccctcaaatacggcttttcgaggcttcggaggtccccaaggaatgtttggtgccgaaaatatggttagagagatagctcatcgactgggaaaatctcccgaggaaataagcagactaaacttgtatcgagaaaataatactacacattatggacaagttttgacatattgtacattacaaagatgttgggacgaatgtgtacaaaactctaatttagcagaaagaaaattaaaaattaaagaattcaacaaacaacacagatggagaaaacgtggtatttcgataataccaacaaaattcggtatcgcttttacagaaaaacttttaaaccaagctggtgcattggtattagtttatgttgatggttcagtacttctatcacacggtggtactgagatgggacagggcttacatacaaagatgatacaagtagctactcgggctcttggtatagacgtttctaaaattcacatcagcgaaacaagtacagataaagttcctaatacttcggcaacagcggctagtgccggctcagatttgaacggcatggcagtactagaggcttgcgagaaaataatgaagcgcctaaaaccgtatatagataagaatccggacgggaaatgggaaaattgggtatcagccgcctatgtcgaccgtgttagcttatccgctaccggcttccacgctacaccggatataggattcgatttcaagaccacttcgggaaaaccgtttaactatttcacatacggtgttgcttgtacggaagtagaaattgactgtcttagcggtgaccatcaagtccttagaacggatattgtaatggacctcggtgagagtctcaatccagcgatagatattggccagattgaaggcggtttcatacaaggctacggtttgttcaccatagaagaattaatttattcacccaccggaactttatattcgcgagggccgggtgcttacaaaattcctggatttggtgatattcctctagaattcaacgtttcattgttaaagggtgcacctaaccctcgagcagtttattcttctaaggccgtaggagaacctccgctgttcttggcttcttcagcttattttgcgatacatgaagccattaaagctgcaagagcagatgccggagtaccgctcgagttcgacatggaggcaccagcaacatctgctcgaattcgaatggcatgtgaggaccatataacgaagaaacttgataaaccagatccaaatagctttgtgccgtggaatgttgtcccttaa

SEQ ID NO: 116065 - protein, 1356 aa, Bombyx mori
MGLLNAEEDPNKICKELVFYVNGKKVIESSPDPEWTLLWYLRKKLRLTGTKLGCAEGGCGACTVMVSKYNRQENKIIHLAVNACLAPVCAMHGLAVTTVEGIGSTKTKLHPVQERIAKAHGSQCGFCTPGIVMSMYTLLRSCKNIQYSDLEVAFQGNLCRCTGYRAIIEGYKTFIEDWETQRIVKNGPQNGTCAMGKDCCKNKSDSCEEADSESQYIFDKSSFLPYDSSQEPIFPPELKLSSIYDSQYVIYRGKQTTWYRPTNIETVLSLKDKFPNAKVVVGNSEVGVEVKFKRCVYPIIIMPNCVPELNTITENEHGLTVGASVTLNDIEKTFREYIKKLPPYKTRVLTTIVEMLNWFAGKQIRNVAAIGGNVMTGSPISDLNPILMSLKVKLNLLSQENGHRTVLMDETFFTGYRKNVVKSNEILLSIEIPFSTKFQYLKAIKQAKRREDDISIVTSAVNVEFEENTNVIKYINLAFGGMAPVTKIATNTGNVLKGLKWNENMLEKAYSLLIDELPLDPSAPGGNIQFRRALTMSLFLKSYLAIGKAMSTDYFYGDLIESYYGSGADSFHGNVPKSSQYFELVGEKQHKSDAVGRPIQHMSAYKQATGEAIYCDDMPIAEGELYLAFVLSSKAHAKLVSVDAKKALAEPGVIAFYSAKDLTEEQNSIGPIFHDEELFARDKVLSQGQTIGVIVAVDQATAQAAARMVKVEYEEIQPIIVTIEDAIKYNSFYPQFPKTIKRGNVKAVFDDKNNIIIEGQCRMGGQEHFYLETHAAFAIPKKEDDELEIFCSSQHPSEIAKLVSHILHVPMNRIVARVKRMGGGFGGKESRGMLVALPVALAAHKLNRPVRCMLDRDEDMQMTGTRHPFLIKYKAAATKEGKIVGAVVNIYNNGGYSTDLSGPVVERAMFHFENAYYIPNCEVTGYVCRTNLPSNTAFRGFGGPQGMFGAENMVREIAHRLGKSPEEISRLNLYRENNTTHYGQVLTYCTLQRCWDECVQNSNLAERKLKIKEFNKQHRWRKRGISIIPTKFGIAFTEKLLNQAGALVLVYVDGSVLLSHGGTEMGQGLHTKMIQVATRALGIDVSKIHISETSTDKVPNTSATAASAGSDLNGMAVLEACEKIMKRLKPYIDKNPDGKWENWVSAAYVDRVSLSATGFHATPDIGFDFKTTSGKPFNYFTYGVACTEVEIDCLSGDHQVLRTDIVMDLGESLNPAIDIGQIEGGFIQGYGLFTIEELIYSPTGTLYSRGPGAYKIPGFGDIPLEFNVSLLKGAPNPRAVYSSKAVGEPPLFLASSAYFAIHEAIKAARADAGVPLEFDMEAPATSARIRMACEDHITKKLDKPDPNSFVPWNVVP

SEQ ID NO: 116066 - DNA, 4585 bp, Pseudomonas putida
  CDS (2044)..(4410): transl_table=11
gtcgaccggtcgatagcgctcagttgaggggagaggtccgaatgctctcggaactgtacagcagcaagattcgtgagtttgcggagcgctcgctgcctacacctcaatgcgagcctacggccgaaacgagtctggaaaatatcttttgtggcgaccgggtgacgatacgggtcagtctgcgagacggggtgtatcgagacctgaatggcagtgtcgatggctgtctgttgtgccgggcagccatggcctggctgctgaaaaatggcgaaggacttgccccggaggccgcaatgcgattgctggctgatgtttccgcttttctcgagggcgggctggccgctgtggatatgccttggcatgagttggagatgttttcgccgctgatagcgcaccgcagccgcaggaaatgcgtgctcctgccattcaaggcgctggcgcaagtggggcaagcgcgccagtcgtaggactgggggcgtgagtcggggccggaggagggcggtgcaagtcagggcatggggctctggatggcttccgtcggtgcgctaattgatgcgctggcggggataacccctgcgctggcgggagtgtttgtccagggaagggtttctagtatcgggttcatatcaatctttatcccagcccccccaaagccctgctggtttttcgcttgaagtaggtgaacgcatgaaattccctgccttttcgtaccgcgctccagcctctttgcaggaggttatccaggtgctggcggatgatccggatgcccgcatcatcgccggtggccagagtctgttgccgctcttggcattcaggctggtctaccccagttgcctcgtggatttgcgaaatgtcagcgagctgttcgagatcagtcagtctgctgggatcttgagcgtcggtgccatggtgacccacttccggaacaagactgatcccacagtagcgaagtgcgttccgatcctgcccaaggtcctggcccatgttgcgcaccaggcggtccgtaaccgaggaacactgggcggaagcctcgcccatgccgatgccggtgccgagatgccatttctgatggctacccttggggcgacgatgtacatcgcaagttctgccggcgtgcgttcggtgagcgccacggatttcatgaaggggcattacttcaccgacctggaagcgggagaagtactggtccgggtcgaaataccgatccctgcattgcattgggagttcgacgagtacgcccggcgcaagggtgactatgccttggtcatggctgcggcggggctttccatgcaaggcggccgttgtgtcgctgcccggattgccttgggggccgtagaggagcgcgcccaccaggccatccgagcgaacgatttcctggtcggaaaagtgattgatgagtccacggctgccacggccgctgaactggcgacagagggcctcgagccccgaagtgatatccatggcagtcgtgatcttcgtttgagtctggcgaaagccattacccaacgcgttatcttgaaggcagcgcaaggagctatgtatgcaggcgcatgaagaaagccagctgatgcgcatatccgccaccataaacggcaaaccccgggtgttttatgtcgagcctcgcatgcatctggccgatgccttgcgtgaggtggtgggcctcacgggaacaaagatcggctgcgagcagggagtatgcggcagttgcacgatcttgatcgacggggcgcctatgcgctcttgcctgacacttgccgtgcaggccgagggttgttcgatcgaaacggtggaaggcctctcgcaaggggaaaagctgaacgccttgcaggactccttccgtcgccaccacgcgttgcaatgtgggttctgtactgccggcatgttggccaccgcgcgcagcatcctggcagagaaccccgcgccttcgagagacgaggttcgtgaggtgatgtcgggcaacctgtgccgctgcaccggctatgaaaccatcatcgatgcgattactgatccggctgttgccgaggcggcaaggcgaggagaagtgtgatgatgaagcatgaagtcgtcgcgctgaagaagaagtccatcggtacttcggtgctcaggagggaagatacgcgattgctgaccgggcgcggccgctacatcgccgacctggttttgtcgggaatgctccatgtcgcgtcactgcgcagcccgttcgcccatgccaggatcgtctccattgatgtcgccgacgcccaggcgctgcccggcgtcgaactcgtctggtgtggggccgatgtggcggagctatcccagggcattgtcgcgaccatgcaggtcgagggcttccagacgaccatccagcccctgcttgccaacggtgttacccgtttcgtcggcgagatagttgccgtcgtagtggcctccagccgggctatcgccgaagacgccgcccagctcatccaggtcgagtacgaggagcttcccgccgtgaccgggatcgaggcggccctggaaggggaggccagggccaacgacaccctggccggcaatgtggtatctcgcaccagtcgggcccgggatgaactggcaccgattttcgccagcagcgccggggtcgttcgtggacagttctcctgcgggcgggtcagcgcttgtccgatggaaacccggggcgccgtcgcacaatacgagtggaccacccagcagttgatcctgtggacggccacccagatgcccagtttcgtccgcaccatggtggcgatgttctgcgctatcccggagcacctgatcgaggtcagggtgcccgatgtggggggcgggtttggccagaaggcccacctgcatcccgaggagttgctggtctgcctgctgtcccgcgcgctgggtcgcccggtgcgctggatcgaggatcgccaggaaaacttcctgggcgcaacccatgccaagcagcagcgcaacgagatggggcttgccttcgacggggacggccgtttcctggccctggagaatcgctcgatcaccgatggcggcgcctacaacaacctgccctggactcagctggtcgagtcccacgtgggcaatgcggtgatcctcggcgtgtacaaggtgccggcggtcagcgaggaaagcatcgccgtcgccaccaacaagtgccccatcggcgcctatcgcggtgtgggcttcacggcgggacagatcgcccgcgagaccctgatcgaccgggcagcccggcaactgggcctgtcgccgttcgagatccgtcggcgcaatgtcgtcatgcccgaggatttccccttcaccaaccgcctggggcagacgcaccgggagggtacctacctgcagaccatcaacctgctcgaggagatggtgaatcccgaggcgtttcgccaacgacaggccgaggcccgcgcacgtggcaagtaccttggcctcggtgtcagtgtgttcaatgattgtacaggcaccgggacacgcaccctgtccttcctgggcaccccgacgaccacccacgattcggccaccgtgcgcatcgacccgacgggcaaggttacggtaaccacatccttggcttcttccggccagggccacgagaccaccctggcgcagatcgccgcggatgtcttaggcgtacccgccagcgatgtggtgatccaggcggggtcgaccaagaacacatacggcttcggtgcgtacgccagccgtggcgcggtgatcggcgccggctccatcgggcgtgccgcgtccatcgtgcgtgagcgtgtcaagcagctcgccgggcacctgctggaagccgcgagcgaagacatcgtcatcgaggacggtctggtccatgtggccggagtgccggccaagggcatgccgttcgccgaggtggtcggcgccgcctatttcgccgatgccacacatccgcccggcttcgatgccacccttgaggcgacggcaacctacgacccttccgacctagttttggccaatggtggtcatgccgccatcgtcgagatcgacgccagcacctatgcgacacgggttacggacttcttcgcggtcgaagactgcgggaccatgatcaacccgatgatcgtcgaggggcagattcgcggtgggatcgcccaagccataggccagaccctgctggaggaggtcatttacgacgacttcggccagcttgtgaccacgaccctcatggactacctcattccgacgaccctggatgtccccgatatccgtatacgccatctcgaaacaccttcgcccctggtgccaggaggcatcaagggcatgggcgagtccgccatgatttccgctccggcggcggtggtggcggcggtcaacgatgcgttggcacacctggaggtggtgatcgagacggtacccatcacaccggagcgcatcttccgttccattcaggagcgcccgatgcagtgatgctgcaccgggtgagtcctgtctaccaggcgggcgagtgtccttgcgaatgcccgattccttcctacacataggttgttgcgatgaatatcaagtacaaggttcgctctaccggttgccccagaaaaagcatggtccgtactcatggatattcccacggtggcaccctgcatgc

SEQ ID NO: 116067 - protein, 788 aa, Pseudomonas putida
MMKHEVVALKKKSIGTSVLRREDTRLLTGRGRYIADLVLSGMLHVASLRSPFAHARIVSIDVADAQALPGVELVWCGADVAELSQGIVATMQVEGFQTTIQPLLANGVTRFVGEIVAVVVASSRAIAEDAAQLIQVEYEELPAVTGIEAALEGEARANDTLAGNVVSRTSRARDELAPIFASSAGVVRGQFSCGRVSACPMETRGAVAQYEWTTQQLILWTATQMPSFVRTMVAMFCAIPEHLIEVRVPDVGGGFGQKAHLHPEELLVCLLSRALGRPVRWIEDRQENFLGATHAKQQRNEMGLAFDGDGRFLALENRSITDGGAYNNLPWTQLVESHVGNAVILGVYKVPAVSEESIAVATNKCPIGAYRGVGFTAGQIARETLIDRAARQLGLSPFEIRRRNVVMPEDFPFTNRLGQTHREGTYLQTINLLEEMVNPEAFRQRQAEARARGKYLGLGVSVFNDCTGTGTRTLSFLGTPTTTHDSATVRIDPTGKVTVTTSLASSGQGHETTLAQIAADVLGVPASDVVIQAGSTKNTYGFGAYASRGAVIGAGSIGRAASIVRERVKQLAGHLLEAASEDIVIEDGLVHVAGVPAKGMPFAEVVGAAYFADATHPPGFDATLEATATYDPSDLVLANGGHAAIVEIDASTYATRVTDFFAVEDCGTMINPMIVEGQIRGGIAQAIGQTLLEEVIYDDFGQLVTTTLMDYLIPTTLDVPDIRIRHLETPSPLVPGGIKGMGESAMISAPAAVVAAVNDALAHLEVVIETVPITPERIFRSIQERPMQ

SEQ ID NO: 116068 - DNA, 4050 bp, Rhodopseudomonas palustris
  CDS (690)..(3014): transl_table=11
aaatcgaccgccgcgttgtagtcgcgtagcggcattgtcccctccgccgtcgttgagttggagtgatataagcgtctgcccggagtgatctccttgatttttgctaagcgctccgtcggtcgtgcggcgtgacgattgcttgactttggtcatggatgaggtcctcccgcgccgacagtctggcgggcgagggagcgatccatggatgaaacgatgctgcgacgccgcaagcgtttgctcggcctgaacgtcaacggtcgatggcgcgaggatgcggttactgacgacatgttgctggtcgattacttgcgcgatatcgcgggcctcaccggcgtcaagaccggctgcgacggcggcgagtgcggtgcttgcaccgtgctgatcgacggcgaagcagctccgtcgtgcctggtgctcgcggtgcgctgcgaggggcgttacatcgagacggtcgagggcttggcggccaacgggcgcctgcaccggctgcagcagaccttccacgagcggctcggcgcccaatgcggtttctgcacccccggcatgatcatggcggccgaaggtctgttgcgccgcaatccgtcgccgaccgacgaagagatcaggacggcgctatccggtaatctttgccgctgcaccggctacgccaagatcgtggaatcggtgcaagcggccgcggagatcgcgccatgagcggtcccgcattccaaggcggtctcgaccgcgccggcgtgccgctggtcgacggtattgataaggtcacggggcgggcgcggtacaccgccgatctcgatcataccggagcattagttgctcgcatcctacgtagcccgatcagtcatggcgatatcgtccggctcgatgtcagcaaggcgttggcactcgacggtgtcgcggcgatcgtcaccggcgaggactgcgcaatcacctatggcgtgctgccgatcgcgatgaacgagtatccgatggcgcgcgatcgcgtccggtatcgcggtgaaccggttgcggcagtggccgcggtcgatgcagagacggcacggcaggcgctcgacctgatcgaactcgagctgcgtgaattgccggcttactacgagtcggaggccgcccgcgccccggatgcctggctgctgcacgacaacaagccgggcaatatcgagcgagaggttcacaatgagttcggcgatcttgccgcaggcttcgaagccgccgatctgatccgcacccacacgcatcattgtgccgaggtcaatcacgcgcagatcgagccgcacgcctgcctgatggattacgatccggtcaccgggcggctcaccgcccagagcgtgtcgcaggtcggctattatctgcatctgatgctggcgcgctgcctcgagatcgatccgtcgcgggtgcgggtgatcaagccgttcgtcggcggcggcttcggcgcccgcgtggaagtcttgaatttcgaggtgatcgccgcactgctcgcccgtaaggccagtggcagagtgttgatgcggctgagccgcgaggaaaccttcatcacccatcgcgcccggccgcagaccgacatcaccttgacgatcggaacgcggcgcgacggccggttcaccgcctgctcgtgcgaagtggtgcagcgcggcggcgcctatgcgggttacggcatcgtgaccatcctgtatgccggcgcgctgctgcaggggctctacgacatccccgccgtcaaatacgacggctaccgcgtctacactaacctgccaccctgcggcgcaatgcgcgggcacggctcggtcgacgttcgtcacgccttcgagaatctggtcgatcggatggcgcgcgaactcggtctcgatccttttgcggtgcgccgcgccaatctgctggccgcgccgacgcgcaccctcaacgatctgatggtcaacagctatggtctcgccgaatgcctcgacaaggtcgagcgcgccagcggttggcatgagcgaattggccggctgccgccgggcaagggtctcggcatggcgtgttcgcactatgtcagcggttcggccaagccgatccatttcaccggcgagccccatgcagtggtggcgctgcggctcgatttcgacggcggcatcacggcccttaccggcgccgccgacatcggccagggctcgtcgactgtggtggcgatcactgttgctgaaaccctgggcgtcgcgctgaaccgggtccgggtaatttccggcgactctgcaattaccccgaaggacaatggcgcgtattcgtcgcgcatcaccttcatggttggcaacgccgcaatcgatgcggcgaccaagctgaaacagatcctgatcgcggcggcagcgcggaaactcgaagccgtgccggagcagatcgagtgtgccggcgagagcttcttcatcggcagcggtgcccaggccgcgctccgcttcgccgaggtggtgaaagccgcgctggtcgacgagggcgccatcaccgtcaagggcatcttcacctgcccgccggagtcgcagggcggccaacatcgcggcggggcggtcggctcaacgatgggatttagctacgcagcccaggttgtcgaggtcagcgtcgacgacgcgaccggtctgatcaccgtcgataaggtctgggcggcgctcgattgcggccgcgccatcaatccgctcgccgtggtcggacaggtacagggcgccgtatggatggggatggggcaggcgatgtgcgaagagacgcgctatctcgacgggctgcctgcgcatgcgcatgccagctttctcgaatatcggatgccgacgatgatcgaatcgccgccgatcgaggtcgcgatcgtcgagagcgtcgatccgcgcgggccgctcggcgacaaggaggccagtgaaggcgcactcgccggtttcccgccggagatggtgaatgccgccgcaatgcgatcggtatcgatctcgatgatttgccggcaacgcccgatcgggtcgtcgaggcgctggcacggcggcggcgcgaggcaaagcgggcggtggcggtgagggcagcctcatgaccgccttgaatgcgttgaatttgcttcggccgggctcggtggacgaagcgatcgccgcactgctggcgcacccgggcggatggctgctcggcggcggcacggatcttctggtcaacatgcggcgcggtgtgacgcagccggagacgctgatcgacactaccggcattgccgagatcaagcagctcgtcgccgatggcagcggtctgaccatcggcgcgggtgtcaccctggcgagtcttgccgccgatggcctggtcgccgcgcgctatccggcgctgagcgaggctgcgcgtgccgtagcgggacccggtcaccgcaagctgggcaccgtcggcggcaatctctgcctcgacacccgctgcatctactacaatcaaagcgaatggtggcggcgcgcgaattcgtactgcttgaagaaccgcggcgagatctgtcatgtcgcgccgaagggtaatcgttgccacgctgccttcagcggggatctggcgcctgcgctgctggtgctcggcgccgaggtggagatcgctggaccggacggtcggcgccgcatcccactcggcgagctgtatgtcgaagacggccgggcgcatcttgcgctgcggccgggcgaggtcgtggtcacggtgcggctgccagccgacccgctcgcgtcgcgctacgtcaaggtgcggcagcgcggcgcgatcgactatccgctcgccggagtcgctgtggcgctggcgcggtcgggctccagactcgcgcagcttcgcattgcactgaccgggaccaattcgcggccgtttctgctcgcagagacggcagccttcgcgcaacggtcgctcgatgacgcgctgctgcgcgagatcgatcggctggtgcagaagcaggtgcagccgatgcggacgacgctgatgccggccaactaccggcgcgtcgttgcagcggctctggccagccgcatcacggccgagctgttcgcctcgctggcgcccgcgtagtacggatcgatccgcaatcacgcttcaacgcacggcctgcag

SEQ ID NO: 116069 - protein, 774 aa, Rhodopseudomonas palustris
MSGPAFQGGLDRAGVPLVDGIDKVTGRARYTADLDHTGALVARILRSPISHGDIVRLDVSKALALDGVAAIVTGEDCAITYGVLPIAMNEYPMARDRVRYRGEPVAAVAAVDAETARQALDLIELELRELPAYYESEAARAPDAWLLHDNKPGNIEREVHNEFGDLAAGFEAADLIRTHTHHCAEVNHAQIEPHACLMDYDPVTGRLTAQSVSQVGYYLHLMLARCLEIDPSRVRVIKPFVGGGFGARVEVLNFEVIAALLARKASGRVLMRLSREETFITHRARPQTDITLTIGTRRDGRFTACSCEVVQRGGAYAGYGIVTILYAGALLQGLYDIPAVKYDGYRVYTNLPPCGAMRGHGSVDVRHAFENLVDRMARELGLDPFAVRRANLLAAPTRTLNDLMVNSYGLAECLDKVERASGWHERIGRLPPGKGLGMACSHYVSGSAKPIHFTGEPHAVVALRLDFDGGITALTGAADIGQGSSTVVAITVAETLGVALNRVRVISGDSAITPKDNGAYSSRITFMVGNAAIDAATKLKQILIAAAARKLEAVPEQIECAGESFFIGSGAQAALRFAEVVKAALVDEGAITVKGIFTCPPESQGGQHRGGAVGSTMGFSYAAQVVEVSVDDATGLITVDKVWAALDCGRAINPLAVVGQVQGAVWMGMGQAMCEETRYLDGLPAHAHASFLEYRMPTMIESPPIEVAIVESVDPRGPLGDKEASEGALAGFPPEMVNAAAMRSVSISMICRQRPIGSSRRWHGGGARQSGRWR

SEQ ID NO: 116070 - DNA, 4484 bp, Oryza sativa
  CDS (421)..(4239)
gcactactactactacttctgcttcactctctctctctccccgatcccaatctcggagagagagacgtcctcatccatccatcccatccactcgagttgatcgatcgcccggacgccgccgcaggggccatggggtcgctcaccagggcggaggaggaggagacggcggcggccgaggagtggtcgggcgaggcggtcgtctacgtcaacggcgtccgccgcgtgctccccgacggcctcgctcacctcaccctgctccaatacctcagagacattggtcttcctggaacaaagcttggatgtggtgaaggtggctgtggagcctgcactgtgatggtctcatgctatgatcaaactacaaagaagacacagcattttgcaatcaacgcatgcttggctccgctttattctgtggaaggaatgcacataatcacagtagagggaattgggaatcgtcagcgaggtttgcacccaatccaggaacgtttagccatggcccacggttcacaatgtggattttgcacccctggttttgtgatgtcgatgtatgcattgctgagatcaagtgaacagcctcctactgaagagcagattgaagatagccttgcaggaaatttatgtcgctgtactggctacagaccaataatagacgccttccgtgttttctcgaaaagagatgatcttttgtacaacaattcatctctgaaaaatgcagatggccgacctatctgcccttcaacaggaaaaccatgttcctgcggagatcagaaagacatcaatggtagtgaatcttcattattgacacctacgaaaagctactcaccttgttcatacaatgagattgatggaaatgcgtacagtgagaaagaactcattttccccccagaacttcagttgagaaaagttacgtcacttaaattgaatgggtttaatgggattcggtggtatagacctcttaaactaaagcaagtattgcatttgaaagcatgctacccaaatgcaaaactaatcattggtaactctgaagtaggagttgaaacaaagttcaagaatgcccagtataaggtcttgatctcagttactcatgttccagagcttcatacccttaaagtgaaagaggatggtatacatattggttcttctgtaagacttgcacagctccaaaatttcctcagaaaggttattttagagcgtgattcacatgaaatttcatcctgtgaggcaatactgcggcaattaaaatggtttgctgggacacaaatcaggaatgttgcttctgttggaggtaacatttgtactgctagtccaatatcagatctaaatccactttggatggctacaggtgcaacgtttgagataattgatgtgaacaataatattaggaccattcctgcaaaagatttttttctgggttatcgtaaagttgacttaaaacctgatgagatattgctctctgttatactgccatggacaaggccatttgaatttgtcaaagaattcaagcaggcacatagaagggaggatgacattgcgttggtgaatgctggaatgcgtgtctatataagaaaagttgaaggtgattggataatttcggatgtttcaattatctatggaggggtagctgcagtttcacaccgtgcttcaaaaactgaaacctttctcactggaaaaaaatgggactatggattgttggataagacttttgatctgttgaaagaagacgtagttctggctgaaaatgcacctggtggaatggttgaatttcgcagttcacttactttgagtttctttttcaaatttttccttcatgttactcatgaaatgaatataaaaggattttggaaggatggattacatgcaaccaatctttcagccatacagtctttcactagacctgtcggtgttggaactcaatgttatgaattggttagacaaggaactgcagttggccaacctgtggttcacacatcagctatgcttcaggttactggtgaagcggaatatactgatgacacaccgacaccccccaataccttgcatgctgctctggtgctgagtacgaaagctcacgcacgcatattatctattgatgcttcacttgccaaatcttcccctgggtttgcgggtctcttcctttcaaaagacgtgcctggcgctaaccatactgggcctgttatccatgacgaggaggtttttgcatctgatgttgttacatgtgttggccagattgttggacttgttgtggcagatacccgtgataatgcaaaagctgctgcaaataaagtcaatattgagtattctgaacttccagcaattttatccatagaggaagctgtgaaagctggtagctttcatccaaatagcaagagatgcctagtaaaaggtaatgttgaacaatgttttctgtcgggtgcatgcgatagaattatagaaggaaaagtacaagttggaggtcaagagcacttctacatggagcctcagagcactcttgtatggccagttgattctggaaatgaaattcatatgatttcatctacccaggctccccagaagcaccaaaagtatgttgctaatgttcttggtcttccacaatcaagagttgtttgcaagactaagcgtattggtggtggatttggtggaaaagaaaccagatcagcaatatttgctgcagcagcatctgtagctgcttattgtttaaggcagcctgtaaagcttgttttggacagggatattgacatgatgacaactggacagaggcacagtttcctagggaagtacaaggtgggatttaccgatgatgggaagatattggccttagaccttgatgtttataacaatggtggtcattcacatgatttgtcccttccagtcctggagcgtgctatgtttcattcagacaatgtctatgatataccaaatgtcagagtcaatgggcaagtatgtttcacaaatttcccaagcaatactgctttcagaggttttggtggtccacaagctatgctgattgcagagaattggattcagcacatggctacagaactcaagcgaagtcctgaggagataaaagaacttaattttcaaagtgagggatctgtgcttcattatggccagttgcttcaaaattgtacaatacattcagtatgggatgaactaaaggtttcttgtaattttatggaagctcgcaaagctgtaattgattttaacaataataaccgttggagaaagcgtggcattgctatggttcccaccaagtttgggatatccttcactacaaaattcatgaatcaggctggtgctttagtgcaagtttacactgatggaactgtccttgtaacgcatggtggggttgaaatggggcagggtttacacacaaaggtagcccaagttgcggcttcatcattcaatatccctcttagctctatatttatctcagaaacaagcactgataaggtaccaaatgcaacaccaacagcagcctctgctagttcagatttatatggtgctgcagttttggatgcttgtcagcaaattatggctcggatggaacctgttgcttcaagaggaaaccacaagtcctttgctgagttggttctagcatgctacctggaaaggatagatctctctgctcatggattttatatcactcctgatgttgggtttgactgggtgtctggcaagggaactccattctactatttcacatacggagcagcatttgcagaagttgaaattgataccctaactggggatttccacacaaggacagtagatattgttatggatcttggctgttcaattaatccggctattgatattggccagattgaaggaggttttatccaaggattaggttgggcggccctggaagaactaaaatggggggatgataaccacaagtggattcgacctggacatcttttcacttgtgggcctggctcttacaaaataccctctgtaaatgatatacctctaaacttcaaggtctcacttttgaagggcgttttgaatccaaaggtcattcactcatccaaggctgtaggagagccaccgtttttcctcggttcagccgtcttgtttgccataaaggatgcgatatctgccgcaagagctgaggagggtcacttcgactggttcccactcgacagcccagcaacaccggaaagaataagaatggcatgcgtggattccatcacaaagaaatttgctagcgtatattaccgtcccaagcttagtgtatagtggctactgccaaagtacaagggtcattaaaggtttatgcttgtcgtacgtatatttgtacagtcccaagctactgtgtaaacataaatataggcgacagtttaggggataaaaagttaccttttcctcttcttttttaccccccaggaagaaaacactagaaataaaagcaatgttcacatcgacttgctgtctagctgtgtactggaatagaagtgcagggctcagcccaatggcgtgttctc

SEQ ID NO: 116071 - protein, 1272 aa, Oryza sativa
MHIITVEGIGNRQRGLHPIQERLAMAHGSQCGFCTPGFVMSMYALLRSSEQPPTEEQIEDSLAGNLCRCTGYRPIIDAFRVFSKRDDLLYNNSSLKNADGRPICPSTGKPCSCGDQKDINGSESSLLTPTKSYSPCSYNEIDGNAYSEKELIFPPELQLRKVTSLKLNGFNGIRWYRPLKLKQVLHLKACYPNAKLIIGNSEVGVETKFKNAQYKVLISVTHVPELHTLKVKEDGIHIGSSVRLAQLQNFLRKVILERDSHEISSCEAILRQLKWFAGTQIRNVASVGGNICTASPISDLNPLWMATGATFEIIDVNNNIRTIPAKDFFLGYRKVDLKPDEILLSVILPWTRPFEFVKEFKQAHRREDDIALVNAGMRVYIRKVEGDWIISDVSIIYGGVAAVSHRASKTETFLTGKKWDYGLLDKTFDLLKEDVVLAENAPGGMVEFRSSLTLSFFFKFFLHVTHEMNIKGFWKDGLHATNLSAIQSFTRPVGVGTQCYELVRQGTAVGQPVVHTSAMLQVTGEAEYTDDTPTPPNTLHAALVLSTKAHARILSIDASLAKSSPGFAGLFLSKDVPGANHTGPVIHDEEVFASDVVTCVGQIVGLVVADTRDNAKAAANKVNIEYSELPAILSIEEAVKAGSFHPNSKRCLVKGNVEQCFLSGACDRIIEGKVQVGGQEHFYMEPQSTLVWPVDSGNEIHMISSTQAPQKHQKYVANVLGLPQSRVVCKTKRIGGGFGGKETRSAIFAAAASVAAYCLRQPVKLVLDRDIDMMTTGQRHSFLGKYKVGFTDDGKILALDLDVYNNGGHSHDLSLPVLERAMFHSDNVYDIPNVRVNGQVCFTNFPSNTAFRGFGGPQAMLIAENWIQHMATELKRSPEEIKELNFQSEGSVLHYGQLLQNCTIHSVWDELKVSCNFMEARKAVIDFNNNNRWRKRGIAMVPTKFGISFTTKFMNQAGALVQVYTDGTVLVTHGGVEMGQGLHTKVAQVAASSFNIPLSSIFISETSTDKVPNATPTAASASSDLYGAAVLDACQQIMARMEPVASRGNHKSFAELVLACYLERIDLSAHGFYITPDVGFDWVSGKGTPFYYFTYGAAFAEVEIDTLTGDFHTRTVDIVMDLGCSINPAIDIGQIEGGFIQGLGWAALEELKWGDDNHKWIRPGHLFTCGPGSYKIPSVNDIPLNFKVSLLKGVLNPKVIHSSKAVGEPPFFLGSAVLFAIKDAISAARAEEGHFDWFPLDSPATPERIRMACVDSITKKFASVYYRPKLSV

SEQ ID NO: 116072 - DNA, 4080 bp, Aspergillus oryzae
  CDS (1)..(4080)
atggcgcccggcatcttgacgtcgccggggcctgaagtgtctcctctaaagactagctcactggcccagttaacggaggaatgggatgataccattcgcttctacttgaatggcacgaaagtgaccctcgactctgtggatccggagctcacccttttggaatacttaaggggaattggtttgacaggaacaaagctaggctgtgcagagggaggctgtggtgcttgcaccgtggtggtgtcgcacgtgaaccctacgaccaagaagctctatcacgcgtcggtaaacgcttgtcttgcgccagtcataagtgtggatggaaaacatgttattactgttgaaggcattggaaatgtgaagaacccccacgcggtccagcaacgaattgccatcggtaacggaagccagtgtggtttctgtacaccaggtatagtgatgagcctctatgcgcttatacgcaataatcctgaaccatcagaacatgctgtggaagaagcttttgatggaaatttgtgtcgttgcaccggatacaggccgatactagacgccgcccagagcttcaaagctagtggtggctgcgggaaatcaagtgccaatggtggaactggctgttgcatggaaaagcagactggctctggaggatgttgcaagggttcgtccgaggtggcgacagccaatggcgattctttgaagcttacggcacctgagttcataagtcataggccagacacagaactgatatttccgcccactcttcacaagcatgagtttcggcccttggttttcggtaataagagaaagaggtggtacagaccggttactctacagcagctcttggagatcaagcatgtgcacccagatgctaaagttatcggtggcagtaccgagactcagattgagacaaaattcaaggcgatgcgatatagtgcttcggtctacgtcggtgatattccggaacttcgccagttctcgttacaagacgatcacttggagattggggcgaatgtctctttgactgatttggagtcaatatgtgatgaagccttagagcgatatgggccggtgcgaggccagccctttactgctatcaaaaagcagcttcggtattttgccgggagacaaattagaaacgtggcgtctccggccggtaatttggctaccgcttcccccatctcggacttgaacccagtcttcgtggcaacaaacactgtactggttgccaaatcactaggaggggatattgagattccaatgaccgaattcttcaaaggttacaggactacggcccttccaccggatgctataatcggcagtctgcgcgtccctactgcatcagagaatggggagtatatgcgggcttacaaacagtccaaaaggaaagacgacgatatcgctattgtcaatgccgccttgcgggtttcgctctcgtcttcacatgatgtgacgagcgtaaacctcgtgtttggcggtatggccccaatgactgtgtctgcacgaaaggcagaagctttcttggtaggcaagaaattcacgcatcctgcgacccttgagggcaccatgagtgctctagaacaagacttcgatctgcagtacggagtgcccggtggtatggctagctatcgtcggtctcttgctctaggatttttctaccgattctatcatgacgttttgtcgggggtcgagttgaacagtacggacatcgaccacgacgtgattggtgagattgaaagagctatctcttgcggggaaaaggatcatgaggcttcagcggcatatcaacagcgagtattagggaaagctggccctcatgtctcggcgttgaaacaggccactggcgaagcgcagtacactgatgatgtacctgtcctacagaacgagttgtttggttgcatggttttgtcgacgaaaccgcatgcaaatattatcagcgttgatccatctgctgctctcgatatccctggagttcatgactatgtggatcacagagatcttcccagtccagaggctaattggtggggtgctcctgtagccgatgaggtgttttttgcagtagataaggttacaactgctggacagcccattggtatgatcctcgcaaagtcggccaaaactgccgaagaggctgcgagagctgtaaaaatcgagtatgaggagctgccggctatactaaccattgaagaggccattgaagccgaatcgttcttcgcgcacaaccactacatcaaaaacggcgatacagaagcggctttcagacatgctgaccacgttatcactggcgtatcgaggatgggaggccaggagcatttctacctggaaacccaagcgtgcgtcgccattcccaaacctgaagacggggaaatggagatctggagtggcacacaaaatcccaccgaaactcaaacatacgtcgctcaggtcacaggggtagcagccaacaagatagtctcaagagttaagcgactaggtggtggatttggtggtaaagagactcgatcaattcaacttgctggcctatgtgcgacggctgcagctaaaacaagacggcccgttcggtgtatgcttaaccgtgatgaagatattataacttcaggtcagcgtcacccgttctactgccgttggaaggttggcgtgaccaaggaagggaagctccttgccctcgatgctgatgtatatgccaacggtggacacacacaagatctttctgccgcagttgtggacaggtccttgtcacatattgacggagtgtataacatcccgaacgttcatgtccggggtcgtatttgcaagacaaatacagtctcaaattccgcgttccgtggattcggtggaccacagggcatgttcatggcggaaagcttcatgtcggagatcgcggatcatctggatatcccagtcgaaaagcttaggatggacaatatgtataagcacggagataagacccactttaaccaggagctcaaagactggcatgttcccttgatgtataatcaagtcttggaggagagctcgtatatggaacgtcgaaaagccgtggaggaatacaataagaagcacaagtggtcaaaacgtggcatggctatcattccgacaaaattcggcatctcctttacggccttgttcctgaaccaagctggggctctcgttcacatctatcatgacgggagcgttcttgtcgcccacggtggtgttgaaatgggccaggggctgcatactaagatgactatgattgcggcagaagcactaggcgttcctcagtcagacgtgttcatttccgaaacagccacaaacacagtcgcaaatacctcgtctacagctgcgtcggccagttccgacctcaatggttacgctattttcaatgcctgtgagcaactcaacgagcgtcttcggccttatcgggaaaagatgccgaatgccccaatgaaagaactcgcgcatgcagcttactttgaccgagtcaacctctctgctcaggggcattatcgtaccccagatattggctatgtctggggcgagaacacaggccaaatgtttttctacttcacacagggtgtgacagccgccgaagttgagatcgacacactaaccggtgattggactccgttacgtgcagacatcaagatggatgtcggccgcaccatcaatccctctatcgactacggacagatagagggagccttcattcagggtcaaggtctctttacgacagaggaaagcctctggcatcgtgcctcaggccaggttgtcactaagggacccggaaactacaagattcccggatttcgggacattccccaggttttcaacgttagccttctcaaggacgttgaatgggaaaatcttcgtacaatccaacgatctcgtggtgtcggtgaaccaccccttttcatgggaagcgctgttttctttgctatccgtgacgctctgaaagcagcacggaagcagtacaatgttcacgaagttctcagtctacgaagtccggccacccccgaacggattcgggtcagctgcgctgatcccattatcgaacgggcaagagtattgcctaaggaaggagagaagagcttttttgttgagatttga

SEQ ID NO: 116073 - protein, 1359 aa, Aspergillus oryzae
MAPGILTSPGPEVSPLKTSSLAQLTEEWDDTIRFYLNGTKVTLDSVDPELTLLEYLRGIGLTGTKLGCAEGGCGACTVVVSHVNPTTKKLYHASVNACLAPVISVDGKHVITVEGIGNVKNPHAVQQRIAIGNGSQCGFCTPGIVMSLYALIRNNPEPSEHAVEEAFDGNLCRCTGYRPILDAAQSFKASGGCGKSSANGGTGCCMEKQTGSGGCCKGSSEVATANGDSLKLTAPEFISHRPDTELIFPPTLHKHEFRPLVFGNKRKRWYRPVTLQQLLEIKHVHPDAKVIGGSTETQIETKFKAMRYSASVYVGDIPELRQFSLQDDHLEIGANVSLTDLESICDEALERYGPVRGQPFTAIKKQLRYFAGRQIRNVASPAGNLATASPISDLNPVFVATNTVLVAKSLGGDIEIPMTEFFKGYRTTALPPDAIIGSLRVPTASENGEYMRAYKQSKRKDDDIAIVNAALRVSLSSSHDVTSVNLVFGGMAPMTVSARKAEAFLVGKKFTHPATLEGTMSALEQDFDLQYGVPGGMASYRRSLALGFFYRFYHDVLSGVELNSTDIDHDVIGEIERAISCGEKDHEASAAYQQRVLGKAGPHVSALKQATGEAQYTDDVPVLQNELFGCMVLSTKPHANIISVDPSAALDIPGVHDYVDHRDLPSPEANWWGAPVADEVFFAVDKVTTAGQPIGMILAKSAKTAEEAARAVKIEYEELPAILTIEEAIEAESFFAHNHYIKNGDTEAAFRHADHVITGVSRMGGQEHFYLETQACVAIPKPEDGEMEIWSGTQNPTETQTYVAQVTGVAANKIVSRVKRLGGGFGGKETRSIQLAGLCATAAAKTRRPVRCMLNRDEDIITSGQRHPFYCRWKVGVTKEGKLLALDADVYANGGHTQDLSAAVVDRSLSHIDGVYNIPNVHVRGRICKTNTVSNSAFRGFGGPQGMFMAESFMSEIADHLDIPVEKLRMDNMYKHGDKTHFNQELKDWHVPLMYNQVLEESSYMERRKAVEEYNKKHKWSKRGMAIIPTKFGISFTALFLNQAGALVHIYHDGSVLVAHGGVEMGQGLHTKMTMIAAEALGVPQSDVFISETATNTVANTSSTAASASSDLNGYAIFNACEQLNERLRPYREKMPNAPMKELAHAAYFDRVNLSAQGHYRTPDIGYVWGENTGQMFFYFTQGVTAAEVEIDTLTGDWTPLRADIKMDVGRTINPSIDYGQIEGAFIQGQGLFTTEESLWHRASGQVVTKGPGNYKIPGFRDIPQVFNVSLLKDVEWENLRTIQRSRGVGEPPLFMGSAVFFAIRDALKAARKQYNVHEVLSLRSPATPERIRVSCADPIIERARVLPKEGEKSFFVEI

SEQ ID NO: 116074 - DNA, 2388 bp, Arthrobacter ilicis
  CDS (1)..(2388): transl_table=11
atggttgaatccattagcgcaccaaagatggtcggccaagcgattcctcgtaaggaaaatgctggcttattgaccggcgctgccctcttcgtggacgacgtggtcttggaagggatgctgcacgccaagattctgcgcagcccgactgcgcacgcgaatcttttgtcagtcgatgcttcgcgggctaggaccatgcctggggttcacgacgttgtcaccggtcccgagatgaccggtgtcctgaagcgattcggtggactggttaaaggtctcccgttcaacgaccgcattgtgatggcagacgacaaggttgtattcgagggccaggaaattgcagccgttgctgccgagtccccgtatgaagcatgggatgctgttgaggcgattaaggtcgcttacgacgagctcgagccggtcgttgacattgagttcgccgcttcatccgaggctaaagcaatttgggattacaacggcaccaacgtctgggaaaactacaagctcaagataggcgatgcgcagtccgcccatggtgccgtgacggtgggaggcaagttccgcacgaaccgtccggcagctgttgccatggaaccccacgtatgtattgcagactttgaccggataacgaagagcctcacgctctacacctccacccagttcacccacctcttggtcggcatcattgctgacgtgctacaaatacctcctgcaaaagtcagggttgctacgctcaacgtcggtggtagcttcggctcgaagggagacctgttcccacacgaagtcatcgcctgtctgctctcactgcggaccggtcggccagttaagctcgtgctcagccgtgaggaggtcttcaaggccgtgggtgggcggtgcgcccaggtaaccacagccgaactaaagatggaccaagacggcagcatcgtgagttacggagcgaaggtgctacacaataccggggctgtgtcgcccttcgggggccagatcatgaagattggccttcatatcggaatgctgccctaccccataccgaacattgatattaatgcctctgcagtctccacgaccacgatcagtggtggccccgtccgggggttcggtgtcccacaggtgcttttcgtcaaagagcagctcattgacatggcggcagaggaactcggactggacccgatcgaggtgcggctgaagaacatccccgcaaatgcggaagagggttacgttacgccctccggcatcaggattgacagcacgacggctcacttctgcttgcggaaggtggccgacgagatcgggtggtgggaccgccacgagaagcgggaagcctacgtcggctacggcgccggcctggcagtgaagtacacaagcgcccgacacccctcccttgacaccgacctttccacaatccgactgctcctcacacccgacggacgagtgaccatcttctctggcgacgtgccccacggacagggacaccacacgatgctgtcgcaaatcgtggccgatgcgaccggcgccaagttcgacgaaatcggccttgtcgcagcggacaccgctacaacgccgttcagtctaggcacgttcggcagccgatcagccgcagttcttggctcggcggcgatgcgggcaggcgaattactggccgagcggatccgcaccgtcgcagccagcatcatgaagtgcccggcggacatcttggagctgcgcgagagcatggtctgggtcaaaggcagcaccgagcccgctcttccgtttgaggccgtcgccgcggtggcgctgttcgccacgagcgggttatccggtggcagcgtggccggtcccatcgaggcccaggccacctatgacaccccgactgagcgcgagcgggaggatgggggcggcaattgggcggcaacttactccgctggggctcatgcggcccgtgtagaggtcgacccttctacaggccaattcaaaattcttgactacgtcatggcccatgactcgggtaacatcatcaaccccctcatagttgaggggcagcaccatggaggctttgcccacggcttagccatggttaccgaggacctccaaattgggtccgacggcaaactgctcaatgccagcctggcaacgtacggggtcctcaccgcgcacgacgtccccaatctccaccaactctacgatgttgatgtcccctcaaccgtcattccgatcggttccaagggtgcaggagagacggcaacaggtgcggtaccagcagtgattgcgaacgcgttggcggacgcgacaggtatccgcttcacccggcttcccatcaccccagaggacgtcgtgctcgcactggccgagaaggagcgccagggcgtcgaccgccttgtgtggccgctcactgagacgcaaggagacacacaatga

SEQ ID NO: 116075 - protein, 795 aa, Arthrobacter ilicis
MVESISAPKMVGQAIPRKENAGLLTGAALFVDDVVLEGMLHAKILRSPTAHANLLSVDASRARTMPGVHDVVTGPEMTGVLKRFGGLVKGLPFNDRIVMADDKVVFEGQEIAAVAAESPYEAWDAVEAIKVAYDELEPVVDIEFAASSEAKAIWDYNGTNVWENYKLKIGDAQSAHGAVTVGGKFRTNRPAAVAMEPHVCIADFDRITKSLTLYTSTQFTHLLVGIIADVLQIPPAKVRVATLNVGGSFGSKGDLFPHEVIACLLSLRTGRPVKLVLSREEVFKAVGGRCAQVTTAELKMDQDGSIVSYGAKVLHNTGAVSPFGGQIMKIGLHIGMLPYPIPNIDINASAVSTTTISGGPVRGFGVPQVLFVKEQLIDMAAEELGLDPIEVRLKNIPANAEEGYVTPSGIRIDSTTAHFCLRKVADEIGWWDRHEKREAYVGYGAGLAVKYTSARHPSLDTDLSTIRLLLTPDGRVTIFSGDVPHGQGHHTMLSQIVADATGAKFDEIGLVAADTATTPFSLGTFGSRSAAVLGSAAMRAGELLAERIRTVAASIMKCPADILELRESMVWVKGSTEPALPFEAVAAVALFATSGLSGGSVAGPIEAQATYDTPTEREREDGGGNWAATYSAGAHAARVEVDPSTGQFKILDYVMAHDSGNIINPLIVEGQHHGGFAHGLAMVTEDLQIGSDGKLLNASLATYGVLTAHDVPNLHQLYDVDVPSTVIPIGSKGAGETATGAVPAVIANALADATGIRFTRLPITPEDVVLALAEKERQGVDRLVWPLTETQGDTQ

SEQ ID NO: 116076 - DNA, 2427 bp, Comamonas acidovorans
  CDS (1)..(2427): transl_table=11
atgaaccacccccatgaactgacgaatgaactggtggcagaagcctttgccgactaccgcaagaaccaggcctatcgcatcgacgaagtgaccgaggccaaggcccatgaccagggtgcccgcgtgggtgtcagccgcaagcacgagtccgcacacctgcatgtggccggcgaggccgcctatatcgacgacctgcccgagctggaaggcacgctgcagtgcgccctggggctctcgcccgtggcccatggccgtctgacggcgctggtgctggaggccgtgcgcgccatgcccgaagtggtggaggtgatcacggcagccgatattcccggcgtcaacgactgcggctccatcattcatgacgaccccatcctctgcgacggcgagatccgctacgtgggccagcccctgttcgccgtgattgcccgctcgcgcgacgcggcaaggcgtgctgcggccctggccaaggcggccgccaccatcagcgagctgccgcccgtgctgacgccgcgccaggcccatgagctgggccagtacgtgatgccgcccatgcacctggagcgcagcacccgcgaaggcggcgcgcgcgccgccatggatgccgcgccgcaccgcctcaagggctccttcgatgtgggcgggcaggagcagttctatctggaagggcagatcagctacgccacgcccaaggaagacggagccgtacatattcactgctccacccagcatcccagcgaaatgcagcacctggtggcgcatgccctgggcgtggcttcacacagcgtgcatgtggaatgccggcgcatgggcggcggcttcggcggcaaggagtcgcagtcggcgctgttcgcctgcgtggcggccgtggcggcgacccggctgcaaaagccggtcaagctgcgcctggaccgcgacgacgacttcatgatcaccggtcgccgtcactgcttctggtatgagtacgaagtgggctatgacgatgaaggccgcgtgctgggagccgagatctccatggtctcgcgcgccggtcactctgccgatttgtcggcgccggtgatgacgcgtgcgctgtgccatttcgacaatacctactggctgcccgatgtgctcatgcacggctacatgggcaagaccaacacccagagcaacacggctttccgtggctttggcggaccgcagggcgcgattgccatcgagaacattctggatacggtggcgcgcagcctggggcgcgatccgctcgatgtgcggcgcgtcaacttctacggcaagggcgagcgcaacatcacgccctatgagcaggtcgtgaccgataacgtgattcacgagctggtggccgagctggaggagtccagtgactaccgtgcgcgccgtgcggccgtgaatgccttcaacgccggcagtgccgtgctcaagcgcggcctggcgctgacgccgctgaagttcggcatctccttcaatgtggcccacttcaaccaggccggcgcactggtccatatctataccgatggctcgattctcgtgaaccatggcggcaccgaaatgggccagggcctgaacaccaaggtggcgcaggtggtggcgcatgagctgggcgtagccttcgagaatgtgcgcgtgacggccaccgataccagcaaggtggccaacacctcggccacggcggcctcgacgggagccgacctcaacggcaaggccgcacaggatgccgcacgccagctgcgcgagcgtctggccgaatgcgccgcacgcctgcatggcggcgacgccggggacgtgcgctttgccaacaatgcggtgcaggtcaatggccagaatgtgccgtttgccgagctggtgcgcgcagcctatctgcagcgtgtgcagctgtggtcggatggcttctatgcgacgcccgggctgcactgggacggcaagcgcatgaagggccaccccttcttctactttgcctatggcgcggctgtcagcgaggtggtcatcgatacgctgacgggcgaatggaagctgctgcgcgccgatgtgctgcatgacgtgggccgctcgctgaacccggccgtcgatgtgggtcaggtggagggggccttcattcagggcatgggctggctgaccaccgaggagctggtctggcatccgcaaaccggaaagctcacgacccatgcgcccagtacctacaagattcccacggccaatgactgcccgccggtcttcaatgtgcgcctgttcgagggcgacaactatgaagactccatccaccgcagcaaggccgtgggcgagccgccgctgctgctgccgttctcggtgttcttcgcgattcgcgatgcggtgtccgccgccggcgagcaccgggcgaatccgcctctgcaggcaccggccacgtcagaggccatcctcagagcagtggaagccgttcaagggcacactggctag

SEQ ID NO: 116077 - protein, 808 aa, Comamonas acidovorans
MNHPHELTNELVAEAFADYRKNQAYRIDEVTEAKAHDQGARVGVSRKHESAHLHVAGEAAYIDDLPELEGTLQCALGLSPVAHGRLTALVLEAVRAMPEVVEVITAADIPGVNDCGSIIHDDPILCDGEIRYVGQPLFAVIARSRDAARRAAALAKAAATISELPPVLTPRQAHELGQYVMPPMHLERSTREGGARAAMDAAPHRLKGSFDVGGQEQFYLEGQISYATPKEDGAVHIHCSTQHPSEMQHLVAHALGVASHSVHVECRRMGGGFGGKESQSALFACVAAVAATRLQKPVKLRLDRDDDFMITGRRHCFWYEYEVGYDDEGRVLGAEISMVSRAGHSADLSAPVMTRALCHFDNTYWLPDVLMHGYMGKTNTQSNTAFRGFGGPQGAIAIENILDTVARSLGRDPLDVRRVNFYGKGERNITPYEQVVTDNVIHELVAELEESSDYRARRAAVNAFNAGSAVLKRGLALTPLKFGISFNVAHFNQAGALVHIYTDGSILVNHGGTEMGQGLNTKVAQVVAHELGVAFENVRVTATDTSKVANTSATAASTGADLNGKAAQDAARQLRERLAECAARLHGGDAGDVRFANNAVQVNGQNVPFAELVRAAYLQRVQLWSDGFYATPGLHWDGKRMKGHPFFYFAYGAAVSEVVIDTLTGEWKLLRADVLHDVGRSLNPAVDVGQVEGAFIQGMGWLTTEELVWHPQTGKLTTHAPSTYKIPTANDCPPVFNVRLFEGDNYEDSIHRSKAVGEPPLLLPFSVFFAIRDAVSAAGEHRANPPLQAPATSEAILRAVEAVQGHTG

SEQ ID NO: 116078 - DNA, 2451 bp, Arthrobacter nicotinovorans
  CDS (1)..(2451): transl_table=11
atggataacccacactattactctcctcccataacaagaaacgtgatcggtaagcgagttccgcgaactgaggacgcaagacttctgaccgggcgcgggaagtacctgaacgacatcaacgtcgacggccaactgcatgcttgtttcgtgcgcagccctgctgctcatgctcaaataaccggcattgatacgtcggccgcctcagaaatgcctggcgttcaccttgtctggacatccgccgacattgagcaatactgcgccggcatcgaagcgcagtacaccgctgagggatgcgaagctatgaccatgccgctcttggccaaggacgtcgtacgttacgttggagaaccggttgtattggtagtcgccgagtcgcgagcggctgcagaagatgcctgtgatcttgtaggccttgagcttgagcacctcgaggtagtgcttgacccgcgcaagtcgattcaagggggccccgtagcgaacggcgaacgccccgacaatgtaggcattcgcgggcgggcttcttttggggacgtggatgaggcttttagcaatgctgagcatgtggtttccgccctgtatcaccctggtcgggtggccgccgcaccgatggagacaagggggtgcctagcggactacgaatggactgaggaccggcttaaactttgggtgtcgacgcagatgccccattacgtaaaaatgtgcctcagcctctttcttggtttcgatgagtcccgaagtgaggtcatttctcccgatacgggtggaggctttggtcagaaggcgcacgtatttcctgaggaaatgctcatgcccttggcctcgaagcacctgaagacgccggtgaaatgggtagaggatcgccgggaaaatcttctggcgggctcacacgcccacgaacagttcgtcacgatccaatatgcggccaacgctgaaggacgaataaccggcgttcgtacgcatgccttagttgatggaggcgcctaccacatgcccccgcagaccatggctgtggaatgctgggcgaccgccgcagtcacgccaactggtgtatacgatatcccggccgctgagtacgtctacgagggggccgttaccaacaagtgccccatgggcgccttccgtggcgttggttacactgcgggaactcttgccagagaatccctcatggatgatttggcgcgaaagatgaaggtgtctccttttgaaatcaggagacggaatgttgtcagggagttcccctggacaaatccccagggcgtcgtttatgaggagggatcctttcttgaagtaatcgatgcgttggaagaaatggtcgattacccggcctttcttaggcgacaggatgaagcccgcaaagccggaaagtacctagggctgggaatcagcgttttcgtcgaaagtagcggcgagagcaccggcatgatgcaggctcacggcgcaacggatgtatttcatgacacggctaccgtcaagatggattcaaccgggtcggtcactataacatcgggattgaactcacagggtcagggccatcaaaccacgctcgctcaggtagcggcggacgtgttgggtattccttttgaatcgatcagtgtcgatgcggggacctccactaagggggcctatggcagcggtaccattggaagccgagcggctgtcatcgcgggcgggtgtgtcaaccgtgcagcttatgccattcgacagaaactggtggccgtagctgcgaacatgctcgaatcttctgaggaagatatcgttttggaagacggcttcgcgtccgtcataggcgctgcggaatcacgagtgagcatcgccgacgtggccatggcagtctactgggactcatccaagtggcccgccggttttgaacctggtttggagttcacgaaggcgtgggacacatcccggccgatgttttcgaacggcggtcatgcccttattgttgaactggatcctgtcactggatttgtgaaagtcgaaaaggtttattctgtagaggactgcggcgttattatcaaccccacaattgttgaaggtcaaattcgaggtggggtcgtacaaggaattggtatgggcctcttcgaacagctggcttatgacaacgcaggaaatttgtctacgacatctttcctggattaccagacgccgactatggatgtttctccgccatttgaaatcaggcacattgaaacaccgtccgtgatgacagcatctggggtgaagggcatgggggagtcgggtctgatttcggcgccggctgcggtgctgaatgccgtaaatgatgcgctatctccgtttggttctgtcctctatgaactccctgccactccggagaaggttgttcgtgcaacgaaaggcatcattgacctgcagggcccccaggactggtcagagctatgggaacgggcaggggtacccgcgcttgatcgcggccctatggacagggagtaa

SEQ ID NO: 116079 - protein, 816 aa, Arthrobacter nicotinovorans
MDNPHYYSPPITRNVIGKRVPRTEDARLLTGRGKYLNDINVDGQLHACFVRSPAAHAQITGIDTSAASEMPGVHLVWTSADIEQYCAGIEAQYTAEGCEAMTMPLLAKDVVRYVGEPVVLVVAESRAAAEDACDLVGLELEHLEVVLDPRKSIQGGPVANGERPDNVGIRGRASFGDVDEAFSNAEHVVSALYHPGRVAAAPMETRGCLADYEWTEDRLKLWVSTQMPHYVKMCLSLFLGFDESRSEVISPDTGGGFGQKAHVFPEEMLMPLASKHLKTPVKWVEDRRENLLAGSHAHEQFVTIQYAANAEGRITGVRTHALVDGGAYHMPPQTMAVECWATAAVTPTGVYDIPAAEYVYEGAVTNKCPMGAFRGVGYTAGTLARESLMDDLARKMKVSPFEIRRRNVVREFPWTNPQGVVYEEGSFLEVIDALEEMVDYPAFLRRQDEARKAGKYLGLGISVFVESSGESTGMMQAHGATDVFHDTATVKMDSTGSVTITSGLNSQGQGHQTTLAQVAADVLGIPFESISVDAGTSTKGAYGSGTIGSRAAVIAGGCVNRAAYAIRQKLVAVAANMLESSEEDIVLEDGFASVIGAAESRVSIADVAMAVYWDSSKWPAGFEPGLEFTKAWDTSRPMFSNGGHALIVELDPVTGFVKVEKVYSVEDCGVIINPTIVEGQIRGGVVQGIGMGLFEQLAYDNAGNLSTTSFLDYQTPTMDVSPPFEIRHIETPSVMTASGVKGMGESGLISAPAAVLNAVNDALSPFGSVLYELPATPEKVVRATKGIIDLQGPQDWSELWERAGVPALDRGPMDRE

SEQ ID NO: 116080 - DNA, 4631 bp, Solanum lycopersicum
  CDS (360)..(4463)
cagctatcaaagaatcttgatctcagaagttctttgtgctaaaaagtaagtatttggacacccaattcaagttcaagattcttgatttttctgtcagttctgttattttccacctgaggaagtagaaaagaagttgaaaaagattaagtttttgagacagggtttgactaaagttaagtgtttcagctaaccaagaatcttgatttaagaagctttttgtgttgaacagtaaatatttggagaccaaaatcaattcaaggttcatgctttttctttcagttgggatattgttcagctcaggaagtagaaaaaagataagattttgataaagggactatgtgaaaggggctattatattaatggaggaaagacagaaaaaagggggttcattggtttttgcagttaatggagagaggtttgagttgccatgtgttgatccttctacaactttgcttcagttcttgcgctctcagacttttttcaagagtcctaaacttggttgtggtgaaggtggttgtggggcttgtgttgttctggtatcgaagtatgatccaaagcttaaaaaggttgaagattttagcgtaagttcatgccttacacttctttgcagtttaaatggtttttcaattactacaagtgaaggtcttgggaacaccagagatggtttccactctattcatgaaaggattgccggtttccatgcttctcaatgcggcttttgcactcccggcatgtgtatgtcatttttctccgctcttgtcaatgccgataaaggaaacaagccagatcctccaccgggattctctaagcttacttcgtccgaagctgaaaaggcaatagaaggaaacctttgtcggtgcactggataccggcccattgctgatgcctgcaagacttttgctgctgatattgatatagaggatttaggattcaatgctttttggaaaaacggagattccaagcaaatgaaagtaagtaaattacctccctatgatccaactaagaacttcaatacatatcccgagttcttgaaaagtgaatccaccacgaatttagactctttaaggtactcttggtatactcctgtttccattgaggatctacagagcttgttgaactccaacgtgacagaaaatggtgcaagctttaaactagtcgttggtaatactggaacaggttattataaagaaactcagcgatatgatcattacattgatctaaggtacattcccgaactctcgatcatcaaaagagatcaggcaggcatcgacattggatcaactgtgacaatctataaactcatttcattcctgaaagaggaaagtaaaatcaatttcggttcatatgggaagttggtgtccgataaactggcttaccacatggagaagattgcttcaccatttgttagaaattctgctagtgtgggaggaaatttggttatggcacagaagaatggttttccttcagatatagctacattatttcttgggctttgtgctactgttagcttgatgactcgtcatggacttgtaaagctcacatgggaggagttattgttgaaaccaccactggactcgagaattgtgcttctaagtgtttcgatcccatttaagaaagatcaaaattctaaatttttatttgaaacttatcgagctgctccacgacctcatggaaatgcattggcatatgttaatgctgctttccaggctgatgtttctctctgccagaacggcttcttgataaactatatccggttggcatttggtgcttatggcacaaaacacgcaacaagggctaaaatgatagagagatatctaaccgggaaaatgttaaacatacaagttttatatggagctcttaaattagtcaaactagcagttgtaccagaagatggcacttcacatcctgagtacagatcaagcttagctgtcagttatgtttttgagttcctttatcccttcactgatgctcattctgccctttctggtggtttattcaatggaattaatgatacctcagtcgaaaaggttttgaaaagtagtaaagatggttgcattagtcaggggagaaaacaaacactactctcttctgctaagcaggttgtggaatcaagtaccgagtactatccagtaggtgaaccgatgaagaaggtcggagctgccatgcaagctgctggtgaagctgtttatgtagatgacatcccttcaccgccaaactgcctgtatggagcatttatatacagtacgaaagcattagcaggtgtaaagggaatccagctcgaatcgaatcaattaacagatggagtcgccgccgttattacttttaaagatatcccaatcggaggggcaaatataggagctactagattttctgatcccgagcccttatttgcagatgatctcgtccgatatgctggcgacagaattgcaattgtggttgctgacagtcagaggtctgctgacgtggctgcaagaacagcccttgttgaatacgacactgcaaatgtagattcgcccattttaaccgttgaggaagctgttgagaaatctagctttatccaaatcccgccgtttctatatccaaaacaggtcggtgatttctcgaaaggaatggctgaagctgatcacaagattctctcagctgaggtaagacttggttctgagtactatttttatatggagacacagactgctcttgcaattccagacgaagacaactgcatggttgtttatacttcaagtcagtgccctgagagcgcacatcgtgtgattgccacttgtcttggtgttcctacacacaatatccgtgtaattacaagaagggtcggaggtggttttgggggcaagggagtcagagcaatgcctgtctccacagcctgtgcacttgcagcatacaagttaaggcgacctgtcaggatatatgtcaacaggaacactgacatgataatgacaggaggaagacacccaatgaaagtaacatatagtgtaggattcaagtcgagcggaaagatcacagcattacatcttgatctattgataaatgctgggatctcagaagatgtaagccctatcctaccattaagtgtgataaaagcactaaagaaatatgattggggtgccctatcttttgatgtaaaactatgcaagacaaatcttaccagcaaatcgactatgcggggccctggggaggtgcaaggatcttacattgctgaagctataatcgaacatgtatcgagttcactattgttggaggtggacttggtcagaaataaaaatgcccatacatttgaaagcctcaattttttctatggtaacattgtatcggtaggagaatatacactgcctagtatcatggataagttggctgtgtcctcgagctttttcaaacgaagagagatgatcaaacagtttaaccagaaaaatacatggaaaaaaaggggtatttctcgagtgccaatcgtgcatgaagtttcgcaacgatcgaccccggggaaagtcagtattctgcaagatggatcgattgttgtagaggttggagggattgaaattggccaagggctatggacaaaggtgaaacagatgactgcctatgctcttggtttaattgaaagtagttgggccgaagaccttgtggagaaagtaagagtcatacaagcagacaccttaagcatagtgcaaggtgggttgacggcagggagcactacatcggaatcaagctgtgaagctgttagactttgctgtaatgtcttggttgaaagactgactcctttgaagaatcagttgcaggaacaaaatgtctctgttgactggccaacactgattcgacaggcacaaatgcaatcagtacacttagcagcacattcttattatgtaccagaatctagttccaagaattatttgaacttcggcgctgctgtcagtgaggtggagattgatattttgactggagagactactattttgcaatcggatattatttatgactgcgggcagagcttgaatccagccattgatttgggacagattgaaggggcatttgttcaaggaattggatttttcatgcatgaagaatatcttacaaacgaagacgggttaatggtctcaaatagcacttggacgtacaagatcccgactattgacaccatacctcagaatttcaatgtccatgtggtaaacagtggacatcacaaaaagcgtgttctctcgtccaaagcatctggtgaaccaccgttgctgctggcagttagtgtccattgtgcaacacgagcagcggttaaagcagcacgtgaacagctcaaacaatgggacaagcttgacgggtctgtttcagaattctatctggacgtccctgccatattacctgttgtgaagacacagtgtggcctggattatgtggagaaatacttggaaactttggtggctcagaaatctaactatacttgcatcaacatggatctcaaatgatactgaacttaaagagttggtttttgtggagtccatatcaaaacagcaaattcgctattttgcttcaagtcactatttctttttccaatttaatacgatttactatttgattcaattttcaattctactatattcaacctctaaatcaaaaaaaaaaaaaaaaaaaaa

SEQ ID NO: 116081 - protein, 1367 aa, Solanum lycopersicum
MEERQKKGGSLVFAVNGERFELPCVDPSTTLLQFLRSQTFFKSPKLGCGEGGCGACVVLVSKYDPKLKKVEDFSVSSCLTLLCSLNGFSITTSEGLGNTRDGFHSIHERIAGFHASQCGFCTPGMCMSFFSALVNADKGNKPDPPPGFSKLTSSEAEKAIEGNLCRCTGYRPIADACKTFAADIDIEDLGFNAFWKNGDSKQMKVSKLPPYDPTKNFNTYPEFLKSESTTNLDSLRYSWYTPVSIEDLQSLLNSNVTENGASFKLVVGNTGTGYYKETQRYDHYIDLRYIPELSIIKRDQAGIDIGSTVTIYKLISFLKEESKINFGSYGKLVSDKLAYHMEKIASPFVRNSASVGGNLVMAQKNGFPSDIATLFLGLCATVSLMTRHGLVKLTWEELLLKPPLDSRIVLLSVSIPFKKDQNSKFLFETYRAAPRPHGNALAYVNAAFQADVSLCQNGFLINYIRLAFGAYGTKHATRAKMIERYLTGKMLNIQVLYGALKLVKLAVVPEDGTSHPEYRSSLAVSYVFEFLYPFTDAHSALSGGLFNGINDTSVEKVLKSSKDGCISQGRKQTLLSSAKQVVESSTEYYPVGEPMKKVGAAMQAAGEAVYVDDIPSPPNCLYGAFIYSTKALAGVKGIQLESNQLTDGVAAVITFKDIPIGGANIGATRFSDPEPLFADDLVRYAGDRIAIVVADSQRSADVAARTALVEYDTANVDSPILTVEEAVEKSSFIQIPPFLYPKQVGDFSKGMAEADHKILSAEVRLGSEYYFYMETQTALAIPDEDNCMVVYTSSQCPESAHRVIATCLGVPTHNIRVITRRVGGGFGGKGVRAMPVSTACALAAYKLRRPVRIYVNRNTDMIMTGGRHPMKVTYSVGFKSSGKITALHLDLLINAGISEDVSPILPLSVIKALKKYDWGALSFDVKLCKTNLTSKSTMRGPGEVQGSYIAEAIIEHVSSSLLLEVDLVRNKNAHTFESLNFFYGNIVSVGEYTLPSIMDKLAVSSSFFKRREMIKQFNQKNTWKKRGISRVPIVHEVSQRSTPGKVSILQDGSIVVEVGGIEIGQGLWTKVKQMTAYALGLIESSWAEDLVEKVRVIQADTLSIVQGGLTAGSTTSESSCEAVRLCCNVLVERLTPLKNQLQEQNVSVDWPTLIRQAQMQSVHLAAHSYYVPESSSKNYLNFGAAVSEVEIDILTGETTILQSDIIYDCGQSLNPAIDLGQIEGAFVQGIGFFMHEEYLTNEDGLMVSNSTWTYKIPTIDTIPQNFNVHVVNSGHHKKRVLSSKASGEPPLLLAVSVHCATRAAVKAAREQLKQWDKLDGSVSEFYLDVPAILPVVKTQCGLDYVEKYLETLVAQKSNYTCINMDLK

SEQ ID NO: 116082 - DNA, 4080 bp, Arabidopsis thaliana
  CDS (1)..(4080)
atgggttcactgaaaaaggacggcgagatcggagatgagtttacggaggcgttactgtacgttaacggcgttcgtagagtcttgcctgatggattggctcatatgacacttctcgaatatctcagaggattgaccggtacaaagctgggatgcggcgaaggtggttgtggggcttgcacggtgatggtgtctagttatgacaggaagtcaaagacctctgtgcattatgctgtcaacgcttgcctagcacctctctattctgtagaagggatgcatgtaatatccattgagggacttgggcatcgcaaacttggcttgcaccctgtccaggagtctttggcatcttcccatggttcccaatgtgggttttgtactcccgggtttatcatgtccatgtattcgttgttgaggtcaagtaaaaactcaccttctgaggaggagattgaagaatgtcttgcaggaaatctatgtcgttgtactggttatcgacccattgttgatgcgtttcgggtttttgcaaaatctgatgatgctctctactgtggtgtatcttcacttagccttcaagatggttctactatttgcccatctactggcaaaccttgctcttgtggatcaaaaacaacaaatgaagttgccagttgtaatgaagatagatttcagtcaatctcttatagtgatatagatggagctaagtatacagataaggagcttattttcccccctgaacttttgctgaggaagttaactcccttaaagttaaggggaaatggggggattacctggtatagacccgtatgtcttcagaacttgcttgagctcaaagcaaattatcctgatgcaaaactactggtaggtaatacagaggtgggaatcgaaatgagattgaagaggttacagtatcaggtgctgatctctgttgctcaagtcccagaactcaacgcattgaatgtcaatgacaatgggatagaggttggttcagctttgagactttctgaactcctgaggttattcaggaagatagtaaaggagcgtcctgcacatgaaacatcagcatgcaaggcttttatcgaacagctgaagtggtttgctgggacacaaataagaaatgttgcttgcattggtggaaacatctgtacagctagtccaatatctgatttaaatcctctttggatggcttcaagagcagagtttcggataaccaactgcaatggagatgttaggtctatacctgcaaaagatttcttcctcggttatcgtaaagtggatatggggagcaacgagatcttgttgtcggtattccttccatggacaagacccttagagtatgtgaaagaatttaagcaggcccatcgcagggatgatgatatagctattgtcaatggtggaatgcgtgtgtttcttgaagacaagggtcaacaattgttcgtttctgatgcatccattgcttatggaggtgtggctcctctttctttgtgtgcgagaaagactgaagagtttctaattggaaagaattggaataaagatcttctgcaggatgcgcttaaggtcatacagagcgatgtcgtgattaaggaagatgctcctgggggaatggtggagtttcggaaatctctaaccctaagcttcttctttaaatttttcttatgggtttctcataatgtcaataatgcaaattctgcgatagagaccttcccaccctcccatatgtcagctgtgcaacctgttcctcggttatctagaattggaaaacaagactatgagacagtaaagcagggaacatctgttggctcgtcggaggtgcatctttcagcgagaatgcaggtcacaggggaagcggaatatactgatgatactccagtacctcctaataccttacatgctgcctttgtgctaagcaaagtgccacatgcccgcatcctttcaatcgatgattcggcagccaaatcttcatctggttttgttggtctgtttcttgccaaagatattcctggggataatatgattggaccaattgttcccgacgaagaattatttgctacagatgtggtcacgtgtgtgggacaagtcattggtgtggtcgtcgcggatacacatgaaaatgcaaaaactgcagcaggaaaagttgacgttaggtatgaggaactaccagcaatattatcaatcaaggaggctattaatgctaaaagtttccatccgaacacagagaaaaggctaagaaaaggggatgtcgagctgtgttttcaatctggtcagtgtgacagggtaatagagggagaggttcaaatgggtggtcaggaacacttctacttggagcctaatggtagtttggtttggacagtagatgggggcagcgaagttcatatgatttcatccacacaggctcctcaaaagcaccagaaatatgtgtcgcatgttcttggtcttccgatgtctaaagtggtatgcaaaaccaaacgaattggtggtggctttggtggtaaagaaacaagatcagctttcattgctgcggcagcttctgttccttcctacctattgaatcgacctgtgaaactcatactggaccgagatgtggacatgatgataactggtcatcgtcatagttttcttggaaagtacaaggttggatttacgaacgaaggaaaaatattggcgttggaccttgaaatttacaacaatggtggcaactctttggatctctccctttctgttcttgaacgtgccatgtttcactcggataacgtttatgagatcccgcatgtaaggattgttgggaatgtttgctttactaattttcctagcaacactgctttccgagggtttggaggcccccaaggtatgcttataactgaaaactggattcaaagaatcgcagctgagcttaataaaagccctgaagaaatcaaagagatgaactttcaagtggaaggatcagtcacccattactgtcagactcttcagcactgcacattgcatcagctctggaaagagctgaaagtatcgtgcaacttcttaaaggcccgcagagaagctgacgaatttaatagtcataatcggtggaaaaagcgtggtgtagctatggttcccacaaaatttggcatatcatttaccacaaagttcatgaatcaggccggagctcttgttcatgtttacactgacgggactgttttagtgactcatggtggtgtggagatgggtcaaggattgcatacaaaggtcgctcaagttgctgcatccgcctttaacattccacttagctcagttttcgtgtcagagacaagcactgacaaggttcctaatgcgtcaccaactgctgcttctgcgagctctgatatgtatggtgctgcagttttagacgcttgtgagcagattatagcaagaatggaacctgttgcatctaagcacaatttcaacacatttactgagctagtaagtgcctgctactttcaacggatagacctatcagctcatggttttcacatagttcctgatcttgggtttgactggatatctggaaaagggaacgcctttagatattacacatatggagctgcctttgcggaagttgagatagatacattgactggtgatttccacacaagagcagctgatataatgttggacctcggatattctcttaacccagccattgatgttggacaaatagaaggagcgtttgtacaaggactgggttgggtagctttagaagaactcaaatggggagatgcagctcataaatggattaaaccaggaagtttactcacttgcggacccggaaactacaaaataccttccatcaacgacatgccgttcaacctcaatgtttcgcttctcaaggggaatccgaatacaaaggcaatacattcatctaaagcagtgggtgagccaccattctttcttgcatcatcggttttctttgcgataaaggaagctattaaagcggctagaaccgaggtgggtctcacagactggttccctctagagagtccagccactccagagcgtatcaggatggcttgtttcgacgaattttcagctccttttgtaaattcagatttctaccctaatcttagtgtttga

SEQ ID NO: 116083 - protein, 1359 aa, Arabidopsis thaliana
MGSLKKDGEIGDEFTEALLYVNGVRRVLPDGLAHMTLLEYLRGLTGTKLGCGEGGCGACTVMVSSYDRKSKTSVHYAVNACLAPLYSVEGMHVISIEGLGHRKLGLHPVQESLASSHGSQCGFCTPGFIMSMYSLLRSSKNSPSEEEIEECLAGNLCRCTGYRPIVDAFRVFAKSDDALYCGVSSLSLQDGSTICPSTGKPCSCGSKTTNEVASCNEDRFQSISYSDIDGAKYTDKELIFPPELLLRKLTPLKLRGNGGITWYRPVCLQNLLELKANYPDAKLLVGNTEVGIEMRLKRLQYQVLISVAQVPELNALNVNDNGIEVGSALRLSELLRLFRKIVKERPAHETSACKAFIEQLKWFAGTQIRNVACIGGNICTASPISDLNPLWMASRAEFRITNCNGDVRSIPAKDFFLGYRKVDMGSNEILLSVFLPWTRPLEYVKEFKQAHRRDDDIAIVNGGMRVFLEDKGQQLFVSDASIAYGGVAPLSLCARKTEEFLIGKNWNKDLLQDALKVIQSDVVIKEDAPGGMVEFRKSLTLSFFFKFFLWVSHNVNNANSAIETFPPSHMSAVQPVPRLSRIGKQDYETVKQGTSVGSSEVHLSARMQVTGEAEYTDDTPVPPNTLHAAFVLSKVPHARILSIDDSAAKSSSGFVGLFLAKDIPGDNMIGPIVPDEELFATDVVTCVGQVIGVVVADTHENAKTAAGKVDVRYEELPAILSIKEAINAKSFHPNTEKRLRKGDVELCFQSGQCDRVIEGEVQMGGQEHFYLEPNGSLVWTVDGGSEVHMISSTQAPQKHQKYVSHVLGLPMSKVVCKTKRIGGGFGGKETRSAFIAAAASVPSYLLNRPVKLILDRDVDMMITGHRHSFLGKYKVGFTNEGKILALDLEIYNNGGNSLDLSLSVLERAMFHSDNVYEIPHVRIVGNVCFTNFPSNTAFRGFGGPQGMLITENWIQRIAAELNKSPEEIKEMNFQVEGSVTHYCQTLQHCTLHQLWKELKVSCNFLKARREADEFNSHNRWKKRGVAMVPTKFGISFTTKFMNQAGALVHVYTDGTVLVTHGGVEMGQGLHTKVAQVAASAFNIPLSSVFVSETSTDKVPNASPTAASASSDMYGAAVLDACEQIIARMEPVASKHNFNTFTELVSACYFQRIDLSAHGFHIVPDLGFDWISGKGNAFRYYTYGAAFAEVEIDTLTGDFHTRAADIMLDLGYSLNPAIDVGQIEGAFVQGLGWVALEELKWGDAAHKWIKPGSLLTCGPGNYKIPSINDMPFNLNVSLLKGNPNTKAIHSSKAVGEPPFFLASSVFFAIKEAIKAARTEVGLTDWFPLESPATPERIRMACFDEFSAPFVNSDFYPNLSV

SEQ ID NO: 116084 - DNA, 4344 bp, Arabidopsis thaliana
  CDS (199)..(4197)
atagatgtgcgtgaaagaggcgcaactataagagaagctgatatgaaactcttcatcacatctccctcaaacttatttctctctttaattggttaaatctccacacccacttcgtgttttcttgattcgtttcctgggtttctcaaaaatctaaccttataattggaaaaattctggtgtcactgctctgggaaaaaaatggatttggagtttgcagttaatggggaacgattcaagattgattctgttgatccatcaacgaccttacttgagttcttgcgattgaacactcctttcaagagtgtcaagctcggctgtggcgaaggagggtgtggtgcttgtcttgtagtgttatctaaatatgatccagagttagatcaagtgaaggaatgttgtataaactcttgtctcactcttctctgtagtgtaaatggatgttccattactacatctgaaggtcttggaaacacgaagaaaggatttcatccgattcataagcggttcgcgggttttcacgcctctcaatgcgggttttgtacaccagggatgtgtatttctctctactcatctcttgcaaatgctgagaataacagctctaaagattttacggtttctgaagctgagaaatctgtttcgggtaatctttgtcgatgtactggttatcgtcccattgtcgatgcttgtaagagttttgcttctgatgttgatattgaggacttagggttaaattccttttggaaaaaaggagaaagcaaagaggttatgtttaagaatttgcctccttataaccccaaagaccatcttgtaacattccctgagttcttgaagaagaaagagaaggttgataatggttcggatcatttgaagtatcgttggaccactccttttagtgtggctgagcttcataacataatggaagcagctaactctggagactcgttgaagttagttgtaggcaacacgggtacaggttactataaagacgaggaacggtttgatagatatattgatatcagtaacattccggagatgtcaatgatcaagaaagatgagaaaggaattgaaataggagcagctgttactatatcgaatgctattgatgctttggagaaggaaagcaaatcttcttatgttttcaagaaaatggccactcatatggagaaaattggcaaccgttctatccgaaactcgggtagtattggtggtaatctagtgatggcacagagcagaaagtttccttctgatgttaccactttgttgctcgctgtagatgcctcggtgtatatgttaaatggtaggaaaaccgagaaggttacgctacaggagtttcttgaattgtctccggtgttagactccaaacgcgttcttttaaaggttgagattccatcatggactgctccttctggtgatgacactgaatttctctttgaaagctatcgagccgcacctcgttctattggaaatgcattgccttacttgaacgctgctttcttggcgctagtgtctcgccaagaagcatcaagaaaaggtgtaacggtagaaaaatgcttcctggcatttggttcttatggcggggatcattcgatcagggcgatagaagtggagactttcttgacaggtaaattacttagctacagtgttctatatgaagctgttggtttacttaaaggaatcatagtccctggcaaagacaccttgcactcggaatatagaaaaagcttggctgttggatatctttttgagtttttttacccactgatcgagagtggccatagaatatgtagtcttgattcagggaataagcataacaacagccatgttgataccgtaaaatctcttcccttcctctcatcttcacagcaagtattagagagcaatgaatttaaacctattggtgaagcagttatcaaagttggagctgccttacaagcttctggtgaggcggtttttgttgatgatataccgactttaccagactgtcttcatggagcattcatttatagcacagagcctttggctaagataaaaagcttaagcttcagagagaatgtaactcctactggagtttttgctgttcttactttcaaggatattccacaacaaggacaaaacattggttccaagaccctttttggaccaggacctttatttgcagatgaactaactcgatgtgcaggtcaaagaattgctcttgtggttgcagacacacagaaacatgcagacatggctgcaaaacttgcagtagttgagtatgatacaaagaatttagaacaaccgatattaactgtcgaagatgcagttaaaagatctagctttttcgaggttcatccgatgttttaccccgaaccagtaggtgatgttataaaaggaatggaagaagctgagcgaaagataatctcctctgagttgaggctagggtcacagtacttcttctatatggagccacaaacagcacttgccttgccagacgaagacaattgtgtcaaggtatttagttcatctcaagcacctgagtacgtacattcggttattgctacatgtcttggcattcaagagcataacgtgagagtcatcactagaagagttggtggtggctttggtggtaaagctgtaaagtcaatgcctgttgcaaccgcatgcgcactaggcgcatacaagttgcaacgtcctgttaagatgtttttgaaccgcaagacggatatgataatggctggaggaagacatccgatgaagataaattacaatgtgggatttagatcagatgggaagctcacagcactggagcttacaatgcttatagatgcagggcttgagccagacgtaagtccaatcatgccgcggaatataatgggtccgctgaggaagtatgactggggagctttgtcatttgatgtaaaagtgtgtaagacgaattgtctgagtagaacagcgatgagagctcccggggaagttcaaggttcttacatagcggaatccattatcgagaatgtagcttcttctcttcaaatggatgttgatgcagtgagaaaaataaaccttcatacttatgatagccttagaaaattctacaatcacattgctggtgatcctgatgaatatacactgcctttattatgggagaaacttgagatatcttcaaagttcaaggaaagatctgagatggtgaaggagtttaatctttgtaatgtatggcgaaagagagggatttctcgagtacctatagtccatcaagttatgcagagaccgaccccggggaaagtaagcatactgagtgatggttctgttgtagttgaggttggaggaattgagatagggcaaggattgtggactaaagtacaacagatggttgcttatggtctcggtatggttaaatgcgaaggaaacgaaaagctcttggatagaatacgtgtagttcagtccgatacactaggtatgatccaaggaggtttcactgctggtagcacgacatccgagagcagttgtgaagccgttaggctttgctgtgttatcttggtggagagattgaaacctataatggatcagatgatgatggagaagtcaggttccgtgacatggaacatactcattcaacaagcgtatggtcagtatattaatttatcggcgagtacattgtataagccagagtattcttccatggaatatctcaactatggagttggagtcagcgaggtggaagtggaccttgtgacaggaaaaaccgagattttaagatccgatattatttatgactgtggaaagagtcttaatcctgcagttgatttaggacagaccgaaggagcatttgttcaaggcatcgggtttttcatgatggaagagtacactactgatgagaaggggcttgtggtgcaacaaggcacttgggactacaaaataccgactgtggacacaatcccaaaacacttcaacgttgagattgtcaacactggtcatcataaaaaccgcgttctctcctccaaagcgtcgggtgagccgccattgcttttagcagcttctgttcattgtgcaacaagatcagccattagggaagctcggaaacattccctttcatcgaacttcattgatgggtctgattcggaatttgagttacctgttccagcgactatgcctgtggtgaagtctctttgcggattgtatagtgtagagaaatacttacaaggaaagatcaaaggacaataaaggcaaagcaagtaagcaactctcgttgctgctaagttacagtgttacatatactaaagttattcagattttatatacagcaaaaataattgctttgtgcataactaatggtttcaaaaccaaatcaataaatcaaatattgaatgt

SEQ ID NO: 116085 - protein, 1332 aa, Arabidopsis thaliana
MDLEFAVNGERFKIDSVDPSTTLLEFLRLNTPFKSVKLGCGEGGCGACLVVLSKYDPELDQVKECCINSCLTLLCSVNGCSITTSEGLGNTKKGFHPIHKRFAGFHASQCGFCTPGMCISLYSSLANAENNSSKDFTVSEAEKSVSGNLCRCTGYRPIVDACKSFASDVDIEDLGLNSFWKKGESKEVMFKNLPPYNPKDHLVTFPEFLKKKEKVDNGSDHLKYRWTTPFSVAELHNIMEAANSGDSLKLVVGNTGTGYYKDEERFDRYIDISNIPEMSMIKKDEKGIEIGAAVTISNAIDALEKESKSSYVFKKMATHMEKIGNRSIRNSGSIGGNLVMAQSRKFPSDVTTLLLAVDASVYMLNGRKTEKVTLQEFLELSPVLDSKRVLLKVEIPSWTAPSGDDTEFLFESYRAAPRSIGNALPYLNAAFLALVSRQEASRKGVTVEKCFLAFGSYGGDHSIRAIEVETFLTGKLLSYSVLYEAVGLLKGIIVPGKDTLHSEYRKSLAVGYLFEFFYPLIESGHRICSLDSGNKHNNSHVDTVKSLPFLSSSQQVLESNEFKPIGEAVIKVGAALQASGEAVFVDDIPTLPDCLHGAFIYSTEPLAKIKSLSFRENVTPTGVFAVLTFKDIPQQGQNIGSKTLFGPGPLFADELTRCAGQRIALVVADTQKHADMAAKLAVVEYDTKNLEQPILTVEDAVKRSSFFEVHPMFYPEPVGDVIKGMEEAERKIISSELRLGSQYFFYMEPQTALALPDEDNCVKVFSSSQAPEYVHSVIATCLGIQEHNVRVITRRVGGGFGGKAVKSMPVATACALGAYKLQRPVKMFLNRKTDMIMAGGRHPMKINYNVGFRSDGKLTALELTMLIDAGLEPDVSPIMPRNIMGPLRKYDWGALSFDVKVCKTNCLSRTAMRAPGEVQGSYIAESIIENVASSLQMDVDAVRKINLHTYDSLRKFYNHIAGDPDEYTLPLLWEKLEISSKFKERSEMVKEFNLCNVWRKRGISRVPIVHQVMQRPTPGKVSILSDGSVVVEVGGIEIGQGLWTKVQQMVAYGLGMVKCEGNEKLLDRIRVVQSDTLGMIQGGFTAGSTTSESSCEAVRLCCVILVERLKPIMDQMMMEKSGSVTWNILIQQAYGQYINLSASTLYKPEYSSMEYLNYGVGVSEVEVDLVTGKTEILRSDIIYDCGKSLNPAVDLGQTEGAFVQGIGFFMMEEYTTDEKGLVVQQGTWDYKIPTVDTIPKHFNVEIVNTGHHKNRVLSSKASGEPPLLLAASVHCATRSAIREARKHSLSSNFIDGSDSEFELPVPATMPVVKSLCGLYSVEKYLQGKIKGQ

SEQ ID NO: 116086 - DNA, 2310 bp, Thauera aromatica
  CDS (1)..(2310): transl_table=11
atgagcccgaaactcccccagcacggcaccgtcggtgtccgcacccccctggtggacggcgtcgaaaaagtcaccggcaaggccaagtacacggccgacatcgccgcccccgacgccctcgtgggacgcatcctgcgctcgcctcatgcccacgcccgcatcctcgccatcgacacttcggccgccgaagccctggaaggcgtcatcgccgtgtgcaccggcgccgaaaccccggtgccgttcggcgtgctgccgatcgccgagaacgagtacccgctcgcccgcgacaaggtgcgctaccgcggcgacccggtggcggccgtcgccgccatcgacgaagtgaccgccgagaaggcgctcgccctgatcaaggtcgactacgaggtcctgcccgcctacatgacgcccaaggcggcgatgaaggcaggcgcgatcgcccttcacgacgacaagcccaacaacatcctgcgtgaagtgcacgccgagttcggcgatgtcgccgccgccttcgccgaagccgacctgatccgcgaaaagacctacaccttcgccgaagtcaaccacgtccacatggagctgaacgccaccctggccgaatacgacccggtgcgcgacatgctcacgctcaacaccaccacccaggtgccctactacgtgcatctcaaggtggcggcctgcctgcagatggactcggcccgcatccgcgtgatcaagcccttcctcggcggcggcttcggcgcccgcaccgaaggcctgcacttcgagatcatcgccgggctgctggcacgcaaggccaagggcacggtgcgcctgctgcagacgcgcgaggaaaccttcatcgcccaccgcggccggccgtggaccgaagtgaagatgaagatcggtctgaagaaggacggcaagatcgccgccctcgcgctggaagccacccaggccggcggcgcctatgccggctacggcatcatcaccatcctctacaccggcgcgctgatgcacgggctctaccacatcccggcgatcaagcacgacgcctggcgcgtctacaccaacaccccgccctgcggcgcgatgcgcggccatggcacggtcgatacccgcgccgcattcgaggcgctgctcaccgaaatgggcgaggaactgggcatcgactcgctcaagatccgccagatcaacatgctgccgcagatcccctacgtcaccatgtacgcccagcgggtgatgagctacggcgtgccggagtgcctggagaaggtcaaggccgcctcgggctgggaagaacgcaagggcaagctgcccaaagggcgcggcctcggcatcgcgctgtcgcacttcgtgtcgggcacctcgacgccgaagcactggaccggcgaaccccacgccaccgtcaacctgaagctcgacttcgacggcggcatcaccttgctcaccggcgccgccgacatcggccagggctccaacaccatggcctcgcaagtcgccgccgaagtgctgggcgtgcgcctgagccgcatccgggtgatctccgccgacagcgcgctgacgcccaaggacaacggctcctattcgtcgcgcgtcaccttcatggtcggcaacgcctcgatttccgccgccgaagagctcaaaggcgtcctggtcaaggccgcggcgaagaagctcgacgcccgcgaggaagacatcgaagtcatcgacgagatgttcatggtctcgggcagccaggaccccggcctcagcttccaggaagtggtcaaggcggcgatggtcgactccggcaccatcacggtgaagggcacctacacctgcccgaccgaattccagggcgacaagaagatccgcggcagcgcgatcggcgccaccatgggcttttgctacgccgcccaggtggtggaagcgtcggtcgacgagatcaccggcaaggtcaccgcacacaaggtgtgggtggcggtcgacgtcggcaaggccctcaatccgctggcggtggaaggccagacacaaggcggcgtgtggatgggcatggggcaggcgctgtcggaagaaacggtctatgacaacggccggatggtgcatggcaacatcctggattaccgggtgccgaccatcgtggagagccccgacatcgaggtgatcatcgtcgagagcatggaccccaacggcccgttcggcgccaaggaggcctcggaagggatgctggccggattcctgcccgcgattcacgaagcggtgtacgaagcggtgggcgtgcgcgccaccgatttcccgctcagccccgaccgcatcactgaactgctcgacgccaaggaagccgcagcatga

SEQ ID NO: 116087 - protein, 769 aa, Thauera aromatica
MSPKLPQHGTVGVRTPLVDGVEKVTGKAKYTADIAAPDALVGRILRSPHAHARILAIDTSAAEALEGVIAVCTGAETPVPFGVLPIAENEYPLARDKVRYRGDPVAAVAAIDEVTAEKALALIKVDYEVLPAYMTPKAAMKAGAIALHDDKPNNILREVHAEFGDVAAAFAEADLIREKTYTFAEVNHVHMELNATLAEYDPVRDMLTLNTTTQVPYYVHLKVAACLQMDSARIRVIKPFLGGGFGARTEGLHFEIIAGLLARKAKGTVRLLQTREETFIAHRGRPWTEVKMKIGLKKDGKIAALALEATQAGGAYAGYGIITILYTGALMHGLYHIPAIKHDAWRVYTNTPPCGAMRGHGTVDTRAAFEALLTEMGEELGIDSLKIRQINMLPQIPYVTMYAQRVMSYGVPECLEKVKAASGWEERKGKLPKGRGLGIALSHFVSGTSTPKHWTGEPHATVNLKLDFDGGITLLTGAADIGQGSNTMASQVAAEVLGVRLSRIRVISADSALTPKDNGSYSSRVTFMVGNASISAAEELKGVLVKAAAKKLDAREEDIEVIDEMFMVSGSQDPGLSFQEVVKAAMVDSGTITVKGTYTCPTEFQGDKKIRGSAIGATMGFCYAAQVVEASVDEITGKVTAHKVWVAVDVGKALNPLAVEGQTQGGVWMGMGQALSEETVYDNGRMVHGNILDYRVPTIVESPDIEVIIVESMDPNGPFGAKEASEGMLAGFLPAIHEAVYEAVGVRATDFPLSPDRITELLDAKEAAA

SEQ ID NO: 116088 - DNA, 2238 bp, Bacillus subtilis
  CDS (1)..(2238): transl_table=11
atgatcatcaacaaaccgtcaagagtcaggccggatggaaggggtaaggtcacaggggaattgaaatatatgaccgatctcagctttccaggaatgctgtatggcaaggtgctgagaagtgcttatcctcatgcagagattgtgtcggtttgcaccataaaagctgagaaaatggaaggcgtgcaggccgtcgtcacacataaagacgttcccggcttaaaccgatttggcattgtcatccctgatcagccggttttatgtgaggacagggtgcggtatgtcggggatgcgatcgccgcagttgctgcggaaacggaagaaatcgcggaagcggcgctggagctgattcaagttgagtataaagagctggaagtcatggattcaccagaaaaagcgcttcggccgaatgcgcaaagactgcatgaggacgggaatatcctgcaccgcgcatttttttcaaacggtgatgtggaagaagggtttcaagcatctgacacagtctttgaagaaacctatgagctgccgcggcagatgcatacgtatatggaaacggagggaggtgtagccgttccggaagacgacgggggttttacgatgtatgcaggaacccagcacggctataaagaccgtttccagcttgcccgtatttttgatattcctgaagagaagatcagaattgtgtcaagtccgatgggcggctcgttcggagggaaggatgagctgaatattcagccgtatgctgcgcttttggccctgaaaagcggacgccctgtcaaaattcatcagacacgaaaggaatctgtacgttctggcattaagcgccatccgatgaagattacgataaaaacgggtgcagatcattcgggaaatctattggcgcacgacgtgaaaattgtggcggacacaggcgcttacgctacgctcggaccggctgttcttgatttttctgtcgagcatgccgcggggccgtaccgtattccgaatatccggactgaaggaatatcagtatttacgaacaacggggtggcgggggaatttcggggctttggcggcaaccaaatcacatttgcactcgaaacccatctcgatcgtctcagcggcatgcttggcatcgacccgctcgagctgagaagaaaaaatatcagaaaaccgcatgacttggggccgcttgagcatcgaattgcaccaactgacggagcggcacaggtgttgaatgccatatctaaatctcccattcttaaaaaaacaagccggaactgcgggtatctgcaaagaggcacgggagcggcaattacaatgcacggcggcgggctggggtttggccgaatggatgcggcaggaggccgtttgtctctttcgagtgaaggcaaaatcactgcttcgtttggatttgaagaatgcggacaggggattctagcagcgattgaacagattgtcatggaggagctgggttgtgccgcagaggatatttccattgttattggggataccgcaaaagtgccgaagtcaggctcctccacagcatcccgcggcacaagcatggtgtggcacgcgatccagcgtttgaagaagccgtttctagctcagttgaaaaaacgggcggcagaatggagcggctgttcagcggaaaatcttattcccggcgctgcaggcttgcgtgacaaaaacacaaaggcgctcgtggtgacgtataaggagctggctgaaaaaggccctttggcagaggaaacggcctttgactttccaacaacgcctgatcctgtggtgggcggccatttcctctactcatttggagcggctgccgttgaggtggaggtagatctgttaacaggcgatgtcaaattgatagattgtgagcacgctattgcggcaggtccggttgtcagtccgcagggatatcgaggtcaaattgaaggcggcgctgccatggcactcggctacacactgatggaggaagcgaaaatgacggatggccgttatgctgcggaaaatctcgatcactatttgattcccggaatcaaagatgttcctgacatgaagctgattgcaatagaagacttaatgaagggagacgtatatggaccgcgcggtgttggtgaaatcggaacaatcgccatcactccggcgattgtaaaggcagtacatgatgcggtcggatgctggataaacaagctgccaatttcaagagaagagttgcttgaagcgatcgacagaaaggggctgaagcaatggacataa

SEQ ID NO: 116089 - protein, 745 aa, Bacillus subtilis
MIINKPSRVRPDGRGKVTGELKYMTDLSFPGMLYGKVLRSAYPHAEIVSVCTIKAEKMEGVQAVVTHKDVPGLNRFGIVIPDQPVLCEDRVRYVGDAIAAVAAETEEIAEAALELIQVEYKELEVMDSPEKALRPNAQRLHEDGNILHRAFFSNGDVEEGFQASDTVFEETYELPRQMHTYMETEGGVAVPEDDGGFTMYAGTQHGYKDRFQLARIFDIPEEKIRIVSSPMGGSFGGKDELNIQPYAALLALKSGRPVKIHQTRKESVRSGIKRHPMKITIKTGADHSGNLLAHDVKIVADTGAYATLGPAVLDFSVEHAAGPYRIPNIRTEGISVFTNNGVAGEFRGFGGNQITFALETHLDRLSGMLGIDPLELRRKNIRKPHDLGPLEHRIAPTDGAAQVLNAISKSPILKKTSRNCGYLQRGTGAAITMHGGGLGFGRMDAAGGRLSLSSEGKITASFGFEECGQGILAAIEQIVMEELGCAAEDISIVIGDTAKVPKSGSSTASRGTSMVWHAIQRLKKPFLAQLKKRAAEWSGCSAENLIPGAAGLRDKNTKALVVTYKELAEKGPLAEETAFDFPTTPDPVVGGHFLYSFGAAAVEVEVDLLTGDVKLIDCEHAIAAGPVVSPQGYRGQIEGGAAMALGYTLMEEAKMTDGRYAAENLDHYLIPGIKDVPDMKLIAIEDLMKGDVYGPRGVGEIGTIAITPAIVKAVHDAVGCWINKLPISREELLEAIDRKGLKQWT

SEQ ID NO: 116090 - DNA, 2871 bp, Escherichia coli
  CDS (1)..(2871): transl_table=11
atgatcatccactttactttaaatggcgcgcctcaggagctaaccgttaatccaggcgaaaacgtgcaaaagctgttgtttaacatgggaatgcactctgtacgcaacagtgatgatggtttcgggtttgccggttctgacgcaataatctttaacggtaatatcgttaacgcgtccttgcttattgccgcacagttagagaaggcagatattcgtaccgcagaatctctgggcaaatggaacgagttaagtctggttcaacaggcaatggttgatgttggcgtggtgcagtctggttataacgatccagctgcagctctgattatcaccgatcttctcgatcgcatcgccgcacctacccgcgaagagatcgacgacgcgctttctggtttgttcagccgcgatgctggctggcagcaatactatcaggtcattgaactggcggttgcacgtaaaaataatccgcaggccaccattgatatcgctccgactttccgtgacgacctagaagtcattggtaagcattatcctaaaactgatgccgcgaaaatggtgcaggcgaaaccctgctatgttgaagaccgcgtaacggctgacgcctgcgtcattaaaatgttacgtagcccacacgctcacgcactgattactcatctggatgtcagcaaagctgaagccttaccgggcgtcgttcacgttattactcacctgaattgcccggatatctactataccccgggtggtcagagcgcaccggaaccgtcaccgcttgaccgccgtatgttcggcaagaaaatgcgtcacgtcggcgatcgtgttgctgcggtcgtcgcagaaagtgaagaaattgcgctcgaagcactgaagctcatcgacgttgaatatgaagtgcttaagccggtaatgtcgatcgacgaagcaatggcggaagatgcgcctgtcgtgcacgatgaaccggtggtgtatgttgctggtgcgccagatactctggaagacgataacagccatgcagcccagcgcggcgagcatatgatcatcaacttcccgatcggttctcgccctcgcaaaaatatcgccgccagtattcatggtcatattggcgatatggacaaaggctttgccgatgccgatgtgatcattgagcgaacctataactcaacgcaagcgcagcagtgcccgactgaaacacatatctgctttactcgtatggacggcgatcgtctggttatccacgcctccacccaggtaccatggcacttacgccgccaggtcgcgcgcctcgtgggcatgaaacagcataaagttcatgtcattaaagagcgagttggcggcggttttggttccaaacaggacatcctgctggaagaagtgtgcgcctgggcaacctgcgtgaccgggcgtccggtactgttccgctacacccgtgaagaagagtttattgctaacacctctcgtcacgtcgcgaaagtcaccgtcaaactgggagcgaaaaaagatggtcgcctgacggcagtgaagatggatttccgcgccaacactggcccttacggcaaccactcactcaccgtaccgtgtaacggaccggcgctgtcgctgccgttatatccgtgcgataacgtcgatttccaggtcaccacctactacagcaacatttgcccaaatggtgcttatcagggttatggcgcaccgaaaggtaacttcgctatcaccatggcattagcggaactggctgaacagttacagatcgaccaactggaaattatcgaacgtaaccgggtacacgaagggcaagagctgaaaattctcggtgcaatcggtgaaggtaaagcgccgacctccgttccttccgccgccagctgtgcactggaagagatcctgcgtcagggtcgcgagatgatccaatggtcgtcaccgaaaccgcaaaatggtgactggcacatcggtcgcggcgtcgccattatcatgcagaaatcgggtatcccggatatcgatcaggctaactgcatgatcaaactggaatcggacggcacctttatcgttcattctggcggtgcggatattggtactggtctggatactgtagtgacgaaactggcagcagaagtgctgcactgcccaccgcaggacgtgcatgttatctccggtgataccgatcatgcgttgtttgataaaggcgcatatgcctcgtccggtacttgcttctcgggtaacgcggcgcgtttggcagcggaaaatctacgggagaaaattctgttccacggcgcgcaaatgttgggtgagccagtggcagatgttcaactggcaacgccgggcgtcgtgcgcggcaagaaaggcgaagttagtttcggggatattgcccataaaggcgaaaccggcaccggctttggttcactggtgggaactggcagttatatcacgcctgatttcgccttcccgtatggcgcaaacttcgctgaagttgccgtcaacacgcgtacgggtgaaatccgcctggataaattctacgccttgctggactgcggtacaccggtcaatccagagttagcgttgggacaaatctacggtgccaccctgcgtgctatcggccacagtatgagcgaagagatcatttatgacgccgaaggtcacccgttaacgcgtgatttacgcagttacggcgcaccgaaaattggtgacattccgcgtgatttccgcgctgtgctggtgccgagcgacgataaagtcggcccgttcggggcgaaatcgatctcggaaatcggtgtaaatggcgcagctccggcgattgctaccgcaattcacgatgcatgcggcatctggttacgcgaatggcatttcacaccggagaaaatactcactgcgctggaaaaaatataa

SEQ ID NO: 116091 - protein, 956 aa, Escherichia coli
MIIHFTLNGAPQELTVNPGENVQKLLFNMGMHSVRNSDDGFGFAGSDAIIFNGNIVNASLLIAAQLEKADIRTAESLGKWNELSLVQQAMVDVGVVQSGYNDPAAALIITDLLDRIAAPTREEIDDALSGLFSRDAGWQQYYQVIELAVARKNNPQATIDIAPTFRDDLEVIGKHYPKTDAAKMVQAKPCYVEDRVTADACVIKMLRSPHAHALITHLDVSKAEALPGVVHVITHLNCPDIYYTPGGQSAPEPSPLDRRMFGKKMRHVGDRVAAVVAESEEIALEALKLIDVEYEVLKPVMSIDEAMAEDAPVVHDEPVVYVAGAPDTLEDDNSHAAQRGEHMIINFPIGSRPRKNIAASIHGHIGDMDKGFADADVIIERTYNSTQAQQCPTETHICFTRMDGDRLVIHASTQVPWHLRRQVARLVGMKQHKVHVIKERVGGGFGSKQDILLEEVCAWATCVTGRPVLFRYTREEEFIANTSRHVAKVTVKLGAKKDGRLTAVKMDFRANTGPYGNHSLTVPCNGPALSLPLYPCDNVDFQVTTYYSNICPNGAYQGYGAPKGNFAITMALAELAEQLQIDQLEIIERNRVHEGQELKILGAIGEGKAPTSVPSAASCALEEILRQGREMIQWSSPKPQNGDWHIGRGVAIIMQKSGIPDIDQANCMIKLESDGTFIVHSGGADIGTGLDTVVTKLAAEVLHCPPQDVHVISGDTDHALFDKGAYASSGTCFSGNAARLAAENLREKILFHGAQMLGEPVADVQLATPGVVRGKKGEVSFGDIAHKGETGTGFGSLVGTGSYITPDFAFPYGANFAEVAVNTRTGEIRLDKFYALLDCGTPVNPELALGQIYGATLRAIGHSMSEEIIYDAEGHPLTRDLRSYGAPKIGDIPRDFRAVLVPSDDKVGPFGAKSISEIGVNGAAPAIATAIHDACGIWLREWHFTPEKILTALEKI

SEQ ID NO: 116092 - DNA, 4035 bp, Drosophila subobscura
  CDS (1)..(4035)
atgtccggccagcagcaagccacttcggtgttggtgttttttgtgaatgggaagaaggtaacggacacaaatcccgatccggaatgcaccctcctcacgtatctgcgggacaagctgcgcctgtgcggcacgaagctgggatgtgccgagggcggctgcggcgcctgcacggtgatgatctcccgcatggatcgtggccagcataagatcagacatctggcagtcaatgcctgcctcacgcccgtgtgtgccatgcatgggtgtgccgtgaccacggtggagggcatcggcagcaccagaactcggctgcacccggtgcaggagcggctggccaaggcgcacggatcgcagtgtggtttctgcacgccgggcatagtgatgtccatgtacgcgctgctgcgaaatgccgaacaaccttcgatgcgggatctggaggtggcgtttcagggcaatctttgccgctgcaccggctaccggcccatactcgagggctacaagaccttcaccaaggagttcctgtgcggcatgggcgagaagtgctgcagagtcaatggcaagggatgtggaggaggcgatgatcccgaatccgtgacggatgacactctgttcgagcgcagcaagttccagcctttggatgccagccaggagcccattttcccacccgaactgcagctgagcaacgcctatgacagcgagagtttggtcttcagctcggagcgtgtcacctggtaccgtccgacgacgctgcaggagctgctccagctgaaggccgctcatccagcggccaagctggtggtgggcaacacggaggtcggcgtggaggtcaagttcaagcattttctctacccgcacctgatcaatcccacgctggtggcggagctgcaggaggtgcgcgagtcggaggagagcatttactttggggctgccgtcagcctgatggagattgacgcgctgctccggcaacgcatcgaggagctgccggaggcgcagacacgcctcttccagtgcaccgtggacatgctgcactactttgccggcaagcagatccgcaacgtggcctgtctgggtggcaacatcatgacgggcagccccatttcggacatgaatcccgtgctgacagccgccggcgctcgcctggaggtggccagcatcgtggagggtaaaataagccagcggactgtccacatgggcacgggcttcttcaccggctatcggcgcaatgtcatcgagccgcaggaggttttgctgggcattcacttccagaagacgacgccggatcagcatgtggtggccttcaagcaggcgcgccgacgcgacgatgacattgccattgtcaatgcggcagtcaatgtccgctttgagcccaagtccaatgtggtggcggagatttccatggcattcggcggcatggcacccacaacggtgctggcacctcgcacctcccaattgatggtcaagcagccactggatcatcagctgctggagcgcgtggcggagagtctgtgtggggagctaccactggcggcttccgcaccgggcggcatgattgcctatcgccgcgctctggtggtcagcctgatcttcaaggcttacctcgccatcagtagcaagctgagcgaagcgggcatcatagccggcgacgccattcccccgaaggagcgcagcggcgccgagcttttccacactcccacgctgcgtagtgcgcagctgttcgagcgcgtctgcagcgatcagcccgtgtgtgatcccattggcaggccggaggtgcatgccgctgccctgaagcaggccacaggtgaggccatctacacggatgacattccacgcatggatggcgaactctatctgggtttcgtgctgagcacaaagcccagggccaagataaccaaactggatgccagcgctgcgctggcgctggagggcgtgcacgcattcttcagccacaaggatctgacggtgcacgagaacgaggtgggtccggtgttccacgatgagcacgtgttcgcggccggagaggtgcactgctacggccagatcgtgggcgccgtggcggcggacaacaaggcgctggcacagcgtgcgtcgcggctcgtgcgtgtggagtacgaagacctttcgccggtgattgtcaccattgagcaggccattgagcatggctcctactttcccgactatccgcgctacgtgaccaagggcaatatggcagaggcctttgcgcaggcggagcacacctacgagggcagctgtcgcatgggtggccaggagcacttctatctggagactcacgcggctgtggccgtgcctcgtgacagcgacgagctggagcttttctgctccacccagcatccgtcggaggtgcagaagctggtggctcacgtgacctcgctgcccgcacaccgcgtggtgtgccgtgccaagcgtctgggtggtggcttcggcggcaaggagtcgcgtggcatatccgtggctctgcccgtggccttggctgcctatcgactgcgtcgccccgtgcgctgcatgctggaccgcgacgaggatatgctgatcactggcacacgccatcccttccttttcaagtacaaggtggcgttcagcagcgacggcctcatcacagcctgcgacattgagtgctacaacaatgccggctggtccatggatttgtcgttttcggtcttggagcgtgccatgtaccactttgagaactgctaccacatacccaatgtgcgcgttgggggctgggtctgcaaaacgaatctgccctcgaacacggccttcagaggatttggtggaccgcagggcatgtttgccggcgagcacatcatcagggacgtcgcgcgaatcgtgggccgcgatgtgctggatgtgatgcgtctgaatttctacagaacgggcgacaccacgcactacaaccagcagctggagcactttcccatcgaacgctgcctcgatgactgcctcacgcagtcgcgctaccacgagaggcgtgcggagattgcaaaattcaatcgggagaaccgatggcgcaagcgcggagtggccgtgattcccaccaagtatggcattgcctttggggtgatgcatctgaaccaggcgggtgccctgctcaatgtctatggcgatggctcggtgctgctgtcgcacggcggcgtcgagattggccagggcctcaacaccaagatgattcagtgtgctgcccgtgcgctgggcataccctcggagctgattcacatttcagagacggccacggacaaggtgcccaacacctcacccacggcggccagtgttggctcggacatcaatggcatggccgtgctggacgcctgcgagaagctcaacaagcgtctggcgccgatcaaggaagccctgccacaggcgacatggcaggagtggatcaacaaggcgtactttgatcgggttagcctctcggccacgggcttctatgccatgcccggcattggctaccatccggagacgaatcccaatgcacgcacctacagctactacaccaacggcgtgggcatcagcgtcgtggagattgactgcctgacgggcgatcaccaagtgctcagcacggacattgtcatggacatcggttcgagcatcaatccggccattgacattggccagatcgagggcgccttcatgcagggctacgggctgttcacgctcgaggagctcatgtactcgccgcagggcatgctctactcgcgcggtcctggcatgtacaagctgcccggctttgccgacattcccggcgagtttaatgtcagcctgctcacaggcgctcccaatccgcgtgctgtctactcctccaaggccgttggggagccaccgctcttcatcggcgcctcagcattctttgccatcaaggaggccattgccgccgctcgccaggagcacggcctgactggggactttccgctggaggcgccctccacctctgcccgcatacgcatggcctgccaggataaatttactaatctgctggaagtacccgaggcaggcagctttacaccttggaatattgtgccataa

SEQ ID NO: 116093 - protein, 1344 aa, Drosophila subobscura
MSGQQQATSVLVFFVNGKKVTDTNPDPECTLLTYLRDKLRLCGTKLGCAEGGCGACTVMISRMDRGQHKIRHLAVNACLTPVCAMHGCAVTTVEGIGSTRTRLHPVQERLAKAHGSQCGFCTPGIVMSMYALLRNAEQPSMRDLEVAFQGNLCRCTGYRPILEGYKTFTKEFLCGMGEKCCRVNGKGCGGGDDPESVTDDTLFERSKFQPLDASQEPIFPPELQLSNAYDSESLVFSSERVTWYRPTTLQELLQLKAAHPAAKLVVGNTEVGVEVKFKHFLYPHLINPTLVAELQEVRESEESIYFGAAVSLMEIDALLRQRIEELPEAQTRLFQCTVDMLHYFAGKQIRNVACLGGNIMTGSPISDMNPVLTAAGARLEVASIVEGKISQRTVHMGTGFFTGYRRNVIEPQEVLLGIHFQKTTPDQHVVAFKQARRRDDDIAIVNAAVNVRFEPKSNVVAEISMAFGGMAPTTVLAPRTSQLMVKQPLDHQLLERVAESLCGELPLAASAPGGMIAYRRALVVSLIFKAYLAISSKLSEAGIIAGDAIPPKERSGAELFHTPTLRSAQLFERVCSDQPVCDPIGRPEVHAAALKQATGEAIYTDDIPRMDGELYLGFVLSTKPRAKITKLDASAALALEGVHAFFSHKDLTVHENEVGPVFHDEHVFAAGEVHCYGQIVGAVAADNKALAQRASRLVRVEYEDLSPVIVTIEQAIEHGSYFPDYPRYVTKGNMAEAFAQAEHTYEGSCRMGGQEHFYLETHAAVAVPRDSDELELFCSTQHPSEVQKLVAHVTSLPAHRVVCRAKRLGGGFGGKESRGISVALPVALAAYRLRRPVRCMLDRDEDMLITGTRHPFLFKYKVAFSSDGLITACDIECYNNAGWSMDLSFSVLERAMYHFENCYHIPNVRVGGWVCKTNLPSNTAFRGFGGPQGMFAGEHIIRDVARIVGRDVLDVMRLNFYRTGDTTHYNQQLEHFPIERCLDDCLTQSRYHERRAEIAKFNRENRWRKRGVAVIPTKYGIAFGVMHLNQAGALLNVYGDGSVLLSHGGVEIGQGLNTKMIQCAARALGIPSELIHISETATDKVPNTSPTAASVGSDINGMAVLDACEKLNKRLAPIKEALPQATWQEWINKAYFDRVSLSATGFYAMPGIGYHPETNPNARTYSYYTNGVGISVVEIDCLTGDHQVLSTDIVMDIGSSINPAIDIGQIEGAFMQGYGLFTLEELMYSPQGMLYSRGPGMYKLPGFADIPGEFNVSLLTGAPNPRAVYSSKAVGEPPLFIGASAFFAIKEAIAAARQEHGLTGDFPLEAPSTSARIRMACQDKFTNLLEVPEAGSFTPWNIVP

SEQ ID NO: 116094 - DNA, 3658 bp, Escherichia coli
  CDS (1460)..(3658): transl_table=11
atgcccctgacactgaaggtgaacggcaaaaccgagcagcttgaggtggatacccgaaccacgctactggacactttgcgtgaaaatctgcatttgatcggtaccaagaaaggttgcgatcacggacagtgcggagcctgtaccgtgctggtcaatggtcgcaggcttaatgcctgcctgacgcttgcagtcatgcatcagggggccgagatcaccaccattgaaggcctgggttcgccagataatcttcaccccatgcaggcggcctttatcaagcatgatggcttccagtgcggctactgcacctccgggcaaatttgctcatcagtagcggtgctaaaagagattcaggacggcattcccagtcacgtcacggtcgatttggtttccgctccagaaacaactgccgatgagatccgtgaacgtatgagcggcaacatctgtcgctgtggtgcatacgctaacatccttgccgccattgaagatgctgcgggggagataaaatcatgaaggcgtttacctatgaacgagtgaataccccagccgaggcggcacttagcgctcagcgcgtacccggcgcaaaatttatcgcgggcgggaccaatctgctggacctgatgaagctggaaattgaaacgcccacccaccttatcgatgtgaacggcctcgggctcgataagattgaagtgaccgacgcgggtgggctgcgcatcggcgcactggtacggaacaccgacctggcggctcacgagcgcgtgcgtcgtgattacgcggtactctcccgcgccctgctcgctggcgcgtctggtcagttacgtaatcaggcaaccaccgcaggtaatctgctccagcgcacgcgctgcccctatttttacgacaccaatcagccctgcaataagcgcctgcccgggagcggctgcgcggcgcttgaaggctttagccgtcagcacgcggtggtaggcgtaagcgaagcctgcattgccacccatccgagcgatatggcggtcgcaatgcggttgctggatgcggtggtggaaaccatcacgccggagggaaagactcgcagtatcacactggctgatttttatcaccctccgggaaaaacgccgcacattgaaaccgccctgcttcccggtgagcttatcgttgcggtgacgttacctccaccgctcggcggaaaacatatctaccgtaaggtgcgcgatcgcgcctcctacgcctttgccctggtatcggtcgcggcgattattcagcctgacggcagcgggcgcgtcgcgctgggcggagtagcacataagccctggcgcattgaggctgcggatgctcagctatcccagggggcgcaggccgtatatgacacgctgttcgccagcgcccatcccaccgctgaaaacacctttaaactcctgttggcgaagcgaacgcttgcctccgtactggctgaagcgagggcacaggcatgaaatttgataaacccgcaggggaaaacccgatcgatcagctgaaggttgtcggtcgtccccatgaccgcatcgacggaccgctgaaaactaccggcacggcacgctacgcctacgaatggcatgaagaagcccccaacgccgcctatggctatatcgtcggttccgccattgccaaaggacgcctcaccgcccttgatacggacgccgcgcaaaaagcgccgggcgtactggctgtcattaccgccagtaacgccggggcactcggcaaaggcgacaaaaacaccgccaggctgttaggcggccccactattgagcactatcatcaggccattgcgctggtagtggccgagaccttcgaacaggcgcgagcggcggcctcgctggtgcaggcacactatcgccgtaataaaggagcttactccctggcggacgaaaaacaggccgtcaatcagccgccggaagacacgcccgacaaaaacgtcggtgactttgacggggctttcacctccgctgcggtgaagattgatgctacctacacgaccccggaccagagccatatggcgatggagccgcatgcctcgatggccgtctgggatggaaataagcttaccctctggacctcaaatcagatgattgactggtgccgcaccgatctggcaaaaacgctgaaagttcccgtggagaatgtgcgtattatctccccgtatatcggcggagggtttggcggcaagctgttcctgagaagcgatgcgctgctggcggccctcgccgcccgagcggtgaaacgtccggttaaagtgatgctcccccgcccctctattcccaataacaccacgcaccgccccgccacccttcagcacttgcgtatcggtgccgaccagagcgggaaaatcaccgctatctcacatgaaagctggtctggaaacctgcccggcggcacgccggaaacggcggtacagcaaagcgaattactctacgccggggcgaatcgtcataccggcctgcggctcgccacgcttgatttgccggaagggaacgccatgcgtgcgcccggcgaagcccccggtctgatggcgctcgaaatcgcgatcgacgaactggcggaaaaagcgggcatcgatcccgtcgagtttcgcatcctgaatgacactcaggttgaccccgccgacccgacgcgctgcttctctcgccgtcagcttatcgagtgcttgcgcaccggagcggataaatttggctggaagcagcgcaacgccacacccggacaggtgcgcgacggggagtggctagtcggccacggtgttgcggcgggctttcgcaataatctgctggaaaaatcgggtgctcgggttcacctcgaacaaaacggcaccgttaccgtagaaacggacatgaccgacattggcaccggcagctacaccattctggcccagacggcagcggaaatgcttggcgtaccgctggagcaggttgcggttcacctcggcgattccagtttcccggtttctgcgggttctggtggacaatggggcgcgaatacctccacctccggcgtttacgccgcctgtatgaagcttcgcgaaatgattgcctcggcagtcgggtttgatcctgagcagtcgcagtttgccgacggcaagattaccaacggtacccgaagcgccacgctacatgaagccaccgcaggcggcagactgacagcggaagagagcattgaattcggaacactgagcaaagagtaccagcagtcgacctttgccgggcattttgtggaggtcggcgtgcatagcgcgacgggagaagttcgggtccggcgtatgctcgctgtgtgtgctgcaggacgcatcctgaatccgaaaactgcgcgcagccaggtcattggcgcaatgactatgggcatgggcgcggcactgatggaggagctggcggtggatgaccgtttgggctacttcgttaatcacgatatggcggggtatgaggtgccggttcatgcggatatcccaaaacaggaggtgattttcctggatgataccgaccccatatcctccccgatgaaggccaaaggtgtcggtgagctgggcctgtgcggcgtgagcgcggctatcgccaacgcggtgtataacgccaccggtattcgggtacgggattatcccatcactctggataagctgctcgataagctgccggatgtggtttaa

SEQ ID NO: 116095 - protein, 732 aa, Escherichia coli
MKFDKPAGENPIDQLKVVGRPHDRIDGPLKTTGTARYAYEWHEEAPNAAYGYIVGSAIAKGRLTALDTDAAQKAPGVLAVITASNAGALGKGDKNTARLLGGPTIEHYHQAIALVVAETFEQARAAASLVQAHYRRNKGAYSLADEKQAVNQPPEDTPDKNVGDFDGAFTSAAVKIDATYTTPDQSHMAMEPHASMAVWDGNKLTLWTSNQMIDWCRTDLAKTLKVPVENVRIISPYIGGGFGGKLFLRSDALLAALAARAVKRPVKVMLPRPSIPNNTTHRPATLQHLRIGADQSGKITAISHESWSGNLPGGTPETAVQQSELLYAGANRHTGLRLATLDLPEGNAMRAPGEAPGLMALEIAIDELAEKAGIDPVEFRILNDTQVDPADPTRCFSRRQLIECLRTGADKFGWKQRNATPGQVRDGEWLVGHGVAAGFRNNLLEKSGARVHLEQNGTVTVETDMTDIGTGSYTILAQTAAEMLGVPLEQVAVHLGDSSFPVSAGSGGQWGANTSTSGVYAACMKLREMIASAVGFDPEQSQFADGKITNGTRSATLHEATAGGRLTAEESIEFGTLSKEYQQSTFAGHFVEVGVHSATGEVRVRRMLAVCAAGRILNPKTARSQVIGAMTMGMGAALMEELAVDDRLGYFVNHDMAGYEVPVHADIPKQEVIFLDDTDPISSPMKAKGVGELGLCGVSAAIANAVYNATGIRVRDYPITLDKLLDKLPDVV

SEQ ID NO: 116096 - DNA, 4071 bp, Oryza sativa
  CDS (1)..(4071)
atggggtcagaggcggcggcggcggcgagggcggtggtggtggcggtgaacggggagaggtacgaggcggtgggggtcgacccgtcgacgacgctgctcgagttcctccgcacgcggacccccgtcaggggccccaagctcggctgcggcgaaggtggatgtggcgcatgcgtggtcgtcgtgtccaagtacgacgccgtcgccgacgaggtgaccgagttctcggcgagctcctgcctgacgctgctcggcagcctgcaccactgcgcggtcaccaccagcgagggcatcggcaactccagggatggcttccacgctgtgcagcggcggctctccggcttccacgcctcacagtgcggcttctgcacgccgggcatgtgcatgtccatctactccgcgctcgccaaggctgacaaggcatccggtcgccccgcgccgccgacggggttctccaagatcaccgccgccgaggcagagaaggccgtctccggcaacctgtgccgctgcactggctacaggcccatcgtcgacgcctgcaagagcttcgccgcggacgtcgacctcgaggatcttggcctcaacgccttctggaagaaaggcgtcgacgacgagcacgctgacatcaacaagctgcctgcatactccggtggcgccgccgtctgtacgttcccggagttcctcaagtcggagataaggtcgtccatgggtcaagcgaatggtgacacttcggcggtggtggtcaccggcgacggctggttccaccccaagagcgtcgaggagttccacaggttgtttgactctaacctgttcgatgaaaggtctgtgaagattgtggcatcgaacaccggctccggagtgtacaaggatcaagacctccatgacaagtacatcaacatctcgcagattccggaactctcagccatcaatagaagcagcaagggcgtagagatcggagctgtcgtgtctatctcccaagccatcgacatactgtcggatggaggcgcggtgtttagaaagatcgctgatcacctgagcaaagtggcctcgccgttcgtccggaacacggcgaccattggaggcaacatcatcatggcgcagaggttgtctttctcgtcggacatcgcaactgttcttctcgctgcaggatcaactgtcaccatccaggtggccgccaagaggatgtgcatcactctggaggagttcttgaagcagcctccatgtgattccaggacattgctggtcagcatctctatcccggattggggttcagatgatggcatcacctttcagacgtttcgtgcggctcctcgtccacttggcaatgctgtgtcatatgttaattctgcattcttggcaagaagttcagtggatggatcatcagggagccatctcattgaggatgtttgcttggcattcggcccctttggggccaagcacgccatcagagctagggaggttgagaagttcttgaagggaaaattggttagtgcaccagtgatacttgaagcagttcgtcttctgaaaggtgttgtttcaccagctgaaggcacaacacatcctgaatacagagtcagcttggccgtcagttatctgttcaaattcctgtcttcccttactaatggcttggatgagcctgaaaatgctaatgttcccaatggttcatttactaatggaaccgcaaatggtattgttgattcctcgccagagaagcactcaaatgttgacagctcttatttgccaataaaatcaaggcaagagatggttttctctgatgaatacagacctattggaaaaccgatcgagaaaacgggagctgagctccaagcttctggggaggcagtgtatgtcgatgacatctctgctccaaaggattgcctctatggggcatttatctacagcacacaccctcacgctcacataaaaggtgtaaacttcagatcatctttggcttcacagaaggtcatcacagttatcactttaaaggacattcctaccaatggaaaaaatattggatcatgctccccaatgctaggagatgaagcgcttttcgttgatcctgtttctgaatttgctggacagaatattggtgttgtgattgctgaaactcaaaagtatgcctatatggcggcgaagcaatctgtgatcgaatatagtactgaaaatcttcagccaccaattctgacagtagaagacgctgtccagcataacagctacttccaagttcccccatttttagctcctacgccaattggtgagttcaaccaagccatgtctgaagctgatcacaagatcatagatggggaggtgaaacttgaatcccaatactatttctacatggagacacagacggccttagctatccctgatgaagataactgtataaccctctatgtgtcggcgcaactacctgagattactcaaaatactgttgcgaggtgccttggcattccatatcacaacgtccgtatcatcacgagaagagttggaggaggttttggtggaaaggcaatgaaagcaatacatgttgcaactgcttgtgctgtcgccgcattcaagctgcggcgtccggttcgaatgtacctcgatcgcaagacagacatgatcatggcgggagggcggcatccgatgaaggtaaagtactccgtcggtttcaagtccgacggcaagatcacgggtctgcacgttgatctcagaatcaactgcggaatatcgccggactgcagcccggcgttgccagtcgccattgtcggggctctgaagaagtacaactggggggctctctccttcgacatcaagctctgcaagacgaacgtctcgtcgaagtcggcgatgcgggctcccggcgacgcgcagggctcgttcatcgccgaggccatcgtcgaacacatcgcgtctactctctcagtggacacgaacgccatcaggaggaagaacctccatgacttcgagagcctcaaggtgttttacgggaatagcgccggtgatccttcgacgtacagcctcgtcaccatcttcgacaagctggcgtcgtcgccggagtaccagcagagggccgccgtggtcgagcatttcaacgccggcagcaggtggaagaagcggggcatttcttgcgtgccgatcacctacgacgtgaggctccggccatctccggggaaggtgtccatcatgaacgacggctccatcgccgtcgaggtcggcggcgtcgagatcgggcaggggctgtggacgaaagtgaagcagatgacagcgttcgcgctgggccagctctgcgatgatggcggcgagggcctcctcgacaaggtccgtgtcatccaggccgacaccctgagcatgatccagggaggcttcaccggcgggagcacgacctccgagactagctgcgaggctgttcggaagtcgtgcgccgccctcgtggagaggttgaagcccatcaaggagaaggctggcacgctaccatggaaatccttgattgcccaggcaagcatggcgagcgtgaagctgacagagcacgcgtactggacgcctgaccccacgttcactagctacttgaactatggagctgcaattagtgaggtggaagtcgatgtgctgacgggagaaaccaccatcctgaggagcgacctcgtgtacgactgtgggcagagcctgaatcctgctgtggacttgggccaggtggaaggcgcattcgtgcaagggatcggcttcttcacgaacgaggagtacacgaccaactccgatgggctggtcatcaacgacggcacgtggacgtacaagatccccaccgtggacaccatccccaagcagttcaacgtcgagctcatcaacagcgcccgcgatcacaagcgcgtcctctcctccaaagcgtccggtgagccgccgctgctgctggcgtcgtcggtgcactgcgcgatgagggaggcgatcagggcggccaggaaggagttcgccggcgccggcggctcgtcgctgacgttccagatggacgtgccggcgacgatgccgatcgtcaaggagctctgcggcctcgacgtcgtggagagagatctcgagagctttgctgccaaagcctag

SEQ ID NO: 116097 - protein, 1356 aa, Oryza sativa
MGSEAAAAARAVVVAVNGERYEAVGVDPSTTLLEFLRTRTPVRGPKLGCGEGGCGACVVVVSKYDAVADEVTEFSASSCLTLLGSLHHCAVTTSEGIGNSRDGFHAVQRRLSGFHASQCGFCTPGMCMSIYSALAKADKASGRPAPPTGFSKITAAEAEKAVSGNLCRCTGYRPIVDACKSFAADVDLEDLGLNAFWKKGVDDEHADINKLPAYSGGAAVCTFPEFLKSEIRSSMGQANGDTSAVVVTGDGWFHPKSVEEFHRLFDSNLFDERSVKIVASNTGSGVYKDQDLHDKYINISQIPELSAINRSSKGVEIGAVVSISQAIDILSDGGAVFRKIADHLSKVASPFVRNTATIGGNIIMAQRLSFSSDIATVLLAAGSTVTIQVAAKRMCITLEEFLKQPPCDSRTLLVSISIPDWGSDDGITFQTFRAAPRPLGNAVSYVNSAFLARSSVDGSSGSHLIEDVCLAFGPFGAKHAIRAREVEKFLKGKLVSAPVILEAVRLLKGVVSPAEGTTHPEYRVSLAVSYLFKFLSSLTNGLDEPENANVPNGSFTNGTANGIVDSSPEKHSNVDSSYLPIKSRQEMVFSDEYRPIGKPIEKTGAELQASGEAVYVDDISAPKDCLYGAFIYSTHPHAHIKGVNFRSSLASQKVITVITLKDIPTNGKNIGSCSPMLGDEALFVDPVSEFAGQNIGVVIAETQKYAYMAAKQSVIEYSTENLQPPILTVEDAVQHNSYFQVPPFLAPTPIGEFNQAMSEADHKIIDGEVKLESQYYFYMETQTALAIPDEDNCITLYVSAQLPEITQNTVARCLGIPYHNVRIITRRVGGGFGGKAMKAIHVATACAVAAFKLRRPVRMYLDRKTDMIMAGGRHPMKVKYSVGFKSDGKITGLHVDLRINCGISPDCSPALPVAIVGALKKYNWGALSFDIKLCKTNVSSKSAMRAPGDAQGSFIAEAIVEHIASTLSVDTNAIRRKNLHDFESLKVFYGNSAGDPSTYSLVTIFDKLASSPEYQQRAAVVEHFNAGSRWKKRGISCVPITYDVRLRPSPGKVSIMNDGSIAVEVGGVEIGQGLWTKVKQMTAFALGQLCDDGGEGLLDKVRVIQADTLSMIQGGFTGGSTTSETSCEAVRKSCAALVERLKPIKEKAGTLPWKSLIAQASMASVKLTEHAYWTPDPTFTSYLNYGAAISEVEVDVLTGETTILRSDLVYDCGQSLNPAVDLGQVEGAFVQGIGFFTNEEYTTNSDGLVINDGTWTYKIPTVDTIPKQFNVELINSARDHKRVLSSKASGEPPLLLASSVHCAMREAIRAARKEFAGAGGSSLTFQMDVPATMPIVKELCGLDVVERDLESFAAKA

SEQ ID NO: 116098 - DNA, 4068 bp, Oryza sativa
  CDS (1)..(4068)
atggggtcagaggcggcggcggcgaggccggtggtggtgacggtgaacggggagaggtacgaggcggtgggggtcgacccgtcgacgacgctgctcgagttcctccgcacgcggacccccgtccggggccccaagctcggctgcggcgaaggtggatgcggcgcatgcgtggtcgtcgtttccaagtacgacgccgtcgccgacgaggtgaccgagttctcggcgagctcctgcctgacgctgctcggcagcctgcaccactgcgcggtcaccaccagcgagggcatcggcaactccagggatggcttccacgccgtgcagcggcggctctccggcttccacgcctcgcagtgcggcttctgcaccccgggcatgtgcatgtccatctactccgcgctcgccaaggccgacaggtgctcgtcccgtccctcgccgccgccggggttctccaagctcaccgccgctgaggccgagaaggccgtctccggcaacctgtgccgctgcaccggctacaggcccatcgtcgacgcgtgcaagagcttcgccgccgacgtcgacctcgaggaccttggcctcaacgccttctggaagaaaggcgccgacgacgagcgcgctgacgtcggcaagctgcctgcatactctggtggcgccgccgtctgtacgttcccggagttcctcaagtcggagataaggtcatccatgggtcaagcgaatggtggcgctccggcggtggcggtcaccggagacggctggttccaccccaagagcgtcgaggagttccacaggttgtttgactctaacctgttcgacgaaaggtctgtgaagattgtggcatcgaacaccggctccggagtgtacaaggatcaagacctccatgacaagtacatcaacatctcgcagattctggaactctcagccatcaatagaagcagcaagggcgtcgagatcggagctgtcgtgtctatctccaaagccattgagatattgtcggatggaggcgcagtgttcagaaagattgccgatcacctgagcaaagtggcctcgtcgttcgtccagaacacggcgaccattggaggcaacatcatcatggcgcagaggctgtctttcccgtcggacatcgcaacggttcttctcgctgcaggatcaactgtcaccatccaggtggccgccaagaggatgtgcatcactctggaggagttcttgaagcagcctccatgtgattccaggacgttgttggtcagcatctctatcccggattggggttcagatgatggcatcacctttgagtcgtttcgtgcggctcctcgtccacttggcaatgctgtgtcatatgttaattctgcattcttggcaagaagttcagtggatggatcatcagggagccatctcattgaggatgtttgcttggcatttggcgccttcggggccgaacacgccatcagagctagggaggttgaggagttcttgaagggaaaattggttagtgcaccagtgatacttgaagcagttcggcttcttaaaggtgttgtttcaccagctgaaggcacaacacatcctgaatacagagtcagcttggccgtcagttatctgttcagattcctgacttcccttgctaatggcttggatgagcctgaaaatgctaatgttcccaatggttcatgtactaatggaaccgcaaacggtagcgctaattcctctccggagaagcactcaaatgttgacagctctgatttgccaataaaatcaaggcaagagatggttttctctgatgaatacaaacctgttggaaagccgatcgagaaaaccggagcagagctccaagcttctggagaggcagtgtatgttgatgacatccctgctccgaaggattgcctctatggagcatttatctatagcacacaccctcacgctcacataaaagatataaacttcagatcatctttggcttcacagaaggtcatcacagttatcactgcaaaggacattcctaccggtggagaaaatattggatcatgcttcccaatgcttggagatgaagcgcttttcgttcatcctgtttctgaatttgccggccagaatattggtgttgtgattgctgaaacacaaaagtatgcctatatggcggcgaagcaagctgtgatcgaatatagtaccgaaaatcttcagccaccaattctgacaatagaagatgctgtccagcataacagctacttcccagttcccccatttttagctcctacgccaattggtgacttcaaccaagctatgtctgaagctgatcacaagatcatagatggggaggtgaaacttgaatcccagtactatttctacatggagacacagacggccttagctatccctgatgaagataactgtataaccctctatgtgtcggcgcaactacctgagattactcaaaatactgttgcgaggtgccttggcattccatatcacaatgtccgtatcatcacgagaagagttggaggaggttttggtggaaaggcaatgaaagcaatacatgttgccgctgcatgtgctgtcgccgcattcaagctgcggcgtccggttcgaatgtacctcgatcgcaagacagacatgatcatggcgggagggcggcatccgatgaaggtaaagtactccgtcggtttcaagtccgacggcaagatcacgggtctgcactttgatcttggaatgaacggcggaatatcgccggattgcagcccggtgttgccagtcgccattgtcggggctctgaagaagtacaactggggcgctctctccttcgacatcaaggtctgcaagacgaacgtctcgtcgaagtcggcgatgcgggctcccggcgacgcgcagggctcgttcatcgccgaggccatcgtcgaacacatcgcgtccactctctcagtggacacgaacgccatcaggaggaagaacctccacgacttcgagagcctcaaggtgttttatgggaatagcgccggtgatccttcgacgtacagtctcgtcaccatcttcgacaagctggcctcgtcgccggagtaccagcagagggccgccatggtcgagcacttcaacgccggcaacaggtggaagaagcggggcatttcttgcgtgccgatcacctacgacgtgaggctccggccaactccggggaaggtgtccatcatgaacgacggctccatcgccgttgaggtcggcggcgtcgagatcgggcaggggctgtggacgaaagtgaagcagatgacagcgttcgcgctgggccagctctgcgatgatggcggcgagggcctcatcgacaaggtccgtgtcatccaggccgacaccctgagcatgatccagggaggcttcaccggtgggagcacgacctccgagactagctgcgaggctgttcggaagtcgtgcgccgccctcgtggagaggttgaagcccatcaaagagaaggctggcacgccaccatggaaatcccttattgcccaggcaagcatggcgagtgtgaagctgacagagcacgcgtactggacgcctgaccccacgttcactagctacttgaactatggagctgcaattagtgaggtggaagtcgatgtgctgacgggagaaaccaccatcctgaggagcgacctcgtgtacgactgtgggcagagcctgaatcctgctgtggacttgggccaggtggaaggcgcattcgtgcaagggatcggcttcttcacgaacgaggagtacacgaccaactccgatgggctggtcatcaacgacggcacgtggacgtacaagatccccaccgtggacaccatccccaagcagttcaacgtcgagctcatcaacagcgcccgcgatcacaagcgcgtcctctcctccaaagcgtccggtgagccgccgctgctgctggcgtcgtcggtgcactgcgcgatgagggaggcgatcagggcggccaggaaggagttcgccggcgccggaggctcgccgctgacgttccagatggacgtgccggcgacgatgccgatcgtcaaggagctctgcggccttgacgtcgtggagagatatctcgagagctttgctgccaaagcctag

SEQ ID NO: 116099 - protein, 1355 aa, Oryza sativa
MGSEAAAARPVVVTVNGERYEAVGVDPSTTLLEFLRTRTPVRGPKLGCGEGGCGACVVVVSKYDAVADEVTEFSASSCLTLLGSLHHCAVTTSEGIGNSRDGFHAVQRRLSGFHASQCGFCTPGMCMSIYSALAKADRCSSRPSPPPGFSKLTAAEAEKAVSGNLCRCTGYRPIVDACKSFAADVDLEDLGLNAFWKKGADDERADVGKLPAYSGGAAVCTFPEFLKSEIRSSMGQANGGAPAVAVTGDGWFHPKSVEEFHRLFDSNLFDERSVKIVASNTGSGVYKDQDLHDKYINISQILELSAINRSSKGVEIGAVVSISKAIEILSDGGAVFRKIADHLSKVASSFVQNTATIGGNIIMAQRLSFPSDIATVLLAAGSTVTIQVAAKRMCITLEEFLKQPPCDSRTLLVSISIPDWGSDDGITFESFRAAPRPLGNAVSYVNSAFLARSSVDGSSGSHLIEDVCLAFGAFGAEHAIRAREVEEFLKGKLVSAPVILEAVRLLKGVVSPAEGTTHPEYRVSLAVSYLFRFLTSLANGLDEPENANVPNGSCTNGTANGSANSSPEKHSNVDSSDLPIKSRQEMVFSDEYKPVGKPIEKTGAELQASGEAVYVDDIPAPKDCLYGAFIYSTHPHAHIKDINFRSSLASQKVITVITAKDIPTGGENIGSCFPMLGDEALFVHPVSEFAGQNIGVVIAETQKYAYMAAKQAVIEYSTENLQPPILTIEDAVQHNSYFPVPPFLAPTPIGDFNQAMSEADHKIIDGEVKLESQYYFYMETQTALAIPDEDNCITLYVSAQLPEITQNTVARCLGIPYHNVRIITRRVGGGFGGKAMKAIHVAAACAVAAFKLRRPVRMYLDRKTDMIMAGGRHPMKVKYSVGFKSDGKITGLHFDLGMNGGISPDCSPVLPVAIVGALKKYNWGALSFDIKVCKTNVSSKSAMRAPGDAQGSFIAEAIVEHIASTLSVDTNAIRRKNLHDFESLKVFYGNSAGDPSTYSLVTIFDKLASSPEYQQRAAMVEHFNAGNRWKKRGISCVPITYDVRLRPTPGKVSIMNDGSIAVEVGGVEIGQGLWTKVKQMTAFALGQLCDDGGEGLIDKVRVIQADTLSMIQGGFTGGSTTSETSCEAVRKSCAALVERLKPIKEKAGTPPWKSLIAQASMASVKLTEHAYWTPDPTFTSYLNYGAAISEVEVDVLTGETTILRSDLVYDCGQSLNPAVDLGQVEGAFVQGIGFFTNEEYTTNSDGLVINDGTWTYKIPTVDTIPKQFNVELINSARDHKRVLSSKASGEPPLLLASSVHCAMREAIRAARKEFAGAGGSPLTFQMDVPATMPIVKELCGLDVVERYLESFAAKA

SEQ ID NO: 116100 - DNA, 4077 bp, Oryza sativa
  CDS (1)..(4077)
atgggggaggcggcggcggtggtggcggtgaacggggagaggtacgaggcggtgggggtggacccgtcgatgacgctgctcgagttcctccgcacgcggacgccattcagaggccccaagctcggctgcggcgaaggaggatgcggggcgtgcgcggtggtggtgtccaagtacgacgccgccgccgacgaggtgacgtcgttctcggcgagctcgtgcctgacgctgctgggcagcctccaccactgcgcggtgaccaccagcgagggcatcggcaactccagggatggcttccaccccgtgcagcgccgcctcgccggcttccacgcctcccagtgcggcttctgcaccccgggcatgtgcgtctccatcttctccgccctcgccaacgccgacagggcggcctccgccgcgccgccgccgccgccgacgccgccggggttctccaggctcaccgccgccgacgccgagcgggccgtctccggcaacctctgccgctgcaccggctaccggcccatcctcgacgcctgcaagagcttcgccgccgacgtcgacctcgaggatctgggtctcaactccttctggaagaaaggcgagcgcgctgacatcaccaagcttccggcctactcctgtactgccgatgttgccaccttcccggagttcctcaagtccgagattaggtcatccggtggtgctccggcggtggcggtcaccggcgacggctgctggttccatcccaggagcatcgaggagttccacaggttgtttgaatgcaacctgttcgacgaaatgtccgtgaagattgtggcgtcgaacaccggctccggggtgtacaaggatcaggacctccatgacaagtacatcaacatctcgcagattcctgagctctcggccatcaacagaagcagcaatggcatcgagatcggagcagccgtgtctatctccaaagccatcgagatactacggtcagatggtggagacgcggtggtgtttcgaaagattgcttatcacctgggcaaggtggcctcaccgttcgtccggaacacggccaccataggaggcaacatcatcatggcgcagaggatgtcgttcccgtcagacatcgcaactgttcttctcgctgcaggatcaactgtcaccatccagcaggtggcttccaagaggatgtgcctcactctggaggaattcttgaagcagcctccatgtgattccaggacattgctaatcagcatctccatcccagattggtgttcatatgatggcatcacttttgagacatttcgtgcggctcctcgtccatttggcaatgctgtctcatatgtgaattctgcattcttggcaaggagttcgttggatgcagcatcaggaagccatcttattgaggatgttcgcttggcattcggcgcttttgggtctgaacatgccatcagagctagtaaggttgaggagttcttgaagggaaaattggttagtgcatctgtgatacttgaagcagtccggctgcttaaaggagttgtttcaccagcagaaggcaccacacatcctgaatacagagtcagtctagccgtcagttacctgttcaggttcctgtcttcccttgctaatggcttggatgataagcctgaaaatgctaataatgttcccaatggttcatgtactactaatggaaccaccaacggtagcgctgagtcgacggttgacagctttgatttgccaataaaatcaagacaagagatggttttctctgatgaatacaaaccagtcggaaaaccaatcaagaaagtcggggcagagctccaagcttctggggaggcagtgtatgttgatgacatccctgctccaaaggattgcctctatggagcatttatctacagcacacaccctcacgctcacataaaaggtgtaaactttagatcatctttggcttcacagaaggttatcacagttatcactgcaaaggacattccgaccggtggagaaaatgttggatcctgcttcccaatgttaggagatgaagcactttttgctgatccagttgctgaattcgctggtcaaaatatcggcgttgtgattgcggaaacacaaaaatacgcctatatggcagcaaggcaagctgtgattgaatataatactgaaaatcttcagccaccaattctaacagtagaagacgctgtccagcataacagctacttccaagttcccccatttttacaacctaagccaattggtgacttcaaccaagccatgtctgaagccgatcacaagatcatagatggggaggtgaaacttggatcccagtactatttctacatggagacacaaacggctttagctttccctgatgaagataactgtataaccgtctactgctcagcgcaaatgcctgaggttactcaagatattgttgcaaggtgcctcggcgttccatttcataatgtccgtattatcacgagaagagttggaggaggtttcggtggaaaggcaatgaaagcaacacatgttgcaactgcttgcgctgtggcagcattcaagctgcggcgcccagttcgaatgtacctcgatcgcaagacggacatgataatggcgggagggcggcatccgatgaaggccaagtactccgtcgggttcaagtccgacggcaagatcacggccctgcacctcgatctcaagatcaacgccgggatatcaccggaattcagcccggcgatcccgtacgccattgtcggggccctgaagaagtacagctggggcgctctcgcgttcgacatcaaggtctgcaagacgaacgtctcgtccaagtcggccatgcgtgctccgggcgacgcgcagggctcgttcatcgccgaggccatcgtcgagcacgttgcgtccacgctctccgtggccacgaacaccatcaggaggaagaacctccatgacttggagagcctcaaggtgttcttcggggacagcgccgccggcgaggcctcgacgtcgtcgtacagcctcgtcatcatcttcgacaggctggcctcgacgccggagtaccagcggagggccgccatggtggagcaattcaacggcagcagcaggtggaagaagcgtggcatttcttgcgtgccgatcacctactcggtgacgctccggccgtctccggggaaggtctccatcttgaacgacggctccatcgccgtcgaggtcggcggcgtcgagatcgggcagggcctgtggaccaaggtgaagcagatgaccgccttcgcgctgggccagctgtgcgatgacggcggcgagggcctcctcgacaatgtccgtgtcatccaggctgacaccctgagcatgatccagggaggatggaccgccgggagcacgacctccgagaccagctgcgaggctgttcggaagtcgtgcgccgcgctcgtcgagcggctcaagcccatcaaggagaaggctggcaccctaccatggaaatcctttattgcgcaggcaagcatggctagtgtaaaactgacggagcacgcgtactggacccctgacccgacgttcactagctacatgaactatggagctgccactagtgaggtggaagtcgatgtgctgacaggggcaaccaccatcctgaggagcgacctcgtgtatgactgtgggcagagcctgaatcctgctgtcgacttaggccaggtggaaggcgcgttcgtgcaaggtgtgggcttcttcacgaacgaggagtacgcgaccaacgccgatgggctggtcatccacgacggcacatggacgtacaagatccccaccgtagacaccatccccaagcagttcaacgtcgagctcatcaacaccgctcgccatcacagccgcgtcctctcctcaaaagcgtccggtgagccgccgctgctgctggcgtcgtccgtgcactgcgcgatgagggaggcgatcagggcggcgcggagagagttcgccgctgtcggcggcggcaccggcggctcagatcaggtgacgtcgttccagatggacgtgccggcgacgatgccggccgtcaaggagctctgcggcctcgacgtcgtggagaggtatctcgagagcttttctgcaaccaccgcctag

SEQ ID NO: 116101 - protein, 1358 aa, Oryza sativa
MGEAAAVVAVNGERYEAVGVDPSMTLLEFLRTRTPFRGPKLGCGEGGCGACAVVVSKYDAAADEVTSFSASSCLTLLGSLHHCAVTTSEGIGNSRDGFHPVQRRLAGFHASQCGFCTPGMCVSIFSALANADRAASAAPPPPPTPPGFSRLTAADAERAVSGNLCRCTGYRPILDACKSFAADVDLEDLGLNSFWKKGERADITKLPAYSCTADVATFPEFLKSEIRSSGGAPAVAVTGDGCWFHPRSIEEFHRLFECNLFDEMSVKIVASNTGSGVYKDQDLHDKYINISQIPELSAINRSSNGIEIGAAVSISKAIEILRSDGGDAVVFRKIAYHLGKVASPFVRNTATIGGNIIMAQRMSFPSDIATVLLAAGSTVTIQQVASKRMCLTLEEFLKQPPCDSRTLLISISIPDWCSYDGITFETFRAAPRPFGNAVSYVNSAFLARSSLDAASGSHLIEDVRLAFGAFGSEHAIRASKVEEFLKGKLVSASVILEAVRLLKGVVSPAEGTTHPEYRVSLAVSYLFRFLSSLANGLDDKPENANNVPNGSCTTNGTTNGSAESTVDSFDLPIKSRQEMVFSDEYKPVGKPIKKVGAELQASGEAVYVDDIPAPKDCLYGAFIYSTHPHAHIKGVNFRSSLASQKVITVITAKDIPTGGENVGSCFPMLGDEALFADPVAEFAGQNIGVVIAETQKYAYMAARQAVIEYNTENLQPPILTVEDAVQHNSYFQVPPFLQPKPIGDFNQAMSEADHKIIDGEVKLGSQYYFYMETQTALAFPDEDNCITVYCSAQMPEVTQDIVARCLGVPFHNVRIITRRVGGGFGGKAMKATHVATACAVAAFKLRRPVRMYLDRKTDMIMAGGRHPMKAKYSVGFKSDGKITALHLDLKINAGISPEFSPAIPYAIVGALKKYSWGALAFDIKVCKTNVSSKSAMRAPGDAQGSFIAEAIVEHVASTLSVATNTIRRKNLHDLESLKVFFGDSAAGEASTSSYSLVIIFDRLASTPEYQRRAAMVEQFNGSSRWKKRGISCVPITYSVTLRPSPGKVSILNDGSIAVEVGGVEIGQGLWTKVKQMTAFALGQLCDDGGEGLLDNVRVIQADTLSMIQGGWTAGSTTSETSCEAVRKSCAALVERLKPIKEKAGTLPWKSFIAQASMASVKLTEHAYWTPDPTFTSYMNYGAATSEVEVDVLTGATTILRSDLVYDCGQSLNPAVDLGQVEGAFVQGVGFFTNEEYATNADGLVIHDGTWTYKIPTVDTIPKQFNVELINTARHHSRVLSSKASGEPPLLLASSVHCAMREAIRAARREFAAVGGGTGGSDQVTSFQMDVPATMPAVKELCGLDVVERYLESFSATTA

SEQ ID NO: 116102 - DNA, 4059 bp, Zea mays
  CDS (1)..(4059)
atggggaagcaggcggcggtggtgctggccgtgaacggcaagcggtacgaggccgccggcgtggacccgtcgatgacgctgctagagtacctgcgcaccgagacgcccgtcaggggccccaagctcggctgcggcgaaggtggctgcggtgcatgtgtcgtccttgtctccaagtatgacccggccaccgacgaggtgaccgagttctcagcgagctcctgcctgacgcttctccacagcgtggaccgctgctcggtgaccaccagcgagggcattggcaacaccaaggatggctaccaccctgtgcagcagcgcctctccggcttccacgcctcgcagtgcgggttctgcacgcccggcatgtgcatgtccatcttctccgcccttgtcaaggccgacaacaagtccgatcgcccggaccctcctgctggcttctccaagatcactacctcggaggcagagaaggctgtctcgggcaacctttgtcgttgcaccggatacagacccattgttgacacctgcaaaagctttgcctctgatgttgacctcgaggacctaggcctcaactgtttctggaagaagggcgaagaacctgcagaagtcagcaggctgccggggtacaacagcggtgccgtctgcacctttccagagtttctcaaatccgaaatcaagtctactatgaagcaggtgaacgatgtccccattgcagcctcaggtgatggctggtaccatcctaagagcattgaagagcttcacaggttgtttgattccagctggtttgatgacagttctgtgaagattgttgcttcaaacactgggtctggagtgtacaaggatcaggacctctacgacaagtacattgacatcaaaggaatcccagagctttcagtcatcaataaaaacgacaaagcaattgagcttggatcagttgtgtccatctctaaagctattgaagtgctgtcagatggaaatttggtcttcagaaagattgctgatcacctcaacaaagtggcttcaccgtttgttcggaacactgcaaccataggaggaaacataatgatggcacaaaggttgccatttgaatcggatgttgcaaccgtgctcctagctgcgggttcgacagtcacagtccaggtggcttccaaaaggctgtgcttcactctggaggaattcttggaacaacctccatgtgattctaggaccctgctgctgagcatatttatcccagaatggggttcagactatgtcacctttgagactttccgagccgccccacgaccatttggaaatgctgtctcttatgtaaactctgctttcttggcaaggacatcaggcagccttctaattgaggatatatgcttggcatttggtgcctacggagtcgatcatgccatcagagctaagaaggttgaagatttcttgaagggaaaatcgctgagctcatttgtgatacttgaagcaattaaactactcaaagataccgtttcaccatcagaaggcactacacatcatgaatacagggtcagcttggctgtcagtttcttgttcagtttcttatcttcccttgccaacagttcgagtgcaccatcaaatattgatactcccaatgggtcatatactcatgaaactggtagcaatgtggactcacctgagaggcatattaaggttgacagcaatgatttgccaattcgttcaagacaagaaatggttttcagcgatgagtacaagcctgttggcaagccgatcaagaaagtcggggcagagatccaagcatcaggggaggctgtgtacgttgatgatatccctgctcccaaggattgcctctatggagcatttatctacagcacccatcctcatgctcatgtgaggggtatcaactttaaatcatctttggcttcgcagaaggtcatcacagttatcaccgcaaaggatattcccagtggtggagaaaatattggttgcagcttcctgatgctgggagaagcactatttgcagatccaatcgctgaatttgctggtcaaaatattggtgtcgtgattgctgaaacacaaagatatgctaatatggctgcaaagcaagctgttgttgagtatagcacagaaaatctgcagccaccaattctgacaatagaagatgccatccaaagaaacagctacatccaaattcccccatttttagctccaaagccagttggtgactacaacaaagggatggctgaagcagaccacaagattctatcagcagaggtaaaacttgaatcccagtactacttctacatggagactcaagtggcgctagctattcctgatgaagataactgtataaccatctattcttcgacacaaattcctgaggtcacacaaaatttggttgcaaggtgtcttggcattccatttcacaatgtccgtgtcatcagcagaagagtcggaggaggctttggtggaaaggcaatgaaagcaatgcatgttgcatgtgcatgtgcggttgctgccttcaagctgcggcgtccagttcggatgtacctggatcgcaagacggacatgataatggctggcggtcggcatcctatgaaggtgaagtactctgttgggttcaagtcagatggcaagatcacagccttgcaccttgatcttgggatcaatgctggaatatcaccggatgtgagtccattgttgccacgtgctatcataggtgctctcaaaaagtacaactggggcactcttgcatttgataccaaggtctgcaagacaaatgtctcatcaaagtcagcaatgcggggtcctggagatgttcagggctctttcatcgctgaagccatcattgagcatgttgcctcagcactttcactagacactaacaccgtcaggaggaagaaccttcatgattttgaaagccttgaagttttctatggagaaagtgcaggtgaagcttctacatacagcctggtttccatgtttgacaagctggccttgtctccagaataccagcacagggctgcaatgattgagcagttcaatagcagcaacaaatggaagaaacgcggcatttcttgtgtgccagccacttatgaggttaatcttcgaccaactccaggcaaggtgtcaatcatgaatgatggttccatcgctgtcgaggttggaggaattgagataggtcaaggattgtggactaaagtgaagcagatgacggcctttggactgggacagctgtgtcctgatggtggcgaatgccttctggacaaggttcgggttatccaggcagacacattaagcctgatccaaggaggtatgactgctgggagcaccacttctgaaactagctgtgaagcagttcggcaatcgtgtgttgcacttgttgagaggctgaagcctatcaaggagagtctcgaagctaagtccaacacagtggaatggagtgccttgattgctcaggcaagcatggcgagtgtgaacctatcagcacaggcgtactggactcctgatccatctttcaagagctacttgaactacggagctggcaccagtgaggtggaagttgatatcctaacaggagcaaccacaattctgcgaagcgacctggtgtatgactgcgggcagagcctaaaccctgctgtagacttgggccagatcgagggctgctttgtccaaggaatagggttcttcacgaacgaggactacaagacgaattccgacggcttggtcatccacgacggcacatggacgtacaagatccccacggtggataatatcccgaaggagttcaatgttgagatgtttaacagcgcccctgacaagaagcgtgtcctatcttccaaagcgtcgggcgagccgccgctggttctcgcagcctcggtgcactgcgcgatgagggaggccatcagggcggcgaggaaggagttctcggtcagcaccagccccgcgaaatccgccgtcacattccagatggacgtgccggcgacgatgcccgtcgtcaaggagctctgcggcctcgacgtcgtggagaggtacctcgagaacgtgtctgccgccagtgccggcccaaacacagcgaaagcatag

SEQ ID NO: 116103 - protein, 1352 aa, Zea mays
MGKQAAVVLAVNGKRYEAAGVDPSMTLLEYLRTETPVRGPKLGCGEGGCGACVVLVSKYDPATDEVTEFSASSCLTLLHSVDRCSVTTSEGIGNTKDGYHPVQQRLSGFHASQCGFCTPGMCMSIFSALVKADNKSDRPDPPAGFSKITTSEAEKAVSGNLCRCTGYRPIVDTCKSFASDVDLEDLGLNCFWKKGEEPAEVSRLPGYNSGAVCTFPEFLKSEIKSTMKQVNDVPIAASGDGWYHPKSIEELHRLFDSSWFDDSSVKIVASNTGSGVYKDQDLYDKYIDIKGIPELSVINKNDKAIELGSVVSISKAIEVLSDGNLVFRKIADHLNKVASPFVRNTATIGGNIMMAQRLPFESDVATVLLAAGSTVTVQVASKRLCFTLEEFLEQPPCDSRTLLLSIFIPEWGSDYVTFETFRAAPRPFGNAVSYVNSAFLARTSGSLLIEDICLAFGAYGVDHAIRAKKVEDFLKGKSLSSFVILEAIKLLKDTVSPSEGTTHHEYRVSLAVSFLFSFLSSLANSSSAPSNIDTPNGSYTHETGSNVDSPERHIKVDSNDLPIRSRQEMVFSDEYKPVGKPIKKVGAEIQASGEAVYVDDIPAPKDCLYGAFIYSTHPHAHVRGINFKSSLASQKVITVITAKDIPSGGENIGCSFLMLGEALFADPIAEFAGQNIGVVIAETQRYANMAAKQAVVEYSTENLQPPILTIEDAIQRNSYIQIPPFLAPKPVGDYNKGMAEADHKILSAEVKLESQYYFYMETQVALAIPDEDNCITIYSSTQIPEVTQNLVARCLGIPFHNVRVISRRVGGGFGGKAMKAMHVACACAVAAFKLRRPVRMYLDRKTDMIMAGGRHPMKVKYSVGFKSDGKITALHLDLGINAGISPDVSPLLPRAIIGALKKYNWGTLAFDTKVCKTNVSSKSAMRGPGDVQGSFIAEAIIEHVASALSLDTNTVRRKNLHDFESLEVFYGESAGEASTYSLVSMFDKLALSPEYQHRAAMIEQFNSSNKWKKRGISCVPATYEVNLRPTPGKVSIMNDGSIAVEVGGIEIGQGLWTKVKQMTAFGLGQLCPDGGECLLDKVRVIQADTLSLIQGGMTAGSTTSETSCEAVRQSCVALVERLKPIKESLEAKSNTVEWSALIAQASMASVNLSAQAYWTPDPSFKSYLNYGAGTSEVEVDILTGATTILRSDLVYDCGQSLNPAVDLGQIEGCFVQGIGFFTNEDYKTNSDGLVIHDGTWTYKIPTVDNIPKEFNVEMFNSAPDKKRVLSSKASGEPPLVLAASVHCAMREAIRAARKEFSVSTSPAKSAVTFQMDVPATMPVVKELCGLDVVERYLENVSAASAGPNTAKA

SEQ ID NO: 116104 - DNA, 4050 bp, Zea mays
  CDS (1)..(4050)
atggagatggggaaggcggcggcggtggtgctggcggtgaacggcaagcggtacgaggccgccggcgtggacccgtcgacgacgctgctggagttcctgcgcacccacacgcccgtcagggggcccaagctcggctgcggcgaaggtggctgcggtgcatgcgttgtgcttgtctcgaagtacgacccagccaccgacgaggtgaccgagttctcagcgagctcctgcctgacgctgctccatagcgtggaccgctgctcggtgaccaccagcgagggcattggcaacaccaaggatggctaccaccctgtgcagcagcgcctctccggcttccacgcctcccagtgcggtttctgcacgcccggcatgtgcatgtccatcttctctgcgcttgtcaaagccgacaaggcggccaaccggccagccccaccggccggcttctccaagctcacttcctcggaggctgagaaggctgtctctggcaacctgtgccgctgcacagggtacaggcccatcgtcgacgcctgtaagagcttcgcagccgatgttgatcttgaggacctgggcctcaactgcttctggaagaagggtgatgagcctgcagatgtcagcaagctgccaggctacaacagtggtgacgtctgcactttccctgactttctcaaatctgagatgaagtcctcaattcagcaggctaacagcgctccagttcctgtttctgacgacggctggtaccgtcctaggagcattgacgagcttcacaggttgtttcaatctagctccttcgatgaaaattccgtgaagatagtggcttcaaacactgggtctggagtgtacaaggatcaggacctttatgacaagtacattgacatcaaaggaatcccagagctttcagtcatcaacagaaacgacaaaggaattgagcttggatcagttgtgtccatctctaaagctattgaggtgctgtcagatggaaatctcgtcttcagaaagattgctggtcacctgaacaaagtggcttcaccgtttgttcggaacactgcaaccataggtggaaacatagtcatggcacaaagattgccattcgcatcggacattgcaaccatactactagctgcaggttcaacagtcacaatccaggtggcttccaaaaggctgtgcttcactctggaggagttcttgcagcagcctccatgcgattctaggaccctgctgctgagcatatttatcccggaatggggctcaaatgatgtcacctttgagactttccgagcagcacctcgtccacttggcaatgctgtctcatatgtcaattcagctttcttggcaaggacttcattggatgcagcatcaaaggaccatctcatcgaggatatatgtctggcgttcggtgcttatggagctgatcatgctattagagctagaaaggttgaggattacctgaagggcaaaacagtgagctcgtctgtcatacttgaagctgttcggttgcttaaagggtctattaaaccatcagaaggctcaacacatcctgagtatagaattagcttggctgtcagtttcttgtttaccttcctatcctcccttgccaacagcttgaatgaatctgcaaaggttagtggtaccaacgagcactcaccagagaagcaactcaagttggacatcaatgatttgccaatacgatcaagacaagaaatatttttcactgatgcatataagccagttggcaaagcaattaagaaagctggggtagagatccaagcttcaggggaagctgtgtacgttgatgatatccccgctcccaaagattgcctctatggagcatttatctacagcacccaccctcatgcccatgtaaaggctatcaactttaaatcatctttggcttcgcagaaggtcatcacagttatcaccgcaaaggatattcccagtggtggacaaaatattggttccaccttcccgatgatgggagacgaagcactttttgcagatccagttactgaatttgctggtcagaatattggtgttgtgattgctgaaacacagaagtatgcctacatggctgcaaagcaagccattattgagtatagcacagaaaatctgcagccaccaattctgacaatagaagatgcaattgaacgaagcagcttcttccaaacccccccatttgtagctcctaagccagttggtgattacaacaaagggatggctgaagctgatcaaaagattctatcagcagaggtaaaaattgaatcccaatactatttctacatggagacacaagtggcgctagctattcctgatgaagataactgcataaccatctattcttcgacacaaatacccgaggccacacaaaatgtggttgcaaagtgccttggcattccatttcacaatgtccgcctaatcaccagaagagtcggaggaggctttggtggaaaagcaatgaaagcaatacatgttgcatgtgcatgtgcagttgctgcattcaagctacaacgtccagttcggatgtacctcgatcgcaagacagacatgataatggcaggcgggcggcatcctatgaaggtgaagtactctgttgggttcaagtcaaacggcaagatcacagccttacacattgatcttgggatcaatgctggaatatcaccagatatgagcccaatgatgccaccacctatcataggtgctctcaaaaagtacaactggggcaatcttgcatttgacaccaaggtctgcaaaacaaatgtctcatcaaaatcagcaatgagagctcctggagatgcgcagggctctttcatcgctgaagccatcatcgagcatgttgcctcagcactttcagccgacactaacaccataaggagaaagaaccttcatgactttgagagccttgcagtgttcttcgaagatactgcaggtgaagcttctacatacagcctagtcaccatgttcgataaactggcctcctctccagaataccagcaccgagctgaaatggtggaacaattcaacagaagcaacaagtggaagaagcgtggcatttcttgtgtgccaataacatatgaggtcaagcttcggccaactccaggaaaggtgtctatcatgaatgatggttccatcgctgttgaggtcggaggggttgagataggccaagggttgtggacaaaagtgaagcagatgacggcattcggactaggacagctgtgccctgacggcggcgaaagcctcctagacaaggtccgggtcatccaggccgacacattgagcatgatccaaggaggggtcaccggtgggagcaccacttctgaaactagctgcgaagcagttcgaaagtcgtgtgttgcactcgtcgagagactgaagccaatcaaggagaatctggaagctaaaacaggcacagtggaatggagtgccttgattgcacaggcaagtatggcgagcgtgaacttatcggcacatgcatactggaccccagatccaactttcacaagctatttaaactacggagccggcactagcgaggtggaaattgatgtcctgacaggagcaacaacaattctaaggagtgaccttgtctacgattgcgggcaaagcttgaaccctgctgtcgacttgggccaggtggaaggcgcattcatacaaggagtaggcttcttcacaaacgaggagtacacaacaaactctgacgggttggtcatccacgatggcacatggacgtacaagatccccacggtcgacaccatcccaaagcagttgaacgttgagctgatcaacagcgcccgtgaccagaagcgtgtcctctcttccaaagcatccggcgagcctccgcttcttctagctgcctcggtgcactgcgcaatgagggaggccatcagagccgccaggaaggaattctcggtctgcactggtccagcaaactctgccatcacgttcgagatggacgtgccggcgacgatgcccatcgtcaaggagctctgcggcctggatgttgtggagaggtacctggagagcatgtccactgccggaccaacaaccactgccaaagcatag

SEQ ID NO: 116105 - protein, 1349 aa, Zea mays
MEMGKAAAVVLAVNGKRYEAAGVDPSTTLLEFLRTHTPVRGPKLGCGEGGCGACVVLVSKYDPATDEVTEFSASSCLTLLHSVDRCSVTTSEGIGNTKDGYHPVQQRLSGFHASQCGFCTPGMCMSIFSALVKADKAANRPAPPAGFSKLTSSEAEKAVSGNLCRCTGYRPIVDACKSFAADVDLEDLGLNCFWKKGDEPADVSKLPGYNSGDVCTFPDFLKSEMKSSIQQANSAPVPVSDDGWYRPRSIDELHRLFQSSSFDENSVKIVASNTGSGVYKDQDLYDKYIDIKGIPELSVINRNDKGIELGSVVSISKAIEVLSDGNLVFRKIAGHLNKVASPFVRNTATIGGNIVMAQRLPFASDIATILLAAGSTVTIQVASKRLCFTLEEFLQQPPCDSRTLLLSIFIPEWGSNDVTFETFRAAPRPLGNAVSYVNSAFLARTSLDAASKDHLIEDICLAFGAYGADHAIRARKVEDYLKGKTVSSSVILEAVRLLKGSIKPSEGSTHPEYRISLAVSFLFTFLSSLANSLNESAKVSGTNEHSPEKQLKLDINDLPIRSRQEIFFTDAYKPVGKAIKKAGVEIQASGEAVYVDDIPAPKDCLYGAFIYSTHPHAHVKAINFKSSLASQKVITVITAKDIPSGGQNIGSTFPMMGDEALFADPVTEFAGQNIGVVIAETQKYAYMAAKQAIIEYSTENLQPPILTIEDAIERSSFFQTPPFVAPKPVGDYNKGMAEADQKILSAEVKIESQYYFYMETQVALAIPDEDNCITIYSSTQIPEATQNVVAKCLGIPFHNVRLITRRVGGGFGGKAMKAIHVACACAVAAFKLQRPVRMYLDRKTDMIMAGGRHPMKVKYSVGFKSNGKITALHIDLGINAGISPDMSPMMPPPIIGALKKYNWGNLAFDTKVCKTNVSSKSAMRAPGDAQGSFIAEAIIEHVASALSADTNTIRRKNLHDFESLAVFFEDTAGEASTYSLVTMFDKLASSPEYQHRAEMVEQFNRSNKWKKRGISCVPITYEVKLRPTPGKVSIMNDGSIAVEVGGVEIGQGLWTKVKQMTAFGLGQLCPDGGESLLDKVRVIQADTLSMIQGGVTGGSTTSETSCEAVRKSCVALVERLKPIKENLEAKTGTVEWSALIAQASMASVNLSAHAYWTPDPTFTSYLNYGAGTSEVEIDVLTGATTILRSDLVYDCGQSLNPAVDLGQVEGAFIQGVGFFTNEEYTTNSDGLVIHDGTWTYKIPTVDTIPKQLNVELINSARDQKRVLSSKASGEPPLLLAASVHCAMREAIRAARKEFSVCTGPANSAITFEMDVPATMPIVKELCGLDVVERYLESMSTAGPTTTAKA

SEQ ID NO: 116106 - DNA, 20 bp, Artificial sequence
  primer
atgcgcgtcgatgccattgc

SEQ ID NO: 116107 - DNA, 26 bp, Artificial sequence
  primer
ttaaatcaatcctgccagatggaact

SEQ ID NO: 116108 - protein, 962 aa, Artificial sequence
  consensus sequence
  Variant (2)..(13): Xaa in position 2 to 13 is any amino acid
  Variant (14)..(21): Xaa in position 14 to 21 is any or no amino acid
  Variant (23)..(25): Xaa in position 23 to 25 is any amino acid
  Variant (27)..(28): Xaa in position 27 to 28 is any amino acid
  Variant (30)..(41): Xaa in position 30 to 41 is any amino acid
  Variant (42)..(56): Xaa in position 42 to 56 is any or no amino acid
  Variant (58)..(61): Xaa in position 58 to 61 is any amino acid
  Variant (63)..(66): Xaa in position 63 to 66 is any amino acid
  Variant (67)..(68): Xaa in position 67 to 68 is any or no amino acid
  Variant (70)..(72): Xaa in position 70 to 72 is any amino acid
  Variant (74)..(77): Xaa in position 74 to 77 is any amino acid
  Variant (80)..(99): Xaa in position 80 to 99 is any amino acid
  Variant (100)..(126): Xaa in position 100 to 126 is any or no amino acid
  Variant (128)..(132): Xaa in position 128 to 132 is any amino acid
  Variant (134)..(134): Xaa in position 134 is any amino acid
  Variant (136)..(140): Xaa in position 136 to 140 is any amino acid
  Variant (142)..(143): Xaa in position 142 to 143 is any amino acid
  Variant (145)..(151): Xaa in position 145 to 151 is any amino acid
  Variant (153)..(162): Xaa in position 153 to 162 is any amino acid
  Variant (163)..(166): Xaa in position 163 to 166 is any or no amino acid
  Variant (168)..(209): Xaa in position 168 to 209 is any amino acid
  Variant (210)..(254): Xaa in position 210 to 254 is any or no amino acid
  Variant (256)..(274): Xaa in position 256 to 274 is any amino acid
  Variant (275)..(276): Xaa in position 275 to 276 is any or no amino acid
  Variant (278)..(304): Xaa in position 278 to 304 is any amino acid
  Variant (305)..(305): Xaa in position 305 is any or no amino acid
  Variant (311)..(311): Xaa in position 311 is any amino acid
  Variant (313)..(330): Xaa in position 313 to 330 is any amino acid
  Variant (331)..(332): Xaa in position 331 to 332 is any or no amino acid
  Variant (334)..(338): Xaa in position 334 to 338 is any amino acid
  Variant (340)..(344): Xaa in position 340 to 344 is any amino acid
  Variant (346)..(368): Xaa in position 346 to 368 is any amino acid
  Variant (369)..(369): Xaa in position 369 is any or no amino acid
  Variant (371)..(382): Xaa in position 371 to 382 is any amino acid
  Variant (383)..(383): Xaa in position 383 is any or no amino acid
  Variant (385)..(415): Xaa in position 385 to 415 is any amino acid
  Variant (416)..(422): Xaa in position 416 to 422 is any or no amino acid
  Variant (425)..(429): Xaa in position 425 to 429 is any amino acid
  Variant (430)..(430): Xaa in position 430 is any or no amino acid
  Variant (432)..(432): Xaa in position 432 is any amino acid
  Variant (434)..(435): Xaa in position 434 to 435 is any amino acid
  Variant (437)..(444): Xaa in position 437 to 444 is any amino acid
  Variant (445)..(445): Xaa in position 445 is any or no amino acid
  Variant (447)..(452): Xaa in position 447 to 452 is any amino acid
  Variant (454)..(455): Xaa in position 454 to 455 is any amino acid
  Variant (457)..(458): Xaa in position 457 to 458 is any amino acid
  Variant (460)..(463): Xaa in position 460 to 463 is any amino acid
  Variant (465)..(466): Xaa in position 465 to 466 is any amino acid
  Variant (468)..(507): Xaa in position 468 to 507 is any amino acid
  Variant (508)..(533): Xaa in position 508 to 533 is any or no amino acid
  Variant (535)..(563): Xaa in position 535 to 563 is any amino acid
  Variant (564)..(592): Xaa in position 564 to 592 is any or no amino acid
  Variant (594)..(594): Xaa in position 594 is any amino acid
  Variant (596)..(597): Xaa in position 596 to 597 is any amino acid
  Variant (599)..(601): Xaa in position 599 to 601 is any amino acid
  Variant (603)..(604): Xaa in position 603 to 604 is any amino acid
  Variant (606)..(607): Xaa in position 606 to 607 is any amino acid
  Variant (609)..(618): Xaa in position 609 to 618 is any amino acid
  Variant (619)..(629): Xaa in position 619 to 629 is any or no amino acid
  Variant (631)..(640): Xaa in position 631 to 640 is any amino acid
  Variant (641)..(641): Xaa in position 641 is any or no amino acid
  Variant (643)..(650): Xaa in position 643 to 650 is any amino acid
  Variant (652)..(654): Xaa in position 652 to 654 is any amino acid
  Variant (656)..(701): Xaa in position 656 to 701 is any amino acid
  Variant (702)..(766): Xaa in position 702 to 766 is any or no amino acid
  Variant (768)..(769): Xaa in position 768 to 769 is any amino acid
  Variant (771)..(771): Xaa in position 771 is any amino acid
  Variant (772)..(772): Xaa in position 772 is any or no amino acid
  Variant (775)..(783): Xaa in position 775 to 783 is any amino acid
  Variant (784)..(785): Xaa in position 784 to 785 is any or no amino acid
  Variant (787)..(787): Xaa in position 787 is any amino acid
  Variant (789)..(791): Xaa in position 789 to 791 is any amino acid
  Variant (794)..(797): Xaa in position 794 to 797 is any amino acid
  Variant (800)..(801): Xaa in position 800 to 801 is any amino acid
  Variant (803)..(806): Xaa in position 803 to 806 is any amino acid
  Variant (808)..(808): Xaa in position 808 is any amino acid
  Variant (810)..(813): Xaa in position 810 to 813 is any amino acid
  Variant (815)..(819): Xaa in position 815 to 819 is any amino acid
  Variant (820)..(828): Xaa in position 820 to 828 is any or no amino acid
  Variant (830)..(836): Xaa in position 830 to 836 is any amino acid
  Variant (837)..(838): Xaa in position 837 to 838 is any or no amino acid
  Variant (840)..(841): Xaa in position 840 to 841 is any amino acid
  Variant (843)..(845): Xaa in position 843 to 845 is any amino acid
  Variant (846)..(847): Xaa in position 846 to 847 is any or no amino acid
  Variant (849)..(865): Xaa in position 849 to 865 is any amino acid
  Variant (866)..(879): Xaa in position 866 to 879 is any or no amino acid
  Variant (881)..(882): Xaa in position 881 to 882 is any amino acid
  Variant (885)..(909): Xaa in position 885 to 909 is any amino acid
  Variant (910)..(961): Xaa in position 910 to 961 is any or no amino acid
GXXXXXXXXXXXXXXXXXXXXGXXXYXXDXXXXXXXXXXXXXXXXXXXXXXXXXXXSXXXXAXXXXXXDXXXAXXXXGVXXXXXXXXXXXXXXXXXXXXXXXXXXXXXXXXXXXXXXXXXXXXXXXGXXXXXVXAXXXXXAXXAXXXXXXXYXXXXXXXXXXXXXXAXXXXXXXXXXXXXXXXXXXXXXXXXXXXXXXXXXXXXXXXXXXXXXXXXXXXXXXXXXXXXXXXXXXXXXXXXXXXXXXXXXXXXXXEXXXXXXXXXXXXXXXXXXXXXQXXXXXXXXXXXXXXXXXXXXXXXXXXXXGGGFGXKXXXXXXXXXXXXXXXXXXXXPXXXXXVXXXXXRXXXXXXXXXXXXXXXXXXXXXXXXGXXXXXXXXXXXXXGXXXXXXXXXXXXXXXXXXXXXXXXXXXXXXXXXXXXXXTNXXXXXXAXRXXGXXXXXXXXXEXXXXXXAXXLXXDXXXXRXXNXXXXXXXXXXXXXXXXXXXXXXXXXXXXXXXXXXXXXXXXXXXXXXXXXXXXXXXXXXXXXXXXXXGXXXXXXXXXXXXXXXXXXXXXXXXXXXXXXXXXXXXXXXXXXXXXXXXXXXXXXXXXXGXGXXTXXXQXXAXXLXXXXXXXXXXXXXXXXXXXXXTXXXXXXXXXXXSXXXXXXXXAXXXAXXXXXXXXXXXXXXXXXXXXXXXXXXXXXXXXXXXXXXXXXXXXXXXXXXXXXXXXXXXXXXXXXXXXXXXXXXXXXXXXXXXXXXXXXXXXXXXXXXXXXXXXXXXXXXXVXXDXXTGXXXXXXXXXXXDXGXXXNPXXXXGQXXGXXXXGXGXXXXEXXXXXXXXXXXXXXGXXXXXXXXXYXXPXXXXXPXXXXXXXXXXXXXXXXXXXXXXXXXXXXXXXKXXGEXXXXXXXXXXXXXXXXXXXXXXXXXXXXXXXXXXXXXXXXXXXXXXXXXXXXXXXXXXXXXXXXXXXXXXXXXXXXXP

SEQ ID NO: 116109 - protein, 27 aa, Artificial sequence
  protein pattern
  Variant (2)..(4): Xaa in position 2 to 4 is any amino acid
  Variant (7)..(10): Xaa in position 7 to 10 is any amino acid
  Variant (11)..(11): Xaa in position 11 is Glu, Gly or Ser
  Variant (13)..(14): Xaa in position 13 to 14 is any amino acid
  Variant (16)..(16): Xaa in position 16 is Ala, Cys or Gly
  Variant (17)..(19): Xaa in position 17 to 19 is any amino acid
  Variant (20)..(20): Xaa in position 20 is Ala or Gly
  Variant (21)..(21): Xaa in position 21 is any amino acid
  Variant (22)..(22): Xaa in position 22 is Ala or Gly
  Variant (23)..(26): Xaa in position 23 to 26 is any amino acid
GXXXNPXXXXXQXXGXXXXXXXXXXXE

SEQ ID NO: 116110 - DNA, 879 bp, Escherichia coli
  CDS (1)..(879): transl_table=11
atgagttttgatccgacgggttacaccctcgcccatgagcatctgcatattgatctctccggctttaaaaacaacgtggactgccgccttgatcagtatgcgttcatttgccaggagatgaacgacctgatgacccggggcgtgcgtaatgtgattgagatgaccaaccgttacatggggcgcaatgcgcaatttatgcttgatgtaatgcgcgagacggggatcaacgtggtggcctgtaccggttattaccaggacgcgtttttcccggaacatgtggcgacccgcagcgtgcaggaactggcgcaggagatggtcgatgaaattgaacagggtatcgatggcacggagctgaaagccgggatcatcgcggagatcggcaccagcgaaggaaagattacgccgctggaagagaaggtatttattgccgctgcgctggcgcataaccagaccggacgcccgatctccacgcatacgtcgttcagcacgatggggctggagcaactggcgttgctacaagcccacggggttgatctttcgcgcgtcaccgttggtcactgcgatctgaaagacaacctcgacaacattttgaagatgatcgatctcggcgcgtacgtgcagttcgacaccatcggcaagaacagttactacccggacgaaaagcgtattgcgatgcttcatgcgctacgcgaccgtgggttgctgaaccgcgtcatgctgtcgatggatattacgcgccgctcccatttaaaagccaacggtggttatggctatgactatttactaaccacctttattccgcaattgcgccagtcaggattcagtcaggccgatgtggatgtgatgttacgtgaaaatccctctcaatttttccaataa

SEQ ID NO: 116111 - protein, 292 aa, Escherichia coli
MSFDPTGYTLAHEHLHIDLSGFKNNVDCRLDQYAFICQEMNDLMTRGVRNVIEMTNRYMGRNAQFMLDVMRETGINVVACTGYYQDAFFPEHVATRSVQELAQEMVDEIEQGIDGTELKAGIIAEIGTSEGKITPLEEKVFIAAALAHNQTGRPISTHTSFSTMGLEQLALLQAHGVDLSRVTVGHCDLKDNLDNILKMIDLGAYVQFDTIGKNSYYPDEKRIAMLHALRDRGLLNRVMLSMDITRRSHLKANGGYGYDYLLTTFIPQLRQSGFSQADVDVMLRENPSQFFQ

SEQ ID NO: 116112 - DNA, 972 bp, Deinococcus radiodurans R1
  CDS (1)..(972): transl_table=11
atgacggcacagacggtgacgggcgcagtcgcggcggctcaactcggagcgacgctgccccacgaacacgtgattttcggctaccccggctacgcgggcgacgtgacgctcgggccattcgaccacgcggcagcgctcgcaagctgcaccgaaacggcgcgggcgctgctggcgcgcggtattcagacggtggtggacgccacccccaacgactgcggacgcaacccggccttcctgcgcgaggtgagcgaggcaaccggcctccagattctgtgcgcgaccggcttttattacgagggcgagggcgccacgacctacttcaagttccgcgcttctctgggtgacgccgaaagcgaaatctacgagatgatgcggaccgaggtgaccgagggcatcgccggcaccggcatccgcgccggggtcatcaagctggcgagcagccgcgacgccatcaccccctacgagcaactgtttttccgggcggcggcgcgggtgcagcgcgaaaccggcgtgccgatcatcacccacactcaggaaggccagcagggaccgcagcaagccgagctgctgacctcgctcggcgcggacccggcgcgcatcatgatcgggcacatggacggcaacaccgacccggcctaccaccgcgagacgctgcgccacggcgtgagcatcgcctttgaccgcatcggcttgcagggcatggtgggcacccccaccgacgccgagcggctaagcgtgctgaccacgctgctcggcgagggctacgccgaccggctgctgctctcgcacgacagcatctggcactggctgggacgcccgccggccatccccgaagccgccttgcccgccgtcaaggactggcaccctctccacatctccgacgacatcttgcctgatctgcggcgccggggcatcaccgaggagcaggtggggcagatgacggtgggcaacccggcccggctgttcgggtaa

SEQ ID NO: 116113 - protein, 323 aa, Deinococcus radiodurans R1
MTAQTVTGAVAAAQLGATLPHEHVIFGYPGYAGDVTLGPFDHAAALASCTETARALLARGIQTVVDATPNDCGRNPAFLREVSEATGLQILCATGFYYEGEGATTYFKFRASLGDAESEIYEMMRTEVTEGIAGTGIRAGVIKLASSRDAITPYEQLFFRAAARVQRETGVPIITHTQEGQQGPQQAELLTSLGADPARIMIGHMDGNTDPAYHRETLRHGVSIAFDRIGLQGMVGTPTDAERLSVLTTLLGEGYADRLLLSHDSIWHWLGRPPAIPEAALPAVKDWHPLHISDDILPDLRRRGITEEQVGQMTVGNPARLFG

SEQ ID NO: 116114 - DNA, 1038 bp, Mycobacterium tuberculosis CDC1551
  CDS (1)..(1038): transl_table=11
gtgacgctactgcactgcggccccgcaagacaccgattgcggcctagcatcagtgacgtgccagaactaaataccgctcgcggacccatcgacaccgctgatctcggcgtcacgctgatgcacgagcacgtcttcatcatgaccaccgagattgcgcagaactacccggaagcctggggcgacgaggacaagcgggtggccggcgccatcgcccggctaggcgaactcaaggcccgcggcgtggacaccatcgtcgacctcacggtgatcgggctgggccgatacatcccgcgcatcgcccgggtggccgcggccaccgagctgaacatcgtcgtggccaccggcttgtacacctacaacgacgtcccgttctacttccactacctcgggccgggcgcacagctggacggcccggagatcatgaccgacatgttcgtccgcgacatcgagcacggcatcgccgacaccggcatcaaggcgggaatcctcaagtgcgccaccgacgaacccggcctcacccctggtgtcgagcgggtgttgcgcgcggtcgcccaagcacacaaacgcaccggggcgccgatctccacccacacccacgccgggctgcggcgcggccttgaccagcaacgcatcttcgccgaggagggggtggacctgagccgggtggttatcggacactgcggcgacagcaccgacgtcggctacctggaagagctcatcgccgccggctcctacctcgggatggaccggttcggcgtcgacgtgatctcaccgtttcaggaccgggtgaacatcgtggcccgaatgtgcgagcgcggccatgccgacaagatggtgctatcacacgacgcctgctgctatttcgacgcgcttcccgaggagctggtgccggtggcgatgccgaattggcattacctccacatccacaacgacgtcatccccgcactgaagcagcacggcgtcaccgacgagcagctgcacaccatgctcgtcgacaacccgcgccgcatcttcgagcggcagggcggctatcagtga

SEQ ID NO: 116115 - protein, 345 aa, Mycobacterium tuberculosis CDC1551
MTLLHCGPARHRLRPSISDVPELNTARGPIDTADLGVTLMHEHVFIMTTEIAQNYPEAWGDEDKRVAGAIARLGELKARGVDTIVDLTVIGLGRYIPRIARVAAATELNIVVATGLYTYNDVPFYFHYLGPGAQLDGPEIMTDMFVRDIEHGIADTGIKAGILKCATDEPGLTPGVERVLRAVAQAHKRTGAPISTHTHAGLRRGLDQQRIFAEEGVDLSRVVIGHCGDSTDVGYLEELIAAGSYLGMDRFGVDVISPFQDRVNIVARMCERGHADKMVLSHDACCYFDALPEELVPVAMPNWHYLHIHNDVIPALKQHGVTDEQLHTMLVDNPRRIFERQGGYQ

SEQ ID NO: 116116 - DNA, 945 bp, Sulfolobus solfataricus P2
  CDS (1)..(945): transl_table=11
atgagaataccattagttgggaaagattcaatagaatctaaggacataggatttacgctaattcatgaacatttaagagtttttagcgaagcggtcagacaacaatggccccatctatataacgaagatgaggagttcagaaacgctgtaaatgaggttaaaagggcaatgcaatttggagtaaagactatagtagatcccactgtaatgggattgggtagggacatcagatttatggaaaaagtggttaaggctaccgggataaatttagttgcggggacggggatttacatatatatcgacttacctttctatttcttaaataggtcaattgatgagatagctgacttgtttattcatgatataaaagagggaatacaaggtactctcaataaagctggcttcgtaaagatagctgcagatgaacctgggatcacaaaggatgtggagaaggtaataagggctgctgccatagcaaacaaagagactaaagtaccaataattacccactctaacgctcacaataacaccggattagaacagcaaagaatattgactgaagaaggtgttgatccagggaaaatattaataggtcatttaggtgatacagataatatagattacataaagaagatagcagataagggatcctttattggattagatagatatggtttagatttattcctacctgttgataagagaaatgaaacgaccttaagactaatcaaagatggttattcagataagataatgatctctcacgattattgttgcacaatcgactggggaactgcaaaaccagaatataaacctaagcttgctccaagatggagtataactctaatatttgaggatacgataccgttcttaaagagaaatggagtgaatgaagaggttatagctacaatatttaaggaaaatccgaaaaagttcttcagctaa

SEQ ID NO: 116117 - protein, 314 aa, Sulfolobus solfataricus P2
MRIPLVGKDSIESKDIGFTLIHEHLRVFSEAVRQQWPHLYNEDEEFRNAVNEVKRAMQFGVKTIVDPTVMGLGRDIRFMEKVVKATGINLVAGTGIYIYIDLPFYFLNRSIDEIADLFIHDIKEGIQGTLNKAGFVKIAADEPGITKDVEKVIRAAAIANKETKVPIITHSNAHNNTGLEQQRILTEEGVDPGKILIGHLGDTDNIDYIKKIADKGSFIGLDRYGLDLFLPVDKRNETTLRLIKDGYSDKIMISHDYCCTIDWGTAKPEYKPKLAPRWSITLIFEDTIPFLKRNGVNEEVIATIFKENPKKFFS

SEQ ID NO: 116118 - DNA, 1068 bp, Agrobacterium tumefaciens str. C58
  CDS (1)..(1068): transl_table=11
atgaccacggaactgtctgaaggacatatccggtcgggaaagatcatgaccgtgcgtggcccgatcgctacggatcaactcggcgtcacgctgatgcacgagcacatcctcaacgattgccgttgctggtggaacgcccccaagacagcggagaggcaatatcttgccgaaggtttcgtctgcatggaaatcatcggcgagctacgccaggatcccttcgtcaacaagcacaatatcacgctggatgacgaaccgctggcgattgcggaactgaaggatttcgtcgctgccggtggacagacggttgtggagccgacctgccagggtatcggcagaaatccgctggcgatgcgacggatttcacaagcgaccgggctcaacatcgtcatgggagcgggttattaccttgcgtcctcccaccccgaaaaggtggccgggctgacggtcgatgccatcgccgacgagatcgtgcaggaggcgcgacacggcgtcgatggcaccgatgtccgcatcggtctgataggcgaaattggggtatcggcggatttcacggctgcggaggaaaagtcccttcgcggggctgcgcaggcgcatgtgcgcaccggcctgcccctgatggttcatctgccgggatggcttcggctgggacaccgggttctcgacgtcgtcgcggaggaaggtgcggatctgaaccataccgttctttgccacatgaacccgtcccatgccgacattgcctaccagagcgaacttgcaggccgcggcgcctttatcgaatatgacatgatcggcatggattttttctatgccgaccagcaggtgcagtgccccagcgacgaggacgctgcccgttctatcgtcacgctggtggaaggcggttacctcgaccgcattctgctttcccacgacgtcttcctgaaaatgatgctgacgcgatatggcggcaatggctacgcctatattctcaagcacttcctgccgcgcctgaaacggcatgggctcgacgacgtcactcttcaaacccttatgcgggataatccgcgctcggtcttccaggcgaagacctga

SEQ ID NO: 116119 - protein, 355 aa, Agrobacterium tumefaciens str. C58
MTTELSEGHIRSGKIMTVRGPIATDQLGVTLMHEHILNDCRCWWNAPKTAERQYLAEGFVCMEIIGELRQDPFVNKHNITLDDEPLAIAELKDFVAAGGQTVVEPTCQGIGRNPLAMRRISQATGLNIVMGAGYYLASSHPEKVAGLTVDAIADEIVQEARHGVDGTDVRIGLIGEIGVSADFTAAEEKSLRGAAQAHVRTGLPLMVHLPGWLRLGHRVLDVVAEEGADLNHTVLCHMNPSHADIAYQSELAGRGAFIEYDMIGMDFFYADQQVQCPSDEDAARSIVTLVEGGYLDRILLSHDVFLKMMLTRYGGNGYAYILKHFLPRLKRHGLDDVTLQTLMRDNPRSVFQAKT

SEQ ID NO: 116120 - DNA, 1035 bp, Salmonella typhimurium LT2
  CDS (1)..(1035): transl_table=11
atgaaaggtttcctgcaaaccgtaacaggcccggtggcgcatacggatatggggctgacgctaccgcatgaacatctgtttaacgatctgtcttcggtcgtagacgagccacattatgctttttcacagcaactggtgggaaagaaagtcagtgctgacctgcagtggggactgaaacacgacccatactgctgcgccgataacatggaccgcaaagagattgatgatgttatcttcgaaatcaataactttatgtctttgggcggcaggacgattgtcgacgccaccggatcagaatccattggacgggacgcctcagcgctgcgagaagttgccttaaaaacgggtttgaatatcgttgcgtcatccggaccttatctggagaaatttgaaagtacccggatccataaacctgttgagctgttagcctcactcattgataaagaactgaatcagggtattggcgagacggatattcgcgctggcatgatcggtgaaatcggcgtatcccccgcgtttacccaagcggagcgtaacagcctgcgggcagcgtctctggcacaatgtaacaacccccacacggcaatgaatatccatatgccggggtggctgcggctgggggatgaggtgctggatatcgtgctggaagaaatgaacgtctctccggcaaaagtctcgctggcgcattcggacccttcaggaaaagatgtcgtctatcaacgtaaaatgctcgaccgtggcgtatggcttgaatttgacatgattggtctggacatcaccttcccaaaagaaggtgtcgcgccgggcgttcaggagaccgcagatgcagtagcgaatctgattgcactgggttacgccgaccaaatcgttttaagccatgatgtttttctcaaacagatgtgggcgaaaaatggcggaaatggctgggggtttgtcccgaatgtcttcctcgcctatctggctgctcgcggagtagacaacgatactctgcgcaagctttgtattgataatccagcccgattactcacggcataa

SEQ ID NO: 116121 - protein, 344 aa, Salmonella typhimurium LT2
MKGFLQTVTGPVAHTDMGLTLPHEHLFNDLSSVVDEPHYAFSQQLVGKKVSADLQWGLKHDPYCCADNMDRKEIDDVIFEINNFMSLGGRTIVDATGSESIGRDASALREVALKTGLNIVASSGPYLEKFESTRIHKPVELLASLIDKELNQGIGETDIRAGMIGEIGVSPAFTQAERNSLRAASLAQCNNPHTAMNIHMPGWLRLGDEVLDIVLEEMNVSPAKVSLAHSDPSGKDVVYQRKMLDRGVWLEFDMIGLDITFPKEGVAPGVQETADAVANLIALGYADQIVLSHDVFLKQMWAKNGGNGWGFVPNVFLAYLAARGVDNDTLRKLCIDNPARLLTA

SEQ ID NO: 116122 - DNA, 993 bp, Listeria monocytogenes EGD-e
  CDS (1)..(993): transl_table=11
atgagttttattcgtactttttatggagatatcgcaccggatcagttgggcttcacttattcacacgagcacattgtttgtgtgccggcttactggcaagagcgaaatgccgatgatttacttttagatgataaagaaaaatcacaacttgatgtacaagatttcgcggacttaggcggaaaaacaattgtcgatgcgacggcggttgattacggtagacgcgtgctagatgtagcgcaaatttccaaagaaacaggtattcaaatcgttggaacagccggttttaacaaaagcttcttgtgggatgggaaaattaagcctgaactgaagccaatcatcggggattttgaaacctattatgaatggattgaaaatacttcaacggaaaaactaacggaattcgttgtaaatgaagtcgaaaatggacttgaaggaacgccgtataaggctggtcaggtgaaatttggcactggttataatatgattacacctttagaagaaaagacgatacgcgcggttgctagagcacatcacgagacaaaagcaccaattcattctcacacagaagcgggaacgatggctttagagcaaatcgagattttaaaacaagaaaatatcccgttagaatatttatctattgggcatatggatcgtaacctagatccgtattatcacaaacaagttgcaaaaacaggcgcattcatgtcattcgatggcattgccaaaattaaatacgcgccagaaagtgcccgaattgctgcgattctatatctagtctcagaaggatttgaagatcagattttagttagtggtgatacagcacggaaaacatattataaacattacggtcacgggcctggccttgaatacatcgccaaaaaatgggtgccacgctttattgatgaagcaaacgaaaaaggctttgacggagaaaaattagttaaaaaattcttcgtggataacccagcaagatgttttacatttaaaaaatag

SEQ ID NO: 116123 - protein, 330 aa, Listeria monocytogenes EGD-e
MSFIRTFYGDIAPDQLGFTYSHEHIVCVPAYWQERNADDLLLDDKEKSQLDVQDFADLGGKTIVDATAVDYGRRVLDVAQISKETGIQIVGTAGFNKSFLWDGKIKPELKPIIGDFETYYEWIENTSTEKLTEFVVNEVENGLEGTPYKAGQVKFGTGYNMITPLEEKTIRAVARAHHETKAPIHSHTEAGTMALEQIEILKQENIPLEYLSIGHMDRNLDPYYHKQVAKTGAFMSFDGIAKIKYAPESARIAAILYLVSEGFEDQILVSGDTARKTYYKHYGHGPGLEYIAKKWVPRFIDEANEKGFDGEKLVKKFFVDNPARCFTFKK

SEQ ID NO: 116124 - DNA, 993 bp, Listeria innocua Clip11262
  CDS (1)..(993): transl_table=11
atgagttttattcgtactttttatggagatattgcccctgaacaactgggatttacttattctcacgagcacatcgtttgtgtaccggcttactggcaagagcgagatgccgacgatttacttttggatgataaagaaaaatcacaacttgatgtacaagatttcgcggatttaggcggaaaaacaattgtcgatgcaaccgcggttgattatggcagacgcgtcttagatgtggcacaaatttccaaagaaacaggcattcaaatcgtcggaacagctggctttaacaaaagttttttatgggacggaaaaattaaaccagaactgaagccgatcataggcgattttgaaacatattatgaatggattgaaaacacttctatagacaaactaacggaattcgttgtaaatgaagtcgaaaatgggcttgaaggaacgccgtataaggccggtcaggtgaaatttggaactggctacaatatgattacacctttagaagaaaagacgatacgcgcggttgcaagagcacatcacgagacaaaagcaccaatacattctcacacagaagcgggaacgatggctttagagcaaattgagattttaaaacaagaaaatatcccgttagaatatctctctattgggcatatggatcgcaacctagacccgtattatcacaagcaagttgccaaaacaggcgcattcatgtcgtttgatggcatcgcaaaaatcaaatatgcaccagaaagcgctcggattgcagcgattctatatctagtttcggaaggctttgaagatcaaattttagtcagtggtgatacagcgcgcaaaacttattataaacattacggccacggaccaggacttgaatatattgccaaaaaatgggtgccacgctttattgacgaagctaacgaaaaaggctttgacggagaaaaattagttaaaaaattcttcgtggataacccggcaagatgttttacttttaaaaaatag

SEQ ID NO: 116125 - protein, 330 aa, Listeria innocua Clip11262
MSFIRTFYGDIAPEQLGFTYSHEHIVCVPAYWQERDADDLLLDDKEKSQLDVQDFADLGGKTIVDATAVDYGRRVLDVAQISKETGIQIVGTAGFNKSFLWDGKIKPELKPIIGDFETYYEWIENTSIDKLTEFVVNEVENGLEGTPYKAGQVKFGTGYNMITPLEEKTIRAVARAHHETKAPIHSHTEAGTMALEQIEILKQENIPLEYLSIGHMDRNLDPYYHKQVAKTGAFMSFDGIAKIKYAPESARIAAILYLVSEGFEDQILVSGDTARKTYYKHYGHGPGLEYIAKKWVPRFIDEANEKGFDGEKLVKKFFVDNPARCFTFKK

SEQ ID NO: 116126 - DNA, 879 bp, Escherichia coli CFT073
  CDS (1)..(879): transl_table=11
atgagttttgatccgacgggttacaccctggcccatgagcatctgcatattgatctctccggctttaaaaacaacgtggactgccgccttgatcagtatgcgttcatttgccaggagatgaacgacctgatggcccggggcgtgcgtaatgtgattgagatgaccaaccgttacatggggcgcaatgcgcaatttatgctcgatgtaatgcgcgaaaccgggatcaacgtggtggcctgtaccggttattaccaggacgcgtttttcccggaacatgtggcgacccgcagcgtgcaggaactggcgcaggagatggtcgatgaaattgagcagggtatcgatggcactgacctgaaagccggaattatcgcggagatcggctccagcgaagggaagattacgtcgctggaagagaaggtgtttattgccgccgcgctggcacataaccagaccggacgcccgatctccacgcatacgtcgttcagcacgatggggctggagcaactggctctgttgcaagcccacggagttgatctttcgcgcgtcaccgtcggccactgcgatctgaaagacaatctcgacaacattttgaagatgatcgatctcggcgcgtatgtgcagttcgacaccatcggcaagaacagttactacccggacgaaaagcgcattgcgatgctccatgcgctacgtgaccgtgggttgctgaaccgcgtcatgctgtcgatggatattacgcggcgctctcatttaaaagccaacggtggttatggctatgactttttattgaccacttttattccgcaattgcgccagtcaggattcagtcaggccgatgtggatgtgatgttacgtgaaaatccctctcaatttttccaataa

SEQ ID NO: 116127 - protein, 292 aa, Escherichia coli CFT073
MSFDPTGYTLAHEHLHIDLSGFKNNVDCRLDQYAFICQEMNDLMARGVRNVIEMTNRYMGRNAQFMLDVMRETGINVVACTGYYQDAFFPEHVATRSVQELAQEMVDEIEQGIDGTDLKAGIIAEIGSSEGKITSLEEKVFIAAALAHNQTGRPISTHTSFSTMGLEQLALLQAHGVDLSRVTVGHCDLKDNLDNILKMIDLGAYVQFDTIGKNSYYPDEKRIAMLHALRDRGLLNRVMLSMDITRRSHLKANGGYGYDFLLTTFIPQLRQSGFSQADVDVMLRENPSQFFQ

SEQ ID NO: 116128 - DNA, 981 bp, Tropheryma whipplei TW08/27
  CDS (1)..(981): transl_table=11
ttgggatttgtaaggacgataaagggtgacgtttcgcccgatttacttgggtgtgttaattgccacgatcatttgattcgtaccggcgccggtgaggtgtatttagacaaggatcatttgctggacagtgtcgacaaggcagttgaagaggcgagttatttcgttcaggctagtaagcgttggtctcagacggcaacaattattgatatgtgtcccgccgattgtgggcgtgatgtcctaaaacttgtcgaggtaaacaatcggattccgggacttcatatagttgtagcaacaggcttccaccgcgaacacgtttatctagaaacaaaatgccactgggtgagtcgctattctgtgaaccagatagctgatcttcttatagctgatattgaagagggagtggatgcccatgactattctggaccaattgtagaaagaaccccttataaggctggggttataaagtttgcttctgcttatggccagattactgaatgggagaaaaagacccaggaagctgtggcgatagctgcgaaggttaccggtgcaccgatcaacacacatacaacttttggcacagccggtcttgaacaggcaaagcggtttattgaattgggtgttgatccagatcaggttgctataggccatatacagcgaaatgctgatgtgtactatctagcacagatactaaaacttggcgtttatctcgagcttgatgggacgtataggatcaaatatctccctgatagtgcacgggtaacgcttgtgcgtgaacttggcaagcagggttttggcaagcgactcttgctcggtaccgattctggaaagcggagttatcaaaaggcttacggtgcggtgagtggcattgattacgatccttcagtattcgcccctcgactgctggatgaaggttttgatcctgattatgttgatgatctgcttatgtacaatgcacaaactttctttcaggtcaggcggtaa

SEQ ID NO: 116129 - protein, 326 aa, Tropheryma whipplei TW08/27
MGFVRTIKGDVSPDLLGCVNCHDHLIRTGAGEVYLDKDHLLDSVDKAVEEASYFVQASKRWSQTATIIDMCPADCGRDVLKLVEVNNRIPGLHIVVATGFHREHVYLETKCHWVSRYSVNQIADLLIADIEEGVDAHDYSGPIVERTPYKAGVIKFASAYGQITEWEKKTQEAVAIAAKVTGAPINTHTTFGTAGLEQAKRFIELGVDPDQVAIGHIQRNADVYYLAQILKLGVYLELDGTYRIKYLPDSARVTLVRELGKQGFGKRLLLGTDSGKRSYQKAYGAVSGIDYDPSVFAPRLLDEGFDPDYVDDLLMYNAQTFFQVRR

SEQ ID NO: 116130 - DNA, 981 bp, Mycobacterium bovis AF2122/97
  CDS (1)..(981): transl_table=11
gtgccagaactaaataccgctcgcggacccatcgacaccgctgatctcggcgtcacgctgatgcacgagcacgtcttcatcatgaccaccgagattgcgcagaactacccggaagcctggggcgacgaggacaagcgggtggccggcgccatcgcccggctaggcgaactcaaggcccgcggcgtggacaccatcgtcgacctcacggtgatcgggctgggccgatacatcccgcgcatcgcccgggtggccgcggccaccgagctgaacatcgtcgtggccaccggcttgtacacctacaacgacgtcccgttctacttccactacctcgggccgggcgcacagctggacggcccggagatcatgaccgacatgttcgtccgcgacatcgagcacggcatcgccgacaccggcatcaaggcgggaatcctcaagtgcgccaccgacgaacccggcctcacccctggtgtcgagcgggtgttgcgcgcggtcgcccaagcacacaaacgcaccggggcgccgatctccacccacacccacgccgggctgcggcgcggccttgaccagcaacgcatcttcgccgaggagggggtggaactgagccgggtggttatcggacactgcggcgacagcaccgacgtcggctacctggaagagctcatcgccgccggctcctacctcgggatggaccggttcggcgtcgacgtgatctcaccgtttcaggaccgggtgaacatcgtggcccgaatgtgcgagcgcggccatgccgacaagatggtgctatcacacgacgcctgctgctatttcgacgcgcttcccgaggagctggtgccggtggcgatgccgaattggcattacctccacatccacaacgacgtcatccccgcactgaagcagcacggcgtcaccgacgagcagctgcacaccatgctcgtcgacaacccgcgccgcatcttcgagcggcagggcggctatcagtga

SEQ ID NO: 116131 - protein, 326 aa, Mycobacterium bovis AF2122/97
MPELNTARGPIDTADLGVTLMHEHVFIMTTEIAQNYPEAWGDEDKRVAGAIARLGELKARGVDTIVDLTVIGLGRYIPRIARVAAATELNIVVATGLYTYNDVPFYFHYLGPGAQLDGPEIMTDMFVRDIEHGIADTGIKAGILKCATDEPGLTPGVERVLRAVAQAHKRTGAPISTHTHAGLRRGLDQQRIFAEEGVELSRVVIGHCGDSTDVGYLEELIAAGSYLGMDRFGVDVISPFQDRVNIVARMCERGHADKMVLSHDACCYFDALPEELVPVAMPNWHYLHIHNDVIPALKQHGVTDEQLHTMLVDNPRRIFERQGGYQ

SEQ ID NO: 116132 - DNA, 891 bp, Photorhabdus luminescens subsp. laumondii TTO1
  CDS (1)..(891): transl_table=11
atgacccagaaaaacagaattgacgcgtccggctatacctatgtacatgagcacctgcatctcgatttatcatcatttaaaaacaacattgactgccgactggatcaatacgagctgatttgtgaagagatgaaaacactggtcagcttgggtgtacacaatattgtggagatgaccaatcgttacatgggacgtaacccacagtttatgctggatctgatgcgggactccggcattaatgtaatagtttcaactggctattaccaatctgccttttttcctgaacatgtagcacataccacagctcgacaactggcggatgaaatgatcgctgagattgagcagggtatcgacgatacaacgctgaaagccggagtgatcggggaaattggttccagtaaaggggtaattacgccggatgaagagaaagtctttcatgctgcggctatagctcatctggcaaccgggcatcctatttcgacgcatacgacattaagcacgatgggccttgaacaactggcgttactgaaaaagcacggtgtagatgctgaacgtgtagttattggtcactgtgatcttaaagataatctggacaacattttgcgcatcattgaactgggggcctatatccagttcgacacgattggcaaaaacgattactacccggatgaaaagcggatcgctatgttacagaccttggcccaacgtggcttgcttaaccgcgtcatgttatcgatggatattacccgtcgttctcatttaaaagccaatggcggcaatggatttgattatttaatcaccacctttgtgccgatgctaaaccgggctggattaacgcaaaccgatattgatttgatgttacgtgataacccaatgctatttttcaactaa

SEQ ID NO: 116133 - protein, 296 aa, Photorhabdus luminescens subsp. laumondii TTO1
MTQKNRIDASGYTYVHEHLHLDLSSFKNNIDCRLDQYELICEEMKTLVSLGVHNIVEMTNRYMGRNPQFMLDLMRDSGINVIVSTGYYQSAFFPEHVAHTTARQLADEMIAEIEQGIDDTTLKAGVIGEIGSSKGVITPDEEKVFHAAAIAHLATGHPISTHTTLSTMGLEQLALLKKHGVDAERVVIGHCDLKDNLDNILRIIELGAYIQFDTIGKNDYYPDEKRIAMLQTLAQRGLLNRVMLSMDITRRSHLKANGGNGFDYLITTFVPMLNRAGLTQTDIDLMLRDNPMLFFN

SEQ ID NO: 116134 - DNA, 981 bp, Mycobacterium avium subsp. paratuberculosis K-10
  CDS (1)..(981): transl_table=11
gtgtcagaactcaataccgctcgcgggcccatcgacaccgctgcgctgggtgtcaccctgatgcacgaacacgtgttcatcatgaccaccgagatcgcgcagaactaccccgaagcgtggggcgacgaagagcagcgggtggccgacgccatcgaccggctcaacgagctcaaggcgcgcggcgtggacaccatcgtcgacctcaccgtcatcggcctgggccgctacattccgcgcatcgcccgggtcgcggcggcgaccgagctgaatatcgttgtggcaactgggctttacacctacaatgatgtgcccttctgtttccactacctgggccccggcgcggagctgggcggcccggagatcatgaccgacatgttcgtccgcgacatcgagcagggcatcgccgacaccggcatcaaggccggcatcctcaagtgcgccaccgacgcacccggcgtcaccccgggcgtcgagcgggtgctgcgggcggtggcgcaggcgcacaagcgcaccggggtgccgatctccacgcacacccacgccgggctgcgccgcggcctcgaccagcagcggatcttcgaggaggagggcgtcgacctgagccgggtggtgatcgggcattccggcgacagcaccgacgtcggctacctcgaagagctcatcgccgccggctcgtatctgggcatggaccggttcggcatcgacgcgatctcgccgttcgaggaccgggtgaacatcgtcgcgcagatgtgcgagcgcggccacgccgacaagatggtgctctcgcacgacgccaactgttatttcgacgcacttcccgaggagttggtgccccaggtcatgccgaactggcattacctgcacatccacaacgacgtgatccccgccctcaagcagcgcggcgtcaccgacgagcagctgcacaccatgctcgtcgacaacccgcggcgcatcttcgagcgccagggcccctatgggtga

SEQ ID NO: 116135 - protein, 326 aa, Mycobacterium avium subsp. paratuberculosis K-10
MSELNTARGPIDTAALGVTLMHEHVFIMTTEIAQNYPEAWGDEEQRVADAIDRLNELKARGVDTIVDLTVIGLGRYIPRIARVAAATELNIVVATGLYTYNDVPFCFHYLGPGAELGGPEIMTDMFVRDIEQGIADTGIKAGILKCATDAPGVTPGVERVLRAVAQAHKRTGVPISTHTHAGLRRGLDQQRIFEEEGVDLSRVVIGHSGDSTDVGYLEELIAAGSYLGMDRFGIDAISPFEDRVNIVAQMCERGHADKMVLSHDANCYFDALPEELVPQVMPNWHYLHIHNDVIPALKQRGVTDEQLHTMLVDNPRRIFERQGPYG

SEQ ID NO: 116136 - DNA, 1056 bp, Apis mellifera
  CDS (1)..(1056)
atggagcatgcaactgattatgtagaaactgtttttggaaagaaaaatgcaaatcaacttggaagaattcttacgcacgaacatttatccatgtccttcattgagttctacgttcaacctccatctcatttgaaacaatttttcgatgataagaagatcgaacttcaaactgttggaattctaaaacaatatccttatagtagttcttataatttaatatataacgatcaatatacggaagatgctgttttggaggatgtaaaattatataaaaaatttggtggtggtactattgtggaaaatagtaattatggcttaaaacgcaacattccattcatgaaaaaagttagtgaagccactggaattaatgtcattgctgggaccggttattatgttagtgcgactcaaactaatgaaaatttatcaaaagaagaaatgtatgatgtaattttaaaagaaatgactattggttgtgaagaatctcctgatgtaaaggcgggatttattggagaagttggaagcacttggccaatcacggctttcgaaaaacgggctattcaagcaactgcggaagttcaacagcaattaaaatgtcccgtcagtttccatcctggaagagattctgcagcaccttctgagataatgagaatctatcaagaagctggtggaaacgcgagaaaagctattctctctcatctcgaccgaactatactcggtctagaagaacttttggagttttctgatgatgtgaaatgttactgccaattcgatctgtttggaaccgaatgttctttttatcaattaaatccatcaattgatatgatgtctgacgcacaacggattgaacgtgttaaatattttcgagataataaaaaattggatcgcgtgcttttaagtcatgacattcatacgaagcacaaattgataaaatttggtggacatggattttctcatattttaaataatgttgtaccaaaaatgatgctgaaaggttttattcttgaagaaatcgacatgttaactattcataatccaaaaacttggttgacatcttaa

SEQ ID NO: 116137 - protein, 351 aa, Apis mellifera
MEHATDYVETVFGKKNANQLGRILTHEHLSMSFIEFYVQPPSHLKQFFDDKKIELQTVGILKQYPYSSSYNLIYNDQYTEDAVLEDVKLYKKFGGGTIVENSNYGLKRNIPFMKKVSEATGINVIAGTGYYVSATQTNENLSKEEMYDVILKEMTIGCEESPDVKAGFIGEVGSTWPITAFEKRAIQATAEVQQQLKCPVSFHPGRDSAAPSEIMRIYQEAGGNARKAILSHLDRTILGLEELLEFSDDVKCYCQFDLFGTECSFYQLNPSIDMMSDAQRIERVKYFRDNKKLDRVLLSHDIHTKHKLIKFGGHGFSHILNNVVPKMMLKGFILEEIDMLTIHNPKTWLTS

SEQ ID NO: 116138 - DNA, 993 bp, Listeria monocytogenes str. 4b F2365
  CDS (1)..(993): transl_table=11
atgagttttattcgtactttttatggagatattgcccctgaacaactgggcttcacttattcacacgagcacatcgtttgtgtaccagcttactggcaagagcgagatgccgatgatttacttttggatgataaagaaaaatcacaacttgatgtacaagatttcgccgatttaggaggcaaaacaattgtcgatgcaaccgcggttgattacggcagacgcgtcttagatgtggcgcaaatttccaaagaaacaggcatccaaatcgttggaacagctggctttaacaaaagtttcttatgggacgggaagattaaaccagaactgaaaccaatcatcggggattttgaaacctactatgaatggattgaaaatactactacagacaaactaacggaattcgttgtaaatgaagtcgaaaatgggcttgaaggaacgccgtataaggctggtcaggtgaaatttggcactggctacaatatgattacacctttagaagaaaagacaatacgtgcggttgcaagagcacatcacgagacaaaagcaccaattcattctcacacagaagcgggaacgatggctttagaacaaatcgagattttaaaacaagaaaatatcccgttagaatacctttctattggtcatatggaccgcaacctagatccgtattatcacaagcaagttgccaaaacaggcgcattcatgtcatttgatggcatcgcaaaaatcaaatacgcaccagaaagcgctcggattgcagcgattctatatctagtttcggaaggctttgaagatcaaattttagttagtggtgatacagcacgcaaaacttattataaacattatggtcacggaccaggacttgaatatatcgccaaaaaatgggtgccacgctttattgatgaagcaaacgaaaaaggctttgacggagaaaaattagttaaaaaattcttcgtggataacccagcaagatgttttacttttaaaaaatag

SEQ ID NO: 116139 - protein, 330 aa, Listeria monocytogenes str. 4b F2365
MSFIRTFYGDIAPEQLGFTYSHEHIVCVPAYWQERDADDLLLDDKEKSQLDVQDFADLGGKTIVDATAVDYGRRVLDVAQISKETGIQIVGTAGFNKSFLWDGKIKPELKPIIGDFETYYEWIENTTTDKLTEFVVNEVENGLEGTPYKAGQVKFGTGYNMITPLEEKTIRAVARAHHETKAPIHSHTEAGTMALEQIEILKQENIPLEYLSIGHMDRNLDPYYHKQVAKTGAFMSFDGIAKIKYAPESARIAAILYLVSEGFEDQILVSGDTARKTYYKHYGHGPGLEYIAKKWVPRFIDEANEKGFDGEKLVKKFFVDNPARCFTFKK

SEQ ID NO: 116140 - DNA, 993 bp, Propionibacterium acnes KPA171202
  CDS (1)..(993): transl_table=11
atggccgtcgttcgtaccatcaatggcgacgtttcacccgacaccctcggcgtcgtcaatgcccacgatcacctcatccgcgtcggagcaggggaggtctacatcgaccctgaccacttgcttgacgacgtcgacaaggcagcccaggaggctacatatttcgtcgaggcctctaagagctgggccgctgggggaaccatcatcgacatgtgcccggcctcctcaggccgcggcgtgctcaaaaccctccaggtcgtcgagaaggttccggggctgcaggtcgtccaagccaccggattccaccagcagaaggtctacctcgagtggcgtcagagctgggtcaaccagtacaccgtcactcagatcgccgatctactcatcgccgacatcgttgagggcatcgaccgtttcgactatatgggccccattgtcgagcgcaccaacgtcaaggcgggcgtcatcaagtgggccaccgcctacggcaagatcaccgagtgggaaaagaagtccggccaagccgtcgccatcgcatctaaggagaccggctgtcccattaacacccacgtgacggccggaacttgtggccctgagcaggcaagattccttgttgaccagggtgttgatccggccaaaatcgctatcggccatatgcagcgcaactgggatccctgggttcacgagcagatctgcaagctcggctgctacgtcgagctggacggcactaaccgcatcaagtacgtcccggataacacccgcgtcaacctcgtgaagaccctcggtgagaagggctacggcaagcagattctgttgggcaccgactccggtaaggcctcttaccaaaaggtttacggttcggtctcaggcatcgattacgatccggccgtcttctgtccacgtctcgtcgaagacgaaggcgtcgaccgcgactacgttaacgacctcctcatcaacaacgcggccaccttcttcggcttcgagccgctggccgggtga

SEQ ID NO: 116141 - protein, 330 aa, Propionibacterium acnes KPA171202
MAVVRTINGDVSPDTLGVVNAHDHLIRVGAGEVYIDPDHLLDDVDKAAQEATYFVEASKSWAAGGTIIDMCPASSGRGVLKTLQVVEKVPGLQVVQATGFHQQKVYLEWRQSWVNQYTVTQIADLLIADIVEGIDRFDYMGPIVERTNVKAGVIKWATAYGKITEWEKKSGQAVAIASKETGCPINTHVTAGTCGPEQARFLVDQGVDPAKIAIGHMQRNWDPWVHEQICKLGCYVELDGTNRIKYVPDNTRVNLVKTLGEKGYGKQILLGTDSGKASYQKVYGSVSGIDYDPAVFCPRLVEDEGVDRDYVNDLLINNAATFFGFEPLAG

SEQ ID NO: 116142 - DNA, 915 bp, Symbiobacterium thermophilum IAM 14863
  CDS (1)..(915): transl_table=11
atggcccatatcatgaccgttctcggccccctggacccgaaggaactcggtcccacgctgatgcacgagcacctgttcatcgacctctccgggcggaagaaggatccggacaccgtgctggacgacctggacctggcctgtgaggaggtggcgcacctgcagcgggccggtggccgggcgctggtggaggtcacctgccacggcatggggcgccggccggaactgctccgggaggtcgcccgccggaccgggctgcaggtcgtggccgccaccggcttctaccagcaggcctaccacccgccctacgtggccgaacgctccgcggaggagctcgcggaactgctgatgcgggacatccaggaggggatggacggcaccgacgtcaagccggggatcctggccgagatcggcacctcgaagggcgagatccggccggacgaggccaaggtcttccgggccgtggccctggtgcacaagtggaccggcctgcccatctccacccactgcaccctggggaccatggggctggagcagctggacctgttggagtccctgggggtcgacccggcccgggtggtgatcggccaccaggacctgaccgacgacctggagacccacgtcgccctggcccggcggggcgccacggtggcttatgacaccgccggcaaggagagttacatgccggacgccgtccgggtccgcctgatcaccggcatgctggagaggggcctggccgaccgggtggtcctctccatggacgtgacccggcgctcccacctgaaggccaacggggggtacggctacagctacctcttcgaccggctggtgcccgcgctccgggccgccggcgtcagcgaggccgagctggaacagatgctggtgctgaacccgcggcggatcctgaccgtcgcctga

SEQ ID NO: 116143 - protein, 304 aa, Symbiobacterium thermophilum IAM 14863
MAHIMTVLGPLDPKELGPTLMHEHLFIDLSGRKKDPDTVLDDLDLACEEVAHLQRAGGRALVEVTCHGMGRRPELLREVARRTGLQVVAATGFYQQAYHPPYVAERSAEELAELLMRDIQEGMDGTDVKPGILAEIGTSKGEIRPDEAKVFRAVALVHKWTGLPISTHCTLGTMGLEQLDLLESLGVDPARVVIGHQDLTDDLETHVALARRGATVAYDTAGKESYMPDAVRVRLITGMLERGLADRVVLSMDVTRRSHLKANGGYGYSYLFDRLVPALRAAGVSEAELEQMLVLNPRRILTVA

SEQ ID NO: 116144 - DNA, 885 bp, Bacillus licheniformis ATCC 14580
  CDS (1)..(885): transl_table=11
atgttgaaagacggaatgacctatatgcatgaacatacaacgatagacctttccaaagtaaaaaacaatgaggattgtaagttggatgtatttcctgaaaccgtcagagaatttaaaagtttatacgaaaagggcgtacggaatattgttgatgttacgaatattggaatggggagaaatattacatacgtccaaaaagttgcaaaagaaacaggcattaatattgtcttttcaactggtttctatcaagattctttttacccgatccatgtgtttcgtgaatcgaaagaaaagctggcagaaagaatgattatggagattgttgaaggaattagaggaacagatgccaatgccgaggtcatcggtgaaattggaacaagttacaataaatggacggaaaccgaacaaaaagtttttgaagcggttgttgtggcacataagcaaacaaaaaaaccaatatcaacccatacttccataggaacattaggacatgaacaagtagaattttttaaaaaacatgaagttgatttaaaccgagtggtgatagggcatgttgatttatctggggatgccgattatatattgaaaatgctgagagaaggtgtatatgtagaattcgatacaataggtaaagaaaattatatgcctgatcgtgttcgggccgaaatattgaaaaaaatacaggataaagggtatatagacaaggttctgttgtccatggatatcacaagaaaatcacatcttgtatataaaggcggggtgggctattcatatttgatagacacgtttatccctctcttgcaaacctatggaataactggtgaatcaattgataagatgttgattaaaaatcctcgcgcttttatgaaaggggagagtgaatga

SEQ ID NO: 116145 - protein, 294 aa, Bacillus licheniformis ATCC 14580
MLKDGMTYMHEHTTIDLSKVKNNEDCKLDVFPETVREFKSLYEKGVRNIVDVTNIGMGRNITYVQKVAKETGINIVFSTGFYQDSFYPIHVFRESKEKLAERMIMEIVEGIRGTDANAEVIGEIGTSYNKWTETEQKVFEAVVVAHKQTKKPISTHTSIGTLGHEQVEFFKKHEVDLNRVVIGHVDLSGDADYILKMLREGVYVEFDTIGKENYMPDRVRAEILKKIQDKGYIDKVLLSMDITRKSHLVYKGGVGYSYLIDTFIPLLQTYGITGESIDKMLIKNPRAFMKGESE

SEQ ID NO: 116146 - DNA, 921 bp, Bacillus clausii KSM-K16
  CDS (1)..(921): transl_table=11
atgattgaaacggtgaggggaccgattaagcccgaagaacttggcatatgtgcttgccatgagcatgtccatattgatttaagccatattaaaaagtctaatgacaccgcattaaccgattatgaccgtgtaaaagaagacgtagcccgttttattaaagccggcggaaaagcctttattgaaatgaccaatgtcggcatggggcggaacattcaatttatgcggcgtttatctgaagagctcgatatgcatattgtggccagtacaggctgttacaaagacccgtttattccggcggaggccctttcatggaaccgggagcaatttgcagcgtttatgttgcaagagattgaggaaggcattgatggttctccaagcaagcccggtgttattggggaaatcggcagcagtttaaatgaattcaaaccagtggagacagagctgtttcatggggcaatcattgcagcgaaggagagcggtttgccgttggccacacataccacattggggacaatggcgcttgagcaagtcgagctgttcgctaaggaagggttgccgctcgaccaagtaattattgggcaccaagatttaaatgaaaacgatgacgtggtgcttgaagtcctagcagctggctgttacgtcgctatggatacgattggcaaagaaaattaccgttctgatcaggaacgtctcacttcgctgttgcgctttatcgaagcaggctatggggacaaaattatgttatccactgatatcacaagaaattcccacctttttgctgccggcgggcaaggctttgattacacgctacgggagtttcaaccgagaatggaagcgtctgggctgtcgcagcaggaaatacgaaaacttttgattgaaaacccagcaaacgcgttttcaaagagggaagggacatcatga

SEQ ID NO: 116147 - protein, 306 aa, Bacillus clausii KSM-K16
MIETVRGPIKPEELGICACHEHVHIDLSHIKKSNDTALTDYDRVKEDVARFIKAGGKAFIEMTNVGMGRNIQFMRRLSEELDMHIVASTGCYKDPFIPAEALSWNREQFAAFMLQEIEEGIDGSPSKPGVIGEIGSSLNEFKPVETELFHGAIIAAKESGLPLATHTTLGTMALEQVELFAKEGLPLDQVIIGHQDLNENDDVVLEVLAAGCYVAMDTIGKENYRSDQERLTSLLRFIEAGYGDKIMLSTDITRNSHLFAAGGQGFDYTLREFQPRMEASGLSQQEIRKLLIENPANAFSKREGTS

SEQ ID NO: 116148 - DNA, 1116 bp, Pseudomonas syringae pv. syringae B728a
  CDS (1)..(1116): transl_table=11
atgagcctgtttcgtcacccttcacccctgcccctcggggtcgacagcggccatgccatgacggtgctggggccggtgccggtcgagcgccttggcgtcaccctgatgcacgaacacattctgctcgacgcttcgggcaagtgggtggcacccagttgctgcggcgagcgacacctggccgagcgcccggtgagcattgagctgcttggcgaactgcacatgaacccgttggtcagccgcgacaactgtcagttgttcgatgtcgatctggcctgtgaggagctgctgaagtaccgggcgctgggcggggaaacggtggttgatccgaccaatctgggcatcggccgcgacccgcaggccttgcagcgaatttcccgtctgaccggcctgaatatcatcatgggtgccggtttctatctggaaccctcgcacccgcattacgtgcatgaacgctcggtggaacagctggcggagcagatcattcatgacgtgggtggtggtgaagagaagcccgaggtgattgccggcctgatcggcgagattggtgtttctgccgcgttcacggctgacgaagagaaatcactgcgcgccgcagcccgtgcaagtgccgcgaccggcgtgccgctttcagtgcacttgccaggctgggagcgtctcggccaccgggtactggacatcgttgaggcagaaggcgccgacctgcgccacacggtgctgtgccacatgaacccgagccacagcgatccggcgtatcagcatgcgctggcggcacgcggcgcgtttctggaatacgacatgatcggcatgggttactacttcgccgacgagcacgcgcagtcgcccagcgatgaggaaaacgcacgggccatcgtcgccctgatcgagcacggcttcggctcgcaggtgctgttgtctcaggacgtctttctgaaaaccatgctgactcgctatggcggtcatggttatggctacctgctgaaacactttgtcccgcgcctgcgccgtcatggcgttaccggcgaacaactcgaaaaccttttgatcgacaacccgcgccgggtcttccagcgcggcttccaggctcctttttcatcgcagaggaatgcaacgtcatga

SEQ ID NO: 116149 - protein, 371 aa, Pseudomonas syringae pv. syringae B728a
MSLFRHPSPLPLGVDSGHAMTVLGPVPVERLGVTLMHEHILLDASGKWVAPSCCGERHLAERPVSIELLGELHMNPLVSRDNCQLFDVDLACEELLKYRALGGETVVDPTNLGIGRDPQALQRISRLTGLNIIMGAGFYLEPSHPHYVHERSVEQLAEQIIHDVGGGEEKPEVIAGLIGEIGVSAAFTADEEKSLRAAARASAATGVPLSVHLPGWERLGHRVLDIVEAEGADLRHTVLCHMNPSHSDPAYQHALAARGAFLEYDMIGMGYYFADEHAQSPSDEENARAIVALIEHGFGSQVLLSQDVFLKTMLTRYGGHGYGYLLKHFVPRLRRHGVTGEQLENLLIDNPRRVFQRGFQAPFSSQRNATS

SEQ ID NO: 116150 - DNA, 1038 bp, Burkholderia xenovorans LB400
  CDS (1)..(1038): transl_table=11
atggcaatcgtccgcaccgtgcttggcgacattactcccgatcaagctggcagcactctgactcacgaacacatccgctacgcctacccggggtgcgagcttgatcaccgctgtgtatgggactttgattttgtcgccgaggatgtcggcaagcagttcgaggaaatgcgtgaagggtgtgggattaagaccgtcgtcgagttgaccccgccagagattggccggcaccccgaactgtttgcacaaattgcccgccgaagcggcatgaatatcgttgcgacaaccggctttttccctgaggctaacgcgatgggcatcccgttccactggcgacgtcagcgcaaggaagacgtcgttaacatgctcatcagggacctgaccgaaggcatgatttacgatgggcagaagacgccttatcgtgcaggtatcctgaaagccgcgaccgggtcgctaaccgcgaagacgcgtacgccggtcaacgagaagggacgtcgcatcggaaatgtcgaaacccacgtcatttccgcaatagctgccgcgcagcgcgaagtggggtgcgcgatcaatacgcatacgcagccgcttgactatgcggtgtgcaaccctggcatcgaacttctcgacgagttggaggaaggaggcgcggatccgaccaaggtgatcatcggtcatgctttcgtccaccccaacatcgatcagctcaaggcgatatgcgagcgcggcgccagcgtccaggtggatcacatcggtattccctggcagaacgacagccgcgcacaactggacgagctgattgcggtggccatgtgccaactggcagacctcggccatctcgacaagttggttgtctcatacgacaagtttttcagccatgcgcgaggtccggtgacggaagaagagcccgagcagttgaatgaactggtccctaacgactacatcatgacggagttcgctccgcgtctggagcgcaaaggctttggggcaagagagctgcatcaggttatggtcgaaaaccccaagcgtctgcttgctttttga

SEQ ID NO: 116151 - protein, 345 aa, Burkholderia xenovorans LB400
MAIVRTVLGDITPDQAGSTLTHEHIRYAYPGCELDHRCVWDFDFVAEDVGKQFEEMREGCGIKTVVELTPPEIGRHPELFAQIARRSGMNIVATTGFFPEANAMGIPFHWRRQRKEDVVNMLIRDLTEGMIYDGQKTPYRAGILKAATGSLTAKTRTPVNEKGRRIGNVETHVISAIAAAQREVGCAINTHTQPLDYAVCNPGIELLDELEEGGADPTKVIIGHAFVHPNIDQLKAICERGASVQVDHIGIPWQNDSRAQLDELIAVAMCQLADLGHLDKLVVSYDKFFSHARGPVTEEEPEQLNELVPNDYIMTEFAPRLERKGFGARELHQVMVENPKRLLAF

SEQ ID NO: 116152 - DNA, 978 bp, Mycobacterium sp. MCS
  CDS (1)..(978): transl_table=11
gtgccacagttgaataccgcggcgggaaccatcgacaccgccgacctcggcgtcacgctcatgcatgagcatgtgttcatcatgaccacggagatcctgctcaactacccggacgcgtggggtgacgaggccaagcgcgaggccgacgcgatcgcccggctcgacgagctgaaggcacgcggggtcgacaccatcgtcgacctgaccgtggtggggctgggccgctacatcccgcgcatcgcgcgtatcgccgcggccaccgacctcaacatcgtcgtggccaccgggctgtacacctacaacgacgtcccgttcttcttccacttcaccggccccggcaccgcgctgggcgggccggaggtgatggtcgacatgttcgtgcgcgacatcgagcacggtatcgccgacaccggggtcaaggccgcgatcctcaagtgcgccaccgacgaacccgggctcacccccggtgtggagcgggtgctgcgcgcggtcgcgcaggcgcaccgccggaccggcgtgccgatctcgacccacacccatgccgccacccggcgggggctggaccagcagcgcatcttcgccgaggagggcgtcgacctgtcgcgggtggtgatcgggcactccggcgacaccaccgacctggactacctcgaagcgctgatggcggccggctcctacatcggcatggaccgtttcggggtcgatgcgttcctcgggttcgaggaccgggtggcgaccgtggcggcgctgtgcgagcgcggccacgccgatcagatggtcctgtcccacgacgcctcgtgctacttcgacgcgctgccggaggagaccgtcgcgcacacgatgccgaactggcactatctgcacatccacaacgacgtgctgcccgcgctgcgcgcccgtggcgtcaccgacgaacagctcaccacgatgctcgtcgacaatccccggcggatcttcgagcactcgggcgggtactga

SEQ ID NO: 116153 - protein, 325 aa, Mycobacterium sp. MCS
MPQLNTAAGTIDTADLGVTLMHEHVFIMTTEILLNYPDAWGDEAKREADAIARLDELKARGVDTIVDLTVVGLGRYIPRIARIAAATDLNIVVATGLYTYNDVPFFFHFTGPGTALGGPEVMVDMFVRDIEHGIADTGVKAAILKCATDEPGLTPGVERVLRAVAQAHRRTGVPISTHTHAATRRGLDQQRIFAEEGVDLSRVVIGHSGDTTDLDYLEALMAAGSYIGMDRFGVDAFLGFEDRVATVAALCERGHADQMVLSHDASCYFDALPEETVAHTMPNWHYLHIHNDVLPALRARGVTDEQLTTMLVDNPRRIFEHSGGY

SEQ ID NO: 116154 - DNA, 1014 bp, Rubrobacter xylanophilus DSM 9941
  CDS (1)..(1014): transl_table=11
atggcagccacggtcaacacggtcaccgggccgatctcctcggaggacctgggtaagacgctggtgcacgagcacttcatgttcgggtaccccggctaccagggcgacacgaccctcgggcccttcgaccgggaggaggccgtccgggtgggggtggcggtggccgagcgggccaagtcccacggggtcaagaccatcatcgacgccacccccaacgagtgcgggcgcgacgtggaggttttgcgcgagatctccgagcgggcggagatacagatagtgtgctccaccggctactactacgagggggagggagcacccgcatacttcaacttccgccgctccctcggcaccgcggaggaggagatctacgagatgctctccacggaggtcgtagaggggatagccgggaccgggataaaggccggggtgataaagctggcctccagcaaggacgccatcaccgactacgaagctatgttcttccgctgcggggcccgagtgcaaaaggagactggcacaccgatcatcacccacacccaggaggggacgatgggcccggagcaggcagagttgctgatctccgagggcgcggacccgcgcaggtgtcagatcgggcacatggacggcaacacggacgtcgtctaccacatgaacaccctggagcacggggtaaacatagccttcgaccgcttcgggatacaggggatcgtgggcgccccgatggacgaggcgcgcaccgcctgcctcataggtctgctggggatgggctacacggaccgcatcctgctctcccacgacacggtgaacctctggctggggcgcccgctccggatgccggagcagctgcagcagctgctggccaactggcacataggccacctcttcgagaacgtagtgccgaagctccggcgggcgggggtcaccgaggagcagatagagaccatcttcgtcgagaacccgaagcggctcttcgaccccctgcccgtgcgggaggccgccggagccgccggctag

SEQ ID NO: 116155 - protein, 337 aa, Rubrobacter xylanophilus DSM 9941
MAATVNTVTGPISSEDLGKTLVHEHFMFGYPGYQGDTTLGPFDREEAVRVGVAVAERAKSHGVKTIIDATPNECGRDVEVLREISERAEIQIVCSTGYYYEGEGAPAYFNFRRSLGTAEEEIYEMLSTEVVEGIAGTGIKAGVIKLASSKDAITDYEAMFFRCGARVQKETGTPIITHTQEGTMGPEQAELLISEGADPRRCQIGHMDGNTDVVYHMNTLEHGVNIAFDRFGIQGIVGAPMDEARTACLIGLLGMGYTDRILLSHDTVNLWLGRPLRMPEQLQQLLANWHIGHLFENVVPKLRRAGVTEEQIETIFVENPKRLFDPLPVREAAGAAG

SEQ ID NO: 116156 - DNA, 993 bp, Rhodococcus sp. RHA1
  CDS (1)..(993): transl_table=11
atgagccaagtcaacacggtccgcggaccgatcgacagcgccgaactcggacgcacctacatgcacgaacacgtgttcgtgctgacgcccgacgtgcagcagaactacccggacgagtgggggggcgaggacgagcgggtcgccgacgccgtcaccaagctgcgcgcgctggcggcgcagggtgtccggaccatcgtcgaccccaccgtcgtcggcctcggccggtacatcccgcgcatccagcgggtcgcggaacagcttcccgagctgaacatcgttgcggcaacagggctgtacacctacgacgacgtgccgttcttcttccactaccgcggtccggcgctggatgcgatcgtgggggccgaggtccccgacccgatggtggacatgttcgtgaaggacatcgaagaggggatcgccggcaccggggttcgcgcggggctgctcaagtgcgcgatcgaccaccaggggcccacgcccggtgtcgagcgggtgatgcgggcggtcgcgaaggcgcatcggcgcacgggcgttcccatcacggtgcacacccaccccggcagtgaggccggagtgcacgtcaaacgtgtgatgtgcgacgaggagggggtgcggccggaccggatcgtgctcgggcacagcggagacagtaccgacatcgagcatctgacgagcctcgccgaggccggcttcgttctcgggatggaccggttcgggatcaacctcgagacgacgttcgaggcccgcgccgacacgctcgtcgagatgtgccgccggggattcgcggggcagatggtcctgtcgcaggacgcctcctgctacatcgactggatcgaccccaacctgatggccgcgctcccgcagtggcactacctgcacatcgagaacgacgtgctgccgtacgtccgcgagcggggtgtcaccgagaagatgatcaccgagatgctggtcgaggtgcctcggcgatacttcgagaacgtcgacccctactga

SEQ ID NO: 116157 - protein, 330 aa, Rhodococcus sp. RHA1
MSQVNTVRGPIDSAELGRTYMHEHVFVLTPDVQQNYPDEWGGEDERVADAVTKLRALAAQGVRTIVDPTVVGLGRYIPRIQRVAEQLPELNIVAATGLYTYDDVPFFFHYRGPALDAIVGAEVPDPMVDMFVKDIEEGIAGTGVRAGLLKCAIDHQGPTPGVERVMRAVAKAHRRTGVPITVHTHPGSEAGVHVKRVMCDEEGVRPDRIVLGHSGDSTDIEHLTSLAEAGFVLGMDRFGINLETTFEARADTLVEMCRRGFAGQMVLSQDASCYIDWIDPNLMAALPQWHYLHIENDVLPYVRERGVTEKMITEMLVEVPRRYFENVDPY

SEQ ID NO: 116158 - DNA, 1080 bp, Rhizobium leguminosarum bv. viciae 3841
  CDS (1)..(1080): transl_table=11
atgagcgaacagacgatagagactctgtccgaagcgcatgtccgctccggcaaggtgatgaccgttaccggccccgtttcggcggatgcactcggcgtgacgctgatgcacgagcatatcctcaacgactgccgctgctggtggcatgcgccgaagacgccggagcggcaatatctcgccgaaagtttcgtctgcatggagatccttggcgaactccggcaggaccccttcgtcaacaagcacaatatcaccctcgacgacgaacatctggcggtggccgagctcaaggacttcgccacggcgggcggtcgcaccgtagtcgagccgacctgcaagggcatcggccgcgatccgctggcgctccggcgtatctccgaagcctcaggcctcaacatcgtgatgggcgcgggttattatctcggctcctcgcatcctgaaggcgtcaccgcgatgagcattgatgatatcgcgggcgaaatcgtccgcgaggcgagggagagcgtcgacggcaccggcgtcaggatcggcctgatcggcgaaatcggcgtctcctcggatttcaccgccgaggaggagaagtcgctacgcggtgcggcccgggcgcaggtgctgactggacttccgctgatggtgcatctgccgggctggttccgtctcggccaccgcgtgctcgacgtggtggcgcaagagggggcggatctccgccacaccgtgctttgccacatgaacccgtctcatgacgacatcgcctatcagagcgagttggcggcgcgcggcgctttcatcgaatacgacatgatcggcatggatttcttctatgccgaccagcaggtgcagtgcccgagcgacgaggaggccgcgcgcgcgatcgttcgtctcgtcgaggccggtcatctcggccggattttgctgtcacacgacgtctttctgaagatgatgctgacgcactacggcggcaacggctacgcctatatccttcgccattttcttccccgtctggagcggcacggcctcgataggacgattctcgacgagatgatgcgcagcaatccgcgccgcgtctttcatgccggagcgtag

SEQ ID NO: 116159 - protein, 359 aa, Rhizobium leguminosarum bv. viciae 3841
MSEQTIETLSEAHVRSGKVMTVTGPVSADALGVTLMHEHILNDCRCWWHAPKTPERQYLAESFVCMEILGELRQDPFVNKHNITLDDEHLAVAELKDFATAGGRTVVEPTCKGIGRDPLALRRISEASGLNIVMGAGYYLGSSHPEGVTAMSIDDIAGEIVREARESVDGTGVRIGLIGEIGVSSDFTAEEEKSLRGAARAQVLTGLPLMVHLPGWFRLGHRVLDVVAQEGADLRHTVLCHMNPSHDDIAYQSELAARGAFIEYDMIGMDFFYADQQVQCPSDEEAARAIVRLVEAGHLGRILLSHDVFLKMMLTHYGGNGYAYILRHFLPRLERHGLDRTILDEMMRSNPRRVFHAGA

SEQ ID NO: 116160 - DNA, 921 bp, Mycobacterium avium 104
  CDS (1)..(921): transl_table=11
atgcacgaacacgtgttcatcatgaccaccgagatcgcgcagaactaccccgaagcgtggggcgacgaagagcagcgggtggccgacgccatcgaccggctcaacgagctcaaggcgcgcggcgtggacaccatcgtcgacctcaccgtcatcggcctgggccgctacattccgcgcatcgcccgggtcgcggcggcgaccgagctgaatatcgttgtggcaacggggctttacacctacaacgatgtgcccttctatttccactacctgggcccgggcgcggagctgggcggcccggagatcatgaccgacatgttcgtccgcgacatcgagcagggcatcgccgacaccggcatcaaggccggcatcctcaagtgcgccactgacgcacccggcgtcactccgggcgtcgagcgggtgctgcgggcggtggcgcaggcgcacaagcgcaccggggtgccgatctccacgcacacccacgccgggctgcgccgcggcctcgaccagcagcggatcttcgaggaggagggcgtcgacctgagccgggtggtgatcgggcattccggcgacagcaccgacgtcggctacctcgaagagctcatcgccgccggctcgtatctgggcatggaccggttcggcatcgacgcgatctcgccgttcgaggaccgggtgaacatcgtcgcgcagatgtgcgagcgcggccacgccgacaagatggtgctctcgcacgacgccaactgttatttcgacgcacttcccgaggagttggtgccccaggtcatgccgaactggcattacctgcacatccacaacgacgtgatccccgccctcaagcagcgcggcgtcaccgacgagcagctgcacaccatgctcgtcgacaacccccggcgcatcttcgagcgccagggcccctatgggtga

SEQ ID NO: 116161 - protein, 306 aa, Mycobacterium avium 104
MHEHVFIMTTEIAQNYPEAWGDEEQRVADAIDRLNELKARGVDTIVDLTVIGLGRYIPRIARVAAATELNIVVATGLYTYNDVPFYFHYLGPGAELGGPEIMTDMFVRDIEQGIADTGIKAGILKCATDAPGVTPGVERVLRAVAQAHKRTGVPISTHTHAGLRRGLDQQRIFEEEGVDLSRVVIGHSGDSTDVGYLEELIAAGSYLGMDRFGIDAISPFEDRVNIVAQMCERGHADKMVLSHDANCYFDALPEELVPQVMPNWHYLHIHNDVIPALKQRGVTDEQLHTMLVDNPRRIFERQGPYG

SEQ ID NO: 116162 - DNA, 978 bp, Mycobacterium smegmatis str. MC2 155
  CDS (1)..(978): transl_table=11
atgccgacagtcaacaccgccgccggagccatcgacacggccgacctgggtgtcacgctcatgcacgagcacgtcttcatcatgaccaccgaggtgatgctcaaccatcccgagtcctggggcgacgagcacaggcgtgaagccgacgccatcgtgcgcctgggtgaactcaaggcgcgcggcgtcgacaccatcgtcgatctcacggtgatcgggctcggccggtacatcccgcgtatcgcgcgaatcgccgaggcgaccgaactcaacatcgtcgtcgcgaccgggctctacacctacaacgacatccccatgacgtttcacttccgcgggcccggcaccgccctggacggtgacgaaccgatggccgagatgttcgtccgcgacatcgagaagggcatcgccgacacgggcatcaaggccgcaatcctcaagtgcgccaccgacgaacccggcgtcacgcccggggtcgagcgtgtgctgcgcgccgtcgcggcggcgcaccgccagaccggtgtgcccatctcgacgcacacccacgccgcgacgcgccgcggcctcgaacagcaacgcgtcttcgccgaggagggcgtcgacctgacccgcgtgatcatcggccactgcggtgacaccaccgacatcggctacctcgaggaactcatcgccaacggttcctacatcggcatggaccggttcggcgtcgacgtgttcctgccgttcgaacagcgggtcgcgaccgtggcgaccatgtgcgagcgcgggcacgccgaacgcatggtgctgtcccacgacacctggtgctacttcgacgcattgcccgacgaactgaccacggccgcactgccgaactctcactatctgcacatccacaacgacgtgatccccgccctgcggcagcgcggcgtcaccgacgaacagatcaccacgatgctggtggacaatccgcgccggatcttcgagcacaagggcggctactga

SEQ ID NO: 116163 - protein, 325 aa, Mycobacterium smegmatis str. MC2 155
MPTVNTAAGAIDTADLGVTLMHEHVFIMTTEVMLNHPESWGDEHRREADAIVRLGELKARGVDTIVDLTVIGLGRYIPRIARIAEATELNIVVATGLYTYNDIPMTFHFRGPGTALDGDEPMAEMFVRDIEKGIADTGIKAAILKCATDEPGVTPGVERVLRAVAAAHRQTGVPISTHTHAATRRGLEQQRVFAEEGVDLTRVIIGHCGDTTDIGYLEELIANGSYIGMDRFGVDVFLPFEQRVATVATMCERGHAERMVLSHDTWCYFDALPDELTTAALPNSHYLHIHNDVIPALRQRGVTDEQITTMLVDNPRRIFEHKGGY

SEQ ID NO: 116164 - DNA, 918 bp, Listeria monocytogenes str. 1/2a F6854
  CDS (1)..(918): transl_table=11
atggaaaagaaaataagaacggttcttggtgacatctcgaaagaaagccttggtttcacatactcacatgaacatttgtggtgttgtccaccttcagtacagaaagaccgtgattttgaattaacagattatgagtcctccttagaagaattaaaaacatttcaatctattggaggtcaaacactcgtagatgcttcgacgctggattatggtcgtgatggaaataaactaaaaactatgtctgaagaatctggcgtgaatgttcttggtgttacaggatttaataaacatatttatttcccggattgggtacaggaggaaagcattgaacaaattacagatcgattaatttttgatattgaaaaaggaatggatggttccgatgctcgtgcagggattttgaagtcaggttcatggtacaacctcattcatccattagagaacaaagtaacacgagctgttgcatgggctcaaaaagagactggtgcaccaatttggttgcatacagaagctggcacaatggggcaggaaatgcttgctatcttagaagaagaaggcgtgaatatggagctggtagctgttggacatagcgatcgcaatgcagatccgtactatcatctgaaattagctgaaaaaggggcttatgttcagtttgatggttgtggaaaagtaaaatactatcctgatagtacaagagttgaactagtgaaaaatatgcttgaaaatggttttggggataaattactcatctcgggagatatgggaagaaaaagttatctgcacgcatatggtggcggtccaggatttcgttttataaaaacaaaatttattccaaggcttttagaagaaggcgtaacggagcaacaaatacaaactatattttatgataatccagccaactggctagccaaattttag

SEQ ID NO: 116165 - protein, 305 aa, Listeria monocytogenes str. 1/2a F6854
MEKKIRTVLGDISKESLGFTYSHEHLWCCPPSVQKDRDFELTDYESSLEELKTFQSIGGQTLVDASTLDYGRDGNKLKTMSEESGVNVLGVTGFNKHIYFPDWVQEESIEQITDRLIFDIEKGMDGSDARAGILKSGSWYNLIHPLENKVTRAVAWAQKETGAPIWLHTEAGTMGQEMLAILEEEGVNMELVAVGHSDRNADPYYHLKLAEKGAYVQFDGCGKVKYYPDSTRVELVKNMLENGFGDKLLISGDMGRKSYLHAYGGGPGFRFIKTKFIPRLLEEGVTEQQIQTIFYDNPANWLAKF

SEQ ID NO: 116166 - DNA, 945 bp, Kineococcus radiotolerans SRS30216
  CDS (1)..(945): transl_table=11
gtggcagagcccctcgacaccgccgcacaggcgcgacacctgcacacgacgctcggtcccctcggcgccggggacgtgggcctcgtcctgccgcacgagcacctcctcgtcgacttccgccccgccgactccccgggtttcgcccaggccgacccggccgagttcgcgtcggtcgtggaaccgctgctggccggggctgccgcggctggggtcaccgcgctcgtcgagtgcacgccccccggcctcggtcggcgcgtcgacctcgtcctcgacgtgagccgccgcacgggcgtgcccgtggtggtcgcgaccggggtctaccgcgaaccgtgggtgccggactgggtgtacggcgcgagcgacgacgagctcgaggcgtggatgcaccgcgaactgaccgagggcgtcgacggctccggcgtcctcgccgggttcatcaagatctccgcggccgaggacggcatccggccggtcgaggagcgcgtcgtgcgcgcggcggcccgggccgcggcccgcaccggggccctcgtcggatcccacaccacgaacggggacgtcgtgctggggcagatcgacctcgccgtggccgaggggctggcgccggaccgcttcctctcgatccacacgcagaccatcaccgaccccgctctgcggcaggcgatcgtcgaccgcggcgcgtggatcgagttcgacgacgtcgggcagggcgacgacacccggacgctggagctggtgctcggcagcctcgaggcgggacaggccggccaggtcctgctgtcccacgacgcggggtggttcgacccggccctgccgggcggcggaaccccccggccgttcacggacctgaccggctcgttcctgccggcgctgcgggcggcgggtgtcgacgcggacgtggtcgacgacctctgcgtccgcaacccgttccgcgccttcgcgcggtag

SEQ ID NO: 116167 - protein, 314 aa, Kineococcus radiotolerans SRS30216
MAEPLDTAAQARHLHTTLGPLGAGDVGLVLPHEHLLVDFRPADSPGFAQADPAEFASVVEPLLAGAAAAGVTALVECTPPGLGRRVDLVLDVSRRTGVPVVVATGVYREPWVPDWVYGASDDELEAWMHRELTEGVDGSGVLAGFIKISAAEDGIRPVEERVVRAAARAAARTGALVGSHTTNGDVVLGQIDLAVAEGLAPDRFLSIHTQTITDPALRQAIVDRGAWIEFDDVGQGDDTRTLELVLGSLEAGQAGQVLLSHDAGWFDPALPGGGTPRPFTDLTGSFLPALRAAGVDADVVDDLCVRNPFRAFAR

SEQ ID NO: 116168 - DNA, 24 bp, Artificial sequence
  primer
atgagttttgatccgacgggttac

SEQ ID NO: 116169 - DNA, 27 bp, Artificial sequence
  primer
ttattggaaaaattgagagggattttc

SEQ ID NO: 116170 - protein, 395 aa, Artificial sequence
  consensus sequence
  Variant (2)..(7): Xaa in position 2 to 7 is any amino acid
  Variant (8)..(11): Xaa in position 8 to 11 is any or no amino acid
  Variant (13)..(13): Xaa in position 13 is any amino acid
  Variant (14)..(16): Xaa in position 14 to 16 is any or no amino acid
  Variant (20)..(59): Xaa in position 20 to 59 is any amino acid
  Variant (60)..(92): Xaa in position 60 to 92 is any or no amino acid
  Variant (94)..(97): Xaa in position 94 to 97 is any amino acid
  Variant (98)..(98): Xaa in position 98 is any or no amino acid
  Variant (101)..(116): Xaa in position 101 to 116 is any amino acid
  Variant (117)..(117): Xaa in position 117 is any or no amino acid
  Variant (119)..(121): Xaa in position 119 to 121 is any amino acid
  Variant (123)..(149): Xaa in position 123 to 149 is any amino acid
  Variant (150)..(169): Xaa in position 150 to 169 is any or no amino acid
  Variant (171)..(173): Xaa in position 171 to 173 is any amino acid
  Variant (174)..(183): Xaa in position 174 to 183 is any or no amino acid
  Variant (185)..(187): Xaa in position 185 to 187 is any amino acid
  Variant (190)..(200): Xaa in position 190 to 200 is any amino acid
  Variant (201)..(213): Xaa in position 201 to 213 is any or no amino acid
  Variant (215)..(222): Xaa in position 215 to 222 is any amino acid
  Variant (224)..(224): Xaa in position 224 is any amino acid
  Variant (226)..(226): Xaa in position 226 is any amino acid
  Variant (228)..(230): Xaa in position 228 to 230 is any amino acid
  Variant (232)..(233): Xaa in position 232 to 233 is any amino acid
  Variant (234)..(234): Xaa in position 234 is any or no amino acid
  Variant (236)..(238): Xaa in position 236 to 238 is any amino acid
  Variant (240)..(266): Xaa in position 240 to 266 is any amino acid
  Variant (267)..(271): Xaa in position 267 to 271 is any or no amino acid
  Variant (273)..(288): Xaa in position 273 to 288 is any amino acid
  Variant (289)..(290): Xaa in position 289 to 290 is any or no amino acid
  Variant (292)..(296): Xaa in position 292 to 296 is any amino acid
  Variant (298)..(299): Xaa in position 298 to 299 is any amino acid
  Variant (301)..(317): Xaa in position 301 to 317 is any amino acid
  Variant (318)..(330): Xaa in position 318 to 330 is any or no amino acid
  Variant (332)..(338): Xaa in position 332 to 338 is any amino acid
  Variant (340)..(340): Xaa in position 340 is any amino acid
  Variant (342)..(383): Xaa in position 342 to 383 is any amino acid
  Variant (384)..(393): Xaa in position 384 to 393 is any or no amino acid
TXXXXXXXXXXGXXXXHEHXXXXXXXXXXXXXXXXXXXXXXXXXXXXXXXXXXXXXXXXXXXXXXXXXXXXXXXXXXXXXXXXXXXXXXXXXTXXXXXGRXXXXXXXXXXXXXXXXXVXXXGXXXXXXXXXXXXXXXXXXXXXXXXXXXXXXXXXXXXXXXXXXXXXXXGXXXXXXXXXXXXXTXXXAGXXXXXXXXXXXXXXXXXXXXXXXXTXXXXXXXXAXAXAXXXTXXXPXXXHXXXXXXXXXXXXXXXXXXXXXXXXXXXXXXXXHXXXXXXXXXXXXXXXXXXGXXXXXDXXGXXXXXXXXXXXXXXXXXXXXXXXXXXXXXXGXXXXXXXSXDXXXXXXXXXXXXXXXXXXXXXXXXXXXXXXXXXXXXXXXXXXXXXXXXXXXXNP

SEQ ID NO: 116171 - protein, 19 aa, Artificial sequence
  protein pattern
  Variant (2)..(2): Xaa in position 2 is Gly, Ile or Val
  Variant (3)..(3): Xaa in position 3 is any amino acid
  Variant (4)..(4): Xaa in position 4 is Ala, Asn or Thr
  Variant (5)..(5): Xaa in position 5 is Phe, Ile, Leu or Val
  Variant (6)..(6): Xaa in position 6 is Ile or Val
  Variant (7)..(7): Xaa in position 7 is Asp or Glu
  Variant (8)..(8): Xaa in position 8 is any amino acid
  Variant (10)..(11): Xaa in position 10 to 11 is any amino acid
  Variant (12)..(13): Xaa in position 12 to 13 is any or no amino acid
  Variant (15)..(16): Xaa in position 15 to 16 is any or no amino acid
  Variant (18)..(18): Xaa in position 18 is any amino acid
  Variant (19)..(19): Xaa in position 19 is Ala, Ile, Leu, Pro or Val
GXXXXXXXTXXXXGXXRXX

SEQ ID NO: 116172 - DNA, 846 bp, Escherichia coli
  CDS (1)..(846): transl_table=11
atgattgagaaccgtccgtggctgacgatattcagccataccatgctgatcctcgggatcgcggtgatcctcttcccgctgtacgtggcgtttgtcgcggcgacgctggataaacaggccgtctatgccgcgccgatgacgctcatccccggcacacatctgctggaaaacatccacaacatctgggtgaacggggtaggcacgaatagcgcgccgttctggcggatgttgcttaacagctttgtgatggcgttcagcattacgctcggcaaaattaccgtctcgatgctctcggcatttgccattgtctggtttcgttttccgctacgtaacctcttcttctggatgatttttatcaccctgatgctgccggttgaagtacgtatcttcccgacggtggaagtcatcgccaacctgcagatgctcgacagctacgccggtttaacgctgccgctgatggcctcggcgaccgctactttcctgttccgccagttctttatgacgctgccggatgagctggtggaagccgcgcggatcgacggcgcatcgccaatgcgcttcttttgcgacatcgtttttccgctctccaaaactaatctggcggcgctgtttgtgatcacctttatctacggctggaatcagtatttgtggccgttgttgattattaccgatgtggatctcggcaccaccgtggcagggatcaaagggatgatcgctacaggcgaaggcaccacggaatggaactcagtgatggtggcgatgttgttaacgcttatccctccggtggtgattgttttagtgatgcagcgtgccttcgtgcgcggcctggtcgatagtgagaaataa

SEQ ID NO: 116173 - protein, 281 aa, Escherichia coli
MIENRPWLTIFSHTMLILGIAVILFPLYVAFVAATLDKQAVYAAPMTLIPGTHLLENIHNIWVNGVGTNSAPFWRMLLNSFVMAFSITLGKITVSMLSAFAIVWFRFPLRNLFFWMIFITLMLPVEVRIFPTVEVIANLQMLDSYAGLTLPLMASATATFLFRQFFMTLPDELVEAARIDGASPMRFFCDIVFPLSKTNLAALFVITFIYGWNQYLWPLLIITDVDLGTTVAGIKGMIATGEGTTEWNSVMVAMLLTLIPPVVIVLVMQRAFVRGLVDSEK

SEQ ID NO: 116174 - DNA, 843 bp, Mycobacterium tuberculosis H37Rv
  CDS (1)..(843): transl_table=11
atgggctgggctgatcgaatagtccaccgccacttcattcgtgggcttgccctgtacgcgggactgatcgggatcgcttggtgcgcgctgttccctatcatctgggcgctgtcgggctccctgaaggcggacggcgaggtgaccgagccgacgctgttcccgtcgcatccgcaatggtccaactaccgcgaggtgttcgcgttgatgccgttctggcggatgttcttcaacaccgtgctgtatgccggatgtgtcaccgccgggcaggtcttcttctgctcgttggccggttatgccttcgcgcgactgcagttccggggccgcgatacgttgttcgtcttgtacttgagcactttgatggtgccgttgacggtgaccgtcatcccacaggtcattctcatgcggatcgtggggtgggtggatacgccgtgggcgatgatcgtgccgggattgttcggtagcgcgttcggtacctacctgatgcggcagttcttccgcacgctgccgaccgatctcgaggaagccgcgattctcgacggttgctcgccgtggcagatctactggcggattctgctgccgcattcacgtcccgcggtgctggtgctgggtgtgctcacctgggtcaacgtgtggaacgactttctgtggccgctgctgatgatccagcgaaacagcctggcgacgctcacccttggcctggtccgattgcggggcgaatacgtcgcccggtggccggtgctgatggcggcgtcgatgctgatgctggtgccgttggtcatcctttatgcggtcgcacaacgttcctttgtccgtggtatcgcggtgactgggctcggcgggtaa

SEQ ID NO: 116175 - protein, 280 aa, Mycobacterium tuberculosis H37Rv
MGWADRIVHRHFIRGLALYAGLIGIAWCALFPIIWALSGSLKADGEVTEPTLFPSHPQWSNYREVFALMPFWRMFFNTVLYAGCVTAGQVFFCSLAGYAFARLQFRGRDTLFVLYLSTLMVPLTVTVIPQVILMRIVGWVDTPWAMIVPGLFGSAFGTYLMRQFFRTLPTDLEEAAILDGCSPWQIYWRILLPHSRPAVLVLGVLTWVNVWNDFLWPLLMIQRNSLATLTLGLVRLRGEYVARWPVLMAASMLMLVPLVILYAVAQRSFVRGIAVTGLGG

SEQ ID NO: 116176 - DNA, 828 bp, Mycobacterium tuberculosis H37Rv
  CDS (1)..(828): transl_table=11
atgacgccggatcggctccgtagcagcgttggctacgcggccatgttgctggtggtcacgctgattgccgggccgttgctgttcgtgttcttcacctcgttcaaggatcagcccgacatctatgcgcagcccaccagttggtggccgctgcgctggtacccgcagaactaccgcacggccaccgagcagattccgttctggacgtttctgcgcaactcgctgatcatcacgtcggtgctggcggtggtgaagttcacgctcggtgtgctcagcgcctttggcttggtgtttgtccggttcccgggccgcacggcggtgtttttggtgatcatcgccgcgttgatggtgcccaaccagatcaccgtgatttccaactacgcgctgatctcacacctgggcctgcgcaacacctttgccggcatcatcctgcctctggcgggggtggcgtttggaaccttcttgatgcgcaaccactttctgtcgctgcccgccgagatcatcgaggcggcccggatggacggcgcgcggtggtggcaactgctgctgcgggtggtgttgccgatgtcgcggcccaccatggtcgccgtcggtgtcatcaccgtggtcaacgaatggaacgaatacctgtggccgttcctgatgtccgacgacgaatcggtggcaccactgccgataggtctgacgtttctgcagcaggccgagggtgtgacgaactggggcccggtgatggcggtgacgctgttggcgatgctgccgatcttgctggtcttcatcgccttgcagcggcagatgataaagggcctcacctcgggcgcggtcaagggatag

SEQ ID NO: 116177 - protein, 275 aa, Mycobacterium tuberculosis H37Rv
MTPDRLRSSVGYAAMLLVVTLIAGPLLFVFFTSFKDQPDIYAQPTSWWPLRWYPQNYRTATEQIPFWTFLRNSLIITSVLAVVKFTLGVLSAFGLVFVRFPGRTAVFLVIIAALMVPNQITVISNYALISHLGLRNTFAGIILPLAGVAFGTFLMRNHFLSLPAEIIEAARMDGARWWQLLLRVVLPMSRPTMVAVGVITVVNEWNEYLWPFLMSDDESVAPLPIGLTFLQQAEGVTNWGPVMAVTLLAMLPILLVFIALQRQMIKGLTSGAVKG

SEQ ID NO: 116178 - DNA, 852 bp, Mycobacterium leprae TN
  CDS (1)..(852): transl_table=11
atgggcttagctgagcgactcaaccatatagttaagcgcagtgtcttgcgtgcggtggtcgtttacatagcgctgaccggcatcgcgtggtgcgccctgttccccattgtctgggcgttgtcaggctcgttgaagaaggaaggcgagatacgcgaacccacgctcttgccagcccatccgcaatggtctaactacaccgaggtgtttgatctgatacccttctggcgaatgtttttcaataccgtgttgtatgctggatacgtcacagtcggccaggttttcttctgctcactggctggatatgcgtttgcacgactacaatttcgcgggcgcgatgcgttgttcgttttatacctgggcacgttgatgatgccactaactgtaacaattataccacagttcatcctgatgcgagtcctgggatggactgacacgccgtgggcgatgatcgtgccaggcttgttcgggagtgcgttcggcacctacctcatgcggcagttcttccggacactgccgagcgatctcgaggaagccgcaatcctggacggctgctcgccatggcagatctattggcgggtcttgttgcctcacgccaagcccgcagtgggggtacttgcggtcctcacctgggtcaacgtatggaacgactttttgtggccgttgctgatgatccagcgcaacagcctagccacactgacgttgggcctagtccggatgcggggggagtacggaacctgctggccggtgataatggcgacctcgatgctaatcatactgccactagtcatcatctatacgatcgcgcagcgcgccttcgttcgcggtatcaccgtcaccaggatcggcgggtag

SEQ ID NO: 116179 - protein, 283 aa, Mycobacterium leprae TN
MGLAERLNHIVKRSVLRAVVVYIALTGIAWCALFPIVWALSGSLKKEGEIREPTLLPAHPQWSNYTEVFDLIPFWRMFFNTVLYAGYVTVGQVFFCSLAGYAFARLQFRGRDALFVLYLGTLMMPLTVTIIPQFILMRVLGWTDTPWAMIVPGLFGSAFGTYLMRQFFRTLPSDLEEAAILDGCSPWQIYWRVLLPHAKPAVGVLAVLTWVNVWNDFLWPLLMIQRNSLATLTLGLVRMRGEYGTCWPVIMATSMLIILPLVIIYTIAQRAFVRGITVTRIGG

SEQ ID NO: 116180 - DNA, 843 bp, Mycobacterium tuberculosis CDC1551
  CDS (1)..(843): transl_table=11
atgggctgggctgatcgaatagtccaccgccacttcattcgtgggcttgccctgtacgcgggactgatcgggatcgcttggtgcgcgctgttccctatcatctgggcgctgtcgggctccctgaaggcggacggcgaggtgaccgagccgacgctgttcccgtcgcatccgcaatggtccaactaccgcgaggtgttcgcgttgatgccgttctggcggatgttcttcaacaccgtgctgtatgccggatgtgtcaccgccgggcaggtcttcttctgctcgttggccggttatgccttcgcgcgactgcagttccggggccgcgatacgttgttcgtcttgtacttgagcactttgatggtgccgttgacggtgaccgtcatcccacagttcattctcatgcggatcgtggggtgggtggatacgccgtgggcgatgatcgtgccgggattgttcggtagcgcgttcggtacctacctgatgcggcagttcttccgcacgctgccgaccgatctcgaggaagccgcgattctcgacggttgctcgccgtggcagatctactggcggattctgctgccgcattcacgtcccgcggtgctggtgctgggtgtgctcacctgggtcaacgtgtggaacgactttctgtggccgctgctgatgatccagcgaaacagcctggcgacgctcacccttggcctggtccgattgcggggcgaatacgtcgcccggtggccggtgctgatggcggcgtcgatgctgatgctggtgccgttggtcatcctttatgcggtcgcacaacgttcctttgtccgtggtatcgcggtgactgggctcggcgggtaa

SEQ ID NO: 116181 - protein, 280 aa, Mycobacterium tuberculosis CDC1551
MGWADRIVHRHFIRGLALYAGLIGIAWCALFPIIWALSGSLKADGEVTEPTLFPSHPQWSNYREVFALMPFWRMFFNTVLYAGCVTAGQVFFCSLAGYAFARLQFRGRDTLFVLYLSTLMVPLTVTVIPQFILMRIVGWVDTPWAMIVPGLFGSAFGTYLMRQFFRTLPTDLEEAAILDGCSPWQIYWRILLPHSRPAVLVLGVLTWVNVWNDFLWPLLMIQRNSLATLTLGLVRLRGEYVARWPVLMAASMLMLVPLVILYAVAQRSFVRGIAVTGLGG

SEQ ID NO: 116182 - DNA, 885 bp, Agrobacterium tumefaciens str. C58
  CDS (1)..(885): transl_table=11
atgatccagcgcacaccctatgccgacgccctgacctacgcgatcatggtggcgggctttctcctgctcatcggccccttcctcgtcgtcatttccggcgcgagccagtctgttcagcaggtcaacagcgtgccgttcagcttcatgccgcaaggcgaattcctcgccaatgcgcagaccgcctgggcacgcgcgaatcttggcaacgccctctggaacagcctgatcatggcgacgctggtgaccatcggcaaggtggcgctttccgccttcaccgccttcgccatcgtcttcttccgctcgccgctgaagcatctgttcttctggacggtcttcatcaccctgatgctgccgctcgaagtgcgcgtggtcccgacctattcggtcgccgccgatcttttccagccgctccgctccattctcggcctgttcggcatcgagatgacgctggaatggaacctcctgaactcctatgccggcctgaccctgccgcttgtcgccacagccaccggcacctttctctaccggcagttcttcatgacgatcccggacgagctggccgaagcggcccgcatggatggttcgggcgccgcacgtttcttcgtcgacatgctgctgccgctctcgcgcaccaacatgctggcactcaccaccatcatgttcgtttatgcctggaaccagtatctgtggccgctgctgatggtcacggacccttcctacaagacggtgatgatgtcgctcagggcgctgttgcccgccgatgacggcaccccggactggaacgtgacgctggccggttccctcatcatcatcctgccgccgcttttcgtcgtggccttcctgcaacgctggttcgtccgtggcctcgtctcgtccgacaagtga

SEQ ID NO: 116183 - protein, 294 aa, Agrobacterium tumefaciens str. C58
MIQRTPYADALTYAIMVAGFLLLIGPFLVVISGASQSVQQVNSVPFSFMPQGEFLANAQTAWARANLGNALWNSLIMATLVTIGKVALSAFTAFAIVFFRSPLKHLFFWTVFITLMLPLEVRVVPTYSVAADLFQPLRSILGLFGIEMTLEWNLLNSYAGLTLPLVATATGTFLYRQFFMTIPDELAEAARMDGSGAARFFVDMLLPLSRTNMLALTTIMFVYAWNQYLWPLLMVTDPSYKTVMMSLRALLPADDGTPDWNVTLAGSLIIILPPLFVVAFLQRWFVRGLVSSDK

SEQ ID NO: 116184 - DNA, 849 bp, Sinorhizobium meliloti 1021
  CDS (1)..(849): transl_table=11
atgagcagtaagcgtccccagccatttttctcccgatcgcaggtcacgctggtccgtggcctctggatggtggtgacggcgatcctcgccttcatgacgctctttccgctcctctggatcgtatcgatcgccttcaagccggccgccgagtcgttctcttcgaaccttatcccgcaggcaccgacgctcgacaacttcatctatgtactgaccggcgttccgttcatccgatacatggtcaacagcttcctcgtgtccgccacggtcacggtcgtggcgctgttcttccacaccatggccggttatgcgctggcgcggctgagatttcccggccgagaggtgatgtttctctcaatcttctcgacgttcctcgtctcgctgccggtgatcatcgtgccgctcttcgtcatcgtcaaagccatgggcatgctcaactcctacgcaggattgatcatcccggcgatcttcaacgccttcggcattttccttctcaggcagtattacctgtcgctgcccaaggagatcgaggaagccgcgcgcatcgacggcgcgggttactggcggatctactggagcgtcatcctcccgctcagccgcccaatcatgtcggcactggcgatcctgtttttcctggccaactggaactccttcctgtggccgctcaccatcacctcggaccccgatctctgggtcgtccaactcgggattgcgaatttcaagagccagtattcggcgtcctggaactacatgatggccgcttccacgatcgtcgcgattccgaccctcatcctcttcgtgatcttccagaggcagatcatggattccctcaagaccagcgggctcaagtga

SEQ ID NO: 116185 - protein, 282 aa, Sinorhizobium meliloti 1021
MSSKRPQPFFSRSQVTLVRGLWMVVTAILAFMTLFPLLWIVSIAFKPAAESFSSNLIPQAPTLDNFIYVLTGVPFIRYMVNSFLVSATVTVVALFFHTMAGYALARLRFPGREVMFLSIFSTFLVSLPVIIVPLFVIVKAMGMLNSYAGLIIPAIFNAFGIFLLRQYYLSLPKEIEEAARIDGAGYWRIYWSVILPLSRPIMSALAILFFLANWNSFLWPLTITSDPDLWVVQLGIANFKSQYSASWNYMMAASTIVAIPTLILFVIFQRQIMDSLKTSGLK

SEQ ID NO: 116186 - DNA, 876 bp, Sinorhizobium meliloti 1021
  CDS (1)..(876): transl_table=11
atgacggtgagcgcagtcaccacgaggcgctattcgaacgcgacttaccggaccttgcgccgtgtaaagacggccggactctatgccggcgtggcggccgtcctcgtctacatgctgtttccctattactgggcgatcgtctcctcgaccaagacggggcaggcgctttaccagttcactctgctgccggcgctcgatttcagcaactacaggcaattgttcgacaatccggtattcatgggcgcgctcgtcaattccggcgtggtcgcgcttgtcagtacggcggtctccctcgtcatcggcattcttgcggcttacgcgctcggccgcctccatttcccgccgggccgcatcgttctgatcgccgttctcatgatctcggtctttccgcaagtggtggtgctttcgggaatgttcgaggtgatcggatggctcgggctctacaatcggccgtcggcgctgatcgtctcgtatctcattctcactttgccctttacgacatggatcctgacgagcttcatccgtgacctgccgaacgaattggaggaggcggcgctcatcgacggctgttcgcgcctgcgcatcctcacccacgtgctgctgccgctgatggggcctgcgattgccagcaccggtctgctgtcgttcatccttgcatggaacgaattcctctttgcgctcaccttcatcctgaccgacgagaaccggacggttcccgtagcgatcggccttctgaccggcagcagccgctacgaatatccgttcggccagatcatggccgcgtccgtcacggtgacgctgccgctgctcgttctcgtcctgatcttccagcgcaagatcgtggcggggttgacctccggcgccgtcaaggggtga

SEQ ID NO: 116187 - protein, 291 aa, Sinorhizobium meliloti 1021
MTVSAVTTRRYSNATYRTLRRVKTAGLYAGVAAVLVYMLFPYYWAIVSSTKTGQALYQFTLLPALDFSNYRQLFDNPVFMGALVNSGVVALVSTAVSLVIGILAAYALGRLHFPPGRIVLIAVLMISVFPQVVVLSGMFEVIGWLGLYNRPSALIVSYLILTLPFTTWILTSFIRDLPNELEEAALIDGCSRLRILTHVLLPLMGPAIASTGLLSFILAWNEFLFALTFILTDENRTVPVAIGLLTGSSRYEYPFGQIMAASVTVTLPLLVLVLIFQRKIVAGLTSGAVKG

SEQ ID NO: 116188 - DNA, 849 bp, Listeria innocua Clip11262
  CDS (1)..(849): transl_table=11
atgaaaacagaaaaaagtggttcaccaaaatggcaactaataaaaaatattcttacctatacgattatctgtcttggtggaattatcatgcttatgccgtttgtttggatgatttcaacagcctttaaaacaggtgcggcaaacatggttctaccgccacaatttattcccaaagaaccgacaaccgcaaacttcactcaagtatttgaaatgttcccaatgttaagatttttaatgaactcagttgttgttgccgttgtaacgacacttggtcaaatgctgttttgttcgatggcagcatacgcatttgcgagaatacctttctggggccgcgataagttatttttactttatttagcgacaatgatggttccagctcaagttacgatgattccgcaatttatcttaatgaaacagtttggttggttagattcttatgcagggctgattgtaccagcgttattcagcgttttcggcactttcttattacgccaagctttcatgggaattccaaaagaattagaagaagccgcatttatggatggggcaaatcattttactattttccgaaaagttattttaccacttgcgaaacctacatttgcaacacttggaattttaacttttatgcaatcttggaacagttatttatggccattaatcgtgacaagttcacaagaaatggcaactttacctttaggattatctcttttacaaggtagatatggaacgaattacggcttaatgatggcgggtgtacttattagtgttatcccgattctagcagtgtacctttttgctcaaaaatatttcatccaaggaatggctatgagcggaatgaaagaataa

SEQ ID NO: 116189 - protein, 282 aa, Listeria innocua Clip11262
MKTEKSGSPKWQLIKNILTYTIICLGGIIMLMPFVWMISTAFKTGAANMVLPPQFIPKEPTTANFTQVFEMFPMLRFLMNSVVVAVVTTLGQMLFCSMAAYAFARIPFWGRDKLFLLYLATMMVPAQVTMIPQFILMKQFGWLDSYAGLIVPALFSVFGTFLLRQAFMGIPKELEEAAFMDGANHFTIFRKVILPLAKPTFATLGILTFMQSWNSYLWPLIVTSSQEMATLPLGLSLLQGRYGTNYGLMMAGVLISVIPILAVYLFAQKYFIQGMAMSGMKE

SEQ ID NO: 116190 - DNA, 843 bp, Agrobacterium tumefaciens str. C58
  CDS (1)..(843): transl_table=11
atgtacaagacgagacctctcgatcatctggtattgatcctcggcgcactgtttctgatattgcctgtcgtcgtggccttcatgacatccacccacacggcggcggaaatccaccgtagcggtctgacgatagtcccgggcgataatttcgtggagacctacgaaaaggtcctgacgcagaagggtggcttcaccgggcaggtcaccggtctcaacatggtgatcaactcgctggtcctcggcatcggttttgccgtcggcaagatcgtcctgtcgatgacggcggcctatgcgatcgtctatttccgcttccggtttgcgacgcttgccttctggatcattttcaccacgctgctcttgccgctcgaagtgcgcatcatgccgtcctatgaggtgatgagcaaactcggcctcctgaattcctataccggcctcatcgtgccgcttctcgcctcggccaccggcaccttttatttccggcaattcttcaagtccgttccggaggagttgctggaagccgcgcgcatcgatggcgcgggtcctgtgaaattcttcatcgatatattaatccccctgtcccgcacgatgatgtcggcgatcttcatcatcatgttcgtgtacggctggaaccagtacctctggcccatgctgatgacgacggacgagaggttcttcacgctgatgcgtggcatcaagtcgatcctgcaggtctgggtcggttcgcaaattcccgattacaacgaagctttcgcgcttgccgtcctggccatgctgccgccggtgctgatcgtcgtcattttccagcgctggttcatcaagggcctgaccgaaagcgataaataa

SEQ ID NO: 116191 - protein, 280 aa, Agrobacterium tumefaciens str. C58
MYKTRPLDHLVLILGALFLILPVVVAFMTSTHTAAEIHRSGLTIVPGDNFVETYEKVLTQKGGFTGQVTGLNMVINSLVLGIGFAVGKIVLSMTAAYAIVYFRFRFATLAFWIIFTTLLLPLEVRIMPSYEVMSKLGLLNSYTGLIVPLLASATGTFYFRQFFKSVPEELLEAARIDGAGPVKFFIDILIPLSRTMMSAIFIIMFVYGWNQYLWPMLMTTDERFFTLMRGIKSILQVWVGSQIPDYNEAFALAVLAMLPPVLIVVIFQRWFIKGLTESDK

SEQ ID NO: 116192 - DNA, 837 bp, Corynebacterium efficiens YS-314
  CDS (1)..(837): transl_table=11
atgattgccaccgaccgcggtccactcatcaagatcatgggatatgcgagcatgatcctcgccgtggtgttcatcggcctgcccctggtgttcatcgtgctcaccagcttcaaacagcagtccgagatctacacccagccggtgacctggctgccggagcagttcaacttcgacaactaccgcaatgtcttcgaccgggtgccgtttttcgactacttccgcaactcgatcctgatcaccatcatcctgtgcaccatcaagatcatcctgggcatcatctccgcctacgcactggcgatcctgcgcttcccggggaggaacctggtgttcctcctggtcatctccgcactgatggtgccgtccgaggtgacggtgatctccaactacgcgctggtcagccagctcgggtggcgtgacacctaccagggcatcatcatcccgctggcgggtatcgccttcggcaccttcctcatgcgcaaccacttcatgtccattccccacgagctgatcgaggcagcacgcatggaccactgcggccacttcaggctgctgtggaaggtgctgctgcccatctccctgcccaccatcgtggcattttccatgatcaccatcgtcaacgaatggaaccagtacctgtggccgttcctgatggcggaaaccgaggcctcggcgaccctgccgatcggcctgaccatgctgcagaacaacgagggcgtctccaactggggaccggtcatggcggccaccatcatgaccatgctcccggtcctggtgatgttcctcgccctgcagcagtacatgatcaagggcctgatctcgggtgcggtcaaggggtaa

SEQ ID NO: 116193 - protein, 278 aa, Corynebacterium efficiens YS-314
MIATDRGPLIKIMGYASMILAVVFIGLPLVFIVLTSFKQQSEIYTQPVTWLPEQFNFDNYRNVFDRVPFFDYFRNSILITIILCTIKIILGIISAYALAILRFPGRNLVFLLVISALMVPSEVTVISNYALVSQLGWRDTYQGIIIPLAGIAFGTFLMRNHFMSIPHELIEAARMDHCGHFRLLWKVLLPISLPTIVAFSMITIVNEWNQYLWPFLMAETEASATLPIGLTMLQNNEGVSNWGPVMAATIMTMLPVLVMFLALQQYMIKGLISGAVKG

SEQ ID NO: 116194 - DNA, 846 bp, Escherichia coli CFT073
  CDS (1)..(846): transl_table=11
atgattgagaaccgtccgtggctgacaatattcagccataccatgctgatcctcgggatcgcggtgatcctcttcccgctgtacgtggcgtttgtcgcggcgacgctggataaacaagaagtctatgccgcaccgatgacgctaatccccggcacacatctgctggaaaacatccacaacatctgggtaaacggggtaggcacgaatagcgcgccgttctggcggatgttgcttaacagctttgtgatggcgttcagcattacgctcggcaaaattaccgtctcgatgctctcggcatttgccattgtctggtttcgttttccgctacgtaacctcttcttctggatgatttttatcaccctgatgttgccggttgaagtgcgtatcttcccgacggtggaagtcatcgccaacctgaaaatgctcgacagctacgcaggtttaacgctgccgctgatggcctcggcgaccgccacgtttctgtttcgccagttctttatgaccctaccggatgaactggtggaagccgcgcggatcgacggcgcgtcgccaatgcgtttcttttgcgacatcgtttttccgctgtccaaaaccaatctggcggcgctgtttgtgattacctttatttacggctggaaccagtatttgtggccgttgttgattattaccgacgttgatctcggcaccaccgtggcagggattaaagggatgatcgccacaggcgaaggcacaacggaatggaactcggtgatggcggcgatgttgttaaccctgatcccaccagtagtgattgttttagtgatgcagcgtgccttcgtgcgcggcctggtcgatagtgagaaataa

SEQ ID NO: 116195 - protein, 281 aa, Escherichia coli CFT073
MIENRPWLTIFSHTMLILGIAVILFPLYVAFVAATLDKQEVYAAPMTLIPGTHLLENIHNIWVNGVGTNSAPFWRMLLNSFVMAFSITLGKITVSMLSAFAIVWFRFPLRNLFFWMIFITLMLPVEVRIFPTVEVIANLKMLDSYAGLTLPLMASATATFLFRQFFMTLPDELVEAARIDGASPMRFFCDIVFPLSKTNLAALFVITFIYGWNQYLWPLLIITDVDLGTTVAGIKGMIATGEGTTEWNSVMAAMLLTLIPPVVIVLVMQRAFVRGLVDSEK

SEQ ID NO: 116196 - DNA, 843 bp, Vibrio vulnificus CMCP6
  CDS (1)..(843): transl_table=11
atgaaaagtaatcgactctctgatcacttaattttgatcgctggcgcactctttatgttgctgccactttggctgatcttcgccagctctacccacaacccaaacaccatcgtctcggaaggattgcaatggacgctaggagacaatctgcaagcggtttacagcgaggcatggaacaaaagtttgggctttgctagtaatgtgaccgctcataccatgatcgtgaactctctcatcatggggctaggttttgcgattggtaaaatcattatctcgatgatggcagcgtacgcactggtttattttcgcctaccctattccaccgcgtggttttggctgatcttcatcacactgctgctgccgctggaagtgcgtatcatcccttcgtatgaagtggtttctcgcttaggtatgctcaatagctacactggtttagtgctgcctcttatcgcctccgccactgccacgtttttctttcgtcaattttttaaaaccattcctgatgaactgctcgaggcagcacaacttgacaatgcagggccgatacgattttttatcgatattttgttccctctgtccaaaaccatgatggccgccatcttcatcatcatgtttatcgtgggttggaatcaatatctctggccgatcatgatgaccaccgatgagcagtacaacaccatcgtcatgggcatcaaacagattctcaataacatcaatgaaaccagcttacctcgttatgactacgcctttgccatggtgatcctcgccatgttgccacctgttttggtggtggtcatcttccagcgttggtttgttaaaggattagtagaaagtgaaaaataa

SEQ ID NO: 116197 - protein, 280 aa, Vibrio vulnificus CMCP6
MKSNRLSDHLILIAGALFMLLPLWLIFASSTHNPNTIVSEGLQWTLGDNLQAVYSEAWNKSLGFASNVTAHTMIVNSLIMGLGFAIGKIIISMMAAYALVYFRLPYSTAWFWLIFITLLLPLEVRIIPSYEVVSRLGMLNSYTGLVLPLIASATATFFFRQFFKTIPDELLEAAQLDNAGPIRFFIDILFPLSKTMMAAIFIIMFIVGWNQYLWPIMMTTDEQYNTIVMGIKQILNNINETSLPRYDYAFAMVILAMLPPVLVVVIFQRWFVKGLVESEK

SEQ ID NO: 116198 - DNA, 894 bp, Pseudomonas syringae pv. tomato str. DC3000
  CDS (1)..(894): transl_table=11
atgatcaggcacagtcggctgctcgatgcagttgcctacttactgctgacgctgggtctggtgttcgcgttggggccgctgtatatggcggtctgctcggcgaccgtcagtaactcgcagctgttcacttacggccttgcggtcgtgcccggcgaccagttgctggagaacctgcagcaggttacccggcgtctggacttgctgcgtttgctgggcaacagcctattggtcgccacgctggtggtgatcggcaaactggcgctctcggccttgaccgcctttgcggtggtgtactttcgcagccgttacacgtcagtgattttcttcgctgtactgggcgcgctgttgctgccgctggaggtgcgcatcatccccacgtatgccgtggccagtgatctcctcgggccgctgcgcacggtattgcgatggctgggcatccagtggctgccggtgccgaccattaatctgctcgacagctacaccggcctcgccctgcccctgatcgcttcggccaccggtacttttctgtttcggcagttctaccagaccctgcccgccgaactggtcgaggccgcgcgaatggatggcgccgggccgtggcgctttttcatcgacattctgctgccgctgtcgaagaccaacttcgctgcgctgggcacgctggtgtttatcggcgcctggaaagactacctgtggccgctggtggcgaccaaccgcgaggacatgcgcacgctggtgctgggcgtcgccagctttctgccgaccgatgcaagtcaaatccctgaatggaacctgctgatggccgctgcagtggtcagcatgctgccccctatcctcgtcattgcgctcatgcagcgatggttcgtcaaaggcctgatcggagtcggtaaatga

SEQ ID NO: 116199 - protein, 297 aa, Pseudomonas syringae pv. tomato str. DC3000
MIRHSRLLDAVAYLLLTLGLVFALGPLYMAVCSATVSNSQLFTYGLAVVPGDQLLENLQQVTRRLDLLRLLGNSLLVATLVVIGKLALSALTAFAVVYFRSRYTSVIFFAVLGALLLPLEVRIIPTYAVASDLLGPLRTVLRWLGIQWLPVPTINLLDSYTGLALPLIASATGTFLFRQFYQTLPAELVEAARMDGAGPWRFFIDILLPLSKTNFAALGTLVFIGAWKDYLWPLVATNREDMRTLVLGVASFLPTDASQIPEWNLLMAAAVVSMLPPILVIALMQRWFVKGLIGVGK

SEQ ID NO: 116200 - DNA, 846 bp, Streptomyces avermitilis MA-4680
  CDS (1)..(846): transl_table=11
atgacctcgatacgagggctggtgcgccggccctggcggctcgccgccgaggcgtccgcgctgctgatcgcggtcgtcgtcgcgttcccgctctactggatggtgctgagcgccctcaaaccggcgggcgagatcgagtcgacgcggccgcggccctggacgctgtccccctcgctggattccttccggcgcgtcttcgaacagcaggaattcggccgctacttcctcaacagcctggtggtggcgtgctccgtggtcgtcgtctccgcattgatcgcctttctcgcggcgaccgcggtgacccgattccgcttccgattccggaccaccctgctgatcatgttcctggtcgcccagatggtgcccgtggaagccctgacgatccccctcttcttcctgatgcgggacttcggtcagctgaacacgctcggctcgctgatcctgccccacatcgccttctcgctgccgttcgcgatctggatgctgcggggctttgtgaaggccgttccggacgcgctggaggaggccgcgtacatcgacggggcgagccgggcgagattcctctggcagatccttttccccttggtcttcccggggctggtggccacgagtgtcttttccttcatctcggcctggaacgacttcctgttcgccaagtccttcatcatcagcgacacgtcccagtcgacgctgccgatggctctcctcgtcttctacaaaccggacgagcccgactggggcggtgtgatggcggcgtccacggtgatgacgattccggtgctggtcttcttcgtactcgtgcaacggcggctcgtgtcgggcctcggcggagcggtaaaggactga

SEQ ID NO: 116201 - protein, 281 aa, Streptomyces avermitilis MA-4680
MTSIRGLVRRPWRLAAEASALLIAVVVAFPLYWMVLSALKPAGEIESTRPRPWTLSPSLDSFRRVFEQQEFGRYFLNSLVVACSVVVVSALIAFLAATAVTRFRFRFRTTLLIMFLVAQMVPVEALTIPLFFLMRDFGQLNTLGSLILPHIAFSLPFAIWMLRGFVKAVPDALEEAAYIDGASRARFLWQILFPLVFPGLVATSVFSFISAWNDFLFAKSFIISDTSQSTLPMALLVFYKPDEPDWGGVMAASTVMTIPVLVFFVLVQRRLVSGLGGAVKD

SEQ ID NO: 116202 - DNA, 861 bp, Chromobacterium violaceum ATCC 12472
  CDS (1)..(861): transl_table=11
atgaaccactccaccaccctggccatccccgccgcccgcgcgcgcgcggaccggctggccgcgcgggccgtccattacctggcgctgtcggcgatcgcgctgatcaccgtctacccgttctggtggacgctggcgacggcgctgtccggcgacggcgaggtgttcgcctttccgccgcccttgctgcccaccgcgccgacgctggagcatttccacgaggcggtatccagcatcgacatcctggccttttaccgcaactccttcgccatcgccgcgctgacggtggccggcacgctgctggtcagcgcgctggccgcctacccgctggcgcgcatgaagtttcccggccgccggctggtgttcggcgccatcctcgccaccatgatcctgcccagcgaggtcaacttcctggtcaacttcatcaccgtgtccaagctgcagctgaccgacagctacagcggcgtggtgctgccgacgctggcaggcgcggtgggcatcttcctgctgaagcaggcgttcgaggcggtgccgcaggatctgatcgacgccgcccgcgtcgacggcgcgtccgaatggcagatcttctggcgcatcatgctgccgctggcgcggccggcgctggcggcgctgaccatcctcaccacggtgtcggcgtggaaccagtacatctggccatccatcgtgatgtccagcccggacaagtttccgctgtcggtcggcgtgctgtacctggccggcgccttcagcttcaagacgcgggtggtggcggcaggcgcggtgctgaccgtgctgcccatcctgatcgtgttcctgttcacccagcgctatttcctgcgcggattcgatggagcggtgaaatga

SEQ ID NO: 116203 - protein, 286 aa, Chromobacterium violaceum ATCC 12472
MNHSTTLAIPAARARADRLAARAVHYLALSAIALITVYPFWWTLATALSGDGEVFAFPPPLLPTAPTLEHFHEAVSSIDILAFYRNSFAIAALTVAGTLLVSALAAYPLARMKFPGRRLVFGAILATMILPSEVNFLVNFITVSKLQLTDSYSGVVLPTLAGAVGIFLLKQAFEAVPQDLIDAARVDGASEWQIFWRIMLPLARPALAALTILTTVSAWNQYIWPSIVMSSPDKFPLSVGVLYLAGAFSFKTRVVAAGAVLTVLPILIVFLFTQRYFLRGFDGAVK

SEQ ID NO: 116204 - DNA, 822 bp, Bacillus cereus ATCC 10987
  CDS (1)..(822): transl_table=11
atgatcgttaaacagtggaaacaaaatttcctattatacatgctgctcattattagtgcagtaatggtgttttttcctgtactctatgcatttttaataagctttatgacaccagacgatattcaaatgagaaggttatttccgactcaatttacttttgataattttattaatatttttcaaaaagtaccgctttttacatacttatataacagtttagttgtatcgacagttgttatgattggacaacttatcgtatcaagcttagcagcgtatgctttcgtctttcttcagtttaaaggaagaaatcttattttcttcctgtttatttcaacgatgcttattccgtgggaagcgacgatggtacctaactttttaacgattcaaaactttggttggatcaatagcttcgctggaatgacagtgccgttttttgcaacagctttcggtattttcttactacgtcaacactttatgacgcttccgaatgaactgaaagaagctgcttttattgaagggattggaaatgtaaagtttttatttagcgttgtaattccgtattgtaaaacgagttttattacgcttggagtatatagttttttaacaacatggaatatgtacttatggccacttttagtgaccactgatgaaaaggtaagaacagtccaaattggtgtgaagcagcttcagtctcaagaagttgcaactgattggggaagcgtaatggccggtgttacggttatcgtaattccgacattgattctactatttttagggcaaaagcaattacaacaaggattaacaaaaggtgcaattaaataa

SEQ ID NO: 116205 - protein, 273 aa, Bacillus cereus ATCC 10987
MIVKQWKQNFLLYMLLIISAVMVFFPVLYAFLISFMTPDDIQMRRLFPTQFTFDNFINIFQKVPLFTYLYNSLVVSTVVMIGQLIVSSLAAYAFVFLQFKGRNLIFFLFISTMLIPWEATMVPNFLTIQNFGWINSFAGMTVPFFATAFGIFLLRQHFMTLPNELKEAAFIEGIGNVKFLFSVVIPYCKTSFITLGVYSFLTTWNMYLWPLLVTTDEKVRTVQIGVKQLQSQEVATDWGSVMAGVTVIVIPTLILLFLGQKQLQQGLTKGAIK

SEQ ID NO: 116206 - DNA, 849 bp, Bradyrhizobium sp. ORS278
  CDS (1)..(849): transl_table=11
atggtcgagcaccgccccctgcgtgacctcgtcgcctacctcgtgctcgcgctgggcatcgtgatcttcgcctttcctgtctacgtcgccttcatcgcctcgacctacgacgcggcgacggtcgtcagcggcaatctgccgctgacgcctggccacaatctgctgcagaactactatcgcgccgtgttcgtcggcggctcccgcttcatgaaccagccggtcggggtgctgctcgccaactccttcatcaccgcgatcggtatcgccctgggcaagatcttcatctcgatcctgtcggccttcgcgatcgtgtatttccgcttcccgttccgcaagaccgcgttctggatcatcttcatcaccttgatgctgccggtcgaggtccgcatctacccgacctacaagatcgtcgccgacctgcgcctgctcgacacctatgccgggctgatccttccgctgatcgcctccgccaccggcacgctgctgttccgccagttcttcatgacggtgccggacgagctgctggaagcgtcacgcatcgacggcgccggccccttgcgcttcttctgggacacgctgctgccgctgtcgatgacgacggtggcggcgctgttcgtgattcagttcatctacggctggaaccagtatttgtggccgttgctgatcaccaccaaggactcgatgcagaccatcgtgatcggcatcaagaagatgctgagcacgacggacgagctcgccgagtggcagctggcgatggccaccgccgtgctggcgatgctgccgccggtcgcggtcgtggtgttcatgcagcggctgttcgtcaaggggctggtggagacggaaaagtga

SEQ ID NO: 116207 - protein, 282 aa, Bradyrhizobium sp. ORS278
MVEHRPLRDLVAYLVLALGIVIFAFPVYVAFIASTYDAATVVSGNLPLTPGHNLLQNYYRAVFVGGSRFMNQPVGVLLANSFITAIGIALGKIFISILSAFAIVYFRFPFRKTAFWIIFITLMLPVEVRIYPTYKIVADLRLLDTYAGLILPLIASATGTLLFRQFFMTVPDELLEASRIDGAGPLRFFWDTLLPLSMTTVAALFVIQFIYGWNQYLWPLLITTKDSMQTIVIGIKKMLSTTDELAEWQLAMATAVLAMLPPVAVVVFMQRLFVKGLVETEK

SEQ ID NO: 116208 - DNA, 852 bp, Bartonella quintana str. Toulouse
  CDS (1)..(852): transl_table=11
atggttgaaaatcgccctattttgaaatttctaacccatatcacccttattattggcatttttattatctgttttccagtttatgttgctattattgcatcaacccatagttcagcggcatttaactcaggaacacttccccttttaccgggaaagtatgcgttggaaaactataaaacaatctttggtgatgatcttgtgcagcttggtctgcccaatctctggccactcttaatgaattcgctcattatggcacttggcattagtattggaaaaattattatttcactcttgtctgcttacgcaattgtctacatgcgcttcccttttcgcaaaactgcttttgccctcatttttatcacactgatgctgcctatcgaagttcgtattattccaacgtatgcagtggtcgcacaattaggcatgataaacacctatggcgggatgattattccacttattgcatccgcaactgctacatttttatttcgccagttttttttgactgttcctgatgaactcttagaagctgctcgcgttgatggtgcaggatcatttaaattttttaaagatattcttctccctcttagcaaaagcaatattgcggctttatttatcattatgttcatttatggatggatacaatatctctggcccctcatagttacaactgatcaaaatcatcaaactattcttattattctcaaacaacttatcgtagaatcacttcaacatgatcctaaatggaatatactcatggcagtatcagtcgtcgccatggtgccgcctgttcttgttgtcatctgcatgcagcggctttttatcaaaggtcttattgaaacggagaaatga

SEQ ID NO: 116209 - protein, 283 aa, Bartonella quintana str. Toulouse
MVENRPILKFLTHITLIIGIFIICFPVYVAIIASTHSSAAFNSGTLPLLPGKYALENYKTIFGDDLVQLGLPNLWPLLMNSLIMALGISIGKIIISLLSAYAIVYMRFPFRKTAFALIFITLMLPIEVRIIPTYAVVAQLGMINTYGGMIIPLIASATATFLFRQFFLTVPDELLEAARVDGAGSFKFFKDILLPLSKSNIAALFIIMFIYGWIQYLWPLIVTTDQNHQTILIILKQLIVESLQHDPKWNILMAVSVVAMVPPVLVVICMQRLFIKGLIETEK

SEQ ID NO: 116210 - DNA, 828 bp, Symbiobacterium thermophilum IAM 14863
  CDS (1)..(828): transl_table=11
atgagcgtccagtcccgtctcacccggctgctgctgtatgcggccctctgcctggcggccctcttcatggtgttccccatcctctacgcggtgtccatcagcctcatgccgccggcggaggtcaacaccttcccgccccgcttcctgcccagctcaccccgctgggccaattacgccgaggtggcccggtcggtgccggtggggcgctacctgctgaactccctggtggtctcctcggccgtgaccctcggccagatcgccaccgccagcctgtccgcctacgccttcgccttcatgaacttccggggcaaggcggccctgttcgccctgttcatgtccaccatgatggtgccctgggaggtcacgctgatccccaactacctcacgatccgttcgctccggctgctggattcgtacaccgggctggtccttccgttcctggccaccgctttcggcacgttcctgctcaggcagttcttcctgcagatcccgagggagctggaggaggcggcccggattgacggctgcggccggttccggttcttctggtccatcgccctgcccctggcccggccgggcctcctgacgctgggggcgtacacgttcctcagcacctggaaccagtacctgtggccgctcctggtcaccaacacgcgtctcatgcggacggtgcagatcggggtgcgcttcctgatgaacgaggaggggctgcagtaccaccgggtgatggccggcgtggtgctgtgcatggcgccggccctggtggtcctggtgctggggcagcgctacttggtgcggggcctgatggccggcggcctcaagggctag

SEQ ID NO: 116211 - protein, 275 aa, Symbiobacterium thermophilum IAM 14863
MSVQSRLTRLLLYAALCLAALFMVFPILYAVSISLMPPAEVNTFPPRFLPSSPRWANYAEVARSVPVGRYLLNSLVVSSAVTLGQIATASLSAYAFAFMNFRGKAALFALFMSTMMVPWEVTLIPNYLTIRSLRLLDSYTGLVLPFLATAFGTFLLRQFFLQIPRELEEAARIDGCGRFRFFWSIALPLARPGLLTLGAYTFLSTWNQYLWPLLVTNTRLMRTVQIGVRFLMNEEGLQYHRVMAGVVLCMAPALVVLVLGQRYLVRGLMAGGLKG

SEQ ID NO: 116212 - DNA, 852 bp, Silicibacter pomeroyi DSS-3
  CDS (1)..(852): transl_table=11
atggtcgaaaatcgccccatcctgaatgtcatcacccatctggttctgatccttggcatcgtcatcgtcgcgctgccgatctggatcacctttgtcgccgccacccatgacgcggtgcgcatgacacaggcgccgatcccgatgctgccgggcacccatttctgggagaatttcactcagaccctgtttggctctggcctgagcgggaccgagaccgcaccggtctggcggatgctgctcaacagcctggccatggcgatgatgatcgccttgggcaagatcgcgatctcgctgatttcggcctttgccatcgtctatttcaagtttcccttccgcatgttctttttctggctgatcttcgtcaccctgatgctgccggtcgaggtgcgcatcctgcccacgttcgaagtggtggccgatctgggcatgctcaacagctattggggcctgtcgatcccgctgattgcctcggccacggcaacgttcatgttccgccaggtgtttctgaccatccccgacgagatgctggaaagcgcgcgcatcgacggggccgggccgctgcgctttttctgggatatcctgatcccgctgtcgcgcaccaatatcgcggcgctgttcgtgatcctcttcatctatggctggaaccagtatctgtggccgctgctgattaccactgacaccgacatgaccaccatcgtgatgagcatcaagcaaatgcttgaggcggcggaacagtccccgcaatggaacatcatcatgatgaccgcgctgctggcgatgctgccgccggtcttcgtggtggtcgcaatgcaaaagctctttgttcagggcctgacagagaccgacaaatag

SEQ ID NO: 116213 - protein, 283 aa, Silicibacter pomeroyi DSS-3
MVENRPILNVITHLVLILGIVIVALPIWITFVAATHDAVRMTQAPIPMLPGTHFWENFTQTLFGSGLSGTETAPVWRMLLNSLAMAMMIALGKIAISLISAFAIVYFKFPFRMFFFWLIFVTLMLPVEVRILPTFEVVADLGMLNSYWGLSIPLIASATATFMFRQVFLTIPDEMLESARIDGAGPLRFFWDILIPLSRTNIAALFVILFIYGWNQYLWPLLITTDTDMTTIVMSIKQMLEAAEQSPQWNIIMMTALLAMLPPVFVVVAMQKLFVQGLTETDK

SEQ ID NO: 116214 - DNA, 810 bp, Bacillus clausii KSM-K16
  CDS (1)..(810): transl_table=11
atgaaagttaacggatggcatttgttattggcgatttgcctggtccttagtttttttccggttttgacaatggcggcaaccgcttttcttgaaacaagccagttgtttgcaggtggtttgcaattattgccgattccgcctacattagaccattttagccaagtgtgggagtcgatcccgattttacgctatatgggcaactctttcttcgtcgcaacagtggttacattgatacaactgttcactagcatccttgctgcttacgggtttactcaatttcaattccgtgggagagagttttgcttttacttggtcattgcgagcatattcattcctattcaagtgacgatgctgccaaactatattctgttaagtgatttagagcttgtaaacacctatttcggtttaatagtgccgcaaatcgcaaatgggatcggcgttttcctgttaaggcaatcgtttcggtctgttcctgccagcctaattgagtctgctcgcgtggacggggcaggggattggcgcaggctttggaaaattttattcccgtcggttaagccatcggtgattgctctaggcattctcttttttattacgacatggaacgaatatttatggccgttactaatgattaacgacaacgacttgatgacgatgcctctcgctttgcaagaatttataagtgcagaagggggcacatcgtgggggccgatgatggctgttgcatttctggcgtccgtcccgccactcgctgtgtatttgttgttgcagcgacatattatgagcagctttttgcatacaggggtgaagtag

SEQ ID NO: 116215 - protein, 269 aa, Bacillus clausii KSM-K16
MKVNGWHLLLAICLVLSFFPVLTMAATAFLETSQLFAGGLQLLPIPPTLDHFSQVWESIPILRYMGNSFFVATVVTLIQLFTSILAAYGFTQFQFRGREFCFYLVIASIFIPIQVTMLPNYILLSDLELVNTYFGLIVPQIANGIGVFLLRQSFRSVPASLIESARVDGAGDWRRLWKILFPSVKPSVIALGILFFITTWNEYLWPLLMINDNDLMTMPLALQEFISAEGGTSWGPMMAVAFLASVPPLAVYLLLQRHIMSSFLHTGVK

SEQ ID NO: 116216 - DNA, 894 bp, Pseudomonas syringae pv. syringae B728a
  CDS (1)..(894): transl_table=11
atgatcgagcataaccggctgttcaacgcaggcgcttacctgctgctgacccttggcctggtgttcgcgttggggccgctgtacatagcggtctgctcggcgaccgtcagtaacccgcaattgttcgcccacggtcttgcggtgatccctggcgaccaactgttggagaatctgcagcgggtcagtcggcgtctggatctgctgcgcctgctgggcaacagcctgctggtcgccacgctggtggtgatcggcaagctggcgctctcggcgctgacggcctttgccgtggtgtactttcgcagccgctacagttcggtgatgttcttcgccgtgctgggggcgctgctgctgccgctggaagtacggatcatccccacgtatgccgtggccagcgatctgctcggccccgtgcgcagcctgttgcactggctgggcattcagtggctgccactgccgaccatcaatttgctcgacagctaccccggcctcgccctgccgctgattgcctcggcgaccggcacctttctgtttcggcagttctaccagacgctgcctgccgagctggtcgaggccgcacgcatggacggtgcagggccctggcggtttttcatcgacatcctgctgccactgtcgaagaccaactttgctgcgctcggcacgctggtgttcatcggcgcctggaaggactacctgtggccgctggtggcaaccaatcgcgaggacatgcgcacgctggtactgggcgtggccagctttctgccgaccgatgcaacccaggtccccgagtggaacctgctgatggccgctgctgtggtcagcatgctgccgcccatcctcgtcattgcgctcatgcagcgctggtttgtcaaaggcctgatcggagtcggtaaatga

SEQ ID NO: 116217 - protein, 297 aa, Pseudomonas syringae pv. syringae B728a
MIEHNRLFNAGAYLLLTLGLVFALGPLYIAVCSATVSNPQLFAHGLAVIPGDQLLENLQRVSRRLDLLRLLGNSLLVATLVVIGKLALSALTAFAVVYFRSRYSSVMFFAVLGALLLPLEVRIIPTYAVASDLLGPVRSLLHWLGIQWLPLPTINLLDSYPGLALPLIASATGTFLFRQFYQTLPAELVEAARMDGAGPWRFFIDILLPLSKTNFAALGTLVFIGAWKDYLWPLVATNREDMRTLVLGVASFLPTDATQVPEWNLLMAAAVVSMLPPILVIALMQRWFVKGLIGVGK

SEQ ID NO: 116218 - DNA, 846 bp, Burkholderia sp. 383
  CDS (1)..(846): transl_table=11
atgatcgaaaatcgcaagggcttcgacctgttctgtcacgcggtgctgatcgcgggtgtggtgctggtcgtgtttcccgtctacgtcgcgttctgcgcggcgacgatgaacgcgcaggaagtgttcacggtgccgctgtcgctcgtgccgagcacgcacctgttcgagaacgtcgcgtacatctgggggcatggcagcgccggcacgaccgcgccgttcggccgcctgctcctgaacagcttcgcaatggcgttcggcatctccgtgggcaagatcgcggtgtcgatcctgtctgcgtacgcgatcgtctatttccgcttcccgttccgcaacacggcgttctggctgatcttcgtcacgctgatgctgccggtggaggtgcggatcttcccgaccgtgcaggtcgtgtcgacgttgcacatgacgaacacctatgcggggctcacgctgccgctgatcgcatcggcgaccgcgacgttcctgttccgccagttcttcatgacgttgcccgacgagctgatggatgccgcgcgcatcgacggcgcggggccgctgcggttcttctgggacgtcgtgctgccgctgtcgaagacgagcatcgcggcgctgttcgtgatcacgttcatctacggctggaaccagtatctgtggccgatcctgatcacgacggaggcgtcgctgtcgacggcggtggtgggcatcaagacgatgatcgcgagcggcgacgccgcgaccgaatggcaatacgtgatggcggcgacgctgctgggaatgatcccgccgctcgtcgtcgtgctggcgatgcagcgctggttcgtgcgcggcctcgtcgattccgagaaataa

SEQ ID NO: 116219 - protein, 281 aa, Burkholderia sp. 383
MIENRKGFDLFCHAVLIAGVVLVVFPVYVAFCAATMNAQEVFTVPLSLVPSTHLFENVAYIWGHGSAGTTAPFGRLLLNSFAMAFGISVGKIAVSILSAYAIVYFRFPFRNTAFWLIFVTLMLPVEVRIFPTVQVVSTLHMTNTYAGLTLPLIASATATFLFRQFFMTLPDELMDAARIDGAGPLRFFWDVVLPLSKTSIAALFVITFIYGWNQYLWPILITTEASLSTAVVGIKTMIASGDAATEWQYVMAATLLGMIPPLVVVLAMQRWFVRGLVDSEK

SEQ ID NO: 116220 - DNA, 819 bp, Moorella thermoacetica ATCC 39073
  CDS (1)..(819): transl_table=11
atgaaaactaaaatcccgtggtggcatttctcgctgctgctggtggtccttgggtcattgctccctttgatatggatgcttgccaccgcctggaaaacgccggaacaagtttttaatgcttcattaaacccctggccgtacccggcgacggcggccaattttgcttatgttgtgggggctattcccctggggcgttatattttgaacaccttcataattgccttcatagtaacggcagccaaattactgaccagcatcctggcagcctatggctttacccagttttctttccgcggccgggaaaccctgttttacctttgcctcttaagcatcttcgtcccttttacggtaaccatgatgcccaattacctctttatgtcaagaatgggatggcttaacacctatacaggggtggcgcttccccagatggccgatgcccttggcattttcctgttgcggcagagtatccgcagcatccctccatccctggtggaagccgcccgcctggacagggtgggacatggcaggatattagggcgcgtgctcctgccggcgataaagccgagcctgatcgccctgggtatccttttctttatcaatacctggaacgaatatttctggccccttttaatgatcaatgacaagagcatgtacactttgcccctggcattacagatgtttaccaacctcgagggaggaactaactggggggcgatgatggcggcggcgaccctggcttcattgccacctctggtcgcttacctcctggcccagcgttatgtaatggatacttttgttcagtcggggttgaaggggtaa

SEQ ID NO: 116221 - protein, 272 aa, Moorella thermoacetica ATCC 39073
MKTKIPWWHFSLLLVVLGSLLPLIWMLATAWKTPEQVFNASLNPWPYPATAANFAYVVGAIPLGRYILNTFIIAFIVTAAKLLTSILAAYGFTQFSFRGRETLFYLCLLSIFVPFTVTMMPNYLFMSRMGWLNTYTGVALPQMADALGIFLLRQSIRSIPPSLVEAARLDRVGHGRILGRVLLPAIKPSLIALGILFFINTWNEYFWPLLMINDKSMYTLPLALQMFTNLEGGTNWGAMMAAATLASLPPLVAYLLAQRYVMDTFVQSGLKG

SEQ ID NO: 116222 - DNA, 846 bp, Burkholderia thailandensis E264
  CDS (1)..(846): transl_table=11
atgatcgagaatcgcaagggcttcgacctgttctgccacgcggtgctgatcgcgggcatcgcggtcatcgtgtttcccgtgtacgtcggcttctgcgcggcgacgatgaacgcgcgcgaagtgttcacggtgccgctgtcgctcgtgccgagcacgcatctgttcgagaacgtcgccgagatctggcggcgcggcagcggcggcatgacgacgccgttcggcacgctgctcgtcaacagcgtcgtgatggcgctcgtgatcgcggcgggcaagatttcggtgtcgatcctgtccgcgtacgcgatcgtctatttccgctttccgctgcgcaacgccgcgttctggctgatcttcgtcacgctgatgctgcccgtcgaggtgcggatctttccgaccgtgcaggtggtgtcgacgctgcatctgacgaacagctacgcgggcctcacgctgcccctcatcgcgtcggcgacggcgaccttcctgttccggcagttcttcatgacgctgcccgacgagctcgtcgacgcggcgcgcatcgacggcgcgggcccgctgcgcttcttctgggacgtcgtgctgccgctgtcgaagacgagcatcgccgcgctgttcgtgatcacgttcatctatggctggaaccagtatctgtggccgatcctgatcacgaccgacgcatcgctctcgacggccgtcgtcggcatcaagtcgatgatcgcgagcggcgacgccgcgaccgaatggcatctcgtgatggcggcgacgctcgtcgcgatgctgccgccgctcgtcgtcgtgctcgcgatgcagcgctggttcgtgcgcggtctcgtcgattcggaaaaataa

SEQ ID NO: 116223 - protein, 281 aa, Burkholderia thailandensis E264
MIENRKGFDLFCHAVLIAGIAVIVFPVYVGFCAATMNAREVFTVPLSLVPSTHLFENVAEIWRRGSGGMTTPFGTLLVNSVVMALVIAAGKISVSILSAYAIVYFRFPLRNAAFWLIFVTLMLPVEVRIFPTVQVVSTLHLTNSYAGLTLPLIASATATFLFRQFFMTLPDELVDAARIDGAGPLRFFWDVVLPLSKTSIAALFVITFIYGWNQYLWPILITTDASLSTAVVGIKSMIASGDAATEWHLVMAATLVAMLPPLVVVLAMQRWFVRGLVDSEK

SEQ ID NO: 116224 - DNA, 849 bp, Mesorhizobium sp. BNC1
  CDS (1)..(849): transl_table=11
atgaccgctccttcccgtcctcgcctcaccgtctggaccgtcctcaaatgggcgctcgccatcctggtcgcaatcattgcggtcttcccggtctggtggatgatcaacgtcgtgttctcgctgcccggcgagccggtctcaatcaatccgcggctgtggccgacatcgatcgcggccgggatcgagaagatccagatgatcttcgcggagaccggatatttaagggcttacggcgtgtcgctgctctacgcggcactgacgatcttcggcgtcctcctgatcggctctctcgcggcgttcgaattcgcgttgttcgagttccgcgggaagcgggtcctcttcgctgttatcatgctgtcgctcatggtgccgaccgcggtaacgatcatcccgacctatttgttgacctcgtcgctcggatggctgaacacgatgcagggcctggtcgtgccgggcctggcctcggcctttggcctgttcatgctggtgcagtttatgggcgcgatcccccgcgacatgatcgaggcggctcggctcgacggcgccagtcacttccagatctactggcacgttgcgcttccgctctgccgcaacgcgctggtcacgctcgcgatcctgaccttcatgcagacctggggcaattacatgtggcccctgatcgtggcgactcgccccgaaatgtacaccgtgggccaggtcgttgggcttttcaacgccccgctgtcgcaccagaccgtcgacgtcgtaatgaccgccaacctcctcgccgccattccgccgctcctcttcttcctgatcttccagcggaagatcgtcgagggcatcgcgatgtccggcaccaagggataa

SEQ ID NO: 116225 - protein, 282 aa, Mesorhizobium sp. BNC1
MTAPSRPRLTVWTVLKWALAILVAIIAVFPVWWMINVVFSLPGEPVSINPRLWPTSIAAGIEKIQMIFAETGYLRAYGVSLLYAALTIFGVLLIGSLAAFEFALFEFRGKRVLFAVIMLSLMVPTAVTIIPTYLLTSSLGWLNTMQGLVVPGLASAFGLFMLVQFMGAIPRDMIEAARLDGASHFQIYWHVALPLCRNALVTLAILTFMQTWGNYMWPLIVATRPEMYTVGQVVGLFNAPLSHQTVDVVMTANLLAAIPPLLFFLIFQRKIVEGIAMSGTKG

SEQ ID NO: 116226 - DNA, 900 bp, Rhodococcus sp. RHA1
  CDS (1)..(900): transl_table=11
atgaccgcggacacccggcgcgaacagcgcagcacggaggtgccggtgacggcagacccggcccgtgaccatcgccgccgggaggtgctcgtgacggccctgggatacgccgcgatggtggcggtgctggtcatggtggccctgccgctgtactggatcgtgatgacgtccttcaaggatcgcccggacgtctacaccctgccggtcacctggtggcccggcaccttccatcccgagaactactcggaggccaccacgtcggtgccgttctggacgttcctgcgcaactccgtgatcatcaccggggtgctggccgtcgtgaagttcgcactcggcgtgttcagtgcctacggactggtgttcctgcggttcccgggcaagaacgtcgtattcctcggcatcatcgccgccttgatggtgcccaaccagatcacggtcatctccaactacgcactcgtcgccgaatggggctggcggaacagctttcacggcatcatcgttccgctcgccggggtcgcgttcggaacgttcctgatgcgcaaccacttcctgtcgatacccaccgagatcgtcgaggccgcccggatggacggcgcaggccacttcgggctgctgtggcgggtgatcctgccggtgtcggggcccaccatggtggcgttcgcgatcatcaccgtcgtcaccgagtggaacgaatacctgtggccgttcctgatggccgacgacgcgtccgtcgcgcccctgccggtcgggttgacccaactccagaacaacgacgggctcaccaactggggcccggtcatggcgggaacggtactcacgatgctgccgattctcgtggttttccttgtgctgcaacggcacatgatcaagggcctcacatcgggtgcggtcaagggatag

SEQ ID NO: 116227 - protein, 299 aa, Rhodococcus sp. RHA1
MTADTRREQRSTEVPVTADPARDHRRREVLVTALGYAAMVAVLVMVALPLYWIVMTSFKDRPDVYTLPVTWWPGTFHPENYSEATTSVPFWTFLRNSVIITGVLAVVKFALGVFSAYGLVFLRFPGKNVVFLGIIAALMVPNQITVISNYALVAEWGWRNSFHGIIVPLAGVAFGTFLMRNHFLSIPTEIVEAARMDGAGHFGLLWRVILPVSGPTMVAFAIITVVTEWNEYLWPFLMADDASVAPLPVGLTQLQNNDGLTNWGPVMAGTVLTMLPILVVFLVLQRHMIKGLTSGAVKG

SEQ ID NO: 116228 - DNA, 885 bp, Rhizobium leguminosarum bv. viciae 3841
  CDS (1)..(885): transl_table=11
atgacgattgatccgacctcactgcatccgcattccgtgtcccagcatcgtcaccgcatattgcggcgcgtcggcaccttcgtcagctacgcggcactttcgctgatcgcgctgcttttcctcttccccttcttctggatggtgtcgaacgcggtgcgctccaatgccgaggtgatggccgtgccggtccgcatcttccctgaggagtatcattggggaacattcgtcgaagccctggtttccctgccgttcggaaccttcctgttgaattccttcgtggtcgcctgcggcgttacggcgatcgtgattgcggtatcctgcctgtccgcctacgccttcgcccgcctgaggtttcccggccgggaggggctgctgcttacctatctcagcacgctgatgatcccgcaggtgatgctggtcattccgctcttcctcatcgtcagcaagttcggctggatcaacacctatcacggcatgatcctgccggtcgccttcagctctttcggcacctttctgctgcggcagttcatcctcggcattcccaaggatctcgacgaggcggcgatgatggacggagcttcgcgcctgcgtatcctggtcacggtcatcgttccgcttgccatgccggccatcggcctgctggcgctgttcaccttcatcgcacaatggaagagtttcctctggccgctgatcgccaccagcggcgtcgaaatggccacgctgccgctcgggctcaccctgttccagacacagcagggcaccgcgtggaactacatcatggccggtgcgacgatctccatggtgcctggtgtcatcctggccatcgtgctgcagagggtaatctacaagggcattaccgtcagctccggctttggtgggcgctaa

SEQ ID NO: 116229 - protein, 294 aa, Rhizobium leguminosarum bv. viciae 3841
MTIDPTSLHPHSVSQHRHRILRRVGTFVSYAALSLIALLFLFPFFWMVSNAVRSNAEVMAVPVRIFPEEYHWGTFVEALVSLPFGTFLLNSFVVACGVTAIVIAVSCLSAYAFARLRFPGREGLLLTYLSTLMIPQVMLVIPLFLIVSKFGWINTYHGMILPVAFSSFGTFLLRQFILGIPKDLDEAAMMDGASRLRILVTVIVPLAMPAIGLLALFTFIAQWKSFLWPLIATSGVEMATLPLGLTLFQTQQGTAWNYIMAGATISMVPGVILAIVLQRVIYKGITVSSGFGGR

SEQ ID NO: 116230 - DNA, 921 bp, Rhizobium leguminosarum bv. viciae 3841
  CDS (1)..(921): transl_table=11
atgcccgaacgtcatctcggtctttcgatcttctgccacgccatactgctgattggcgcgatctttgtctgccttcccctctacttcgctttcgtcgccggatcattgacgttgcagcaggttcagcaggcgccgttcccggtcatcccaggctcccattttctcgaaaaccttgccgccgcctggcagcagggcgagttctcccggttgtttttgaattcgatcatcgtcaccgccggcatcgttatcggaaagctggcgatctcattgattgcagcatttggcgtgacctattttcgcttcccgtttcgcatgacggcattctggctcattttcgtgtcgctgatgcttccggtcgaggtccgcatcatcccgacctatgaagcggtcgccgatgctgccgggccgctgcgctggttggccgggtcgatcggtctttccggtgtcgttgaagggctcaccggatacagtatcgaagcatccttgaagtggaacatggtcaacagctacgccggcctgatcctgcctctcatcgcctctgcctccgcgaccttccttttccggcagttcttcctgaccgttcccgatgaactctgcgaggccgccaagctcgatggagccggcccgctgaaattcttcaaggacattctccttccactctcgagcgccaatatcgcggccctgtcgatcatcctgtttctctatggctggaaccagtatttgtggccgctgctcttcacgacggacaaggagatgggaactgcggtccttgggctgaagcagctcgttcccgtctcggactcagcacctgcctggaacatcgcgatgagtgcggcacttctcgtcatgcttccgcctgcggccgtcattctcttcatgcagcgctggttcaccaagggactggtggactccggaaagtaa

SEQ ID NO: 116231 - protein, 306 aa, Rhizobium leguminosarum bv. viciae 3841
MPERHLGLSIFCHAILLIGAIFVCLPLYFAFVAGSLTLQQVQQAPFPVIPGSHFLENLAAAWQQGEFSRLFLNSIIVTAGIVIGKLAISLIAAFGVTYFRFPFRMTAFWLIFVSLMLPVEVRIIPTYEAVADAAGPLRWLAGSIGLSGVVEGLTGYSIEASLKWNMVNSYAGLILPLIASASATFLFRQFFLTVPDELCEAAKLDGAGPLKFFKDILLPLSSANIAALSIILFLYGWNQYLWPLLFTTDKEMGTAVLGLKQLVPVSDSAPAWNIAMSAALLVMLPPAAVILFMQRWFTKGLVDSGK

SEQ ID NO: 116232 - DNA, 918 bp, Rhizobium leguminosarum bv. viciae 3841
  CDS (1)..(918): transl_table=11
atgattgaaaacgcacgttccctcaacatcgcagccagcctcgtcctcatcgtcggcatcgtctatatcctcgggccgctctatctgacgctggcgacagcctcgcaatcctatgaattcatcctgcgcaacgggctcgcctggtatcccggcgaccagtttttcaccaatgcggcgcacatcttcaccgagacgcacatcccggtccagatgctcaacagtctggtggtcgccttcggtgatgcattcgcgacctgcgtcctgtcgcttctgtcggcctatgccatcgtctatttcagggttcgctgggcgggcgttgtcttcgcgctcatccttgcgaccatcatgctgccgatcgagatccgcgtcatcaccacctaccaggtggcgtcgaacgtgttttcgccggtcaacgcgctgctcgatatcaccggcctgaacgggctgatcgccgactatttcggcgcgccggtgaagctcgaatggagcgtgctgaacacgcatttcggcctgatcgcgccgcttgtggcgcatggcaccggcaccttcctgttccgccagttcttcctcaccctgcccaaggatctgttcaaggcggcgcgcatggatggggcagggccgattcgctttctcttcgatatcctgctgcccttgtcgcgcaccagcttcgctgcgctcttcgtgctgaccttcctcagcggctggacgcaatatctctggccgctggtcgccgcctcgacgtcagacatgcagaccgccgtcgtcgggctggcgcggcttgtgccggatgcggagggagagatccctgatttcccgatgatcatggccggcgccgttatcgtttccatcattccgctcgcgatgatcgcgcttctgcagcgctatctcgtccagggcctcgctctcacggagaaatag

SEQ ID NO: 116233 - protein, 305 aa, Rhizobium leguminosarum bv. viciae 3841
MIENARSLNIAASLVLIVGIVYILGPLYLTLATASQSYEFILRNGLAWYPGDQFFTNAAHIFTETHIPVQMLNSLVVAFGDAFATCVLSLLSAYAIVYFRVRWAGVVFALILATIMLPIEIRVITTYQVASNVFSPVNALLDITGLNGLIADYFGAPVKLEWSVLNTHFGLIAPLVAHGTGTFLFRQFFLTLPKDLFKAARMDGAGPIRFLFDILLPLSRTSFAALFVLTFLSGWTQYLWPLVAASTSDMQTAVVGLARLVPDAEGEIPDFPMIMAGAVIVSIIPLAMIALLQRYLVQGLALTEK

SEQ ID NO: 116234 - DNA, 915 bp, Rhizobium leguminosarum bv. viciae 3841
  CDS (1)..(915): transl_table=11
atgatcgaacgcacgccgatattcaacttcatctgctatacgcttctcgcgctcggcatggtgatcgcgcttctgcctttcgccatcgtcatcatcgcctcgacgcttgatctggagacggtcaatcgtgtgccgctgccgctggttccaggctcgcatttctgggaaaacgcgcagaccgcctgggttcgcgccgatctcggcaacaagctgtttcacagcgtcatcttcgccgcaaccgtcggcgccggcaaggtgatgctgtcttccatggcagccttctcgatcgtctacttccgctttcgcggccggtatgtgattttctggatcatcttcatcacgctgatgctgccgctggaagtccgcatcgtgccgacctattcgattgcggccaacgcgctgcagcctttccagacgatcctcgacgtcaccggcataagctggctcgtcgcgcagatcaccggcgttcagatcaagctcgaatggggcctgctgaattcctatcccggtctcgttctgccgctggtcgcgaccgcgaccggcaccttcctctaccggcagttctacctgacggttccggacgagcttgccgaggcctcgaagatggacggatcaggcccggtccggttcttctgggacattctgctgccgctctcccgcccaaatatgatcgcgctcttcaccatcatgttcgtctgggcctggaaccagtatctctggccgctgctgatcaccaccgatccgaatttcggcatcgccgtgacgcagctcaagaccctcatcccgtccgaattcggcctgcccgactggaacgtcgcaatggccggaaccctgatcatcatgtcgccgccattgatcctcgtcattctgatgcagcgctggttcgtacgcggccttatctccaccgagaagtga

SEQ ID NO: 116235 - protein, 304 aa, Rhizobium leguminosarum bv. viciae 3841
MIERTPIFNFICYTLLALGMVIALLPFAIVIIASTLDLETVNRVPLPLVPGSHFWENAQTAWVRADLGNKLFHSVIFAATVGAGKVMLSSMAAFSIVYFRFRGRYVIFWIIFITLMLPLEVRIVPTYSIAANALQPFQTILDVTGISWLVAQITGVQIKLEWGLLNSYPGLVLPLVATATGTFLYRQFYLTVPDELAEASKMDGSGPVRFFWDILLPLSRPNMIALFTIMFVWAWNQYLWPLLITTDPNFGIAVTQLKTLIPSEFGLPDWNVAMAGTLIIMSPPLILVILMQRWFVRGLISTEK

SEQ ID NO: 116236 - DNA, 828 bp, Nocardioides sp. JS614
  CDS (1)..(828): transl_table=11
atgtctgagcccgcccgcagccggttccgctccgcggccgtcctcgccctggtggtcctgggcgctgtggtcatgctgttcccgttcctctggacggtgatcacctcgatcacgcccggcggcagcctggccgacggtccgacgctgttcgtcgacaaccccacgctggcggcctaccgggcgctgctggacgcgatgccgatctggcggatcctggtgaactcgttcgcgatcgccgtcgcctccacggtcctgcagctggtcaccggctcgatggcggcctacggcttcgcccgcctgcgcttcccgggccgcaacgtggtgttcgcgctctatctcgcgacgatgatggtgccgctgcaggtcctcgtcgtcccgctcttcatcgagatgaagacgctgaacctgcaggacacctacctgggcctgctcgccccgtcgatcgcgtcggccttcggcgtcttcctgctcaagcaggcggtcgagaccgtgcccctcgagctggacgaggcggccaccatcgacggcgccgggcacctgcggatcttcgccacgatcgtgctccccctgatccggccggcactggcgacggtcgcggtcttcgcgttcatggcctcgtggaacagcttcctgtggcccctggtggtgatccgctcgcccgagctgatgaccctgccgctcggcctggcgaccctccaggggcagttcaccacccggtgggacgtggtgatggccgggtcggtggtctcggtcgtcccgatcgcggtcgtctacctgctcgcccaacgccacgtcgtggccggcatcgcgcacaccggcatcaagtga

SEQ ID NO: 116237 - protein, 275 aa, Nocardioides sp. JS614
MSEPARSRFRSAAVLALVVLGAVVMLFPFLWTVITSITPGGSLADGPTLFVDNPTLAAYRALLDAMPIWRILVNSFAIAVASTVLQLVTGSMAAYGFARLRFPGRNVVFALYLATMMVPLQVLVVPLFIEMKTLNLQDTYLGLLAPSIASAFGVFLLKQAVETVPLELDEAATIDGAGHLRIFATIVLPLIRPALATVAVFAFMASWNSFLWPLVVIRSPELMTLPLGLATLQGQFTTRWDVVMAGSVVSVVPIAVVYLLAQRHVVAGIAHTGIK

SEQ ID NO: 116238 - DNA, 915 bp, Mesorhizobium loti MAFF303099
  CDS (1)..(915): transl_table=11
atggttgagcgcaccccgttcctcaatttcttcacgcatctgatcctgttcatcggcttcgtcttttgcatcgcgccgttcgtggtcgtggcgatcgcggcgtcgcacaacctcaaggatgtcaacgatgtgccgatgtcgctgctgccgggcagcgacttctgggtcaacatcaagaccgcctggacgaccgccgatctcggtcccaagctgctcaacagcttcatcatggcgacaggcgtcgccgccggcaaagtgatcatctcggcgctcaccgccttctcgatcgtctacttccgctatcccggccgcatgctgatcttctggctgatcttcatcacgctgatgctgccgctcgaagtgcgtatcgtgccgacctacgccgtggtcgccaacgtgctcgagccctatcaggcgatcctggacctgaccgggctttcctggctgatcgagaaagtctcgggcgtgcaggtccagctcagcctcggactgctcaattcctatagcggactgatcctgccgctggtcgccaccgcgaccggcacgttcctctaccggcagttcttcctgaccgtgccggacgaactgaccgaggccgcccgcatggacggcgcaggggcgctgcggttcttcatcgatatcctgctgccgctgtcgcgcaacaacatggcggcgctcggcaccatcatgttcctgtgggcctggaaccagtatctgtggccactgctcatcaccacggaccagtcgcatacgatggcggtgaccgagctcaaacaattgatccccaatgtcggcggcgttccggaatggcacatcgccatggccggcacgctgatcgtcatgctgccgccgctgatcgtcgtggtgctgatgcagcgctggttcgtgcgcggcctgatcgccaccgagaagtaa

SEQ ID NO: 116239 - protein, 304 aa, Mesorhizobium loti MAFF303099
MVERTPFLNFFTHLILFIGFVFCIAPFVVVAIAASHNLKDVNDVPMSLLPGSDFWVNIKTAWTTADLGPKLLNSFIMATGVAAGKVIISALTAFSIVYFRYPGRMLIFWLIFITLMLPLEVRIVPTYAVVANVLEPYQAILDLTGLSWLIEKVSGVQVQLSLGLLNSYSGLILPLVATATGTFLYRQFFLTVPDELTEAARMDGAGALRFFIDILLPLSRNNMAALGTIMFLWAWNQYLWPLLITTDQSHTMAVTELKQLIPNVGGVPEWHIAMAGTLIVMLPPLIVVVLMQRWFVRGLIATEK

SEQ ID NO: 116240 - DNA, 831 bp, Thermotoga maritima MSB8
  CDS (1)..(831): transl_table=11
atgaggaggaagagatcaatcacaatcctctacgaaataattcttgtaatggtgactttcataatggctctgccattgtttcttgcgataactataagttttcaaaaacctgaggctgtattttcataccccccgaagttttttccaacgagtttttactggaaaaattatgtagaagctttcaaatatgttccgctggcaaggctttttttgaacagcttgatcgttgcatcacttataacgcttggaaaacttaccactggagcgctcgcgggttttgctttttctcatttcaatttcaagagtaaaaaaattatgttcgctactttgtttgccactctattccttcccgcagaaactgttatgattctccccctatttctgatcatgaaaacctttggctgggtcaatacttactgggctctgacaattcctttcatggcaagcgcaacaaatacctttctcatgagacagcattttcttacgattccaagagaactccaggacgctgcacttatagacggagcaagttacatgcaatttttctggaaagtgctgatccccctctcaaaacacatgttagcaggtgcttccataataaacttcgtttatgcctggaacatgtatctctggcctttgatagtgagcatggaagacaaaatgaaaacggtccaggtaggagtgaagatgctcatgcaggctgaatcagccaacaactggggtgtaataatggcgggtaccgtggttgctctagcgccaaccgttgtgatgtttctcgctcttcagaacctgtttgtgaaaagtcttgtgaggagtggtatgaaagggtga

SEQ ID NO: 116241 - protein, 276 aa, Thermotoga maritima MSB8
MRRKRSITILYEIILVMVTFIMALPLFLAITISFQKPEAVFSYPPKFFPTSFYWKNYVEAFKYVPLARLFLNSLIVASLITLGKLTTGALAGFAFSHFNFKSKKIMFATLFATLFLPAETVMILPLFLIMKTFGWVNTYWALTIPFMASATNTFLMRQHFLTIPRELQDAALIDGASYMQFFWKVLIPLSKHMLAGASIINFVYAWNMYLWPLIVSMEDKMKTVQVGVKMLMQAESANNWGVIMAGTVVALAPTVVMFLALQNLFVKSLVRSGMKG

SEQ ID NO: 116242 - DNA, 843 bp, Vibrio cholerae O1 biovar eltor str. N16961
  CDS (1)..(843): transl_table=11
atgaaaagtaatcgactctccgatcatttgatccttatcgctggcgcactgtttatgctagtgccgctgtggctgattttcgcaagctcaacccatcagccaaacaccattgtctcggaaggtttgcaatggactcttggcgataatctcagcgcagtttatcgcgaagcatggaataaaagcctcggttttgccggtaatgtcaccgcgcaaaccatgatcgttaactcgatgatcatgggcttgggttttgcgattggcaaaatcgtaatttcgatgatggccgcttacgctttggtctactttcgtttgccttatgccagcgcgtggttttggctgattttcattaccctactgctgccgcttgaagtgcggattattccctcttatgaagtggtgtccaatttaggcatgctcaatagctacaccggcttagtgctacccctgattgcctccgctaccgcgacgtttttcttccgtcagttttttaaaaccataccggatgaactgttggaagcggctcagcttgataacgcaggccctatacgtttttttatcgatattttatttcccctctcgaaaaccatgatggccgcgattttcatcatcatgtttgtggtgggttggaaccaatacctgtggccgatcatgatgaccacggatgagcagtacaacaccatagtgatgggcataaaacagattctcaataacatcaatgaaaccagcttgccgcgttatgactacgcgtttgccatggtgatcctcgccatgctgccaccggttttggtggtggtgattttccaacgttggtttgtaaaaggattagtcgaaagtgaaaaataa

SEQ ID NO: 116243 - protein, 280 aa, Vibrio cholerae O1 biovar eltor str. N16961
MKSNRLSDHLILIAGALFMLVPLWLIFASSTHQPNTIVSEGLQWTLGDNLSAVYREAWNKSLGFAGNVTAQTMIVNSMIMGLGFAIGKIVISMMAAYALVYFRLPYASAWFWLIFITLLLPLEVRIIPSYEVVSNLGMLNSYTGLVLPLIASATATFFFRQFFKTIPDELLEAAQLDNAGPIRFFIDILFPLSKTMMAAIFIIMFVVGWNQYLWPIMMTTDEQYNTIVMGIKQILNNINETSLPRYDYAFAMVILAMLPPVLVVVIFQRWFVKGLVESEK

SEQ ID NO: 116244 - DNA, 813 bp, Bacillus halodurans C-125
  CDS (1)..(813): transl_table=11
atgaaaacgacgagaccttatatcgtatatccgctcctatgtctctcggcattgcttatcttttttccgattgtttacgcgttttttgtaagctttatgagcggcgctgaagtgttaagccgggcattttttccgtcgtccgttaacgttgacaactatgaaaaagttttttcaacggtcccgcttcttcactatttgcaaaatagtttcattgtctcaatcacagttatgatcggtcagctcatcgtttgttcgttatctgcatatgtctttgcctttatcccttttaaagggcgtacgttcgtgtttctcttgttcatctctacgctcatgattccgtgggaagcggccatgatcccgaattttctcacgatccaaaaactaggctggctaaactcctatttagggatgaccgttccatttttcgccctcgcctttgggacgtttttgcttcgccagcattttaagacgattccgaaggagcttcatgaagcagcgcaagtcgagggactttctccgtttcaatttttttataaagtgtgccttccttatgcgaagacgagtctagtgactcttggaatctacggatttttaacgacgtggaacatgtacttgtggccgcttctcgtcacgacaaatgatcgtaagcgaacggtccaaatcgggcttaaacaattacaaacggtcgaagttgcgaccgaatggggggtggttatggcaggagtcgtcgttgtcattattcctaccttattgcttctgtttctcgggcagaagcagctgcaaaaagggttaacgcaaggagcaattaagtaa

SEQ ID NO: 116245 - protein, 270 aa, Bacillus halodurans C-125
MKTTRPYIVYPLLCLSALLIFFPIVYAFFVSFMSGAEVLSRAFFPSSVNVDNYEKVFSTVPLLHYLQNSFIVSITVMIGQLIVCSLSAYVFAFIPFKGRTFVFLLFISTLMIPWEAAMIPNFLTIQKLGWLNSYLGMTVPFFALAFGTFLLRQHFKTIPKELHEAAQVEGLSPFQFFYKVCLPYAKTSLVTLGIYGFLTTWNMYLWPLLVTTNDRKRTVQIGLKQLQTVEVATEWGVVMAGVVVVIIPTLLLLFLGQKQLQKGLTQGAIK

SEQ ID NO: 116246 - DNA, 849 bp, Agrobacterium tumefaciens str. C58
  CDS (1)..(849): transl_table=11
atgattgaaaatcgccccatcgcccgcgtgattgcccatctgatgctggttctcggcatcatcatcgtggccttcccgatctattacaccttcatcgcgtcctccatgacatcgaatgatatcatccgcccgcccatgtcgctgctgcccggcgatcatctcagtgcgaattacaccgaggccatggtcggcggtgtcgaaagagtggttggcgtcagcctcgagcggctactgttcaacagcttcgtcgttgcgctcgccatcgccatcggcaaaatcgtcatctcgttcctgtcggcattcgccatcgtgtttttccgctttcccttccgcatgggctttttctggatgatcttcatcaccctcatgctgccggtggaagtgcgcatcctgccgacctacaaggtcatcgtcgatctcgggctgatcgacacctatgcgggactgacgctgccgctgatggcatcggcaacggcgactttcctgttccggcagtttttcctcaccattcccggtgagctggtcgaggcggcgcgtatcgacaatgccggcccattccgcttcatgcgcgatattctgctgccgctgtcgagaaccaatatcgccgctcttttcgtgattctgttcatctatggctggacccagtatctctggccgctgctcgtcaccaacgatgccaagatgaacacgatcatcatcggcctcaagcgcatggtggatttcaccgacgcttcgacaccctggaattatgtgatggtgacggcgatcctcgccatcatcccccctgttatggttgtggtgctgatgcagcgctggttcgtcaaaggtttggtggagaccgagaagtaa

SEQ ID NO: 116247 - protein, 282 aa, Agrobacterium tumefaciens str. C58
MIENRPIARVIAHLMLVLGIIIVAFPIYYTFIASSMTSNDIIRPPMSLLPGDHLSANYTEAMVGGVERVVGVSLERLLFNSFVVALAIAIGKIVISFLSAFAIVFFRFPFRMGFFWMIFITLMLPVEVRILPTYKVIVDLGLIDTYAGLTLPLMASATATFLFRQFFLTIPGELVEAARIDNAGPFRFMRDILLPLSRTNIAALFVILFIYGWTQYLWPLLVTNDAKMNTIIIGLKRMVDFTDASTPWNYVMVTAILAIIPPVMVVVLMQRWFVKGLVETEK

SEQ ID NO: 116248 - DNA, 879 bp, Halobacterium sp. NRC-1
  CDS (1)..(879): transl_table=11
atggggcgtgatacaatggccactgacaccgcccagtcttcgacccggacgacccaccgtgacatcctccccgagaacgctctgatgcacctggggctgttcggcgcgatcgcactgatggccgccccactcgtgttggccgtgctgatgagcacgcaaacgaccgccgaagtctaccagcccaccaccatcggacccggcagtaacgccctccagaactaccaggccgcgctcacaacgtacaacttcgggacctacctcctcaactcgctggtgatgagcatcgccgtcgtcatcgggaaagtcaccctctcgttgctggccgcgctcgcgctcgtctactacgaactcccgtacgagcgcgcgatcttcatgttcgttctgctcacgctgttgttacccgttccagtccggatcgtgcccctcttccagctgatggcggatctcggctggacgaacaccctcctagcgatcacggggccgtacatcgccagcgcaaccgcggtgttcctgttccgccagcatttccgctcgattcccgactcgctggtcgagacagcccacgtggatggggtcggcccgtttcgcttcctggtgtccgtgctgatcccgatgtcccgcagcatgatcgccggcgtctgcgtcatcacgttcatctactcctggaaccagttcctctggccgctcatcgcggtcacggacaaaccaagtcaggtcgcccaggtcgggattcgatacatccagggggcggcccaggccggcttgacacagtggggcgtcatcatggccgcggcggtgctcgcgttgttgccgccgcttgccgtactgctggtcttccaccgttcgcttcgcgaaaccatcgcgattcagcaatcctga

SEQ ID NO: 116249 - protein, 292 aa, Halobacterium sp. NRC-1
MGRDTMATDTAQSSTRTTHRDILPENALMHLGLFGAIALMAAPLVLAVLMSTQTTAEVYQPTTIGPGSNALQNYQAALTTYNFGTYLLNSLVMSIAVVIGKVTLSLLAALALVYYELPYERAIFMFVLLTLLLPVPVRIVPLFQLMADLGWTNTLLAITGPYIASATAVFLFRQHFRSIPDSLVETAHVDGVGPFRFLVSVLIPMSRSMIAGVCVITFIYSWNQFLWPLIAVTDKPSQVAQVGIRYIQGAAQAGLTQWGVIMAAAVLALLPPLAVLLVFHRSLRETIAIQQS

SEQ ID NO: 116250 - DNA, 849 bp, Sinorhizobium meliloti 1021
  CDS (1)..(849): transl_table=11
atgattgaaaagcgccccatctccaacctaatcgggcacctgatgctgatcatcggcatcatcatcgtggttttcccgatctattataccttcgtcgcctcaagcatgagctcggtcgagatcatcaggccgcctatgccgcttgttcccggcacgcggcttgccgagaattatagcgaagcgctttccggtggcgtcgagcgtgtggtcggcgtcagcctggaacgcttgctgttcaacacattcgtggtggcgatcgcgatcgccgtcggcaagatcgtcatttccttcctctcggccttcgccatcgtgttcttccgtttccctctgcgcatggccttcttctggatgatcttcatcacgctgatgctcccggtggaggtgcggatcctgccgacctacaaggtgatcgtcgatctcggactgatcgacacctatgcgggactgacgcttcccctgatggcgtcggcgacggcgaccttcctgttccggcagttctttctcaccatcccgggcgaactcgtggaagcggcgcgcatcgacaatgccgggccgttccgcttcatgcgggatattctgctgccgctttcaaagaccaatatcgcggcgcttttcgtgatcctcttcatctacggctggacccagtatctctggccgctgctggtcacgaatgacagccggatgaacacgatcatcatcggcctcaggaagatggtcgatttcactgacgcatcgaccccgtggaactacgtcatggtgaccgccatcctcgcgatcatcccgcctgtcgcagtggtcgtcctgatgcagcgctggttcgtcaagggcctcgtcgaaacggagaagtaa

SEQ ID NO: 116251 - protein, 282 aa, Sinorhizobium meliloti 1021
MIEKRPISNLIGHLMLIIGIIIVVFPIYYTFVASSMSSVEIIRPPMPLVPGTRLAENYSEALSGGVERVVGVSLERLLFNTFVVAIAIAVGKIVISFLSAFAIVFFRFPLRMAFFWMIFITLMLPVEVRILPTYKVIVDLGLIDTYAGLTLPLMASATATFLFRQFFLTIPGELVEAARIDNAGPFRFMRDILLPLSKTNIAALFVILFIYGWTQYLWPLLVTNDSRMNTIIIGLRKMVDFTDASTPWNYVMVTAILAIIPPVAVVVLMQRWFVKGLVETEK

SEQ ID NO: 116252 - DNA, 849 bp, Ralstonia solanacearum GMI1000
  CDS (1)..(849): transl_table=11
atgatcgaacgccgcccgttcctggatgtcctgacccacctcgtgctgatcctgggcgtggtggtggtcgcctttccggtctacgtggtcttcgtcgcgtcctcgctgacggccgaggacgtgctgcaggcgccgatgacgctgatccccggcccgcacctgatcgacaactaccgcgaggtgctcgcgcacggcatgggcaacgccgccacgccggtcggcaccatgctgatgaacagcctgatcatggcgctgggcatctcgctgggcaagatcgcgatctccatcatctcggccttcgccatcgtctatttccgctttccgctgcgcaagaccttcttctggctgatcttcgtcacgctgatgctgccggtggaggtgcgcatcctgccgacctacaaggtggtgtcggacctcggcatgctcaacagctacttcggcctgaccatcccgatcatcgcctcggccaccgccacgttcctgttccgccagttcttcctgaccattcccgacgagctcgccgaggccgcgcgcatcgacggcgccgggccgctcaagttcttctgggacgtggtgctgccgctgtcgcgcaccagcatcgcggcgctgttcgtgatccagttcatctacggctggaaccagtacctgtggccgctgctggtcaccaccgagcgggacatgacgccgatcgtgctgggcgtcacgcagatgatctcgcgttcgggcgattccgccaccgactggaacctgctgatggccaccgtgatgctggccatggtgccgcccgtgctggtggtgatcggcatgcagcggtggttcgtgaagggcctggtggaaaccgaaaaatag

SEQ ID NO: 116253 - protein, 282 aa, Ralstonia solanacearum GMI1000
MIERRPFLDVLTHLVLILGVVVVAFPVYVVFVASSLTAEDVLQAPMTLIPGPHLIDNYREVLAHGMGNAATPVGTMLMNSLIMALGISLGKIAISIISAFAIVYFRFPLRKTFFWLIFVTLMLPVEVRILPTYKVVSDLGMLNSYFGLTIPIIASATATFLFRQFFLTIPDELAEAARIDGAGPLKFFWDVVLPLSRTSIAALFVIQFIYGWNQYLWPLLVTTERDMTPIVLGVTQMISRSGDSATDWNLLMATVMLAMVPPVLVVIGMQRWFVKGLVETEK

SEQ ID NO: 116254 - DNA, 846 bp, Yersinia pestis KIM
  CDS (1)..(846): transl_table=11
atgatcgagaatcgtcgtggattggatatcttttgtcacatcatgctgattatcggggtgctattgatcctgttcccactgtatgtggcgttcgttgcggcttcattagatgacagccaggtttttcaggcgcccatgacgctgatccctggcccgcatttgtggcaaaacatcagccatatctggcatgccggcgtgggcaataacagcacacctttcgggttgatgctgttgaacagttttgttatggcttttgccattactgtcggcaaaatcactgtctcaatattgtctgcttatgccatcgtttacttccgtttcccactgcggaatctgtttttctggctaatcttcctcacgctgatgctaccggtggaagtgcgtattttccctaccattgaggtgattgccaacctgaacctgctagacagctataccggtttaacattgccgctgatggcctctgccacggcgacgttcttattccgccagttctttatgacgttgccggatgagctattggaagccgcccgtattgacggcgccggtgccatgcgtttcttctgggacattgtattaccgctgtcaaaaaccaatctcgcagcattatttgttattacctttatttatggctggaaccaatacctttggccgatcttaatcaccagtgatgcctcaatgggcacggcagtggcggggataagaagcatgatttcaacctcgggcgcaccaacccaatggaatcaggttatggcggcgatgattttgactttaattccaccggtcgtggtggttcttttgatgcagcgttggtttgtacgcggcttggtagacagtgagaagtaa

SEQ ID NO: 116255 - protein, 281 aa, Yersinia pestis KIM
MIENRRGLDIFCHIMLIIGVLLILFPLYVAFVAASLDDSQVFQAPMTLIPGPHLWQNISHIWHAGVGNNSTPFGLMLLNSFVMAFAITVGKITVSILSAYAIVYFRFPLRNLFFWLIFLTLMLPVEVRIFPTIEVIANLNLLDSYTGLTLPLMASATATFLFRQFFMTLPDELLEAARIDGAGAMRFFWDIVLPLSKTNLAALFVITFIYGWNQYLWPILITSDASMGTAVAGIRSMISTSGAPTQWNQVMAAMILTLIPPVVVVLLMQRWFVRGLVDSEK

SEQ ID NO: 116256 - DNA, 849 bp, Brucella suis 1330
  CDS (1)..(849): transl_table=11
atgatagaacaacgcccagtctcaaatctgatcggccatctgatcctgatcctcgggatcatcattgtcgcctttccgatctattacacctttgtcgcctcgttgatgacctcgacgcagatcatccgccccccgatctcgctcctgccgggcgatcatctggttgaaaactaccgcgaagccattttcggcggcgtggaacgggtggtcggcgtcagcctcgaacggctgctctggaactccttcgtcgtcgccatggcaattgccgtcggcaagatcatcatttccttcatgtcggcctttgcgatcgtgttctttcgctttccgatgcgcatgttcttcttctggatgattttcatcacgctgatgctgcccgtggaagtgcgtatcctgccgacctacaaggtgatcgtcgatctcggcatgatcgacacctatgcggggctgaccctgcccttgatggcatcggcaacggcaactttcctgttccgccagtttttcctcaccattccgggcgaactggtggaggcggcgcgcatcgacaatgcggggcctttccggttcatgcgcgatatcctgctgccgctttccaagaccaatatcgcagcactcttcgtcattctctccatctatggatggacccagtatctttggccgctccttgtcaccaatgacgccaagatgaatacgatcatcatcggcctgcgccgcatggttgattgggccgatgcgtccacatcctggaactacgtcatggtcacggccatcctggccatcatccccccgattctcgtggtggtgctgatgcagcgctggttcgtcaaaggtctcgttgaaacggaaaagtaa

SEQ ID NO: 116257 - protein, 282 aa, Brucella suis 1330
MIEQRPVSNLIGHLILILGIIIVAFPIYYTFVASLMTSTQIIRPPISLLPGDHLVENYREAIFGGVERVVGVSLERLLWNSFVVAMAIAVGKIIISFMSAFAIVFFRFPMRMFFFWMIFITLMLPVEVRILPTYKVIVDLGMIDTYAGLTLPLMASATATFLFRQFFLTIPGELVEAARIDNAGPFRFMRDILLPLSKTNIAALFVILSIYGWTQYLWPLLVTNDAKMNTIIIGLRRMVDWADASTSWNYVMVTAILAIIPPILVVVLMQRWFVKGLVETEK

SEQ ID NO: 116258 - DNA, 846 bp, Shigella flexneri 2a str. 301
  CDS (1)..(846): transl_table=11
atgattgagaaccgtccgtggctgacgatattcagccataccatgctgatcctcgggatcgcggtgatcctcttcccgctgtacgtggcgtttgtcgcggcgacgctggataaacaggccgtctacgccgcgccgatgacgctcatccccggcacgcatctgctggaaaacatccacaacatctgggtgaacggggtaggcacaaatagcgcgccgttctggcggatgttgcttaacagctttgtgatggcgttcagcattacgctcggcaaaattactgtctcgatgctctcggcatttgccattgtctggtttcgttttccgctacgtaacctcttcttctggatgatttttatcaccctgatgctgccggttgaagtacgtatcttcccgacggtggaagtcatcgccaacctgaagatgctcgacagctacgccggtttaacgctgccgctgatggcctcggcgaccgccacgtttctgtttcgccagttctttatgacgctgccggatgaactggtggaagcggcgcggatcgacggtgcgtcaccaatgcgcttcttttgcgacatcgtttttccgctctccaaaactaatctggcggcgctgtttgtgatcacctttatttacggctggaaccagtatttgtggccgttgttgattattaccgacgtggatctcggcaccaccgtggcagggatcaaagggatgatcgccactggcgaaggcaccacggaatggaactcagtgatggcggcgatgttgttaaccctgatcccaccagtagtgattgttttagtgatgcagcgtgccttcgtgcgcggcctggtcgatagtgagaaataa

SEQ ID NO: 116259 - protein, 281 aa, Shigella flexneri 2a str. 301
MIENRPWLTIFSHTMLILGIAVILFPLYVAFVAATLDKQAVYAAPMTLIPGTHLLENIHNIWVNGVGTNSAPFWRMLLNSFVMAFSITLGKITVSMLSAFAIVWFRFPLRNLFFWMIFITLMLPVEVRIFPTVEVIANLKMLDSYAGLTLPLMASATATFLFRQFFMTLPDELVEAARIDGASPMRFFCDIVFPLSKTNLAALFVITFIYGWNQYLWPLLIITDVDLGTTVAGIKGMIATGEGTTEWNSVMAAMLLTLIPPVVIVLVMQRAFVRGLVDSEK

SEQ ID NO: 116260 - DNA, 849 bp, Bradyrhizobium japonicum USDA 110
  CDS (1)..(849): transl_table=11
atggtcgaggacgagggcatcaggcgctacgtcgcccatttcattctctggatcgggatcgcgatcgtcgcattcccggtctacatcgcgatcgtcgcctcgacccaggacaacgcactgatcgcgaacgggcagatgtcgctgctgccgggcgggcacttcttcgaggtctactaccagaccatcttcgtcggcacgagcggctcgacccgcgagcccgtcggcaacatgatgctcaattcgctggtgatggcgctggcgatcgcgatcggcaagatcgcgatctcgatcatctcggcctatgcgatcgtgtatttccgctttccgttccggatgccgatcttctggatcatcttcatcaccctgatgctgccggtcgaggtccgcatctatccgacctacaagatcgttgccgatttgcacatgctcgacagctatgcgggcctgtcgctgccgctaatcgcgtccgccaccgcgacgctgctgttccgccagttcttcatgaccgtgccggacgaattgctggaggcctcgcgcatcgacggcgccggtcccttgcgcttcttctgggacacgctgctgccgctgtcgcgcaccaacatggcggcgctgttcgtgatcctgttcatcctcggctggaatcaatatctctggccgctgctcatcaccacccgcgacgacatgcagaccatccaggtcggcatccgcaagatgatcaccaccaccgacgcgctgaccgaatggccgatcgtgatggcgaccgccgtgctggccatgctgccgccggtgttcgtcgtcgtcgccatgcagagactgttcgtgcgcggcctggtcgagacggaaaagtag

SEQ ID NO: 116261 - protein, 282 aa, Bradyrhizobium japonicum USDA 110
MVEDEGIRRYVAHFILWIGIAIVAFPVYIAIVASTQDNALIANGQMSLLPGGHFFEVYYQTIFVGTSGSTREPVGNMMLNSLVMALAIAIGKIAISIISAYAIVYFRFPFRMPIFWIIFITLMLPVEVRIYPTYKIVADLHMLDSYAGLSLPLIASATATLLFRQFFMTVPDELLEASRIDGAGPLRFFWDTLLPLSRTNMAALFVILFILGWNQYLWPLLITTRDDMQTIQVGIRKMITTTDALTEWPIVMATAVLAMLPPVFVVVAMQRLFVRGLVETEK

SEQ ID NO: 116262 - DNA, 846 bp, Salmonella enterica subsp. enterica serovar Typhi Ty2
  CDS (1)..(846): transl_table=11
atgatagagaatcgtcgcgggctgacaatattcagccataccatgctgattctggggatcgcggtcattttgtttccgctgtatgtcgcgtttgtcgcggcgacgctggacgaccgcgcggtgtttgagacgccgatgacgctgcttcccggcacgcagttactggagaatatcaaaactatttgggtcaacggcgtcggtgttaatagcgcgccattctggctgatgatgcttaacagtttcattatggcgttcagcattacggtaggcaaaatcacggtatctatgctttccgcattcgccatcgtctggtttcgttttcccctgcgtaacctgttcttctggatgatttttatcaccctgatgttgccggttgaagtgcgtatcttcccgacggtggaagtgatcgccaacctgaaaatgctcaacagctatgccggtctgacgttaccgctgatggcgtccgctaccgccactttcctgtttcgtcaattcttcatgacgcttccggatgaactggtggaggcggcccgtattgacggcgcgtcgccgatgcgctttttccgcgacatcgtgttgccgctgtcaaaaaccaacctggcggcgttattcgtcatcacctttatctacggctggaaccagtatctgtggccgctgttgattatcaccgacgtgaatcttggcactgccgtagcgggtatcaaagggatgatcgccactggcgaaggtaccacgcaatggaaccaggtgatggcggcaatgctgctgactctgattcccccggtcgtaattgtgttagccatgcaacgggcgtttgtgcgtggtttagtggacagtgagaaataa

SEQ ID NO: 116263 - protein, 281 aa, Salmonella enterica subsp. enterica serovar Typhi Ty2
MIENRRGLTIFSHTMLILGIAVILFPLYVAFVAATLDDRAVFETPMTLLPGTQLLENIKTIWVNGVGVNSAPFWLMMLNSFIMAFSITVGKITVSMLSAFAIVWFRFPLRNLFFWMIFITLMLPVEVRIFPTVEVIANLKMLNSYAGLTLPLMASATATFLFRQFFMTLPDELVEAARIDGASPMRFFRDIVLPLSKTNLAALFVITFIYGWNQYLWPLLIITDVNLGTAVAGIKGMIATGEGTTQWNQVMAAMLLTLIPPVVIVLAMQRAFVRGLVDSEK

SEQ ID NO: 116264 - DNA, 822 bp, Bacillus anthracis str. Ames
  CDS (1)..(822): transl_table=11
atgattgttaaacagtggaaacaaaatttcctgctatacatgctgctcataattagtgcagtaatggtattttttcctgtgctatatgcgtttttaataagctttatgacaccagacgatattcaaatgagaaggatatttccaactcaatttacttttgataatttcattaatatttttcagaaagtaccactttttgcatatttatacaacagcttagttgtatcgacagttgttatgattggacaacttatcgtgtcaagcttagcggcgtatgcttttgtctttcttcagtttaagggaagaaatcttatttttttcctgtttatttcaacgatgcttattccgtgggaagcaacgatggtacctaactttttaacgattcaaaactttggctggatcaatagtttcgctgggatgacagtgccgttttttgcaacagctttcggtattttcttgttacgccaacattttatgacacttccaaatgaactgaaagaagctgcttttattgaagggattggaaatgtaaggtttttattcagcgttgtaattccatattgtaaaacgagttttattacgcttggcgtatatagttttttaacaacatggaatatgtacttatggccacttttagtgaccactgatgaaacggtaagaacagttcaaattggtgtgaagcagcttcaatctcaagaagttgcaactgattggggaagcgtaatggctggcgttacggttatcgttataccaacattgattctattatttttaggacaaaagcaattacaacaaggattaacaaaaggtgcaattaaataa

SEQ ID NO: 116265 - protein, 273 aa, Bacillus anthracis str. Ames
MIVKQWKQNFLLYMLLIISAVMVFFPVLYAFLISFMTPDDIQMRRIFPTQFTFDNFINIFQKVPLFAYLYNSLVVSTVVMIGQLIVSSLAAYAFVFLQFKGRNLIFFLFISTMLIPWEATMVPNFLTIQNFGWINSFAGMTVPFFATAFGIFLLRQHFMTLPNELKEAAFIEGIGNVRFLFSVVIPYCKTSFITLGVYSFLTTWNMYLWPLLVTTDETVRTVQIGVKQLQSQEVATDWGSVMAGVTVIVIPTLILLFLGQKQLQQGLTKGAIK

SEQ ID NO: 116266 - DNA, 852 bp, Bordetella bronchiseptica RB50
  CDS (1)..(852): transl_table=11
atggtagaacgtcgtccctggctggacatcctggcccacttcatcctgctgtgcggggtggcgctggtggccttcccgatatacgtcaccttcgtggcttccacgcagacggcgcaggaagtcgcctcggcgcccatgtcgctgattcccggcaagcatttcgtcgacaactacatgcaggcgctgttcgccggttcgggcggcggctcgtacggcgcgccggtgggccgcatgatgtatgtaagcctgatcatggcgctggcgatctcgctgggcaagatcgccatctcgctgctgtcggcgttcgcggtggtgtatttccgcttccccggccgcatgttcttcttctggatgatcttcgtcacgctgatgctgcccgtggaggtgcgcatcgcgcccacctacaaggtggtggccgacctgggcctgctcaacagctacgccggcctgacgctgccgctgatcgcctcggccacggccaccttcctgttccgccagttcttcctgaccgtgcccgacgaactggtcgaggccgcgcgcatcgacggcgccggcccgatgcggttcttccgcgacgtgctgctgccgctgtcgcgcaccagcatcgcggccctgttcgtgatccagttcatctatggctggaaccagtacctgtggccgctgctgatcaccacccaggaagacatgtatcccgtggtcatcggcatcaagcgcatgatcagcgggggcgacagcgtcaccgaatggaatatcaccatggccaccgcgatcctggccatgatcccgcccgcgctggtggtcatcctgatgcagaaatggttcgtcaagggtctggtcgacaccgagaagtaa

SEQ ID NO: 116267 - protein, 283 aa, Bordetella bronchiseptica RB50
MVERRPWLDILAHFILLCGVALVAFPIYVTFVASTQTAQEVASAPMSLIPGKHFVDNYMQALFAGSGGGSYGAPVGRMMYVSLIMALAISLGKIAISLLSAFAVVYFRFPGRMFFFWMIFVTLMLPVEVRIAPTYKVVADLGLLNSYAGLTLPLIASATATFLFRQFFLTVPDELVEAARIDGAGPMRFFRDVLLPLSRTSIAALFVIQFIYGWNQYLWPLLITTQEDMYPVVIGIKRMISGGDSVTEWNITMATAILAMIPPALVVILMQKWFVKGLVDTEK

SEQ ID NO: 116268 - DNA, 840 bp, Chromobacterium violaceum ATCC 12472
  CDS (1)..(840): transl_table=11
atggtggagaaccgtaaagggctggacctgttctgccacgcgatgctgatcgcgggcatgctggtggtggcctttcccttgtatctgatgctggtcgccgccagtcaggacgccgatcaggtgacgcgggtgccgctgtcgctgctgcccggcagccagctgtggaccaacctttccaccgtgctgtggaacggcagcggcgggttggcggtgccgctggcgcgcacgctgtggaacagcttcgtgatggcgatgctgatcgccgtcggcaagatcgtcatttccttcctgtcggcctacgccatcgtctatttccgcttcccgctgcgcaagaccggcttcgcgctgatcttcgtcacactgatgctgccggtggaggtgcgcatcttcccgacggtggaagtggtgaccaagatggggctgatcaacagctataccggcctgacgctgcccttgatcgcgtccgccaccgccaccttcctgctgcggcagttcttcatgacgctgcccaaggaattgatggaggcgtcgcgggtggacggcgcggggccgatccgcttcatggtggacgtggtgctgcccttgtcgcgcaccaatatcgcggccttgttcgtgattaccttcatctacggctggaaccagtatctgtggccgctcttggtcacccatgatccggcgatgtccacctcggtgatcgcgatcaagggcatgctgggcgagggcgcggtgcagtggcacctggtgatggcgtccgcgctcttgaccctgctgccgccgctggcggtggtgatcggcatgcagcgctggttcgtcaagggcctggtggacaacgagaaatga

SEQ ID NO: 116269 - protein, 279 aa, Chromobacterium violaceum ATCC 12472
MVENRKGLDLFCHAMLIAGMLVVAFPLYLMLVAASQDADQVTRVPLSLLPGSQLWTNLSTVLWNGSGGLAVPLARTLWNSFVMAMLIAVGKIVISFLSAYAIVYFRFPLRKTGFALIFVTLMLPVEVRIFPTVEVVTKMGLINSYTGLTLPLIASATATFLLRQFFMTLPKELMEASRVDGAGPIRFMVDVVLPLSRTNIAALFVITFIYGWNQYLWPLLVTHDPAMSTSVIAIKGMLGEGAVQWHLVMASALLTLLPPLAVVIGMQRWFVKGLVDNEK

SEQ ID NO: 116270 - DNA, 849 bp, Rhodopseudomonas palustris CGA009
  CDS (1)..(849): transl_table=11
atggtcgagcgccggaagttcggaaacctggtgccgcacctgatcctgtggatcggcgtcgcgatcgttgccttcccggtctatctggcgttcgtcgcctcgacccaggacaacgccaccatcgccaatggccagatgtcgctgctacccggcagccatttcctggaaacctactacaagaccatcttcgtcggctcctccggcaccacgcgggagccggtcgccagcatgctgttcaactcgttcgtgatggcgatgtcgatcgcgctaggcaagatcgcgatctcgatcatctccgcctacgcgatcgtgtacttccggtttccgttccggatgacgatcttctggatcatcttcatcacgctgatgctgccggtcgaggtccggatctatccgacctacaagatcgccgccgacctcaatctgctggacagctacgccgggctggcgctgccgctgatcgcgtcggcaaccgcaacgctgctgttccggcagttcttcatgacggtgccggacgagctgttggaagcgtcgcggatcgacggcgccgggccgctgcggttcttctgggatacgctgctgccgctgtcgcgcaccaatatggcggcgctgttcgtgatcctcttcatcctcggctggaatcaatatctctggccgctgctgatcaccacgcgtgacgacatgcagaccatccagatcggcatccgcaaaatgattgtcacctcggatgcgttgaccgaatggccgatcgtgatggcgaccgcggtgctggcgatgctgccgccggtcgccgtggtggtgctgatgcagaagctgttcgtgcgcggactggtcgagacggagaagtaa

SEQ ID NO: 116271 - protein, 282 aa, Rhodopseudomonas palustris CGA009
MVERRKFGNLVPHLILWIGVAIVAFPVYLAFVASTQDNATIANGQMSLLPGSHFLETYYKTIFVGSSGTTREPVASMLFNSFVMAMSIALGKIAISIISAYAIVYFRFPFRMTIFWIIFITLMLPVEVRIYPTYKIAADLNLLDSYAGLALPLIASATATLLFRQFFMTVPDELLEASRIDGAGPLRFFWDTLLPLSRTNMAALFVILFILGWNQYLWPLLITTRDDMQTIQIGIRKMIVTSDALTEWPIVMATAVLAMLPPVAVVVLMQKLFVRGLVETEK

SEQ ID NO: 116272 - DNA, 846 bp, Burkholderia vietnamiensis G4
  CDS (1)..(846): transl_table=11
atgatcgaaaatcgcaagggcttcgacctgttctgccacgcggtgctgctcgcgggcgtcgtcgtgatcgtgttcccggtgtacgtcgcgttctgcgcggcgacgatgaatgcgcaggaagtgttcacgatcccgctgtcgctggtgccgagcacgcatctgctggagaacgtcgcgtacatctggagccacggcagcggcggcacgaccgcgccgttcggccggctgctggtgaacagcttcgtgatggcgctcgggatcgcggtcggcaagatcgcggtgtcgatcctgtccgcgtacgccatcgtctatttccgcttcccgctgcgcaacaccgcgttctggctgatcttcgtcacgctgatgctgccggtcgaggtgcggatcttcccgaccgtgcaggtcgtgtcgacgctgcacctgaccaacacctacgcggggctgtcgctgccgctgatcgcgtcggcgaccgcgacgttcctgttccgccagttcttcatgacgctgcccgacgagctgatggacgccgcgcgcatcgacggcgcggggccgctgcggtttttctgggacgtcgtgctgccgctgtcgaagacgagcatcgccgcgctgttcgtgatcacgttcatctacggctggaaccagtatctgtggccgatcctgatcacgacggaggcgtcgctgtcgacggcggtggtcggcatcaagacgatgatcgcgagcggcgacgccgcgaccgaatggcaatacgtgatggcggcgacgctgctggcgatgattccgccgctcgtcgtcgtgctggcgatgcagcgctggttcgtgcgcggcctcgtcgattccgaaaaatga

SEQ ID NO: 116273 - protein, 281 aa, Burkholderia vietnamiensis G4
MIENRKGFDLFCHAVLLAGVVVIVFPVYVAFCAATMNAQEVFTIPLSLVPSTHLLENVAYIWSHGSGGTTAPFGRLLVNSFVMALGIAVGKIAVSILSAYAIVYFRFPLRNTAFWLIFVTLMLPVEVRIFPTVQVVSTLHLTNTYAGLSLPLIASATATFLFRQFFMTLPDELMDAARIDGAGPLRFFWDVVLPLSKTSIAALFVITFIYGWNQYLWPILITTEASLSTAVVGIKTMIASGDAATEWQYVMAATLLAMIPPLVVVLAMQRWFVRGLVDSEK

SEQ ID NO: 116274 - DNA, 852 bp, Bartonella henselae str. Houston-1
  CDS (1)..(852): transl_table=11
atggttgaaaatcgccctgttttaaaatttctaacccatataacccttattattggcattttcattatttgctttccagtttatgttgctatcattgcctcaacccataactcggcggcatttagttcaggaacacttcctcttttaccaggaaaatatgccctggaaaactataagacaatctttggtgatggacttatgcagcttggtttgcctaatctctggccactcttaatgaactccctcattatggctgttggtattagtattggaaaaattattatttcactcttttctgcttatgcaattgtctacatgcgcttcccttttcgcaaaactgcgtttgcccttatattcattacattaatgctacctgtcgaagttcgtattatcccaacatatgcagtcgtcgcacaattaggcatgataaacacctatggtggaatgattattccactcattgcatctgcaactgctacatttttatttcgtcagttttttttgactgttcctgacgaactcttagaagctgctcgtgttgatggtgcaggaccatttaaattttttaaagatattcttcttcctcttagcaaaagtaatattgctgctttatttatcattatgttcatttatggatgggtacaatatctttggcctcttatagtcacaactgaccaaaatcatcaaactattcttattattctcaaacagctcatcgtagaatcacttcaacataaccctcaatggaatatactcatggcagtatcggttgtggccatggtgccacctgttctagtcgttattttcatgcagcgactttttatcaaaggccttattgaaacggagaaataa

SEQ ID NO: 116275 - protein, 283 aa, Bartonella henselae str. Houston-1
MVENRPVLKFLTHITLIIGIFIICFPVYVAIIASTHNSAAFSSGTLPLLPGKYALENYKTIFGDGLMQLGLPNLWPLLMNSLIMAVGISIGKIIISLFSAYAIVYMRFPFRKTAFALIFITLMLPVEVRIIPTYAVVAQLGMINTYGGMIIPLIASATATFLFRQFFLTVPDELLEAARVDGAGPFKFFKDILLPLSKSNIAALFIIMFIYGWVQYLWPLIVTTDQNHQTILIILKQLIVESLQHNPQWNILMAVSVVAMVPPVLVVIFMQRLFIKGLIETEK

SEQ ID NO: 116276 - DNA, 852 bp, Erwinia carotovora subsp. atroseptica SCRI1043
  CDS (1)..(852): transl_table=11
atggcaatgattgagaatcgtcgcgggttagatattttcagccacgtcatgctgatcgtcggcattctcgccgtattgttccctctgtacgtggggtttgtcgccgccacgctggataatcaggaagtctttcaggctccgatgacgctcatccccggttcgcacctgtggggaaacctgcgtgatatctggttgcacggtgcgggcaataacaccacgccgttcgggctaatgctgctcaatagcttcgtcatggcgctggcgatcacggtaggcaaaattaccgtatcgatcctatccgcttacgccatcgtttattttcgttttccactgcgcaacctgttcttctggatgattttcctgacgctgatgctgccggtagaagtgcgtattttcccgacggtggaagtgatcgcgcggctggacatgatggacagctacaccggtttaacgctgccgctgatggcgtcggcgaccgcaactttcctgtttcgccagttctttatgacgctgccggatgaactgatggaagcggcgcgtatcgacggtgccagcccgatgcgtttcttcttcgacatggtgttgccgctgtcgaagaccaatctggcggcgctgttcgtgatcacgttcatttacggctggaaccagtatctgtggccgctgctgatagttagcgatgccaatctgggcaccgcggttgcggggattaaaagcatgattgcctccggtgatggtgcaacccagtggaatcaggtgatggccgcgatgctgttgaccatgctgccgccgctgctggtggtgctactgatgcagcgctggttcgttcgcggtctggtcgacagcgaaaaataa

SEQ ID NO: 116277 - protein, 283 aa, Erwinia carotovora subsp. atroseptica SCRI1043
MAMIENRRGLDIFSHVMLIVGILAVLFPLYVGFVAATLDNQEVFQAPMTLIPGSHLWGNLRDIWLHGAGNNTTPFGLMLLNSFVMALAITVGKITVSILSAYAIVYFRFPLRNLFFWMIFLTLMLPVEVRIFPTVEVIARLDMMDSYTGLTLPLMASATATFLFRQFFMTLPDELMEAARIDGASPMRFFFDMVLPLSKTNLAALFVITFIYGWNQYLWPLLIVSDANLGTAVAGIKSMIASGDGATQWNQVMAAMLLTMLPPLLVVLLMQRWFVRGLVDSEK

SEQ ID NO: 116278 - DNA, 771 bp, Legionella pneumophila subsp. pneumophila str. Philadelphia 1
  CDS (1)..(771): transl_table=11
atgatggctcctttgtatttggctgtagttgctgcaagtcatgaaggaacggtcatgatgcattctcagttgccattgattccagggacctcatttttcaaaaatattaaaagtgtgctgactgaaggtttagctgtcactggaggtgagcctatcacttccatgcttgtaaatagcttattcatggcatttatcattgcagtgggtaagatcattttggctctgggatctgcttttgcattggtatattttgatttttcttttaaaaagtcttgttttgccctgatatttgcaacgatgatgttaccagtggaagtaagaatagtccctacttttcaagtggttgcttcatttggcctattgaactcattttctggtttaaccttgccattattggcatcagctactggaacatttttatttcgtcagttttttaaaaccatatctaaagaactggttgatgctgctaaattagatggcgcaggtccattaagattttttattgatatcgtgttacccttgtcaagaactcaaatttccgccttgtttgtaatcttgtttgtctatgggtggaatcaatacttatggcctttggtcatcacgacagaaactaaaatgacaactattgtgatgggaattcggtatttggcaggcgtagcggatcaagtaccggagtggcactatattatggccgtcgcattgatagctcttgtgccgccttgtatggtggttatggtgatgcaacgttggttcgaaaagggattgaaataa

SEQ ID NO: 116279 - protein, 256 aa, Legionella pneumophila subsp. pneumophila str. Philadelphia 1
MMAPLYLAVVAASHEGTVMMHSQLPLIPGTSFFKNIKSVLTEGLAVTGGEPITSMLVNSLFMAFIIAVGKIILALGSAFALVYFDFSFKKSCFALIFATMMLPVEVRIVPTFQVVASFGLLNSFSGLTLPLLASATGTFLFRQFFKTISKELVDAAKLDGAGPLRFFIDIVLPLSRTQISALFVILFVYGWNQYLWPLVITTETKMTTIVMGIRYLAGVADQVPEWHYIMAVALIALVPPCMVVMVMQRWFEKGLK

SEQ ID NO: 116280 - DNA, 846 bp, Burkholderia pseudomallei K96243
  CDS (1)..(846): transl_table=11
atgatcgagaatcgcaagggcttcgacctgttctgccacgcggtgctgatcgcgggcatcgcggtcatcgtgttcccggtgtacgtcgggttctgcgcggcgacgatgaacgcgcgcgaagtgttcacggtgccgctgtcgctcgtgccgagcacgcatctgttcgagaacgtcaccgcgatctggcggcgcggcagcggcggcatgacgacgccgttcggcacgctgctcgtcaacagcgtcgtgatggcgctcgtgatcgcggcgggcaagatctcggcgtcgatcctgtccgcttacgcaatcgtgtacttccgctttccgctgcgcaatacggcgttctggctgatcttcgtcacgctgatgctgcccgtcgaagtgcggatctttccgaccgtgcaggtggtgtcgacgctgcatctgacgaacagctacgcggggctcacgctgccgctcatcgcgtcggcgacggcgaccttcctgttccggcagttcttcatgacgctgcccgacgagctcgtcgacgcggcgcgcatcgacggcgcggggccgctgcgtttcttctgggacgtcgtgctgccgctgtcgaagacgagcatcgccgcgctgttcgtgatcacgttcatctacggctggaaccagtatctgtggccgatcctgatcacgaccgacgcgtcgctgacgacggccgtggtcggcatcaaatcgatgatcgcgagcggcgacgccgcgaccgaatggcatctcgtgatggcggcgacgctcgtcgcgatgctgccgccgctcgtcgtcgtgctcgcgatgcagcgctggttcgtgcgcggcctcgtcgattcggaaaagtga

SEQ ID NO: 116281 - protein, 281 aa, Burkholderia pseudomallei K96243
MIENRKGFDLFCHAVLIAGIAVIVFPVYVGFCAATMNAREVFTVPLSLVPSTHLFENVTAIWRRGSGGMTTPFGTLLVNSVVMALVIAAGKISASILSAYAIVYFRFPLRNTAFWLIFVTLMLPVEVRIFPTVQVVSTLHLTNSYAGLTLPLIASATATFLFRQFFMTLPDELVDAARIDGAGPLRFFWDVVLPLSKTSIAALFVITFIYGWNQYLWPILITTDASLTTAVVGIKSMIASGDAATEWHLVMAATLVAMLPPLVVVLAMQRWFVRGLVDSEK

SEQ ID NO: 116282 - DNA, 894 bp, Pseudomonas syringae pv. phaseolicola 1448A
  CDS (1)..(894): transl_table=11
atgatcgagcgtcaccggctgatcgacgcgggcgcttacctgctgctgacgctcgggctggtgttcgcgacgggaccgctgtacgtcgcagtctgctcggcaactgtgagcaacccacaactgttcgcccacggccttgcgctgatacccggcgaccaactgctggagaacctgcaacaagtcacccgacgcctcgacctgctgcgcttgctgggcaatagcctgctggtcgccacgctggtggtaatcggcaagctgacactttcggcgctgacagcatttgccgtggtgtactttcgcagccgctacacctcggtgatcttctttgccgtgctgggcgctctgctgctgccgctggaggtacgcatcatccccacgtatgcggtggccagcgacctgctcggaccgctacgcaacctgttgcaatggctgggcatccagtggctgccggtgccgaccatcaacctgctcgacagctacaccgggctcgccttgccgctgattgcctcagccaccggcacctttctgttccggcagttttaccagacgctgcccgccgaactggtcgaggccgcacgtatggacggtgccgggccctggcgtttttttgtcgacattctgctgccgctgtcgaagaccaacttcgcagcgctcggcacgctggtgttcatcggcgcgtggaaagactacctgtggccgctggtcgcgaccaatcgcgaggacatgcgcacgctggtgctgggcgtcgccagctttctgccgaccgatgcaacccaggtccccgaatggaacctgctgatggccgccgccgtggtcagcatgctaccccccatcctcgtcattgcgctcatgcagcgatggtttgtcaaaggcctgatcggagtcggtaaatga

SEQ ID NO: 116283 - protein, 297 aa, Pseudomonas syringae pv. phaseolicola 1448A
MIERHRLIDAGAYLLLTLGLVFATGPLYVAVCSATVSNPQLFAHGLALIPGDQLLENLQQVTRRLDLLRLLGNSLLVATLVVIGKLTLSALTAFAVVYFRSRYTSVIFFAVLGALLLPLEVRIIPTYAVASDLLGPLRNLLQWLGIQWLPVPTINLLDSYTGLALPLIASATGTFLFRQFYQTLPAELVEAARMDGAGPWRFFVDILLPLSKTNFAALGTLVFIGAWKDYLWPLVATNREDMRTLVLGVASFLPTDATQVPEWNLLMAAAVVSMLPPILVIALMQRWFVKGLIGVGK

SEQ ID NO: 116284 - DNA, 849 bp, Ralstonia eutropha JMP134
  CDS (1)..(849): transl_table=11
atggtagaacgacgacctttgctcgatgtactttctcatttgatgctgctccttggcgtgggcatcgtggcctttccggtctatgtgaccttcgtcgcgtcgacactaaccgcggacgaggtactacaggcgcccatgacgttggtgccaggcagccacttgctggaaaactacaggacggtcctggtggacggtgttggcaatgccgcgtcgcccgtttccacgatgatgatgaacagcctgatcatggcgctcgggattgcgctgggcaagatcgcgatctccatcatctcggccttcgcgatcgtctatttccgcttcccgctgcgcaagaccttcttctggctgatcttcatcacgctgatgctgccggtggaagtccgcattctgccaacctacaaggtcgtgtccgacctcggcatgctcgacagctattttggcctgacgattccgatcatcgcctcggccacggccacgttcctgttccggcagttcttcctgacgattcccgacgagcttgccgaagcggcgcgcatcgatggcgcagggccgctgcgcttcttctgggacgtggtgctgccactgtcgcgcacgagcatcgcggccctgttcgtgatccagttcatctacggctggaaccagtacctgtggccgctgctgatcaccacgcagaagtcgatgacgccgatcgtggtcggtgtgacgcagatgatttcgcgctcgggcgatgcggcaacggactggaacctcgtaatggccaccgtgatgctggccatgattccgccagctgtcgtcgtggtgctgatgcagaagtggttcgtcaagggactggtcgaaaccgagaagtga

SEQ ID NO: 116285 - protein, 282 aa, Ralstonia eutropha JMP134
MVERRPLLDVLSHLMLLLGVGIVAFPVYVTFVASTLTADEVLQAPMTLVPGSHLLENYRTVLVDGVGNAASPVSTMMMNSLIMALGIALGKIAISIISAFAIVYFRFPLRKTFFWLIFITLMLPVEVRILPTYKVVSDLGMLDSYFGLTIPIIASATATFLFRQFFLTIPDELAEAARIDGAGPLRFFWDVVLPLSRTSIAALFVIQFIYGWNQYLWPLLITTQKSMTPIVVGVTQMISRSGDAATDWNLVMATVMLAMIPPAVVVVLMQKWFVKGLVETEK

SEQ ID NO: 116286 - DNA, 864 bp, Rhodobacter sphaeroides 2.4.1
  CDS (1)..(864): transl_table=11
atggctgagcacgagatgatcggcacctcgcgccagagccggatcatggcgcatttcctgctggtgatcggggtcatcgtggtggccttcccgatctggtatgtcttcgtggcctcgacccacccgctccagcagatcctgcgcccgccgctgccgctgctgcccggcgccgaggggccctcgaactacgcccgcgcgctcggcggcgggatcggacagatcggccgcgtgggggtggaccggcttcttctcaacacggccgtcgtggctttcggcatcgccatcggaaagatcctgatctcgatggcctcggcctacgccatcgtcttcttccgcttcccgctgcgcatggtctgcttctggatgatcttcatcaccctgatgctgccggtcgaggtgcggatcctgcccacctacaaggtgatggtggacctgcgcctgatcgacacctacgcgggtctgatcctgccgctggtggcctcggccacggggacgctgctcttccggcagttcttcatgacgatcccgaacgagctgatggaagccgctcgcgtcgatggcgcaggcccctggcgcttcttcaaggacatcctgctgccgctctcggccaccaacatcgcggcgctgttcgtgatcctcttcatctacggatggacgcagtatctctggccgctcctcgtgaccaactcgaactcgatgaacaccatcgtgatcgccctgagaaagatgatctccttcgccgatgccgacacgccgtgggacctcgtgatggtcacctgcgtgctggccatcctgccgccgatcctcgtggtcgtgctgatgcagcggtggttcgtgaagggacttgtggagacggagaagtaa

SEQ ID NO: 116287 - protein, 287 aa, Rhodobacter sphaeroides 2.4.1
MAEHEMIGTSRQSRIMAHFLLVIGVIVVAFPIWYVFVASTHPLQQILRPPLPLLPGAEGPSNYARALGGGIGQIGRVGVDRLLLNTAVVAFGIAIGKILISMASAYAIVFFRFPLRMVCFWMIFITLMLPVEVRILPTYKVMVDLRLIDTYAGLILPLVASATGTLLFRQFFMTIPNELMEAARVDGAGPWRFFKDILLPLSATNIAALFVILFIYGWTQYLWPLLVTNSNSMNTIVIALRKMISFADADTPWDLVMVTCVLAILPPILVVVLMQRWFVKGLVETEK

SEQ ID NO: 116288 - DNA, 846 bp, Burkholderia xenovorans LB400
  CDS (1)..(846): transl_table=11
atgatcgagaaccgccgcggtttcgacctcttctgccacgcggtgctgatgctcggcgtcgtgctggtggtgtttccggtgtacgtcgcgttctgcgcggcgaccatgagcgagcacgaagtgttcagcgtgccgctctcgctggtgccgagcacgcatctgttcgagaacatcgcgaccgtctggtcgcaaggcagcggcaacgcggcggcgccgttcggccgcatgctgttcaacagcctcgtcatggcgctggtgatttcgatcggcaagatcgcggtctcgatgatctccgcgtacgcgatcgtgttcttccgttttccgttccgcaacctcgcgttctggctgattttcatcacgctgatgctgccggtcgaagtgcggatctttccgaccgtgcaggtcgtgtcgtcgatgcatctgagcaatacgtacagcggtttgacgttgccgctgatcgcctcggccaccgcgacattcctgttccgccagttcttcatgacgctgccggacgaactcatggaagccgcgcggatcgacggcgcgggcgccatgcggtttttctgggacgtcgtgttgccgctgtcgaaaacgaacatggcggccctcttcgtcatcacgttcatttacggctggaatcagtacctgtggccgattctgatcacgagccagcaatcgctgaccacggccgtggtcggcatcaaaagcatgatcgcctcgggcgacaccgcgaccgaatggcacctggtgatgaccgcgacactgctcgcaatgctgccgccgctcgccgtcgtgctgacgatgcagcgctggttcgtgcgcggactcgtggacgcggagaagtga

SEQ ID NO: 116289 - protein, 281 aa, Burkholderia xenovorans LB400
MIENRRGFDLFCHAVLMLGVVLVVFPVYVAFCAATMSEHEVFSVPLSLVPSTHLFENIATVWSQGSGNAAAPFGRMLFNSLVMALVISIGKIAVSMISAYAIVFFRFPFRNLAFWLIFITLMLPVEVRIFPTVQVVSSMHLSNTYSGLTLPLIASATATFLFRQFFMTLPDELMEAARIDGAGAMRFFWDVVLPLSKTNMAALFVITFIYGWNQYLWPILITSQQSLTTAVVGIKSMIASGDTATEWHLVMTATLLAMLPPLAVVLTMQRWFVRGLVDAEK

SEQ ID NO: 116290 - DNA, 852 bp, Silicibacter sp. TM1040
  CDS (1)..(852): transl_table=11
atggttgaaaatagacccatcctgaacatcgtcagccacattatcctgatcctcggcatcgcgatcgtggcgctgcccatctggattacctttgtggccgccacccatgatgcggtgcgcatgacacaggcacctattccgcttttgccgggcagctacttctgggaaaacttcaagcagacgctgtttggctcggggctttcgggcaccgagatcgccccggtctggcggatgttgttgaactctctggcgatggcgatgctgatctctctgggcaagatcgcgatctcgctcatctcggcctttgccatcgtctacttcaagttccccttccgcatggggttcttctggctgatcttcatcacgctgatgctgccggtcgaggtgcgtatcctgccaacattcgaggtggtcgcggatcttggcatgctcaacagctactggggtctttcgatcccgctgattgcctccgccacggcgaccttcatgttccggcaggtgttcctgacgatccctgatgaaatgctcgagagcgcgcgcattgatggcgctgggccgatgcggttcttctgggacatcgtgatcccactcagccgcaccaatatcgcggcgctcttcgtgatcttgttcatctacggctggaaccagtatctctggcccttgctgatcaccaccgacactgacatgaccaccatcgtcatgagcatcaaacagatgctggaggccgcagagcaatctccgcaatggaacatcatcatgatgacggctcttttggcgatgatcccgccggtcttcgtcgtgatcgcaatgcagaagctctttgttcagggcctcaccgagacagataaatag

SEQ ID NO: 116291 - protein, 283 aa, Silicibacter sp. TM1040
MVENRPILNIVSHIILILGIAIVALPIWITFVAATHDAVRMTQAPIPLLPGSYFWENFKQTLFGSGLSGTEIAPVWRMLLNSLAMAMLISLGKIAISLISAFAIVYFKFPFRMGFFWLIFITLMLPVEVRILPTFEVVADLGMLNSYWGLSIPLIASATATFMFRQVFLTIPDEMLESARIDGAGPMRFFWDIVIPLSRTNIAALFVILFIYGWNQYLWPLLITTDTDMTTIVMSIKQMLEAAEQSPQWNIIMMTALLAMIPPVFVVIAMQKLFVQGLTETDK

SEQ ID NO: 116292 - DNA, 849 bp, Rhizobium leguminosarum bv. viciae 3841
  CDS (1)..(849): transl_table=11
atggttgaaaatcgccctttcctgaatttcctggcgcaccttgtcctcatcattggcgtcacgatcgtcgtatttccggtctacgtggctttcatcgcatcgagccacggtccaaacgacttcctgtcaggcgtcgtgccgctgacaccgggaagccatatcatcgagaactattcgacgatgctgtcgtcgggaatgacaagctccggggcgccgccgatcgggccgatgatgatcaactcgctgatcatggcggttggcgtcgccgtcgggaagatcgctatttcgatcctttcggcctttgccatcgtctatttccggtttccgttccggaccttggcattctggatgatcttcatcacgctgatgctgccggtcgaggtacgcatcgtgccgacctataaagtcgtcgccgatcttggaatgctgaacaattacggcggcctcatcattccgctgatcgcatcggcaacggcaaccttcctgtttcgccagttctttctgacagtccccgacgaactcatggaggctgcccgtgtcgatggggcagggccgatgaagttcttccgcgatatcctgctgccgctgtcgatcaccaacatcgcagcattgttcatcatcctgtttgtgctcggctggaaccagtatctgtggccgctcatcataacgaccgaccagagcttctataccgtcgtgatgggaatccagcgcatggcagcggttgccgatgccgagcctcgctggaacctagtgatggcagccgtcattctggccgcactaccacccgtcctcgtcatcgtcgccatgcaacgcctttttgtcaaaggcctggtcgaaacggagaaatga

SEQ ID NO: 116293 - protein, 282 aa, Rhizobium leguminosarum bv. viciae 3841
MVENRPFLNFLAHLVLIIGVTIVVFPVYVAFIASSHGPNDFLSGVVPLTPGSHIIENYSTMLSSGMTSSGAPPIGPMMINSLIMAVGVAVGKIAISILSAFAIVYFRFPFRTLAFWMIFITLMLPVEVRIVPTYKVVADLGMLNNYGGLIIPLIASATATFLFRQFFLTVPDELMEAARVDGAGPMKFFRDILLPLSITNIAALFIILFVLGWNQYLWPLIITTDQSFYTVVMGIQRMAAVADAEPRWNLVMAAVILAALPPVLVIVAMQRLFVKGLVETEK

SEQ ID NO: 116294 - DNA, 849 bp, Acidovorax sp. JS42
  CDS (1)..(849): transl_table=11
atgatcgaccgtaacccctggctcaatttcatttcgcacgccgtgctggtcctcggcgtggccatcgtggccttcccgctgtacctggcgctggtggcctccacccacacggcggacgccatcgtgcagtcgcccatgccgctgctgccgggcagccatctgtgggagaactaccaggccgcgctgttcggctcgggcaagctgggctccaacaccaacgtggtgcacatgatgtgggtgagcttcgtggtggccatggtcatcaccgtgggcaagatcgccatctcgctgctgtcggcgttcgccatcgtgtacttccgcttcccgttcaagatgctgtgcttctgggccatcttcgtgacgctgatgctgccggtggaagtgcgcatcctgcccacctacaaggtggtggcagacctgggcctgctcaacagctacgccggcctcacgctgccgctgatcgcctcggccaccgccacgttcctgttccgccagttcttcctgacggtgcccgacgagctggtggaggccgcgcgcatcgacggcgccgggcccatgcgctttttcaaggacgtgctggtgccgctgtcgcgcacctcgatcgctgcgctgttcgtgatccagttcatctacggctggaaccagtacctgtggccgctgctgatgaccacctccgaagacatgtacccggtggtgatcggcatcaagcgcatgctggccggcggcgaggccgccgtggactggaacatcgtgatggccaccgccatcgtcgccatgctgccgcccacggccgtggtgatcctgatgcagaagtggttcgtcaagggcctggtcgacaccgagaaataa

SEQ ID NO: 116295 - protein, 282 aa, Acidovorax sp. JS42
MIDRNPWLNFISHAVLVLGVAIVAFPLYLALVASTHTADAIVQSPMPLLPGSHLWENYQAALFGSGKLGSNTNVVHMMWVSFVVAMVITVGKIAISLLSAFAIVYFRFPFKMLCFWAIFVTLMLPVEVRILPTYKVVADLGLLNSYAGLTLPLIASATATFLFRQFFLTVPDELVEAARIDGAGPMRFFKDVLVPLSRTSIAALFVIQFIYGWNQYLWPLLMTTSEDMYPVVIGIKRMLAGGEAAVDWNIVMATAIVAMLPPTAVVILMQKWFVKGLVDTEK

SEQ ID NO: 116296 - DNA, 879 bp, Roseovarius nubinhibens ISM
  CDS (1)..(879): transl_table=11
atgaccgatatcccctatacccccgccgcgcgccgcatccgctggtcggtactggccgatcacgcggtgctcatcgccgggtcgctcttcctgctgatcccgctgctggtgatgctgcaaaccaccaccaccaccgatctcgaaacgatcaaatacggcccgcaactggccatcggcgatcagctcgacgacaatttccgcgccgccatgttcaaggcctcgggcttttccggtcagaacaccgggctgtcgatgctgatcaactcgaccatcctcggcctcggctttgcgctgggcaagatcgtcatcggcatgatggccgcctatgcgctggtctatttccggatgcgctttgcgacgctggccttctggctcatcttcaccacgcttctgctgccgctcgaggtgcgcatcctgccctcctacgagatcgcgcaaaagctcaacctcctgaacagctacaccggtctcatcctgccgctcatcgcctccgcgacggccaccttcttcttccgccagttctttcgcgcggtcccggaagagctggtcgaggcggcgcgcatcgacggggccgggccggtgcgcttcttcatcgacgtgctcgtgccgctgagccggacgatgatcgccgcgatgttcatcatcatgtttgtctttggctggaaccaatacctctggcccacgatgatcaccaccgaggaaggcatgtacacgctggtgcgcggcatcaagcagctgacccaggatctcgaaggcaccaacatccccgaatatggccgcgccaacatgctggcgctgattgcgatcctgccgccggtggcggtggtgatctttttccaaagctggttcgtcaagggcctcacggaatcggacaaataa

SEQ ID NO: 116297 - protein, 292 aa, Roseovarius nubinhibens ISM
MTDIPYTPAARRIRWSVLADHAVLIAGSLFLLIPLLVMLQTTTTTDLETIKYGPQLAIGDQLDDNFRAAMFKASGFSGQNTGLSMLINSTILGLGFALGKIVIGMMAAYALVYFRMRFATLAFWLIFTTLLLPLEVRILPSYEIAQKLNLLNSYTGLILPLIASATATFFFRQFFRAVPEELVEAARIDGAGPVRFFIDVLVPLSRTMIAAMFIIMFVFGWNQYLWPTMITTEEGMYTLVRGIKQLTQDLEGTNIPEYGRANMLALIAILPPVAVVIFFQSWFVKGLTESDK

SEQ ID NO: 116298 - DNA, 846 bp, Oceanicola batsensis HTCC2597
  CDS (1)..(846): transl_table=11
atgatcgagaaccgccccgtcctgaacatcgtccagcatgtcatcctgatcctcggggtgacggtcttcgtctttccgatctggctggccttcgtcgcctcgacccataccgcccgggacgtgaattccggcatccccctgctgcccggcgaccagatgtgggagaactacgcccaggtgctgggcgagggtctgtcgaccatcggtgcgccgccgatcgggctcatgctgttcaattcgctgatcatggcgctggcgatcacaatcgggaagatcgtgatctctctgctgtcctccttcgccatcgtctatttccggtttcccttccgggtgctcgcgttctggacgatcttcgtgacgctgatgctgccggtcgaagtccggatccttccgacctacgaggtggtggcgcagctggggatgctgaactcctatgccgggttgtcgatcccgctgatcgcctcggccacggcgacctttctcttccggcagttcttcatgaccgtgccggacgaactgaccgaggcggcgcgggtggacggcgcggggccgatgaagttcttccgcgacatcctggtgccgctgtcgcgcaccaatctggccgcgctcttcgtgatcctgttcatctacggctggaaccagtacctatggccgctgctcgtgaccacggacgagagctattacaccgtcgtcatggggatccagcgcatggcgaatgccggcgaggaacaaccgctgtggaatcttatcatggccaccgccatcctggcgatgctgccgccggtggccgtcatcatcgggatgcagcggctgttcgtccgcggcctggtcgaaaccgagaagtaa

SEQ ID NO: 116299 - protein, 281 aa, Oceanicola batsensis HTCC2597
MIENRPVLNIVQHVILILGVTVFVFPIWLAFVASTHTARDVNSGIPLLPGDQMWENYAQVLGEGLSTIGAPPIGLMLFNSLIMALAITIGKIVISLLSSFAIVYFRFPFRVLAFWTIFVTLMLPVEVRILPTYEVVAQLGMLNSYAGLSIPLIASATATFLFRQFFMTVPDELTEAARVDGAGPMKFFRDILVPLSRTNLAALFVILFIYGWNQYLWPLLVTTDESYYTVVMGIQRMANAGEEQPLWNLIMATAILAMLPPVAVIIGMQRLFVRGLVETEK

SEQ ID NO: 116300 - DNA, 849 bp, Photobacterium sp. SKA34
  CDS (1)..(849): transl_table=11
atggtagaaagaagacctctttttaatttttgttgtcatctattgttgatacttggcgtgatctctatcgcgttaccagtatggttagccattgtggcaacgacacacgaaaatcatgatttcgcgacaagtactcctctgtggtttggtgatcttgggttcagtatttttaaagatttactcagtgggcataccgcttttagtgataagtcattatccataaatggactattacttaactcgtttattatggcgatatgtatcactgtgggtaaattatcaatctctattatgtcagcttatgcggtggttttcttccgttttcgtggccgtatgattgctttttggttgatcttttttaccctgatgttacctgttgaagtgcgtattatgccgacttttgaggtgatcagtaatttggggatgttgaattcattttcaggcttaaccattccattgattgctagtgcaacagccacgttcttatttaggcagttctttttaacgattcccaatgaacttgttgaagccgcacgtattgatggtgcaggtccaataaaattctttttcgatattttattgccattatcacgcaccaatatcgcagccttatttgtgatcacttttatctacggttggaaccaatatttatggccgttattgatcacgacggatacccattatttcactatcgtcatggcgatcaagcaaatgacgggagtggttgatggcgtcattgaatggaacaaaattatggcaaccacgattatcgcaatgttaccaccagtcattgttgttatagcaatgcaaaaagcctttgttaaaggcctagttgattcggagaaataa

SEQ ID NO: 116301 - protein, 282 aa, Photobacterium sp. SKA34
MVERRPLFNFCCHLLLILGVISIALPVWLAIVATTHENHDFATSTPLWFGDLGFSIFKDLLSGHTAFSDKSLSINGLLLNSFIMAICITVGKLSISIMSAYAVVFFRFRGRMIAFWLIFFTLMLPVEVRIMPTFEVISNLGMLNSFSGLTIPLIASATATFLFRQFFLTIPNELVEAARIDGAGPIKFFFDILLPLSRTNIAALFVITFIYGWNQYLWPLLITTDTHYFTIVMAIKQMTGVVDGVIEWNKIMATTIIAMLPPVIVVIAMQKAFVKGLVDSEK

SEQ ID NO: 116302 - DNA, 852 bp, Xanthobacter autotrophicus Py2
  CDS (1)..(852): transl_table=11
atggccggcacctcgcgcctgtccctgctcttcgcccacctcgtgctcatcgccggcgcggcggtgatgatgctgccgctctatgtggcgttcgtcgcctccacttatgcgggcgcggatttcctctccggccgcgtgggcctcctgcccggcccgcatctggtggaaaattaccgtctcgcgctcaccaccggatcgtccacggcgggcattccgccggtgggccccatgctgtggaactcgctggtggtcgcggtggtgatcgcggcggggaagatctccatctccatcctgtccgccttcgccatctgctatttccgctttccgctgcgggtgccggccttctggctcatcttcatgacgctgatgctgccggtggaggtgcgcatattgcccaccttcgaggtggcagcgcggctggatctcctcaattcctacgccggcctcaccgtgccgctgatcgccagcgccacggccaccttcctgttccggcaggtgttcatgaccattccggacgagctgacggaagctgccatcatcgacggcgcgggcccgctgcgcttcttctggtcgatccttttgccgctctcgcgcaccaatatcgcggccctgttcgtgatcctgttcctctatggctggaaccagtatctgtggccgctgctggtgacgacggacgccagctacttcaccgtggtcatgggcatccgccgcctcgtgggcgcggcggcggaggcggacccggtgtggcacctggtgatggccaccgccatcctggcgctggtgccgcctgtgctggtgatcgcggcgctgcagcggctgttcgtgcgcgggctgaccgagacggagaagtga

SEQ ID NO: 116303 - protein, 283 aa, Xanthobacter autotrophicus Py2
MAGTSRLSLLFAHLVLIAGAAVMMLPLYVAFVASTYAGADFLSGRVGLLPGPHLVENYRLALTTGSSTAGIPPVGPMLWNSLVVAVVIAAGKISISILSAFAICYFRFPLRVPAFWLIFMTLMLPVEVRILPTFEVAARLDLLNSYAGLTVPLIASATATFLFRQVFMTIPDELTEAAIIDGAGPLRFFWSILLPLSRTNIAALFVILFLYGWNQYLWPLLVTTDASYFTVVMGIRRLVGAAAEADPVWHLVMATAILALVPPVLVIAALQRLFVRGLTETEK

SEQ ID NO: 116304 - DNA, 831 bp, Thermotoga sp
  CDS (1)..(831)
atgaggagaaaaagatccatcacaatcctctacgaaataattcttgtaatggtgactttcataatggctctgccattgtttcttgcgataaccataagttttcaaaaacctgaggctgtattttcataccctccgaagttttttccaacgagtttttactggaagaattatgtagaagctttcaaatatgttccgctggcaagactttttttgaacagcttgattgttgcatcactgataacacttggaaaacttgccaccggagcgctcgcaggtttcgctttttctcatttcaatttcaagggtaaaaaggtcatgttcgcagctttgtttgctaccctattccttcccgcagaaaccgttatgattctccctctgtttttgatcatgaaaactttcggctgggtcaatacttactgggctctgacaattcctttcatggcaagcgcaacaaacacctttctcatgagacagcattttctcacaattccaagagaactccaagatgctgcactcatagacggagcgagttacatgcaatttttctggaaagtgctgatccccctctcaaaacatatgctggcaggtgcctctataataaacttcgtctatgcctggaacatgtatctctggcctttgatagtgagtatggaagacaaaatgaaaacggtccaggtaggagtgaagatgctcatgcaggctgaatcagccaacaactggggtgtaataatggcgggtaccgtggttgctctagcgccaaccgttgtgatgtttctcgctcttcagaacctgtttgtgaaaagtcttgtgagaagtggcatgaaagggtaa

SEQ ID NO: 116305 - protein, 276 aa, Thermotoga sp
MRRKRSITILYEIILVMVTFIMALPLFLAITISFQKPEAVFSYPPKFFPTSFYWKNYVEAFKYVPLARLFLNSLIVASLITLGKLATGALAGFAFSHFNFKGKKVMFAALFATLFLPAETVMILPLFLIMKTFGWVNTYWALTIPFMASATNTFLMRQHFLTIPRELQDAALIDGASYMQFFWKVLIPLSKHMLAGASIINFVYAWNMYLWPLIVSMEDKMKTVQVGVKMLMQAESANNWGVIMAGTVVALAPTVVMFLALQNLFVKSLVRSGMKG

SEQ ID NO: 116306 - DNA, 831 bp, Thermus brockianus
  CDS (1)..(831): transl_table=11
atgagcaagcagcgtttttggctcgccttggtcctccacgttgggcttttgcccttagcccttttgtggctggcgccgctgtggctcatggtggtgtttgctacccatcccgaagaggagatctttcgtatacccacgccgctccatccgggaggggccttcgggcagaacttggccaacctgcaggcagataccaatttcctgcgggcgcttttaaacagtgtggtggtgtctgggctttacaccctagggggacttttgcttagtgccatggcggggtatgcccttgccgtgtaccaattccggtttaaagccctggtgttctcctttatcgtggccacgctcaccattccctactttgtggtggtcattccccaatacatcttggtggccagggacctgaagctcactaacaccttctggggcgttatcctgccctttttggccaacgctttgggggttttttacatgcgccaggttttcctttcccttccttcttccctcctggacgccgcccgcgtggatggggcgggggaggtgcgcatcttcttccagatcgccttgcccctggtgcgccctgccttggcggcgctggccctcatccttttcctaaatgcctggaacgattacctttggccccttctggtgctttcgcaaaaggagatgtataccgccccggtggccttgggtacgctcatcgggcttacccgagtttcctggggaggcatcatggtgggttcggccttgatgacggtaccctttttgttgcttttcctctttttacagcgttatttcgtggcgggcataaccgcgggtgcggtaaaggagtaa

SEQ ID NO: 116307 - protein, 276 aa, Thermus brockianus
MSKQRFWLALVLHVGLLPLALLWLAPLWLMVVFATHPEEEIFRIPTPLHPGGAFGQNLANLQADTNFLRALLNSVVVSGLYTLGGLLLSAMAGYALAVYQFRFKALVFSFIVATLTIPYFVVVIPQYILVARDLKLTNTFWGVILPFLANALGVFYMRQVFLSLPSSLLDAARVDGAGEVRIFFQIALPLVRPALAALALILFLNAWNDYLWPLLVLSQKEMYTAPVALGTLIGLTRVSWGGIMVGSALMTVPFLLLFLFLQRYFVAGITAGAVKE

SEQ ID NO: 116308 - DNA, 22 bp, Artificial sequence
  primer
atgattgagaaccgtccgtggc

SEQ ID NO: 116309 - DNA, 24 bp, Artificial sequence
  primer
ttatttctcactatcgaccaggcc

SEQ ID NO: 116310 - protein, 303 aa, Artificial sequence
  consensus sequence
  Variant (2)..(10): Xaa in position 2 to 10 is any amino acid
  Variant (12)..(31): Xaa in position 12 to 31 is any amino acid
  Variant (32)..(34): Xaa in position 32 to 34 is any or no amino acid
  Variant (36)..(40): Xaa in position 36 to 40 is any amino acid
  Variant (41)..(43): Xaa in position 41 to 43 is any or no amino acid
  Variant (45)..(59): Xaa in position 45 to 59 is any amino acid
  Variant (60)..(67): Xaa in position 60 to 67 is any or no amino acid
  Variant (70)..(78): Xaa in position 70 to 78 is any amino acid
  Variant (80)..(87): Xaa in position 80 to 87 is any amino acid
  Variant (89)..(89): Xaa in position 89 is any amino acid
  Variant (91)..(95): Xaa in position 91 to 95 is any amino acid
  Variant (97)..(102): Xaa in position 97 to 102 is any amino acid
  Variant (104)..(108): Xaa in position 104 to 108 is any amino acid
  Variant (111)..(112): Xaa in position 111 to 112 is any amino acid
  Variant (114)..(115): Xaa in position 114 to 115 is any amino acid
  Variant (116)..(116): Xaa in position 116 is any or no amino acid
  Variant (118)..(120): Xaa in position 118 to 120 is any amino acid
  Variant (122)..(136): Xaa in position 122 to 136 is any amino acid
  Variant (137)..(167): Xaa in position 137 to 167 is any or no amino acid
  Variant (169)..(171): Xaa in position 169 to 171 is any amino acid
  Variant (173)..(174): Xaa in position 173 to 174 is any amino acid
  Variant (176)..(176): Xaa in position 176 is any amino acid
  Variant (177)..(178): Xaa in position 177 to 178 is any or no amino acid
  Variant (180)..(181): Xaa in position 180 to 181 is any amino acid
  Variant (185)..(185): Xaa in position 185 is any amino acid
  Variant (188)..(188): Xaa in position 188 is any amino acid
  Variant (190)..(192): Xaa in position 190 to 192 is any amino acid
  Variant (194)..(194): Xaa in position 194 is any amino acid
  Variant (197)..(197): Xaa in position 197 is any amino acid
  Variant (201)..(202): Xaa in position 201 to 202 is any amino acid
  Variant (206)..(216): Xaa in position 206 to 216 is any amino acid
  Variant (219)..(225): Xaa in position 219 to 225 is any amino acid
  Variant (227)..(230): Xaa in position 227 to 230 is any amino acid
  Variant (232)..(234): Xaa in position 232 to 234 is any amino acid
  Variant (237)..(237): Xaa in position 237 is any amino acid
  Variant (242)..(251): Xaa in position 242 to 251 is any amino acid
  Variant (252)..(253): Xaa in position 252 to 253 is any or no amino acid
  Variant (255)..(269): Xaa in position 255 to 269 is any amino acid
  Variant (270)..(273): Xaa in position 270 to 273 is any or no amino acid
  Variant (275)..(276): Xaa in position 275 to 276 is any amino acid
  Variant (277)..(277): Xaa in position 277 is any or no amino acid
  Variant (280)..(286): Xaa in position 280 to 286 is any amino acid
  Variant (288)..(295): Xaa in position 288 to 295 is any amino acid
  Variant (297)..(301): Xaa in position 297 to 301 is any amino acid
LXXXXXXXXXPXXXXXXXXXXXXXXXXXXXXXXXPXXXXXXXXNXXXXXXXXXXXXXXXXXXXXXXXNSXXXXXXXXXGXXXXXXXXAXAXXXXXFXXXXXXFXXXXXTLXXPXXXVXXXPXXXXXXXXXXXXXXXXXXXXXXXXXXXXXXXXXXXXXXXXXXXXXXGXXXPXXAXXXAXXTFLXRQXFXXXPXELXEAAXXDGAXXXXXXXXXXXPLXXXXXXXLXXXXFXXXWNXYLWPXXXXXXXXXXXXTXXXXXXXXXXXXXXXXXXXWXXXMAXXXXXXXPXXXXXXXXQXXXXXGL

SEQ ID NO: 116311 - protein, 27 aa, Artificial sequence
  protein pattern
  Variant (2)..(4): Xaa in position 2 to 4 is any amino acid
  Variant (5)..(6): Xaa in position 5 to 6 is any or no amino acid
  Variant (8)..(9): Xaa in position 8 to 9 is any or no amino acid
  Variant (11)..(11): Xaa in position 11 is Asn or Gln
  Variant (12)..(14): Xaa in position 12 to 14 is any amino acid
  Variant (15)..(15): Xaa in position 15 is Ala, Gln, Ser or Thr
  Variant (16)..(16): Xaa in position 16 is Ile, Leu or Val
  Variant (18)..(18): Xaa in position 18 is any amino acid
  Variant (19)..(19): Xaa in position 19 is Glu or Ser
  Variant (20)..(20): Xaa in position 20 is Ile, Leu or Met
  Variant (21)..(21): Xaa in position 21 is any amino acid
  Variant (22)..(22): Xaa in position 22 is Asp or Glu
  Variant (23)..(23): Xaa in position 23 is Ala, Ser or Thr
  Variant (24)..(24): Xaa in position 24 is Ala or Ser
  Variant (25)..(25): Xaa in position 25 is any amino acid
  Variant (26)..(26): Xaa in position 26 is Ile, Leu, Met or Val
  Variant (27)..(27): Xaa in position 27 is Asp or Glu
AXXXXXFXXRXXXXXXPXXXXXXXXXX

SEQ ID NO: 116312 - DNA, 537 bp, Glycine max
  CDS (1)..(537)
atggaaccgcgttcgggtcggcgaatcgtcgacttcgtaaccataaccgtcttctccctcgcactccttgccgttttgacaggttttggtggtggtgggactctcaccgtagccatggcggtgtccgtgacgcgtggttcggagaaaggaaccgtcgctagttcgcatcgcaaactccttaccagtgacaatggaaatgaaagagtggaaccaaaccgaatatggggcgagaaatgcagcaaaactgatatagtgataaaccaaggccccacagcacctctcccaagtggcattccaacctacacagtagagataatgaacatgtgcgtcagtggatgcgacatctctaaaatacacctcagatgcggctggttcagctctgcacgcctaatcaaccccaagctcttcaagcgcctccgttacaacgactgcctcgtcaatgatggcaggcccttgatcaacggtgccaccatttcattccaatatgccaacaccttcctctaccctctctcagtttcctctgttgtctgtgtatga

SEQ ID NO: 116313 - protein, 178 aa, Glycine max
MEPRSGRRIVDFVTITVFSLALLAVLTGFGGGGTLTVAMAVSVTRGSEKGTVASSHRKLLTSDNGNERVEPNRIWGEKCSKTDIVINQGPTAPLPSGIPTYTVEIMNMCVSGCDISKIHLRCGWFSSARLINPKLFKRLRYNDCLVNDGRPLINGATISFQYANTFLYPLSVSSVVCV

SEQ ID NO: 116314 - DNA, 540 bp, Arabidopsis thaliana
  CDS (1)..(540)
atgagaatggaacatatctacaaattccaacattggctcttcttcataggtcttggagtgttgctgtctctttctctgtctgtgaaggccaatgacttcgaaggttccaatgatagaagaagcattgctctcaaggctagaagcttcgtttccataaacgaaaaccgcaccgctctttccagaaagctactactctctcccgacattggcgatgggaccaacagaatcggacaagattgctcaaaagatgatattgttctctttcaaggctcaacaaatccacttcctagtggagttccttcatatacagttgagatcttcaactcttgtgtctcggattgcaatatagcagagatccacgtcagttgtggctggttcagctcagtcagactggttaaccctcgagttttcaggcgactcgactacgacgattgtctggttaacgatggtcaacctcttggtcctggacagtcactctcctttcaatatgctaacagcttctcttaccctctctctgttgcttcagtctcttgcttctga

SEQ ID NO: 116315 - protein, 179 aa, Arabidopsis thaliana
MRMEHIYKFQHWLFFIGLGVLLSLSLSVKANDFEGSNDRRSIALKARSFVSINENRTALSRKLLLSPDIGDGTNRIGQDCSKDDIVLFQGSTNPLPSGVPSYTVEIFNSCVSDCNIAEIHVSCGWFSSVRLVNPRVFRRLDYDDCLVNDGQPLGPGQSLSFQYANSFSYPLSVASVSCF

SEQ ID NO: 116316 - DNA, 531 bp, Arabidopsis thaliana
  CDS (1)..(531)
atgaaccgacggcgacttttggtatcggcgacactgctctcgtatttgctctacggcatggctctcgtctccgttgaagcctccggtggtgaaaagcttagagataatctggatttgactaaaacgacgacgtcgtcaccgagcatatcacatcggaaaatgctgcttctctctcctggtactggaaaaacagaaaggagtgtagagccggagagaattggagaaaagtgcaagagtacggacatagtggtgaaccaagcagtaacggaaccaatgcctaacggaataccaggctacatggtagagataacgaaccagtgtatgtctggatgcataatttcgaggatccacatcaactgcggttggttcagctcagctaagttgataaacccaagagtcttcaagcgtattcactacgacgactgtctcgtcaacaacggcaagcctttgccttttggctccactctctcttttcactacgccaacactttcccttaccatctctctgtcgccttcgtgacatgtgcttag

SEQ ID NO: 116317 - protein, 176 aa, Arabidopsis thaliana
MNRRRLLVSATLLSYLLYGMALVSVEASGGEKLRDNLDLTKTTTSSPSISHRKMLLLSPGTGKTERSVEPERIGEKCKSTDIVVNQAVTEPMPNGIPGYMVEITNQCMSGCIISRIHINCGWFSSAKLINPRVFKRIHYDDCLVNNGKPLPFGSTLSFHYANTFPYHLSVAFVTCA

SEQ ID NO: 116318 - DNA, 486 bp, Medicago truncatula
  CDS (1)..(486)
atgtctttttatctgttcttcctcttcatcacaatgcccctcattgttttttgtgattttgaaatgccttcaggttcttcaacacagatttttcattctttccatgaagacaaaaatggttctctaacagtgtcagaaaaagttgaacatgcacactacacccctagaaaattttggtttcatggttcttgcacaaaaagagacattagtatctcacaaagcaaaggttcaacttctggaattccacagtacattgtgcaaattgttaacacttgtgtttctggatgtgctccttatgatatccatcttcactgtggttggtttgcttctgcaagaataatcaaccctaaattgttcaagagactctcttatgatgattgtttggtgcatggagggaagcctttaacttctaaccagattattagattcacttattctaattcttttatgtaccctcttgcattcaagtctgctagattttgctga

SEQ ID NO: 116319 - protein, 161 aa, Medicago truncatula
MSFYLFFLFITMPLIVFCDFEMPSGSSTQIFHSFHEDKNGSLTVSEKVEHAHYTPRKFWFHGSCTKRDISISQSKGSTSGIPQYIVQIVNTCVSGCAPYDIHLHCGWFASARIINPKLFKRLSYDDCLVHGGKPLTSNQIIRFTYSNSFMYPLAFKSARFC

SEQ ID NO: 116320 - DNA, 609 bp, Oryza sativa subsp
  CDS (1)..(609)
atggccgactgcactacgatgcgtttggcttcgtctgtgaccatcatcttgctgctgctcgtagctagccaagctctagtagtctctggcgagtcatcttcctccgcgatgcagtccaagacgttgaacatgaacaagcttctcaacatcagtgaagatcactctcctaatggcggacgccactggatgcagcggatgcagccggacagctgctcggagcagaacgtggtggtgtaccagaacaacgcggagcacctccccagcggcatcccgacctacagcgtggaaatcatcaacgtctgcacggcgtgcacggtgtacgacgtccacatctcctgcggcgagtttgcctccgcggagctcgtcgaccccagccagttccagcgtatcggcttcaacgactgtctggtgaagggcggaggccggttgggccctagcgaggccgtctccttccagtactccaactccttcgcctacccgctcgccgtagctaatgtcgcgtgttttcattattccattgtttgggcaagcatgataccgtgtttgccagaacatgcttgtcacacggcctcatctgtaaagggccttggcccacgacctcatgcgtag

SEQ ID NO: 116321 - protein, 202 aa, Oryza sativa subsp
MADCTTMRLASSVTIILLLLVASQALVVSGESSSSAMQSKTLNMNKLLNISEDHSPNGGRHWMQRMQPDSCSEQNVVVYQNNAEHLPSGIPTYSVEIINVCTACTVYDVHISCGEFASAELVDPSQFQRIGFNDCLVKGGGRLGPSEAVSFQYSNSFAYPLAVANVACFHYSIVWASMIPCLPEHACHTASSVKGLGPRPHA

SEQ ID NO: 116322 - DNA, 510 bp, Oryza sativa
  CDS (1)..(510)
atggccgactgcactacgatgcgtttggcttcatctgtgaccatcatcttgctgctgctcgtagctagccaagctctagtagtctctggcgagtcatcttcctccgcgatgcagtccaagacgttgaacatgaacaagcttctcaacatcagtgaagatcactctcctaatggcggacgccactggatgcagcggatgcagccggacagctgctcggagcagaacgtggtggtgtaccagaacaacgcggagcacctccccagcggcatcccgacctacagcgtggaaatcatcaacgtctgcacggcgtgcacggtgtacgacgtccacatctcctgcggcgagtttgcctccgcggagctcgtcgaccccagccagttccagcgtatcggcttcaacgactgtctggtgaagggcggaggccggttgggtcctagcgaggccgtctccttccagtactccaactccttcgcctacccgctcgccgtagctaatgtcgcgtgtgagtag

SEQ ID NO: 116323 - protein, 169 aa, Oryza sativa
MADCTTMRLASSVTIILLLLVASQALVVSGESSSSAMQSKTLNMNKLLNISEDHSPNGGRHWMQRMQPDSCSEQNVVVYQNNAEHLPSGIPTYSVEIINVCTACTVYDVHISCGEFASAELVDPSQFQRIGFNDCLVKGGGRLGPSEAVSFQYSNSFAYPLAVANVACE

SEQ ID NO: 116324 - DNA, 681 bp, Oryza sativa
  CDS (1)..(681)
atgagggtctcctcggcgtccagtacgccgccgccgccggcgttcgcggccgcggcgtgggcggtggtgctgctcgccatgctccgctccgacgtcgccctcgccgccgccgcatcctccaacgacgacacaggtctctcgccgttgatgccgccgccgccgctcgccgccccggttcccgcggcggtttctccggccccggcgacgcctcccgccgtcctctccccccgcaagctcctccgcccgcaaggcgcggacgtcgtcggcgtcggtttcgtctccggcagcggcggcggaggaggaggagacggagtacggacgcgccgggtggacgacgggtgcgcgggggcggacgacatcgcgatctaccaggggagggcgacgccgctgccgagcggggtgccggcgtacacggtggacgtgatgaaccggtgcgccggcggcggcggcggcgacgaggagtgcgccatcgcggggatccacgtgcggtgcgggtggttcagctcggtgagcctggtggacccgcgcgtgttccgccggctcggccacgacgactgcctcctcaacgacggccgcccgctcctcgccggcgagaccgtctccttcgagtacaccaactccttcccctacaagctctccgtctccgtcgcaacctgcgtcgtcgaccccgccgccccatag

SEQ ID NO: 116325 - protein, 226 aa, Oryza sativa
MRVSSASSTPPPPAFAAAAWAVVLLAMLRSDVALAAAASSNDDTGLSPLMPPPPLAAPVPAAVSPAPATPPAVLSPRKLLRPQGADVVGVGFVSGSGGGGGGDGVRTRRVDDGCAGADDIAIYQGRATPLPSGVPAYTVDVMNRCAGGGGGDEECAIAGIHVRCGWFSSVSLVDPRVFRRLGHDDCLLNDGRPLLAGETVSFEYTNSFPYKLSVSVATCVVDPAAP

SEQ ID NO: 116326 - DNA, 519 bp, Brassica napus
  CDS (1)..(519)
atgagccgacggcgactactgttatcggcgacgatactctcgtatttgctccacggaatggctctcgtctccgtcgtagcctccggcgtggaggaggttagtagagataacgtggatttgaccaaaacgacgacgttagctacaacctatacgcatcggaagatgctacgtctctctcatgagacgagagtagagccggataggatcggagagaagtgcaagaagtcagacattgtggtgaaccaagcagcgaccgaacctatgcccaacggaatacccggttacaccgtggagatcacgaaccagtgcatgtctggatgcaacatctcgaggatccacgtcagctgcggttggttcagctccgctaagttggttaacccgagagttttcaagcgtattcactacgatgactgtctcgtcaacaacgggaagcctttgccttatggctcgacgctctctttccactacgccaacactttcccttaccgtctggctgtcgcgttcgttacctgctcttga

SEQ ID NO: 116327 - protein, 172 aa, Brassica napus
MSRRRLLLSATILSYLLHGMALVSVVASGVEEVSRDNVDLTKTTTLATTYTHRKMLRLSHETRVEPDRIGEKCKKSDIVVNQAATEPMPNGIPGYTVEITNQCMSGCNISRIHVSCGWFSSAKLVNPRVFKRIHYDDCLVNNGKPLPYGSTLSFHYANTFPYRLAVAFVTCS

SEQ ID NO: 116328 - DNA, 516 bp, Brassica napus
  CDS (1)..(516)
atgagccgacggcgactactgttatcggcgacgatactctcgtatttgctccacggaatggctctcgtctctgtcgtagcctccggcgtggaggaggttagagataacgtggatttgaccaaaacgacgacgttagctacaacctctacgcatcggaagatgctacgtctctctcatgagacgagagtagagccggataggatcggagagaagtgcaagaagtcagacattgtggtgaaccaagcagcgaccgaacctatgcccaacggaatacccggttacaccgtggagatcacgaaccagtgcatgtctggatgcaacatctcgaggatccacgtcagctgcggttggttcagctccgctaagttggttaacccgagagttttcaagcgtattcactacgatgactgtctcgtcaacaacgggaagcctttgccttatggctcgacgctctctttccactacgccaacactttcccttaccgtctggctgtcgcgttcgttacctgctcttga

SEQ ID NO: 116329 - protein, 171 aa, Brassica napus
MSRRRLLLSATILSYLLHGMALVSVVASGVEEVRDNVDLTKTTTLATTSTHRKMLRLSHETRVEPDRIGEKCKKSDIVVNQAATEPMPNGIPGYTVEITNQCMSGCNISRIHVSCGWFSSAKLVNPRVFKRIHYDDCLVNNGKPLPYGSTLSFHYANTFPYRLAVAFVTCS

SEQ ID NO: 116330 - DNA, 537 bp, Glycine max
  CDS (1)..(537)
atggaaccgcgttcgggtcggcgaatcgtcgacttcgtaaccataaccgtcttctccctcgcactccttgccgttttgacaggttttggtggtggtgggactctcaccgtagccatggcggtgtccgtgacgcgtggttcggagaaaggaaccgtcgctagttcgcatcgcaaacttcttactagtggcaatggcaatgaaagagtggaaccgaaccgaatatggggtgagaagtgcagcaagtgtgatgtagtgatcaaccagggccccacagcacctcttccaagtggcattccgacctacacagtagagataatgaatatgtgtgtgagtggttgcgacatctctggcatacacctcagatgcggctggttcagctctgcacgcctcatcaaccctaagctcttcaagcgcctccgttacaacgactgtctcgtcaatgatggcaggcccttgatcaacggtgccaccatttccttccagtatgccaacaccttcctctaccctctctcagtttcctctgttgtctgtgtatga

SEQ ID NO: 116331 - protein, 178 aa, Glycine max
MEPRSGRRIVDFVTITVFSLALLAVLTGFGGGGTLTVAMAVSVTRGSEKGTVASSHRKLLTSGNGNERVEPNRIWGEKCSKCDVVINQGPTAPLPSGIPTYTVEIMNMCVSGCDISGIHLRCGWFSSARLINPKLFKRLRYNDCLVNDGRPLINGATISFQYANTFLYPLSVSSVVCV

SEQ ID NO: 116332 - DNA, 510 bp, Zea mays
  CDS (1)..(510)
atgggagaatggtgcttcaagaaacgcgcagctctggtgattattgtggccattattagctcgctgcagctgctcctgataactgctcaagaagctggaggagaccacgaggtgtggtcgtcgtcatcctcgccggccggtggtcgtggtggcggcgccgtcgtcgtcccgacggcgcggatggggccggacgggtcgtcgtcgtgttcgggggaggaggcggtggtggtgtaccagagcagcgccaaccctctgcccagcggcatcccggcctacaccgtgcagatcatcaacgtctgcggcggagggtgcaccgtgtacgacgtgcacgtctcctgcggcgacttcgcctccacggagctcgtcgacccggccaagttccagcgcgtcgccttcgacgactgcgtcgtcaagggcggcgccgccttggaacccagcgagaccgtctccttccagtactccaactccttctcctaccagctcagtgtcgcctccgtcgcgtgccactag

SEQ ID NO: 116333 - protein, 169 aa, Zea mays
MGEWCFKKRAALVIIVAIISSLQLLLITAQEAGGDHEVWSSSSSPAGGRGGGAVVVPTARMGPDGSSSCSGEEAVVVYQSSANPLPSGIPAYTVQIINVCGGGCTVYDVHVSCGDFASTELVDPAKFQRVAFDDCVVKGGAALEPSETVSFQYSNSFSYQLSVASVACH

SEQ ID NO: 116334 - DNA, 510 bp, Zea mays
  CDS (1)..(510)
atgggacaatggtgctttaagaaacgcgcagctctggtgattattgtggccattagctcgctgcagctgctcctgataactgctcaagaagctggaggagaccacgaggtgtggtcgtcgtcatcctcgccggccggtggtcgtggtggcggcgccgtcgtcgtcccgacggcgcggatggggccggacgggtcgtcgacgtcgtgttcgggggaggaggcggtggtggtgtaccagagcagcgccaaccctctgcccagcggcatcccggcctacaccgtgcagatcatcaacgtctgcggcggagggtgcaccgtgtacgacgtgcacgtctcctgcggcgacttcgcctccacggagctcgtcgacccggccaagttccagcgcgtcgccttcgacgactgcgtcgtcaagggcggcgccgccttggaacccagcgagaccgtctccttccagtactccaactccttctcctaccagctcagtgtcgcctccgtcgcgtgccactag

SEQ ID NO: 116335 - protein, 169 aa, Zea mays
MGQWCFKKRAALVIIVAISSLQLLLITAQEAGGDHEVWSSSSSPAGGRGGGAVVVPTARMGPDGSSTSCSGEEAVVVYQSSANPLPSGIPAYTVQIINVCGGGCTVYDVHVSCGDFASTELVDPAKFQRVAFDDCVVKGGAALEPSETVSFQYSNSFSYQLSVASVACH

SEQ ID NO: 116336 - DNA, 20 bp, Artificial sequence
  primer
atggaaccgcgttcgggtcg

SEQ ID NO: 116337 - DNA, 20 bp, Artificial sequence
  primer
tcatacacagacaacagagg

SEQ ID NO: 116338 - protein, 99 aa, Artificial sequence
  consensus sequence
  Variant (2)..(3): Xaa in position 2 to 3 is any amino acid
  Variant (5)..(8): Xaa in position 5 to 8 is any amino acid
  Variant (9)..(10): Xaa in position 9 to 10 is any or no amino acid
  Variant (12)..(12): Xaa in position 12 is any amino acid
  Variant (16)..(16): Xaa in position 16 is any amino acid
  Variant (18)..(18): Xaa in position 18 is any amino acid
  Variant (20)..(20): Xaa in position 20 is any amino acid
  Variant (22)..(22): Xaa in position 22 is any amino acid
  Variant (24)..(24): Xaa in position 24 is any amino acid
  Variant (26)..(27): Xaa in position 26 to 27 is any amino acid
  Variant (28)..(34): Xaa in position 28 to 34 is any or no amino acid
  Variant (36)..(40): Xaa in position 36 to 40 is any amino acid
  Variant (42)..(43): Xaa in position 42 to 43 is any amino acid
  Variant (46)..(46): Xaa in position 46 is any amino acid
  Variant (48)..(48): Xaa in position 48 is any amino acid
  Variant (50)..(51): Xaa in position 50 to 51 is any amino acid
  Variant (53)..(54): Xaa in position 53 to 54 is any amino acid
  Variant (56)..(57): Xaa in position 56 to 57 is any amino acid
  Variant (59)..(59): Xaa in position 59 is any amino acid
  Variant (61)..(64): Xaa in position 61 to 64 is any amino acid
  Variant (69)..(70): Xaa in position 69 to 70 is any amino acid
  Variant (72)..(73): Xaa in position 72 to 73 is any amino acid
  Variant (75)..(80): Xaa in position 75 to 80 is any amino acid
  Variant (83)..(83): Xaa in position 83 is any amino acid
  Variant (85)..(85): Xaa in position 85 is any amino acid
  Variant (87)..(87): Xaa in position 87 is any amino acid
  Variant (89)..(89): Xaa in position 89 is any amino acid
  Variant (91)..(91): Xaa in position 91 is any amino acid
  Variant (93)..(93): Xaa in position 93 is any amino acid
  Variant (95)..(96): Xaa in position 95 to 96 is any amino acid
  Variant (98)..(98): Xaa in position 98 is any amino acid
VXXQXXXXXXPXGIPXYXVXIXNXCXXXXXXXXXCXXXXXHXXCGXFXSXXLXXPXXFXRXXXXDCLVXXGXXLXXXXXXSFXYXNXFXYXLXVXXVXC

SEQ ID NO: 116339 - protein, 57 aa, Artificial sequence
  protein pattern
  Variant (2)..(6): Xaa in position 2 to 6 is any or no amino acid
  Variant (9)..(9): Xaa in position 9 is any amino acid
  Variant (11)..(11): Xaa in position 11 is Ala or Ser
  Variant (13)..(13): Xaa in position 13 is Ala, Thr or Val
  Variant (14)..(14): Xaa in position 14 is Glu, Lys or Arg
  Variant (16)..(16): Xaa in position 16 is Ile or Val
  Variant (17)..(17): Xaa in position 17 is Asp or Asn
  Variant (19)..(20): Xaa in position 19 to 20 is any amino acid
  Variant (22)..(22): Xaa in position 22 is any amino acid
  Variant (24)..(24): Xaa in position 24 is Ile, Leu or Val
  Variant (25)..(25): Xaa in position 25 is any amino acid
  Variant (26)..(26): Xaa in position 26 is Phe or Tyr
  Variant (27)..(27): Xaa in position 27 is Asp or Asn
  Variant (30)..(30): Xaa in position 30 is Leu or Val
  Variant (32)..(32): Xaa in position 32 is any amino acid
  Variant (33)..(33): Xaa in position 33 is Asp, Gly or Asn
  Variant (35)..(36): Xaa in position 35 to 36 is any amino acid
  Variant (38)..(39): Xaa in position 38 to 39 is any amino acid
  Variant (40)..(40): Xaa in position 40 is Gly or Ser
  Variant (41)..(41): Xaa in position 41 is Ala, Glu, Gln or Ser
  Variant (42)..(42): Xaa in position 42 is Ala, Ser or Thr
  Variant (43)..(43): Xaa in position 43 is Ile, Leu or Val
  Variant (46)..(46): Xaa in position 46 is any amino acid
  Variant (48)..(48): Xaa in position 48 is Ala or Ser
  Variant (50)..(50): Xaa in position 50 is Ser or Thr
  Variant (52)..(52): Xaa in position 52 is any amino acid
  Variant (54)..(54): Xaa in position 54 is any amino acid
  Variant (56)..(56): Xaa in position 56 is Ala or Ser
SXXXXXCGXFXSXXLXXPXXFXRXXXXDCXVXXGXXLXXXXXXSFXYXNXFXYXLXV

SEQ ID NO: 116340 - protein, 20 aa, Artificial sequence
  protein pattern
  Variant (2)..(2): Xaa in position 2 is Ala, Gly, Asn or Ser
  Variant (3)..(3): Xaa in position 3 is any amino acid
  Variant (4)..(4): Xaa in position 4 is Ala or Thr
  Variant (5)..(5): Xaa in position 5 is Ala, Glu or Asn
  Variant (6)..(6): Xaa in position 6 is any amino acid
  Variant (7)..(7): Xaa in position 7 is Leu or Met
  Variant (9)..(9): Xaa in position 9 is Asn or Ser
  Variant (11)..(11): Xaa in position 11 is Ile or Val
  Variant (13)..(13): Xaa in position 13 is Ala, Gly, Ser or Thr
  Variant (15)..(15): Xaa in position 15 is any amino acid
  Variant (17)..(17): Xaa in position 17 is Glu or Gln
  Variant (19)..(19): Xaa in position 19 is any amino acid
QXXXXXXPXGXPXYXVXIXN

SEQ ID NO: 116341 - DNA, 621 bp, Synechocystis sp.
  CDS (1)..(621): transl_table=11
atggcacaacctttgattttgggggtcagcggtgcctctgggctaatttatgccgtcagagccatcaagcatttactggcggcggattacaccatcgaactggtggcttcccgagccagctaccaagtttggcaagcggaacaaaatattcaaatgccaggggaaccctccgcccaggcagaattttggcgctctcaggctggggtagaaaagggtggcaaattgatttgtcaccgttggggagatgtgggggccaccattgccagtggttcctaccgttgcgccggcatggtggtgctgccctgtagcatgagcaccgtggctaaattggcggtgggcatgagttccgatctattggagcgggcggcggatgtgcaaatcaaagaaggtaaacccttggtggtggtgcccagggaaacgcccttaagtttgatccatctgcgcaatctcactagtttggccgaggctggagtccgcattgtgcccgccattcccgcttggtatcatcagccccaatcggtggaagatttagtggattttgtggtggctagggccttggatcaattggcgatcgactgtgtgcccctccagcgttggcaagggggtatggaaggggagtaa

SEQ ID NO: 116342 - protein, 206 aa, Synechocystis sp.
MAQPLILGVSGASGLIYAVRAIKHLLAADYTIELVASRASYQVWQAEQNIQMPGEPSAQAEFWRSQAGVEKGGKLICHRWGDVGATIASGSYRCAGMVVLPCSMSTVAKLAVGMSSDLLERAADVQIKEGKPLVVVPRETPLSLIHLRNLTSLAEAGVRIVPAIPAWYHQPQSVEDLVDFVVARALDQLAIDCVPLQRWQGGMEGE

SEQ ID NO: 116343 - DNA, 582 bp, Pasteurella multocida subsp. multocida str. Pm70
  CDS (1)..(582): transl_table=11
atgaaaaacgacaaaaaacgcctcattattggtatttctggtgcatcgggtgcgatttatgcgattcgcttattggaagtgcttaaaccgcttgatcacattgagacccatttaattatcagcaatgctgctaaacaaactattgcagcagaaacggattacagcattcaagcggtcaaggcattggcggatgtgaattatgatgtgcgtgatattggcgcagcaatttcgtccggctcttaccgcaccttaggtatgattatcctgccttgttccatcaaaaccttatcaggcattgcgcatagttataccgatgatttgatcacgcgtgccgctgatgtgtgtttaaaagaacgtaaacccttggtgttatgtgtacgtgaaacgccattacatttagggcatcttcgtttaatgactcaagccgctgaaattggcgcacaaatcacgccattgatgccagcgttttatcatcacccgaaaacagtgcaagacattgtggatcaaagtgtcaaccgcttatgcgatcaattcgaaattcaattagcacaggatttgtttcagcgttggggtggaaaataa

SEQ ID NO: 116344 - protein, 193 aa, Pasteurella multocida subsp. multocida str. Pm70
MKNDKKRLIIGISGASGAIYAIRLLEVLKPLDHIETHLIISNAAKQTIAAETDYSIQAVKALADVNYDVRDIGAAISSGSYRTLGMIILPCSIKTLSGIAHSYTDDLITRAADVCLKERKPLVLCVRETPLHLGHLRLMTQAAEIGAQITPLMPAFYHHPKTVQDIVDQSVNRLCDQFEIQLAQDLFQRWGGK

SEQ ID NO: 116345 - DNA, 594 bp, Escherichia coli O157:H7 EDL933
  CDS (1)..(594): transl_table=11
  misc_feature (41)..(41): y is t or c
atgaaactgatcgtcgggatgacaggggctaccggtgcgcytcttggtgtggcattactgcaagcgctgcgggagatgccgaatgtcgagactcatctggtgatgtcgaagtgggcgaaaaccaccattgaactggaaacgccttacagcgcccgcgatgttgctgccctcgctgacttcagccataacccggcggatcaggcggcgaccatctcctcaggttcctttcgtacagacggcatgatcgttattccgtgcagtatgaaaacgctcgccggtatccgcgctggttacgctgatggcctggtagggcgcgcggcggacgtcgtgcttaaagaaggccgcaaactggtgctggtgccgcgtgaaatgccgcttagcaccatccatctcgaaaatatgctcgcactttcacgcatgggcgtggcgatggtgccgccgatgcctgccttttataaccatcccgaaacggtagatgacattgtccaccacgtggtagcccgcgtgctggatcaatttggccttgaacatccctacgccaggcgctggcaaggattgccgcaggcccggaatttttctcaggagaatgaataa

SEQ ID NO: 116346 - protein, 197 aa, Escherichia coli O157:H7 EDL933
  misc_feature (14)..(14): The Xaa at location 14 stands for Leu, or Pro.
MKLIVGMTGATGAXLGVALLQALREMPNVETHLVMSKWAKTTIELETPYSARDVAALADFSHNPADQAATISSGSFRTDGMIVIPCSMKTLAGIRAGYADGLVGRAADVVLKEGRKLVLVPREMPLSTIHLENMLALSRMGVAMVPPMPAFYNHPETVDDIVHHVVARVLDQFGLEHPYARRWQGLPQARNFSQENE

SEQ ID NO: 116347 - DNA, 630 bp, Sulfolobus solfataricus P2
  CDS (1)..(630): transl_table=11
gtgttatcaacaatggttagcggaatggttaaggaagcaggaacaaagaacaggagggaaaaaacaaagaggattattatagggataagtggggcaagtggaacaatatacggtattaggactgtccaatttctaaatgagcttggttatgagatacatatcataatttctaaaagtgcggagaaagtagcacaaaaggaactaggtatcaatttaatcaatgaactgaagaagtattcctcttatatttataatcaatcccagatcgaagcttcaccttctagttcaagcttttccataacttcaaaaggtatgattatcattccatgtagtattaaaactcttgcagaaattgcaaatggtattggatcgaatcttctatccagaactgcattaaatttcatcagaacaaataaaaggttagttctagtaattagggaaaccccattaggtgctatagaacttgaaaatgccctaaagttagctagattgggggtttatataatgccagcttctcctgccttctatatcttaccaaaaaacattgatgacatgattaacttcattgtaggcaaggctttagacttactgggaataaagcatgatatatacaagagatggaagggatag

SEQ ID NO: 116348 - protein, 209 aa, Sulfolobus solfataricus P2
MLSTMVSGMVKEAGTKNRREKTKRIIIGISGASGTIYGIRTVQFLNELGYEIHIIISKSAEKVAQKELGINLINELKKYSSYIYNQSQIEASPSSSSFSITSKGMIIIPCSIKTLAEIANGIGSNLLSRTALNFIRTNKRLVLVIRETPLGAIELENALKLARLGVYIMPASPAFYILPKNIDDMINFIVGKALDLLGIKHDIYKRWKG

SEQ ID NO: 116349 - DNA, 591 bp, Agrobacterium tumefaciens str. C58
  CDS (1)..(591): transl_table=11
atgaccccatgccgcgtcgtggtcggtgttaccggcgcatccggtgccggcatcgcgctgcgcatcatcgaacgcctcgccgcgatgaaaagcgtcgaaatacatctcgtcctgtcgccatccgcccgacgcaccgtgctgcatgaggaaggtgccgagggcatggggcggatgctctcgctcgccagcgtcaatcacgccgtcgatgatattggcgcggcaattgccagcggctccttcccgacaacaggcatgatcgtcgccccctgctccatgcgtacacttgccgccatcgcaaccggactttcggacaatctcatcacccgcgccgccgatgtgcacctgaaggaacggcggaaactggttttgatgacccgcgagacgccgctgcatctcatccatctgcgcaacatgtgcgctgtgacggaggcaggtgccatcgtcatgccgccggtgccggccttttataacaggccgcaaagcgtcttcgatattgtcgaccagcttgctgcccgcgcgatcgatcagctcggtatcagctccgcaccgcaagcgccgatatggcagccgcatgtggtgaagacgtcgtaa

SEQ ID NO: 116350 - protein, 196 aa, Agrobacterium tumefaciens str. C58
MTPCRVVVGVTGASGAGIALRIIERLAAMKSVEIHLVLSPSARRTVLHEEGAEGMGRMLSLASVNHAVDDIGAAIASGSFPTTGMIVAPCSMRTLAAIATGLSDNLITRAADVHLKERRKLVLMTRETPLHLIHLRNMCAVTEAGAIVMPPVPAFYNRPQSVFDIVDQLAARAIDQLGISSAPQAPIWQPHVVKTS

SEQ ID NO: 116351 - DNA, 594 bp, Salmonella typhimurium LT2
  CDS (1)..(594): transl_table=11
atgagattgattgtggggatgaccggtgcgaccggcgcgccgcttggcgtcgagctactccaggcattgcgggcgatacctgatgttgaaacgcatctggtaatgtcaaagtgggcgaaaaccactattgaactggagacgccctacacgcccgctgaggtagccgccctggcagattattgtcatagcccggccgatcaggcggcgaccatttcctccggctcatttcgtaccgacggcatgattattatcccctgcagtatgaaaacactggcgggggttcgcgccggctatgccgaggggctggtgggacgcgctgccgatgtcgtgttgaaagagggtcgcaagctggtgcttgtgccgcgggaaatgccgctcagcacgattcatctggaaaacatgcttgcgctttctcgtatgggggtggcgatagtgccgcccatgcccgcgttctacaacctgccgcaaaccgttgacgatattatccagcacatcgtagcgcgcgttctcgaccagtttggtctggagcatacgcgcacgcgccgctggcaaggactgcgacagacagcaaatttttcacaggagaatggataa

SEQ ID NO: 116352 - protein, 197 aa, Salmonella typhimurium LT2
MRLIVGMTGATGAPLGVELLQALRAIPDVETHLVMSKWAKTTIELETPYTPAEVAALADYCHSPADQAATISSGSFRTDGMIIIPCSMKTLAGVRAGYAEGLVGRAADVVLKEGRKLVLVPREMPLSTIHLENMLALSRMGVAIVPPMPAFYNLPQTVDDIIQHIVARVLDQFGLEHTRTRRWQGLRQTANFSQENG

SEQ ID NO: 116353 - DNA, 630 bp, Nostoc sp. PCC 7120
  CDS (1)..(630): transl_table=11
gtgtcacaacataacaaacctctgattatcggcgtatcaggagcatctggactgatttacgccgtccgcgcccttaaatatctgctcacagccgactatgaaattgaattagttgcctctaaatcaacttacatggtttggcaagcagaacaggaaactcggatgccatcagaaccaaaacaacaagagcaattctggcgagaacaagccggagttgctctctctggcaaactgcgttgccatccttggagcgatgtaggagccaatatcgccagtggttcctttcgcactttgggaatgattgtgattccttgtagtatgagtacagtagccaagctagcgggtggtttgagttctgacttactagaacgggctgcggatgtgcatctcaaggaaggacgtaagctagttattgttcccagagaaacgcccttcagcttaatacacctacgaaacttaaccaccttagctgaaactggagtccgaattgtccccgccatccctgcttggtatcacaacccacaaactattgaggacttagttgattttgtcgttgctcgtactttagaccaactcgatatcgattgcgtacctctaaagcgatgggagggcggtaagcataattcgtaa

SEQ ID NO: 116354 - protein, 209 aa, Nostoc sp. PCC 7120
MSQHNKPLIIGVSGASGLIYAVRALKYLLTADYEIELVASKSTYMVWQAEQETRMPSEPKQQEQFWREQAGVALSGKLRCHPWSDVGANIASGSFRTLGMIVIPCSMSTVAKLAGGLSSDLLERAADVHLKEGRKLVIVPRETPFSLIHLRNLTTLAETGVRIVPAIPAWYHNPQTIEDLVDFVVARTLDQLDIDCVPLKRWEGGKHNS

SEQ ID NO: 116355 - DNA, 588 bp, Yersinia pestis KIM
  CDS (1)..(588): transl_table=11
atgaggcagttttccatgaagcgacttattattggcattagtggtgcaagtggtgccatttatggtgtgcggctgttacaggtgctgcaacatgtcgaaggcgtggaaacccatttgattatcagcaatgctgcccgtcaaacactggcgctcgaaaccgactacagcgtcaaggacgtccaagaatttgccgatgtggtccatgattttcgggacattgcggcttgtatctcttctggttcatttaagaccgatggcatggttattttaccttgctccatcaaaacactgtctggcattgtccatagttataccgatggtttattgacccgcgctgccgatgtgatccttaaagaacgtcgccgtttggtgctttgtgtccgcgaaacccccctgcatttaggccacctccgcttaatggtgcaagccgccgaattaggtgctgtgattatgccgccaatgcttgcgttctatcatcagccacaaactattcaggacattattgatcaaacagttaatcgcatcatcgatcagtttgatattgagttacctaaagatctgtttacgcgctggcaaggtaaaaactaa

SEQ ID NO: 116356 - protein, 195 aa, Yersinia pestis KIM
MRQFSMKRLIIGISGASGAIYGVRLLQVLQHVEGVETHLIISNAARQTLALETDYSVKDVQEFADVVHDFRDIAACISSGSFKTDGMVILPCSIKTLSGIVHSYTDGLLTRAADVILKERRRLVLCVRETPLHLGHLRLMVQAAELGAVIMPPMLAFYHQPQTIQDIIDQTVNRIIDQFDIELPKDLFTRWQGKN

SEQ ID NO: 116357 - DNA, 633 bp, Thermosynechococcus elongatus BP-1
  CDS (1)..(633): transl_table=11
gtgattgcggttgtgacctcctcttctttgccaattgtgttgggtgtaacgggtgcctctggtctcatttatgcagtgcgtgccattaaatttctattacaagcgaactatcctattcaactagtggcatcgaaggcggcgcatcaagtgtggcgggcagaatatggcctcaccctgccgactcagcccgataagcaggaactgttttggcgcgaacaggcccaagtttgggaaggttgcctcacctgccatcggccaacagatgtggcagcagcgatcgccagcggttcctttcgcaccctgggcatggtgattctcccctgtagtatgagcacagtagccaagttagcggcaggcctgagttccgatctcctagagcgggtggcggatgtccacctcaaggagcaccgtccactggtgctggtgccccgcgaaaccccctttagtctcattcatctgcaaaacctgacccaactggcaatggctggggcgcgcattgtacccgccatccctgcatggtatcaccggccgcagaccattgaagacttagtggattttgtgatcgcccgtgcccttgatcagttagggttggattgtgtgcctctgcaacgttggcaaggacccctttcctaa

SEQ ID NO: 116358 - protein, 210 aa, Thermosynechococcus elongatus BP-1
MIAVVTSSSLPIVLGVTGASGLIYAVRAIKFLLQANYPIQLVASKAAHQVWRAEYGLTLPTQPDKQELFWREQAQVWEGCLTCHRPTDVAAAIASGSFRTLGMVILPCSMSTVAKLAAGLSSDLLERVADVHLKEHRPLVLVPRETPFSLIHLQNLTQLAMAGARIVPAIPAWYHRPQTIEDLVDFVIARALDQLGLDCVPLQRWQGPLS

SEQ ID NO: 116359 - DNA, 570 bp, Shigella flexneri 2a str. 301
  CDS (1)..(570): transl_table=11
atgaaacgactcattgtaggcatcagcggtgccagcggcgcgatttatggcgtgcgcttattacaggttctgcgcgatgtcacagatatcgaaacgcatctggtgatgagccaggcggcgcgccagaccttatccctcgaaacggatttttccctgcgcgaagtgcaggcattagctgatgtcacgctcgatgcgcgcgatatttccgccagcatctcttccggttctttccagacgctggggatggtgattttaccctgttcaatcaaaaccctgtccggcattgtccatagctatactgatggcttactgacccgtgcggcagatgtggtgctgaaagagcgtcgcccgttggtgctctgcgtgcgtgaaacaccattgcacttaggccatctgcgtttaatgactcaggcggcagaaatcggtgcggtgattatgcctcccgttccggcgttttatcatcgcccgcaatcccttgatgatgtgataaatcagacggttaatcgtgttcttgaccagtttgcaataacccttcctgaagatctctttgcccgctggcagggcgcataa

SEQ ID NO: 116360 - protein, 189 aa, Shigella flexneri 2a str. 301
MKRLIVGISGASGAIYGVRLLQVLRDVTDIETHLVMSQAARQTLSLETDFSLREVQALADVTLDARDISASISSGSFQTLGMVILPCSIKTLSGIVHSYTDGLLTRAADVVLKERRPLVLCVRETPLHLGHLRLMTQAAEIGAVIMPPVPAFYHRPQSLDDVINQTVNRVLDQFAITLPEDLFARWQGA

SEQ ID NO: 116361 - DNA, 660 bp, Shewanella oneidensis MR-1
  CDS (1)..(660): transl_table=11
atggcctatgccaaatcatcgaaggcgattagcctcgcgtggacaggcgcttcgggcgcgccctatggtttgaagttattagaatgcttattggcttcgggctaccaagtgtttttaatgatctccagtgccgctcgggtggtactggccactgaacatggcctacagcttagtgctaatagcgataaagccaaggcacaattactcgatgtactggcacagaagaatatccccttatctggtgagctagtggtattaggcaaggatgagtggttttcaccgccagcctctggcagtgctgcacctaaacaaatggtgatttgcccttgctcgacggggacgcttgctgcggtcgcgacgggaatgagcaataatttgctcgagcgcgcggcagatgtggtgctaaaagagcgcggtcagcttatcttggttccgcgggaaacgccatttaacgccatacacttagagcatatgctcaacctatcgcgcctaggcgccactattatgccggcggcgccaggcttttatcacaatcccaaatcggttgaagatctgatagacttcatggtcgctcgaatcctcgatcatttgggcgttgaccatgcattaacgagtcgttggggttatgacaaacactcccccaatgacatcgacaattga

SEQ ID NO: 116362 - protein, 219 aa, Shewanella oneidensis MR-1
MAYAKSSKAISLAWTGASGAPYGLKLLECLLASGYQVFLMISSAARVVLATEHGLQLSANSDKAKAQLLDVLAQKNIPLSGELVVLGKDEWFSPPASGSAAPKQMVICPCSTGTLAAVATGMSNNLLERAADVVLKERGQLILVPRETPFNAIHLEHMLNLSRLGATIMPAAPGFYHNPKSVEDLIDFMVARILDHLGVDHALTSRWGYDKHSPNDIDN

SEQ ID NO: 116363 - DNA, 630 bp, Pseudomonas putida KT2440
  CDS (1)..(630): transl_table=11
gtgaacgggccggaacgcatcaccctggccatgacgggcgcctcgggtgcccagtatggccttcgcctgctcgattgcctggtacgcgaagaccgcgaggtgcacttcctgatttccaaggccgcacagttggtgatggccaccgagacggatgttgtgttgccggccaagccccaggcgatgcaggccttcctgaccgaatacaccggcgcggccgacgggcagatccgtgtgtatggcaaggaagactggatgtcgccggtagcctcgggttctggcgccccggcggcaatggtggtggtcccctgttccactggcaccttgtcggccattgccactggcgcctgcaacaacctgatcgagcgtgctgccgacgttaccctcaaggagcgtcgccagctgatcctggtgccacgcgaagcgccattctccaccatccacctggaaaacatgctcaagctgtcgcaaatgggcgcggtgatcctgccggcggcaccggggttctatcaccagccgcagaccatcgacgacctggtcgactttgtcgtggcgcgtatcctcaacctgctgaacatcccccaggatatgttgccgcgttggggcgagcaccacttcggggtggatgattga

SEQ ID NO: 116364 - protein, 209 aa, Pseudomonas putida KT2440
MNGPERITLAMTGASGAQYGLRLLDCLVREDREVHFLISKAAQLVMATETDVVLPAKPQAMQAFLTEYTGAADGQIRVYGKEDWMSPVASGSGAPAAMVVVPCSTGTLSAIATGACNNLIERAADVTLKERRQLILVPREAPFSTIHLENMLKLSQMGAVILPAAPGFYHQPQTIDDLVDFVVARILNLLNIPQDMLPRWGEHHFGVDD

SEQ ID NO: 116365 - DNA, 645 bp, Vibrio vulnificus CMCP6
  CDS (1)..(645): transl_table=11
atgagcatgacaaaccaagaaaaatcgatcacgttagcctttacgggcgcctctggcgcgccttatgggttacgtttattacagcaattactggcggcagactaccgcgtctacctgctgatctcttctgcggcaagagtggtattggcaaccgagcatggtctcaagcttccagccaatcctgacgcagcgcagcaagcgctagtgaagcatctgggttgtcctgccgacaagctggtggtgtgtggtaaagacgattggttttcgccagtggcttctggctcggctgcccctaagcagatggtggtttgcccttgctcggcagggagtgtggcggcgattgctcatggtatgtcggataatttaattgagcgtgctgcggatgtggtaatgaaagagcgtggccaattgattttagtggtgcgtgaaacgcccttttcgaccttgcatcttgaaaacatgcacaagctttctcagctcggggtcaccatcatgcccgccgcgcccggtttctatcatcaaccgcagtcgatagacgatctgattgattttatggtcgcgcgtatcttagatcatctcggcattgaacaggttttggtgccacgttggggatacgatcatcgcaatgacggtgactctgtatag

SEQ ID NO: 116366 - protein, 214 aa, Vibrio vulnificus CMCP6
MSMTNQEKSITLAFTGASGAPYGLRLLQQLLAADYRVYLLISSAARVVLATEHGLKLPANPDAAQQALVKHLGCPADKLVVCGKDDWFSPVASGSAAPKQMVVCPCSAGSVAAIAHGMSDNLIERAADVVMKERGQLILVVRETPFSTLHLENMHKLSQLGVTIMPAAPGFYHQPQSIDDLIDFMVARILDHLGIEQVLVPRWGYDHRNDGDSV

SEQ ID NO: 116367 - DNA, 564 bp, Lactobacillus plantarum WCFS1
  CDS (1)..(564): transl_table=11
atgaaacgaattgttgtgggaatcacgggagcgtccggtacgatttacgcggtcgacttattagaaaagttacatcagcggccagatgttgaagttcatctggtaatgagtgcgtgggctaaaaaaaacttggagttagagactgattactcgctcgcgcagctgacggcgctcgcggatgctacttatcgggctaatgaccaaggcgcagcgattgccagcggttcgtttttgaatgacggaatggtcattgtcccagctagtatgaagacggtagcagggattgcgtacggcttcggtgataatttaatatcgcgggctgctgatgtcacgattaaagaacaacgtaaacttgtgattgttccacgtgaaacaccgttaagcgtgattcatttagaaaatctaacgaagttggcaaaactcggtgcccaaattattccaccgattcccgcgttttataatcatccgcaatccattcaggatctggtcaatcatcaaaccatgaaaattttagatgcgtttcatattcataatgaaactgatcgccgttgggagggggattaa

SEQ ID NO: 116368 - protein, 187 aa, Lactobacillus plantarum WCFS1
MKRIVVGITGASGTIYAVDLLEKLHQRPDVEVHLVMSAWAKKNLELETDYSLAQLTALADATYRANDQGAAIASGSFLNDGMVIVPASMKTVAGIAYGFGDNLISRAADVTIKEQRKLVIVPRETPLSVIHLENLTKLAKLGAQIIPPIPAFYNHPQSIQDLVNHQTMKILDAFHIHNETDRRWEGD

SEQ ID NO: 116369 - DNA, 594 bp, Salmonella enterica subsp. enterica serovar Typhi Ty2
  CDS (1)..(594): transl_table=11
atgagattgattgtggggatgaccggtgcgaccggcgcgccgcttggcgtcgagctactccaggcattgcgggcgatacctgatgttgaaacgcatctggtaatgtcaaagtgggcgaaaaccactattgaactggagacgccctacacgcccgctgaggtagccgccctggcagattattgtcatagcccggccgatcaggcggcgaccatttcctccggctcatttcgtaccgacggcatgattattatcccctgcagtatgaaaacactggcgggggttcgcgccggctatgccgatgggctggtgggacgcgctgccgatgtcgtgttgaaagagggtcgcaagctggtgcttgtgccgcgggaaatgccgctcagcacaattcatctggaaaacatgcttgcgctttctcgtatgggggtggcgatagtgccgcccatgcccgcgttctacaacctgccgcaaaccgttgacgatattatccagcacatcgtggcgcgcgttctcgaccagtttggtctggagcatacgcgcgcgcgccgctggcaaggactgcgacaggcagcaaatttttcacaggagaatggataa

SEQ ID NO: 116370 - protein, 197 aa, Salmonella enterica subsp. enterica serovar Typhi Ty2
MRLIVGMTGATGAPLGVELLQALRAIPDVETHLVMSKWAKTTIELETPYTPAEVAALADYCHSPADQAATISSGSFRTDGMIIIPCSMKTLAGVRAGYADGLVGRAADVVLKEGRKLVLVPREMPLSTIHLENMLALSRMGVAIVPPMPAFYNLPQTVDDIIQHIVARVLDQFGLEHTRARRWQGLRQAANFSQENG

SEQ ID NO: 116371 - DNA, 666 bp, Streptomyces avermitilis MA-4680
  CDS (1)..(666): transl_table=11
gtgccttggatcgtaggggtgtccggtgcatccggtacgccgtacgccgccgcggtgctgcgggcgcttgtggagcggggagagagcgtcgacctggtcgtcagcagggcctcccggctcacgctgctcgacgagaccggtctgcccttccgggacgcccactggcgggacgatctgcgggcgtggctggcgcggggcgccgacgggaagccggacaccttcgacgccttcgaggaccatctcgacgccgtacggcactggagcgccggtgacctggcagcggggccgtcctccggttcgtacccctcgaagggcatgctcatcgtgcccgcctccacggcctgcgtcgccggagtcgccctcggcctgtcgaaggacctgttgcagcgcgccgcgagcgtgacgctcaaggaggggcgcaagctggtcgtcgccgtgcgggagaccccgctgaacgggcagacgctgcggcacctggtctccctggacgaggcgggcgccaccgtgctgcccgcctcgccggcgttctacgcgggggccacgcacatccaggacctggtggacttcgtcgccgggcgggtgctcgacgcggcgggcgtcgagcaccacctgtaccgccggtgggagggcgaactcggcggcggctcccgcggcggcaccacctga

SEQ ID NO: 116372 - protein, 221 aa, Streptomyces avermitilis MA-4680
MPWIVGVSGASGTPYAAAVLRALVERGESVDLVVSRASRLTLLDETGLPFRDAHWRDDLRAWLARGADGKPDTFDAFEDHLDAVRHWSAGDLAAGPSSGSYPSKGMLIVPASTACVAGVALGLSKDLLQRAASVTLKEGRKLVVAVRETPLNGQTLRHLVSLDEAGATVLPASPAFYAGATHIQDLVDFVAGRVLDAAGVEHHLYRRWEGELGGGSRGGTT

SEQ ID NO: 116373 - DNA, 636 bp, Nitrosomonas europaea ATCC 19718
  CDS (1)..(636): transl_table=11
gtggtcagttctttaggaaacatgagcgaacagaaaaccattaccgtcgccctgactggagcatccggcatgccatacggtattcgcctgctggaaatactgctgaagcagggccatcgggtttatttactctattctcaagccgcacaaatcgtggcgcaacaggaaatggctctgacattgtctcctcgtcccaaagaaacggaggctttcctgaatggctatttcaatgtcgagccgggactgctcaaggtttttggccgggaagaatggtttgcaccagttgcttccggctccaacccggccgatgcaatggtaatttgtccctgtaccatgggtacgttatcagccgtggcagccggcttaggacagaaactgatagaacgtgcagccgatgtaatgctgaaggagcaacgcaaactcatcatcgttgcccgggaaacacctttttccgctattcatctggaaaatatgctgaagctcgcacacagcggagcagtgatactacctgccaaccccggtttttaccatttgcctgaaagcattcaggacatcgtcgattttatcgtcgcacgtatacttgatcagcttggtgtaacacatactctgctgccgcgctggggatgtgacgcataa

SEQ ID NO: 116374 - protein, 211 aa, Nitrosomonas europaea ATCC 19718
MVSSLGNMSEQKTITVALTGASGMPYGIRLLEILLKQGHRVYLLYSQAAQIVAQQEMALTLSPRPKETEAFLNGYFNVEPGLLKVFGREEWFAPVASGSNPADAMVICPCTMGTLSAVAAGLGQKLIERAADVMLKEQRKLIIVARETPFSAIHLENMLKLAHSGAVILPANPGFYHLPESIQDIVDFIVARILDQLGVTHTLLPRWGCDA

SEQ ID NO: 116375 - DNA, 606 bp, Chromobacterium violaceum ATCC 12472
  CDS (1)..(606): transl_table=11
atgacccgcaagaccatcaccgtcgcgctgaccggcgcctccggcctgccctacggcctgcgcctgatcgaaatcctgctcgccgccggcgcgcgggtatgggtgctgtactcgcaggccgcccaagtggtggccaaacaggaaatgcagctgacgctgccttcccgtcccgcggaaatgctcgcctggctgcgggagcgctacccggccggcgacggccagctggaagtgtacggccgcgaggaatggttcgcgccggccgcctcaggctccaatccgccggacgcgatggtggtatgtccgtgctcgatgggcacgctggcggccatccgccacggcatgagcgacaacctgatcgaacgcgccgcagatgtctgcatcaaggagcagcgcaagctggtgctggtgccgcgcgagacgccgctgtccgccatccacctggagaacatgctggagctggcgcgcctgggcgtggtgatcctgccgccttcccccggattttatacccaccccaagagcgtggacgacatggtggacttcgtcgtctcccgcatcctcgatcaactgggcgtagcgcagacattgacgccgcgctggggagagtag

SEQ ID NO: 116376 - protein, 201 aa, Chromobacterium violaceum ATCC 12472
MTRKTITVALTGASGLPYGLRLIEILLAAGARVWVLYSQAAQVVAKQEMQLTLPSRPAEMLAWLRERYPAGDGQLEVYGREEWFAPAASGSNPPDAMVVCPCSMGTLAAIRHGMSDNLIERAADVCIKEQRKLVLVPRETPLSAIHLENMLELARLGVVILPPSPGFYTHPKSVDDMVDFVVSRILDQLGVAQTLTPRWGE

SEQ ID NO: 116377 - DNA, 627 bp, Gloeobacter violaceus PCC 7421
  CDS (1)..(627): transl_table=11
ttgcagacccaggctccatcctcccggccgatcgtgctgggcgtggccggcgcttccggcttgatctatgccgtgcgcaccgtgcgctttttgctggcggccggtcacgcagtcgatctggtcgcttcgcgggcgagcttcatggtctggcgcgaggaaatgggtacggcgatgccggtggaacccgccgagcaggagcgcttctggcgcgaacagagcggcgagagcggcggcaaactgcgctgccacgcctttgccaatctcgccgcttcgatcgccagcggctcctaccgcacccggggcatgctcgtcattccctgcagcatgtccaccgtcggcaaactggcggcgggtctcagctcggacttgctggagcgggccgccgatgtgcaactgaaagaaggccggccgctggtgctggtaccgcgcgaaacgcccttcagcctcattcacctgcgcaacctgacggcgcttgcagaggcgggggcgcgcatcgtgccagccattcccgcctggtatcagcagcccaaaaccatcgaagatctcgtcgattttgtgattggccgggcgctcgatcagctcgatatcgaccacagcctttttgagcgctggcacccagacacttga

SEQ ID NO: 116378 - protein, 208 aa, Gloeobacter violaceus PCC 7421
MQTQAPSSRPIVLGVAGASGLIYAVRTVRFLLAAGHAVDLVASRASFMVWREEMGTAMPVEPAEQERFWREQSGESGGKLRCHAFANLAASIASGSYRTRGMLVIPCSMSTVGKLAAGLSSDLLERAADVQLKEGRPLVLVPRETPFSLIHLRNLTALAEAGARIVPAIPAWYQQPKTIEDLVDFVIGRALDQLDIDHSLFERWHPDT

SEQ ID NO: 116379 - DNA, 624 bp, Mycobacterium avium subsp. paratuberculosis K-10
  CDS (1)..(624): transl_table=11
atgagcacgcaaccgatacgaatcatcgtaggggtcaccggcgccagcggcgcgccgtttgccgtgcggttaatgcagacgctgcacgggatggacgacgtggagacccacttggtgatgagcgggtgggctcggtcgagtattggaatcgaaacaccctatagcgttcaacaggtttcagcgatggcggatgtcacctacaaactcgaagaacagggcgccgcgatctcatcgggttcgtttcagaccgccggaatgattgtagtgccgtgcagtatgcggacgttggcagcgattcgctacgggctggcggacaacctggtgtgccgtgccgctgacgttgttcttaaggagggacgacggttagtcctagtgccccgtgagacaccattgaatacaatccatttggagaacatgctggcactcagccggatgggcgcgcggattgtgccgccgatgcccgccttttacaaccggccggaatcggtcgacgacattgttgaccacgtggtggtccgtgttctcgatcagttcggtatcaatgccccgcaggcaaagcgctggcagggaatgaagtcggcgaggaccaccggcttcggcaagaactcagcgatcctggcgtag

SEQ ID NO: 116380 - protein, 207 aa, Mycobacterium avium subsp. paratuberculosis K-10
MSTQPIRIIVGVTGASGAPFAVRLMQTLHGMDDVETHLVMSGWARSSIGIETPYSVQQVSAMADVTYKLEEQGAAISSGSFQTAGMIVVPCSMRTLAAIRYGLADNLVCRAADVVLKEGRRLVLVPRETPLNTIHLENMLALSRMGARIVPPMPAFYNRPESVDDIVDHVVVRVLDQFGINAPQAKRWQGMKSARTTGFGKNSAILA

SEQ ID NO: 116381 - DNA, 678 bp, Gibberella zeae PH-1
  CDS (1)..(678)
atgaagattggcaatcgaaaccaatcgtacttgagctggggtggagcacgagaccaggtttacgagaatgctctcccatctttggaatcaacaaggccgacgaggattgttgtcgggattacaggtgcaacaggtgccccgtacgccatccgcatcttaacccttcttcaccacctaggtgtggagactcatcttatcattagcaaatgggcattagccacactcaaatacgaaacatccatgagcgaagctgatattcgaggccttgcgagtagatcatacacagcaaaagatctctcagcaccaatcgcttcaggatcctttcagcatgacggaatgatgatcgttccctgtagcatgaaaactcttgctgcagtacgatctggttactgcgatgacctaatatcaagagccgccgatgtcacactcaaggaagaccgcatactactcctagctattagggaaacacctttgagttctattcatcttgagaatatgcttgctcttcgtcgtgctaacgccatcatcttccctcctgttccggctttctataccaggcctgggggtatcgatgatattgtcgatcaaagtgctggaaggatgttggatatgatgggaatattcactgatggatttgagcgatgggaggggttcaagaaagctcagactgagatgtag

SEQ ID NO: 116382 - protein, 225 aa, Gibberella zeae PH-1
MKIGNRNQSYLSWGGARDQVYENALPSLESTRPTRIVVGITGATGAPYAIRILTLLHHLGVETHLIISKWALATLKYETSMSEADIRGLASRSYTAKDLSAPIASGSFQHDGMMIVPCSMKTLAAVRSGYCDDLISRAADVTLKEDRILLLAIRETPLSSIHLENMLALRRANAIIFPPVPAFYTRPGGIDDIVDQSAGRMLDMMGIFTDGFERWEGFKKAQTEM

SEQ ID NO: 116383 - DNA, 690 bp, Candida albicans SC5314
  CDS (1)..(690): transl_table=12
atgattgcgagagtttgtttgagaagactgaatgttttacccatttttcagattccatcgagaaagtattctattaattatgaaaaagtgaataactcaatatataacaatgtgatcaaacccaaaagaatagttttagcaatcaccggtgccacggggactcaaataggggtaaggttattagaaatattgaaagaattgggtgtggaaactcatttggtcatgtcaaaatgggggattgccactttgaaatacgaaactgattatcaagttgattatgtcacttcattggctacaaaaacatactctgcaagggatgtaacagcaccaatatcttcagggtcatttgttcatgatggaatgattgttgccccttgttcaatgaaatcactttcagctatcagaactggttttacggaagatttgatagttagagctgctgatgtttctttaaaagaaaggcgtaaattgttattagttgctcgagaaacccctctttcagatattcatttggataatatgctatatttactgcgaatgggggtgacaatattcccacctgtgccagcattttatacaaaaccaaaaactattgatgatattgtggaacaaacctgtggaagaatattagataattttggaattaatatagacacgttcgagagatgggatggaattaaccatagatag

SEQ ID NO: 116384 - protein, 229 aa, Candida albicans SC5314
MIARVCLRRSNVLPIFQIPSRKYSINYEKVNNSIYNNVIKPKRIVLAITGATGTQIGVRLLEILKELGVETHLVMSKWGIATLKYETDYQVDYVTSLATKTYSARDVTAPISSGSFVHDGMIVAPCSMKSLSAIRTGFTEDLIVRAADVSLKERRKLLLVARETPLSDIHLDNMLYLSRMGVTIFPPVPAFYTKPKTIDDIVEQTCGRILDNFGINIDTFERWDGINHR

SEQ ID NO: 116385 - DNA, 609 bp, Prochlorococcus marinus str. MIT 9303
  CDS (1)..(609): transl_table=11
gtggatccctatgtccttgccgtttcaggagcttcagctcaacctctagctgaaagatcgctgcagctcttgcttgaaaacaaccgtgacgtccatttgattttcagccacggggctcttcaggtgtggaaagccgaaagaggaattgaagttccaatggatccttctgatcaggagaaattctggcgcgatcatctacaagtaaaaaatggcaatctgacatgccatcgctggaatgatcaatctgcctgcatcgcaagcggtagttttcgcacccgcgggatggcaatcgttccctgcagtatgggcacaattggtcgaatcaatgctggtgtatcaatcgatctaatcgagcgttgtgcagacgtccacctcaaagaggggcgacctctggtgattgcgccaagagacatgccctggagcatcattcaccttcgtaacctcacatcacttgcagaagcaggagcaaaaattgcgccaccaattcctgcctggtacacaaaaccaaacacaattgaagagatggttgattttcttgttgtgagattgttcgacctctttgatgaaaggctcgcccccattaaccgctggaatggtccttcacaatga

SEQ ID NO: 116386 - protein, 202 aa, Prochlorococcus marinus str. MIT 9303
MDPYVLAVSGASAQPLAERSLQLLLENNRDVHLIFSHGALQVWKAERGIEVPMDPSDQEKFWRDHLQVKNGNLTCHRWNDQSACIASGSFRTRGMAIVPCSMGTIGRINAGVSIDLIERCADVHLKEGRPLVIAPRDMPWSIIHLRNLTSLAEAGAKIAPPIPAWYTKPNTIEEMVDFLVVRLFDLFDERLAPINRWNGPSQ

SEQ ID NO: 116387 - DNA, 594 bp, Methylococcus capsulatus str. Bath
  CDS (1)..(594): transl_table=11
atgccacaaccccaacgcctcatcgtcggcatcagcggtgccacgggaatcatctatggtgcgcggctgctggagctgctgaaggagaccgggatcgagacgcacctggtggtgtcccgggccgccgatctgacccgggcgcacgagctggagctgagcgccgcggcgctgcgtggtctcgccagcgtgagctatggcgcgaacgacgtaggcgcggcgctttccagcggatcgttccggaccgccggtatggtgattctgccatgttccatgcggacgctggccgagatcgccaccggcgtgaccagtaccctgctgacccgtgccgccgacgtggtattgaaggagcggcggcggctggtgctgctggtgcgtgagaccccgctgcacgccatccacctgcgcaacatgctcagcgtgaccgaatgcggcgcgatcgtcatgccgccggtgccggcgttctatacccggccgcagaccatcgacgacatggtcaccgacacggtgtgccgggtgctggatttgttcgacatcgacgtcggccgggccaggcgctggggcgaggacatcgacacgggcgcggcgacggcttga

SEQ ID NO: 116388 - protein, 197 aa, Methylococcus capsulatus str. Bath
MPQPQRLIVGISGATGIIYGARLLELLKETGIETHLVVSRAADLTRAHELELSAAALRGLASVSYGANDVGAALSSGSFRTAGMVILPCSMRTLAEIATGVTSTLLTRAADVVLKERRRLVLLVRETPLHAIHLRNMLSVTECGAIVMPPVPAFYTRPQTIDDMVTDTVCRVLDLFDIDVGRARRWGEDIDTGAATA

SEQ ID NO: 116389 - DNA, 606 bp, Anaplasma marginale str. St. Maries
  CDS (1)..(606): transl_table=11
atgggcctttcagggtgcacaccacacaaactggccatggtaaaaagaataattgtaggaatcagtggcgcgtctggcgcattatatgccatacgcatgctgcagaagttgcgtcagtccgaatatgaagtccacctcgtagtaagtgatgcggcaaaggtaactatggcgcacgagtgcggtcatttactcacggtggagcaattgtgcacagattattgtacgcactaccatgacgtacgcaacgtaggcgcttcgatagcgagcgggtctttcaaaaccgcagggatggtcatagtcccatgctcggtacgcactatgtctgagattgcaaccggcgtcacctctaacctactaaccagagctgcagatgtggcactaaaagaaaggagaaaactcgtactgatgctcagagagaccccactgcacttggggcacttgcgcaccatggtatcattggcagagatgggagcaataatcgccccgcccgtaccatcgttttatcaccaccccgaatcgctagacgatatagtaaacaattcggtagacagagtgctaggcatgtttgacatacagcaggagttacgcgagtggcagggaatctag

SEQ ID NO: 116390 - protein, 201 aa, Anaplasma marginale str. St. Maries
MGLSGCTPHKLAMVKRIIVGISGASGALYAIRMLQKLRQSEYEVHLVVSDAAKVTMAHECGHLLTVEQLCTDYCTHYHDVRNVGASIASGSFKTAGMVIVPCSVRTMSEIATGVTSNLLTRAADVALKERRKLVLMLRETPLHLGHLRTMVSLAEMGAIIAPPVPSFYHHPESLDDIVNNSVDRVLGMFDIQQELREWQGI

SEQ ID NO: 116391 - DNA, 621 bp, Colwellia psychrerythraea 34H
  CDS (1)..(621): transl_table=11
gtgaacaatgattttaatggtaaaataacccttgccatcaccggtgcctcgggtgcttcttatgctatgcggctaatagagtgtttaatcgcagcaaactatcagctctatattttgtgctcaagtgccggtcgtattgttttagatactgaagtgggcgttaaaatacccagttctcctgatgctgccagtaaatttctcaccgaaaaatatcaggccaaagatcaacaaataacggtttttggtaaagaacagtggttttctcctgttgcttcgggctcttcagcaccgaaacaaatggttgtttgtccctgttctactggaacaatggccgctatttgtcatggtatgagtgacaacttaattgaacgtgccgcggatgtggtgataaaagaacgtggtcaattgattttaatggtaagagaaacacccttttcaacgttacacttgcaaaatatgctcagcttatctcagcaaggagtcactattatgcctgcgtcccctggattttatcataaggttgaaaccattgaagatctcatcgattttatggtgggtagagtattagatcaccttggtattgaacaagatattatgccgcgttggggttataacatttaa

SEQ ID NO: 116392 - protein, 206 aa, Colwellia psychrerythraea 34H
MNNDFNGKITLAITGASGASYAMRLIECLIAANYQLYILCSSAGRIVLDTEVGVKIPSSPDAASKFLTEKYQAKDQQITVFGKEQWFSPVASGSSAPKQMVVCPCSTGTMAAICHGMSDNLIERAADVVIKERGQLILMVRETPFSTLHLQNMLSLSQQGVTIMPASPGFYHKVETIEDLIDFMVGRVLDHLGIEQDIMPRWGYNI

SEQ ID NO: 116393 - DNA, 612 bp, Dechloromonas aromatica RCB
  CDS (1)..(612): transl_table=11
atgtccaagactatctgcctcgccctgaccggtgcctccgggatgccctacggcctgcgcctgctcgaatgcctgctcaacgccggctgcaaggtacagctgctctattcgcaggcgtcacagatcgttgcccgccaggaactggatttcgaactcccctcccgcccggccgatgccaaaagtgcgctgctcgcccgctttccgtcgatctccccggaaaacctgaccgtctttggccgcgaggagtggttcgccccggttgcctcgggctccaacccccccgatgccatgatcatttgcccctgttcgatgggaacgctggccgcgatcgcccagggcttggccgacaacctgatcgaacgtgctgccgatgtggtcatgaaagaaggccgaaaactggtgctcgtgccacgggaaacgcctttctcggccatccacctcgaaaacatgctgcgcctgtcgcgagcaggggctgtcattctgccgcccagccccggcttctatcaccacccacagagcgtgcaggacattgtcgatttcgttgtcgcccgcgcgctcgaccagatcggcgtggcgcacaagttgatgcagcgctggggcgaggagcgctga

SEQ ID NO: 116394 - protein, 203 aa, Dechloromonas aromatica RCB
MSKTICLALTGASGMPYGLRLLECLLNAGCKVQLLYSQASQIVARQELDFELPSRPADAKSALLARFPSISPENLTVFGREEWFAPVASGSNPPDAMIICPCSMGTLAAIAQGLADNLIERAADVVMKEGRKLVLVPRETPFSAIHLENMLRLSRAGAVILPPSPGFYHHPQSVQDIVDFVVARALDQIGVAHKLMQRWGEER

SEQ ID NO: 116395 - DNA, 591 bp, Ralstonia eutropha JMP134
  CDS (1)..(591): transl_table=11
atgacgaagcgccttgtcgtcgctatcaccggtgcgagtggcgcggtctatggcgtgcgcgtgttgcaggcgctgtcaccgctggcggactgggaaacgcatctggtgtgctcgccttccggcctgctgaccgcacaccacgaactcggcctgcagcgaccgcaggtcgaggcgatggccgatgccgtgcacaacgtgcgcgatatcggcgcagcgatcgcgagtggatcgttccgctgcgacggcatggtggtagcgccctgctccatgcgcacgctggccgcgatcgcgacgggcatggccgacaacctcgtcacgcgcgcagccgacgtaatgctcaaggaacggcgccgactcgtgctgcttgcgcgcgagacgccgctgcatctcgtgcatctgcgcaacatgactgcagtcaccgagatgggcgcgatcgtgctgccgccccttcctgccttctacacgcatccgcagaccgtcgacgatatcgtcaaccacacggttggtcgcgtgctcgatctgttcaacgttccgcacgatggactggtgcagcgctgggaaggcctgcgccctgccatcggcgccgcatag

SEQ ID NO: 116396 - protein, 196 aa, Ralstonia eutropha JMP134
MTKRLVVAITGASGAVYGVRVLQALSPLADWETHLVCSPSGLLTAHHELGLQRPQVEAMADAVHNVRDIGAAIASGSFRCDGMVVAPCSMRTLAAIATGMADNLVTRAADVMLKERRRLVLLARETPLHLVHLRNMTAVTEMGAIVLPPLPAFYTHPQTVDDIVNHTVGRVLDLFNVPHDGLVQRWEGLRPAIGAA

SEQ ID NO: 116397 - DNA, 618 bp, Thiobacillus denitrificans ATCC 25259
  CDS (1)..(618): transl_table=11
atgcacaccgcccccaagaccgtcacactcgcgctgtccggcgcctcgggcatggcctacggcctgcgtctgctcgaatgcctgctcgccgccgacgtccgcgtctacctgcttttgtcccaggcggcgcacgtcgtcgccaagcaggaactcggcatcgcgcttcccgcgcggccgtgcgatctcgaagggcagcttcgcgaaagcctgtgcgtgggcgacggccagttgcgcgtgttcggacgtgaagactggaacgcgccggtcgcctcgggctccaacccggccgacgcgatggtcgtctgtccgtgttcgatgggcacactcgccgcgatcgcgcacggccttgcggacaacctgatcgaacgtgccgccgacgtgatgctgaaggagcagaagaagctcgtgctcgtgccgcgcgaggcgccgttttccacgctccatctcgagaacatgctcgcgctgtcgcgcatgaatgccgtgatcctgccggccaatcccgggttctatcaccgtccgcgctcgatcgaggacgtcgtcgacttcatcgtcgcgcgcatcctcgaccagctcgacatcgcgcacgccttgatcccgcgctgggccgaagaggggtga

SEQ ID NO: 116398 - protein, 205 aa, Thiobacillus denitrificans ATCC 25259
MHTAPKTVTLALSGASGMAYGLRLLECLLAADVRVYLLLSQAAHVVAKQELGIALPARPCDLEGQLRESLCVGDGQLRVFGREDWNAPVASGSNPADAMVVCPCSMGTLAAIAHGLADNLIERAADVMLKEQKKLVLVPREAPFSTLHLENMLALSRMNAVILPANPGFYHRPRSIEDVVDFIVARILDQLDIAHALIPRWAEEG

SEQ ID NO: 116399 - DNA, 624 bp, Anabaena variabilis ATCC 29413
  CDS (1)..(624): transl_table=11
gtgtcacaacataacaaacctctgattatcggcgtatcaggagcatctggactgatttacgccgtccgcgcccttaaatatctgctcaccgccgactatgaaattgaattagttgcctctaaatcaacttacatggtttggcaagcagaacaggaaactcggatgccatcagaaccaaaacaacaagagcaattctggcgagaacaagccggggttgctctctctggcaaactgcgttgccatccttggagcgatgtaggagccaatatcgccagtggttccttccgcacctcaggcatgattgtgattccttgtagtatgagtacagtagccaagctagcgggtggtttgagttctgacttactagaacgggcggctgatgtgcatctcaaagaaggacgtaaattagttatcgttcccagagaaaccccttttagcttgattcacctacgcaacttaaccaccttagctgaaactggagtccgcattgtccccgccatccctgcttggtatcacaacccacaaaccattgaggacttagttgattttgttgttgctcgtactctagaccaacttgatatcgattgcgtacctctaaaacgatgggagggaggtaaagtgtaa

SEQ ID NO: 116400 - protein, 207 aa, Anabaena variabilis ATCC 29413
MSQHNKPLIIGVSGASGLIYAVRALKYLLTADYEIELVASKSTYMVWQAEQETRMPSEPKQQEQFWREQAGVALSGKLRCHPWSDVGANIASGSFRTSGMIVIPCSMSTVAKLAGGLSSDLLERAADVHLKEGRKLVIVPRETPFSLIHLRNLTTLAETGVRIVPAIPAWYHNPQTIEDLVDFVVARTLDQLDIDCVPLKRWEGGKV

SEQ ID NO: 116401 - DNA, 621 bp, Geobacter metallireducens GS-15
  CDS (1)..(621): transl_table=11
atgagcggtacggttctcgtggggatcaccggggcctccggctccgtctacgggctgcgactctgcgaggagctcctcaaggcgggaaagcgggtggtggtcaccgccagcggcgccggcatcggcgtggtgcgggaggagaccaatctggacctttcggctggggaggaggacgcggtggcccgactgcgggagctcttcggcgcttcgccggaacagctctccttttatggcgccgataacctcttcgctcccccggccagcggctcggcggcccccgacgccatggtggtggccccgtgcagcatggggaccctggcccgcatcgctaccggcctttcctcaacgctccttgagcggtgcgccgatgtcatggtcaaggaggggcgtcccctggtgatcgtcccccgggagactcccctgtcagccattcacctggagaatatgctgaagctggcccggctcggggtgcgtgttgtgccggccatgcccgccttctaccatcggcccagaaccctggacgacctggtggatttcgtggtgggtaaggtgctcgacaccctcggcgttcaccatgagctcttcacccgttggggagtaaaggccgggaccggggattag

SEQ ID NO: 116402 - protein, 206 aa, Geobacter metallireducens GS-15
MSGTVLVGITGASGSVYGLRLCEELLKAGKRVVVTASGAGIGVVREETNLDLSAGEEDAVARLRELFGASPEQLSFYGADNLFAPPASGSAAPDAMVVAPCSMGTLARIATGLSSTLLERCADVMVKEGRPLVIVPRETPLSAIHLENMLKLARLGVRVVPAMPAFYHRPRTLDDLVDFVVGKVLDTLGVHHELFTRWGVKAGTGD

SEQ ID NO: 116403 - DNA, 570 bp, Desulfovibrio desulfuricans G20
  CDS (1)..(570): transl_table=11
atgaaacgatttattgtaggcgtttccggcgcaagtggcatgccgcttgccgtgacgttgctaaatgccctcacatgggccgcggatgtggaaacacatcttgtggtgtcgcgtgcggcggaaaaggtgctcacgctggaatcgggaatttccgttgaccagttgtatgctcttgccgatgtgcggcacgaccccgaagatgtgggcgccgcccccgccagcggttcatggcggcattccggcatggttatctgtccgtgcagcatgaccacgcttgccgcggtagccaacggcatagggtccaaccttattcaccgtgcggcggatgtgacgctgaaggaaaacaggccgctgattctggtgccgcgcgagacgccgcttggcagagtgcatctgcgcaacatgctggccgcgcaggaagccggggcggttatcatgccgccgtgtccggggttttacagccggcccgaaagcatacaggacatactgaatcatcttgtgggcaggatgcttgatcatctgggcatcgagcacgacctgtgccgccgctggggcggtttgccggcctga

SEQ ID NO: 116404 - protein, 189 aa, Desulfovibrio desulfuricans G20
MKRFIVGVSGASGMPLAVTLLNALTWAADVETHLVVSRAAEKVLTLESGISVDQLYALADVRHDPEDVGAAPASGSWRHSGMVICPCSMTTLAAVANGIGSNLIHRAADVTLKENRPLILVPRETPLGRVHLRNMLAAQEAGAVIMPPCPGFYSRPESIQDILNHLVGRMLDHLGIEHDLCRRWGGLPA

SEQ ID NO: 116405 - DNA, 639 bp, Synechococcus elongatus PCC 7942
  CDS (1)..(639): transl_table=11
gtgagttcgaccgattcccttcccctcgtgctaggggtcagcggagcctcgggcatgatctatgcggtccgggctctgcgtcacctcctcttggcagatctggcggttgaccttgtcgcctctcgggctgcagctgaagtctggcgatcggaatcccaaattccctttccctctgcacctgagctgcaagaaaagttttggcgcgagcaagcgggtgtgcccgatcgcggtcatctggtctgccatcgcagcagcaatgtcggtgcacgcattgccagcggttcttttcggacgcgaggcatggtcatcctgccctgcagcatgagtacggttggcaagttagcctcaggggtcggcagcgatttgctcgagcgatcggcagacgtccacctcaaagaagggcgctgcttagcagtggtgccacgggaaacccccttcaacctgatccatctgcgcaacctcaccaccttggccgaagctggggcgcggatcgtgccagcgattcctgcttggtaccatcaaccccaaaccatcgacgatttggtggattttgtggtggcccgcgtcttggattgcttcgggttggactgtgttcctctcaatcgttggcagggcaatgttgatctagccgaggattag

SEQ ID NO: 116406 - protein, 212 aa, Synechococcus elongatus PCC 7942
MSSTDSLPLVLGVSGASGMIYAVRALRHLLLADLAVDLVASRAAAEVWRSESQIPFPSAPELQEKFWREQAGVPDRGHLVCHRSSNVGARIASGSFRTRGMVILPCSMSTVGKLASGVGSDLLERSADVHLKEGRCLAVVPRETPFNLIHLRNLTTLAEAGARIVPAIPAWYHQPQTIDDLVDFVVARVLDCFGLDCVPLNRWQGNVDLAED

SEQ ID NO: 116407 - DNA, 618 bp, Burkholderia xenovorans LB400
  CDS (1)..(618): transl_table=11
atgaatgacggagcgacgcgcaggctcgtgctcgcgatcacgggcgcgtccggcgccatctacggcgtcagggcgctcgatgcgctgatgcgcgccggtgtcgaaactcatctcgtcatcagccgggcagcgcatctgaccctggcgcaggaactgtcgcggcgcccggcggaactcgcggcgcaggccagcgtcgtccacaaggtagacgatgtcggcgcgtccatttcgagcggttctttccgcacgatgggcatgctgatcgcgccatgctcggtgcgaacgatgtcggaaatcgcctccggcgtcacctccagtctgatcagccgcgcggcggatgtcacgctgaaggaacgcagacgccttgtactgatggtgcgcgagacgccgctccatctcgggcacctgcgcacgatgacggcgttaagcgaaatgggggcgatcatcatgccgcccgttcccgccttctacgctgtgccacgcagcctcgatgagatggtggaccataccgtcggccgcgcgctcgatctgttcgacatcgacaccgatgccgtgcgccgctggaacggcatggcggccagccgcagcgaggcggccgatgacgctcgcgcccaatag

SEQ ID NO: 116408 - protein, 205 aa, Burkholderia xenovorans LB400
MNDGATRRLVLAITGASGAIYGVRALDALMRAGVETHLVISRAAHLTLAQELSRRPAELAAQASVVHKVDDVGASISSGSFRTMGMLIAPCSVRTMSEIASGVTSSLISRAADVTLKERRRLVLMVRETPLHLGHLRTMTALSEMGAIIMPPVPAFYAVPRSLDEMVDHTVGRALDLFDIDTDAVRRWNGMAASRSEAADDARAQ

SEQ ID NO: 116409 - DNA, 594 bp, Mesorhizobium sp. BNC1
  CDS (1)..(594): transl_table=11
gtggctcatcctaggatgattgtcgggattagcggtgcttcgggagccatttacggccttcggtgcctcgagctgttgcgtgaccttggggtcgaaacgcatctcatagtttcaaaaagcgctgtgctgaccattgagcaggagctcaatatgaaagctgcgaacttcaggaaacttgcaagctattgccatgcgcctggcaatattggtgcggtttgtgcgagcggatcgtttcaaacgcttggcatggtcgtagcgccgtgttccatgcgcagccttgctgagatcgccgttggtgtaacctccagcctgttgacgcgggcagccgaggtggtgctcaaggaacgccggcggctggtgctgttggcgcgtgaagcgccgctgaccttgacgcatctgcggaacatgacggtcgtcactgaaatgggcggcatcatactgccaccggttcccgcattttacactcacccgaagtcactcaacgagatggtggatcatacaatcggtcggactctcgatctcttcggcctcgacactggaaagctgaagcggtgggaggggctgaaaggacccgtcacacaaatctccgactag

SEQ ID NO: 116410 - protein, 197 aa, Mesorhizobium sp. BNC1
MAHPRMIVGISGASGAIYGLRCLELLRDLGVETHLIVSKSAVLTIEQELNMKAANFRKLASYCHAPGNIGAVCASGSFQTLGMVVAPCSMRSLAEIAVGVTSSLLTRAAEVVLKERRRLVLLAREAPLTLTHLRNMTVVTEMGGIILPPVPAFYTHPKSLNEMVDHTIGRTLDLFGLDTGKLKRWEGLKGPVTQISD

SEQ ID NO: 116411 - DNA, 621 bp, Haemophilus somnus 129PT
  CDS (1)..(621): transl_table=11
gtgaaaaagatgccacgaatctcgaaatgcacaatgaagcttaaaaaagactgtttaattattggcatcaccggtgcatctggtgccatttatgctattcggttgttgcaaattttaaaatcccttccggaaattgaaacgcaccttattattagccaagcggcgaaacagactattgcacttgaaacacaatttacggtacaacaagtccgagaattgtccgataaagtttatgatattcgtgacattagtgcggcaatttcttccggatcttaccgcactttaggcatggtaattttgccttgttcaataaaaaccctgtcaggtattgcacatagctataccgatgatttaatgacaagagctgctgatgtatgcttaaaagaacgtaaaccgttggtattatgtgtacgtgaaacacctttacacttaggacatttacgtttgatgactcaggcggcagaaataggtgcacagattacccctctaatgcctgctttttaccataaacccagtaacttagatgatattattaaccaaagcgtcaatcgtgtatgtgatcaatttggtattgaattagaacaagatttatttcttcgctggggaagcgagggaaaataa

SEQ ID NO: 116412 - protein, 206 aa, Haemophilus somnus 129PT
MKKMPRISKCTMKLKKDCLIIGITGASGAIYAIRLLQILKSLPEIETHLIISQAAKQTIALETQFTVQQVRELSDKVYDIRDISAAISSGSYRTLGMVILPCSIKTLSGIAHSYTDDLMTRAADVCLKERKPLVLCVRETPLHLGHLRLMTQAAEIGAQITPLMPAFYHKPSNLDDIINQSVNRVCDQFGIELEQDLFLRWGSEGK

SEQ ID NO: 116413 - DNA, 621 bp, Synechococcus sp. CC9311
  CDS (1)..(621): transl_table=11
atggagcaccctgatcgtccttatgtccttggggtaagcggcgcctcagcccaaccgcttgctgagcgagccttacaacttttgcttcagaaggaacgcagtgttcacctgatcatgagtcgtggggcgcatgaggtttggctcgccgaacaatccatccaggtccccgtcgatcctgagcttcaggaacgcttttggagatcacggctgaatgttcaaacaggatcattaatttgccatcgctggggagatcaagcagcaacgattgctagtggaagtgtggcaacccgcggcatggtgattgttccttgttcgatgggcaccgtggggcgtattgcggccggagtagccagtgatctgctcgaacgttgtgctgatgttcatctcaaggaaggacgaccccttgtactggcacctagagaaatgccatggagcctgattcatctccgcaacctcacaactctggctgaagcaggagcaagaattgctccacccattccggcctggtatagccagccccaaaatctcagcgaaatggtggatttcttagtggtgagactctttgattcccttggtgaggagttaagccctctgaaacgttggcagggtcgccagccatga

SEQ ID NO: 116414 - protein, 206 aa, Synechococcus sp. CC9311
MEHPDRPYVLGVSGASAQPLAERALQLLLQKERSVHLIMSRGAHEVWLAEQSIQVPVDPELQERFWRSRLNVQTGSLICHRWGDQAATIASGSVATRGMVIVPCSMGTVGRIAAGVASDLLERCADVHLKEGRPLVLAPREMPWSLIHLRNLTTLAEAGARIAPPIPAWYSQPQNLSEMVDFLVVRLFDSLGEELSPLKRWQGRQP

SEQ ID NO: 116415 - DNA, 648 bp, Alkalilimnicola ehrlichei MLHE-1
  CDS (1)..(648): transl_table=11
atgatgcacggccacgtcaccctggccctgaccggcgcctccggcatgccctacgggctgcgcctgctgcagtgtctgctgcacgcggacaccccggtgcacctgctggtctcggaggcggcccgggtggtgctgggcctggagaccgacctgcaactgcccgccaagccaagcgccatggcgcggcgactgctagaggcctgtcggctccccgactcggcaccgctggcggtattcggtgaccgccagtggacggcgcccgtggcctccggctccggcgcaccccgccagatggtggtctgcccctgcagcatgggcaccctatcggccatcgccaccggcgccagcgataacctgatcgaacgggcggcggacgttgtgctaaaagagagagggaggcttatcctggtgccgcgcgagacgcccttttccgacattcacctggaaaacatgcttcggctcagtcgcatgggcacggttatcctgccggccaatcccggcttttaccaccaaccggagacagtggaggcgctggtggatttcgtggtggcgcgcattctcgaccaactgggtgccccccagagcctgctgccggcctggggcgagcgactcagtccgacggcccatggcggagggcgggcatcgtga

SEQ ID NO: 116416 - protein, 215 aa, Alkalilimnicola ehrlichei MLHE-1
MMHGHVTLALTGASGMPYGLRLLQCLLHADTPVHLLVSEAARVVLGLETDLQLPAKPSAMARRLLEACRLPDSAPLAVFGDRQWTAPVASGSGAPRQMVVCPCSMGTLSAIATGASDNLIERAADVVLKERGRLILVPRETPFSDIHLENMLRLSRMGTVILPANPGFYHQPETVEALVDFVVARILDQLGAPQSLLPAWGERLSPTAHGGGRAS

SEQ ID NO: 116417 - DNA, 582 bp, Solibacter usitatus Ellin6076
  CDS (1)..(582): transl_table=11
atgcagaaaatgacatcgaaagttatcatcggcatatccggggctagtggagccatttacggctggcgcctgctcgagaggctgcgcgggctgggcaccgtagaggtccacttggtcctgacccgttctggcgagaagacgctgtttcttgaaacaggaaagtcagcagccgatgcccgttctctttcggatttttcctatccacttgaggatatcgggtcccgcctggccagcgggtcctgccggatggacgccatggtggtggccccctgttcgattcacacgatgtccgcgatcgccggtgggatcagttctaatctgttgatccgggcagccgacgtgatgctgaaggagcgacgtaaattgatccttatggtccgagaaacgcccttccatgtcgggcacctaagaaatatgaccgcattagctgaaatgggcgcaataattgcgccgccaattccagggttttatcatagtccgcaaaccgtaatggatatcgtggaccacagcgtagaccgcgtcctggacctgatgggaatcgccgattccgaggttcgccgctgggatggggtgagccggtga

SEQ ID NO: 116418 - protein, 193 aa, Solibacter usitatus Ellin6076
MQKMTSKVIIGISGASGAIYGWRLLERLRGLGTVEVHLVLTRSGEKTLFLETGKSAADARSLSDFSYPLEDIGSRLASGSCRMDAMVVAPCSIHTMSAIAGGISSNLLIRAADVMLKERRKLILMVRETPFHVGHLRNMTALAEMGAIIAPPIPGFYHSPQTVMDIVDHSVDRVLDLMGIADSEVRRWDGVSR

SEQ ID NO: 116419 - DNA, 630 bp, Azoarcus sp. BH72
  CDS (1)..(630): transl_table=11
atgagcgctaccaagaccatcaccgtcgcctttaccggcgcctccggcctgccctacggcgtgcgcctggtggaatgcctgctcgcagccggctgcagggtgtggctgctgtattcgcaggtcgcgcagatcgttgcccgccaggagatggactggaccctgccggggcgtccggccgaggtggaagcggagctgtcggcgcgcttcaaggctcagcccggccaactgcgcgtgttcggccgtgaggaatggttcgctccgccggcttccggttccaacccgccggatgcgatggtgatctgcccctgcaccatggcgacgctggcggcggtggccgcgggcctgagccagagcctgatcgagcgcgccgccgacgtggtcgtgaaggaaggccgcaagctggtgctggtgccgcgcgagacgccgtactcggcgatccacctcgagaacatgctcaagctggcccgcctcggcgtctgcatcctgccgcccaatcccggcttctaccatcaccctcaaaccgttcaggacctggtcgatttcgttgtcgcccgcatcctcgaccagctcggcgtggcgcacagcctgatggcgcgctggggcgaggcgcccgccgacggcatagactga

SEQ ID NO: 116420 - protein, 209 aa, Azoarcus sp. BH72
MSATKTITVAFTGASGLPYGVRLVECLLAAGCRVWLLYSQVAQIVARQEMDWTLPGRPAEVEAELSARFKAQPGQLRVFGREEWFAPPASGSNPPDAMVICPCTMATLAAVAAGLSQSLIERAADVVVKEGRKLVLVPRETPYSAIHLENMLKLARLGVCILPPNPGFYHHPQTVQDLVDFVVARILDQLGVAHSLMARWGEAPADGID

SEQ ID NO: 116421 - DNA, 621 bp, Pseudoalteromonas tunicata D2
  CDS (1)..(621): transl_table=11
atgagcgaatttaaagcgaccatcaccttagcatttagtggtgcatcaggagcaccttatggtttaaggctgctcgaagtattgattgcgcaaggttatcaggtatatgtcttgataagctcggcagcccgtgtggtattagatgttgaatcaaacgtaaaactgtctgccaatgaagaaaaagcctccgcacaattaagtgagcgttttttagctacaccctcgcaacttaaagtatttggtaaagaaaactggttttcacccgtggcatcaggctcggcggcgccgaaaaagatggtggtttgcccgtgtagcgcaggtaccgtatcggcaattgccattggcgcatcggataacttacttgaacgtgctgcggatgtggtgattaaagaaaaaggccagcttattttagtgccaagagaaacaccatttagcgaaatccatttagctaatatgctgacacttgcacgtatgggggtgacgattatgccagctgcacccggtttttatcataatccgcaatgtattgatgaccttgtggattttatggtggcaagaattttagatcaccttggcatagagcatcagttgatgcaacgttggggctacggggaacaataa

SEQ ID NO: 116422 - protein, 206 aa, Pseudoalteromonas tunicata D2
MSEFKATITLAFSGASGAPYGLRLLEVLIAQGYQVYVLISSAARVVLDVESNVKLSANEEKASAQLSERFLATPSQLKVFGKENWFSPVASGSAAPKKMVVCPCSAGTVSAIAIGASDNLLERAADVVIKEKGQLILVPRETPFSEIHLANMLTLARMGVTIMPAAPGFYHNPQCIDDLVDFMVARILDHLGIEHQLMQRWGYGEQ

SEQ ID NO: 116423 - DNA, 618 bp, Photobacterium sp. SKA34
  CDS (1)..(618): transl_table=11
atgacagataaacgtataacgctagcatggacaggcgcatcgggtgcaccttacggactacgtttattagaatgtttattggcagctgactaccaggtgtttttgttgatttcatccgcggcacgtgtggttttagcgacagagcatggtttgaaactatcagcatcgcctgataaagcacgagagcaattagcagctcacctacagggtaatgctgataaattaactgtttgtggtaaagatgattggttttctcctgtcgcgtctggctctgcagcaccgaagcaaatggttgtttgcccatgttcggctggctctttagcttctattgcttatggcatgtcagataatttgattgagcgtgctgctgatgtagtgattaaagaacgtggtcaattggtactggtggtacgtgaaacaccattttcgactatacatttagaaaatatgctcaaactttctcagcttggggtgactatcatgcctgccgcacctggtttttatcatcaaccacaatcgattgatgatttaattgattttatggtcgcaagaatcttggatcatttaggtgttaagcaaggtttagtccctcgatggggatatgatcagcgcacataa

SEQ ID NO: 116424 - protein, 205 aa, Photobacterium sp. SKA34
MTDKRITLAWTGASGAPYGLRLLECLLAADYQVFLLISSAARVVLATEHGLKLSASPDKAREQLAAHLQGNADKLTVCGKDDWFSPVASGSAAPKQMVVCPCSAGSLASIAYGMSDNLIERAADVVIKERGQLVLVVRETPFSTIHLENMLKLSQLGVTIMPAAPGFYHQPQSIDDLIDFMVARILDHLGVKQGLVPRWGYDQRT

SEQ ID NO: 116425 - DNA, 567 bp, marine gamma proteobacterium HTCC2207
  CDS (1)..(567): transl_table=11
atgcgactcattattggtatgtcaggctccagcggtgttatttacggcattcgcatgttgcagatgctcgccgacaaacccgaaattgaaactcatctggtgatgagccaagcggcgcgtatgaatattggcatcgaaactgattgggctgctgaagatgttgaggccctggccgatgaagtgcataacaataaaaatatcggcgccaccatcgccagtgggtcatttgaaacggccggcatgatcgtagtcccctgttctatgaaaactctctcaggaattgttaattcctatgctgataatctgctgattcgcgccgccgatgtgattctcaaggagcgccgcagactggtgattgtgccccgtgagtcgcccttacacaccggccactgtgaactgatgttcaaggccagccaatacggtgcgattatttgcccaccctctccggcgttctataccaatcctcaaagcgtggacgatattatcaatcactctgtggcccgggtgttggatctatttgatattgaaactgcaagcctgaaacgctggcaagggcagggcagttaa

SEQ ID NO: 116426 - protein, 188 aa, marine gamma proteobacterium HTCC2207
MRLIIGMSGSSGVIYGIRMLQMLADKPEIETHLVMSQAARMNIGIETDWAAEDVEALADEVHNNKNIGATIASGSFETAGMIVVPCSMKTLSGIVNSYADNLLIRAADVILKERRRLVIVPRESPLHTGHCELMFKASQYGAIICPPSPAFYTNPQSVDDIINHSVARVLDLFDIETASLKRWQGQGS

SEQ ID NO: 116427 - DNA, 624 bp, Oceanobacter sp. RED65
  CDS (1)..(624): transl_table=11
atgcaaccaagcaaagatgtctcaataaagccgatcacggtagcgattaccggggcctctggtgctccctatacgttgcgtttattgcagtgcttagttgaggcgggcaagccaatctatgtgatgattagcaaagctgctcaggtggtgtttgctactgagacagatattaaattgcccggtactcctgataaaatgcaggctaagctcactgaaatgttcaatgccaagccggatcaaatacaagtattcggtcgtgagcagtggttcgcgccagtggccagcggctcgggtcgcaatggtcccatggtggtatgtccatgtagtacgggcactcttagcgcgattgcgacaggcgccagcaataacttaattgaacgtgcagcggatgtggcaataaaagaacagcgaaagttgattcttgttcctagagaaaccccttttagccctattcatctagagaatatgcttaagctggctaaccttggcgtgacgattatgccagcggcaccgggtttttatcacaatcctcaatccatcgaagatttggtggattttgtggtggcacgcatcttaacccatttagaaatcgatcaagatattatgcccttgtggggcgagtag

SEQ ID NO: 116428 - protein, 207 aa, Oceanobacter sp. RED65
MQPSKDVSIKPITVAITGASGAPYTLRLLQCLVEAGKPIYVMISKAAQVVFATETDIKLPGTPDKMQAKLTEMFNAKPDQIQVFGREQWFAPVASGSGRNGPMVVCPCSTGTLSAIATGASNNLIERAADVAIKEQRKLILVPRETPFSPIHLENMLKLANLGVTIMPAAPGFYHNPQSIEDLVDFVVARILTHLEIDQDIMPLWGE

SEQ ID NO: 116429 - DNA, 621 bp, Alteromonadales bacterium TW-7
  CDS (1)..(621): transl_table=11
ttgcaatttaaagataaaatcaccttagcgttcagtggtgcctctggcgcaccatatggtttaaagctgcttgaagtgttactcgagcagcaataccaagtgtatgtacttatttcgagcgcagcccgagttgtgcttgatactgagtcaaacataaagctctcggcaaatgaagataaagctactgagcagttaaatacgctatttgatgcacagccacaacaattacaagtatttggtaaagataactggtttagtcctgtagcctctggttctgcagcgcccaaaaaaatggttgtgtgcccatgcagtgcggggtcagtatcggcgattgctgtaggcgcatctgataatttactagagcgtgcggccgatgtagtgattaaagaacgtggccagcttattttagtaccgcgtgaaacgccttttagcgagattcatttagagaatatgttaaagctatcgcgtttgggcgttaccattatgcctgcagcgccgggcttttatcataagccgcaaagtatagaagatttagtcgattttatggtggctcgcattttagatcatttaaacattgagcatacactaacaaaacgttggggttatggtgagggtaagtaa

SEQ ID NO: 116430 - protein, 206 aa, Alteromonadales bacterium TW-7
MQFKDKITLAFSGASGAPYGLKLLEVLLEQQYQVYVLISSAARVVLDTESNIKLSANEDKATEQLNTLFDAQPQQLQVFGKDNWFSPVASGSAAPKKMVVCPCSAGSVSAIAVGASDNLLERAADVVIKERGQLILVPRETPFSEIHLENMLKLSRLGVTIMPAAPGFYHKPQSIEDLVDFMVARILDHLNIEHTLTKRWGYGEGK

SEQ ID NO: 116431 - DNA, 570 bp, Escherichia coli B
  CDS (1)..(570): transl_table=11
atgaaacgactcattgtaggcatcagcggtgccagcggcgcgatttatggcgtgcgcttattacaggttctgcgcgatgtcgcagatatcgaaacgcatctggtgatgagccaggcggcgcgccagaccttatccctcgaaacgggtttttccctgcgcgaagtgcaggcattagctgatgtcacgcacgatgcgcgcgatattgccgccagcatctcttccggttctttccagacgctggggatggttattttaccctgttcaatcaaaaccctttccggcattgtccatagctacaccgatggtttactgacccgtgcggcagatgtggtgctgaaagagcgtcgcccgttggtgctctgcgtgcgtgaaacaccattgcacttaggccatctgcgtttaatgactcaggcagcagaaatcggtgcggtgattatgcctcccgttccggcgttttatcatcgcccacagtcccttgatgatgtgataaatcagacggttaatcgtgttcttgaccagtttgcgataacccttcctgaagatctctttgcccgctggcagggcgcataa

SEQ ID NO: 116432 - protein, 189 aa, Escherichia coli B
MKRLIVGISGASGAIYGVRLLQVLRDVADIETHLVMSQAARQTLSLETGFSLREVQALADVTHDARDIAASISSGSFQTLGMVILPCSIKTLSGIVHSYTDGLLTRAADVVLKERRPLVLCVRETPLHLGHLRLMTQAAEIGAVIMPPVPAFYHRPQSLDDVINQTVNRVLDQFAITLPEDLFARWQGA

SEQ ID NO: 116433 - DNA, 774 bp, Pseudomonas putida GB-1
  CDS (1)..(774): transl_table=11
atgcaaggtgccgagcgtggtggccgacagcctcgaagcgatcatcgaacgggtcaaaggccaggctcgcccaggcacccatgtggtgatcatgagcaacggcggtttcggtggcctgcacggcaagttggccgaggcgctgaagtgaacgggccgcaacgcatcaccctggccatgacgggcgcctctggcgcccaatatggcctgcgcttgctcgattgcctggtgcgtgaggaccgcgaggtgcatttcctcatctcaaaggccgcgcagttggtaatggccaccgagacggatgtgttgctgccggccaagccccaggcaatgcaggcctttctgacggagtacaccggcgccgccgatgggcagatccgtgtgtacggcaaggaggactggatgtcgcccgtggcctcgggctctggcgccccagcagcgatggtggtggtgccgtgttctaccggcacgttgtcggcgattgccaccggtgcgtgcaacaacctgatcgagcgggctgccgacgttaccctcaaggagcgtcgccagctgatcctggtaccacgcgaagcaccgttctccaccatccacctggaaaacatgctcaagctgtcgcaaatgggcgcggtgatcctgccggcggcgccgggcttctatcaccagccacagaccatcgacgacctggtcgactttgtcgtggcgcgcattctcaacctgctgaacatcccccaggacatgctgccgcgttggggcgagcatcattttggggtggatgattga

SEQ ID NO: 116434 - protein, 257 aa, Pseudomonas putida GB-1
MQGAERGGRQPRSDHRTGQRPGSPRHPCGDHEQRRFRWPARQVGRGAEVNGPQRITLAMTGASGAQYGLRLLDCLVREDREVHFLISKAAQLVMATETDVLLPAKPQAMQAFLTEYTGAADGQIRVYGKEDWMSPVASGSGAPAAMVVVPCSTGTLSAIATGACNNLIERAADVTLKERRQLILVPREAPFSTIHLENMLKLSQMGAVILPAAPGFYHQPQTIDDLVDFVVARILNLLNIPQDMLPRWGEHHFGVDD

SEQ ID NO: 116435 - DNA, 747 bp, Aspergillus oryzae
  CDS (1)..(747)
atgggctggattggcagtgccatcatcgtcctagtagggagccttctctacttaacaaatcgtttccccaatctacgcatatcgcctttctcccacaaatgggacacaaaagcatcagcctcggcagccacagaaccaagcccacaatccacacgtcttcaaacccaaccaaaccccccaacccggccaatgcgaatcatcgtcgcaatgacaggagcaacgggggcaatcctgggcatccgcctcctagaacgcctacgagaaatgaacgtcgaaacgcacctagtcatcagccgctgggcggtcgagacaatcaaatacgaaaccaagtatacagcgaacgacgtgcgtgcacttgctacccgatgctacccggtgaatgatgctgccgcagctatatccagcggctcgtttcaggcggacgggatgatcatcgtgccgtgcagtatgaggacgctgagcgccgtgcgcacgggattcgccgatgacttgatctgcagagcggccgatgtaacgttgaaggaaaggagaaagcttgtattggtcgtgagggagacgccgcttagtggtattcatttggaaaatatgttggaccttacccgttatggagcggtgatctttccgcctatgcctgcgttctatacgatgcctgagagcgtggatgatattgttacgcagagtgtggggaggatgttggatatgtttggtttggatgctgggaattttgaaaggtgggatgggttttga

SEQ ID NO: 116436 - protein, 248 aa, Aspergillus oryzae
MGWIGSAIIVLVGSLLYLTNRFPNLRISPFSHKWDTKASASAATEPSPQSTRLQTQPNPPTRPMRIIVAMTGATGAILGIRLLERLREMNVETHLVISRWAVETIKYETKYTANDVRALATRCYPVNDAAAAISSGSFQADGMIIVPCSMRTLSAVRTGFADDLICRAADVTLKERRKLVLVVRETPLSGIHLENMLDLTRYGAVIFPPMPAFYTMPESVDDIVTQSVGRMLDMFGLDAGNFERWDGF

SEQ ID NO: 116437 - DNA, 723 bp, Aspergillus oryzae
  CDS (1)..(723)
atgctctcctccttccttccttccggcaccaacacatcaaactccggtcatcacagccccgacaatgcatccgaaacacaatcaaccacacagtccgcaccactcgagcacatatccaccgcaatgccaccagtcccaaccaaaggtcgacgcaaacgaatcgtcgtagccatgaccggagccaccggctcaatcctgggaatcaaagtcctcatcgcccttcgccgcctcaacatcgaaacccacctcgtaatcagcaaatgggccgaagcaaccataaaatacgaaacagactatcacccgcggaatgttcgtgccctagccgactacgtccacaacataaacgacatggcggcacccatatccagcgggtccttcaagaccgacggcatgatcgtcgtcccatgttccatgaaaacactcgccgctatcaactccgggttctgtgaagatctcatctcccggactgcagacgtcatgctcaaggagcgcaggaagctggttcttgttgctagggaaacgcctcttagtgatattcatcttcgcaatatgctttctgtgtctcaggctggggctattatcttcccgcctgtgccggcgtactatatcaaggcggcgtctgtggatgaacttgtggatcagagtgttgggcgcatgttggatctgtttgatctggatacggctgattttgctagatgggagggttggaagaaggataactga

SEQ ID NO: 116438 - protein, 240 aa, Aspergillus oryzae
MLSSFLPSGTNTSNSGHHSPDNASETQSTTQSAPLEHISTAMPPVPTKGRRKRIVVAMTGATGSILGIKVLIALRRLNIETHLVISKWAEATIKYETDYHPRNVRALADYVHNINDMAAPISSGSFKTDGMIVVPCSMKTLAAINSGFCEDLISRTADVMLKERRKLVLVARETPLSDIHLRNMLSVSQAGAIIFPPVPAYYIKAASVDELVDQSVGRMLDLFDLDTADFARWEGWKKDN

SEQ ID NO: 116439 - DNA, 594 bp, Klebsiella pneumoniae
  CDS (1)..(594): transl_table=11
atgaaactgattattgggatgacgggggccaccggggcaccgcttggggtggcattgctgcaggcgctgcgcgatatgccggaggtggaaacccatctggtgatgtcgaaatgggccaaaaccaccatcgagctggaaacgccctggacggcgcgcgaagtggccgcgctggcggacttttcccacagcccggcagaccaggccgccaccatctcatccggttcatttcgtaccgacggcatgatcgttattccctgcagtatgaaaacgcttgcaggcattcgcgcgggttatgccgaagggctggtgggccgcgcggcggacgtggtgctcaaagaggggcgcaagctggtgttggtcccgcgggaaatgccgctcagcacgatccatctggagaacatgctggcgctgtcccgcatgggcgtggcgatggtcccgccgatgccagcttactacaaccacccggagacggttgacgatatcaccaatcatatcgtcacccgggtgctggatcagtttggcctcgactatcacaaagcgcgccgctggaacggcttgcgcacggcagaacaatttgcacaggagatcgaataa

SEQ ID NO: 116440 - protein, 197 aa, Klebsiella pneumoniae
MKLIIGMTGATGAPLGVALLQALRDMPEVETHLVMSKWAKTTIELETPWTAREVAALADFSHSPADQAATISSGSFRTDGMIVIPCSMKTLAGIRAGYAEGLVGRAADVVLKEGRKLVLVPREMPLSTIHLENMLALSRMGVAMVPPMPAYYNHPETVDDITNHIVTRVLDQFGLDYHKARRWNGLRTAEQFAQEIE

SEQ ID NO: 116441 - DNA, 594 bp, Escherichia coli
  CDS (1)..(594): transl_table=11
atgaaactgatcgtcgggatgacaggggctaccggtgcgcctcttggtgtggcattactgcaagcgctgcgggagatgccgaatgtcgagactcatctggtgatgtcgacgtgggcgaaaaccaccattgaactggaaacgccttacagcgcccacgatgttgctgccctcgcagacttcagccataacccggcggatcaggcggcgaccatctcctcaggttcctttcgtaccgacggcatgatcgttattccgtgcagtatgaaaacgctcgccggtatccgtgccggttacgccgatggcctggtggggcgcgcggcggacgtcgtgctcaaagaaggccgcaaactagtgctggtgccgcgtgaaacgccgcttagcaccatccatctcgaaaatatgctcgcactttcacgcatgggcgtggcgatggtgccgccgatgcctgccttttataaccatcccgaaacggtagatgacattgtccaccacgtggtagcccgcgtgctggatcaatttggcctcgaacatcctcacgccaggcgctggcaaggattgccgcaggcccggaatttttctcaggagaatgaataa

SEQ ID NO: 116442 - protein, 197 aa, Escherichia coli
MKLIVGMTGATGAPLGVALLQALREMPNVETHLVMSTWAKTTIELETPYSAHDVAALADFSHNPADQAATISSGSFRTDGMIVIPCSMKTLAGIRAGYADGLVGRAADVVLKEGRKLVLVPRETPLSTIHLENMLALSRMGVAMVPPMPAFYNHPETVDDIVHHVVARVLDQFGLEHPHARRWQGLPQARNFSQENE

SEQ ID NO: 116443 - DNA, 621 bp, Bacillus halodurans
  CDS (1)..(621): transl_table=11
atgacagtgtataaaggcatttataccgtcgggataacaggagcaagcggagcgcaatatggaatacgtctcgtacaagagatgaaaaaaaagggatataaggtccacttagtgatcacagaagccggctggcaagtttttcgagaagaactgctcatccaaacagacgatcgaaaaatggtgattgatgagctgtttgcggctggcgatggtgaagtaagcttccaccagttggatgattatactgcgccgatcgcaagcggttcctatcaaaatagggggatgattataattccgtgctcgatgggaaccctttccggcattgcgcaaggagcgtcggggaacttattagagcgaacagccgacgtgatgttgaaagagaaacgtcgcctcgtcatcgttccaagggaaacgccgttaaatcaaattcatttggaaaatatgctgaagctatcgaaaatgggggtaacgattttacctgccatgccaggattttatcagctaccaaaaacaatggatgacctgattgatttcgttgtcggtaaagcacttgaccagctcgggattgaacacgagctgtttacgagatggggtgaagaacgtgacaatcacagtcggtga

SEQ ID NO: 116444 - protein, 206 aa, Bacillus halodurans
MTVYKGIYTVGITGASGAQYGIRLVQEMKKKGYKVHLVITEAGWQVFREELLIQTDDRKMVIDELFAAGDGEVSFHQLDDYTAPIASGSYQNRGMIIIPCSMGTLSGIAQGASGNLLERTADVMLKEKRRLVIVPRETPLNQIHLENMLKLSKMGVTILPAMPGFYQLPKTMDDLIDFVVGKALDQLGIEHELFTRWGEERDNHSR

SEQ ID NO: 116445 - DNA, 615 bp, Bacillus subtilis
  CDS (1)..(615): transl_table=11
atgaaagcagaattcaagcgtaaaggagggggcaaagtgaaactcgttgtcggaatgacaggggcaacaggggccattttcggggtcaggctgctgcagtggctgaaggccgccggagtggaaacccatctcgttgtgtctccttgggcaaacgtcacgatcaaacacgaaacaggctatacgttacaagaagtagaacaactggccacatacacttactcacataaggatcaggcggcagccatttcaagcgggtcgtttgataccgatggaatgattgttgcgccgtgcagcatgaaatctctcgcaagcattcgcacaggaatggcggataatctgctgacacgtgcggcggatgtcatgctcaaggagagaaaaaaactcgtcctcttaacgagagagacgcctttgaaccaaattcatctcgaaaatatgctagcgcttacgaaaatgggcaccatcattcttcctccgatgccggcattttataatcggccgagaagcttagaggaaatggttgaccatattgtttttagaacgttggaccaattcggcattcggcttcctgaagcgaagcgctggaatgggattgaaaaacaaaaaggaggagcttga

SEQ ID NO: 116446 - protein, 204 aa, Bacillus subtilis
MKAEFKRKGGGKVKLVVGMTGATGAIFGVRLLQWLKAAGVETHLVVSPWANVTIKHETGYTLQEVEQLATYTYSHKDQAAAISSGSFDTDGMIVAPCSMKSLASIRTGMADNLLTRAADVMLKERKKLVLLTRETPLNQIHLENMLALTKMGTIILPPMPAFYNRPRSLEEMVDHIVFRTLDQFGIRLPEAKRWNGIEKQKGGA

SEQ ID NO: 116447 - DNA, 630 bp, Pseudomonas aeruginosa
  CDS (1)..(630): transl_table=11
atgagcggtccggaacgcattaccctggcgatgaccggcgcctccggcgcccagtacggcctgcgcttgctcgattgcctggtgcaggaagagcgcgaggtgcacttcctgatctccaaggccgcgcaactggtgatggccaccgagaccgacgtggccttgccggccaagccgcaggcgatgcaggccttcctcaccgaatattgcggtgccgccgccggacagatccgcgtgttcggccagaacgactggatggcgccgccggcctccggctccagcgcgcccaatgccatggtgatctgcccgtgttccaccggcaccctgtcggcggtcgccacgggggcctgcaacaacctcatcgagcgcgccgccgatgtcgccctgaaggagcgccggccgctggtgctggtgccgcgcgaggcgccgttctccagtatccacctggaaaacatgctcaagctgtccaacctcggcgcggtgatcctgccggcggcgccgggcttctaccaccagccgcaatcggtggaggacctggtggacttcgtcgtcgcgcgaatcctcaacaccctggggattccccaggatatgctgccgcgctggggggaacagcaccttgtcagcgacgagtag

SEQ ID NO: 116448 - protein, 209 aa, Pseudomonas aeruginosa
MSGPERITLAMTGASGAQYGLRLLDCLVQEEREVHFLISKAAQLVMATETDVALPAKPQAMQAFLTEYCGAAAGQIRVFGQNDWMAPPASGSSAPNAMVICPCSTGTLSAVATGACNNLIERAADVALKERRPLVLVPREAPFSSIHLENMLKLSNLGAVILPAAPGFYHQPQSVEDLVDFVVARILNTLGIPQDMLPRWGEQHLVSDE

SEQ ID NO: 116449 - DNA, 651 bp, Streptomyces coelicolor
  CDS (1)..(651): transl_table=11
gtgccttggatcgtgggggtgtccggggcctccggcaccccgtacgccgccgccgtgctgcgtgcgctgctcgccgccggcgagagcgtcgacctggtggtcagccgggcctcgcggctcaccctgctcgacgagaccggcatctccttccgcgacgcccactggcggcacgacctgcgcgaatggctggcccgcggagccgacggaaagccggacacgttcgacgcggacgtctccggcgtacggcactggagcgcgggcgacctcgcggccgggccgtcctcggggtcgtacccgacgaagggcatgctgatcgtgcccgcgtccacggcctgcgtggccggtgtcgcgctcgggctgtccaaggacctgctccagcgcgccgcgagcgtgaccctcaaggagcgccgcaggctggtcgtggccgtacgggagaccccgctggacggccggacgctgcggcacctggtgaccctggacgacgccggcgcgagcgtggtgcccgcctccccggccttctacgcgggggcgacgcacatccaggacctggtggacttcgtcgccggacgcgtcctcgacgcggcgggcgtcgggcacggcctctaccgccgctggcgcggcgacctcggcggggcccgccccaccggctga

SEQ ID NO: 116450 - protein, 216 aa, Streptomyces coelicolor
MPWIVGVSGASGTPYAAAVLRALLAAGESVDLVVSRASRLTLLDETGISFRDAHWRHDLREWLARGADGKPDTFDADVSGVRHWSAGDLAAGPSSGSYPTKGMLIVPASTACVAGVALGLSKDLLQRAASVTLKERRRLVVAVRETPLDGRTLRHLVTLDDAGASVVPASPAFYAGATHIQDLVDFVAGRVLDAAGVGHGLYRRWRGDLGGARPTG

SEQ ID NO: 116451 - DNA, 594 bp, Escherichia coli
  CDS (1)..(594): transl_table=11
atgaaactgatcgtcgggatgacaggggctaccggtgcgcctcttggtgtggcattactgcaagcgctgcgggagatgccgaatgtcgagactcatctggtgatgtcgaagtgggcgaaaaccaccattgaactggaaacgccttacagcgctcgcgatgttgctgccctcgcagacttcagccataacccggcggatcaggcggcgatcatctcatccggttcttttcgtaccgacggcatgatcgttattccgtgcagtatgaaaacgctcgccggtatccgcgctggttacgccgatggcctggtagggcgcgcggcggacgtcgtgctcaaagaaggccgcaaactggtgctggtgccgcgtgaaatgccgcttagcaccatccatctcgaaaatatgctcgcactttcacgcatgggcgtggcgatggtgccgccgatgcctgccttttataaccatcccgaaacggtagatgacattgtccaccatgtggtagcccgcgtgctggatcaatttggcctcgaacatccccacgccaggcgctggcaaggattgccgcaggcccggaatttttctcaggagaatgaataa

SEQ ID NO: 116452 - protein, 197 aa, Escherichia coli
MKLIVGMTGATGAPLGVALLQALREMPNVETHLVMSKWAKTTIELETPYSARDVAALADFSHNPADQAAIISSGSFRTDGMIVIPCSMKTLAGIRAGYADGLVGRAADVVLKEGRKLVLVPREMPLSTIHLENMLALSRMGVAMVPPMPAFYNHPETVDDIVHHVVARVLDQFGLEHPHARRWQGLPQARNFSQENE

SEQ ID NO: 116453 - DNA, 729 bp, Saccharomyces cerevisiae
  CDS (1)..(729)
atgctcctatttccaagaagaactaatatagcctttttcaaaacaacaggcatttttgctaattttcctttgctaggtagaaccattacaacttcaccatctttccttacacataaactgtcaaaggaagtaaccagggcatcaacttcgcctccaagaccaaagagaattgttgtcgcaattactggtgcgactggtgttgcactgggaatcagacttctacaagtgctaaaagagttgagcgtagaaacccatttggtgatttcaaaatggggtgcagcaacaatgaaatatgaaacagattgggaaccgcatgacgtggcggccttggcaaccaagacatactctgttcgtgatgtttctgcatgcatttcgtccggatctttccagcatgatggtatgattgttgtgccctgttccatgaaatcactagctgctattagaatcggttttacagaggatttaattacaagagctgccgatgtttcgattaaagagaatcgtaagttactactggttactcgggaaacccctttatcttccatccatcttgaaaacatgttgtctttatgcagggcaggtgttataatttttcctccggtacctgcgttttatacaagacccaagagccttcatgacctattagaacaaagtgttggcaggatcctagactgctttggcatccacgctgacacttttcctcgttgggaaggaataaaaagcaagtaa

SEQ ID NO: 116454 - protein, 242 aa, Saccharomyces cerevisiae
MLLFPRRTNIAFFKTTGIFANFPLLGRTITTSPSFLTHKLSKEVTRASTSPPRPKRIVVAITGATGVALGIRLLQVLKELSVETHLVISKWGAATMKYETDWEPHDVAALATKTYSVRDVSACISSGSFQHDGMIVVPCSMKSLAAIRIGFTEDLITRAADVSIKENRKLLLVTRETPLSSIHLENMLSLCRAGVIIFPPVPAFYTRPKSLHDLLEQSVGRILDCFGIHADTFPRWEGIKSK

SEQ ID NO: 116455 - DNA, 21 bp, Artificial sequence
  primer
atggcacaacctttgattttg

SEQ ID NO: 116456 - DNA, 20 bp, Artificial sequence
  primer
ttactccccttccatacccc

SEQ ID NO: 116457 - protein, 205 aa, Artificial sequence
  consensus sequence
  Variant (3)..(3): Xaa in position 3 is any amino acid
  Variant (5)..(11): Xaa in position 5 to 11 is any amino acid
  Variant (13)..(14): Xaa in position 13 to 14 is any amino acid
  Variant (16)..(23): Xaa in position 16 to 23 is any amino acid
  Variant (24)..(24): Xaa in position 24 is any or no amino acid
  Variant (26)..(27): Xaa in position 26 to 27 is any amino acid
  Variant (29)..(37): Xaa in position 29 to 37 is any amino acid
  Variant (39)..(60): Xaa in position 39 to 60 is any amino acid
  Variant (61)..(86): Xaa in position 61 to 86 is any or no amino acid
  Variant (88)..(90): Xaa in position 88 to 90 is any amino acid
  Variant (94)..(98): Xaa in position 94 to 98 is any amino acid
  Variant (99)..(100): Xaa in position 99 to 100 is any or no amino acid
  Variant (102)..(104): Xaa in position 102 to 104 is any amino acid
  Variant (108)..(109): Xaa in position 108 to 109 is any amino acid
  Variant (111)..(116): Xaa in position 111 to 116 is any amino acid
  Variant (118)..(121): Xaa in position 118 to 121 is any amino acid
  Variant (123)..(124): Xaa in position 123 to 124 is any amino acid
  Variant (130)..(131): Xaa in position 130 to 131 is any amino acid
  Variant (134)..(136): Xaa in position 134 to 136 is any amino acid
  Variant (138)..(141): Xaa in position 138 to 141 is any amino acid
  Variant (144)..(144): Xaa in position 144 is any amino acid
  Variant (146)..(149): Xaa in position 146 to 149 is any amino acid
  Variant (152)..(152): Xaa in position 152 is any amino acid
  Variant (154)..(160): Xaa in position 154 to 160 is any amino acid
  Variant (162)..(163): Xaa in position 162 to 163 is any amino acid
  Variant (165)..(165): Xaa in position 165 is any amino acid
  Variant (167)..(168): Xaa in position 167 to 168 is any amino acid
  Variant (170)..(170): Xaa in position 170 is any amino acid
  Variant (173)..(174): Xaa in position 173 to 174 is any amino acid
  Variant (176)..(179): Xaa in position 176 to 179 is any amino acid
  Variant (181)..(185): Xaa in position 181 to 185 is any amino acid
  Variant (187)..(187): Xaa in position 187 is any amino acid
  Variant (189)..(189): Xaa in position 189 is any amino acid
  Variant (192)..(200): Xaa in position 192 to 200 is any amino acid
  Variant (201)..(203): Xaa in position 201 to 203 is any or no amino acid
GAXGXXXXXXXLXXLXXXXXXXXXLXXSXXXXXXXXXEXXXXXXXXXXXXXXXXXXXXXXXXXXXXXXXXXXXXXXXXXXXXXXXXAXXXSGSXXXXXXXMXXXPCSXXTXXXXXXGXXXXLXXRAADVXXKEXXXLXXXXREXPXXXXHLXNXXXXXXXGXXIXPXXPXFYXXPXXXXDXXXXXVXRXLDXXXXXXXXXXXXRW

SEQ ID NO: 116458 - protein, 34 aa, Artificial sequence
  protein pattern
  Variant (2)..(3): Xaa in position 2 to 3 is any or no amino acid
  Variant (5)..(5): Xaa in position 5 is any or no amino acid
  Variant (8)..(11): Xaa in position 8 to 11 is any amino acid
  Variant (12)..(12): Xaa in position 12 is Ala, Gly or Gln
  Variant (14)..(14): Xaa in position 14 is Ile, Leu or Val
  Variant (15)..(15): Xaa in position 15 is Ile or Val
  Variant (16)..(16): Xaa in position 16 is any amino acid
  Variant (20)..(21): Xaa in position 20 to 21 is any amino acid
  Variant (22)..(22): Xaa in position 22 is Ser or Thr
  Variant (23)..(23): Xaa in position 23 is Leu, Met or Val
  Variant (24)..(24): Xaa in position 24 is Ala, Gly or Ser
  Variant (25)..(25): Xaa in position 25 is any amino acid
  Variant (26)..(26): Xaa in position 26 is Ile, Leu or Val
  Variant (27)..(28): Xaa in position 27 to 28 is any amino acid
  Variant (29)..(29): Xaa in position 29 is Gly or Ser
  Variant (30)..(30): Xaa in position 30 is any amino acid
  Variant (31)..(31): Xaa in position 31 is Ala, Cys, Gly, Ser or Thr
  Variant (32)..(32): Xaa in position 32 is Asp, Glu, Gly, Asn or Ser
  Variant (33)..(33): Xaa in position 33 is Asp, Gly, Asn, Ser or Thr
AXXSXGSXXXXXMXXXPCSXXXXXXXXXXXXXXL

SEQ ID NO: 116459 - protein, 21 aa, Artificial sequence
  protein pattern
  Variant (2)..(2): Xaa in position 2 is any amino acid
  Variant (3)..(6): Xaa in position 3 to 6 is any or no amino acid
  Variant (9)..(9): Xaa in position 9 is Ser or Thr
  Variant (11)..(13): Xaa in position 11 to 13 is any amino acid
  Variant (14)..(14): Xaa in position 14 is Ala or Gly
  Variant (15)..(17): Xaa in position 15 to 17 is any amino acid
  Variant (18)..(18): Xaa in position 18 is Ile, Leu, Met or Val
  Variant (19)..(20): Xaa in position 19 to 20 is any amino acid
IXXXXXGAXGXXXXXXXXXXL

SEQ ID NO: 116460 - DNA, 816 bp, Synechocystis sp.
  CDS (1)..(816): transl_table=11
atgactaatttgtccggttcaatgcccagctccacagcagcggatttacagcctgccctcagggttgaaggtttgggattttattacggcaccaaaaaagtgttagagggggtaaccatggcaatccccgttggtaaggtcactgccatgattggcccttctggttgtggtaaatcaactttgctcaaagcttttaaccgcattgccgaactggagggacgggtgaaagtaaccgggaaaatcgaatttttcggacaaaatatttacgatcaaaaggtcaatattaatagcctgcgtcgggaaattggcatggtctttcagcgccccaatcctttccccaccagcatttacgacaacattgtctatggggttaaactttgttgcaatgtgagccgggccgaattggatgaaattgtcgaacgttccctcactagggcagtgttgtgggatgaagtcaaggatagtttgaaaaaatctgctttgggtttatcggggggacaacagcaacgcctatgtattgccagggcgttagcggtcaatcccaaggtgttgttaatggatgaaccctgttctgctctcgatcctatttctactctgaaaattgaggaattaatcaatagtctgcgggaaaatgtgaccatcaccattgtgacccacaatatgcaacaggccctgagggtgtctgactacacagcgtttttcaataccgatgaaagccgtatcggtcagttagtagaattcgacaccacccagaatattttctctagtccccaggaaacccaaaccagggattatgtggctggtcgctttggctaa

SEQ ID NO: 116461 - protein, 271 aa, Synechocystis sp.
MTNLSGSMPSSTAADLQPALRVEGLGFYYGTKKVLEGVTMAIPVGKVTAMIGPSGCGKSTLLKAFNRIAELEGRVKVTGKIEFFGQNIYDQKVNINSLRREIGMVFQRPNPFPTSIYDNIVYGVKLCCNVSRAELDEIVERSLTRAVLWDEVKDSLKKSALGLSGGQQQRLCIARALAVNPKVLLMDEPCSALDPISTLKIEELINSLRENVTITIVTHNMQQALRVSDYTAFFNTDESRIGQLVEFDTTQNIFSSPQETQTRDYVAGRFG

SEQ ID NO: 116462 - DNA, 780 bp, Listeria monocytogenes
  CDS (1)..(780): transl_table=11
atgacaactgaaactgctgaaaaagtagagtatatcattgaaacaaaagatgtagatttattttatggttccaaacaagcactacaaaaaatcgctttaaatattaagaaaaatcaagtgaccgctctaattggtccgtcggggtgtgggaaatcaacttttctgcgtacgcttaaccgaatgaatgatttaattcccaatgtgaaaacgactggagaaatccatattggcggtgaaaatgtacaagatcctaaaattgacatggttaacttacgaaaaaaagtgggtatggttttccaacaagcaaacccattcccgttttcgatttatgataatgtcgcttatggtccgcggatgcatggtataaaagacaaaaaagtacttgatgagattgtagaaagaagtttgcgtcaagcggctctttgggaagaagtgcatgataggctggatcgttcggcgattgggatgtcaggtggacaacaacagcggctttgcatcgcacgagttctagctgttaaaccggatgttattttgatggatgagccaacttctgcactggacccaatttcgacagcaaaagtagaagatttgattttagaattaaagaaagactatacgattgttattgtgacgcataatatgcaacaagcatcccggatttccgatgaaactgcctttttcttaaatggtcgcatcgtggagttcgcggatacgacgagtatttttaccaacccagcagaaaaggaaacagaagactatatttcaggaagatttggataa

SEQ ID NO: 116463 - protein, 259 aa, Listeria monocytogenes
MTTETAEKVEYIIETKDVDLFYGSKQALQKIALNIKKNQVTALIGPSGCGKSTFLRTLNRMNDLIPNVKTTGEIHIGGENVQDPKIDMVNLRKKVGMVFQQANPFPFSIYDNVAYGPRMHGIKDKKVLDEIVERSLRQAALWEEVHDRLDRSAIGMSGGQQQRLCIARVLAVKPDVILMDEPTSALDPISTAKVEDLILELKKDYTIVIVTHNMQQASRISDETAFFLNGRIVEFADTTSIFTNPAEKETEDYISGRFG

SEQ ID NO: 116464 - DNA, 780 bp, Bacillus licheniformis; strain DSM 13
  CDS (1)..(780)
atgagcgctgtaacagctgtaaagccagaagatgtataccagatcaacgacttgaatttatggtacggcgaacatcacgcattaaagaacattaacttgacaatacccgagtacgaaattaccgccatcattggaccgtcagggtgcggaaagtcgacattcattaaaacgctgaatctcatgatcaatatggttccgaatgtcaaaatgaccggagagatcagctacaacggaacgaacgtactcaacagcaaagtcgaccttgtcgagttacggaaaaaagtcggcatggtgtttcaaaaaggaaacccgtttccccagtcgatctttgataatgtcgcatacggaccaagaatccatggattgaaaaacaaaaaagaactgaatgagagagtggaaaaggcgcttgtggatgtagcgctgtgggatgaagtgaaagaccgtcttcattcccaggcgctcggactttccggggggcagcagcagcgcctctgcatcgcaagggcgctggccaccaatcctgacgttctcttgatggatgaaccgacatccgcccttgatcccgtttcaactttgaaaatcgaagagctgatgctcaagctgaaagagaaatatacaattgccatcgtcacgcacaacatgcagcaggcctcgagaatttccgatcaaacggcgtttttcctgatgggcgagctgattgagtgcaatgatacggtcaaaatgttttcaagtcctgacgatcatcggacgaaagattatataacaggccggttcggatga

SEQ ID NO: 116465 - protein, 259 aa, Bacillus licheniformis; strain DSM 13
MSAVTAVKPEDVYQINDLNLWYGEHHALKNINLTIPEYEITAIIGPSGCGKSTFIKTLNLMINMVPNVKMTGEISYNGTNVLNSKVDLVELRKKVGMVFQKGNPFPQSIFDNVAYGPRIHGLKNKKELNERVEKALVDVALWDEVKDRLHSQALGLSGGQQQRLCIARALATNPDVLLMDEPTSALDPVSTLKIEELMLKLKEKYTIAIVTHNMQQASRISDQTAFFLMGELIECNDTVKMFSSPDDHRTKDYITGRFG

SEQ ID NO: 116466 - DNA, 870 bp, Dichelobacter nodosus VCS1703A
  CDS (1)..(870): transl_table=11
atgttcgttgaaactcgtcaaacaaatttttcaaatcaggaaactgttgtgaataaaaaacctcaagaaattcaattttctatattaaaaacagtggggcagccttttgtcgatacgcccaaaattaccgcgcgcgatgtcaacgttttttatggtgataaacaggcaatttttgatgtcaatttagatattggcagtaatgaagttttagccatgatcggaccttcaggctgcggaaaatctacctttttacgctgtttaaaccgcatgaatgatacgattgacggctgccgcgtggaaggcaccatttctttagacggctgcaatatgtatgacccgaaattagacgtggtcaatttgcgccggcgcgtgggcatggtttttcaacgtcccaatccctttcctaaatccgtttacgataatgtggcgtacggtccgcgcattcacggattgacgcattctaaagcagaattagatgaactcgttgaaacggctttaagaaaatctggcatttggaatgaagtcaaagatcgtcttgataaatctggaacgggactttctggtggacaacagcagcgtttatgcattgcgcgcgcgattgccgttaaaccgtcagtaattttgatggacgaaccatgttcggcgctcgatcccattgcaacgggcaaaatcgaagaattaatcgatgaattgcgcgaaaactattgcattgccatcgttacgcattctatgcaacaagccgcgcgcgtttcgcaacgtaccgcgtattttcatttgggaaaattagttgaaattggcgatactgatcaaattttccaaaatccgcagcaccgcttaacggaagactatatcactggtcgttttggctaa

SEQ ID NO: 116467 - protein, 289 aa, Dichelobacter nodosus VCS1703A
MFVETRQTNFSNQETVVNKKPQEIQFSILKTVGQPFVDTPKITARDVNVFYGDKQAIFDVNLDIGSNEVLAMIGPSGCGKSTFLRCLNRMNDTIDGCRVEGTISLDGCNMYDPKLDVVNLRRRVGMVFQRPNPFPKSVYDNVAYGPRIHGLTHSKAELDELVETALRKSGIWNEVKDRLDKSGTGLSGGQQQRLCIARAIAVKPSVILMDEPCSALDPIATGKIEELIDELRENYCIAIVTHSMQQAARVSQRTAYFHLGKLVEIGDTDQIFQNPQHRLTEDYITGRFG

SEQ ID NO: 116468 - DNA, 777 bp, Agrobacterium tumefaciens str. C58
  CDS (1)..(777): transl_table=11
atgaaggaaagttccatgtcgcaatcctccgccgcacaggctccgctgatcgcccttgaaggggttggaaagtggtatggagccttccatgcgcttaaaggcgtcaacatgacggttcgcaaaggcgaaaagatcgttctttgcggcccgtccggttcgggcaaatccaccctcatccgctgcatcaaccatctggaggaaatccaggagggcaagatcaccgtcgagggcaccacgctgtcggattccagccgcgccatcgatgcggttcgccgcgaagtgggcatggtgttccagagcttcaatctcttcccgcacaagaccatcatggaaaactgtacccttgccccgatgcgggtgaagggtctctccaaggccgatgcggaggcgacggcgcgcaaatatctggaccgcgtacgcatcctcaaccaggccgacaaatacccggcacagctttccggcggccagcagcagcgtgcggccatcgcccgggcgctatgcatggaaccgaaagccatgctgttcgacgagccgacttcggcactcgacccggaaatggtgaaggaagtgctcgacaccatgatcggccttgcccgcgacggcatgacgatgatctgcgtgacccatgaaatgggtttcgcccgccaggtggccgaccgcgtggtcttcatgtcggaaggcgagatcatcgaggaaggcccgccggaagaattcttccgcgatcccaagcaccagcgcacgcgcacgttcctcggcgaaattctcgcccaccactga

SEQ ID NO: 116469 - protein, 258 aa, Agrobacterium tumefaciens str. C58
MKESSMSQSSAAQAPLIALEGVGKWYGAFHALKGVNMTVRKGEKIVLCGPSGSGKSTLIRCINHLEEIQEGKITVEGTTLSDSSRAIDAVRREVGMVFQSFNLFPHKTIMENCTLAPMRVKGLSKADAEATARKYLDRVRILNQADKYPAQLSGGQQQRAAIARALCMEPKAMLFDEPTSALDPEMVKEVLDTMIGLARDGMTMICVTHEMGFARQVADRVVFMSEGEIIEEGPPEEFFRDPKHQRTRTFLGEILAHH

SEQ ID NO: 116470 - DNA, 1779 bp, Agrobacterium tumefaciens str. C58
  CDS (1)..(1779): transl_table=11
ttgaacgaaccgaaggccgctccagtcgagagcgggctggccaaaagcggttattcgcatttccgcatcgtcccggcccggtatccgctgcggacggtgggcacggttttctccgttctcgttatcgcggccgtcctgcattccgttttcggcaatccacgctggggctgggacgtttttgccgaatggttcttcgccgaacccgtgctggtcggccttgggcgaacgctgctgctcaccgcgctcggcgcccttttcggtttcgtgctgggaacactgttggcgcttgcccgcgtttcccgctcgccattgctggttgccgtttcctggacctatatctggattttccggtcgatcccgctgatcgtgcttctgctgatcctcaacaatctcggttatctctatgagaccgtgacgatcggcgtgccctataccggcatcaatttcatcagctggaacaccacgcagttgatgacgccctttgcagccgccattctggggcttacactcaatcaggccgctttcgcttccgagatcgtgcgcggtggtattctctccgtcgaccagggccagcttgaggccgcagcggctctcggcctgccacgtcggcggcaggcctcccgtatcattctgccgcaggcgatgcgctcgattctgccgaccgctttcaacgatattatcggcctcgcgaagggcacgtcccaggtctatatcctcgcgctgccggaactgttctacacgatccagatcatctatcgtcgcaatctggaagtgatcccgctcttgatggtcgcgaccgtctggtatctggtgatcctgaccgcgctttccatcgtccagcatcatatcgaacgacacttctcgcgcggcgcgctgcgcaatccgccgccctcgctgtttgccacgatcttccgcaccttcctgccgcgcaaatcaacgcctggagcggtggaaacggtcacggccaagtccgagcgtaaggcaccggctcgcgcggctagcttccagctcggcaatcgcggcggttcggtcaatatccacggagtttcgaaatccttcggatcgctgaaggtgcttgacgatataagcctctccattccggcgggaagcgtcaccaccattctcggccagtccggctccggcaagtcgacattgctgcgctccatcaatcatctcgagcgcgtggatgacggtttcatcgccatcgatggcgagctggttggttatcgccagaagggcgacacgctttacgaattgaaggagcgcgaaatcctcaagcgccgcgccgaagtcggcatggtgttccagagcttcaatctcttcccgcatctgaccgcgcttgaaaacattatcgaagcgcccgtcgcggttcgcggcatctcgaaagaacaggcggaggtcgaagcgcgtgatcttctggcccgcgtcgggcttgccgataaggcagcggcttatccccgccagctttccggcgggcagcagcagcgcgtggcgattgcccgcgccttggccctgcgaccgaaggtgctgctctttgacgaaccgacatcggcgctcgatcctgaactggtcaacgaggtgcttgatgtcatcaaggaactgtctcgctccggcgttaccctcatcatcgtcacccatgaaattggttttgcccgcgaagtctccgacagggtcgtcttcatggaacagggtcgcatcctcgaaacgggcacgccggacaaggtcttcaacagcccggaccatccgcgcaccgctgaattcctcgcaaaagttctctaa

SEQ ID NO: 116471 - protein, 592 aa, Agrobacterium tumefaciens str. C58
MNEPKAAPVESGLAKSGYSHFRIVPARYPLRTVGTVFSVLVIAAVLHSVFGNPRWGWDVFAEWFFAEPVLVGLGRTLLLTALGALFGFVLGTLLALARVSRSPLLVAVSWTYIWIFRSIPLIVLLLILNNLGYLYETVTIGVPYTGINFISWNTTQLMTPFAAAILGLTLNQAAFASEIVRGGILSVDQGQLEAAAALGLPRRRQASRIILPQAMRSILPTAFNDIIGLAKGTSQVYILALPELFYTIQIIYRRNLEVIPLLMVATVWYLVILTALSIVQHHIERHFSRGALRNPPPSLFATIFRTFLPRKSTPGAVETVTAKSERKAPARAASFQLGNRGGSVNIHGVSKSFGSLKVLDDISLSIPAGSVTTILGQSGSGKSTLLRSINHLERVDDGFIAIDGELVGYRQKGDTLYELKEREILKRRAEVGMVFQSFNLFPHLTALENIIEAPVAVRGISKEQAEVEARDLLARVGLADKAAAYPRQLSGGQQQRVAIARALALRPKVLLFDEPTSALDPELVNEVLDVIKELSRSGVTLIIVTHEIGFAREVSDRVVFMEQGRILETGTPDKVFNSPDHPRTAEFLAKVL

SEQ ID NO: 116472 - DNA, 1509 bp, Agrobacterium tumefaciens str. C58
  CDS (1)..(1509): transl_table=11
atgaactggcttgaaaacctgcgccgcagcttcctcgactggaatgccatggccgaagtgctgccgaccatgatcacggtcggactgaagaatacgctgattctggctgcgacctcgacggtgcttggcgtcgccatcggcatgatgctcgccatcatgggtatttcccgctcgccatggctgcgcattcccgcgcgcctttataccgatattttccgcggcctgccggccatcgtcacaatcctcctgatcggccagggttttgcccgcatcggccgcgagctcttcggtccgtcgccttatccgctcggcattctggcgctcagcctgatcgctggcgcttatatcggcgagattttccgctccggtattcagagcgttgaccgcggccagatggaggcctgccgggcgctctcgatgagctacggtcagggcatgcgccttatcgtcgtgccgcagggtgtgcgccgtgtgctgccggctctcgtcaaccagttcatcggcaacgtgaaggattcgagccttgtctatttcctcgggcttctggcctccgagcgcgagattttccgcgtggggcaggaccaggcggtggtgacgggcaatctttcgccgctgctgctcgcgggcgtattttatctcatcgtcaccgtaccgctcacccatgtcgtcaatgcgatcgacaatcgcttgcggatcggcaagcagcgtccatccgtcatcaccagtgggctggaggaagtcagtgaactcgacggtgcagcccgcgcgtccggtgtcgccttcaagggtggcagcctcgatgtgcgccgtctcggcatggcgtatggcgatctcgatgtgctgaagggtgtcgacctttcggtaaagccgggcagcgtcacctgcatcatcggcccgtccggttcaggcaaatccaccctgctgcgcggacttaaccgtctggtcgagccgaagagcggcgatattctcatcgatggtgaaagcattctggccatgaaaccggaaacgctgcgccgccgggtcggtatggtcttccagcatttcaatctctttccggatcacacggcgctggaaaacgtcatgctgtcgctgaagaagatcaagggcctgcctgcagccgaggccgagcgcattgccaaggcagggcttgccgacgttggtcttgcgagccgtcagcatcaccgtccgggcggtctttccggtgggcagcaacagcgcgtcgccatagcccgtgcgcttgccatggagccggaagttatcctcttcgatgaggtgacgagtgcgctcgatccggaattggtcaagggcgtgctcaacctgatggccgaactcggcacgcgtggcatgaccatggtcgtcgtgacgcatgaaatgggatttgcccgccgggtcgccgatcaggtcgtcttcatggatgaggggcgcgtggtggaagccggcacgccagaggcgatattcgataacccgcaaagcccgcgcctccagcgcttccttgcggaagtgctctga

SEQ ID NO: 116473 - protein, 502 aa, Agrobacterium tumefaciens str. C58
MNWLENLRRSFLDWNAMAEVLPTMITVGLKNTLILAATSTVLGVAIGMMLAIMGISRSPWLRIPARLYTDIFRGLPAIVTILLIGQGFARIGRELFGPSPYPLGILALSLIAGAYIGEIFRSGIQSVDRGQMEACRALSMSYGQGMRLIVVPQGVRRVLPALVNQFIGNVKDSSLVYFLGLLASEREIFRVGQDQAVVTGNLSPLLLAGVFYLIVTVPLTHVVNAIDNRLRIGKQRPSVITSGLEEVSELDGAARASGVAFKGGSLDVRRLGMAYGDLDVLKGVDLSVKPGSVTCIIGPSGSGKSTLLRGLNRLVEPKSGDILIDGESILAMKPETLRRRVGMVFQHFNLFPDHTALENVMLSLKKIKGLPAAEAERIAKAGLADVGLASRQHHRPGGLSGGQQQRVAIARALAMEPEVILFDEVTSALDPELVKGVLNLMAELGTRGMTMVVVTHEMGFARRVADQVVFMDEGRVVEAGTPEAIFDNPQSPRLQRFLAEVL

SEQ ID NO: 116474 - DNA, 753 bp, Salmonella typhimurium LT2
  CDS (1)..(753): transl_table=11
atgagtgcgatcgaagttaccaacctggtcaaaaaatttcatggtcaaacggtgctgcacggtattgaccttgaggtgaagcccggagaagtcgtcgccattatcggcccgagcggctcagggaagacaacgttattacgctgtattaacctgctggaacaaccggaagcgggcaccattaaagtgggcgatattatcatcgataccgcccgcccattcagccagcaaaaagggttgattcgccagctacgccagcatgtcggctttgtctttcagagttttaacctgttcccgcatcgtaccgtgctggaaaatatcattgaaggtccggtgattgtaaagggagagccgaaagccgaggcgacggcgctggcgcgggaactgttagccaaagtcgggttggccggtaaagagtcccgttatccgcgccgcctgtcgggcgggcaacagcagcgcgtggcgattgcgcgcgcgctggcgatgcgcccggaagtgattctgtttgatgagccgacgtcggcgcttgatcctgaattagtcggcgaggtgcttaatacgattcgccagctggcgcaggaaaagcgcacaatggtgatcgttactcacgaaatgagctttgcgcgtgacgtggctgatcgggcaatatttatggatcaggggcaaatcgtcgagcaggggccggcgaaaaccttgttcgccgatcctcagcatccgcgtacccgccagttccttgagaaatttttagtgaaataa

SEQ ID NO: 116475 - protein, 250 aa, Salmonella typhimurium LT2
MSAIEVTNLVKKFHGQTVLHGIDLEVKPGEVVAIIGPSGSGKTTLLRCINLLEQPEAGTIKVGDIIIDTARPFSQQKGLIRQLRQHVGFVFQSFNLFPHRTVLENIIEGPVIVKGEPKAEATALARELLAKVGLAGKESRYPRRLSGGQQQRVAIARALAMRPEVILFDEPTSALDPELVGEVLNTIRQLAQEKRTMVIVTHEMSFARDVADRAIFMDQGQIVEQGPAKTLFADPQHPRTRQFLEKFLVK

SEQ ID NO: 116476 - DNA, 882 bp, Brucella melitensis 16M
  CDS (1)..(882): transl_table=11
ttgctgcaatcattctacgccgccgcttcgagcgccgctggtaaacgggagtcgaatgtgatgaatctgatggccgaacgatctctcgaaaatgccgtaggagaaaaaatgaacgccaccgccagttccatcaagatgcgcggcgaaaaggtctgcgtgttctatggcgagaaacaggctcttttcgatgtcgatctcgatattcctgaaaagatggtcactgcactgatcggcccgtccggctgcggcaaatccaccttcctgcgttcgcttaaccgcatgaacgacacgatcgaaggctgccgcattgctggccggatcaccctcgacaatgaggatatctacgatccccgcctcgatgtggtggaactgcgcgcccgcgtcggcatggtgttccagaagccgaacccgttcccgaaatcgatctatgaaaacgtggcctacggcccgcgcattcacggccttgcccgctcgaaggcggagcttgaggaaatcgtggtgacgagcctccagaaggcgagcctgttcgaggaagtgaaggaccgtcttcacgatgcgggcacgggcctttccggtggccagcagcagcgcctgtgcattgcgcgcgccatcgccgtcagcccggaagtgatcctgatggatgaaccctgctcggcgctcgatcccatcgccaccgcgaaagtggaggaactgatcgacgaactgcgccagaacttcaccatcgtcatcgtgacgcactccatgcagcaggccgcgcgcgtttcgcagcgcaccgccatgttccatctgggcaatctggtggaagtgggcgacacggagatgatgttcaccgcgccgaccgaaaagcgcacgcaggattatatcaccggacgcttcggctga

SEQ ID NO: 116477 - protein, 293 aa, Brucella melitensis 16M
MLQSFYAAASSAAGKRESNVMNLMAERSLENAVGEKMNATASSIKMRGEKVCVFYGEKQALFDVDLDIPEKMVTALIGPSGCGKSTFLRSLNRMNDTIEGCRIAGRITLDNEDIYDPRLDVVELRARVGMVFQKPNPFPKSIYENVAYGPRIHGLARSKAELEEIVVTSLQKASLFEEVKDRLHDAGTGLSGGQQQRLCIARAIAVSPEVILMDEPCSALDPIATAKVEELIDELRQNFTIVIVTHSMQQAARVSQRTAMFHLGNLVEVGDTEMMFTAPTEKRTQDYITGRFG

SEQ ID NO: 116478 - DNA, 780 bp, Yersinia pestis KIM
  CDS (1)..(780): transl_table=11
ttgatgagtatggctactgacgtcaccaacagtaaaattcaggttcgcgatttgaacttctactatggcaaattccatgcactgaagaatatttcgttggatattgccaagaatcaggtcactgcgttcatcggcccgtcaggttgcggtaaatctactttactgcgtactttcaataaaatgtaccagctgtatccagaacagcgggcggaaggtgacatcttattagatggccaaaatatcctaaccgataaacaagatattgctttgctacgggcaaaagtcggtatggttttccaaaagccgactccgttcccgatgtcgatttacgacaacatcgcttttggtgtcaaactgtttgagagcttatctcgcgccgatatggatgagcgggtgcaatgggcattgaccaaagcagcgttatggaatgagaccaaagataagttgcaccagagcggttatagcttatcgggcgggcaacagcagcgtctgtgtattgctcgtggtatcgccattcgccctgatgtattactgttggatgagccttgctcggcgcttgacccgatctctaccggccgtattgaagagctgattagtgaattgaaatcggactatacggttgtgattgtaacgcacaatatgcagcaagctgctcgctgttcagatcacacggcatttatgtatctgggcgagcttattgaattcagtgatacagataccctgtttacgacgccacagcaaaaacagacagaagattatatcactggtcgctatggttga

SEQ ID NO: 116479 - protein, 259 aa, Yersinia pestis KIM
MMSMATDVTNSKIQVRDLNFYYGKFHALKNISLDIAKNQVTAFIGPSGCGKSTLLRTFNKMYQLYPEQRAEGDILLDGQNILTDKQDIALLRAKVGMVFQKPTPFPMSIYDNIAFGVKLFESLSRADMDERVQWALTKAALWNETKDKLHQSGYSLSGGQQQRLCIARGIAIRPDVLLLDEPCSALDPISTGRIEELISELKSDYTVVIVTHNMQQAARCSDHTAFMYLGELIEFSDTDTLFTTPQQKQTEDYITGRYG

SEQ ID NO: 116480 - DNA, 750 bp, Streptococcus agalactiae NEM316
  CDS (1)..(750): transl_table=11
gtgagtaaattagtaattaataatttagatttgtattatggagaatttcacgctctgaaggatgttaatttagacattgaagaaaaagaaatcacagcctttattggaccttctgggtgcggaaagtctactctcttgaaaagtattaaccgtatgaatgatttggtcaaaaattgcaaaatcacaggggatattactttagaaggcgaggatgtctatagacaattggatattaaccaattgcgtaaaaaggttggaatggtgtttcaaaaacctaatccgtttccaatgagcatttatgataatgttgcttttggtccaagaacgcacggtattcattccaaagcagagttagatgatatcgttgaacgttcccttaaacaggcggctctatgggatgaggttaaagatcgtcttcacaaatctgctctgggtatgtctggcggacagcagcaacgtttgtgtattgcgcgtgctcttgctattgagcctgatgttttacttatggatgaacccacaagtgccttggatcctatttcaacagcaaaaattgaagaattggttatccaactgaagaagaactacactattgttatagtgacacataatatgcaacaagctgttcgtatttctgataaaacagcattctttctgatgggagaagtggttgaatataacaaaacgagccaactcttttcattgccacaagatgagcgtacagaaaactacattacagggagattcggatga

SEQ ID NO: 116481 - protein, 249 aa, Streptococcus agalactiae NEM316
MSKLVINNLDLYYGEFHALKDVNLDIEEKEITAFIGPSGCGKSTLLKSINRMNDLVKNCKITGDITLEGEDVYRQLDINQLRKKVGMVFQKPNPFPMSIYDNVAFGPRTHGIHSKAELDDIVERSLKQAALWDEVKDRLHKSALGMSGGQQQRLCIARALAIEPDVLLMDEPTSALDPISTAKIEELVIQLKKNYTIVIVTHNMQQAVRISDKTAFFLMGEVVEYNKTSQLFSLPQDERTENYITGRFG

SEQ ID NO: 116482 - DNA, 774 bp, Pseudomonas putida KT2440
  CDS (1)..(774): transl_table=11
atggctcaggccacgcccgcgctggaaatccgcaatttgcacaaacgctacggcgagcaggaaattctaaagggcatttcgctgaccgctcgcgacggtgacgtgatctccatcctggggtcgtccggctccggtaagtccaccctgctgcgctgcatcaacctgctcgagaacccgcaccagggcgaaatcctggtcgccggcgaagccctcaagctcaaggccgccaagaatggcgacctgatcgcagccgacaaccgccagatcaatcgcgtgcgcagcgaaatcggctttgtcttccagaatttcaacctgtggccgcacatgtcgatcctcgacaacatcatcgaggcgccacgccgcgtgctcggccaaagcaaggccgaggccatcgaagccgccgaagcgctgctgaacaaggtcggcatctacgacaaacgccacagctaccccgcccagctttccggtggccagcaacagcgcgccgccattgcccgtaccctggccatgaagcccaaggtcatcctgttcgacgagcccacttcggcgctcgatccggaaatggtccaggaagtgcttaacgttatccgcgcattggccgaagaaggccgtaccatgctgctggtgacgcacgagatgagctttgcccgccatgtgtccagtgaagtcgtcttcctgcaccagggcctggtcgaagagcagggatcgccgcagcaggtcttcgaaaacccgacctcggcgcgttgcaagcaattcatgtccagccaccgctaa

SEQ ID NO: 116483 - protein, 257 aa, Pseudomonas putida KT2440
MAQATPALEIRNLHKRYGEQEILKGISLTARDGDVISILGSSGSGKSTLLRCINLLENPHQGEILVAGEALKLKAAKNGDLIAADNRQINRVRSEIGFVFQNFNLWPHMSILDNIIEAPRRVLGQSKAEAIEAAEALLNKVGIYDKRHSYPAQLSGGQQQRAAIARTLAMKPKVILFDEPTSALDPEMVQEVLNVIRALAEEGRTMLLVTHEMSFARHVSSEVVFLHQGLVEEQGSPQQVFENPTSARCKQFMSSHR

SEQ ID NO: 116484 - DNA, 846 bp, Pseudomonas putida KT2440
  CDS (1)..(846): transl_table=11
atggagttgaccatgcagcaagattcccacacccatggcatcgacatgtctgccctgggccgcaacaagcagagcctgcggatggctgaagaaaccgtggccatcgaagtgccgggcctgagcctgttctatggcgacaagcaagcgctgttcgacgtgcagatgaacatcccgaagcagcgcgtgaccgccttcatcggcccatccggctgcggcaagtcgaccctgctgcgcaccttcaaccggatgaacgacttggttgacggttgccgtgtggaaggtgccatcaacctgtacggcaacaatatctaccgcaagggcgaagacgttgccgaactgcgccggcgtgtgggcatggtgttccagaagccgaacccgttccccaagaccatctacgagaacgtggtctacggcctgcgcatccagggcatcaacaagaagcgcgtgctcgatgaagccgtcgagtgggcgttgaagggcgcggccttgtgggacgaggtcaaggaccgcctgcacgagtcggcgctgggcctgtccggtggccagcagcagcgtctggtcatcgcccgcaccattgccgtggagccggaggtgctgctgcttgacgaaccgtgctcggcgctggacccgatctcgaccttgaaggtcgaagaactgatctatgaattgaaatccaagtacaccatcgtcatcgtgacccacaacatgcagcaagcggcgcgtgtttcggattacaccgcgttcatgtacatgggcaaactggtcgaattcggggataccgataccctgttcaccaacccggcgaagaagcagaccgaagactacatcaccggtcgctacggctaa

SEQ ID NO: 116485 - protein, 281 aa, Pseudomonas putida KT2440
MELTMQQDSHTHGIDMSALGRNKQSLRMAEETVAIEVPGLSLFYGDKQALFDVQMNIPKQRVTAFIGPSGCGKSTLLRTFNRMNDLVDGCRVEGAINLYGNNIYRKGEDVAELRRRVGMVFQKPNPFPKTIYENVVYGLRIQGINKKRVLDEAVEWALKGAALWDEVKDRLHESALGLSGGQQQRLVIARTIAVEPEVLLLDEPCSALDPISTLKVEELIYELKSKYTIVIVTHNMQQAARVSDYTAFMYMGKLVEFGDTDTLFTNPAKKQTEDYITGRYG

SEQ ID NO: 116486 - DNA, 810 bp, Tropheryma whipplei str. Twist
  CDS (1)..(810): transl_table=11
ttgccccaaaatctacgaatcgttgagaagggttatatgacttcattactggaaataaaagatttaaccgccttttacgggccattgagagctataaaagatgtttcgctctcgatacaagaggggagtgttacggctctcattggaccttcggggtgtggaaaatcaactttgctccggactttaaatagaatgcatgaactctctcccggtgcaaaggttaaaggtcaggtattacttgatggtcgtgatttatatcaactcgatccggtttatgtccgccaagaagttggcatgatttttcaaaggccgaatccatttccaacaatgtcgatcagagaaaatgtccttgcaggtataaagcttaaccgcaagcgcatccatcgcattcagcaaaacgagttgatggaacgctgtttgcgtagcgtaaatttatgggatgaagtgcataatcgcctgggtcgacccgggggagagctctctggaggtcaacagcagagactctgtatcgctcgggcaattgcagtatccccgagagttattctcatggatgagccatgttcggcacttgatccggtgtcaaccaaggcaattgaacagcttatttgcaagctgaaagaaaaacatacaattgttattgtcacgcataatatgcaacaggcatcgagggtgtctgattggactgcggtgtttaacgttgcaagaagcggtggatctggtgaattggttgagcatgacaaaactgaggtcatattcacaagcccaaagaacgaagttactctaaattacatttctggtaagttcggctaa

SEQ ID NO: 116487 - protein, 269 aa, Tropheryma whipplei str. Twist
MPQNLRIVEKGYMTSLLEIKDLTAFYGPLRAIKDVSLSIQEGSVTALIGPSGCGKSTLLRTLNRMHELSPGAKVKGQVLLDGRDLYQLDPVYVRQEVGMIFQRPNPFPTMSIRENVLAGIKLNRKRIHRIQQNELMERCLRSVNLWDEVHNRLGRPGGELSGGQQQRLCIARAIAVSPRVILMDEPCSALDPVSTKAIEQLICKLKEKHTIVIVTHNMQQASRVSDWTAVFNVARSGGSGELVEHDKTEVIFTSPKNEVTLNYISGKFG

SEQ ID NO: 116488 - DNA, 825 bp, Bordetella bronchiseptica RB50
  CDS (1)..(825): transl_table=11
gtgatcgccgccgccggcgcccgcggggcgccggccataggaagcaaaatggaaaacaccgcaaccgctcccaacgccaagctggaagtcaagaacctgaatttctactacggcaagttccacgcgatccgcaatgtgaacatgtcgatccgcgagaacaaggtcaccgccttcatcggcccgtcgggctgcggcaagtcgacgctgctgcgcaccttcaaccgcatgttcgagctgtaccccggccagcgcgccgaaggcgagatcctgctcgacggcgaaaacctgttgacgtccaagaccgatatttcgctgattcgcgccaaggtcggcatggtgttccagaagcccacgccgtttcccatgagcatctacgacaacatcgccttcggcgtgcgcctgttcgagcggctcagcaagggcgagatggacgagcgggtcgagtgggcgctgagcaaggcggcgctgtggaacgaggtgaaggacaagctgcaccagagcggcaacagcctgtcgggcggccagcaacagcgcctgtgcatcgcgcgcggcgtggccatcaagcccgaagtgctgctgctcgacgagccctgctcggcgctggacccgatctccaccgccaagatcgaggaactgatcgccgaactcaagcacgagtacacggtggtgatcgtcacgcacaacatgcagcaggcggcgcgctgctccgactacaccgcctacatgtacctgggcgagctgatggagtacggcgccaccgaccagatcttcgtcaagccggcgcgcaaagagacggaagactacatcaccggccgcttcggctga

SEQ ID NO: 116489 - protein, 274 aa, Bordetella bronchiseptica RB50
MIAAAGARGAPAIGSKMENTATAPNAKLEVKNLNFYYGKFHAIRNVNMSIRENKVTAFIGPSGCGKSTLLRTFNRMFELYPGQRAEGEILLDGENLLTSKTDISLIRAKVGMVFQKPTPFPMSIYDNIAFGVRLFERLSKGEMDERVEWALSKAALWNEVKDKLHQSGNSLSGGQQQRLCIARGVAIKPEVLLLDEPCSALDPISTAKIEELIAELKHEYTVVIVTHNMQQAARCSDYTAYMYLGELMEYGATDQIFVKPARKETEDYITGRFG

SEQ ID NO: 116490 - DNA, 759 bp, Herminiimonas arsenicoxydans
  CDS (1)..(759): transl_table=11
atgattaaaaagactctcgaaattgccaacctgaattttttctacggaacttttcaaggcttgaagaatatcaatctggatattcacgacaagaaggtgacggctttcatcggcccttccggttgcggcaaatcgacgctgctgcggaccttcaaccgcatgtatgacttgtacccgggtcagcgcgccgaaggcaagatcatgtatcacggcaagaacattctcgagccgggccaggatgtcaacatgctgcgcgccaaggtcggcatggtattccagaagccgacgccattcccgatgtcggtctatgacaatatcgctttcggcgtgcgcttgtatgaaaacctgccgaaaggcgaaatggacgagcgcgtcgaatgggcgctgaacaaggcggcgctgtggaccgaggttaaggataaactcaacaagagcgggctcagcctgtccggcggccagcagcagcgtctgtgcatagcccgcggcgtggcggtcaagccggatgtgttgttgctggatgagccgacctcggcgctggatccaatctcgaccgcaaaaatcgaggaattgatcagcgagttgaagggcgactacacgatcgcgatcgtcacgcataatatgcagcaggcagcgcgctgttccgattacaccgcgtatatgtatctgggcgaattggttgaattcggcgaaaccgatcagatcttcatgaatccgaacaagaaagatacgcaggactacattaccggccgcttcggctga

SEQ ID NO: 116491 - protein, 252 aa, Herminiimonas arsenicoxydans
MIKKTLEIANLNFFYGTFQGLKNINLDIHDKKVTAFIGPSGCGKSTLLRTFNRMYDLYPGQRAEGKIMYHGKNILEPGQDVNMLRAKVGMVFQKPTPFPMSVYDNIAFGVRLYENLPKGEMDERVEWALNKAALWTEVKDKLNKSGLSLSGGQQQRLCIARGVAVKPDVLLLDEPTSALDPISTAKIEELISELKGDYTIAIVTHNMQQAARCSDYTAYMYLGELVEFGETDQIFMNPNKKDTQDYITGRFG

SEQ ID NO: 116492 - DNA, 849 bp, Burkholderia vietnamiensis G4
  CDS (1)..(849): transl_table=11
atgaatatggcagaaagccacctgaatcccgtcgagcgcacggttgcgcccgccggcacgcaagacacggcaaacgaccgcccgctcgagccgttgaacgcgaagatcgaggtcaacaacctcaatttcttctacaacaagttccacgcgctgaagaacatcaacctgcgcattcccgaagggaaggtgacggcgttcatcggcccgtcgggctgcggcaagtcgacgctgctgcgcaccttcaacaagatgttcgcgctctatccggagcagcgcgccgaaggcgagatcctgatggacggcgagaacctgctgaccaccaagcgcgacatttcgctgctgcgtgcgcgcatcggcatggtgttccagaagccgacgccgttcccgatgtcgatctacgacaacatcgcgttcggcgtgaagatgttcgagaagctcacgcgctcggagatggacgaccgcgtcgaatgggcgctgaccaaagccgcgctgtggagcgaggtgaaggacaagctgaaccagagcggctatgggctgtccggcggccagcagcagcggctgtgcatcgcgcgcggcatcgcgatccgtccggaagtgctgctgctcgacgagccgtgctccgcgctcgacccgatctcgacgggccgcatcgaggagctgatcgccgagctcaagagcgactacacggtcgtgatcgtcacgcacaacatgcagcaggccgcacgctgctcggacttcaccgcgtacatgtacctgggcgagctgatcgaattcggcgagaccgagaagatcttcatcaagccggtacgcaaggaaacggaagactacatcaccggccgtttcggctga

SEQ ID NO: 116493 - protein, 282 aa, Burkholderia vietnamiensis G4
MNMAESHLNPVERTVAPAGTQDTANDRPLEPLNAKIEVNNLNFFYNKFHALKNINLRIPEGKVTAFIGPSGCGKSTLLRTFNKMFALYPEQRAEGEILMDGENLLTTKRDISLLRARIGMVFQKPTPFPMSIYDNIAFGVKMFEKLTRSEMDDRVEWALTKAALWSEVKDKLNQSGYGLSGGQQQRLCIARGIAIRPEVLLLDEPCSALDPISTGRIEELIAELKSDYTVVIVTHNMQQAARCSDFTAYMYLGELIEFGETEKIFIKPVRKETEDYITGRFG

SEQ ID NO: 116494 - DNA, 825 bp, Anaplasma marginale str. St. Maries
  CDS (1)..(825): transl_table=11
gtgctggctggtaggaaagccggcagggctgtataccatgtcagatgtattaagggcttaatttcagtgtcagaagttcatgctgcagtagagggtctgaatctgtggtatggcaagaagcagattttgttcgatgttaacctagatgtgtacaaaagggaggttactgcccttatagggccgtctgggtgcggcaagtccacgttcttgcgatgttttaaccgcatgaatgactttgttccagattgcaaggtggaaggcaagattgacattgaagggatggacgtgcactcgcccgacactaatgttgtgctgctgcgggcaaaggttggtatggtgtttcagaaaccgaacccgtttcccgactcgatatacaaaaacatagcttatgggcctaagctgcatgggttagccagaaacaagaggcggcttgatgacatcgttgaggaaagtttgcgacgtgtagggttgtgggatgaactgggcggacggctgaaggatagtgcgtgtaagctttctggtgggcagcaacagcgtctatgcatagcccgagcgattgcggttaggcctactatgctgttgatggacgagccgtgctctgcgcttgatcctgtggctacaggtgttgtggagaatttaatcaaggagctaaagaagaatttcacgatagtgctggtcactcactctgttaagcaggtacgagaagtttcggacagggtcgcgttttttcaagagggcagaatagttgagcacaatacgaccaaagaggtgttcaaggccccgaaatcagaggaagttaagggatatctagctgaccacttatag

SEQ ID NO: 116495 - protein, 274 aa, Anaplasma marginale str. St. Maries
MLAGRKAGRAVYHVRCIKGLISVSEVHAAVEGLNLWYGKKQILFDVNLDVYKREVTALIGPSGCGKSTFLRCFNRMNDFVPDCKVEGKIDIEGMDVHSPDTNVVLLRAKVGMVFQKPNPFPDSIYKNIAYGPKLHGLARNKRRLDDIVEESLRRVGLWDELGGRLKDSACKLSGGQQQRLCIARAIAVRPTMLLMDEPCSALDPVATGVVENLIKELKKNFTIVLVTHSVKQVREVSDRVAFFQEGRIVEHNTTKEVFKAPKSEEVKGYLADHL

SEQ ID NO: 116496 - DNA, 918 bp, Psychrobacter arcticus 273-4
  CDS (1)..(918): transl_table=11
atgatgacagacttactagaaagaaatgccgttaagcaaaacgtcagccaacgtggtttatttggtcaatcattttctaatgacgctcagagacagcaggggcagcagccagacagtgcttttttaactcagcaaacagtagcagatattcctgaacatatgccgcctgccaaaattagtattcgggatctcaatttctattatggtgattttaaagcgttaaaaaacatcaatatcgacataccagaaaaaaaggtcactgcttttatcggtccatcgggctgtggcaagtccacactgctacgtacctttaaccgcatgtacgatttgtatccgagtatgcatgccgaaggtcaaatcatccttgatggcagcaatattttggcaaaagacatggatgtcaatttgttgcgtgcgcgtgtaggtatggtctttcaaaaaccgacaccgtttccgatgtcgatatatgacaacgtggcatttggcgtacgcctctacgagaaactgagcaaagctgagatggataatcgtgtcgaatgggcactcaaaaaggcagcattatggcttgaggtaaaagacaaacttcgtgcatcaggcttgtcgttatccggtggtcagcaacaacggctttgtatcgctcgcggtgtggcgacaaaacctgaagtactgctcctagatgagccaacctcagcgctcgaccctatctcgacaggggcgattgaagagctcatcacagatttaaaaaatgactatacgattgctatcgttacccacaatatgcagcaagcggcacgcgtctctgactacactgcctatatgtatctgggtgatatggtagagatgggtgagacggatcagatatttaccaacccagcacaaaaggcgaccgaagactatattactggtcgttatggttaa

SEQ ID NO: 116497 - protein, 305 aa, Psychrobacter arcticus 273-4
MMTDLLERNAVKQNVSQRGLFGQSFSNDAQRQQGQQPDSAFLTQQTVADIPEHMPPAKISIRDLNFYYGDFKALKNINIDIPEKKVTAFIGPSGCGKSTLLRTFNRMYDLYPSMHAEGQIILDGSNILAKDMDVNLLRARVGMVFQKPTPFPMSIYDNVAFGVRLYEKLSKAEMDNRVEWALKKAALWLEVKDKLRASGLSLSGGQQQRLCIARGVATKPEVLLLDEPTSALDPISTGAIEELITDLKNDYTIAIVTHNMQQAARVSDYTAYMYLGDMVEMGETDQIFTNPAQKATEDYITGRYG

SEQ ID NO: 116498 - DNA, 801 bp, Pediococcus pentosaceus ATCC 25745
  CDS (1)..(801): transl_table=11
atgttggaaacgaaacgtaaagaaaaatcaattttgaccttccccgccgatcgcgaaattgctttagaaacgaataaccttcaggtctattatggcgataaccatgccatgcaggatgcatctttgcaattccctcgttattccattacggctttgatcggcgcttctggatcggggaaatccacttacttgagaagcttgaatcggatgaatgacggcattgctcgcgtagatggcgagattatgtatcgaggattggatgttaatgcggatgaagtcgatatttatcaaatgcggcgtcggattggaatggtatttcaacgtccaaatccctttgccaaatcaatttacaacaatatcagttttccattacgcgaaatgggtattaaagacaaatcaaaaattgatggcattgtagaatcgagtttaaaacaggcggccttatgggatgaagtcaaggatgatttgaaacgtagtgcgttagcattgtcaggggggcaacaacagcgactatgtattgcacgttcactggcaatgagtccagatattctattgatggatgagcctgctagtgccttagatcccatttcaacccacaaattagaaatgactttaaatgacttaaaagaacaatacactattattatcgttacacacagtatggaacaagcttctcgactaagtgattacactgcttttatgcacatggggaaaattgttgaatttgatacgacagaaaacatttttactaatccagcagttaaattaactgaggactatgtctctggaaactttgggtag

SEQ ID NO: 116499 - protein, 266 aa, Pediococcus pentosaceus ATCC 25745
MLETKRKEKSILTFPADREIALETNNLQVYYGDNHAMQDASLQFPRYSITALIGASGSGKSTYLRSLNRMNDGIARVDGEIMYRGLDVNADEVDIYQMRRRIGMVFQRPNPFAKSIYNNISFPLREMGIKDKSKIDGIVESSLKQAALWDEVKDDLKRSALALSGGQQQRLCIARSLAMSPDILLMDEPASALDPISTHKLEMTLNDLKEQYTIIIVTHSMEQASRLSDYTAFMHMGKIVEFDTTENIFTNPAVKLTEDYVSGNFG

SEQ ID NO: 116500 - DNA, 777 bp, Mycobacterium avium 104
  CDS (1)..(777): transl_table=11
gtggccaaacggttggacctcaagggtgtcaacatctactacgggtcgtttcacgccgtcgcggaggtgacgctgtcggtgcttccgcgcagcgtcacggcgttcatcggcccgtcgggttgcggcaagacgacggtgttgcgcaccctcaaccggatgcacgaggtggtgcccggcgggcgggtcgagggaagcgtgctgctcgacgacgaagacatctacggccccggtgtcgaccctgtcggggtgcgccgggccatcggcatggtgttccagcggccgaacccgttccccgccatgtcaattcgcgacaacgtggtcgcgggcctgaagctgcaaggggtccgcaatcgcaaggtgctcgacgagacggccgagtactcgctgcgcggcgccaacctgtgggacgaggtcaaggaccggctggacaggcccggcggcggactctcgggcgggcagcagcagcggttgtgcatcgcgcgggccatcgcggtgcaaccggatgtgctgctgatggacgagccgtgctcggcgctggacccgatttcgacgatggccatcgaagagctgatcagcgagctgaagcaggactacaccatcgtcatcgtcacccacaacatgcagcaggccgcccgggtcagcgactacaccgcgtttttcaacctggaagccgtcggaaagccgggacgactgatcgaggtcgacgacaccgagaagatcttctccaaccccagccagaaggcgacggaggactacatctcgggccgcttcggttaa

SEQ ID NO: 116501 - protein, 258 aa, Mycobacterium avium 104
MAKRLDLKGVNIYYGSFHAVAEVTLSVLPRSVTAFIGPSGCGKTTVLRTLNRMHEVVPGGRVEGSVLLDDEDIYGPGVDPVGVRRAIGMVFQRPNPFPAMSIRDNVVAGLKLQGVRNRKVLDETAEYSLRGANLWDEVKDRLDRPGGGLSGGQQQRLCIARAIAVQPDVLLMDEPCSALDPISTMAIEELISELKQDYTIVIVTHNMQQAARVSDYTAFFNLEAVGKPGRLIEVDDTEKIFSNPSQKATEDYISGRFG

SEQ ID NO: 116502 - DNA, 780 bp, Nocardioides sp. JS614
  CDS (1)..(780): transl_table=11
atggccaagagcatcgatgtctccgacctggacatctactacggcgacttcctcgcggtcgagggcgtcacgatgacgatcaaggcgcgctcggtgactgccttcatcggcccgtccggctgcggcaagtcgacgttcctgcgctcgctgaaccggatgcacgaggcgatccccggcgcccgcgtcgagggcaaggtgatggtcgacggccagtccctctacgagccctcgatcgacccggtcgccgtacgccggcagatcggcatggtcttccagcggcccaacccgttccccaccatgtcgatctacgagaacgtgctggccggcaagcggctgaacgccaagcggatgtcgaggtccgacgccgacgacctggtcgagcgctcgctgcgcggcgcgaacctgtggaccgaggtcaaggaccggctcaacaagcccggcatgtcgctgtccggcggccagcagcagcggctctgcatcgcccgcgcgatcgcggtcgagccgcaggtgctgctgatggacgagccctgctcggcgctcgacccgatctccacggcggccatcgaggacctgatccacgagctcaagaccgactacacgatcgtgatcgtcacccacaacatgcagcaggccgcccgggtctccgacgacaccggtttcttcaacctcaaggccgccggcgagcccggccacctcgtggagttcaacccgaccacgaagatgttcaccaaccccgacgacgagtcgaccgaggcctacatctccggccgcttcggctga

SEQ ID NO: 116503 - protein, 259 aa, Nocardioides sp. JS614
MAKSIDVSDLDIYYGDFLAVEGVTMTIKARSVTAFIGPSGCGKSTFLRSLNRMHEAIPGARVEGKVMVDGQSLYEPSIDPVAVRRQIGMVFQRPNPFPTMSIYENVLAGKRLNAKRMSRSDADDLVERSLRGANLWTEVKDRLNKPGMSLSGGQQQRLCIARAIAVEPQVLLMDEPCSALDPISTAAIEDLIHELKTDYTIVIVTHNMQQAARVSDDTGFFNLKAAGEPGHLVEFNPTTKMFTNPDDESTEAYISGRFG

SEQ ID NO: 116504 - DNA, 783 bp, Acidovorax sp. JS42
  CDS (1)..(783): transl_table=11
atgccctccaccaagacctccgcgcccgtgcaatccaagatcacggtccgtgacctgaacttctattacgggaagttccatgccctcaagagcatcaacctcgacattcccgagaagaaggtcaccgccttcatcgggccgtcgggctgcggcaaatccacgctgctgcgcaccttcaaccgcatgttcgagttgtatcccgagcagcgcgccgaggggcagatcatcctcgacggcgagaacctgctcaccagcaagcaggacgtggcgctgatccgcgccaaggtgggcatggtgttccagaagcccacgccgtttcccatgtcgatctacgacaacatcgcctttggcgtgaagcttttcgagagcctgagcgcgagcgacatggacgaccgcgtggaatgggcgctgcgcaaggcggccttgtggaatgaggtcaaggacaagctggaccagagcggcgcgggcctgtccggcggccagcagcagcgcctgtgcatcgcacgcggcatcgccatcaagccggaagtgttgttgctcgacgagccctgctcggcgctggaccccatctcgaccgccaagatcgaggaattgatcgctgaactgaaagacgactacaccgtggtcatcgtcacgcacaacatgcagcaggcggcgcgctgcagtgactacaccgcctatatgtatttgggcgacctggtggagttcggggacacagagcagatgttcttcaagccgcagcgcaaggagacagaggactacatcacgggccgcttcggctga

SEQ ID NO: 116505 - protein, 260 aa, Acidovorax sp. JS42
MPSTKTSAPVQSKITVRDLNFYYGKFHALKSINLDIPEKKVTAFIGPSGCGKSTLLRTFNRMFELYPEQRAEGQIILDGENLLTSKQDVALIRAKVGMVFQKPTPFPMSIYDNIAFGVKLFESLSASDMDDRVEWALRKAALWNEVKDKLDQSGAGLSGGQQQRLCIARGIAIKPEVLLLDEPCSALDPISTAKIEELIAELKDDYTVVIVTHNMQQAARCSDYTAYMYLGDLVEFGDTEQMFFKPQRKETEDYITGRFG

SEQ ID NO: 116506 - DNA, 813 bp, Magnetospirillum magnetotacticum MS-1
  CDS (1)..(813): transl_table=11
atgagcgccaatcccgcgatccgtagccagttcgacggtcgaagcccggccgatgtgaaggcgcccgtgcgcatcgccgtcagggacctcaacttctattacggcagtttccacggcctgaaggacatcaatctcgatttccgcgaccgacaggtgacggcgctgatcggcccctccggctgcgggaagtcgacccttctgcgcaccttcaaccggatctacagcctctatcccgagcagcgggcggagggcgagatcctgctcgacggccgcaacgtgctcgatcccaagatcgatctgaacgagctgcggtcgcgcgtcggcatggtgttccagaagccgacgcccttcccgatgtcgatctacgacaatgtcgccttcggcctgcgcctctacgagaagctgccgaaatccgaactcgacatccgtgtcgaggagtcgctgcgcaaggccgcgctctgggacgaggtgaaggacaagctcaagcagtccggcacggggctctccggcggtcagcagcagcgcctctgcatcgcccgcaccgtcgcgcagcgtcccgaggtgatcctgttcgacgagccgacctcggctctcgacccgatctcgaccggccgcatcgaggagctgatcgagcagctgcgcacggatttcacgatcgtcatcgtgacccacaacatgcagcaggccgcccgcatctcgcagttcaccgcttcatgtattcggcgagctgatcgaattcgacgcgacgccaagatcttcatgaatccgtcgaagcggcagacccaggattatatcaccggtcgcttcggctga

SEQ ID NO: 116507 - protein, 270 aa, Magnetospirillum magnetotacticum MS-1
MSANPAIRSQFDGRSPADVKAPVRIAVRDLNFYYGSFHGLKDINLDFRDRQVTALIGPSGCGKSTLLRTFNRIYSLYPEQRAEGEILLDGRNVLDPKIDLNELRSRVGMVFQKPTPFPMSIYDNVAFGLRLYEKLPKSELDIRVEESLRKAALWDEVKDKLKQSGTGLSGGQQQRLCIARTVAQRPEVILFDEPTSALDPISTGRIEELIEQLRTDFTIVIVTHNMQQAARISQFTASCIRRADRIRRDAKIFMNPSKRQTQDYITGRFG

SEQ ID NO: 116508 - DNA, 831 bp, Nostoc punctiforme PCC 73102
  CDS (1)..(831): transl_table=11
atgacttatagcaatagtagtagaagtcaatcagatagtgccacaatcgactatgataagagcgtattcgatgttgaaggtgtgaaagtttcctatggtggatttctggcacttttagatgtctatctcaagattcctgaaaaacaaattattgcttttattgggccttcaggatgtggtaaaagtactttactgcgttgcttcaaccggatgaatgatttaatccctggagctaaggttgagggtagactgaattaccgcgatcgcaatatttacgatcctaagataaattctgtcaaattacgccgccaagtcggaatggtttttcaaagaccaaatcctttccccaagtcaatatacgaaaatatttcttttgggccgcgtgctaacggttacaaaggtaacgttgatgaattggtggaagattctctcagacgtgctgctatctgggatgaagtcaaagacaaactcaaagagaaaggtactgcattatctggcggacaacagcaacgactttgcatagcccgtgcgatcgcaatgaagccagatgtattattgatggatgaaccatgttctgctctcgacccaatttctagccgccaagtagaagaactctgcttagaactgaagcagcaatacaccatcatcatggtgacacacaatatgcagcaagcttccagagtggcagatttcacagctttcttcaatacagaaattgacgagtatggcaaacgtcgcggaaaattagttgaatttaatccgacagcccagatgttcagttctcctcaaactaaagaagctgaagactatatcagtggacgtttcggttaa

SEQ ID NO: 116509 - protein, 276 aa, Nostoc punctiforme PCC 73102
MTYSNSSRSQSDSATIDYDKSVFDVEGVKVSYGGFLALLDVYLKIPEKQIIAFIGPSGCGKSTLLRCFNRMNDLIPGAKVEGRLNYRDRNIYDPKINSVKLRRQVGMVFQRPNPFPKSIYENISFGPRANGYKGNVDELVEDSLRRAAIWDEVKDKLKEKGTALSGGQQQRLCIARAIAMKPDVLLMDEPCSALDPISSRQVEELCLELKQQYTIIMVTHNMQQASRVADFTAFFNTEIDEYGKRRGKLVEFNPTAQMFSSPQTKEAEDYISGRFG

SEQ ID NO: 116510 - DNA, 807 bp, Nostoc punctiforme PCC 73102
  CDS (1)..(807): transl_table=11
atggctaccaatattagcacagtcaatggtactgaaactgttttacgcaccgaaaacctcaacgtttactacggcaaatttttagccttgcagaatatttggctagatataccaaaaaatcaggttacagcctttatcggcccttctggttgtggtaaaagtaccttgttgcgatgctataaccgcctcaatgacctgattgagtcatttcgggcagagggtaaaatacttttttacgataaaaacttgtacgcatccgatattgatcctgtagaagtacgtcggagaattgggatggtgtttcaaagaccaaacccctttcccaaatcaatttatgacaacattgcttttggagccaaaatcaatggctacaaaggtaatatggatgaattagtagaacggagtttgcggcaagcggctttgtgggacgaagttaaagataagctacgacaaagtggttcgtctttatcaggtggacaacaacaaaggttatgtattgctcgtgcgatcgcagtccaacctgaaattatattaatggatgaaccttgctccgctcttgaccctatttccaccttgcgggttgaagaattaattcatcagctgaaagagcaatataccatcgttatcgttacccataatatgcagcaagcagcgcgggtttctgataagacagccttttttaatgtcaaaactactgagtcaggaagtcgtaacggatacatggtagaatacgacgcaacagaactaattttcaacaatcctcagcagcaagataccagagattacgttagcggcagatttggataa

SEQ ID NO: 116511 - protein, 268 aa, Nostoc punctiforme PCC 73102
MATNISTVNGTETVLRTENLNVYYGKFLALQNIWLDIPKNQVTAFIGPSGCGKSTLLRCYNRLNDLIESFRAEGKILFYDKNLYASDIDPVEVRRRIGMVFQRPNPFPKSIYDNIAFGAKINGYKGNMDELVERSLRQAALWDEVKDKLRQSGSSLSGGQQQRLCIARAIAVQPEIILMDEPCSALDPISTLRVEELIHQLKEQYTIVIVTHNMQQAARVSDKTAFFNVKTTESGSRNGYMVEYDATELIFNNPQQQDTRDYVSGRFG

SEQ ID NO: 116512 - DNA, 780 bp, Nostoc punctiforme PCC 73102
  CDS (1)..(780): transl_table=11
atgagtaaactaattccagccatcagagtcaaaaacttcagcttctcttacgacactcaaaagatagttgaaggcgtgtcaatggatatttaccaaaaccaaatcacggcaattattggttctagcggttgtggcaaatctacttttattaaatccttaaatcgcatgagtgaattagaaggagaagtgaaggttgaaggaaaagtagaattttttggccagagtatttatgagcgtcgggtcaatatcaatcgcttacgtcgccaagttagtatggtttttcccaagccaaatctttttcctatgagtgtttacgataatgttgcttatggagtgaaattaattggatggcatccgaaagtagaattagatgggattgttgaatctgccatcaaagctgctgaactttgggatgaagtgaaaaataagttgcacaagtctgctttagaactttctggtggtcaacaacaaagattatgtattgctcgggctttagcagtcaaaccaaatgttttgttgatggatgagccttgttcaggtcttgatcctgctgctagcatgaaaattgagcatttgatccataacttgcgctctgagttaacaattgtgattgttactcacaatatgcatcaagttactcgcctatcggattttacggctttctttcatagcaatgaaaatcgtattactcaaatggttgaatttggtactacaaataaaatttttactaatcccgtagattctcgcacccgtgactacgttttcgcccgcgtcagttga

SEQ ID NO: 116513 - protein, 259 aa, Nostoc punctiforme PCC 73102
MSKLIPAIRVKNFSFSYDTQKIVEGVSMDIYQNQITAIIGSSGCGKSTFIKSLNRMSELEGEVKVEGKVEFFGQSIYERRVNINRLRRQVSMVFPKPNLFPMSVYDNVAYGVKLIGWHPKVELDGIVESAIKAAELWDEVKNKLHKSALELSGGQQQRLCIARALAVKPNVLLMDEPCSGLDPAASMKIEHLIHNLRSELTIVIVTHNMHQVTRLSDFTAFFHSNENRITQMVEFGTTNKIFTNPVDSRTRDYVFARVS

SEQ ID NO: 116514 - DNA, 780 bp, Nostoc punctiforme PCC 73102
  CDS (1)..(780): transl_table=11
atgagtaacctaattccagctatcaaagttaaaaatatcagcttttactatggcgcaacaaaagcaatcgaaaaggtatcaatagatatttatcaaaaacaagtaaccgcaattattggccctagtggctgtggtaaatctaccttcatcaaaattcttaatcgaattagcgaattagaagggcctgtaaaagttgaaggagatgtagaattttttggtcaaaatatttacgattctcgtgtcaacatcaaccgattacgccgccaaattggtatggtgtttcaaaaaccgaatccttttccgataagcatttacgaaaatgttgcctacggtatgagaatagcaggtaggaattcaaaattagaattagatgaaattgttgaatctgcccttaaaagtgctgctctttgggatgaagtaaaagataagctcgataaatcagctttagggctttctggtggtcagcaacaaagattgtgtattgctcgcgctttagcagtcaagccgaaagttttgctgatggatgagccttgctcggctcttgaccccattgccaccatgaaagttgaggaactccttcatagcttacagtctgagttgacaattgcgatcgttacccacaatatgcaacaagccgcccgcgtttctgattttacggctttctttagcaccgacgaaagtcgcattggtcaaatgattgaatttggcgctacagagcaaatctttaacaatccactagaccctcgcacccgcgactacatttcagggcgtttcggttaa

SEQ ID NO: 116515 - protein, 259 aa, Nostoc punctiforme PCC 73102
MSNLIPAIKVKNISFYYGATKAIEKVSIDIYQKQVTAIIGPSGCGKSTFIKILNRISELEGPVKVEGDVEFFGQNIYDSRVNINRLRRQIGMVFQKPNPFPISIYENVAYGMRIAGRNSKLELDEIVESALKSAALWDEVKDKLDKSALGLSGGQQQRLCIARALAVKPKVLLMDEPCSALDPIATMKVEELLHSLQSELTIAIVTHNMQQAARVSDFTAFFSTDESRIGQMIEFGATEQIFNNPLDPRTRDYISGRFG

SEQ ID NO: 116516 - DNA, 816 bp, Listeria monocytogenes str. 1/2a F6854
  CDS (1)..(816): transl_table=11
atgttaacgaagaaacctgaaattaatacaattttacaagcaacaccagatcctcattcacttcctgctgcaatggcgacagaggatttgcacgtatactatggggacaatcatgcaattaaaggcgtcgatttaacgttccccgaaaataaagtgacagctttaatcggaccatctggttgcggtaaatccacttatttaagagcattaaaccggatgaacgatgaaattgatggttgccgtatggaaggtcaaattttatacgatggcattaatattaatcgtaaagaagttgatctatacaatgttcgtaaagaaataggcatggtattccaaaaaccaaatccatttacaaaatctatctatgaaaatgttgcttttggactcaaacgtcatggcatgaagaataaaaaagaaattatggagcgtgtggagaaaagtttgcgccgagcagctctttgggacgaagtaaaagacgatttaggaaaaagcgcactatccctttctggtggacagcaacaacgactttgtatcgctagagctgtcgcaatgcagccaaaagtattgttactcgatgaaccagcatctgcgctagatccaatttccacaagtaaaattgaagatttaattaatgagttaaaaaataaatataccatcattatcgtaacgcacaatatgcaacaagcagctcgggtttcagactatacttctttcttttatctaggagaagtcgtggaattctcaggaacatccgaactatttacgaatccacaagaaaaacaaaccgaagactatatttctggtaactttggctag

SEQ ID NO: 116517 - protein, 271 aa, Listeria monocytogenes str. 1/2a F6854
MLTKKPEINTILQATPDPHSLPAAMATEDLHVYYGDNHAIKGVDLTFPENKVTALIGPSGCGKSTYLRALNRMNDEIDGCRMEGQILYDGININRKEVDLYNVRKEIGMVFQKPNPFTKSIYENVAFGLKRHGMKNKKEIMERVEKSLRRAALWDEVKDDLGKSALSLSGGQQQRLCIARAVAMQPKVLLLDEPASALDPISTSKIEDLINELKNKYTIIIVTHNMQQAARVSDYTSFFYLGEVVEFSGTSELFTNPQEKQTEDYISGNFG

SEQ ID NO: 116518 - DNA, 759 bp, Wolbachia endosymbiont of Drosophila simulans
  CDS (1)..(759): transl_table=11
atgagcaatacacgtgcctctgttaaagatttaaatctctggtatggctctaagcaagttttattcgatataaatttgaatatttataaaagaaaagttactacttttatcggaccatccgggtgcggtaaatcaacatttttgcgttgttttaatcgtatgaatgactatgtacctggatgcaaaactgttggtgaattagatatcgatgggctgggtgatatatattcacgcgatatggatgttgtactacttagagcaaaagttggtatggtatttcaaaagccaaatccttttccaaaatcaatatatgataatgttgcttgtgggccaaaattgcatggtatggcgaaggataagcaaaaattgaatgagatggtggaaaatagtttaaccaaggttggtttatgggaagaattgaaggacagattgcaagatagcgcactcaatttatccggtggccaacaacagaggctatgcatcgctcgcgcaattgcagtgaagccaactattttattaatggatgaaccgtgctctgctcttgatccaatggcaaccaatgcaatcgaaaatcttatacaagagctgaaattaagatttactataattatggtgactcattcaatgaagcaagctaaaaagttatctgatagtgtaattttctttcataatggcagaattgttgagtctggaagcactcaagaaatattcgaaaatgctcaatctcccttaacaaaggagtatatcctggatcattaa

SEQ ID NO: 116519 - protein, 252 aa, Wolbachia endosymbiont of Drosophila simulans
MSNTRASVKDLNLWYGSKQVLFDINLNIYKRKVTTFIGPSGCGKSTFLRCFNRMNDYVPGCKTVGELDIDGLGDIYSRDMDVVLLRAKVGMVFQKPNPFPKSIYDNVACGPKLHGMAKDKQKLNEMVENSLTKVGLWEELKDRLQDSALNLSGGQQQRLCIARAIAVKPTILLMDEPCSALDPMATNAIENLIQELKLRFTIIMVTHSMKQAKKLSDSVIFFHNGRIVESGSTQEIFENAQSPLTKEYILDH

SEQ ID NO: 116520 - DNA, 819 bp, Crocosphaera watsonii WH 8501
  CDS (1)..(819): transl_table=11
atgatggaaaatatggaacaagataaggtgccagcagaaaacctagagactgttttttcagtggatcacgtcgatattttttatggaaattatcgggctgttcgtgatgttacttttaccattcctaaaaacaaggtaactgcttttattggtccttctggctgcggaaaaagtaccattttacgctgttttaatcgacttaacgatctaatcgaaatctttagcttaaaaggaaagataaactatcacggacaagatttatacgcccctgatatcgatcccattgaggtaagaaaacggatcggtatggtttttcaaaaacccaatcctttcccaaaaactatctatgataatattgtctacggtgctagggttaataactacaaaggagatttagatgagttagtagaaacctccttaagacgggcagttttatgggatgaagttaaggataaattgggagaaagtggcttttccttatcagggggacaacaacaaagattgtgtattgctcgtacagttgctgctcaaccagaagtagttttaatggatgaaccttgttccgcattagatccaatttctaccctaaaaattgaagaattaatgcacgaattaaaggaaaattataccattgtaattgttacccacaatatgcagcaagcgacacgggtagctgattataccgcattttttaacgcagaagctacggataagggtagtaaagtgggttttctagttgaatacgatcaaacagagaacatttttggtaatcccaaacatcaagacactaaagattatgttagtggacgttttggttaa

SEQ ID NO: 116521 - protein, 272 aa, Crocosphaera watsonii WH 8501
MMENMEQDKVPAENLETVFSVDHVDIFYGNYRAVRDVTFTIPKNKVTAFIGPSGCGKSTILRCFNRLNDLIEIFSLKGKINYHGQDLYAPDIDPIEVRKRIGMVFQKPNPFPKTIYDNIVYGARVNNYKGDLDELVETSLRRAVLWDEVKDKLGESGFSLSGGQQQRLCIARTVAAQPEVVLMDEPCSALDPISTLKIEELMHELKENYTIVIVTHNMQQATRVADYTAFFNAEATDKGSKVGFLVEYDQTENIFGNPKHQDTKDYVSGRFG

SEQ ID NO: 116522 - DNA, 828 bp, Exiguobacterium sibiricum 255-15
  CDS (1)..(828): transl_table=11
atgatggatacgaagctgacgacaaaaccagccaaagaaggggcaaaaacaatgaatcaaccagtagctgcgcgacaaagtgtataccgtgtcaatgatttgaacctatggtacggtgatgatcatgctttgaaagatgttaatctggacattaaacaaaatgaagtgacggccatcatcggaccgtcaggatgcgggaaatcgacgttcatcaaaacgttgaaccgaatggtcgaactcgttccgatcgtacggacgaacggtgtcatcgaataccacggccgtaatatctttgataaggattacgaagtcgaagaattgcggacatcggtcggaatggtcttccagcaaccaaacccgttcccaaaatcgatttatgacaacatcgcatacggaccgcgtgtccacggtgtcaaaaataaaaaaatcctggatgagattgttgaacgcagtttacgcggggcagcgatttgggatgaggtcaaagaccgcttgaacgaaaacgcctatggactgtcaggcggacaacaacaacgtctctgtatcgcccgttgcctggcaatcgaacccgatgtcatcttgatggatgagccgacatctgcacttgatccgatctcaacgttgaaagtcgaagaattggtacaggaattgaaaaaagattattcgatcatcattgtgacgcataacatgcaacaagcagcacgtgtctcggataaaacagcattcttcttgaacggtgaagtcgttgaatttgaccaaacggatcgtattttctcaaatccgagtgacaaacggacggaagactatatttcaggacgattcggataa

SEQ ID NO: 116523 - protein, 275 aa, Exiguobacterium sibiricum 255-15
MMDTKLTTKPAKEGAKTMNQPVAARQSVYRVNDLNLWYGDDHALKDVNLDIKQNEVTAIIGPSGCGKSTFIKTLNRMVELVPIVRTNGVIEYHGRNIFDKDYEVEELRTSVGMVFQQPNPFPKSIYDNIAYGPRVHGVKNKKILDEIVERSLRGAAIWDEVKDRLNENAYGLSGGQQQRLCIARCLAIEPDVILMDEPTSALDPISTLKVEELVQELKKDYSIIIVTHNMQQAARVSDKTAFFLNGEVVEFDQTDRIFSNPSDKRTEDYISGRFG

SEQ ID NO: 116524 - DNA, 840 bp, Kineococcus radiotolerans SRS30216
  CDS (1)..(840): transl_table=11
gtggccaagcgcatcgacgtcaaggacctcaacgtctactacggcaacttcaaggccgtcgaggacgtctcgatgaccgtggagccccgctccgtgacggccttcatcggcccgtccggctgcgggaagtcgaccttcctccgcaccctcaaccgcatgcacgaggtcatccccggcggtcgggtcgagggcagcgtcatgctcgacgacgacgacctctactcctccaagatggacccggtgaacgtccgccggaccgtcggcatggtgttccagcgccccaacccgttccccacgatgtcgatcttcgacaacgtcgcggccgggatgcgcctcaacggggtccgcagcaagaaggtcctcaccgaggccgtggagtcctcgctgcgcggggccaacctgtggaacgaggtcaaggaccgcctcgacaagcccggcgccgggctgtccggcggtcagcagcagcggctgtgcatcgcccgcgccatcgcggtgaagccgcaggtgctcctcatggacgagccctgctcggccctggacccgatctcgacgctggcgatcgaggacctcatcggggagctgaagagctccttcacgatcgtcatcgtcacccacaacatgcagcaggcggcccgcgtcagcgacaagacggcgttcttcaacctcgccgccaccggcaagcccgggcgcctcgtggagatcgacgacaccgcgacgatcttcagcaacgcccataacaggaagccaccacatgacccactctgctcgcctttacggatgattcaccaccctgcgcgattatactcgcaccatgggggggcttttaaaataaagtcttga

SEQ ID NO: 116525 - protein, 279 aa, Kineococcus radiotolerans SRS30216
MAKRIDVKDLNVYYGNFKAVEDVSMTVEPRSVTAFIGPSGCGKSTFLRTLNRMHEVIPGGRVEGSVMLDDDDLYSSKMDPVNVRRTVGMVFQRPNPFPTMSIFDNVAAGMRLNGVRSKKVLTEAVESSLRGANLWNEVKDRLDKPGAGLSGGQQQRLCIARAIAVKPQVLLMDEPCSALDPISTLAIEDLIGELKSSFTIVIVTHNMQQAARVSDKTAFFNLAATGKPGRLVEIDDTATIFSNAHNRKPPHDPLCSPLRMIHHPARLYSHHGGAFKIKS

SEQ ID NO: 116526 - DNA, 798 bp, Oceanicola batsensis HTCC2597
  CDS (1)..(798): transl_table=11
atgtatgacgcccccgcttcggagcagaaagtgaaccagcagaccaccaagatctcggcgcgcaaggtgcaggtctattacggcgacacccatgccatcaaggacgtggatgtcgatatcgaggatcgcacggtcaccgccttcatcggcccctcgggttgcggcaagtcgaccttcctgcgctgtctgaaccggatgaacgacaccatcgacgtcgcgcgcatcgagggcgacatccttctggacggcgaggatatctacgacaagaaggtcgatcccgtgcagctgcgcgccaaggtgggcatggtgttccagaagcccaacccctttcccaagtcgatctacgacaacatcgcctacgggccgcgcatccacgggcttgccaagaacaaggcggatctggacgagatcgtcgagaaatcgctccgccgcggcgcgatctggaacgaggtcaaggaccggctccacgcgcccggcaccggcctctccggcgggcagcagcagcggctctgcatcgcccgcgccatcgcgacggagcccgaggtgctgctgatggacgaaccctgctccgcgctcgacccgatcgccacggggcaggtggaggaactgatcgacgagctgcgcgaaagctattcggtcgtcatcgtcacgcactccatgcagcaggccgcacgggtcagccagaagacggcgttctttcacctcggcaacctcgtggaatacggcgaaaccggccagatcttcacgaacccggtcgatccccgcaccgaaagctacattaccggccggatcggctaa

SEQ ID NO: 116527 - protein, 265 aa, Oceanicola batsensis HTCC2597
MYDAPASEQKVNQQTTKISARKVQVYYGDTHAIKDVDVDIEDRTVTAFIGPSGCGKSTFLRCLNRMNDTIDVARIEGDILLDGEDIYDKKVDPVQLRAKVGMVFQKPNPFPKSIYDNIAYGPRIHGLAKNKADLDEIVEKSLRRGAIWNEVKDRLHAPGTGLSGGQQQRLCIARAIATEPEVLLMDEPCSALDPIATGQVEELIDELRESYSVVIVTHSMQQAARVSQKTAFFHLGNLVEYGETGQIFTNPVDPRTESYITGRIG

SEQ ID NO: 116528 - DNA, 792 bp, Erythrobacter sp. NAP1
  CDS (1)..(792): transl_table=11
gtgaccctagtccacgaaagcatccagcaagacaaaggcgcgaagatgatcgcgcgcgatgtctcggtctactatggggcgaagaaggccatcgacgaggtgtcgatcgacatctcgcccgactatgtgaccgcctttatcggtccttccggctgcggaaaatcgaccttcctgcggtgcttcaaccgtatgaatgacaccattcctgttgcccgtgttgaaggcctcatcgaattggaaggcgaagacatccattccgacgcgatggacgtcgtgcaactgcgtgctcgcgtgggaatggtgttccagaagccaaaccccttccccaagtcgatctacgagaacattgcatacgggccgaagatccatggcctcggggaaaagaaggccgatctcgatgtgatcgtggaacgatcgctcactcgtgctggcctatgggacgaggtgaaagaccgtctggaagactccggtaccgctctctcgggaggccagcaacaacgcctttgtatcgctcgcgcaatcgccgtcgatcctgaagtaatcctgatggacgaaccagcatccgcgctcgacccgattgcgactgccaagattgaagagttgatcgatgagctttccgggcgttatgctatcgtaatcgtgacgcactcgatgcaacaagctgcgcgcgtttcacaacgcaccgcctttttccaccttgggaagatggtcgaatacggccctacctcggacatcttcaccaacccgattgaagagcggaccaaggactacattacagggcgctacggctaa

SEQ ID NO: 116529 - protein, 263 aa, Erythrobacter sp. NAP1
MTLVHESIQQDKGAKMIARDVSVYYGAKKAIDEVSIDISPDYVTAFIGPSGCGKSTFLRCFNRMNDTIPVARVEGLIELEGEDIHSDAMDVVQLRARVGMVFQKPNPFPKSIYENIAYGPKIHGLGEKKADLDVIVERSLTRAGLWDEVKDRLEDSGTALSGGQQQRLCIARAIAVDPEVILMDEPASALDPIATAKIEELIDELSGRYAIVIVTHSMQQAARVSQRTAFFHLGKMVEYGPTSDIFTNPIEERTKDYITGRYG

SEQ ID NO: 116530 - DNA, 819 bp, Synechococcus sp. WH 5701
  CDS (1)..(819): transl_table=11
atgaccagcaccctgaatccacccagcaccagctccaccctgcccagctgcctcagcctggagaacgtcaccatcagctacggcagcttcgaagccgtgcgtgatgtctacatggacatcccccgcaatcgggtgaccgccttcatcggcccctccggctgcggcaaatcgaccgtcctgcgggccctcaaccgcatgaacgatctgatcgagggctgcagcctgcgtggtcgcgtggtgttcgatggtcaggacatgtatgcccgagaggtggatccggtggaggtacgccgccgcatcggcatggtgttccagaagcccaaccccttccccaagagcatctacgagaacatcgcctttggggctcggatcaatggctacaagggcgacatggatgagctggtggagcgctccctgcgcaaggcggcgatctgggatgaaaccaaggacaagctcaaggagagtggcaatgccctctccggcggccagcagcagcggctgtgcatcgcccgagccatcgccgtggagccggaggtgatcctgatggacgagccctgctcggcacttgatccgatctccaccctcaagatcgaggagatgatgcatgagctcaagaagagcttcaccatcgtgatcgtcacccacaacatgcagcaggcggtacgggtgtcggactacaccggcttcttcaatgccgaagccgtggaaggcggcagcggcaaggtgggttacctggtggagttcaacgacaccgagcgcatcttcaacgccccggtgcagcaggccacccaggattacgtcaccggccgcttcggctga

SEQ ID NO: 116531 - protein, 272 aa, Synechococcus sp. WH 5701
MTSTLNPPSTSSTLPSCLSLENVTISYGSFEAVRDVYMDIPRNRVTAFIGPSGCGKSTVLRALNRMNDLIEGCSLRGRVVFDGQDMYAREVDPVEVRRRIGMVFQKPNPFPKSIYENIAFGARINGYKGDMDELVERSLRKAAIWDETKDKLKESGNALSGGQQQRLCIARAIAVEPEVILMDEPCSALDPISTLKIEEMMHELKKSFTIVIVTHNMQQAVRVSDYTGFFNAEAVEGGSGKVGYLVEFNDTERIFNAPVQQATQDYVTGRFG

SEQ ID NO: 116532 - DNA, 828 bp, Pseudoalteromonas tunicata D2
  CDS (1)..(828): transl_table=11
atgattacagttgcaccacatgttactcagtcggcctctagcttaaagttagatttagaaaacctgactcctgagcaaatggcattacagattaaaaatttagatcttttttatggtgataaacaagcacttaataaagtgtctatgatgatcccaaaaggacaagtaaccgcatttatcggtccatcaggttgtggtaaatcaaccttattacgctgcatcaatcgaatgaatgatttagttgataattgccgaattgaaggtgaaattctgcttcatggtgaaaacatttacgataaacgtgtcgatgtagcagcacttcgtcgtaatgtcggcatggtatttcagcgtccaaatccatttcctaaatcaatttatgaaaatgtggtttatggtttacgtttgcaaggtattaaagaaaagcgtcaattggatgaagtggttgaaaagtcattacgtggcgctgccatttgggatgaagtgaaagaccgcttacatgacagtgcctttggtttatcgggtggtcagcagcaacgtttagtaattgcacgttcaattgcgattgaaccggaagtgttgttacttgatgagccgacctctgcacttgacccaatttcaaccttggttattgaagaattaatcaatgatttgaaagataaatatactgttgtaattgttacccataacatgcaacaagctgcgcgagtatccgatcaaaccgcatttatgtacatgggtgagttaatcgaatactcagatacgaatacgctgtttaccacacctaaaaagaagaaaaccgaagattatattaccggtcgctacggctaa

SEQ ID NO: 116533 - protein, 275 aa, Pseudoalteromonas tunicata D2
MITVAPHVTQSASSLKLDLENLTPEQMALQIKNLDLFYGDKQALNKVSMMIPKGQVTAFIGPSGCGKSTLLRCINRMNDLVDNCRIEGEILLHGENIYDKRVDVAALRRNVGMVFQRPNPFPKSIYENVVYGLRLQGIKEKRQLDEVVEKSLRGAAIWDEVKDRLHDSAFGLSGGQQQRLVIARSIAIEPEVLLLDEPTSALDPISTLVIEELINDLKDKYTVVIVTHNMQQAARVSDQTAFMYMGELIEYSDTNTLFTTPKKKKTEDYITGRYG

SEQ ID NO: 116534 - DNA, 819 bp, Photobacterium sp. SKA34
  CDS (1)..(819): transl_table=11
atgtattctgcttcaccatcaataggtttatttgaacccgtcgatctctcttcgttaccagatgagcaaacggcattatcgattgaaggtttgaacctacactatggtaaaacgcaagctttgtataatatcaatatgcgtattcctaaaggacaggtcaccgcatttatcggcccttcaggttgtggtaaatcaacgttattaagttgtattaaccgaatgaacgatttgattgaaggctgtcatgtcgatggtaaaatcatgctacatgggcagaacatctacgataataaagttgatgttgcgtcattacgccgtcgtgtagggatggtgtttcaacgcccgaatccatttcctaaatccatatatgaaaatgtggtttatggtttacgtctgcaagggatcagtgatcgacgtattttagatgatgcggttgaaagttcattgcgttcggcagctttgtgggatgaggtaaaagacaggttgcatgaaaatgcgtttggtttatctggaggccaacagcagcgtttagtgattgcgcgtgcgattgctattgaacctgagattctacttcttgatgagccgacatcagcacttgatccaatatcaaccttaacgattgaagaattgatcaatgatctaaaagccaaatataccgtgattatcgtgacacataacatgcagcaagcggcacgagtgtcagatcaaacagcttttatctatatgggagagctggtggaatattcgagcaccaatgatattttcaccaccccaagagaaaaacgtactgaagattatattacaggacgttatggttaa

SEQ ID NO: 116535 - protein, 272 aa, Photobacterium sp. SKA34
MYSASPSIGLFEPVDLSSLPDEQTALSIEGLNLHYGKTQALYNINMRIPKGQVTAFIGPSGCGKSTLLSCINRMNDLIEGCHVDGKIMLHGQNIYDNKVDVASLRRRVGMVFQRPNPFPKSIYENVVYGLRLQGISDRRILDDAVESSLRSAALWDEVKDRLHENAFGLSGGQQQRLVIARAIAIEPEILLLDEPTSALDPISTLTIEELINDLKAKYTVIIVTHNMQQAARVSDQTAFIYMGELVEYSSTNDIFTTPREKRTEDYITGRYG

SEQ ID NO: 116536 - DNA, 834 bp, Oceanospirillum sp. MED92
  CDS (1)..(834): transl_table=11
atgactagcgaagctaaaacacacgcaattgatatttcttctatgcagcgagacaatcgcgttcttaaccttgcagatgaaacaatcgctcttgaggttaaagatctacgtttaagctatggcgataacgaagctctgcacggtatcgacatgcacatcccgaaaaaccgtgtaaccgcgtttatcggcccatccggttgtggtaaatccacactactacgctgcttcaaccgcatgaacgatctggttgatgactgtaacatcaccggtcagatcatgctggatgatgccaacatctacgagcgtagcgttgatatcgctgaattacgccgtcgcgtaggtatggtattccagaagccaaacccattcccaaaatctatctacgaaaacgttgcttacggcctgcgtattcagggcgttactaagaaacgtgttatcgatgaaacggttgagtgggctctgaaatcagcagcactgtgggatgaagtaaaagatcgcctgcatgaaagtgcactgggtatgtctggtggtcagcagcagcgtctggttatcgcgcgtaccatcgccgttaaaccagaagtacttctgcttgacgaacccgcttccgctctggacccgatctcaactctgaagatcgaagagctgattcacgaactgaagaaagatttcactatcgtgatcgttacccataacatgcaacaggcagcacgtgtatctgattacactgctttcatgtacatgggtgatctgatcgagtttggtgtaacagatacgctgttcacaaacccagagaagaaacagactgaagactacatcacaggccgttacggttaa

SEQ ID NO: 116537 - protein, 277 aa, Oceanospirillum sp. MED92
MTSEAKTHAIDISSMQRDNRVLNLADETIALEVKDLRLSYGDNEALHGIDMHIPKNRVTAFIGPSGCGKSTLLRCFNRMNDLVDDCNITGQIMLDDANIYERSVDIAELRRRVGMVFQKPNPFPKSIYENVAYGLRIQGVTKKRVIDETVEWALKSAALWDEVKDRLHESALGMSGGQQQRLVIARTIAVKPEVLLLDEPASALDPISTLKIEELIHELKKDFTIVIVTHNMQQAARVSDYTAFMYMGDLIEFGVTDTLFTNPEKKQTEDYITGRYG

SEQ ID NO: 116538 - DNA, 825 bp, Xanthobacter autotrophicus Py2
  CDS (1)..(825): transl_table=11
atgacttcagccgtcgatcccaccttcaacctctcctcctcggtcgccgcgcgccccgatgcgctggcggcccccgccaagatcaaggtggagaacctgcagttctactacggcagcaaccatgcgctgcggaacatcaacttccaggtgccggaaaagcgggtgaccgccatgatcggcccctcgggctgcggcaagtccaccctgctgcgcgtgttcaaccgcatgtacgacctctaccccggccagcgggccgagggcgcggtgctgtatgacggcgtgaacatcgtcggcaaggagctggattccaccatcgtgcgcacccgcatcggcatggtgttccagaagccgaccccgtttcccatgtcgatctatgacaacatcgccttcggcgtgaagctgcacgagaagctcaccaaggcgcagatggacgagcgcgtcgagtggtgcctgcgcaaggccgccatctgggacgagaccaaggaccgcctgcacacctcggcgctcggcatgtccggtggccagcagcagcgcctgtgcatcgcccgcaccatcgcggtgcgccccgaggtgatcctgctggacgagcccacctcggccctcgaccccatctccacctcgaagatcgaggacctgatcgacgaactgaagcaggacttcacgatcgtcatcgtcacgcacaatatgcagcaggccgcgcgttgcgccgacatcaccgccttcttctatctcggcgagctgatcgaggtggcgccttcggacgtgatcttcaccaatccgaaggagatcaagacgcgcgactatatcaccggccgcttcggctga

SEQ ID NO: 116539 - protein, 274 aa, Xanthobacter autotrophicus Py2
MTSAVDPTFNLSSSVAARPDALAAPAKIKVENLQFYYGSNHALRNINFQVPEKRVTAMIGPSGCGKSTLLRVFNRMYDLYPGQRAEGAVLYDGVNIVGKELDSTIVRTRIGMVFQKPTPFPMSIYDNIAFGVKLHEKLTKAQMDERVEWCLRKAAIWDETKDRLHTSALGMSGGQQQRLCIARTIAVRPEVILLDEPTSALDPISTSKIEDLIDELKQDFTIVIVTHNMQQAARCADITAFFYLGELIEVAPSDVIFTNPKEIKTRDYITGRFG

SEQ ID NO: 116540 - DNA, 840 bp, Oceanobacter sp. RED65
  CDS (1)..(840): transl_table=11
atgacagacgcaactgaacaaaaaggccatagcatcgacatgtcttccatggggcgtgagagccgccatcttgacctcagcaaagaggagccagcgctaaaagtgaataacttgcgtctgagctatggcgagaaagaagcgcttcacggtatcgacatgattatcccgaagaagcgcgttaccgccttcatcggtccatcgggttgtggtaaatcgacgctattgcgttgcttcaaccgtatgaacgatttggtcgacacctgttcaatcacgggtgaaattcttttggacgatcaaaacatctacgaaaaaggggtggatgttgctgaactccgtcgtcgagtgggtatggtattccaaaagccgaaccctttcccaaaaagcatttatgaaaacgtagcatatggcttacgtattcaaggtattaagaaaaagcgtcaaatcgatgagaccgtcgagtgggcactgcgcagtgcggcactttgggatgaagtaaaagatcgcctacacgaaagtgccttgggtatgtccggtggtcagcagcagcgtttggttatcgcccgtactatcgccgtgaaaccagaagtattgctattggatgaaccggcttctgctcttgacccaatttcgacacttaagatcgaagaattgattcacgaactgaaaaacgatttcaccatcgctatcgtaacccacaatatgcaacaggctgctcgtgtgagcgactatactgcatttatgtacatgggcgacatgatcgaatttggcgataccgatcagttgttcactaacccgaccgagaaacaaacggaagactatattacgggtcgttacggctag

SEQ ID NO: 116541 - protein, 279 aa, Oceanobacter sp. RED65
MTDATEQKGHSIDMSSMGRESRHLDLSKEEPALKVNNLRLSYGEKEALHGIDMIIPKKRVTAFIGPSGCGKSTLLRCFNRMNDLVDTCSITGEILLDDQNIYEKGVDVAELRRRVGMVFQKPNPFPKSIYENVAYGLRIQGIKKKRQIDETVEWALRSAALWDEVKDRLHESALGMSGGQQQRLVIARTIAVKPEVLLLDEPASALDPISTLKIEELIHELKNDFTIAIVTHNMQQAARVSDYTAFMYMGDMIEFGDTDQLFTNPTEKQTEDYITGRYG

SEQ ID NO: 116542 - DNA, 780 bp, Desulfitobacterium hafniense DCB-2
  CDS (1)..(780): transl_table=11
atgacgaaagatagaagtaagaatgagagtgttgtttttgatgttcaggggctgaatctatggtatggagaagaccaggcgcttaagaacatcaagatgcagattaaaaagaataaggtcaccgcgattatcggtccttccgggtgcggaaaatcgacctttattaaaaccctgaacagaatgattgagaatattcccagtgttaaaaccaccggagaaatcatctatcaagggcagaatatctttgataaatccgtccgggtggaggaattgcggacaaaagtcggcatggtctttcaaaaacccaatcccttcccgaaatccatctttgccaatgtggtctatgggccgcggattcatggcattaaagataagaaacttttgctggatattgcagagaccagcctgagaaacgcagcattatgggatgaagtaaaagaccggcttcatgataatgcttacggcctctccggagggcagcagcagcgtttgtgtatcgccagatgtctggcagtccagccggatgtcattttgatggatgagccgacctccgctttggaccctattgccacctataagatcgaagaactgatggaaagtttgaaaaagcactacaccatcgccatcgtaacccactccatgcaacaggccgcccggatatccgatgatacagcctttttcctgatgggagaccttatcgaatttgataagaccacagaaatattctctaatccgaaagataagcggaccgaagattatattaccggaagaataggctga

SEQ ID NO: 116543 - protein, 259 aa, Desulfitobacterium hafniense DCB-2
MTKDRSKNESVVFDVQGLNLWYGEDQALKNIKMQIKKNKVTAIIGPSGCGKSTFIKTLNRMIENIPSVKTTGEIIYQGQNIFDKSVRVEELRTKVGMVFQKPNPFPKSIFANVVYGPRIHGIKDKKLLLDIAETSLRNAALWDEVKDRLHDNAYGLSGGQQQRLCIARCLAVQPDVILMDEPTSALDPIATYKIEELMESLKKHYTIAIVTHSMQQAARISDDTAFFLMGDLIEFDKTTEIFSNPKDKRTEDYITGRIG

SEQ ID NO: 116544 - DNA, 819 bp, Vibrio sp. Ex25
  CDS (1)..(819): transl_table=11
atgtttaattttgatagtacattaggttatgagccaccattggacgttcataatttaacggatgaacaaacagcaatctcaatcgagaaccttaatctgttctatggtcaaactcaggcgctgcatgatatttcgatgcgaattcccaaagggcgagtcaccgcttttatcggtccttcagggtgtggaaagtcgacgttattacgttgcatcaatcgcatgaacgacttagtggaagggtgtcgagtcacaggcaaagtgcgtctacatggcaagaatgtttatcatcctaatgtcgatgttgcgacacttcgacgccgagtggggatggtgtttcaaagacccaatccatttcctaagtctatttatgaaaacgtagtttatggcttacgcttacaaggtgtaaaaaacagccgcagtttagatgacgcagtggagcgatccttgcgctcggcggcgttgtgggatgaggtaaaagaccgcttgcatgagaacgcatttggtttatctggtggtcagcaacagcgcttggtcattgcgcgcgcggtggcgattgagccggaagtcctgttattggatgagccgacatcagcgttggatccaatctcaactttaactattgaagagcttatcaatgagcttaagactcaatatactgtcgttatcgttacccataacatgcagcaagcggcgcgagtgagtgatcacaccgcattcattcatatgggtaagttaattgaatactctgacgcggactcgatcttcacctcgccaatgaagaaacagaccgaagattacattacgggtcgatacggttaa

SEQ ID NO: 116545 - protein, 272 aa, Vibrio sp. Ex25
MFNFDSTLGYEPPLDVHNLTDEQTAISIENLNLFYGQTQALHDISMRIPKGRVTAFIGPSGCGKSTLLRCINRMNDLVEGCRVTGKVRLHGKNVYHPNVDVATLRRRVGMVFQRPNPFPKSIYENVVYGLRLQGVKNSRSLDDAVERSLRSAALWDEVKDRLHENAFGLSGGQQQRLVIARAVAIEPEVLLLDEPTSALDPISTLTIEELINELKTQYTVVIVTHNMQQAARVSDHTAFIHMGKLIEYSDADSIFTSPMKKQTEDYITGRYG

SEQ ID NO: 116546 - DNA, 828 bp, Alteromonadales bacterium TW-7
  CDS (1)..(828): transl_table=11
atgattacagtcgctccaaaagtaaaccaagccaatttgggcatgaagttagatttagacaatttaacagacgagcaaaaagcgttagagattaaagatctcgatctttactacggtgataaacaagcgcttagtaaagtgaatatgaatattccaaaaggccaagtaacggcgtttatcggcccatcaggttgtggtaaatcaacgctattacgctgtattaaccgcatgaatgatttggttgatatttgtcgaattgaaggtgaaatactccttcatggacaaaatatttacgataaaaatgtagatgttgcggcgcttcgccgtaacgttgggatggtgtttcagcgtcctaatccatttccaaaatcgatttatgaaaatgtagtctatggtctacgcttacaaggcattaaagaaaagcgtaagttagacgaagtagtagagcagtcattacgtggcgctgctttatgggatgaagtaaaagatagactacatgacagtgcatttggtttatcaggcggtcagcaacagcgtttagttattgctcgttctattgcgatagagcctgaggttttattactagatgaaccaacgtctgcacttgatccaatttcgactttagttattgaagaactaattaacgatttaaagaataaatttaccgttgttattgttacgcataacatgcaacaagcagcgcgagtgtctgaccaaacagcctttatgtacatgggtgagctgattgaatactcagatacaaataccttatttacaacaccaacaaagaaaaagactgaagattatattacaggtcgttacggctaa

SEQ ID NO: 116547 - protein, 275 aa, Alteromonadales bacterium TW-7
MITVAPKVNQANLGMKLDLDNLTDEQKALEIKDLDLYYGDKQALSKVNMNIPKGQVTAFIGPSGCGKSTLLRCINRMNDLVDICRIEGEILLHGQNIYDKNVDVAALRRNVGMVFQRPNPFPKSIYENVVYGLRLQGIKEKRKLDEVVEQSLRGAALWDEVKDRLHDSAFGLSGGQQQRLVIARSIAIEPEVLLLDEPTSALDPISTLVIEELINDLKNKFTVVIVTHNMQQAARVSDQTAFMYMGELIEYSDTNTLFTTPTKKKTEDYITGRYG

SEQ ID NO: 116548 - DNA, 825 bp, marine gamma proteobacterium HTCC2143
  CDS (1)..(825): transl_table=11
gtgaaaactcatgccattgacctaggcagtatcggacgtagtcaacaaaacctcgatattggtgcggaagatatcagtttgtcagtacgtaacttaaacctctactacgaaggtaagaagcaagcgttgtatgatgtgtcccttgaaattccaaaacagcgagttaccgcgtttattgggcccagtggctgtgggaaatcgacattgctgcgctgttttaatcggatgaatgatttggtcgatggctgcgagatagaagggggtatttttctcgatgatgaaaacatctaccaaaaaggcgttgatgcgccttctctccgtcgccgaataggaatggtattccaaaaaccgaatccttttccgaaaacgatctatgagaatgtggcttatggtttgcgtattcaaggtgttaataaaaagcgcgttttggatgaggcggtggaaaaatccctgcggcaagcggcactttgggacgaagtcaaagatcgattacatgacagtgcgctgggcatgtcaggtggtcagcagcaacggttggttatcgcgcgcacgattgctatcgagccggaagtgttgttactggacgagcctgcgtcggccttggaccctatttcaaccttaaaaattgaagagctcatttacgagttgaaatcaaaatatactatcgtaatagtcacccataacatgcagcaggccgcacgggtttctgactacacggcattcctatatatgggaaagcttattgaatttgatacgaccgacacattgtttactaatcctcggctaaagcagacagaagattatattacgggccgctacggataa

SEQ ID NO: 116549 - protein, 274 aa, marine gamma proteobacterium HTCC2143
MKTHAIDLGSIGRSQQNLDIGAEDISLSVRNLNLYYEGKKQALYDVSLEIPKQRVTAFIGPSGCGKSTLLRCFNRMNDLVDGCEIEGGIFLDDENIYQKGVDAPSLRRRIGMVFQKPNPFPKTIYENVAYGLRIQGVNKKRVLDEAVEKSLRQAALWDEVKDRLHDSALGMSGGQQQRLVIARTIAIEPEVLLLDEPASALDPISTLKIEELIYELKSKYTIVIVTHNMQQAARVSDYTAFLYMGKLIEFDTTDTLFTNPRLKQTEDYITGRYG

SEQ ID NO: 116550 - DNA, 789 bp, Pseudomonas putida GB-1
  CDS (1)..(789): transl_table=11
atggtcagtgaagctaccccgatcgtcatggactgcaagctggacaagattttctacggcaatttcatggccgtgcgtgacagccatgtaccgatccgcaagaacgagatcaccggcttcatcgggccgtcgggctgcggcaagagtaccgtgctgcgtagcctgaaccgcatgaacgacctggtgaagggcttccgcttcgaaggccatgtgcacttcctgggccaggacgtttatggcaagggcgttgacccggtggtggtacgccgctacatcggcatggtgttccagcagcccaacccgttctcgatgagcatcttcgacaacgtcgccttcggcctgcgcctgaaccgctacaaaggcgacttgggtgaccgcgtgaagcacgccttgcaaggcgccgcgctgtgggacgaagtgaaggacaagctcaaggtcagcggcctgtcgctgtccggtggccagcagcagcgcctgtgcattgcccgtgccattgccaccgagccagaagtgctgttgctggacgagccgtgctcggcgctcgacccgatcgctacccgccgggtggaagagctgatggtcgagctgaagaaggactacaccatcgcgctggtgacccacaacatgcagcaggcgattcgtgtggccgacaccacggcgttcttctcggtcgatatctcccagggcacgcgcaccggctacctggtcgagatgggccctaccgcgcagattttccagaacccgcgcgaacaactgaccagcgactacatcagcggcaaattcagctga

SEQ ID NO: 116551 - protein, 262 aa, Pseudomonas putida GB-1
MVSEATPIVMDCKLDKIFYGNFMAVRDSHVPIRKNEITGFIGPSGCGKSTVLRSLNRMNDLVKGFRFEGHVHFLGQDVYGKGVDPVVVRRYIGMVFQQPNPFSMSIFDNVAFGLRLNRYKGDLGDRVKHALQGAALWDEVKDKLKVSGLSLSGGQQQRLCIARAIATEPEVLLLDEPCSALDPIATRRVEELMVELKKDYTIALVTHNMQQAIRVADTTAFFSVDISQGTRTGYLVEMGPTAQIFQNPREQLTSDYISGKFS

SEQ ID NO: 116552 - DNA, 834 bp, Pseudomonas putida GB-1
  CDS (1)..(834): transl_table=11
atgcagcaagattcccatacccacggcatcgacatgtctgccctgggccgcaacaagcagagcctgcgcctggccgaagaaaccgtggccatcgaagtaccgggcctgagcctgttctacggcgacaagcaggcgttgttcgacgtcagcatgaacatccccaagcagcgcgtgaccgccttcatcgggccgtccggctgcggcaagtcgaccctgctgcgcaccttcaaccgcatgaacgacctggttgacggttgccgcgtggaaggcgccatcaacctgtacggcaacaacatctaccgcaagggcgaagacgtggccgagctgcgccgccgtgtgggcatggtgttccagaagcccaacccgttccccaagaccatctacgagaacgtcgtctacggcctgcgcatccagggcatcaacaagaagcgcgtgctggatgaagccgtcgaatgggcgttgaagggcgcggccttgtgggatgaggtgaaagatcgcctgcacgagtcggcgctgggcctgtccggtggccagcagcagcgcctggtcatcgcccgcaccatcgccgtggagccggaggtgctgttgctcgatgaaccctgctccgcgctggacccgatctcgacgttgaaggtcgaagagctgatctacgaattgaaatccaagtacaccatcgtcatcgtgacccacaacatgcaacaggcggcccgtgtttcggattacaccgcgttcatgtacatgggcaaactggtcgaattcggcgataccgataccctgttcaccaacccggcgaagaagcagaccgaagactacatcaccggtcgctacggctaa

SEQ ID NO: 116553 - protein, 277 aa, Pseudomonas putida GB-1
MQQDSHTHGIDMSALGRNKQSLRLAEETVAIEVPGLSLFYGDKQALFDVSMNIPKQRVTAFIGPSGCGKSTLLRTFNRMNDLVDGCRVEGAINLYGNNIYRKGEDVAELRRRVGMVFQKPNPFPKTIYENVVYGLRIQGINKKRVLDEAVEWALKGAALWDEVKDRLHESALGLSGGQQQRLVIARTIAVEPEVLLLDEPCSALDPISTLKVEELIYELKSKYTIVIVTHNMQQAARVSDYTAFMYMGKLVEFGDTDTLFTNPAKKQTEDYITGRYG

SEQ ID NO: 116554 - DNA, 759 bp, Serratia marcescens
  CDS (1)..(759): transl_table=11
atggaacagaccgcgctggcggtcaacggcctgaacctgttttatggtgacaagcaggtgttgcacgatatctcgttacgtatcccgaagcaccgggtgacggctttgattggtccctcgggctgcggcaaatcgacgctgctgcgctgtttcaaccgcatgaacgatctggtggacaactgccgcatcgagggcgatctgcagctgaacggcgcggcgatctccggcgcgcagatcgacgtggcggcgctgcggcggcgggtgggcatggtgttccagcggccgaacccgttcccgaaatcgatctatgaaaacgtggtgtacggcctgcggctgcagggcgtgcgcgaccggcgcttgctggatgaagcggtggagcgttcgctgcgcgccgccgcgctgtggcatgaggtgaaggaccggctgcgcgaaaatgcgttccgcttgtccagcggccagcagcagcgcctggtgatcgcgtcctccatcgccatcgagccggaggtgttgctgctcgacgagccgacctcggcgctggatccgatctccacgctgaccatcgaagagctgatttccgcactcaagcagcgctatagcgtggtgctggtgacgcacaacatgcagcaggcggcgcgcgtctccgactacaccgcctttattcatcagggccggctggtggagtacaacgacaccgacgccattttcacctcgccgcgccagcgccgcaccgaggattatattaccgggcggtatgggtga

SEQ ID NO: 116555 - protein, 252 aa, Serratia marcescens
MEQTALAVNGLNLFYGDKQVLHDISLRIPKHRVTALIGPSGCGKSTLLRCFNRMNDLVDNCRIEGDLQLNGAAISGAQIDVAALRRRVGMVFQRPNPFPKSIYENVVYGLRLQGVRDRRLLDEAVERSLRAAALWHEVKDRLRENAFRLSSGQQQRLVIASSIAIEPEVLLLDEPTSALDPISTLTIEELISALKQRYSVVLVTHNMQQAARVSDYTAFIHQGRLVEYNDTDAIFTSPRQRRTEDYITGRYG

SEQ ID NO: 116556 - DNA, 771 bp, Erwinia amylovora
  CDS (1)..(771): transl_table=11
atggttgataatactgccgctcagacgattcaggttcgcgatctgaacttctattacggaaaattccatgcgctgaaaaacattaatctggatattgccaaaaatcaggtgacggcgtttatcggcccttccggctgcggcaaatctaccctgttgcgtacctttaacaagatgttttcgctgtatcccgatcagcgcgcggaaggggaaatattgctggatggcgaaaatattttgaccgccagtcaggatatcgccctgctgcgcgcgcgtgtgggcatggtcttccagaagccgacgccattcccgatgtcgatctacgacaatatcgccttcggcgtgcggctgtttgaaaagctgtcgcgcgccgatatggatgaacgcgtgcagtgggcgctgaccaaagcggcgctgtggacggaaaccaaagataagctgcatcagagcggctacagtctttccggtggccagcagcagcgcctgtgcattgcacgcggtatcgcgatccgtccggaggtgctgctgctggatgaaccctgctcggcgcttgacccgatttccaccgggcgcattgaagagttgattaccgaactgaaacaggattacaccgtggtgatcgtcactcacaatatgcagcaggctgcccgctgctccgaccgtacggcgtttatgtacctcggcgaactgatagagtacagcgataccgatacgctgtttaccactccgctacaaaagcagactgaagactatatcaccggccgctacggttga

SEQ ID NO: 116557 - protein, 256 aa, Erwinia amylovora
MVDNTAAQTIQVRDLNFYYGKFHALKNINLDIAKNQVTAFIGPSGCGKSTLLRTFNKMFSLYPDQRAEGEILLDGENILTASQDIALLRARVGMVFQKPTPFPMSIYDNIAFGVRLFEKLSRADMDERVQWALTKAALWTETKDKLHQSGYSLSGGQQQRLCIARGIAIRPEVLLLDEPCSALDPISTGRIEELITELKQDYTVVIVTHNMQQAARCSDRTAFMYLGELIEYSDTDTLFTTPLQKQTEDYITGRYG

SEQ ID NO: 116558 - DNA, 783 bp, Bacillus subtilis
  CDS (1)..(783): transl_table=11
atgagtattgctaccgaagctgtaatgaaacaggaagtatatcaagtcaatggaatgaacttatggtatgggcagcatcatgctttaaaaaatatcaatttgagcatttatgaaaatgaggttacggcgattatcggaccatccggatgcgggaaatcgacctttatcaagacattgaatttaatgattcaaatgacgccgaatgtaaagcttgcaggtgagctgaactataatggcagcaacattttaaaggataaagtggacatcgtggatttgcgaaaaaatatcggcatggtattccaaaaagggaatccgtttccgcaatctatttttgataatgtggcttacggaccgagagtccacggcaccaaaaataagaagaagcttcaggaaattgtggaaaagtcattaaaagacgtggcgttatgggatgaggtgaaggatcgattgcatacgtccgctctttcgctgtcagggggccagcagcagcgtctttgcatcgccagagcacttgcgaccaatcctgatattttgctgatggatgaaccgacatctgcactagatccaatctcaacgagaaaaattgaagaactcattctagagctgaaagataaatatacaattgtcattgtcacgcataacatgcagcaggcagcaagggtttctgatcaaaccgcctttttctacatgggcgagcttgttgaatgcgacaatacgaataaaatgttctctaacccgaaggaccaaagaacgctcgattacatttcaggaaagtttggatga

SEQ ID NO: 116559 - protein, 260 aa, Bacillus subtilis
MSIATEAVMKQEVYQVNGMNLWYGQHHALKNINLSIYENEVTAIIGPSGCGKSTFIKTLNLMIQMTPNVKLAGELNYNGSNILKDKVDIVDLRKNIGMVFQKGNPFPQSIFDNVAYGPRVHGTKNKKKLQEIVEKSLKDVALWDEVKDRLHTSALSLSGGQQQRLCIARALATNPDILLMDEPTSALDPISTRKIEELILELKDKYTIVIVTHNMQQAARVSDQTAFFYMGELVECDNTNKMFSNPKDQRTLDYISGKFG

SEQ ID NO: 116560 - DNA, 900 bp, Haloarcula marismortui
  CDS (1)..(900): transl_table=11
atgacagagaacgagatgacgagcaacgacagtaccgagcccacaccgaccactgaaacggccgcgtcgtcacccgacccgtccggcgaccctctcatcgaacagtcgatcgacgtggagggaaccgactcgaccgcggccgagacggggaaaccagtcatcgaatccagtgacctgaacgtgttctacggcgagacgcaagcgctccagagcatcgatctggccatccctgaaaaacaggtgaccgccatgatcggcccctccggctgtggcaagtccacgttcctgcggtgtatcaaccgcatgaacgacctcatcgacgcggcacgggtcgaaggggacctccacttcgaggggaaaaacgtctacgacgctgacgtggacccggtggcgctgcggcgacgcattggaatggtgttccagcacccgaaccccttccccaagagtatctacgacaacgtcgcctacggcctccggattcaggaccagacggagaacatcgacgagaaagtcgagacggcactcaagcgcgccgcactgtgggacgaagtcaaagaccaactggacaagagcgcactcgacctctcaggtggtcagcaacagcggctctgcatcgcccgcgctattgccgtcgacccagacgtgattctgatggacgagccggcgtcggcgcttgacccgatcgccacctcgaagatcgaggacctcatcgaggagttggcagaggagttcacggtcgtcatcgtcacccacaatatgcagcaggcggctcgcatctccgacaagacggctgtcttcctcactggcggcgagctcgtcgagttcgacgatactgacaagattttcgagaaccccgagagccagcgcgtcgaggactacatcaccggcaagttcggataa

SEQ ID NO: 116561 - protein, 299 aa, Haloarcula marismortui
MTENEMTSNDSTEPTPTTETAASSPDPSGDPLIEQSIDVEGTDSTAAETGKPVIESSDLNVFYGETQALQSIDLAIPEKQVTAMIGPSGCGKSTFLRCINRMNDLIDAARVEGDLHFEGKNVYDADVDPVALRRRIGMVFQHPNPFPKSIYDNVAYGLRIQDQTENIDEKVETALKRAALWDEVKDQLDKSALDLSGGQQQRLCIARAIAVDPDVILMDEPASALDPIATSKIEDLIEELAEEFTVVIVTHNMQQAARISDKTAVFLTGGELVEFDDTDKIFENPESQRVEDYITGKFG

SEQ ID NO: 116562 - DNA, 798 bp, Lactobacillus acidophilus
  CDS (1)..(798): transl_table=11
atgatgcaagaattaaaacaaagctatatcaaaacttttgataaagatgacgtggcactgtctacaaatgatttaagtgttttgtacggtggtaaggttcaaaagctctttgatgctagtttacaatttaagaaaaatacgatcactgctttaatcggtgcatctggatcaggaaaatctactttcttacgttcacttaatagaatgaatgataaggtggctacagtaaacggtgaaatttggtttcatggtttagatgtaaataagcctaatatcaatgtttatgaattaagaaaaagtattggaatggtatttcagcgtcccaatccttttcctaaatcaattagagaaaatatagtttacgctttaaaagcaaatggtaagactgacaagcaggaacttgataagatagtggaagaaagtttaagagctgctgctttgtgggatgaagtaaaagataaactagataagagtgctttggcgctttctggtgggcaacagcaacgtttgtgtattgctagagcactagctgttcaaccacaaattttactcttagatgagccagcaagtgccttagatccagtatcaacttctaaattggaagatacgctcaaacaattaagaagtaaatatactatggttatggttactcataacatgcagcaagcttcaagaattagtgattacacagcatttttccacttggggcatgtaattgaatataattcaacagcagaaatcttcactaatcctaaaggtaaaattactgaagattatattcaaggaagttttggttaa

SEQ ID NO: 116563 - protein, 265 aa, Lactobacillus acidophilus
MMQELKQSYIKTFDKDDVALSTNDLSVLYGGKVQKLFDASLQFKKNTITALIGASGSGKSTFLRSLNRMNDKVATVNGEIWFHGLDVNKPNINVYELRKSIGMVFQRPNPFPKSIRENIVYALKANGKTDKQELDKIVEESLRAAALWDEVKDKLDKSALALSGGQQQRLCIARALAVQPQILLLDEPASALDPVSTSKLEDTLKQLRSKYTMVMVTHNMQQASRISDYTAFFHLGHVIEYNSTAEIFTNPKGKITEDYIQGSFG

SEQ ID NO: 116564 - DNA, 819 bp, Photobacterium profundum
  CDS (1)..(819): transl_table=11
atgctttcagttaatccatcaatgggcttatttgagccattagatttagcctcgttacccgatgacaaaacggcgatgtcaatcgaagggctcgatcttcattacggtaatacgcaggcgttgtttgatattaatatgcgcattgctaaagggcaggttacctcattcattggtccgtcaggttgcggtaaatcgacgttattacgctgcattaatcgaatgaatgaattagtggatggttgccgtgttgatggcaagatcatgcttcacggtcaaaacatctatgacagtaaagtggatgtagcatcattacgtcgccgagtgggtatggtatttcagcgcccgaatccatttcctaaatcgatttatgaaaacgtggtttatgggctgcgcttacaagggttgaaagagcgtcgagtacttgatgacgcggttgaaaaatcattacgtggtgcggcgttatgggatgaagtaaaagatcgtttacatgaaaatgcctttggtttatcaggtggtcagcagcaacgtttagtgattgcccgagcgattgcgattgagccggaagtcttgttattggatgagccaacatcagcactagatcctatttcgacgctgacgattgaagaattgattaatgatctaaaaacgaaatacacggtcattatcgtaacccataacatgcaacaggctgcccgggtttcggatcaaaccgcatttatgcacatgggtgagctggtggaatattccagtaccaatgatattttcaccaccccaaaagagaaacgcactgaagattacattactggccgatacggttaa

SEQ ID NO: 116565 - protein, 272 aa, Photobacterium profundum
MLSVNPSMGLFEPLDLASLPDDKTAMSIEGLDLHYGNTQALFDINMRIAKGQVTSFIGPSGCGKSTLLRCINRMNELVDGCRVDGKIMLHGQNIYDSKVDVASLRRRVGMVFQRPNPFPKSIYENVVYGLRLQGLKERRVLDDAVEKSLRGAALWDEVKDRLHENAFGLSGGQQQRLVIARAIAIEPEVLLLDEPTSALDPISTLTIEELINDLKTKYTVIIVTHNMQQAARVSDQTAFMHMGELVEYSSTNDIFTTPKEKRTEDYITGRYG

SEQ ID NO: 116566 - DNA, 840 bp, Pseudomonas putida
  CDS (1)..(840): transl_table=11
ttgagaaagggagcatccaacttgaacgtatccactgcgcaaagagccgctcccatggtcagcgaagcccccatcgtcatggactgcaagctcgacaagattttctacggtaacttcatggccgtgcgtgacagccatgtgccgatcaggaaaaacgagatcaccggtttcatcggcccttcgggctgcggcaagagtaccgtgctgcgtagcttgaaccgtatgaatgacctggtgaagggcttccgcttcgaaggccatgtgcactttcttgggcaggatgtctacggcaagggtgtcgaccctgttgtagtgcgccgctatatcggcatggtgttccagcagcccaacccgttctcgatgagcatcttcgacaatgtggccttcggcctgcgcctgaaccgctacaaaggcgacttgggcgatcgcgtgaagcacgccttgcaaggcgccgcgttgtgggacgaagtgaaggacaaactcaaggtcagtgggctgtcactgtccggtggccagcagcagcgcctgtgcatcgcccgtgccatcgccaccgagccggaagtgctgttgctggacgagccctgctcggcactcgacccgattgccacccgccgcgtggaagagctgatggtcgagctgaaaaaggactacaccatcgccctggtgacccataacatgcagcaggcgattcgtgtggccgacaccaccgcgttcttctcggtggatatttcccagggcacccgcaccggctacctagtcgagatgggcccgaccgcgcagattttccagaacccgcgcgagcagctgaccagcgactacatcagcggcaagttcagctaa

SEQ ID NO: 116567 - protein, 279 aa, Pseudomonas putida
MRKGASNLNVSTAQRAAPMVSEAPIVMDCKLDKIFYGNFMAVRDSHVPIRKNEITGFIGPSGCGKSTVLRSLNRMNDLVKGFRFEGHVHFLGQDVYGKGVDPVVVRRYIGMVFQQPNPFSMSIFDNVAFGLRLNRYKGDLGDRVKHALQGAALWDEVKDKLKVSGLSLSGGQQQRLCIARAIATEPEVLLLDEPCSALDPIATRRVEELMVELKKDYTIALVTHNMQQAIRVADTTAFFSVDISQGTRTGYLVEMGPTAQIFQNPREQLTSDYISGKFS

SEQ ID NO: 116568 - DNA, 795 bp, Shewanella oneidensis
  CDS (1)..(795): transl_table=11
atgaaaaccaatagttttgacttagcaaatttgagccaggacgataccgcactggagatccgcaacttagacctacgctatggcgacaagcaagcgttgtttaatgtgtcgatgaagatcccaaaaaagcaagtgaccgcctttatcggccctagcggttgcggtaaatctactctgctgcgttgcattaaccgtatgaatgatctggtggataactgccatatcgatggcgaaattttgctgcacggtcagaatatttatgacaagagaattgacgtagctgcactgcgccgcaacgtgggcatggtgttccagcgtccaaacccgttccctaagtcaatttacgaaaacgtagtgtacggcctgcgcctgcagggtattaacaaccgccgtgagcttgatgaagcggctgaacgctcactgcgcggcgcggcgatttgggatgaggttaaagaccgtctgcacgataacgcctttggcttatccggtggtcagcagcaacgtctggtcatcgcccgtgcgattgctatcgagccagaagtattactgctcgacgaaccgacctctgcccttgacccgatttcaaccttaaccatcgaagagttgataaccgagctaaaaaccaagtacacagtggttatcgtaactcacaacatgcaacaggcggcgcgggtatcggatcaaaccgcctttatgtatatgggtgaattggtggaatatgctgataccaataccatttttactacgccgaaaaaacgtaaaaccgaagattacattaccggacgttacggttaa

SEQ ID NO: 116569 - protein, 264 aa, Shewanella oneidensis
MKTNSFDLANLSQDDTALEIRNLDLRYGDKQALFNVSMKIPKKQVTAFIGPSGCGKSTLLRCINRMNDLVDNCHIDGEILLHGQNIYDKRIDVAALRRNVGMVFQRPNPFPKSIYENVVYGLRLQGINNRRELDEAAERSLRGAAIWDEVKDRLHDNAFGLSGGQQQRLVIARAIAIEPEVLLLDEPTSALDPISTLTIEELITELKTKYTVVIVTHNMQQAARVSDQTAFMYMGELVEYADTNTIFTTPKKRKTEDYITGRYG

SEQ ID NO: 116570 - DNA, 819 bp, Vibrio parahaemolyticus
  CDS (1)..(819): transl_table=11
atgtttaatttcgataatacattaggttatgagccaccactggacgtccataacttaacggatgaacaaacggcgatctcgatagagaaccttaatcttttctacggtcaagcgcaggcattacacgatatttcgatgcgtatcccaaaagggcgagtgacagcatttatcggcccgtctggttgtggtaaatcgacattattacgctgtatcaatcgtatgaacgacttggtggagggatgtaaagtcaccggaaaagttcgtttgcacggtaagaacgtctatcacccgaatgtcgatgtagcaacgcttaggcgtcgtgttgggatggtttttcagcgtcccaacccatttcctaagtcgatttatgagaatgtggtttatggcttacgcttacaaggtgtcaagaacagtcgcacattagatgatgcggttgagcgttcacttcgctctgctgcgttatgggatgaagtgaaagatagattgcacgaaaacgcatttggactttcgggtggtcagcagcaacgtttggttattgcacgtgcggtagcaattgaaccagaagtgctgttattggatgagccaacatcggcactggatccaatatcaactttaactattgaagaacttatcaacgagcttaagactcaatatactgtcgtgatcgttacccacaacatgcagcaagctgcgcgagtgagtgaccacaccgcattcattcacatgggtaagttgattgaatactccgacgcagactcaatcttcacatcgccaatgaagaaacagacagaagactacattactggtcgatacggctaa

SEQ ID NO: 116571 - protein, 272 aa, Vibrio parahaemolyticus
MFNFDNTLGYEPPLDVHNLTDEQTAISIENLNLFYGQAQALHDISMRIPKGRVTAFIGPSGCGKSTLLRCINRMNDLVEGCKVTGKVRLHGKNVYHPNVDVATLRRRVGMVFQRPNPFPKSIYENVVYGLRLQGVKNSRTLDDAVERSLRSAALWDEVKDRLHENAFGLSGGQQQRLVIARAVAIEPEVLLLDEPTSALDPISTLTIEELINELKTQYTVVIVTHNMQQAARVSDHTAFIHMGKLIEYSDADSIFTSPMKKQTEDYITGRYG

SEQ ID NO: 116572 - DNA, 819 bp, Vibrio vulnificus
  CDS (1)..(819): transl_table=11
atgtattctttcaatgacacattgggctatcacgcccctttagatgtgaataatctgcctgacgataaaacggccattacgattgagaacttggatctgcactatggtcaaagtcaggcactgtacgacatttcgatgcgcattcccaaagggagagtgacggcatttatcggtccgtcaggttgtggtaagtcaacgttgctgcgttgtattaatcgcatgaacgatctagtggaaggatgcaaagtgacaggcagcgttaagctgtatggcagcaatgtttacgatcctagtgtcgacgttgcaaccttaaggcgtcgggtcgggatggtgtttcaaaggcccaatccatttcctaaatccatctatgaaaatgtggtgtatggtttacgcttgcaaggtgtgaaaaatagccgaacgcttgatgacgcagtagagcgatctttacgctcggcggcgttatgggatgaagtgaaagaccgcctgcatgagaatgcctttggtctctctggtgggcaacagcagcgattggtcattgcccgagcggtcgccatcgagccagaagtgctgttattggacgaaccaacatcggctttggatcctatatcaactttaacgattgaagagcttatcaacgacctaaagactcaatatactgtggtcattgtcactcacaacatgcagcaagctgcgcgagtgagcgactatactgcctttatccacatgggtaagctcattgagtattcggacgcagataccatcttcacctctccgatgaaaaagcaaactgaagattacattactggccgctacggctag

SEQ ID NO: 116573 - protein, 272 aa, Vibrio vulnificus
MYSFNDTLGYHAPLDVNNLPDDKTAITIENLDLHYGQSQALYDISMRIPKGRVTAFIGPSGCGKSTLLRCINRMNDLVEGCKVTGSVKLYGSNVYDPSVDVATLRRRVGMVFQRPNPFPKSIYENVVYGLRLQGVKNSRTLDDAVERSLRSAALWDEVKDRLHENAFGLSGGQQQRLVIARAVAIEPEVLLLDEPTSALDPISTLTIEELINDLKTQYTVVIVTHNMQQAARVSDYTAFIHMGKLIEYSDADTIFTSPMKKQTEDYITGRYG

SEQ ID NO: 116574 - DNA, 870 bp, Anabaena variabilis
  CDS (1)..(870): transl_table=11
atgacaattttcacaaaaaactcagttcctcttagagcaagagtagaaactatgtcagccttttctttgccatctgtaaatccttctagagcagatagcgaagttattttacatgcaaaggtagaggcattttattatgatagatttttggccttacgtaatgtttaccttcctatctacaaaaacctaattacaactttaattggaccttctggctgtggtaaaagcacattactccggtgttttaatcgtctcaatgatcttattccccaaactcgcttacaagggcaaattatttttaaaggacgcaatatttatcatcctctagaagatgccgtagttctacgccgcaacattgggatggtcttccaaaagccaaatccctttccaaaatctatctataataatgttgcctttggtctccgcattcagggatatcgaggagatatagatgaaatcgttgagcattcattacgtcaggctatcctttgggatgaggtcaagaataaacttaaagaaaatgctctatctctttctggtggtcagcaacaaaggttgtgtatcgcgcgaatgctggctgtacaaccagagataattcttatggatgaaccttgctctgctcttgatccaacatcaaccaagcaaattgaagcattaataaaagaaattaagcaacaacatactattgtgattgttacccataatatgcaacaggcttcacgaatctctgatatgactgcatttttcaatactgaaatgatagaaggaagccgtactggtgaattagtcgaatatgatcacacacctgtaatttttcaaaatccaacaagagaaattactcggcaatatgtgaatggttatttcggttga

SEQ ID NO: 116575 - protein, 289 aa, Anabaena variabilis
MTIFTKNSVPLRARVETMSAFSLPSVNPSRADSEVILHAKVEAFYYDRFLALRNVYLPIYKNLITTLIGPSGCGKSTLLRCFNRLNDLIPQTRLQGQIIFKGRNIYHPLEDAVVLRRNIGMVFQKPNPFPKSIYNNVAFGLRIQGYRGDIDEIVEHSLRQAILWDEVKNKLKENALSLSGGQQQRLCIARMLAVQPEIILMDEPCSALDPTSTKQIEALIKEIKQQHTIVIVTHNMQQASRISDMTAFFNTEMIEGSRTGELVEYDHTPVIFQNPTREITRQYVNGYFG

SEQ ID NO: 116576 - DNA, 828 bp, Bacillus licheniformis
  CDS (1)..(828): transl_table=11
atggctcaggttcagatgccggttttggaaaccgtgcgcgacaatatcggaatcgctccgttccctgaagcgaaagagcatattttagaagtgaaaaatttaaatatttactatggagaaaagcgggccgtcaacgacatttccatgcgtattgacaaacatgcggtcacggctttgatcggtccgtcaggctgcggaaaatcgacttttttaagaagcatcaaccggatgaacgatctgattccatcagccagaacatccggagaaatacggtatgaagggcttaacatccttgattccaatatcaatgtcgtcaatctgagaagggagatcggcatggtatttcagaagccgaacccctttccaaaatcgatttacagcaacattacccacgcattaaaatatgcgggcgaacggcggaaatccgtgcttgatgagatcgtggaagaaagcttgacgaaagccgcgctgtgggatgaagtgaaagacaggctgcatgagtcggctctttcgctgtcaggcgggcagcagcagcgtctctgcatcgcccggacgctcgcgatgaagcccgaagtcctgctcttggatgagcctgcttcagcgctcgacccgatttcaaacgcgaaaatagaggaattaatcgtcggtttaaaagaggaatactcgatcatcattgtcacgcataacatgcagcaagcttcaagaatttccgatcaaacggcgtttttccttaacggagatttaatcgaatacgatcgtacggaaaagatttttatgaatccttcagaaaaaaagacagaggattacatcaacggcagatttggataa

SEQ ID NO: 116577 - protein, 275 aa, Bacillus licheniformis
MAQVQMPVLETVRDNIGIAPFPEAKEHILEVKNLNIYYGEKRAVNDISMRIDKHAVTALIGPSGCGKSTFLRSINRMNDLIPSARTSGEIRYEGLNILDSNINVVNLRREIGMVFQKPNPFPKSIYSNITHALKYAGERRKSVLDEIVEESLTKAALWDEVKDRLHESALSLSGGQQQRLCIARTLAMKPEVLLLDEPASALDPISNAKIEELIVGLKEEYSIIIVTHNMQQASRISDQTAFFLNGDLIEYDRTEKIFMNPSEKKTEDYINGRFG

SEQ ID NO: 116578 - DNA, 810 bp, Bacillus subtilis
  CDS (1)..(810): transl_table=11
atgtctgaacaaatggtaaaagaaaaacctgagcgagctgttattgttccgaagcagaaccacgtgcttgaggtcaaagatctgtccatttattacggaaataaacaagccgttcatcatgtaaacatggatattgaaaaaaatgcggtgactgctttaattgggccgtcgggatgcggaaaatctacttttttgagaaatattaaccgaatgaacgatttaattccatctgcaagagcggaaggtgaaatcctttatgagggattaaatatattgggcggcaatattaacgttgtcagcttgagaagagaaatcggaatggttttccaaaaaccaaatccatttccgaaatcgatctatgcgaatatcacacatgcattgaaatatgccggagagcggaataaagctgttttagatgaaattgtggaagaaagtttaacaaaagcagcgctctgggatgaggtgaaggatcgtttacattcatccgcactctcgttatccggcggccagcagcagcgtttatgcatcgcgagaacgcttgcgatgaagccggctgttcttctgcttgatgaaccagcttcagcgcttgatccgatttcaaatgcaaaaatagaggaattaattacaggattgaaaagagaatactcaattattattgtcacgcacaatatgcagcaggctctgcgggtttctgaccggacggcattctttttaaacggcgagcttgtagaatacggacagaccgaacagattttcacgagtccgaaaaagcaaaagacagaggattatattaacgggaaattcggatag

SEQ ID NO: 116579 - protein, 269 aa, Bacillus subtilis
MSEQMVKEKPERAVIVPKQNHVLEVKDLSIYYGNKQAVHHVNMDIEKNAVTALIGPSGCGKSTFLRNINRMNDLIPSARAEGEILYEGLNILGGNINVVSLRREIGMVFQKPNPFPKSIYANITHALKYAGERNKAVLDEIVEESLTKAALWDEVKDRLHSSALSLSGGQQQRLCIARTLAMKPAVLLLDEPASALDPISNAKIEELITGLKREYSIIIVTHNMQQALRVSDRTAFFLNGELVEYGQTEQIFTSPKKQKTEDYINGKFG

SEQ ID NO: 116580 - DNA, 810 bp, Enterococcus faecalis
  CDS (1)..(810): transl_table=11
atgaaagaatacaatttaaatgatacccatttacttcaactagatagccaaaaagacccgattgcgttacacacggaagacttacatgtcttttacggggacaatgaggctatcaaaggtgttgatttgcaatttgaaaagaacaaaataaccgccttaattggaccttctggttgcggtaaatccacgtatttacgttcgctaaatcgtatgaacgatggcattgccaattcacgtgttactggaaaaatcatgtataaagatgtcgatgtcaatacgaaagaagttgacgtctacgaaatgagaaaacgcattggcatggtttttcagcggcccaatccatttagtaaatctatctatgaaaatatcacattcgcattgaaacagcatggtgaaaaggataagaaaaaattagatgaaatcgttgaaacaagtttgaagcaagccgcactttgggatcaagtgaaagataacttaaacaaaagcgccttagctctgtctggtgggcaacaacaacgtttgtgtatcgctcgggcaattgcgatgaaaccagatattttattgttagatgaaccggcaagcgcgttagatccgatttcaacaggaacggttgaagaaacgttagtgaatttaaaagatgattacacgatcatcattgtgacacataacatgcaacaagcggcgcggattagtgactatacagctttcttctatatgggtaaagtcattgaatacgaccatacaagaaaaatctttacacgaccaaaaattcaagcaacggaagactacgtttcaggacattttggttag

SEQ ID NO: 116581 - protein, 269 aa, Enterococcus faecalis
MKEYNLNDTHLLQLDSQKDPIALHTEDLHVFYGDNEAIKGVDLQFEKNKITALIGPSGCGKSTYLRSLNRMNDGIANSRVTGKIMYKDVDVNTKEVDVYEMRKRIGMVFQRPNPFSKSIYENITFALKQHGEKDKKKLDEIVETSLKQAALWDQVKDNLNKSALALSGGQQQRLCIARAIAMKPDILLLDEPASALDPISTGTVEETLVNLKDDYTIIIVTHNMQQAARISDYTAFFYMGKVIEYDHTRKIFTRPKIQATEDYVSGHFG

SEQ ID NO: 116582 - DNA, 777 bp, Erwinia carotovora subsp
  CDS (1)..(777): transl_table=11
atgagtatgactactgagacatccaccaataaaatccaggtacgcgatctgaatttctactacggaaaattccatgcgttgaaaaacattacgctggatattgccgcgaatcaggttactgcgtttatcggcccgtccggctgtggtaaatccacgctgctgcgtacgctgaacaaaatgtatcagctctaccctgagcagcgcgccgaaggcgatatcctgctggatggcaataacatcctgacggataagcaagacatcgcgctgctgcgtgccaaggtgggtatggttttccagaaaccgacgccgttccctatgtccatttacgataacatcgcgtttggtgttcgcctgtttgagaaactgtcccgcgctgatatggatgaacgtgttcagtgggcgttgaccaaagcggcgctgtggcaagaaacgaaagataagctgcaccagagcggctatagcctgtccggtggtcaacagcagcgtttatgtattgcacgcggtattgcgattcgcccagatgtcttgctgctggatgaaccttgctctgcactcgatccgatttctaccggccgtattgaagagctgatctccgagctgaaaaaagattacaccgtggtcatcgtgactcacaacatgcagcaggcagcgcgttgttcagatcatacggcgttcatgtatttgggtgaactgattgagttcagcgatactgataccctgtttactgctccacggcagaaacagactgaagattacatcaccggccgttacggttga

SEQ ID NO: 116583 - protein, 258 aa, Erwinia carotovora subsp
MSMTTETSTNKIQVRDLNFYYGKFHALKNITLDIAANQVTAFIGPSGCGKSTLLRTLNKMYQLYPEQRAEGDILLDGNNILTDKQDIALLRAKVGMVFQKPTPFPMSIYDNIAFGVRLFEKLSRADMDERVQWALTKAALWQETKDKLHQSGYSLSGGQQQRLCIARGIAIRPDVLLLDEPCSALDPISTGRIEELISELKKDYTVVIVTHNMQQAARCSDHTAFMYLGELIEFSDTDTLFTAPRQKQTEDYITGRYG

SEQ ID NO: 116584 - DNA, 807 bp, Gloeobacter violaceus
  CDS (1)..(807): transl_table=11
atgagcagtgagcagcttcaagccgatcaggtgcccaccaaggccggtatcgcctacaaagtgcgcaacatggcctttttctacggcaccaagaaggccctcgataatatcagcgtcgatcttcccgccaagtcggtcacggcgattatcggcccctccggctgtggcaaatccacctttatcaaggccctcaaccgcatcgccgaggcggagaccaaggtacgcatcgacgggcaaatcgaactgttcggtcaaaacatttacgatcccaaagtcaacatcacccgtctgcgccgccgcgtcggcatggtcttccagcggcccaacccgtttccgatgaccatctacgacaacatcacctacgggccgcgggtgtttggatttaagggcaactacgacgaaatcgtcgagacgagcctgcgcagagccgccctctggaacgaagtcaaagacaaagtcaagacttcggccctcggtctttcgggcggccagcagcagcgcctgtgcatcgcacgctccctagcggtcaatcccgacgtgctcttgatggacgaaccgtgctcagccctcgacccgatcgctacgctgcgcatcgaagaactcatcgagacgctgcgcgatcagttcacgatcatcatcgtgacccacaacatgcagcaggcgggccgcgtctcccagaacaccctctttttcaacaccgacgagagccgcatcggccaactggtcgaaaatggtcccaccaaggagatcttcttttctcccaaggacaagcgcaccgaagattacatttccggccgcttcggttga

SEQ ID NO: 116585 - protein, 268 aa, Gloeobacter violaceus
MSSEQLQADQVPTKAGIAYKVRNMAFFYGTKKALDNISVDLPAKSVTAIIGPSGCGKSTFIKALNRIAEAETKVRIDGQIELFGQNIYDPKVNITRLRRRVGMVFQRPNPFPMTIYDNITYGPRVFGFKGNYDEIVETSLRRAALWNEVKDKVKTSALGLSGGQQQRLCIARSLAVNPDVLLMDEPCSALDPIATLRIEELIETLRDQFTIIIVTHNMQQAGRVSQNTLFFNTDESRIGQLVENGPTKEIFFSPKDKRTEDYISGRFG

SEQ ID NO: 116586 - DNA, 1038 bp, Halobacterium salinarium
  CDS (1)..(1038): transl_table=11
atgagtgacacaccacaatcggagccacgacgcagcgacgaccgttcgggagccgacgacgccaccgcggcggcggcgggcagcacagacgcagccgcggccgccgtctcgtcgaagacgggcggtatcgcgggcccgcctggcgggcccggtgaggtcgacggcgacgaaccggcggtcgccagaacggtcggcgagagcgacgaacagttgcaggacgcgtggaccgactacgagttcgacggggacgcgaaggtcagcgtgtccgacctggatacgtactacggcgaggagcgggcgttggagtcggtctccctggacatccccgccgagagcgtgaccgcgctcatcgggccgtcgggctgcgggaagtcgacgttcctgcggtgtttgaaccgcatgaacgaccggatcaggggggcgcgcgtcgaagggagggtggctctcgacgacagggacgtctacggtgacggcgtgaacctcgtggagctgcgccggcaggtggggatggtgttccaggagcccaacccgttcccgaagtcgatcagggacaacatctcctacgggccccggaagcatggtgacctcgaaacggggctgcttgcgcggctgctcgggcgcgacgaccgggacgcggagcgcgacctcgtcgagcgggcgctgcggcgcgcggcgctgtgggacgaggtcaacgaccgcctgggcgacaacgcgttggggctgtccgggggccaacagcagcgcctctgtatcgcgcggtgtctggccgtcgatccggacgtgatcctgatggacgagccggcgtcggccctggatccggtggcgacggcgaagatcgaggacctcatcgaggagctcgccgaggagtacaccgtcgtggtggtcacgcacaacatgcagcaggccgcccgcatcagcgaccagacggcggtgtttctcaccggcgggcggctcgcggagtacgacgcaaccgacgcgatcttccagaacccccagagccagcgcgtcgaggattacgtcgccgggaagttcgggtag

SEQ ID NO: 116587 - protein, 345 aa, Halobacterium salinarium
MSDTPQSEPRRSDDRSGADDATAAAAGSTDAAAAAVSSKTGGIAGPPGGPGEVDGDEPAVARTVGESDEQLQDAWTDYEFDGDAKVSVSDLDTYYGEERALESVSLDIPAESVTALIGPSGCGKSTFLRCLNRMNDRIRGARVEGRVALDDRDVYGDGVNLVELRRQVGMVFQEPNPFPKSIRDNISYGPRKHGDLETGLLARLLGRDDRDAERDLVERALRRAALWDEVNDRLGDNALGLSGGQQQRLCIARCLAVDPDVILMDEPASALDPVATAKIEDLIEELAEEYTVVVVTHNMQQAARISDQTAVFLTGGRLAEYDATDAIFQNPQSQRVEDYVAGKFG

SEQ ID NO: 116588 - DNA, 834 bp, Pseudomonas putida
  CDS (1)..(834): transl_table=11
atgcagcaagattcccacacccatggcatcgacatgtctgccctgggccgcaacaagcagagcctgcggatggctgaagaaaccgtggccatcgaagtgccgggcctgagcctgttctatggcgacaagcaagcgctgttcgacgtgcagatgaacatcccgaagcagcgcgtgaccgccttcatcggcccatccggctgcggcaagtcgaccctgctgcgcaccttcaaccggatgaacgacttggttgacggttgccgtgtggaaggtgccatcaacctgtacggcaacaatatctaccgcaagggcgaagacgttgccgaactgcgccggcgtgtgggcatggtgttccagaagccgaacccgttccccaagaccatctacgagaacgtggtctacggcctgcgcatccagggcatcaacaagaagcgcgtgctcgatgaagccgtcgagtgggcgttgaagggcgcggccttgtgggacgaggtcaaggaccgcctgcacgagtcggcgctgggcctgtccggtggccagcagcagcgtctggtcatcgcccgcaccattgccgtggagccggaggtgctgctgcttgacgaaccgtgctcggcgctggacccgatctcgaccttgaaggtcgaagaactgatctatgaattgaaatccaagtacaccatcgtcatcgtgacccacaacatgcagcaagcggcgcgtgtttcggattacaccgcgttcatgtacatgggcaaactggtcgaattcggggataccgataccctgttcaccaacccggcgaagaagcagaccgaagactacatcaccggtcgctacggctaa

SEQ ID NO: 116589 - protein, 277 aa, Pseudomonas putida
MQQDSHTHGIDMSALGRNKQSLRMAEETVAIEVPGLSLFYGDKQALFDVQMNIPKQRVTAFIGPSGCGKSTLLRTFNRMNDLVDGCRVEGAINLYGNNIYRKGEDVAELRRRVGMVFQKPNPFPKTIYENVVYGLRIQGINKKRVLDEAVEWALKGAALWDEVKDRLHESALGLSGGQQQRLVIARTIAVEPEVLLLDEPCSALDPISTLKVEELIYELKSKYTIVIVTHNMQQAARVSDYTAFMYMGKLVEFGDTDTLFTNPAKKQTEDYITGRYG

SEQ ID NO: 116590 - DNA, 750 bp, Thermoanaerobacter tengcongensis
  CDS (1)..(750): transl_table=11
atgaagaagatagaggtaagagacttggacttattttacggagaagtacaggctctcaaaaagataaatttggatgtggagcccaatagtgtccttgcacttattggtccttccgggtgtgggaagtctacctttatcaggactttgaacaggatgaacgacttaattgaaggcgttaaaataagtggtactgtgttgctcgatggcaaagacatttacaaggaagttgatgtgattgagcttcgcaaaaaagtggggatggtatttcagaagccaaatccttttcctatgacagtatatgacaatgtagcgtatggacccagaattcacggaataagagataaaaggactttgaatgaaatagtggagaaaagcttaaaagcagcggctttatgggatgaggtaaaagacaggcttcatcattctgctttgagcttatcaggaggtcagcagcaaagactttgcattgcaaggactttggcagtggaaccagaagttattttgatggatgagcctacatcggcgctagatcctatttctactatgaagatcgaagagttaattgaagagttgaagaaaaaatatactataataatagtaacccataacatgcaacaggcaggaagagtatctgattacacggcctttttcctaaacggtgaattagtggaatgggggcctacagatcaggtgttctacaatcctaaggataaaaggacagaggattacatcactggcagattcggctaa

SEQ ID NO: 116591 - protein, 249 aa, Thermoanaerobacter tengcongensis
MKKIEVRDLDLFYGEVQALKKINLDVEPNSVLALIGPSGCGKSTFIRTLNRMNDLIEGVKISGTVLLDGKDIYKEVDVIELRKKVGMVFQKPNPFPMTVYDNVAYGPRIHGIRDKRTLNEIVEKSLKAAALWDEVKDRLHHSALSLSGGQQQRLCIARTLAVEPEVILMDEPTSALDPISTMKIEELIEELKKKYTIIIVTHNMQQAGRVSDYTAFFLNGELVEWGPTDQVFYNPKDKRTEDYITGRFG

SEQ ID NO: 116592 - DNA, 807 bp, Anabaena variabilis
  CDS (1)..(807): transl_table=11
atggctacaaatactagcaccctcaatagcacagaaaccgtcctgaagaccgaaaatcttaatgtctactatggcaaattcctagccttacaaaacatttggttagatattcccaaaaataaagtgacagcctttatcggcccttctggttgcggcaaaagtactttgttgcgttgctacaaccgtctcaatgacctgattgaatcattccgagccgaaggtaaagtcttttattacgggaaaaatttgtatgcacaagatattgaccctgtagaagtgcgtcgtcggattgggatggtatttcaaagaccaaacccattctcaaaatcaatttatgacaatattgcttacggagccaaaattaatggtttcaaaggtaatatggacgaattggtggaacgaagcttgcgccaagcagcgttgtgggatgaggtcaaagataaactacgccaaagtggcttgtctttatctggtggacaacagcaaaggttatgtattgcgcgagcgatcgccgttcaaccagagattatcctcatggatgaaccttgttctgcgttagatcccatctctacgttacgtgtagaagaactaatccacgaactgaaagagcaatacactattgttattgttactcacaatatgcagcaagctgcccgtgtctccgacatgacagcattttttaacgtccggcctacagaaacagggggtcgtattggctacttggtagaatacgatgccacagaatcaattttcaataatcctaagcaagaagataccagagattacgttagtggcagattcggttaa

SEQ ID NO: 116593 - protein, 268 aa, Anabaena variabilis
MATNTSTLNSTETVLKTENLNVYYGKFLALQNIWLDIPKNKVTAFIGPSGCGKSTLLRCYNRLNDLIESFRAEGKVFYYGKNLYAQDIDPVEVRRRIGMVFQRPNPFSKSIYDNIAYGAKINGFKGNMDELVERSLRQAALWDEVKDKLRQSGLSLSGGQQQRLCIARAIAVQPEIILMDEPCSALDPISTLRVEELIHELKEQYTIVIVTHNMQQAARVSDMTAFFNVRPTETGGRIGYLVEYDATESIFNNPKQEDTRDYVSGRFG

SEQ ID NO: 116594 - DNA, 786 bp, Anabaena variabilis
  CDS (1)..(786): transl_table=11
atgagtaaactaattccagccattaaagtcaacaatctcagcttttattatgacacccaaaaaatacttgagggggtgtctatggagatataccagagcaaagtaactgctattattggccctagtggttgtggaaaatctaccttccttaaatgtctcaatcggatgaatgaactagagtcagaagtgcgtgtagaaggcagggtagaattttttaatcaaaatatttatgagcgtcgagttaacttgaatcggctacgccgacaagtgagtatggtacatcccaaacctaatcttttccccatgagtgtttatgataatgtggcttatggggtaaaaatagttggatggcgaccaaaattagaaatagatgatattgtagaatccgcacttaaagatgctgatttgtgggatgaaataaaacataaaatacacaaatccgcattagacctttctggtggtcaacaacaacgactttgtattgcccgtgctttagcagttaagccaaaagttttgttaatggatgagccttgttttggtcttgaccctatagctagtatgaaagtagaaagtttaattcagagtttacgtcttcgttctgaattaacgatggtgatagtcagccataatttacctcagattagtcgtatatcagatttcactgcattttttaaaggcaatgaaagtagaattggtcaattagttgaatttggtctgactaagaaaatatttaacagccctcatgattctcgcactcgtgaatatgttttaagcagacttgggtaa

SEQ ID NO: 116595 - protein, 261 aa, Anabaena variabilis
MSKLIPAIKVNNLSFYYDTQKILEGVSMEIYQSKVTAIIGPSGCGKSTFLKCLNRMNELESEVRVEGRVEFFNQNIYERRVNLNRLRRQVSMVHPKPNLFPMSVYDNVAYGVKIVGWRPKLEIDDIVESALKDADLWDEIKHKIHKSALDLSGGQQQRLCIARALAVKPKVLLMDEPCFGLDPIASMKVESLIQSLRLRSELTMVIVSHNLPQISRISDFTAFFKGNESRIGQLVEFGLTKKIFNSPHDSRTREYVLSRLG

SEQ ID NO: 116596 - DNA, 783 bp, Anabaena variabilis
  CDS (1)..(783): transl_table=11
atgaatcaacaattaatccctgcaattaaagttaaagacctgagtttttattacaacacatcaaaagccattgaagggatttcaatggatatttaccgcaataaagtaacagcaattatcggccctagtggttgcggtaagtcaacctttatcaaaaccctcaaccgtattagcgaattagaaggcccagtcaaggtagaaggggttgttgatttctttggtcaaaatatttatgacccgcgcatcaatattaatagattacgccgccaaattggtatggtttttcaaagacctaatcccttccccatgagtatttatgaaaatgtggcttatggtgtgagaatatctgctaaattaccacaagcagatttagatgaaattgttgaatctgcgctcaagggtgcagctttatggcaagaagtcaaggataagttaaataaatcagctttagggctttctggaggtcaacagcaacggctttgtattgcgcgtgctttagcgattaagccaaaagttctgttaatggatgagccttgttctgcactagaccccatcgctacgatgaaagttgaggaacttattcatagtttacgctcagaattgaccattgcgatcgtcacgcataatatgcagcaagcaactcgcgtatctgatttcacagcttttttcagtacggatgaaagtcgtattggtcaaatggtggaatttggtgtaactactcaaatctttagcaaccccctcgattctcgcacccgtgactatgtttcaggtcgctttggctaa

SEQ ID NO: 116597 - protein, 260 aa, Anabaena variabilis
MNQQLIPAIKVKDLSFYYNTSKAIEGISMDIYRNKVTAIIGPSGCGKSTFIKTLNRISELEGPVKVEGVVDFFGQNIYDPRININRLRRQIGMVFQRPNPFPMSIYENVAYGVRISAKLPQADLDEIVESALKGAALWQEVKDKLNKSALGLSGGQQQRLCIARALAIKPKVLLMDEPCSALDPIATMKVEELIHSLRSELTIAIVTHNMQQATRVSDFTAFFSTDESRIGQMVEFGVTTQIFSNPLDSRTRDYVSGRFG

SEQ ID NO: 116598 - DNA, 816 bp, Agrobacterium tumefaciens
  CDS (1)..(816): transl_table=11
atgaacatgttgtcggaagcagcagttgaaaaggcgctggacaagaaaatgaatgaagtctcatacaagatgatcggcaaggacgtttcggtttattacggcgaaaagcgtgcgctttacgacgtgaacctcaatgtccgcgaaaacacggtgactgcacttatcggcccgtccggttgcggtaaatccactttcctgcgcaccttgaaccgcatgaacgacacgatcgacggttgccgggtaaccggcaagatcacgctcgacaccgacgatatctacgatcagcagatcgatgtcgtggaacttcgtgcccgcgtcggcatggtgttccagaagccgaaccccttcccgaagacgatttacgaaaacatcgcctatggtccgcgtatccacggtctcgcccgcaacaaggcggatatggaccagatcgtcgagcatagcctgcagaaggccggtctctggaacgaagtgaaggaccgtctgctggaatccggcaccggcctttccggcggtcagcagcagcgtctgtgcatcgcccgcgcagttgccgtcagccccgaagtgatcctgatggacgagccgtgctcggcgctggacccgatcgcgaccgccaaggtcgaggaactgatccacgaactgcgcaccaattacacgatcgtcatcgtcacgcactccatgcagcaggcggcgcgtgtttcccagcgcacggccatgttccaccttggtcaccttgtcgaagaaaacgaaaccgacaagatgttcaccaatccggacgaccagcgcacgcaggactacatcatgggccgcttcggctga

SEQ ID NO: 116599 - protein, 271 aa, Agrobacterium tumefaciens
MNMLSEAAVEKALDKKMNEVSYKMIGKDVSVYYGEKRALYDVNLNVRENTVTALIGPSGCGKSTFLRTLNRMNDTIDGCRVTGKITLDTDDIYDQQIDVVELRARVGMVFQKPNPFPKTIYENIAYGPRIHGLARNKADMDQIVEHSLQKAGLWNEVKDRLLESGTGLSGGQQQRLCIARAVAVSPEVILMDEPCSALDPIATAKVEELIHELRTNYTIVIVTHSMQQAARVSQRTAMFHLGHLVEENETDKMFTNPDDQRTQDYIMGRFG

SEQ ID NO: 116600 - DNA, 858 bp, Alkalilimnicola ehrlichei
  CDS (1)..(858): transl_table=11
atggtgagcacgatgatgaacgaacagcaacagggtggcatgacccacggctacaacgtcgaggcgctgaaaaacaagcccaagtccaagccgggcaaggccaccgacacctgcttggaggtgagcgacctgcagctctggtacgggcaggacaaggtgttgaagggcgtcgacatggagatcccacgggggcggattaccgcctttatcggcccttccggctgcggcaagtccaccctgctgcgctgcttcaaccgcatgaacgacctgatcgacaactgccgcatcgagggccacatccgcatcgacggcgaagacatctacgaccgccgggtggacatccccgagctgcgccgccgggtgggcatggtcttccagaagcccaaccccttccccaagtccatctacgagaacgtggcctacggcctgcgcctgcagggcgtgcgcaaccggcgggtgctggacgaggtggtggagcgctccctcaagcgcgccgctctgtgggacgaggtgaaggaccgcctgcacgagaacgctttgggcctgagtggcggtcagcagcagcggctggtaatcgcccgcgccgtggcggtggagccggaggtgctgctgctggacgagcccgcctccgccctggacccgctggccacgctgaagatcgaggagctgatgttcgagctcaaggaggagtacaccatcgccatcgtcacccacaacatgcagcaggcggcccgggtgtccgattacaccgccttcatgtacctgggggaactggtggagttcaacgacaccgacaccctgttcactaccccggcgaagaagcagaccgaggactacattaccggtcgctatggttga

SEQ ID NO: 116601 - protein, 285 aa, Alkalilimnicola ehrlichei
MVSTMMNEQQQGGMTHGYNVEALKNKPKSKPGKATDTCLEVSDLQLWYGQDKVLKGVDMEIPRGRITAFIGPSGCGKSTLLRCFNRMNDLIDNCRIEGHIRIDGEDIYDRRVDIPELRRRVGMVFQKPNPFPKSIYENVAYGLRLQGVRNRRVLDEVVERSLKRAALWDEVKDRLHENALGLSGGQQQRLVIARAVAVEPEVLLLDEPASALDPLATLKIEELMFELKEEYTIAIVTHNMQQAARVSDYTAFMYLGELVEFNDTDTLFTTPAKKQTEDYITGRYG

SEQ ID NO: 116602 - DNA, 756 bp, Archaeoglobus fulgidus
  CDS (1)..(756): transl_table=11
atggaggtggctttcgacatcagaaacttttccgtttattacggaaacaaggttggaataaggaacgtgaaccttgaaatctacaggaacaaggttaccgccataataggcccaagcggatgcggcaagtcaacacttctgaggtctctgaacaggctcatcgagctggttgatggtgtcaggattgaaggagaggtgattttcgatggcaagaacatctacgatgatggcgtcgatgcggtggagttgagaaggagaataggcatggtcttccagcatccgaatccctttccgaagagcatatttgacaacgttgcctacggaccgagagtccacggtataaaggataaagagaggttgaaggagatcgtggaggaaagtctgaaaaaagcagctttgtgggatgaagttaaagacaggctgagcgacagcgctctggggctttcgggagggcagcagcagaggctctgcatagcgagagcaatcgcaacgaatcctgaggtcattctgtttgacgagccgacctcagccctcgacccaatagcagcggcaaaaatagaggagcttatggttgagctgaagaagaactacacggttgtggttgtaacacacaacatccagcaggctgcgaggataagcgattatgtcgccttcttctggatgggggagcttgttgagtatggtaaaacagctaaggtttttgagaaacctgagaaggaattaactgaaaagtatcttacggggagggttggatga

SEQ ID NO: 116603 - protein, 251 aa, Archaeoglobus fulgidus
MEVAFDIRNFSVYYGNKVGIRNVNLEIYRNKVTAIIGPSGCGKSTLLRSLNRLIELVDGVRIEGEVIFDGKNIYDDGVDAVELRRRIGMVFQHPNPFPKSIFDNVAYGPRVHGIKDKERLKEIVEESLKKAALWDEVKDRLSDSALGLSGGQQQRLCIARAIATNPEVILFDEPTSALDPIAAAKIEELMVELKKNYTVVVVTHNIQQAARISDYVAFFWMGELVEYGKTAKVFEKPEKELTEKYLTGRVG

SEQ ID NO: 116604 - DNA, 816 bp, Bacillus anthracis
  CDS (1)..(816): transl_table=11
atggtggcaacagtagtaaatgtacaggtgaaaaacgaggagaaaattgagactgcgccaaagaaagtagtatttgatacgaaaaacttaaatctatggtacggagaagatcatgctttaaaagatattaacttaagcattcatgagaatgaagttacggcaattatcgggccaagtggttgtggtaaatcaacttacttaaaaacattaaatcgtatggtagagttagtaccaatcgtgcgaactacaggcgtaattgaatatagagagcgcaatatatttgataaatcatacccagttgaagaattacgaacacatgtaggaatggtgttccaaaaaccaaatccatttccaaaatctatttatgaaaatgtagcatacggtccaaaaattcatggtattagcgataaaaaaacattagatgaaattgttgaaaaaagtttacgtggagcagcaatttgggatgagttaaaagatcgtttgcatgataatgcatatggtttatctggtggacagcaacagcgtctatgtatcgcacgttgtttagcgattgaaccagacgttattttaatggatgagccaacatcggcactagatccaatttcaacattaaaagtagaagaattaattcaagaattaaagaaagactttagcatcgttattgtaacacataacatgcaacaggcagcacgtatttcagataaaactgctttcttcttaagtggagaagttgtggagtatacagatacaaataaattatttacgacaccttcagataagcgtacagaagattatattacaggccgattcggttga

SEQ ID NO: 116605 - protein, 271 aa, Bacillus anthracis
MVATVVNVQVKNEEKIETAPKKVVFDTKNLNLWYGEDHALKDINLSIHENEVTAIIGPSGCGKSTYLKTLNRMVELVPIVRTTGVIEYRERNIFDKSYPVEELRTHVGMVFQKPNPFPKSIYENVAYGPKIHGISDKKTLDEIVEKSLRGAAIWDELKDRLHDNAYGLSGGQQQRLCIARCLAIEPDVILMDEPTSALDPISTLKVEELIQELKKDFSIVIVTHNMQQAARISDKTAFFLSGEVVEYTDTNKLFTTPSDKRTEDYITGRFG

SEQ ID NO: 116606 - DNA, 762 bp, Bacteroides fragilis
  CDS (1)..(762): transl_table=11
atggatacaacagtaaaaattgatgcgcgtgatgtgaacttctggtatggtgacttccatgcactgaaggggatcagtatggagattgaagaaaaatcggtagtcgcgtttataggtccttccggatgtgggaaatctacttttctacgcctttttaatcggatgaacgacttgattcctgcaacccgcctgacgggagagatccgcatagacggcgaaaacatctatgacaagggagtgcaggtggacgagctgcgtaaaaatgtaggcatggtgttccagcgtcccaatccttttccgaaaagcatttttgaaaacgtggcttacgggttgagagtgaatggagtgaaagataatgcctttatccgtcagcgggtggaggagaccctgaagggtgccgcgctttgggatgaagtgaaggacaaactgaaagaatcggcttttgccttgtccggcggacagcagcagcgcctttgtatcgcacgcgcaatggctgtatcgccttcggtgctgttgatggacgaaccggcttcggcgctcgaccctatttcgacggcaaaggtggaagagttgatacacgagttgaaagaacggtataccattgtgattgtgacgcacaatatgcagcaggctgcacgtgtcagtgataagacggcgtttttctatatggggcagatggtggagtttggcgacacgaagaagatctttacgaacccggagaaggaagcgacacaaaactatataaccggacgtttcggatga

SEQ ID NO: 116607 - protein, 253 aa, Bacteroides fragilis
MDTTVKIDARDVNFWYGDFHALKGISMEIEEKSVVAFIGPSGCGKSTFLRLFNRMNDLIPATRLTGEIRIDGENIYDKGVQVDELRKNVGMVFQRPNPFPKSIFENVAYGLRVNGVKDNAFIRQRVEETLKGAALWDEVKDKLKESAFALSGGQQQRLCIARAMAVSPSVLLMDEPASALDPISTAKVEELIHELKERYTIVIVTHNMQQAARVSDKTAFFYMGQMVEFGDTKKIFTNPEKEATQNYITGRFG

SEQ ID NO: 116608 - DNA, 759 bp, Bartonella quintana
  CDS (1)..(759): transl_table=11
atgaagattaaaatgcgtggtcaagatgtgaaagttttttacaaagacaaagaagcactccatggtattacgcttgatattcctgaacataaggttactgccttaattggcccttcagggtgcggaaagtcgacctttttgcgttgttttaatcgtatgaatgatacaattgaaggtgctaaaataacaggtcttattaccttagatggagaaaatatttatgattcgcaaattgatgttgtagaattgcgtgcgcgtgttggtatggtttttcaaaaaccttgtccttttccaaaatctatttttgagaatgttgcttatgggccacgcattcatggtttagtcaaatcgcgtgccgaattgcatgatattgttgaaaaaagtttaagacaggcaggtttatttgaagaagtaaaggatcgccttcatgaggcagggacaagtttgtcaggagggcagcaacagcgcttgtgtattgcgcgtgctattgcggttagtcctgaagttattttaatggatgagccctgttcggctcttgatccaattgcaacggcacgtattgaagaacttatcgatgcattacgaaaagattatacaatcgtcattgtgacgcattcaatgcagcaggcagcgcgtgtttctcaatatacagccatgtttcatctagggcatttggtcgaagttggtgcaactgaaatgatattcacctcaccaaaagagcaacgtacacaagattatattacggggcgttttggatag

SEQ ID NO: 116609 - protein, 252 aa, Bartonella quintana
MKIKMRGQDVKVFYKDKEALHGITLDIPEHKVTALIGPSGCGKSTFLRCFNRMNDTIEGAKITGLITLDGENIYDSQIDVVELRARVGMVFQKPCPFPKSIFENVAYGPRIHGLVKSRAELHDIVEKSLRQAGLFEEVKDRLHEAGTSLSGGQQQRLCIARAIAVSPEVILMDEPCSALDPIATARIEELIDALRKDYTIVIVTHSMQQAARVSQYTAMFHLGHLVEVGATEMIFTSPKEQRTQDYITGRFG

SEQ ID NO: 116610 - DNA, 768 bp, Bdellovibrio bacteriovorus
  CDS (1)..(768): transl_table=11
atgcagttgaatttgcgcgctgaagttaaaaatctggttttctcttacggtgataaaaaggttctgaacggcatcactttgccgatctatgaaaaccgcgtgacggctttgattggtccttccggttgcggtaagaccacgctgcttcgttgtttcaaccgcatgcacgatctgtatgccaatgcccaataccagggcgagattctgctttatccaaatcaaagtaacatcctgggtaaagacattgacccgatggaagtgcgcatgcgtatcggaatggttttccaaaagccaaatccgttcccgaaaagcatctatgacaacgtcgcctacggtctgactgttcgcggagtgaaaaagaaaagcttcatcgaagagcaggttgaaaagtccctgcagcaggcgagcctttggaatgaagtcaaagaccgtttgcattcatcggcgacagcgctttccggcggtcaacagcagcgtctgtgcatcgcacgcgcccttgcgaccgaacctgaaatcctgctgctcgatgaaccaacctccgcactggatccgatctccactcgtcacatcgaagaactgattcaagagcttcgtaaagacgtgaccatcgcgatcgtcacccacagcttgcatcaagcagcccgcgtgtctgatttcaccgccttcatgtatctgggcgacctgatcgaattcggcgccagcgaccagatcttcacgaaccccaaagatcaaagaacagaaaactacatcaccggccgcttcgggtaa

SEQ ID NO: 116611 - protein, 255 aa, Bdellovibrio bacteriovorus
MQLNLRAEVKNLVFSYGDKKVLNGITLPIYENRVTALIGPSGCGKTTLLRCFNRMHDLYANAQYQGEILLYPNQSNILGKDIDPMEVRMRIGMVFQKPNPFPKSIYDNVAYGLTVRGVKKKSFIEEQVEKSLQQASLWNEVKDRLHSSATALSGGQQQRLCIARALATEPEILLLDEPTSALDPISTRHIEELIQELRKDVTIAIVTHSLHQAARVSDFTAFMYLGDLIEFGASDQIFTNPKDQRTENYITGRFG

SEQ ID NO: 116612 - DNA, 780 bp, Bifidobacterium longum
  CDS (1)..(780): transl_table=11
atgggacaacgtattgacgtcaaccacgagaacatctattacggcgactttctggccgtggaagatgtgaacatcaacatcgagccgaacaaggtcaccgccttcatcggcccgtccggctgcggcaagtccaccgtgctgcgcaccttggaccgtatgcacgagatcatccccggcgctcacgtcgagggcgaggtgctgctcgaaggcaagaacctgtacgacaaggacgtggatccggtggccgtgcgccgcgacgtcggcatggtcttccagcgcccgaacccgttcccgaccatgtccatccgtgagaacgtgctggccggtgtgcgcctgaacaaccaccacctggccaagtccgacgccgacgatctggtcgagtgggctctgcgcggtgccaacctctgggaagaggtcaaggaccgtcttgacaaccctggcatcggcttgtccggtggccagcagcagcgtctgtgcatcgcccgcgccgtggccgtccacccgcaggtgctgctcatggatgagccctgctccgccttggacccgatttcgaccttggctgtcgaggatctgatcaacgagctcaagagcgactacaccatcgtgatcgtgacccacaacatgcagcaggccgcccgtatcgccgactacaccgccttcttcaacctgaaggcagtgggccagcccggtcacctcgagtacttcgcggacaccatcacgatgttcaacaacccgcaaaacgaagaagccgagcgctacatctctggaaggttcggctga

SEQ ID NO: 116613 - protein, 259 aa, Bifidobacterium longum
MGQRIDVNHENIYYGDFLAVEDVNINIEPNKVTAFIGPSGCGKSTVLRTLDRMHEIIPGAHVEGEVLLEGKNLYDKDVDPVAVRRDVGMVFQRPNPFPTMSIRENVLAGVRLNNHHLAKSDADDLVEWALRGANLWEEVKDRLDNPGIGLSGGQQQRLCIARAVAVHPQVLLMDEPCSALDPISTLAVEDLINELKSDYTIVIVTHNMQQAARIADYTAFFNLKAVGQPGHLEYFADTITMFNNPQNEEAERYISGRFG

SEQ ID NO: 116614 - DNA, 822 bp, Bradyrhizobium japonicum
  CDS (1)..(822): transl_table=11
atgagtgagctttccgtatcgatgagcgcggccggtgggctgccccaggcgccgctgctgccggaagcgccggccaaggtgacggtgcgcaacctcaacttctattacggcgagcaccacgcgctgaagaacatcaacctgacgctcggcaccaaccgcgtcaccgcgttcatcggcccgtccggctgcggcaagtcaaccctgctgcgcatcttcaaccggatgtacgacctctatccggggcagcgcgccaccggccagctcatgctcgaccagaccaacatcctcgacggcaagctcgacctcaacctgctgcgcgcccgcgtcggcatggtgttccagaagccgacgccgttcccgatgacgatctacgagaacatcgccttcggcatccgcctctacgagaagatctcgaagtccgagatggacgaccgcgtcgagaaggcgctgcgcggcggcgcgctgtggaacgaggtcaaggacaagctcaacgcctccggcctgtcgctctccggcggccagcagcagcgcctctgcatcgcccgcaccgtcgcggtgcggcccgaggtgatcctgttcgacgagccctgctcggcgctcgacccgatctcgaccgccaaggtcgaggagctgatccaggaattgtccgagaactacacgatcgcgatcgtcacccacaacatgcagcaggcggcgcgcgtctccgacaagaccgcgttcatgtatctcggcgagctgatcgagttcgacgacaccagcaagatcttcacgtcgccgagcgaccggcgcacgcaggattacatcaccggccggttcggctga

SEQ ID NO: 116615 - protein, 273 aa, Bradyrhizobium japonicum
MSELSVSMSAAGGLPQAPLLPEAPAKVTVRNLNFYYGEHHALKNINLTLGTNRVTAFIGPSGCGKSTLLRIFNRMYDLYPGQRATGQLMLDQTNILDGKLDLNLLRARVGMVFQKPTPFPMTIYENIAFGIRLYEKISKSEMDDRVEKALRGGALWNEVKDKLNASGLSLSGGQQQRLCIARTVAVRPEVILFDEPCSALDPISTAKVEELIQELSENYTIAIVTHNMQQAARVSDKTAFMYLGELIEFDDTSKIFTSPSDRRTQDYITGRFG

SEQ ID NO: 116616 - DNA, 762 bp, Carboxydothermus hydrogenoformans
  CDS (1)..(762): transl_table=11
atgctgtctgatgttaaaattaaagttcgggatttaaatttatattacggtaactttcaagcgttaaaaaacataagtttggatatttataaaaatgaggttacagccctaattggtccttctggatgcggaaaatcgacttttttacgaactttaaaccgcatgaatgacttaattccaggggtaagaattgaaggctcaattttatttgatggtgttgatatttataaggaaaattttgatgttgtagaacttaggaaaagagtgggaatggtttttcaatctccaaatccttttcccaagtcagtttacgaaaacgtagcttatgcacccaaaattcacgggttaaaagataagagaaaattagatgaaatcgttgaaaagagccttcgcggagcagctttgtgggatgaggtgaaagataggcttcataaacctgctaccggtttatccgggggccagcagcaaagactttgtattgcccgggcattagctattgaaccggaagtgcttttaatggatgaaccaacttcagccttggatccgatttctactatgcgaattgaagaacttattcaggaattaaagaaaaaatacacgatagtaattgttacccacaacatgcagcaggctgcgagaatttccgacagaaccgcctttttcctaaatggtgaattaattgaaatggataggaccgaggttatctttactaagccccgggatcgccgaacagaagattatattaccggtcgctttggctaa

SEQ ID NO: 116617 - protein, 253 aa, Carboxydothermus hydrogenoformans
MLSDVKIKVRDLNLYYGNFQALKNISLDIYKNEVTALIGPSGCGKSTFLRTLNRMNDLIPGVRIEGSILFDGVDIYKENFDVVELRKRVGMVFQSPNPFPKSVYENVAYAPKIHGLKDKRKLDEIVEKSLRGAALWDEVKDRLHKPATGLSGGQQQRLCIARALAIEPEVLLMDEPTSALDPISTMRIEELIQELKKKYTIVIVTHNMQQAARISDRTAFFLNGELIEMDRTEVIFTKPRDRRTEDYITGRFG

SEQ ID NO: 116618 - DNA, 774 bp, Chromobacterium violaceum
  CDS (1)..(774): transl_table=11
atgacaaccatgaccagcaccgcctccaagctcgaggtccgcgacctgaacttcttctacggcaacttccacgcgctgaagggcattcagctggagatcgcgccgcgcaaggtgaccgccttcatcggcccgtccggctgcggcaagtcgacgctgctgcgcaccttcaaccgcatgtacgagctctaccccggcctgcgcgccgagggcgagatcatgctggacggccagaacatcctggggcgcgacatcgacgtcaacctgctgcgcgccaaggtgggcatggtgttccagaagccgacgccgttcccgatgtcgatctacgacaacatcactttcggcgtgaagctgtatgagaagctgtccaagggcgagatggaggaccgcgtcgagtgggcgctgcgcaaggccgcgctgtgggacgaggtgaaggacaagctcaagcagtcgggcaactcgctgtccggcggccagcagcaacggctgtgcatcgcgcgcgcggtggcctccaaaccggaagtgctgctcttggacgagccgacctcggcgctggacccgatctccaccgcccacatcgaagagctgatccacgaactgaaagaggattacaccatcgccatcgtcacccataacatgcagcaggcggcgcgggtgtccgactacaccgcctacatgtatctgggcgagctggtggagttcggcaacaccgacaccatcttcaccaccccgcagaagaaggcgaccgaggactacatcaccggcaaattcggctga

SEQ ID NO: 116619 - protein, 257 aa, Chromobacterium violaceum
MTTMTSTASKLEVRDLNFFYGNFHALKGIQLEIAPRKVTAFIGPSGCGKSTLLRTFNRMYELYPGLRAEGEIMLDGQNILGRDIDVNLLRAKVGMVFQKPTPFPMSIYDNITFGVKLYEKLSKGEMEDRVEWALRKAALWDEVKDKLKQSGNSLSGGQQQRLCIARAVASKPEVLLLDEPTSALDPISTAHIEELIHELKEDYTIAIVTHNMQQAARVSDYTAYMYLGELVEFGNTDTIFTTPQKKATEDYITGKFG

SEQ ID NO: 116620 - DNA, 750 bp, Clostridium acetobutylicum
  CDS (1)..(750): transl_table=11
atgggcataatacaaactaaggacttaaatttatattatggaaatgttcaggcattaaaaaagataaaccttgatttcagtgctaatacggtaactgcacttataggaccgtctggctgcggaaagtcgacttttttaagaacaataaatagaatgaatgatttaataagcactgttaaaatagacggtgaggtaatgtttgagggaaaagatgtatataaggattatgatgagatagagcttagaaaaagagtaggtatggtatttcaaaagccaaatccatttcctatgtctatatatgataatgtagcctatggtcctagaatacatggaataaaaaataagggtaaattagacgaaattgtggaaagaagcttaaaaggctctgcactttgggaagaagttaaggatagattgaaaaagagtgcacttggtctttcaggaggacagcagcaaagattatgtattgctagaacacttgcagttgaaccagaagttcttcttatggatgaacctacatcggcactggatccaatatcaacacttaaaatagaagaactaatggatgaattaaaacataagtatacagtaattatagtaacccataatatgcagcaggcaggaagaatatctgataatacggctttctttttaaatggtgaagttgtagaaaatggaaaaacagaggatattttttataaaccaaaggataaaagaactgaggactatataacaggaagattcggatag

SEQ ID NO: 116621 - protein, 249 aa, Clostridium acetobutylicum
MGIIQTKDLNLYYGNVQALKKINLDFSANTVTALIGPSGCGKSTFLRTINRMNDLISTVKIDGEVMFEGKDVYKDYDEIELRKRVGMVFQKPNPFPMSIYDNVAYGPRIHGIKNKGKLDEIVERSLKGSALWEEVKDRLKKSALGLSGGQQQRLCIARTLAVEPEVLLMDEPTSALDPISTLKIEELMDELKHKYTVIIVTHNMQQAGRISDNTAFFLNGEVVENGKTEDIFYKPKDKRTEDYITGRFG

SEQ ID NO: 116622 - DNA, 765 bp, Deinococcus radiodurans
  CDS (1)..(765): transl_table=11
atgaccagtcccctcctcctgagcgcgcaagacgtgagcatctactacggcgacaaacaggccgtcaaaaacgtgaatctcgatgtgcgccctggcaccgtcaacgccttcatcgggccgtcgggctgcggcaagacgaccttcctgcgggccatcaaccgcatgcacgacctgacccccggcgcccgcgtgaccggcagcatcctgctcgacgggcaggacatctacagcccgagcgtggaccccgtcgccatgcgccgccgcgtgggtatggtgtttcaaaagcccaaccccttcccgaccatgagcgtgttcgacaacgtggtggcgggcctgaaactgaccggcgtgaaaaaccgtgaccacctgatgcaggtcgccgagcgctccctgcgcggggccgcgctgtgggacgaggtcaaagatcgcctgaacacccccgccaccggcctctcgggcgggcagcagcagcgcctgtgcatcgcccgcgcgcttgccgtggagcctgaaattctgctgatggacgaaccgacctcggcgctcgaccctgccagcaccgccaagatcgaggacctgctcggcgacctgaaaaaagtcaccaccatcatcatcgtgacccacaacatgcaccaggcggcgcgcgtgtcggacaccaccagcttcttcctggtgggcgacctggtcgaacacggccccaccgatcaggtgttcaccaacccgcgcgacgagcgcaccgaggcctacgtgtcggggcggttcggatga

SEQ ID NO: 116623 - protein, 254 aa, Deinococcus radiodurans
MTSPLLLSAQDVSIYYGDKQAVKNVNLDVRPGTVNAFIGPSGCGKTTFLRAINRMHDLTPGARVTGSILLDGQDIYSPSVDPVAMRRRVGMVFQKPNPFPTMSVFDNVVAGLKLTGVKNRDHLMQVAERSLRGAALWDEVKDRLNTPATGLSGGQQQRLCIARALAVEPEILLMDEPTSALDPASTAKIEDLLGDLKKVTTIIIVTHNMHQAARVSDTTSFFLVGDLVEHGPTDQVFTNPRDERTEAYVSGRFG

SEQ ID NO: 116624 - DNA, 768 bp, Desulfovibrio vulgaris
  CDS (1)..(768): transl_table=11
atggcagttaccagcaaagcgaagatgtacgcccaggggttgcagttctattacggcgacttcaaggcgctgcatgatatcgaccttacctttgaacagaatcaggtcacggcgctcatcgggccgtccggctgcggcaagagcaccttcctgcgttgcctcaaccgcatgaacgacctcatccccatatcccgggtggagggcgtcatcgcccttgacggtgagaacatctacgacccgaaggtcgatgtggtcgaactgcggcgcagggtgggcatggtcttccagaagcccaacccctttcccaagacggtgttcgagaacgtggcctacgggttgcgtgtgaatggcgtcaaggaccgggaatatctcgaagagaaggtggaacagagcctgcgtcatgcggccctgtgggacgaggtgaaggacaggcttcaggactctgcgctgggcctttcgggcgggcagcagcagcggctgtgcatcgcacgggcactggcagtcgaacccgaggtgctgctcatggacgagcctgcttcggcgctcgaccccatcgccacgcagaagatcgaagaactcatccacatcctcaagcagcagtacaccatcatcatcgtcacccacagcatgcagcaggcggcacgggtctctgacgtgacggcgttcttctacatggggcggctcatcgagacgggggcgacggagatcatgttcacgcggccccgcaacaaacagaccgaagactacataaccggccgattcgggtag

SEQ ID NO: 116625 - protein, 255 aa, Desulfovibrio vulgaris
MAVTSKAKMYAQGLQFYYGDFKALHDIDLTFEQNQVTALIGPSGCGKSTFLRCLNRMNDLIPISRVEGVIALDGENIYDPKVDVVELRRRVGMVFQKPNPFPKTVFENVAYGLRVNGVKDREYLEEKVEQSLRHAALWDEVKDRLQDSALGLSGGQQQRLCIARALAVEPEVLLMDEPASALDPIATQKIEELIHILKQQYTIIIVTHSMQQAARVSDVTAFFYMGRLIETGATEIMFTRPRNKQTEDYITGRFG

SEQ ID NO: 116626 - DNA, 780 bp, Edwardsiella tarda
  CDS (1)..(780): transl_table=11
atgagtaatgtagtgacagacccgaccaacagtaaaattcaggtgcgcgatctgaacttctattacggaaaattccacgcgctgaagaatatctcgctggatattgagaaaaacaaagtgacggccttcatcggtccctccgggtgcggtaagtcgacgctgctgcgtacctttaacaagatgttccagctttacccggagcagcgcgcagagggggagattttactggatggtcagaatatcctgaccgacagccaggatgtcgcgctgctgcgcgccaaggtggggatggtgtttcagaagccgacgccgtttcccatgtccatctacgacaatatcgccttcggcgtacgcctgtttgaaaagctgtcgcgggccgatatggatgagcgggtgcagtgggcgctgaccaaggcggcgctgtggagtgagacgaaagataagctgcaccaaagcggctatagcctgtctggcggccagcagcagcgtctgtgtatcgcccgcggcattgctatccgtccggaggtcttactgctggatgagccctgctctgcgctggaccctatttcgaccagccgtatcgaggagctgatcaccgagctgaagcaggactacaccgtggtgatcgtgacccacaacatgcagcaggcggcgcgctgttctgattacactgcatttatgtatcttggtgaactaattgaatttagtgatacagataagctgtttaccgcccctgcacagcggcagacggaagactatattaccggtcgctatggctga

SEQ ID NO: 116627 - protein, 259 aa, Edwardsiella tarda
MSNVVTDPTNSKIQVRDLNFYYGKFHALKNISLDIEKNKVTAFIGPSGCGKSTLLRTFNKMFQLYPEQRAEGEILLDGQNILTDSQDVALLRAKVGMVFQKPTPFPMSIYDNIAFGVRLFEKLSRADMDERVQWALTKAALWSETKDKLHQSGYSLSGGQQQRLCIARGIAIRPEVLLLDEPCSALDPISTSRIEELITELKQDYTVVIVTHNMQQAARCSDYTAFMYLGELIEFSDTDKLFTAPAQRQTEDYITGRYG

SEQ ID NO: 116628 - DNA, 774 bp, Enterobacter cloacae
  CDS (1)..(774): transl_table=11
atgagtatggttgatactgccccgggtaagattcaggttcgtgatttgaacttctactacggcaaattccatgccctgaagaacatcaacctggatatcgcgaagaaccaggtcacggcatttatcggtccgtccggctgtgggaaatccacgctgctgcgcacctttaacaaaatgtattcgctctatccggagcagcgcgctgagggtgaaatcatcctggacggtgaaaacattctgacccaggcgcaggatatcgccctgctgcgcgccaaagtggggatggtgttccagaaaccaacgcctttcccgatgtccatttatgacaacatcgcgtttggcgtgcgtctgtttgaaaaactctcccgtgccgatatggacgagcgcgtgcagtgggctttgaccaaggccgcattatggaacgaaaccaaagataagttgcaccagagcggttactctctctccggcggtcagcagcagcgtctgtgcattgcgcgcggtattgctattcgcccggaagtgttgctgctggatgagccgtgttcagcgctggacccgatctcaaccggccgtattgaagagctgatcaccgagctgaagcaggattacaccgtggttatcgtgacccataacatgcagcaggctgcgcgttgttccgatcacacggcgtttatgtacctgggcgagttgattgagttcagcgatacggacgcgctgttcaccaggcccgcgaagaaacaaaccgaagattatattactggccgctacggttga

SEQ ID NO: 116629 - protein, 257 aa, Enterobacter cloacae
MSMVDTAPGKIQVRDLNFYYGKFHALKNINLDIAKNQVTAFIGPSGCGKSTLLRTFNKMYSLYPEQRAEGEIILDGENILTQAQDIALLRAKVGMVFQKPTPFPMSIYDNIAFGVRLFEKLSRADMDERVQWALTKAALWNETKDKLHQSGYSLSGGQQQRLCIARGIAIRPEVLLLDEPCSALDPISTGRIEELITELKQDYTVVIVTHNMQQAARCSDHTAFMYLGELIEFSDTDALFTRPAKKQTEDYITGRYG

SEQ ID NO: 116630 - DNA, 819 bp, Geobacillus kaustophilus
  CDS (1)..(819): transl_table=11
atgagtacgatggcggtggtggagcgccgaaaagaggacattccttcggcccagttggtgaaaaaagaggttgtttacgaaacgaatggactgaacgtatggtatggcgagcatcatgcgttaaaacatattcacctgtctttttatgaacgcgagattacagcgattatcggcccgtcaggatgcggcaagtcaacctatatcaaaacgctcaatcgaatgatcgagctcattccaaacgtccggctcgaaggggagattttgtatcgcggccgccgcatttttgacacgtcataccctgttgaacagctgcggacgcaagtgggcatggtgtttcaaaagcccaacccgtttccaaagtcgatttatgacaacgtcgcctatgggccgcgcattcatgggatccgcgaccggcggcggctcgatgagatcgtcgaaaaaagcttgcgccaagcggcgctctgggaggaagtcaaagatcggcttcatgaaaatgccctcggtttatcgggcggccaacagcagcggctgtgcatcgcccgctgtttggccgtcgagccggatgtcattttaatggatgaaccgacatcagcgctcgatcccatttcgacagcgaaggtcgaggagttgatgggcgagctgaaaacaaaatacagcatcatcattgtcacgcataatatgcagcaggcggctcgcatttccgatcggacagcgtttttcttaaacggagaagtgattgagtacggagagacaaaaacgttgttttctcgtccagctgatcagcggacggcggattatatcgccgggcggttcggatga

SEQ ID NO: 116631 - protein, 272 aa, Geobacillus kaustophilus
MSTMAVVERRKEDIPSAQLVKKEVVYETNGLNVWYGEHHALKHIHLSFYEREITAIIGPSGCGKSTYIKTLNRMIELIPNVRLEGEILYRGRRIFDTSYPVEQLRTQVGMVFQKPNPFPKSIYDNVAYGPRIHGIRDRRRLDEIVEKSLRQAALWEEVKDRLHENALGLSGGQQQRLCIARCLAVEPDVILMDEPTSALDPISTAKVEELMGELKTKYSIIIVTHNMQQAARISDRTAFFLNGEVIEYGETKTLFSRPADQRTADYIAGRFG

SEQ ID NO: 116632 - DNA, 759 bp, Geobacter metallireducens
  CDS (1)..(759): transl_table=11
atgaacaccaaggtcaaaatcgacaaactgaatgtacacttcgggcagacccacgcggtcaaggatgtctccatcgacgtccccgaaaacaccgtcaccgccatcatcgggccgtcggggtgcggcaagtccaccatgctccgctccctcaaccggatgcacgatctctttcccaacgcccgcgtaaccggaaaggtcctcctggacggcaacgacatctatgaccgcaaggtcgatccggtctccatccggcgccgcgtcggcatggtcttccagaaaccgaaccccttccctgccatgtccatttacgataatgtggtggcagggtacaaactgaacgggcgcgtgaagaagagcgatgccgacgagatcgtcgaaaccagcctgcgccgggtggccctctgggacgaggtcaaggaccgcctcaagagcaactccatggagctctccggtggccagcagcagcggctctgcattgcccggaccattgccgtgcagccggaagtcatcctcatggacgagcccgcatcggccctcgacccgatttccaccctgaagatcgaggaactgatagaagagctgacggagaagtacaccatcatcatcgtcacccacaacatgcagcaggcggcccgggtctccgactacaccgccttcttctacatgggtgacctggtcgagtggggcgagaccaagaagcttttcaccacccccgagaagaagcagaccgaagattacattacgggacgtttcgggtag

SEQ ID NO: 116633 - protein, 252 aa, Geobacter metallireducens
MNTKVKIDKLNVHFGQTHAVKDVSIDVPENTVTAIIGPSGCGKSTMLRSLNRMHDLFPNARVTGKVLLDGNDIYDRKVDPVSIRRRVGMVFQKPNPFPAMSIYDNVVAGYKLNGRVKKSDADEIVETSLRRVALWDEVKDRLKSNSMELSGGQQQRLCIARTIAVQPEVILMDEPASALDPISTLKIEELIEELTEKYTIIIVTHNMQQAARVSDYTAFFYMGDLVEWGETKKLFTTPEKKQTEDYITGRFG

SEQ ID NO: 116634 - DNA, 807 bp, Gluconobacter oxydans
  CDS (1)..(807): transl_table=11
atgatacaggattccatgatgaccgagactgatccgcaggtggcgaaaagccctgaagtggcgctggctgtccgcaacctgaacttctactacggcgaaaaccacgccctgcacgatatttcgatcgacttcccggcccgccgtgtcacggccatgatcgggccgagcggatgtggtaaatcgacgctgctgcgggtcttcaaccgtatgtacgacctgtatcccggccagcgcgcgacgggcgaggtgattttcgacgggcgcaatgttctggagcgcgatctggatctgaacatcctgcgtgcccgcgtgggcatggtgttccagaagccgacgccgtttccgatgtcgatctatgacaacatcgctttcggtgtgcgtctgcacgagaagctgaacaaggccgagatggacgcgcgcgtgcaggacgtgctgacccgcgtggcactgtggaacgaagtccgggaccgtctgaacgctccggcttccggtctgtccggtggtcagcagcagcgtctgtgcatcgcccgttcgattgcgacacgtccggaagtgttgctcctcgacgagccgacctcggcactggatccgatctccacagcgcgcatcgaagagcttctcgacgaactcaaggaagagttcacgatcgcgatcgtgacccacaacatgcagcaggctgcgcgttgcgcggaccaggtggcattcttctatatgggacggctgatcgaagtagacagcgcggatcggatgttcaccaatccgaagcagcagcagacccaggactacatcaccggcaggtttggataa

SEQ ID NO: 116635 - protein, 268 aa, Gluconobacter oxydans
MIQDSMMTETDPQVAKSPEVALAVRNLNFYYGENHALHDISIDFPARRVTAMIGPSGCGKSTLLRVFNRMYDLYPGQRATGEVIFDGRNVLERDLDLNILRARVGMVFQKPTPFPMSIYDNIAFGVRLHEKLNKAEMDARVQDVLTRVALWNEVRDRLNAPASGLSGGQQQRLCIARSIATRPEVLLLDEPTSALDPISTARIEELLDELKEEFTIAIVTHNMQQAARCADQVAFFYMGRLIEVDSADRMFTNPKQQQTQDYITGRFG

SEQ ID NO: 116636 - DNA, 819 bp, Idiomarina loihiensis
  CDS (1)..(819): transl_table=11
atgatttcggtaaatccgagtacaagcaacttagaaaagctggacttacacaacttgccagcagaacagactgctttagatattaaaaacctggatctttactacggtgaagatcaggcgttgtatgatatttctatgcgcattccgaacaaccgcgtaacggcgtttatcggaccatcgggctgtggtaagtcaacgcttctgcgctgcattaaccgcatgaacgacttggttgaaatttgtcgtattgaggggcaaattgatatgcacggccacaatatttacggcaagaatgtcgatgttgcgtcactgcgtcgtcgtgtcggtatggtgtttcagcgccctaacccgttccctaagtctatttatgagaacgtggtttatggtctacgcttacagggtgtaaaagacaaacgagtgctggatgaagcggtagaaacgtcattgcgtggcgcagccttatgggatgaagtaaaagaccgcctaaacgccagtgctttcagtttgtcgggtggtcagcagcaacgtctggttattgcgcgttctattgccattgagccggaaattctgttgctggacgaaccaacgtctgctttggatcctatttcgactttgaccattgaagagctgatcaccgatttgaaagacaaatataccgtggttattgtcacgcacaacatgcagcaggccgcgcgcgtttcagaccagacagcgtttttgtatatgggtaaactgattgagtacgccgatactgatactctgtttacgaccccgtctgagaagcaaacagaagattatattaccggtcgttacggttaa

SEQ ID NO: 116637 - protein, 272 aa, Idiomarina loihiensis
MISVNPSTSNLEKLDLHNLPAEQTALDIKNLDLYYGEDQALYDISMRIPNNRVTAFIGPSGCGKSTLLRCINRMNDLVEICRIEGQIDMHGHNIYGKNVDVASLRRRVGMVFQRPNPFPKSIYENVVYGLRLQGVKDKRVLDEAVETSLRGAALWDEVKDRLNASAFSLSGGQQQRLVIARSIAIEPEILLLDEPTSALDPISTLTIEELITDLKDKYTVVIVTHNMQQAARVSDQTAFLYMGKLIEYADTDTLFTTPSEKQTEDYITGRYG

SEQ ID NO: 116638 - DNA, 777 bp, Methanosarcina acetivorans
  CDS (1)..(777): transl_table=11
atgactgaagctgttcaaaacgtagctcaaccccagattgaagtagaaaacctgaatctgtggtatggggaaaagcaggctcttaaaaatatctctatgcagattcccaaaaacagcgtaaccgctcttatagggccttcaggttgcggcaaatccactttcatccgctgcctgaaccgtatgaatgaccttatcaagaactgcaggatagaaggcaaagtctcaattgaggacgaggatatttatgaaaaaggcgtggatgtcgttgaactccgtaaacgcgtaggtatggttttccagaagcccaacccttttccaatgtcgatttatgacaatattgcatacgggccgcgcatacatggtgcgaataagaaagaccttggcggtattgttgaatttgctctccgttcggctgccctctggaatgaaacctcggaccggttaaagtcaactgcgctttccctgagtggggggcagcagcagaggctttgcattgcccggacccttgcagtgaaaccggaaatcatccttttcgatgaaccgtgcagtgctctcgacccgatttcgacgtcaaggatcgaagaactcatcatgaaccttaaaaaagattataccatagtaatcgtaactcataacatgcagcaggcagccagagtttcggactataccggcttttttcttatgggggaattgattgagttcgggaagacgaggcagattttccataatcctaaagagcagagtactgaggactacattaccggcaggttcgggtga

SEQ ID NO: 116639 - protein, 258 aa, Methanosarcina acetivorans
MTEAVQNVAQPQIEVENLNLWYGEKQALKNISMQIPKNSVTALIGPSGCGKSTFIRCLNRMNDLIKNCRIEGKVSIEDEDIYEKGVDVVELRKRVGMVFQKPNPFPMSIYDNIAYGPRIHGANKKDLGGIVEFALRSAALWNETSDRLKSTALSLSGGQQQRLCIARTLAVKPEIILFDEPCSALDPISTSRIEELIMNLKKDYTIVIVTHNMQQAARVSDYTGFFLMGELIEFGKTRQIFHNPKEQSTEDYITGRFG

SEQ ID NO: 116640 - DNA, 756 bp, Methanococcus maripaludis
  CDS (1)..(756): transl_table=11
atgaaaatcaaaatgaactcaaaagatgtgaatttttggtatggcgaaaaaaaggcgttaaatgatataaatctgccaatttatgaaaataaaatcactgcactaatcggcccaagtggctgtggaaaatccacattcttaagatgcctcaacaggatgaatgacctaatttcaggggttaaaattactggagaaataactctcgatgagaaaaatatttacgacaaagatgttgacgttgttgagcttagaaaaagagttggaatggtatttcaaaaaccaaacccatttccaatgagtatttacgacaatattgcatatggcccaagaatccacggaattaaagacaaaaaacagctcgatgaaatcgttgaatgggcactgaaaaaatctgcactttgggatgatgtaaaagaagacctgaaaaaatctgcactgaaactttcagggggccagcaacagaggttatgcattgcacgaaccattgcggtaaaacctgatgtaatactgatggatgagccgtgttcagcactggacccaatttcaacgctcaaaattgaagatttaatggttgaattaaagaaagaatatacaatagtaatagtaactcacaatatgcagcaagcaagccgtgtttcagattacactggatttttcatgctgggagatttagtagaatttaataaaacggataaattatttgttgaaccggaaaacaaaaaaactgaagactacattagcggaagatttggataa

SEQ ID NO: 116641 - protein, 251 aa, Methanococcus maripaludis
MKIKMNSKDVNFWYGEKKALNDINLPIYENKITALIGPSGCGKSTFLRCLNRMNDLISGVKITGEITLDEKNIYDKDVDVVELRKRVGMVFQKPNPFPMSIYDNIAYGPRIHGIKDKKQLDEIVEWALKKSALWDDVKEDLKKSALKLSGGQQQRLCIARTIAVKPDVILMDEPCSALDPISTLKIEDLMVELKKEYTIVIVTHNMQQASRVSDYTGFFMLGDLVEFNKTDKLFVEPENKKTEDYISGRFG

SEQ ID NO: 116642 - DNA, 759 bp, Moorella thermoacetica
  CDS (1)..(759): transl_table=11
atggcgcaaccgaaaattaccatcaataatttaaacttttactatggttccaacagggccttaaaggatgtcaacctggaaatacaggctcatgcggtaacagcccttatcggtccctcagggtgcggtaaatccactttcctgcggaccctgaaccgcctcaatgacctgattgatggggtccgtatctccggggaaattctcctggatgggcagaatatctacgcccccgaggtcgatgtggtggccctgcgtaagcgagtagggatggtattccagcgtcccaaccctttccccatgtccatctatgataatatcgcctacgggcccaggattcacggtataaccagtcgccgggaactggatgggattgttgaacgcagcctcaaggccgctgccctgtgggacgaagtggccggccgtttgcgccattcggccctggggttatccgggggccagcagcagcgcctttgcattgccaggcttctggccgtggaaccggaagtcgtcctgatggacgagccctcctcggccctggatcccatttccacattaaagattgaagaactaattcataacttgaaagaaaaatacaccattgtcattgtgacccataacatgcagcaggcggcccgggtttccgattatacggctttcttccttaacggggaaatggtagaatacgatgagacagagatcatctttaccaaaccccgggacaagcggacggaggattatatcaccgggcgcttcggttaa

SEQ ID NO: 116643 - protein, 252 aa, Moorella thermoacetica
MAQPKITINNLNFYYGSNRALKDVNLEIQAHAVTALIGPSGCGKSTFLRTLNRLNDLIDGVRISGEILLDGQNIYAPEVDVVALRKRVGMVFQRPNPFPMSIYDNIAYGPRIHGITSRRELDGIVERSLKAAALWDEVAGRLRHSALGLSGGQQQRLCIARLLAVEPEVVLMDEPSSALDPISTLKIEELIHNLKEKYTIVIVTHNMQQAARVSDYTAFFLNGEMVEYDETEIIFTKPRDKRTEDYITGRFG

SEQ ID NO: 116644 - DNA, 744 bp, Myxococcus xanthus
  CDS (1)..(744): transl_table=11
atggaagcgcgggagctctcccttcgctacggccccaagacggccatccacaaggtgtccctggccatcctcgaccggcgggtgacggcgctcatcggcccctccggctgtgggaagtccaccttcctgcgctccctcaaccggatgaacgacctcatctccggcaccacgcattcgggcaccatcctgctggacggcacggacatccatgaccgcggcgtggacgtggtggacctgcgccggcgcgtgggcatggtcttccagaagtccaaccccttccccaagagcatcttcgagaacgtggcctacggcctgcgcgtgggcgggatgaaggacaaggcggagctggccacgcgcgtggagaagtcactgcgcggcgccgcgctctgggacgaggtgaaggaccggctggacgaaagcgccctgggcctgtccggcggccagcagcagcgcctgtgcatcgcccgcgcgatggcggtggagccggaggtgctgctgatggacgagcccgccagcgcgttggaccccatcgccaccgcgaaaatcgaggagctcatccacgagctcaagtcgacgtacaccatcgccatcgtcacccacaacatgcagcaggccgcgcgcgtcagcgaccgcaccgctttcttctacatgggcgagctggtggaatgcggccccaccgagcagatcttcaccaacccgcgagagaagcgcaccgaggactacgtcaccggcaagttcgggtga

SEQ ID NO: 116645 - protein, 247 aa, Myxococcus xanthus
MEARELSLRYGPKTAIHKVSLAILDRRVTALIGPSGCGKSTFLRSLNRMNDLISGTTHSGTILLDGTDIHDRGVDVVDLRRRVGMVFQKSNPFPKSIFENVAYGLRVGGMKDKAELATRVEKSLRGAALWDEVKDRLDESALGLSGGQQQRLCIARAMAVEPEVLLMDEPASALDPIATAKIEELIHELKSTYTIAIVTHNMQQAARVSDRTAFFYMGELVECGPTEQIFTNPREKRTEDYVTGKFG

SEQ ID NO: 116646 - DNA, 801 bp, Nitrosomonas europaea
  CDS (1)..(801): transl_table=11
atgcaaatattcaaacctgccagcggccacactcattctactgtccagaaatcagtggtcaataaactgaacttctattacgggggttatcaggcacttaaaaatatcgatatgatggtctatgaaaaacaggtaactgccctgatcgggccgtcaggctgcggtaaatcgaccttcctccgatgtttcaaccgcatgcatgatctgtatccgcgtaaccattacgagggagagatcatcctccacccggataatgcaaacattctctcacccgaagtggatccgatcgaagtcaggatgcggatcagtatggtatttcaaaaacccaatccctttcccaagtcaatttttgagaatgtggcctatggcctcaggatacggggtgtcaaacgccgttccattctcgaggaacgggtagaaaatgcactgcgtaatgctgcattatgggaagaagtcaaagatcggcttggagatcttgccttcaatctctcgggtggccagcagcaacgactgtgtatcgcccgtgctctggcgacggatcctgaaatccttttattcgatgaacccacctctgcgctggatccaatcgcaaccgcaagtatcgaagaactgatctcggatctcaggaacaaggttacgatcctgatcgtgacccacaatatgcaacaggctgccagggtatcggactacaccgcctatatgtatatgggtgagctgatcgaatttggcgctaccgacactatcttcatcaaaccaaaaaacaaacagactgaagattacattaccggccgattcggctaa

SEQ ID NO: 116647 - protein, 266 aa, Nitrosomonas europaea
MQIFKPASGHTHSTVQKSVVNKLNFYYGGYQALKNIDMMVYEKQVTALIGPSGCGKSTFLRCFNRMHDLYPRNHYEGEIILHPDNANILSPEVDPIEVRMRISMVFQKPNPFPKSIFENVAYGLRIRGVKRRSILEERVENALRNAALWEEVKDRLGDLAFNLSGGQQQRLCIARALATDPEILLFDEPTSALDPIATASIEELISDLRNKVTILIVTHNMQQAARVSDYTAYMYMGELIEFGATDTIFIKPKNKQTEDYITGRFG

SEQ ID NO: 116648 - DNA, 777 bp, Nocardia farcinica
  CDS (1)..(777): transl_table=11
atggccaagcggatcgacgtcaaagacctcaacatctactacggcaagttccacgccgtggccgatgtctcgctgaccgtgctgccgcgcagtgtgaccgccttcatcggtccctccggctgcggtaagtccaccgtgctgcgttcgctcaaccgcatgcacgaggtgacccccaacgcccgcgtcgagggcgtcgtcgccctcgacggcgaggacatctacggcgagaacgtcgacccggtcggcgtgcgccgcaccatcggcatggtgttccagcgcccgaacccgttccccaccatgtcgattcgcgacaacgtggtggccggcctgcgcttgcagggcgtgcgcaacaagagcgagctcgacgaggtcgccgagcgctcgctgcgcggagcgaacctgtggaacgaggtgaaggaccgcctcgacaagccgggcggcggcctgtccggcggtcagcagcagcgcctgtgcatcgcccgcgcgatcgcggtctcgcccgacgtgctgctgatggacgagccctgttcggcgctggacccgatctccaccctggcgatcgaggacctgatcaccgaactgaagaaggactacacgatcgtcatcgtcacgcacaacatgcagcaggcggcgcgcgtgagcgatcagaccggcttcttcaacctggaggcccagggcaagcccggcaagctgatcgagatcgacgacaccgagaagatcttctccaaccccggccagaaggcgaccgaggactacatctcgggccgcttcggctga

SEQ ID NO: 116649 - protein, 258 aa, Nocardia farcinica
MAKRIDVKDLNIYYGKFHAVADVSLTVLPRSVTAFIGPSGCGKSTVLRSLNRMHEVTPNARVEGVVALDGEDIYGENVDPVGVRRTIGMVFQRPNPFPTMSIRDNVVAGLRLQGVRNKSELDEVAERSLRGANLWNEVKDRLDKPGGGLSGGQQQRLCIARAIAVSPDVLLMDEPCSALDPISTLAIEDLITELKKDYTIVIVTHNMQQAARVSDQTGFFNLEAQGKPGKLIEIDDTEKIFSNPGQKATEDYISGRFG

SEQ ID NO: 116650 - DNA, 828 bp, Novosphingobium aromaticivorans
  CDS (1)..(828): transl_table=11
atgaacgctgaagcgatccagaccccaatgaccgtcgacgtgaaggcggacgacaagccctacttcgacgcaccatcgaagatgagcgcgaagaacgtctcggtcttctatggcgacaagcgcgcgatcgacgatgtgtcgatcgagatcccgcagcgctacgtcaccgcgttcatcggcccgtcgggctgcggcaagtcgacgttcctgcgctctttgaaccgcatgaacgacaccatcgccaacgcccgcgtcgaaggcgaaatcctcctcgacggcgaagacatctacaagtctggcatggacgtcgtgcagcttcgcgcgcgggtcggcatggtgttccagaagccgaacccgttcccgaagtcgatctacgagaacatcgcctacggaccgaaaatccacggcatcaccggcagcaaggcggaactggacgagatcgtcgaacagtcgctgcggcgcgcgggcctgtgggacgaggtcaaggaccggctgggcgacagcggcacggcgctttccggcggccagcaacagcgcctgtgcatcgcccgggccatcgcggtcgatcccgaagtgatcctcatggacgagccctgctccgcgcttgaccccattgccaccgcgcgcatcgaggaactgatcgacgaactgcgtggccgctatgccatcgtcatcgtcacgcactcgatgcagcaggccgcccgcgtttcgcagcgcaccgcgttcttccatcttggcaagatagtggaatacggcaagacttccgacatcttcaccaatccgcgcgaggaacggacgaaggactacatcaccggtcgctacggttaa

SEQ ID NO: 116651 - protein, 275 aa, Novosphingobium aromaticivorans
MNAEAIQTPMTVDVKADDKPYFDAPSKMSAKNVSVFYGDKRAIDDVSIEIPQRYVTAFIGPSGCGKSTFLRSLNRMNDTIANARVEGEILLDGEDIYKSGMDVVQLRARVGMVFQKPNPFPKSIYENIAYGPKIHGITGSKAELDEIVEQSLRRAGLWDEVKDRLGDSGTALSGGQQQRLCIARAIAVDPEVILMDEPCSALDPIATARIEELIDELRGRYAIVIVTHSMQQAARVSQRTAFFHLGKIVEYGKTSDIFTNPREERTKDYITGRYG

SEQ ID NO: 116652 - DNA, 831 bp, Oceanobacillus iheyensis
  CDS (1)..(831): transl_table=11
atgagtttattaacagcggacaagaaggtacaagtagatattaataaaaatgataaaaaagcacctgtaaataataaaaatattgtatatgatacaaaagatcttaatttatggtacggggaaacacatgcgttaaaagatattaacctagctataaatgaaaaagaagtaactgcaattatcggaccgtctggctgtgggaaatcaacgtatataaagacattgaatcgaatggtggaattagttccgacggtaaaaacgactggaacaatcacctatagaggaaaaaatatcttagatcgctcgtttaaagtagaggatctacgtacccatgtaggtatggttttccaaaagccaaatccatttccgaagtctatatatgaaaatgtagcttatggcccaaagattcacggtattaaaaataaaaaagtactggatgagattgtagaaaaaagtttaagaggggcttctatttgggacgaagtaaaagatcgtcttaatgagaacgcgtatggactgtcaggtggacaacagcaacgtttatgtatcgcacgttgtttagcaattgaacctaatgtaattttaatggatgaaccaacatctgccctagaccctaagtcaacacttcgtatagaagaacttgtgcaggaattgaaaaaagactattccattataatagtgacccataatatgcaacaagctgcacgaatttctgataaaacagcattcttcttaaacggagaagtggtagaatttgatgatacagatcgtatctttacgaaaccttcagatcaaagaaccgaagattatatttccggtcgatttggttaa

SEQ ID NO: 116653 - protein, 276 aa, Oceanobacillus iheyensis
MSLLTADKKVQVDINKNDKKAPVNNKNIVYDTKDLNLWYGETHALKDINLAINEKEVTAIIGPSGCGKSTYIKTLNRMVELVPTVKTTGTITYRGKNILDRSFKVEDLRTHVGMVFQKPNPFPKSIYENVAYGPKIHGIKNKKVLDEIVEKSLRGASIWDEVKDRLNENAYGLSGGQQQRLCIARCLAIEPNVILMDEPTSALDPKSTLRIEELVQELKKDYSIIIVTHNMQQAARISDKTAFFLNGEVVEFDDTDRIFTKPSDQRTEDYISGRFG

SEQ ID NO: 116654 - DNA, 780 bp, Pasteurella multocida
  CDS (1)..(780): transl_table=11
atgaatactcaaattatccaacttgaagatacaaaattagaagtgaacaacctcaattttcactatggtgatttccatgcgttaaaaaatatcaatatgcgtattgcgaaacacaaagtgacggcgtttattgggccttctggctgtggtaaatcgaccttgcttcgttcgtttaatcgtatttttgagctgtatccaaaccaatacgccaccggtgaaatcaaattagacggtgaaaatttattaacttcaccaatggatatttcactgattcgcgccaaagtcggtatggtattccaaaaacctacccctttcccgatgtctatttatgacaatgtggcatttgggatccgtttattcgagaaattaagcaaagctgatctgaatgatcgcgtggaatgggcattaagcaaagcggcgttatggaatgaggtgaaagacaaattaaatcaaagtggcgacagcttatcgggcggtcaacaacaacgcttatgcattgcgcgtggcattgcgattaaaccagaagtgttactgttagatgaaccttgttccgcactcgatcctatttcaacagccaaaatcgaagaattgatttcagaactcaagcacgattataccgtggtgatggttactcataatatgcaacaagccgcgcgttgttctgattacaccgcgtttatgtatttaggtgaattgattgagtttgatgaaaccgccaaaatctttgacaaaccacgtctgcaacgcacagaagactatatcaaaggacgcatgggataa

SEQ ID NO: 116655 - protein, 259 aa, Pasteurella multocida
MNTQIIQLEDTKLEVNNLNFHYGDFHALKNINMRIAKHKVTAFIGPSGCGKSTLLRSFNRIFELYPNQYATGEIKLDGENLLTSPMDISLIRAKVGMVFQKPTPFPMSIYDNVAFGIRLFEKLSKADLNDRVEWALSKAALWNEVKDKLNQSGDSLSGGQQQRLCIARGIAIKPEVLLLDEPCSALDPISTAKIEELISELKHDYTVVMVTHNMQQAARCSDYTAFMYLGELIEFDETAKIFDKPRLQRTEDYIKGRMG

SEQ ID NO: 116656 - DNA, 777 bp, Propionibacterium acnes
  CDS (1)..(777): transl_table=11
atggcaaagcgcatcgagaccaaagacctcgacatttactacgggtccttccacgccgtcgagtcggtaaacctgatcgtcgagcctcgcactgtgacggccttcattggcccgtccgggtgtggcaagtcgacggtgctgcggaccctcaatcgcatgcacgaggtcattccaggtgcctactgcaccggcaaggtagagctcgacggggttgacctgtacggcaaaggcgtcgacccggtagccgtgcgacgcaatgttggcatggtcttccagcgagccaaccccttcccggcaatgtccatccgagataacgtcgtagcagggctgaagctcaacggcgtacgtgacaacaagttactcgatgaggcttgtgagaagtcgctacgcggcgccaacctgtgggacgaggtcaaggaccgcctggagcgctccggcgcttccctttcgggtggccagcagcaacgactgtgcatcgcccgagccattgccgtcgagcccgaggtcctactcatggacgagccctgctcggccctggacccgatctcgaccctagccatcgaggatcttgtcagtgagctcaaggagcgcttcaccgtggtgatcgtaacccacaacatgcagcaggctgcccgggtctctgatcagaccgccttctttaacctgaaagctcagggagagcccggtcgtctcgtcgagatcgacaccaccgagcgaattttctccaacccaaaggaaaaagccactgaggattacatctcgggccgcttcggctga

SEQ ID NO: 116657 - protein, 258 aa, Propionibacterium acnes
MAKRIETKDLDIYYGSFHAVESVNLIVEPRTVTAFIGPSGCGKSTVLRTLNRMHEVIPGAYCTGKVELDGVDLYGKGVDPVAVRRNVGMVFQRANPFPAMSIRDNVVAGLKLNGVRDNKLLDEACEKSLRGANLWDEVKDRLERSGASLSGGQQQRLCIARAIAVEPEVLLMDEPCSALDPISTLAIEDLVSELKERFTVVIVTHNMQQAARVSDQTAFFNLKAQGEPGRLVEIDTTERIFSNPKEKATEDYISGRFG

SEQ ID NO: 116658 - DNA, 819 bp, Prochlorococcus marinus
  CDS (1)..(819): transl_table=11
atgacagccacttcctctcctcggccaaagcagatttcaactgatccctgcatatcacttcagaacgtcactataagttacaatgaatttgaagcagtacgacatgtttactgcgagataccccgcggcaaaattacagctttaatcggaccatctggatgtggtaaatcaacaattctgcgatctctaaatcgtatgaacgatttgatagaaggatgttctcttacaggtcgagtgatgtttgatggagacgacttgtattccccaaatatcgatccagttgaggtacgccgacgcatcgggatggtatttcagcaacccaatccattccctaaaagcatctatgaaaatattgcatttggagcaagaattaatggatataaaggtgatatgaatgagcttgttgaacgctcacttcgtcaagcagctgtatgggatgaatgcaaggataagcttaaagaaagcggatgttctctatcaggtggccagcaacaaaggctatgcatagctaggacaatcgctattgaaccagaagtgattctaatggatgaaccctgttcagcccttgatcctatttctacacttaaaattgaagagacaatgcatgagttaaaaaatagatttacgattgtaattgtcactcataatatgcaacaggctgttcgagttagtgatttcacagctttcttcaatgctgaggtacaagaaggtggatcaggaaaagttggttatcttgttgagttcaatgaaacagagaaaatcttccattcacctgctcaggaggctactcagaattatatatccggccgctttggttga

SEQ ID NO: 116659 - protein, 272 aa, Prochlorococcus marinus
MTATSSPRPKQISTDPCISLQNVTISYNEFEAVRHVYCEIPRGKITALIGPSGCGKSTILRSLNRMNDLIEGCSLTGRVMFDGDDLYSPNIDPVEVRRRIGMVFQQPNPFPKSIYENIAFGARINGYKGDMNELVERSLRQAAVWDECKDKLKESGCSLSGGQQQRLCIARTIAIEPEVILMDEPCSALDPISTLKIEETMHELKNRFTIVIVTHNMQQAVRVSDFTAFFNAEVQEGGSGKVGYLVEFNETEKIFHSPAQEATQNYISGRFG

SEQ ID NO: 116660 - DNA, 834 bp, Pseudomonas aeruginosa
  CDS (1)..(834): transl_table=11
atgcaaaacgagaccgccagccacggcatcaacttcgatgcgctcggccgcgaccgccagagcctcgacctggcttccgaaagtgtcgaactggaagtgcccgggctgaacctgttctacggcgccaagcaggcccttttcgacgtccggatgaacattccgaagcagcgcgtgaccgccttcatcggcccgtccggctgcggcaagtcgaccttgctgcgctgcttcaaccggatgaacgacctggtggatggctgccgcgtcgaaggcgagattcgcctcgatggccacaacatcttcgccaagggcgtcgacgtcgccgagctgcgccgtcgcgtcggcatggtgttccagaagcccaacccgttccccaagagcatctacgagaacgtggtctacggcctgcgtatccagggcatcaacaagaagcgcgtacttgacgaggccgtcgagtgggcgctgaagggggctgcgctgtgggaggaggtgaaggatcgcctgcacgagtccgccctcggcctgtccggcggccagcagcagcgcctggtgatcgcccggaccatcgcggtggaaccggaagtgctgctgctcgacgagccgtgctcggcgctggacccgatctccacgctgaagatcgaagagctgatctacgagttgaagtcgaagttcaccatcgtcatcgttacccacaacatgcagcaggccgcgcgggtttccgactatacggcgttcatgtacatgggcaagctgatcgagttcggcgacaccgatacgctgttcaccaacccggcgaagaagcagaccgaagactacatcaccggccgctacggctag

SEQ ID NO: 116661 - protein, 277 aa, Pseudomonas aeruginosa
MQNETASHGINFDALGRDRQSLDLASESVELEVPGLNLFYGAKQALFDVRMNIPKQRVTAFIGPSGCGKSTLLRCFNRMNDLVDGCRVEGEIRLDGHNIFAKGVDVAELRRRVGMVFQKPNPFPKSIYENVVYGLRIQGINKKRVLDEAVEWALKGAALWEEVKDRLHESALGLSGGQQQRLVIARTIAVEPEVLLLDEPCSALDPISTLKIEELIYELKSKFTIVIVTHNMQQAARVSDYTAFMYMGKLIEFGDTDTLFTNPAKKQTEDYITGRYG

SEQ ID NO: 116662 - DNA, 834 bp, Pseudomonas fluorescens
  CDS (1)..(834): transl_table=11
atgcaacacgaagcacacactcatggcatcaacatgtccgccctgggccgcgacaagcagagcctgagcctggaacaggaaaccgtggccatcgaagtgcccggcctgagcctgtactacggcgagaaacaggcgctgttcgacgtcagcatgaacatccccaagcagcgcgtgaccgccttcatcggcccgtccggttgcggcaagtcgaccctgctgcggaccttcaaccgcatgaacgacctggtggacggctgccgcgtagagggtgcgatcaacctctacggcaacaacatctatcgcaagggcgaagacgtggccgagctgcgtcgccgggtcggcatggtgttccagaagcccaacccgttccccaagaccatctatgaaaacgtggtctacggcctgcgcatccagggcatcaacaagaagcgcgtgctcgacgaagccgtggaatgggccctcaagggcgcggcgctgtgggacgaggtcaaggaccgcctgcatgattcggccctgggcctgtccggcggccagcagcagcgtctggtgatcgcccggaccatcgccgtggagccggaagtgctgttgctggacgaaccctgctcggccctggacccgatctcgaccctgaaggtcgaggagctgatctatgagctcaagtccaagttcaccatcgtcatcgtgacccacaacatgcagcaggcggcgcgggtttccgactacaccgccttcatgtacatgggcaaactggtggagttcggcgataccgacacgctgttcaccaacccggcgaagaagcagaccgaagactacattaccgggcgctatggctag

SEQ ID NO: 116663 - protein, 277 aa, Pseudomonas fluorescens
MQHEAHTHGINMSALGRDKQSLSLEQETVAIEVPGLSLYYGEKQALFDVSMNIPKQRVTAFIGPSGCGKSTLLRTFNRMNDLVDGCRVEGAINLYGNNIYRKGEDVAELRRRVGMVFQKPNPFPKTIYENVVYGLRIQGINKKRVLDEAVEWALKGAALWDEVKDRLHDSALGLSGGQQQRLVIARTIAVEPEVLLLDEPCSALDPISTLKVEELIYELKSKFTIVIVTHNMQQAARVSDYTAFMYMGKLVEFGDTDTLFTNPAKKQTEDYITGRYG

SEQ ID NO: 116664 - DNA, 834 bp, Pseudomonas fluorescens
  CDS (1)..(834): transl_table=11
atgcagcacgaaacacatacccacggcatcaacatgtctgccctgggccgcgacaagcagagcctgaacctcgagcgggaaaccgtggccatcgaagtgccgggcctgagcctgttctacggcgagaaacaagcgctgtacgacgtcagcatgaacatcccgaaacagcgcgtgaccgccttcatcggcccgtcaggctgcggcaagtccacgctgctgcgtaccttcaaccgcatgaacgatctggtggacggctgccgcgtcgaaggcgcgatcaacctgtacggcaacaacatctaccgcaagggcgaagacgtggccgagctgcgtcgccgggtcggcatggtgtttcagaagcctaacccgttccccaagaccatctacgagaacgtggtctacggcctgcgcatccagggcatcaacaagaagcgcatcctcgacgaagccgtcgagtgggcgttgaaaggcgcggccttgtgggacgaagtgaaagaccgtctgcatgactcggcactcggcctgtccggtggtcagcaacagcgtctggtgatcgcccgcaccatcgccgtggaaccggaagtgctgctgctcgacgaaccgtgctcggcgcttgacccgatctcgaccctgaaagtcgaagagctgatctacgagctcaaatccaagttcaccatcgtcatcgtgacccacaacatgcagcaggcggcacgggtgtccgactacacggcgttcatgtacatgggcaaactggtggaattcggcgacaccgataccctgttcaccaatccggccaagaagcagaccgaggactacatcaccggtcgttacggctga

SEQ ID NO: 116665 - protein, 277 aa, Pseudomonas fluorescens
MQHETHTHGINMSALGRDKQSLNLERETVAIEVPGLSLFYGEKQALYDVSMNIPKQRVTAFIGPSGCGKSTLLRTFNRMNDLVDGCRVEGAINLYGNNIYRKGEDVAELRRRVGMVFQKPNPFPKTIYENVVYGLRIQGINKKRILDEAVEWALKGAALWDEVKDRLHDSALGLSGGQQQRLVIARTIAVEPEVLLLDEPCSALDPISTLKVEELIYELKSKFTIVIVTHNMQQAARVSDYTAFMYMGKLVEFGDTDTLFTNPAKKQTEDYITGRYG

SEQ ID NO: 116666 - DNA, 834 bp, Pseudomonas putida
  CDS (1)..(834): transl_table=11
atgcagcaagattctcatacccacggcatcgacatgtctgccctgggccgcaacaagcagggcctgcaactggccgaagaaaccgtggccatcgaagtgccgggcctgagcctgttctatggcgacaagcaggcgctgttcgatgtcagcatgaacattcccaagcagcgcgtgaccgccttcatcggcccgtccggctgcggcaagtcgaccctgctgcgcaccttcaaccgcatgaacgacctggttgacggctgccgcgtggaaggcgccatcaacctgtacggcaacaacatctaccgcaagggcgaagacgtggccgagctgcgccgtcgtgtgggcatggtgttccagaagcccaacccgttccccaagaccatctacgagaacgtggtctacggcctgcgtatccagggcatcaacaagaagcgtgttctggacgaagctgtcgagtgggcgctgaaaggcgcggccctgtgggacgaggtcaaggaccgcctgcacgagtcggcgctgggcctgtccggtggccagcagcagcgtctggtcatcgcccgcaccattgccgtggaaccggaagtgctgttgctcgacgaaccttgctcggcactggacccgatctcgaccctgaaggttgaagaactgatctacgaattgaaatccaagtacaccatcgtcatcgtgacccacaacatgcagcaggcggcccgggtttcggactacaccgcgttcatgtacctgggcaaactggtcgaattcggggacaccgataccctgttcaccaacccggcgaagaaacagaccgaagactacatcaccggtcgctacggctag

SEQ ID NO: 116667 - protein, 277 aa, Pseudomonas putida
MQQDSHTHGIDMSALGRNKQGLQLAEETVAIEVPGLSLFYGDKQALFDVSMNIPKQRVTAFIGPSGCGKSTLLRTFNRMNDLVDGCRVEGAINLYGNNIYRKGEDVAELRRRVGMVFQKPNPFPKTIYENVVYGLRIQGINKKRVLDEAVEWALKGAALWDEVKDRLHESALGLSGGQQQRLVIARTIAVEPEVLLLDEPCSALDPISTLKVEELIYELKSKYTIVIVTHNMQQAARVSDYTAFMYLGKLVEFGDTDTLFTNPAKKQTEDYITGRYG

SEQ ID NO: 116668 - DNA, 792 bp, Ralstonia solanacearum
  CDS (1)..(792): transl_table=11
atgaccatgactgctacgtctatcgatgtgcgcgtgcaaagcccgaagatcgatgtgcgcgacctgaacttctattacggcaagttccacgccctcaagaacatctcgctgcagattccggagaagcaggtgacggccttcatcggcccgtcgggctgcggcaagtcgacgctgctgcgcaccttcaacaagatgtacgcgctgtaccccgagcagcgcgccgagggtgagatcaacatggacggcgagaacctgctgacctcgcgcatggacatcgccctgctgcgcgccaaggtgggcatggtgttccagaagccgacgccgttcccgatgtcgatctacgacaacatcgccttcggcgtgaagctgttcgagcgcctgtcgcgctcggagatggacgaccgcgtggaatgggcgctgaccaaggcggcgctgtggggtgaagtgaaggacaagctgcaccagtcgggctacggcctgtcgggtggccagcagcagcgcctgtgcatcgcgcgcggcattgccatccgtccggaagtgttgctgctcgacgagccgtgctccgcgctggacccgatctccaccggcaagatcgaagagctgatcgccgaactgaaggatgactacacggtggtcatcgtgacgcacaacatgcaacaggcggcgcgctgctctgactacactgcctacatgtacctgggcgagctgatcgagttcggcgagaccgagaagatcttcatcaagccccgccgcaaggaaacggaagactacattaccggccgcttcggctga

SEQ ID NO: 116669 - protein, 263 aa, Ralstonia solanacearum
MTMTATSIDVRVQSPKIDVRDLNFYYGKFHALKNISLQIPEKQVTAFIGPSGCGKSTLLRTFNKMYALYPEQRAEGEINMDGENLLTSRMDIALLRAKVGMVFQKPTPFPMSIYDNIAFGVKLFERLSRSEMDDRVEWALTKAALWGEVKDKLHQSGYGLSGGQQQRLCIARGIAIRPEVLLLDEPCSALDPISTGKIEELIAELKDDYTVVIVTHNMQQAARCSDYTAYMYLGELIEFGETEKIFIKPRRKETEDYITGRFG

SEQ ID NO: 116670 - DNA, 804 bp, Rhizobium loti
  CDS (1)..(804): transl_table=11
atgagccagatgttgtctccagacatgacgatcgccgccgaggcggtgaccaaggccaagatcgaggtcaagaacctcaacttctactacggccagtcgaaggcgctgaaggatatcacgctatcgctgcccgagcgcagcgtcaccgccttcatcggcccgtcgggttgcggaaagtcgacgctgctgcgcgtcttcaaccgcatctacgagctctatcccaagcagaccgccgagggccaggtgctgctcgacggccagaacgttctcgaccgttcgcaggacctcaacctgctgcgcaccaagatcggcatggtgttccagaagccgacgccgttcccgatgtcgatctacgaaaacatcgctttcggcgtcaggctctacgagaagatcagcaaggccgagatggacggccgtgtcgagcaggcgctgaagcgcgcggcactgtggaccgaggtcaaggacaagctcaatgccagcggcctcagcctgtcgggcggccagcagcagcggctgtgcatcgcccgcaccgtggcggtgaagccggaggtcatcctgctcgacgagccggcctcggcgctcgacccgctgtcgaccgccaagatcgaggaactgatcgacgagctgcaggccgactacacgatcgtcatcgtcacccacaacatgcagcaggcggcgcgcgtgtcgaagcagacggcctttatgtatctgggcgaactggttgaattcgaccgcaccgagaagatcttcacgtcgcctcgcgagaagcgcacgcaagactacatcaccggccgcttcggctga

SEQ ID NO: 116671 - protein, 267 aa, Rhizobium loti
MSQMLSPDMTIAAEAVTKAKIEVKNLNFYYGQSKALKDITLSLPERSVTAFIGPSGCGKSTLLRVFNRIYELYPKQTAEGQVLLDGQNVLDRSQDLNLLRTKIGMVFQKPTPFPMSIYENIAFGVRLYEKISKAEMDGRVEQALKRAALWTEVKDKLNASGLSLSGGQQQRLCIARTVAVKPEVILLDEPASALDPLSTAKIEELIDELQADYTIVIVTHNMQQAARVSKQTAFMYLGELVEFDRTEKIFTSPREKRTQDYITGRFG

SEQ ID NO: 116672 - DNA, 816 bp, Rhizobium meliloti
  CDS (1)..(816): transl_table=11
atgaacatcatgtcggaagctgcagtcgaaaaggctcttgaccagaaaatgaatacggtgccttacaagatgatcggcaatgatgtgtcggtctattacggcgaaaagcgcgcgctcttcgacgtcaacctcaacatccgcgagaacacggtcacggcgctgatcggtccctcagggtgcggcaaatcgacgtttctgcgcactttgaaccgcatgaacgacacgatcgagaactgccgcgtgaccggcaagatcacgctcgacgaggacgacatctatgatccgtcgatcgacgtggtggagctgcgcgcccgggtcggcatggtgttccaaaaacccaatccgttcccgaagtcgatctacgacaatgtctcctacgggccgcgcatccatggcctggcacgcaccaaggccgaactcgacgaggtcgtggaaacgagcctgcagaaggccgggctctggaacgaggtgaaggatcggctgcaggagccgggcaccggcctatccggcggtcagcagcagcgcctctgcatcgcccgcgccgtcgcggtcagcccggaagtcatcctgatggacgagccctgctcggcgctcgatcccatcgcgactgcgaaagtcgaggaactcatccacgaattgcgggcgaatttcacgatcgtgatcgtcacccactcgatgcagcaggcggcgcgcgtgtcgcagcgcacggccatgttccatctcggcaatctcgtcgaggagaacgataccgacaaaatgttcaccaacccggacgatcagcgcacccaggactacatcatgggccgcttcggctga

SEQ ID NO: 116673 - protein, 271 aa, Rhizobium meliloti
MNIMSEAAVEKALDQKMNTVPYKMIGNDVSVYYGEKRALFDVNLNIRENTVTALIGPSGCGKSTFLRTLNRMNDTIENCRVTGKITLDEDDIYDPSIDVVELRARVGMVFQKPNPFPKSIYDNVSYGPRIHGLARTKAELDEVVETSLQKAGLWNEVKDRLQEPGTGLSGGQQQRLCIARAVAVSPEVILMDEPCSALDPIATAKVEELIHELRANFTIVIVTHSMQQAARVSQRTAMFHLGNLVEENDTDKMFTNPDDQRTQDYIMGRFG

SEQ ID NO: 116674 - DNA, 822 bp, Rhodopseudomonas palustris
  CDS (1)..(822): transl_table=11
atgaccgagatctcgatcgccaccagcgttccgtccgcgatgccgccgatcggcgcccagccggacggcccagccaaggtgaccgtacgcgacctcaatttctactacggtcagaaccatgcgctgaagcacatcaatctcgcgctcgccaccaaccgggtcaccgccttcatcggcccgtcgggctgcggcaagtcgaccctgctgcgcatcttcaaccggatgtatgatctgtatccgggtcagcgcgccgaagggcaggtgctgctcgacaacgccaacatcctcgaccccaagctcgacctcaacctactgcgggcccgggtcggcatggtgttccagaagccgacgccgtttccgatgacgatctacgagaacatcgcgttcggcgtccgcctctacgagaagatctccaagtcggagatggacgggcgggtcgagaaggcgctgcgcggcgccgcgctgtggaacgaggtcaaggacaagctgaacgcctcgggcctcagcctgtccggcggccagcagcagcggctgtgcatcgcccgcaccatcgcggtgcggcccgaagtgatcctgttcgacgagccgtgctcggcgcttgacccgatctccaccgccaagatcgaggagctgatcgacgagctgaaggaacagtacacgatcgcgatcgtcacccataacatgcagcaggcggcgcgcgtgtcggaatcgactgctttcatgtatctcggcgagctgatcgagttcggcccgaccaacaagatcttcacctcgccgagcgatcggcgcacccaggactacatcaccggccggttcggctga

SEQ ID NO: 116675 - protein, 273 aa, Rhodopseudomonas palustris
MTEISIATSVPSAMPPIGAQPDGPAKVTVRDLNFYYGQNHALKHINLALATNRVTAFIGPSGCGKSTLLRIFNRMYDLYPGQRAEGQVLLDNANILDPKLDLNLLRARVGMVFQKPTPFPMTIYENIAFGVRLYEKISKSEMDGRVEKALRGAALWNEVKDKLNASGLSLSGGQQQRLCIARTIAVRPEVILFDEPCSALDPISTAKIEELIDELKEQYTIAIVTHNMQQAARVSESTAFMYLGELIEFGPTNKIFTSPSDRRTQDYITGRFG

SEQ ID NO: 116676 - DNA, 774 bp, Salmonella paratyphi
  CDS (1)..(774): transl_table=11
atgagtatggttgaaactgccccgagtaagattcaggttcgtgatttgaacttctactacggcaaattccatgccctgaagaacattaatctggatatcgcgaagaatcaggtaacggcatttatcgggccatccggctgcggtaaatcaacgctactgcgtaccttcaataaaatgtattcgctttatccggagcagcgcgcggaaggtgaaattctgctggatggcgacaatattctcaccaacacccaggatatcgcgctactgcgcgcaaaagtggggatggtattccagaagccgacgccgttcccgatgtccatctatgacaatatcgcctttggcgtgcgtctgtttgagaagctgtctcgcgccgatatggacgagcgcgtgcagtgggcgttgaccaaagccgcattatggaacgaaaccaaagataaattgcaccagagcgggtactctctctccggtggtcagcagcagcgcctgtgcattgcgcgcggtatcgccattcgcccggaagtgctgctgctggatgagccatgctcagctctggatccgatctctaccgggcgtattgaagagctgatcaccgagctgaaacaggattacaccgtggtgatcgtgacccacaacatgcagcaggcggcacgttgctccgatcatacggcgtttatgtacctgggcgagttgattgagttcagcaacacggacgatctgttcaccaagcccgcgaagaaacaaacagaagactatatcaccggtcgttacggttaa

SEQ ID NO: 116677 - protein, 257 aa, Salmonella paratyphi
MSMVETAPSKIQVRDLNFYYGKFHALKNINLDIAKNQVTAFIGPSGCGKSTLLRTFNKMYSLYPEQRAEGEILLDGDNILTNTQDIALLRAKVGMVFQKPTPFPMSIYDNIAFGVRLFEKLSRADMDERVQWALTKAALWNETKDKLHQSGYSLSGGQQQRLCIARGIAIRPEVLLLDEPCSALDPISTGRIEELITELKQDYTVVIVTHNMQQAARCSDHTAFMYLGELIEFSNTDDLFTKPAKKQTEDYITGRYG

SEQ ID NO: 116678 - DNA, 783 bp, Sphingopyxis alaskensis
  CDS (1)..(783): transl_table=11
atgacaaacgacgatcttaccatcaccgatcccaagatgcgggcgcagggcgtcaacgtcttttatggcgacaaacaggcgatcaacaatgtgtcgatcgacgtcggcaccgatctggtcaccgccttcatcggcccgtcgggatgcggcaaatcgaccttcctgcggtccttgaaccgcatgaacgatacggtcgccagcgcgaaggtgacgggcaagatcgaactcgacggcgaggatatttatgcgccgtcgatggacgtggtgcagttgcgcgcgcgcgtcggcatggtgttccagaaaccgaacccctttcccaagtcgatctatgacaatgtcggctatggcccgcgcatccacgggctggcgccgtcgaaggccgacctcgacgtcgtcgtcgagcgcgcgctggtgcgcgccgggctgtgggacgaggtcaaggaccgcctcaatgaaagcggcaccgccttgtcggggggccagcagcagcgcctgtgcatcgcgcgcgcgatcgcggtcgatcccgaagtcattttgatggacgaaccctgctcggcgctcgacccgatcgcaaccgcaaagatcgaggagctgatccacgaactgcgcggcaaatatgctatcgtgatcgtcacgcataacatgcagcaggcggcgcgcgtgtcgcagcgcaccgcctttttccacctcgggacgttggtcgaatatggcaagaccaccgacatattcaccaacccgaagcaggaacgcaccaaggattatatcacgggtcgctatggttga

SEQ ID NO: 116679 - protein, 260 aa, Sphingopyxis alaskensis
MTNDDLTITDPKMRAQGVNVFYGDKQAINNVSIDVGTDLVTAFIGPSGCGKSTFLRSLNRMNDTVASAKVTGKIELDGEDIYAPSMDVVQLRARVGMVFQKPNPFPKSIYDNVGYGPRIHGLAPSKADLDVVVERALVRAGLWDEVKDRLNESGTALSGGQQQRLCIARAIAVDPEVILMDEPCSALDPIATAKIEELIHELRGKYAIVIVTHNMQQAARVSQRTAFFHLGTLVEYGKTTDIFTNPKQERTKDYITGRYG

SEQ ID NO: 116680 - DNA, 876 bp, Staphylococcus epidermidis
  CDS (1)..(876): transl_table=11
atggctaattcacaagtagcagaaaaagagaaactagacgcacaaacaaataatcaagactcagttgccacaatagtaactactgaaaacaataagaaaaatacaattccagacagtgaaaagaagattgtttattcaactcaaaatctagatttatggtatggagaaaatcatgcgttacaaaacattaatttagatatattggaaaataatgtaactgcaataatcggaccttctggatgtggtaaatctacatacatcaaagctttaaatagaatggtcgaattagttccatctgtgaaaactgcaggtaaaattttgtatcgtgaccaaaatatatttgatgcaaagtattctaaagaaaagctacgtactaacgttggaatggtctttcaacaacctaacccattccctaagtcaatttatgataatattacttatggccctaagactcacggtattaaaaacaaaaaaattctagatgaaatcgtagaaaaatcattacgtggcgctgcaatatgggatgaattaaaagatagattgcatacaaatgcttatggattatcaggtggacaacaacaacgtgtttgtatagctagatgtttagcaattgaaccagatgtcattttaatggatgaacctacatcagcattagatcctatttctacgttaagagttgaagaacttgtacaagaattaaaagaaaattactcaattatcatggttacgcacaacatgcaacaagctgcgcgtgtttcagataaaactgctttcttcttaaatggatatgtcaatgaatatgatgatactgataaaatcttttcaaatcctgccgacaaacaaactgaagattatatatctggtcgttttggataa

SEQ ID NO: 116681 - protein, 291 aa, Staphylococcus epidermidis
MANSQVAEKEKLDAQTNNQDSVATIVTTENNKKNTIPDSEKKIVYSTQNLDLWYGENHALQNINLDILENNVTAIIGPSGCGKSTYIKALNRMVELVPSVKTAGKILYRDQNIFDAKYSKEKLRTNVGMVFQQPNPFPKSIYDNITYGPKTHGIKNKKILDEIVEKSLRGAAIWDELKDRLHTNAYGLSGGQQQRVCIARCLAIEPDVILMDEPTSALDPISTLRVEELVQELKENYSIIMVTHNMQQAARVSDKTAFFLNGYVNEYDDTDKIFSNPADKQTEDYISGRFG

SEQ ID NO: 116682 - DNA, 777 bp, Streptomyces avermitilis
  CDS (1)..(777): transl_table=11
atggccaagcgaatcgacgtgagcggtctcaccgcctactacggctcccacaaggcgatcgaagacatctcgatgacggtcgagcccaggtcggtgacggcgttcatcggtccgtccggctgcggcaagtcgacgttcctgcgcacgctcaaccgtatgcacgaggtcacccccggcggccgcgtcgagggcaaggtgctgctggacgacgaggacctgtacgggcagggcatcgacccggtgtcggtgcggcgcgaggtcggcatggtcttccagcgcccgaacccgttccccacgatgtcgatcttcgacaacgtggcggcgggcctgcgcctgaacggctcgtacaagaagtccgagctgagcgagatcgtcgagaagtccctcaagggcgcgaacctctggaacgaggtcaaggaccgcctgaacaagcccggctcgggcctgtcgggcggccagcagcagcgcctgtgcatcgcccgcgcgatcgcggtggagcccaacgtgctgctgatggacgagccctgctcggcgctcgaccccatctccaccctcgcgatcgaggacctgatcggcgagctgaaggagcgcttcacgatcgtcatcgtgacgcacaacatgcagcaggcggcccgtgtctcggaccgcaccgccttcttcaacctggccgccgtcggccagcccggcaggctcatcgaggtcgacgagacggagcggatcttctccaacccgtcggtccaggccacggaggactacatctccggccgcttcggctga

SEQ ID NO: 116683 - protein, 258 aa, Streptomyces avermitilis
MAKRIDVSGLTAYYGSHKAIEDISMTVEPRSVTAFIGPSGCGKSTFLRTLNRMHEVTPGGRVEGKVLLDDEDLYGQGIDPVSVRREVGMVFQRPNPFPTMSIFDNVAAGLRLNGSYKKSELSEIVEKSLKGANLWNEVKDRLNKPGSGLSGGQQQRLCIARAIAVEPNVLLMDEPCSALDPISTLAIEDLIGELKERFTIVIVTHNMQQAARVSDRTAFFNLAAVGQPGRLIEVDETERIFSNPSVQATEDYISGRFG

SEQ ID NO: 116684 - DNA, 777 bp, Streptomyces coelicolor
  CDS (1)..(777): transl_table=11
atggccaagcgcatagatgtcagcggcctcaacgcctactacggctccttcctggccatcgaggacatctcgatgaccgtcgagccccgctccgtgacggccttcatcggcccctccggctgcggcaagtccaccttcctgcgcacgctcaaccgcatgcacgaggtcaccccgggcggccgcgtcgacggcaaggtgatgctcgacgacgagaacctctacggcgcgggcatcgacccggtggccgtgcgccgcgaggtcggcatggtcttccagcgcccgaacccgttccccacgatgtcggtgtacgacaacgtggcggcgggcctgcgcctgaacggcaagtacaagaagtcccagctggacgacgtcgtcgagaagtcgctgcgcggcgccaacctctggaacgaggtcaaggaccgtctgaacaagccgggctccggcctctccggcggccagcagcagcgcctgtgcatcgcccgcgcgatcgcggtcgagcccaacgtgctcctgatggacgagccctgctccgccctcgacccgatctccaccctcgccatcgaggacctgatcggcgagctgaaggagcgcttcacgatcgtcatcgtgacgcacaacatgcagcaggcggcgcgcgtctcggaccgtacggcgttcttcaacctggcggcggtcggccagcccggcaagctgatcgagatcgacgagacggagcgcatcttctccaacccgtcggtccaggccacggaggactacatctccggccgcttcggctag

SEQ ID NO: 116685 - protein, 258 aa, Streptomyces coelicolor
MAKRIDVSGLNAYYGSFLAIEDISMTVEPRSVTAFIGPSGCGKSTFLRTLNRMHEVTPGGRVDGKVMLDDENLYGAGIDPVAVRREVGMVFQRPNPFPTMSVYDNVAAGLRLNGKYKKSQLDDVVEKSLRGANLWNEVKDRLNKPGSGLSGGQQQRLCIARAIAVEPNVLLMDEPCSALDPISTLAIEDLIGELKERFTIVIVTHNMQQAARVSDRTAFFNLAAVGQPGKLIEIDETERIFSNPSVQATEDYISGRFG

SEQ ID NO: 116686 - DNA, 777 bp, Streptomyces griseus
  CDS (1)..(777): transl_table=11
atggccaagcgcatcgacatcagcggcctcagcgccttctacggcaaccacaaggccatcgaggacatctcgatgaccgtggagccccgctccgtgaccgccttcatcggcccgtccggctgcggcaagtccaccttcctgcgcaccctgaaccggatgcacgaggtgacccccggcggccgcgtcgagggcaaggtgctgctggacgacgagaacctctacgactccaacgtcgacccggtcaccgtgcgccgcacggtgggcatggtcttccagcgcccgaaccccttccccaccatgtcgatcttcgacaacgtggcggcgggcctgcggctgaacggcagctaccgcaagagcgagctgaacgacgtcgtggagaagtccctgcgcggcgcgaacctctggaacgaggtcaaggaccgcctcaacaagcccggctccggcctctccggcggccagcagcagcgcctgtgcatcgcccgcgccatcgcggtcgagccgcaggtcctgctgatggacgagccgtgctcggcgctggacccgatctcgacgctcgccatcgaggacctgatcggcgagctgaaggagcgcttcacgatcgtcatcgtgacgcacaacatgcagcaggcggcccgcgtctcggaccgcacggcgttcttcaacctcgccgcggtcggcaagcccggccggctcatcgagatagacgagacggagcggatcttctccaacccgtcggtccaggccacggaggactacatctccggccgcttcggctga

SEQ ID NO: 116687 - protein, 258 aa, Streptomyces griseus
MAKRIDISGLSAFYGNHKAIEDISMTVEPRSVTAFIGPSGCGKSTFLRTLNRMHEVTPGGRVEGKVLLDDENLYDSNVDPVTVRRTVGMVFQRPNPFPTMSIFDNVAAGLRLNGSYRKSELNDVVEKSLRGANLWNEVKDRLNKPGSGLSGGQQQRLCIARAIAVEPQVLLMDEPCSALDPISTLAIEDLIGELKERFTIVIVTHNMQQAARVSDRTAFFNLAAVGKPGRLIEIDETERIFSNPSVQATEDYISGRFG

SEQ ID NO: 116688 - DNA, 783 bp, Thiobacillus denitrificans
  CDS (1)..(783): transl_table=11
atgtccgatcaagtcatgccgaccggtcagaatcccgcgctgcaaatccgcaatctggatttcttctacggcgatttcaaaggcctcaagaacgtcaatctcgacatcgcgcagaagaaggtgacggcctttatcggtccgtccggttgcggcaagtccacgctgttgcgtacgttcaaccgcatgtacgacctgtatccgggacagcgcgccgagggggaaatcctctttcacggcaagaacctgctcgaaaaaagccaggacgttaacctcgtgcgcgccaagatcggtatggtgtttcagaaaccgacgccgttcccgatgacgatctatgaaaacatcgcgttcggcgtgcgcctttatcagcgcatgtcggggagcgcgatggacgatcgcgtggagtgggcgctcaagaaagccgcgctctggggcgaggtcaaggacaagctcaatcagagcggcctgtcgttgtcgggcgggcagcagcagcgtctgtgcatcgcgcgcgccgtcgccgtcaaacccgaaatcgttctgctcgacgagccgacttccgcgctggatccgatatcgacggccaagatcgaggaactcatcaacgagttgaagagcgactacacgatcgcgatcgtcacccacaacatgcagcaggcggcgcgaatttcggactacacggcgttcatgtacctcggagagctgatcgaattcaacgagaccgggacgattttcatgcggcccggcaagaagcagaccgaagactacatcaccggtcgtttcggttga

SEQ ID NO: 116689 - protein, 260 aa, Thiobacillus denitrificans
MSDQVMPTGQNPALQIRNLDFFYGDFKGLKNVNLDIAQKKVTAFIGPSGCGKSTLLRTFNRMYDLYPGQRAEGEILFHGKNLLEKSQDVNLVRAKIGMVFQKPTPFPMTIYENIAFGVRLYQRMSGSAMDDRVEWALKKAALWGEVKDKLNQSGLSLSGGQQQRLCIARAVAVKPEIVLLDEPTSALDPISTAKIEELINELKSDYTIAIVTHNMQQAARISDYTAFMYLGELIEFNETGTIFMRPGKKQTEDYITGRFG

SEQ ID NO: 116690 - DNA, 822 bp, Trichodesmium erythraeum
  CDS (1)..(822): transl_table=11
atgctagagcatcaaacaaatacttatcaacagaattctactcctgctctttcagcagaaaaccttagcattttttatggtgattttaaagccctaaaagatatttcaatgagaattcctaagaataaagtaactgcttttatcggaccttcaggttgtggtaaaagtacattattacgatgctttaatcgtctcaatgatttgattgatattttccgcttagaaggtcgtattctttatcataatcaaaatatttacgacccagatattgaccctgtagaaattcgccgtcacatcggtatggtttttcaaaaacccaatccttttcctaagtcaatttacgataacattgcttatggagtaagagtgaatggtttggctaaatctaaagaagaaatggatgagatagtcgagcgatcgctaaggcaagcagttttatgggatgaggtcaaggataaattaggacaaagtggttttgctctatctggaggtcaacaacaacgtttgtgtattgctcgtgcagttgctattagtccagatgtagttttaatggatgaaccttgtgcttccctggatcctatttcaactgtgaaagtagaagagttaattaacgaactcaggcaaaaatatactattattatagtgactcataatatgcagcaagctactcggatagctgacttaactgctttttttaatgccaaagctgtagaaagtggccaacgttttggttatttggttgaatttgataaaactaacaatatttttcaaaacccaagggaaaaagccactcaagattatgtaagtggtcgttttggctaa

SEQ ID NO: 116691 - protein, 273 aa, Trichodesmium erythraeum
MLEHQTNTYQQNSTPALSAENLSIFYGDFKALKDISMRIPKNKVTAFIGPSGCGKSTLLRCFNRLNDLIDIFRLEGRILYHNQNIYDPDIDPVEIRRHIGMVFQKPNPFPKSIYDNIAYGVRVNGLAKSKEEMDEIVERSLRQAVLWDEVKDKLGQSGFALSGGQQQRLCIARAVAISPDVVLMDEPCASLDPISTVKVEELINELRQKYTIIIVTHNMQQATRIADLTAFFNAKAVESGQRFGYLVEFDKTNNIFQNPREKATQDYVSGRFG

SEQ ID NO: 116692 - DNA, 804 bp, Xylella fastidiosa
  CDS (1)..(804): transl_table=11
atgcaacgcattgccatcccggcctctgcaaatgcgccactgacgacaaccccagtcaaaattgctatacgtaaccttgagttctactacggtacgttccaggcactaaagcaaattaatttagaaatccctgaaaagcgtgtaactgccctgattggcccatcaggctgtgggaagtcgacgctactacgcattttcaaccggatctatgcgctatatccaaaactggaggcacgcggtgaggtactcttagacggcgaaaatatcctatcgccgaaatactcgataaaccgactgcgcagcaaggtaggcatggtgtttcaaaaacctgtgccattccccatgacaatttacgagaatgttgcctacggcatccgtcatcatgaggtgatgtccaaaagtcaaatgaatgaccgcgtcgagcaagcactacaacaaagtgctttgtgggaagaggtcaaagacaagttgaatcaaaatgcactgggcctgtccgggggccaacagcaacgcctatgcatcgcacgcgcaatcgcactaacaccatcggtactactgcttgatgaaccaacttcagcattagacccgatctcaaccagccgcatagaacagctgattgaagaactaaaaactaaatacaccatcgtgatcgtcacccacaacatgcaacaagctgcgcgcgtatcagattacactggcttcatgtatctaggcgacctgattgaacacgaccgcaccgagaccatcttttcacagccatccaaacaacagaccgaagattacatcactggtcgatttggctaa

SEQ ID NO: 116693 - protein, 267 aa, Xylella fastidiosa
MQRIAIPASANAPLTTTPVKIAIRNLEFYYGTFQALKQINLEIPEKRVTALIGPSGCGKSTLLRIFNRIYALYPKLEARGEVLLDGENILSPKYSINRLRSKVGMVFQKPVPFPMTIYENVAYGIRHHEVMSKSQMNDRVEQALQQSALWEEVKDKLNQNALGLSGGQQQRLCIARAIALTPSVLLLDEPTSALDPISTSRIEQLIEELKTKYTIVIVTHNMQQAARVSDYTGFMYLGDLIEHDRTETIFSQPSKQQTEDYITGRFG

SEQ ID NO: 116694 - DNA, 957 bp, Zymomonas mobilis
  CDS (1)..(957): transl_table=11
atgggttggtgccttgctaattgctatggcagttctaaccatcaatattttaggacgcgttatgaccagagggggaaaacgctaatgacgaataaagataacacggtcgaagacctcgaacagtttattgcgcccccagcagcagaaaatcttaacctggaagcgcgcaacctcgatttctattatgggacgcatcagactttatttaatgtcagcttacctgttgagcggaataaaattacggcgcttattggcccctccggatgtggaaaatcgacgcttttacggattttaaaccggatatacgctctttatccccagcaatatgcagttggtcgcgtgttgttggatgggaaagatattctgaccgaccatgacacgcttacccgtttaaaagaacggggtgataacgttacccttgatccattgggtgatgatatttctcaaatcagagcgcggattggcatggttttccaaaaaccaacgccgttcccaatgtcgatttatgacaatgtcgcctatggcgttcgtcttcattttaataaatcgcgtcaggaattagatcatattgttgaacgatccttgcatcgcgccgctctttgggatgaagtaaaagataagttaaaagaatccggccttagcctttctggtggacaacagcagcgtctttgtgttgcccgtgggcttgcggttgaaccagaagttcttttgctggatgagccagcttctgcgcttgatcctgtttcaacggcaaggttggaagaaaccttgatggaattaaagaaagacctgagcatcgttatcgttacgcataacttgcagcaggccgcccgtatttctgattataccggctttatgtatttgggtaatatgatcgagttttgctcaaccgatcgtttgtttgcgcgtccaaagacccgtcgcgcccgtgactatttaacgggacgatttggataa

SEQ ID NO: 116695 - protein, 318 aa, Zymomonas mobilis
MGWCLANCYGSSNHQYFRTRYDQRGKTLMTNKDNTVEDLEQFIAPPAAENLNLEARNLDFYYGTHQTLFNVSLPVERNKITALIGPSGCGKSTLLRILNRIYALYPQQYAVGRVLLDGKDILTDHDTLTRLKERGDNVTLDPLGDDISQIRARIGMVFQKPTPFPMSIYDNVAYGVRLHFNKSRQELDHIVERSLHRAALWDEVKDKLKESGLSLSGGQQQRLCVARGLAVEPEVLLLDEPASALDPVSTARLEETLMELKKDLSIVIVTHNLQQAARISDYTGFMYLGNMIEFCSTDRLFARPKTRRARDYLTGRFG

SEQ ID NO: 116696 - DNA, 1041 bp, Oryza sativa
  CDS (1)..(1041)
atgcgtcgtctgggactttcccttcaccacgacacgagtccaagcttcgctgcccttgcttgcaaccagcggccgccaccgaatggcaccgttcacgcgtgctccaaaagccgcccacctcagttggagccgggaaaagttggcaaaaagccaataaaaaagacgatgcgcattgcccggattcccacttcgatcccccctcaccttcgtcttcctctcgacctctccgctgtctctccgatgggctcagcttcagagcatgatgtcagggagcacctgctggacgtggacggcgtcggggaagaaggggcggcggcggcggcggggccgaagatacgggtgcgggggctgacgcggcggtcggaggcgagaggcgaggagatcctgcggggcgtcgacctggacgtgccgcgcggggtggtcgtcggcgtcatcggccccagcggcagcggcaagtccacgctgctccgcgcgctcaaccgcctctgggagcccgcgccgggcgccgtgctcctcgacggcgtcgacatctgcggcatcgacgtcctcgcgctccgccggaaggtcggcatgctcttccagctccccgccatgttcgacggaaccgtggctgacaacgtgcgatacgggccacagctgcagggcaagaagctgacggacgccgaggtgcagagcctactgagcctcgccgacctggaccctgctctctgctccaagcccgcctccgagctctccgtcggccaggcgcagcgcgtcgcattggctcgcaccctcgccaacgatccggaggtgcttctgctggatgagccgacgagcgcgttggatcccatctcgacgcagaacatcgaggaggcgatcgtgcggctgaagaagacgagggggctcaccacggtgatggtgtcgcacagcgtgaagcagatccagcggatcgccgacctggtctgcctcctcgtcgccggcgaggtcgtcgaggtgctcccgccgtcggagctgtccgaggccaagcaccccatggcacggcgcttcctcgagctcagctga

SEQ ID NO: 116697 - protein, 346 aa, Oryza sativa
MRRLGLSLHHDTSPSFAALACNQRPPPNGTVHACSKSRPPQLEPGKVGKKPIKKTMRIARIPTSIPPHLRLPLDLSAVSPMGSASEHDVREHLLDVDGVGEEGAAAAAGPKIRVRGLTRRSEARGEEILRGVDLDVPRGVVVGVIGPSGSGKSTLLRALNRLWEPAPGAVLLDGVDICGIDVLALRRKVGMLFQLPAMFDGTVADNVRYGPQLQGKKLTDAEVQSLLSLADLDPALCSKPASELSVGQAQRVALARTLANDPEVLLLDEPTSALDPISTQNIEEAIVRLKKTRGLTTVMVSHSVKQIQRIADLVCLLVAGEVVEVLPPSELSEAKHPMARRFLELS

SEQ ID NO: 116698 - DNA, 783 bp, Glycine max; identical to SEQ ID NO: 84845
  CDS (1)..(783)

SEQ ID NO: 116699 - protein, 260 aa, Glycine max; identical to SEQ ID NO: 84846

SEQ ID NO: 116700 - DNA, 789 bp, Zea mays; identical to SEQ ID NO: 84851
  CDS (1)..(789)

SEQ ID NO: 116701 - protein, 262 aa, Zea mays; identical to SEQ ID NO: 84852

SEQ ID NO: 116702 - DNA, 846 bp, Zea mays; identical to SEQ ID NO: 72928
  CDS (1)..(846)

SEQ ID NO: 116703 - protein, 281 aa, Zea mays; identical to SEQ ID NO: 72929

SEQ ID NO: 116704 - DNA, 20 bp, Artificial sequence
  primer
atgactaatttgtccggttc

SEQ ID NO: 116705 - DNA, 21 bp, Artificial sequence
  primer
ttagccaaagcgaccagccac

SEQ ID NO: 116706 - protein, 302 aa, Artificial sequence
  consensus sequence
  Variant (2)..(5): Xaa in position 2 to 5 is any amino acid
  Variant (6)..(6): Xaa in position 6 is any or no amino acid
  Variant (8)..(19): Xaa in position 8 to 19 is any amino acid
  Variant (23)..(23): Xaa in position 23 is any amino acid
  Variant (34)..(34): Xaa in position 34 is any amino acid
  Variant (37)..(38): Xaa in position 37 to 38 is any amino acid
  Variant (41)..(46): Xaa in position 41 to 46 is any amino acid
  Variant (47)..(51): Xaa in position 47 to 51 is any or no amino acid
  Variant (53)..(56): Xaa in position 53 to 56 is any amino acid
  Variant (57)..(90): Xaa in position 57 to 90 is any or no amino acid
  Variant (92)..(94): Xaa in position 92 to 94 is any amino acid
  Variant (100)..(100): Xaa in position 100 is any amino acid
  Variant (102)..(102): Xaa in position 102 is any amino acid
  Variant (103)..(103): Xaa in position 103 is any or no amino acid
  Variant (107)..(107): Xaa in position 107 is any amino acid
  Variant (108)..(108): Xaa in position 108 is any or no amino acid
  Variant (111)..(112): Xaa in position 111 to 112 is any amino acid
  Variant (114)..(116): Xaa in position 114 to 116 is any amino acid
  Variant (118)..(127): Xaa in position 118 to 127 is any amino acid
  Variant (128)..(144): Xaa in position 128 to 144 is any or no amino acid
  Variant (147)..(148): Xaa in position 147 to 148 is any amino acid
  Variant (150)..(151): Xaa in position 150 to 151 is any amino acid
  Variant (153)..(153): Xaa in position 153 is any amino acid
  Variant (156)..(156): Xaa in position 156 is any amino acid
  Variant (161)..(161): Xaa in position 161 is any amino acid
  Variant (163)..(167): Xaa in position 163 to 167 is any amino acid
  Variant (168)..(168): Xaa in position 168 is any or no amino acid
  Variant (178)..(178): Xaa in position 178 is any amino acid
  Variant (182)..(183): Xaa in position 182 to 183 is any amino acid
  Variant (185)..(186): Xaa in position 185 to 186 is any amino acid
  Variant (188)..(188): Xaa in position 188 is any amino acid
  Variant (190)..(190): Xaa in position 190 is any amino acid
  Variant (192)..(192): Xaa in position 192 is any amino acid
  Variant (196)..(196): Xaa in position 196 is any amino acid
  Variant (203)..(203): Xaa in position 203 is any amino acid
  Variant (205)..(207): Xaa in position 205 to 207 is any amino acid
  Variant (209)..(209): Xaa in position 209 is any amino acid
  Variant (211)..(213): Xaa in position 211 to 213 is any amino acid
  Variant (214)..(215): Xaa in position 214 to 215 is any or no amino acid
  Variant (217)..(220): Xaa in position 217 to 220 is any amino acid
  Variant (222)..(223): Xaa in position 222 to 223 is any amino acid
  Variant (233)..(233): Xaa in position 233 is any amino acid
  Variant (235)..(235): Xaa in position 235 is any amino acid
  Variant (238)..(238): Xaa in position 238 is any amino acid
  Variant (242)..(247): Xaa in position 242 to 247 is any amino acid
  Variant (248)..(258): Xaa in position 248 to 258 is any or no amino acid
  Variant (260)..(262): Xaa in position 260 to 262 is any amino acid
  Variant (264)..(266): Xaa in position 264 to 266 is any amino acid
  Variant (268)..(269): Xaa in position 268 to 269 is any amino acid
  Variant (271)..(273): Xaa in position 271 to 273 is any amino acid
  Variant (274)..(275): Xaa in position 274 to 275 is any or no amino acid
  Variant (277)..(277): Xaa in position 277 is any amino acid
  Variant (280)..(281): Xaa in position 280 to 281 is any amino acid
  Variant (282)..(298): Xaa in position 282 to 298 is any or no amino acid
  Variant (300)..(301): Xaa in position 300 to 301 is any amino acid
YXXXXXAXXXXXXXXXXXXVTAXIGPSGCGKSTXLRXXNRXXXXXXXXXXXGXXXXXXXXXXXXXXXXXXXXXXXXXXXXXXXXXXXXXXRXXXGMVFQXPXXPFPXXSIXXNXXXGXXXXXXXXXXXXXXXXXXXXXXXXXXXVEXXLXXAXLWXEVKDXLXXXXXXLSGGQQQRLXIARXXAXXPXVXLXDEPXSALDPIXTXXXEXLXXXXXLXXXXTXXIVTHNMQQAXRXSDXTAFXXXXXXXXXXXXXXXXXEXXXTXXXFXXPXXXXXTXDYXXXXXXXXXXXXXXXXXXXGXXG

SEQ ID NO: 116707 - protein, 32 aa, Artificial sequence
  protein pattern
  Variant (10)..(10): Xaa in position 10 is Cys or Val
  Variant (14)..(14): Xaa in position 14 is Ala, Cys, Gly, Ser or Thr
  Variant (15)..(15): Xaa in position 15 is Ile, Leu, Met or Val
  Variant (17)..(18): Xaa in position 17 to 18 is any amino acid
  Variant (20)..(20): Xaa in position 20 is any amino acid
  Variant (21)..(21): Xaa in position 21 is Ile or Val
  Variant (22)..(22): Xaa in position 22 is Ile, Leu or Val
  Variant (24)..(24): Xaa in position 24 is Phe, Leu or Met
  Variant (28)..(28): Xaa in position 28 is Ala, Cys or Thr
LSGGQQQRLXIARXXAXXPXXXLXDEPXSALD

SEQ ID NO: 116708 - protein, 26 aa, Artificial sequence
  protein pattern
  Variant (2)..(6): Xaa in position 2 to 6 is any amino acid
  Variant (7)..(8): Xaa in position 7 to 8 is any or no amino acid
  Variant (10)..(11): Xaa in position 10 to 11 is any or no amino acid
  Variant (15)..(15): Xaa in position 15 is Asn or Ser
  Variant (20)..(20): Xaa in position 20 is any amino acid
  Variant (22)..(22): Xaa in position 22 is any amino acid
  Variant (23)..(23): Xaa in position 23 is Ala or Ser
  Variant (24)..(25): Xaa in position 24 to 25 is any amino acid
LXXXXXXXIXXVTHXMQQAXRXXXXT

SEQ ID NO: 116709 - protein, 11 aa, Artificial sequence
  protein pattern
  Variant (6)..(6): Xaa in position 6 is any amino acid
  Variant (8)..(8): Xaa in position 8 is Cys, Asn, Thr or Val
GMVFQXPXPFP

SEQ ID NO: 116710 - protein, 18 aa, Artificial sequence
  protein pattern
  Variant (2)..(2): Xaa in position 2 is Glu or Gln
  Variant (3)..(3): Xaa in position 3 is any amino acid
  Variant (4)..(4): Xaa in position 4 is Ala, Cys, Ser, Thr or Val
  Variant (5)..(5): Xaa in position 5 is Ile or Leu
  Variant (6)..(7): Xaa in position 6 to 7 is any amino acid
  Variant (8)..(8): Xaa in position 8 is Ala, Gly, Ser or Val
  Variant (9)..(9): Xaa in position 9 is any amino acid
  Variant (10)..(10): Xaa in position 10 is Ile, Leu or Val
  Variant (12)..(12): Xaa in position 12 is any amino acid
  Variant (14)..(15): Xaa in position 14 to 15 is any amino acid
  Variant (16)..(16): Xaa in position 16 is Asp, Gly or Asn
  Variant (17)..(17): Xaa in position 17 is any amino acid
VXXXXXXXXXWXEXXXXL

SEQ ID NO: 116711 - protein, 15 aa, Artificial sequence
  protein pattern
  Variant (2)..(5): Xaa in position 2 to 5 is any amino acid
  Variant (7)..(7): Xaa in position 7 is any amino acid
  Variant (8)..(8): Xaa in position 8 is Ala, Asp or Asn
  Variant (10)..(10): Xaa in position 10 is Ile or Val
  Variant (11)..(11): Xaa in position 11 is any amino acid
  Variant (13)..(14): Xaa in position 13 to 14 is any amino acid
PXXXXTXXYXXGXXG

SEQ ID NO: 116712 - protein, 11 aa, Artificial sequence
  protein pattern
  Variant (2)..(2): Xaa in position 2 is Ile, Leu, Met or Val
  Variant (3)..(3): Xaa in position 3 is Ala or Ser
  Variant (5)..(6): Xaa in position 5 to 6 is any amino acid
  Variant (7)..(7): Xaa in position 7 is Ile or Val
  Variant (9)..(9): Xaa in position 9 is Asp, Glu, Asn or Gln
  Variant (11)..(11): Xaa in position 11 is Ile, Leu, Met or Val
PXXTXXXEXLX

SEQ ID NO: 116713 - DNA, 1056 bp, Synechocystis sp.
  CDS (1)..(1056): transl_table=11
atgactgccacgattcccccgttgacaccaacggtaacgcccagcaatcccgatcgcccgattgcggatctcaaactacaagacatcattaaaaccctgcccaaggaatgcttcgagaaaaaagcgagcaaagcctgggcttctgttttgattaccctaggggcgatcgccgtgggctatttgggcattatttatctgccctggtactgcttgcccattacctggatctggacagggacagccttaacgggggccttcgttgtcggccatgactgtggccatcgctcctttgctaaaaaacgctgggtcaatgatttagtgggacatatcgcttttgctcccctcatctaccctttccatagctggcgcctactccacgaccaccatcacctccacaccaacaaaattgaggttgataacgcctgggatccctggagtgtggaagctttccaagccagcccggcgatcgtccggcttttttatcgggccatccggggtcccttctggtggactggttccattttccattggagcttaatgcacttcaaactttccaactttgcccaaagggaccgcaataaagtcaaattatccattgccgttgtcttcctgtttgcggcgatcgcctttcctgccctaattatcaccacaggggtgtggggtttcgtcaaattttggctaatgccctggttggtgtatcacttttggatgagcacttttaccattgtgcaccacaccattcccgaaattcgtttccgtcccgccgccgattggagtgccgccgaagcccagttaaatggtactgttcactgcgattatccccgttgggtggaagtgctctgccatgacatcaacgtccatattccccaccacctctccgttgccatcccttcctataacctacgactagcccacggaagtttaaaagaaaactggggaccttttctttacgagcgcacctttaactggcaattaatgcaacaaattagtgggcaatgtcatttatatgaccccgaacatggctaccgcaccttcggctccctgaaaaaagtttaa

SEQ ID NO: 116714 - protein, 351 aa, Synechocystis sp.
MTATIPPLTPTVTPSNPDRPIADLKLQDIIKTLPKECFEKKASKAWASVLITLGAIAVGYLGIIYLPWYCLPITWIWTGTALTGAFVVGHDCGHRSFAKKRWVNDLVGHIAFAPLIYPFHSWRLLHDHHHLHTNKIEVDNAWDPWSVEAFQASPAIVRLFYRAIRGPFWWTGSIFHWSLMHFKLSNFAQRDRNKVKLSIAVVFLFAAIAFPALIITTGVWGFVKFWLMPWLVYHFWMSTFTIVHHTIPEIRFRPAADWSAAEAQLNGTVHCDYPRWVEVLCHDINVHIPHHLSVAIPSYNLRLAHGSLKENWGPFLYERTFNWQLMQQISGQCHLYDPEHGYRTFGSLKKV

SEQ ID NO: 116715 - DNA, 1053 bp, Nostoc sp. PCC 7120
  CDS (1)..(1053): transl_table=11
atgactacatcaatcatcaaaaatcaggaaataaaaaataagcttagtaatcccgaactaaggctcaaagatattattaaaactctgccaaaggaatgttttcagcagaaccgtcgcaaagcgtggacacaagcactacttagtgttgtgatggtgggtttaggttactggagtttggcgatcgcaccttggtttctgttacccattgcctggatttttacaggtacagccttaacaggtttttttgtgattggtcacgattgtggacaccgttcatttgccaaacgtcgttgggtaaatgacttggtagggcatatatttatgatgccgttaatatatccctttcacagttggcggattaagcataatcatcaccacaaacacaccaacaagttagacgaagataatgcttggcatcctatcagaccagaagtttttgccagttggggtaaaactcgtcagtctgcctttaagttgtttatgcgtcaaaggctttggtgggtaggctcagttggacattgggctgttgtgcatttcgattggcggaaattcaaagttaaagaccaagctgatgtgaaactttctgttgctgtagtagttttatttgccgcagttgcttttcccaccctcatcgctacaactggtatttggggatttgtaaaattttggtttgtgccttggcttggttatcatttttggatgagtaccttcaccattgttcaccacacatatccagatgttccttttgaagcagagaacaaatggcatgaagctatggcacagttatttgggactattcattgtgattatcccaaatgggtagaagtgttgtgtcacgatattaacgtccacgttcctcatcacctttctacagctattccttcttataatttgcggctagcttacagcagcattcaagaaaattggggtgattatctacatgatgaacttcgcttttcttggtctttaatgaagctcattactgacgaatgtcaactgtatcaaactgatgttggctatcagccttttaaagattattacgcaggacgatag

SEQ ID NO: 116716 - protein, 350 aa, Nostoc sp. PCC 7120
MTTSIIKNQEIKNKLSNPELRLKDIIKTLPKECFQQNRRKAWTQALLSVVMVGLGYWSLAIAPWFLLPIAWIFTGTALTGFFVIGHDCGHRSFAKRRWVNDLVGHIFMMPLIYPFHSWRIKHNHHHKHTNKLDEDNAWHPIRPEVFASWGKTRQSAFKLFMRQRLWWVGSVGHWAVVHFDWRKFKVKDQADVKLSVAVVVLFAAVAFPTLIATTGIWGFVKFWFVPWLGYHFWMSTFTIVHHTYPDVPFEAENKWHEAMAQLFGTIHCDYPKWVEVLCHDINVHVPHHLSTAIPSYNLRLAYSSIQENWGDYLHDELRFSWSLMKLITDECQLYQTDVGYQPFKDYYAGR

SEQ ID NO: 116717 - DNA, 1059 bp, Gloeobacter violaceus PCC 7421
  CDS (1)..(1059): transl_table=11
atggtacagcgacagagcttcgaggggacaggccgcgacctggaccgtcaacggattgccgccctggaaaaacaggcttccctcggcgatgtcatccagaccatacccaaagactgttttcggatcagcccggcaaaagcctgggcaagattggttgtcaatgtgctgctggttgtcttaggctacgcggctcttgctctcaacccctggtggtggctgttgccggctctatggattttcaccggcacggcactgacgggctttttcgtcatcgcccacgactgcggccaccgcagcttctcgacgcggcggcgcatcaacgacatcgtcgggcatgtgatgctcttgccgttgctctatccgttccatggctggcggatcaagcacaaccagcaccacaccttcaccaatcagatcgagatggacaatgcctggcggccgatgtcggtggcggagtaccgcgcgctttcgccgggggtgcgggcaggctatcgctttgcccgcggcatcggttggtggttcgcctcggcggtgcaccagctcaacctgcacttcaagccgtcgctattcaagcccaaggaccgagccgatatccggctctcatccacggcagtgattgcctttgcctgcgtgttgtttccggccctactgtggatgggcggcccctgggcggtcatccagttctggctgatgccctggctggtctatcacttctggatgagcacctttacgctcgtccaccacacccacccggacattcctttttatcccgccgccacctggacgccggtgaccggtcagctgttttcgactatccactgcgtctacccggcctgggtcgaatttctctgccacgatatcaacgtccacattccccaccatgtctcgacggcgatcccgagctacaacctcagaaaagcgcacaccgccctcaaggcgcactggtcggactacatgcacgagaccgaattttcctggtcgctgatgcgttcgatcacccgcgagtgccacctgcgcgatgaaacgggctactacctgccctgccgagaagtagattaa

SEQ ID NO: 116718 - protein, 352 aa, Gloeobacter violaceus PCC 7421
MVQRQSFEGTGRDLDRQRIAALEKQASLGDVIQTIPKDCFRISPAKAWARLVVNVLLVVLGYAALALNPWWWLLPALWIFTGTALTGFFVIAHDCGHRSFSTRRRINDIVGHVMLLPLLYPFHGWRIKHNQHHTFTNQIEMDNAWRPMSVAEYRALSPGVRAGYRFARGIGWWFASAVHQLNLHFKPSLFKPKDRADIRLSSTAVIAFACVLFPALLWMGGPWAVIQFWLMPWLVYHFWMSTFTLVHHTHPDIPFYPAATWTPVTGQLFSTIHCVYPAWVEFLCHDINVHIPHHVSTAIPSYNLRKAHTALKAHWSDYMHETEFSWSLMRSITRECHLRDETGYYLPCREVD

SEQ ID NO: 116719 - DNA, 1068 bp, Gloeobacter violaceus PCC 7421
  CDS (1)..(1068): transl_table=11
ttgacgatcgatacgccggcggcgggcatccgcacgcacaaccgcaagttactgcgccaactggagcgggtgacctaccgcgaggtgctcagtaccattcccaaaaaatgcttcgagcgcgacaccctgcgcggcctgggggcggtggtcctgcacctgggggttctggccggttcttacgcgctttttgccgtctctccgatctggctggcgccgctcttttgggtgtggatcggcacggtgctgtggggcaacttcgtgctggcccacgactgtggtcaccagtccttctcgccctaccgcaggctcaatgcgctggtgggccatgggctgctgctgccgacgctctacccgtttcacagctggcggatcatgcacaaccgccaccacgcctggaccaaccaccaggacaacgacaacagctggcggacgatcgcccccgagacttacgcgggtatgaacgacttcaaccggtttttttatcggcatgtccacacctgggcctggtggttcgcctcggtcattcatctgttcatcttccactacgaccaaaagaaattcctcccccaggagcggcccgaggcgcgcttttcgattgcagtgaacgtcgtgtttgcagcggtcgccctaccgggcttgttctggctcaccggttttgggggggtgctcagttactgggtgctgccgtggctggtctttcacttctggctgagcaccttcacccttatccaccacaaccatccggacattccctacttcccggagggcgagtggacgccgctgaaggcgcaactgttcggcacggtccactgcgagtacccctggtgggtcgaactggtggcctaccgcattggcgtgcacatcccccaccacctctcgacggcgatcccgtactatcacctcgacgaggcccacgccgccctcaaagcccgctggccggagtacgtgcacgaggcgcgcttcacctggccgtatctcaaatcgatcgtcaccacctgccacctgagcggtccggagggctatcatctgcccatcaaacgcgcccgggtcgtaaggggccgcaaataa

SEQ ID NO: 116720 - protein, 355 aa, Gloeobacter violaceus PCC 7421
MTIDTPAAGIRTHNRKLLRQLERVTYREVLSTIPKKCFERDTLRGLGAVVLHLGVLAGSYALFAVSPIWLAPLFWVWIGTVLWGNFVLAHDCGHQSFSPYRRLNALVGHGLLLPTLYPFHSWRIMHNRHHAWTNHQDNDNSWRTIAPETYAGMNDFNRFFYRHVHTWAWWFASVIHLFIFHYDQKKFLPQERPEARFSIAVNVVFAAVALPGLFWLTGFGGVLSYWVLPWLVFHFWLSTFTLIHHNHPDIPYFPEGEWTPLKAQLFGTVHCEYPWWVELVAYRIGVHIPHHLSTAIPYYHLDEAHAALKARWPEYVHEARFTWPYLKSIVTTCHLSGPEGYHLPIKRARVVRGRK

SEQ ID NO: 116721 - DNA, 1248 bp, Kluyveromyces lactis NRRL Y-1140
  CDS (1)..(1248)
atgagcaaaagcaccggcgtcgagcatcatatcagtggtgttgctactacagaaacggcaacagagacagttactgttcctcctgccaagacagctattgacacacatggtaacatcttcaaggttccagactatactatcaaagacatcctaggtgccatcccaaaggagtgttacaagagagacactctttggtcattgcattatgtggtaagagatattattgccatctgtattattgggtatgttggtaccaactacattccagtttggtttccaaatagtggtctcctaagatttgttgcctatatggtgcaatcatacttaattgggttatttggttttgggttgtggattttggctcacgaatgcggtcatggtgccttctctgattcaagattaatcaacgataccgttgggtgggttttgcactcatggtggatggtcccatacttttcttggaaattctctcactctaagcatcataaagctaccggtcatttgactagagatatggtttttgttccatacacgaaaaaagaatacttggaaatgaagggtaaatcaaaactaagggagatcaccgaagaagcaccaattgtaactttattaactttgattggccaacaaattggtggtttgcagttgtatttagcaacaaatgccactggccaatcttatcctggtgttcctaaattcttcaaatcccattactggcctacttctccggtgttcgataccaaggacttctggtacatcattctgagtgacattggtattatttccacacttacaatcaattatttgtgggcaaagacctatggctcccatgtcatgttgatcaactggtttgttccatggttatgggttaaccactggttagtatttgtcacatttttgcaacacactgacccaaccatgcctcattacgaagccagtgaatggaccttcgctaaaggtgctgctgccaccattgatagaaactttggctttgttggtcaacatattttccacgatattattgaaacgcatgttttgcatcattactgttcaagaattcctttctacaacgctcgtgtagccactgaagctattaagaaagttatgggtgaacattatcgttatgaaggcgaaaatatgtggcaatcattatggaaggtggcaagatcctgtcagtttgtagatggtgacaacggtgttttgatgttcagaaacacaaacggagtcggagcaccatgtcaagaatga

SEQ ID NO: 116722 - protein, 415 aa, Kluyveromyces lactis NRRL Y-1140
MSKSTGVEHHISGVATTETATETVTVPPAKTAIDTHGNIFKVPDYTIKDILGAIPKECYKRDTLWSLHYVVRDIIAICIIGYVGTNYIPVWFPNSGLLRFVAYMVQSYLIGLFGFGLWILAHECGHGAFSDSRLINDTVGWVLHSWWMVPYFSWKFSHSKHHKATGHLTRDMVFVPYTKKEYLEMKGKSKLREITEEAPIVTLLTLIGQQIGGLQLYLATNATGQSYPGVPKFFKSHYWPTSPVFDTKDFWYIILSDIGIISTLTINYLWAKTYGSHVMLINWFVPWLWVNHWLVFVTFLQHTDPTMPHYEASEWTFAKGAAATIDRNFGFVGQHIFHDIIETHVLHHYCSRIPFYNARVATEAIKKVMGEHYRYEGENMWQSLWKVARSCQFVDGDNGVLMFRNTNGVGAPCQE

SEQ ID NO: 116723 - DNA, 1185 bp, Aspergillus nidulans FGSC A4
  CDS (1)..(1185)
atggctgcaactgcaacaaccctagcagagattgaaaagacaatcaaaaatgcgattcccaaacactgcttcaaccgctctctcctcatttcctctgcctacgtcgtccgcgatctcctctacgcctccgtcctcttctactttgccctgcacattgacaccctcttttcctcgcaactcctccgcatcctcgcctggaccgcctacggtttcatgcaaggctgcgtcggcaccggaatctggatcctcgcacacgaatgcggccatggagctttctccccataccaaacgtggaacgatgtcgtcggatggacattgcactccctcctgatggtcccgtatttcagctggaagatcacgcacgctcgacaccaccggtacacaaacaacacagagcgagatacagcatttgtcccctggacagagaaggaatacgacactcgcccgcgctacttccctgcctggtttgagatgtttgaggacacgcccgtctacaaccttattagcctactggcgcatcagatcgcaggatggcagatgtatctctgtttttacgttagcgccggcgcaaagagtaagcctgtaccgcagggaaaacagagcgggtggtttggaggccagcagagcgccagccactttgatccgggcagttcgctgtggacggaaaaccagcggcatctgattgcgatttcggacctggggttgctgcttgttgcggcggcaaattggtaccttgcgcagcaagtgggcgtgctccgcatggtgctgatctatgttgtgccgtacttctgggtgcaccattggcttgtggcgatcacgtacctccaccacacacacccctcgatcccgcactacactgatagcacctggacgttcaccaaaggcgctctgtccaccgtcgaccgcgacttcggtttcatcgggcggcatttcttccaccatatcattgaccaccatgtcgtgcatcacttgtttaaccggatcccgttctaccatgccgaggaggcgactaatgccattattcccgtactcggggacatgtatcatcgcgaagagaccggcttcttgtggagtttaatggagacgtacaagaactgtcggtttgtaggcgttgaaaatgatgttggaaaggagggcgttttgcattgggtttttgaggagaagaagggtgccaaagcggaatag

SEQ ID NO: 116724 - protein, 394 aa, Aspergillus nidulans FGSC A4
MAATATTLAEIEKTIKNAIPKHCFNRSLLISSAYVVRDLLYASVLFYFALHIDTLFSSQLLRILAWTAYGFMQGCVGTGIWILAHECGHGAFSPYQTWNDVVGWTLHSLLMVPYFSWKITHARHHRYTNNTERDTAFVPWTEKEYDTRPRYFPAWFEMFEDTPVYNLISLLAHQIAGWQMYLCFYVSAGAKSKPVPQGKQSGWFGGQQSASHFDPGSSLWTENQRHLIAISDLGLLLVAAANWYLAQQVGVLRMVLIYVVPYFWVHHWLVAITYLHHTHPSIPHYTDSTWTFTKGALSTVDRDFGFIGRHFFHHIIDHHVVHHLFNRIPFYHAEEATNAIIPVLGDMYHREETGFLWSLMETYKNCRFVGVENDVGKEGVLHWVFEEKKGAKAE

SEQ ID NO: 116725 - DNA, 1662 bp, Ustilago maydis 521
  CDS (1)..(1662)
atgaagcagagaaaacctagccaagacctgttcacgctatcttgcgactctggaatgcaattcaagcgagagtgttggtccaaacgtcgtgctcgaggtgcttgctccgaaatttcgcctcctcagaatcacgaatgcctgcatcagtcccctgttctcgccactgattcgcattcacgatccgtcgacatgtcgtccgctgtcgcacccaacgttaccgctgccggtcagcgcgcaggcaagaaggccgctgctgcctccaccgccgccaaggccagcaagactgagactatccgttactcgcatcgcaaggctgccacctacgacgagaaggacatccccacctttgacgtgccccaattcaccgtcaaggatcttctctcggcgatccctgctcactgctttgagcgctccgccttcaagtcgttcacctatgtgtttgccgattttgccatgattgctgcacttggctatgccgctagctttattgaccctaccgtcgctagcaccttctctggcctcaagtccaacgccctttctccctacgtttcccttggcgttcagcaggctgctactcgttttgctgcctggtccgcttactggatcctccagggtatggtcttcaccggcgtatgggtcattgctcacgagtgtggtcaccaaagcttcagcactagcaagacgctcaacaatgctgtcggctgggtcctccactcggctctcctcgtgccttaccactcgtggagaatctcgcacgcccgccatcacgctgccacaggtcacttgacccgtgacgaagtctttgtcccccgaacccgacaacagcgcggccgtctcccgcttcagcctgctcccaagtctgccgacgactcgaacgacgaggacgccgttgagaaggaggtcggtgccatcaaggttgacgaaacgttcggcgagtggctcgccgaagttctcgaggatgctcccgcctacaacctgctctacattttcattcagcaactcctcggctggcctctgtacctactcaggaacgcctctggtcagctccactaccccaaattcacgaaccactttaacccggatgcgattatctttgacaagcgtcaccgcatgcagattatcgtttccgacattggtatcgccgctacgctcagcgctctcaccgcctggggcctgctctccaagggcggtttctcggacgtcttccgctactatgtcattccttacctgtggtgcaaccactggctcgtaatgatcacctacctccagcacaccgaccccgctcttcctcactacaaggccgaggcatggaccttcccgcgtggcgctctttgcacgattgaccgcaactggctcggtcctgttggtccttaccttttccacggtattgctgagactcacgtccttcaccacgtctcgagcaagatcccccactacaacgcctgggaggctaccgaggcgctcaaggctcgtcttggacaccactacgtcaagagcaccgaaaacgtctttgtctcgctctggaagagcatcaacacgtgcaagtttgtcgacgagaacgaccaggtcgctttctaccgcactgttgacggtgtcccgcaccgcgtcatttcgccggacagcgcttatgcttccgactcgggcattgccatgtctgagtaa

SEQ ID NO: 116726 - protein, 553 aa, Ustilago maydis 521
MKQRKPSQDLFTLSCDSGMQFKRECWSKRRARGACSEISPPQNHECLHQSPVLATDSHSRSVDMSSAVAPNVTAAGQRAGKKAAAASTAAKASKTETIRYSHRKAATYDEKDIPTFDVPQFTVKDLLSAIPAHCFERSAFKSFTYVFADFAMIAALGYAASFIDPTVASTFSGLKSNALSPYVSLGVQQAATRFAAWSAYWILQGMVFTGVWVIAHECGHQSFSTSKTLNNAVGWVLHSALLVPYHSWRISHARHHAATGHLTRDEVFVPRTRQQRGRLPLQPAPKSADDSNDEDAVEKEVGAIKVDETFGEWLAEVLEDAPAYNLLYIFIQQLLGWPLYLLRNASGQLHYPKFTNHFNPDAIIFDKRHRMQIIVSDIGIAATLSALTAWGLLSKGGFSDVFRYYVIPYLWCNHWLVMITYLQHTDPALPHYKAEAWTFPRGALCTIDRNWLGPVGPYLFHGIAETHVLHHVSSKIPHYNAWEATEALKARLGHHYVKSTENVFVSLWKSINTCKFVDENDQVAFYRTVDGVPHRVISPDSAYASDSGIAMSE

SEQ ID NO: 116727 - DNA, 1080 bp, Anabaena variabilis ATCC 29413; identical to SEQ ID NO: 53650
  CDS (1)..(1080): transl_table=11

SEQ ID NO: 116728 - protein, 359 aa, Anabaena variabilis ATCC 29413; identical to SEQ ID NO: 53651

SEQ ID NO: 116729 - DNA, 1053 bp, Anabaena variabilis ATCC 29413
  CDS (1)..(1053): transl_table=11
atgactacatcaatcatcaaaaatcaggaaataaaaaataagcttagtaatcccgaactaaggctcaaagatattattaaaactctgccaaaagaatgttttcagcagaaccgtcgcaaagcgtggacacaagcactactcagtgttgtcatggttggtttaggttactggagtttggcgatcgcaccttggtttcttttacccattgcctggatttttacaggtactgctttaacaggtttttttgtgattggtcatgattgtggacatcgttcatttgccaaacgtcgttgggtaaatgacttggtagggcatatatttatgatgccgttaatatatccctttcatagctggcggattaagcataatcaccaccacaagcacaccaacaagttagacgaagacaatgcttggcatcctatcagaccagaagtgtttgccagttggggtaaaactcgtcagtctgcctttaagttgtttatgcgtcaaaggctttggtgggtaggttcaattggacattgggctgtcgtgcatttcgattggcggaagttcaaagttaaagaccaagctgatgtgaaactttctgttgctgtagtagttttatttgccgcagttgcttttcccaccctcatcgctacaactggtatttggggatttgtaaaattttggtttgtgccttggctgggttatcatttctggatgagtaccttcaccattgttcaccatacatttccagatgttccttttgaaacagagaacaaatggcatgaagctatggcacagttatttgggactattcattgtgattatcccaaatgggtagaagtgttgtgtcacgatattaacgtccacgttcctcatcacctttctaccgctattccctcttataatttgcggttagcttacagcagcattaaagaaaattggggtgattatctacatgatgaacttcgcttttcttggtctttaatgaagttcattactgacgaatgtcaactgtatcgaactgatgttggctatcagccttttaaagattattacgcaggacgatag

SEQ ID NO: 116730 - protein, 350 aa, Anabaena variabilis ATCC 29413
MTTSIIKNQEIKNKLSNPELRLKDIIKTLPKECFQQNRRKAWTQALLSVVMVGLGYWSLAIAPWFLLPIAWIFTGTALTGFFVIGHDCGHRSFAKRRWVNDLVGHIFMMPLIYPFHSWRIKHNHHHKHTNKLDEDNAWHPIRPEVFASWGKTRQSAFKLFMRQRLWWVGSIGHWAVVHFDWRKFKVKDQADVKLSVAVVVLFAAVAFPTLIATTGIWGFVKFWFVPWLGYHFWMSTFTIVHHTFPDVPFETENKWHEAMAQLFGTIHCDYPKWVEVLCHDINVHVPHHLSTAIPSYNLRLAYSSIKENWGDYLHDELRFSWSLMKFITDECQLYRTDVGYQPFKDYYAGR

SEQ ID NO: 116731 - DNA, 1056 bp, Trichodesmium erythraeum IMS101
  CDS (1)..(1056): transl_table=11
atgactgtatcaattaaagaatctgctcaggtcaattctaatggtcaaaagcaccaactacagctaaaagatattgtaaaaactttgccgcgagaagttttcatcaaagatcgatggaaaacatgggcaatggtgacaaccaatatattcatggtaattttaggttattggggactaataattgcaccttggtttttattgcccctactctgggttttcactggcactgcattaacagggttttttgttattggccatgactgcggtcatcgctcttttgctaaccgtaggtgggtaaatgatttagttggtcatttggtgtttttacccttaatttatccctttcatggttggcgaataggccataatcatcaccacaaacatactaataagatgggtgaggacaatgcttggcaaccttggtatccagaagattatgaggttgctggtagttcgatgcagttagtgtatagggttatgcgtggtagactctggtggttagcttctattgctcactgggcagttgtgcattttgattggagaaaatttgagaaaaataataaggaagatgtaaagttttctgcattggtagtttttgggtttagtgcgatcgcatttcctttgttaatagctacagttggtatgtggggtttactcaagttttggttcatgccttggttagtttaccatttctggatgagtacatttactattgttcaccatacagtaccagaaattccctttactcctgtcccagagtggaatgaagcagaggctcaattatttggtacagtacattgtgattatccccgttgggtagaatttctatgtcatgatattaatgtacatattccccatcatatctcaacaggaattccttcatataatcttaggcaagcacatcaatttttgaaggataaatggggagataaactttatgaaactcatttttcttggtctttaatgaaaaaaataacagatcagtgtcatttgtataatcagactaagttctatctcagttttaaagaatatgatgctcagaaagtttcccagtaa

SEQ ID NO: 116732 - protein, 351 aa, Trichodesmium erythraeum IMS101
MTVSIKESAQVNSNGQKHQLQLKDIVKTLPREVFIKDRWKTWAMVTTNIFMVILGYWGLIIAPWFLLPLLWVFTGTALTGFFVIGHDCGHRSFANRRWVNDLVGHLVFLPLIYPFHGWRIGHNHHHKHTNKMGEDNAWQPWYPEDYEVAGSSMQLVYRVMRGRLWWLASIAHWAVVHFDWRKFEKNNKEDVKFSALVVFGFSAIAFPLLIATVGMWGLLKFWFMPWLVYHFWMSTFTIVHHTVPEIPFTPVPEWNEAEAQLFGTVHCDYPRWVEFLCHDINVHIPHHISTGIPSYNLRQAHQFLKDKWGDKLYETHFSWSLMKKITDQCHLYNQTKFYLSFKEYDAQKVSQ

SEQ ID NO: 116733 - DNA, 1062 bp, Nostoc punctiforme PCC 73102
  CDS (1)..(1062): transl_table=11
atgactacatcaataattaatagccagaaactaagtgacgagcctggtaattccaacttccggctcaaagatattatcaaaacagttccacgggaatgttttcagcagaaccgtcgcaaagcttggacacaagtactgctcagtgtcttggcagttgccttgggctattacagcctgatcgttactccttggtttcttttgcccctagcttggattttcacgggcactgctttaacaggtttttttgtaattggccatgattgtggacacaggtcttttgccaaacgtcgttgggtaaatgatttggtagggcacttcttcatgatgccgttaatttacccctttcacagttggcgcattaagcataattatcaccatgctcataccaataaactggatgaggacaacgcttggcatccaatcagaccagaagtgtttgaaaattgggatacaactaggcagtctgcttttaagctattcatgcgtaaacgcttatggtgggtaggttccattggacattgggctgtagtgcattttgattggcggaacttcaaaactaaagaccaatccagtattaagctttctgtggctgtagtagttgtgtttgctgcgatctctttcccgcttctggtcgccacaactggtatctggggatttgtcaagttctggctagtaccctggatgatttaccatttttggatgagtacttttactattgttcaccatactgccgcagatgttccttttgcgacagcgaacaagtggaacgaagctctagcacaactagctggaactattcattgcgattatccgcgttgggtagaaatcctgtgccacgatatcaatgttcatgtccctcatcatatttccactgcgatcccttcttataatttgcggctagcttacagcagcatcaaagaaaattgggggccttatctccatgatgagtgtcagttttcttggcctttaatgaagcagattacagacgagtgtcaactgtacacaactgacgttggttataagactttcaacgaacattacgaacattatacagagcaataa

SEQ ID NO: 116734 - protein, 353 aa, Nostoc punctiforme PCC 73102
MTTSIINSQKLSDEPGNSNFRLKDIIKTVPRECFQQNRRKAWTQVLLSVLAVALGYYSLIVTPWFLLPLAWIFTGTALTGFFVIGHDCGHRSFAKRRWVNDLVGHFFMMPLIYPFHSWRIKHNYHHAHTNKLDEDNAWHPIRPEVFENWDTTRQSAFKLFMRKRLWWVGSIGHWAVVHFDWRNFKTKDQSSIKLSVAVVVVFAAISFPLLVATTGIWGFVKFWLVPWMIYHFWMSTFTIVHHTAADVPFATANKWNEALAQLAGTIHCDYPRWVEILCHDINVHVPHHISTAIPSYNLRLAYSSIKENWGPYLHDECQFSWPLMKQITDECQLYTTDVGYKTFNEHYEHYTEQ

SEQ ID NO: 116735 - DNA, 1098 bp, Burkholderia vietnamiensis G4
  CDS (1)..(1098): transl_table=11
atggcgaaaacctacacggtccccagcgcgccgccggcgcgtttcgacgaattcatgcagaagtcgaagtcgctcgagggcgtgcggctgaccgatgcgattccgaaatccctctacgagccgcgcgtatggcgcggcattctcggcttcgtggtgagctatgcggcgtatatcggcgcgctcgtcggcatcgcttacgcgccgcactggctgttctacgttccgctgtggctgctggccggcctgggcggctgggggctgcattgcatcgcgcacgattgcgggcacaactcgttttcgcgcgtccgatggttcaacctggcgatcgggcacctgtcgcttctgccgctgctgtatccgttccacgcgtggcgccacacgcacaacctgcaccacgcgaataccaacaacctcgagctcgataccgactggcggccgattcccgcgccgctttacgatcgcatgccgctgttgaagcggctcgagtacgccggcacccgcaagtggctgttctgggccggcacggtgagctactggaaggaatcgggcttccgtccgggcttctatccgaagcgcgagatgcggcgcgacgtgaaacgctcgatcgcgttcgtcctgttcgcgtccgcgctctatttcccggcgctcatctacttcaccggcatcaccggcctgttcctgtacttcgtcgtgccctggttgatgattcatgcgtggttcagcgccacgacgctgatgcatcacacgtcggacgagatcccgttcctgccgtcgcagcactggacgccgaacgccagccgcttgctggtgacgaccgactaccggtatccgaagtggctgcacttcatgacgcacaacatctcggtgcatacggcgcaccacgtcgcgccgatcgtgccgttctacaacctgccgaaggcgcaggcggcgctcaagcaggcgtttccgggaatgatccgcgaaaaggatttctccttcggcgatctgtggcacgtgatcggtcactgccatttctacgacaccgagtcgggttactaccgcagcctgtcccgggaggccgtgccggtcggcgcgcgtgcggcggcggagggccggtga

SEQ ID NO: 116736 - protein, 365 aa, Burkholderia vietnamiensis G4
MAKTYTVPSAPPARFDEFMQKSKSLEGVRLTDAIPKSLYEPRVWRGILGFVVSYAAYIGALVGIAYAPHWLFYVPLWLLAGLGGWGLHCIAHDCGHNSFSRVRWFNLAIGHLSLLPLLYPFHAWRHTHNLHHANTNNLELDTDWRPIPAPLYDRMPLLKRLEYAGTRKWLFWAGTVSYWKESGFRPGFYPKREMRRDVKRSIAFVLFASALYFPALIYFTGITGLFLYFVVPWLMIHAWFSATTLMHHTSDEIPFLPSQHWTPNASRLLVTTDYRYPKWLHFMTHNISVHTAHHVAPIVPFYNLPKAQAALKQAFPGMIREKDFSFGDLWHVIGHCHFYDTESGYYRSLSREAVPVGARAAAEGR

SEQ ID NO: 116737 - DNA, 1050 bp, Crocosphaera watsonii WH 8501; identical to SEQ ID NO: 53654
  CDS (1)..(1050): transl_table=11

SEQ ID NO: 116738 - protein, 349 aa, Crocosphaera watsonii WH 8501; identical to SEQ ID NO: 53655

SEQ ID NO: 116739 - DNA, 1050 bp, Crocosphaera watsonii WH 8501
  CDS (1)..(1050): transl_table=11
atgacatcactgctcactcagtctcaaccgtctgtttctcctcaactggatgaaaatattcggttacgtgacattatcaaaaccctaccaaaagaggtctttattaaaaatcctcgtaaagcttggttcaaggtgattcttaccgtttctatggtggctttaggatgggctgctttggcggtttctccttggtacttattgcctattttatgggcttttacaggaacagcgatgacaggattatttgtcattggccatgattgtggtcatcgctctttttctaataataataaggttaatgatttcgttggtcacgccatttttttacccctgttttatccttttcatggttggcgtattctccacaattatcatcataaacataccaataaattagatgttgataatgcttgggacccttttatgccagaattttacgaaactttttctgcttttgaaaagtggggctatcggcagttaagaggtcgtttttggtggcttggttctgtggtacactgggctaagatgcactttgactggactacatttgagggaaaagaacgagaacaaatccgcttttcttctttggtagtcattgttgctgctattattgcttttcccattgccttcgctacactaggagtatggggtgtgattaagttttggttattaccttggttagtcttccatttttggatgagtacctttaccattgttcatcatactgtccctaatattccctttaaaaaagaagcagactggaacgaagctgaagctcaattatctggtacagtccattgtgactatcctcgttgggtggaaattttgtgtcatgacattaatgttcatattccccaccacgtttctacgggaatacccagttataatttaagaatggctcatcaaagtttaaaagaaaattggggtgattatttgtgtgaattacgcttttcttggcccctaatggatgaaatcacaagtcagtgtcatctctatcaccctgagacacattatcaaagcttttcacaatattatcagagtaagaaataa

SEQ ID NO: 116740 - protein, 349 aa, Crocosphaera watsonii WH 8501
MTSLLTQSQPSVSPQLDENIRLRDIIKTLPKEVFIKNPRKAWFKVILTVSMVALGWAALAVSPWYLLPILWAFTGTAMTGLFVIGHDCGHRSFSNNNKVNDFVGHAIFLPLFYPFHGWRILHNYHHKHTNKLDVDNAWDPFMPEFYETFSAFEKWGYRQLRGRFWWLGSVVHWAKMHFDWTTFEGKEREQIRFSSLVVIVAAIIAFPIAFATLGVWGVIKFWLLPWLVFHFWMSTFTIVHHTVPNIPFKKEADWNEAEAQLSGTVHCDYPRWVEILCHDINVHIPHHVSTGIPSYNLRMAHQSLKENWGDYLCELRFSWPLMDEITSQCHLYHPETHYQSFSQYYQSKK

SEQ ID NO: 116741 - DNA, 2247 bp, Chlamydomonas reinhardtii
  CDS (40)..(1314)
gttactcggccgtaaaccggcctttagaccactcacacaatggcgttcgctctgcgctcgcctggcgccgtgcgcgcgcctgcctgcgcccagcgcgcgtccggtgtgcgtgcggccaagcctggtttcctgcggtctgcggctgttgctcgcccccaggtgcagaccaacgccgcggctctgtccgtgccggtcaaccagctgactgatgaggagcgcgccaacctggcccgcgagctgggctacaagtccatcggccgtgagctgcccgacaacgtctcgctcaccgacattatcaagagcatgcccgctgaggtgttcaagctggaccacggcaaggcttggcgcgcgtgcctgaccaccatcgctgcgtgctcggcctgctggtacctcatctctatcagcccctggtacctgctgcccgctgcttgggccctggccggcaccgccttcaccggctgcttcgtgattggccacgactgcggccaccgctctttccacgagaacaacctgatcgaggacattgtgggccacatcttcttcgcgcccctgatctaccccttcgagccctggcggatcaagcacaaccaccaccacgcccacaccaacaagctggtggaggacactgcctggcaccccgtgactgaggcggacatggccaagtgggactccacctcggccatgctgtacaaggtgttcctgggcacccccctgaagctgtgggcctcggtgggccactggctggtgtggcacttcgacctcaacaagtacacgcccaagcagcgcactcgcgttgtcatctcgctggctgttgtgtacggcttcatggcgacggccttcccggcgctgctgtacttcggcggcccttgggccttcgtgaagtactggctgatgccgtggctgggctaccacttctggatgagcaccttcaccgtggtgcaccacaccgcgccgcacatccccttcaagaaggcggaggagtggaacgccgccaaggcccagctgtcgggcaccgtgcactgcgacttccccaactgggtggagttcctgacgcacgacatctcgtggcacgtgccccaccacgtggcccccaagatcccatggtacaacctgcgcaaggcgaccgagtcgctgcgcgagaactggggccagtacatgaccgagtgcaccttcaactggcgcgtggtgaagaacatctgcaccgagtgccacgtgtacgacgagaaggtcaactacaagccctttgactacaagaaggaggaggccctgtttgccgtgcagcgccgcgtcctgcccgactccgccgccttctaaactagctggctacaactggctatcgcgctagtgagctaatcggagctgagcaagcttctcggagccttgcgagagcttctgatgttggctttatagggctggctaaaacagctagcagctaggtagtgtggctgcgcggccgcttgcgcgcgcgagagagggaggggcgtcaggcatgtgctgtggaccgggctgcacgagagcagtgcagcagttgcgctactttgtgtcttgtatgaaaatggttttgaggattggttgtgtgcgtgacggcgcgagatggacggttgcgcgggcggctttgttctgtgtggtgcgtcagtgcgaggcatgccctgacatgagtaggtgaggggtgcgacgagcctgcaggaatgcgtgtgtgtctgtggagcagcggtgttcgcggcagctccgttgtcggcatgcgtttccgctcaccgccccctcgtccttcgcataaagtgcttggtatgcctcggcttgcccacgggacgccgaccgtgtgacggctccgcggctgtgaagaatttcatccgcattgcgcacagcctctaacagttggatcgattcttgttatgtacatgtggtgttggacgtggagtgcacagtcagaggcgtgtgtgttcgtgtgtgcgtggagcgtggcggaaagccaggaagggtgacaagagagaggacgcaacagttaccagtgtgtgagccggatgttgggggcggaagagatttactgctctccccccgtcacgtgataagtagtggtgttatgttggttgtcgtgcccagatgaacgtgcaggcagctgtggagttggccctcaattttcccaccaccccatgcaacgtgaagcgggcgagccaccggaggagcgggataccctcccgcgcctgcctgaaacgagtggtgaatgtaaagcaaattatcctaaaaaaa

SEQ ID NO: 116742 - protein, 424 aa, Chlamydomonas reinhardtii
MAFALRSPGAVRAPACAQRASGVRAAKPGFLRSAAVARPQVQTNAAALSVPVNQLTDEERANLARELGYKSIGRELPDNVSLTDIIKSMPAEVFKLDHGKAWRACLTTIAACSACWYLISISPWYLLPAAWALAGTAFTGCFVIGHDCGHRSFHENNLIEDIVGHIFFAPLIYPFEPWRIKHNHHHAHTNKLVEDTAWHPVTEADMAKWDSTSAMLYKVFLGTPLKLWASVGHWLVWHFDLNKYTPKQRTRVVISLAVVYGFMATAFPALLYFGGPWAFVKYWLMPWLGYHFWMSTFTVVHHTAPHIPFKKAEEWNAAKAQLSGTVHCDFPNWVEFLTHDISWHVPHHVAPKIPWYNLRKATESLRENWGQYMTECTFNWRVVKNICTECHVYDEKVNYKPFDYKKEEALFAVQRRVLPDSAAF

SEQ ID NO: 116743 - DNA, 1521 bp, Descurainia sophia
  CDS (73)..(1416)
cttcacagccattcaatctcaaaaacattttgcagagaacgtcgagtcgcttcttctgcaatctgtgcgtctatggcttccagaatcgctgattctctcttcgccttcacgggcccacaacaacaatgtcttcccagggttcctaagcttgcttctgctcgtgtttctcctggtgtgtatgctgtgaggccgatcaatcttctgttaaaaggaagtacatatcgaagaagtagatgcgtagctcctgtgaaaaggaggattggatgtataaaagcagtggctgttccagtcgcaccgccttcagctgacagcgcagaaggcagggaacaattagcagaaagctatggcttcagacaaattggagaagatcttcctgataatgtcaccttaaaagatatcatggatacacttcccaaagaggtgtttgagattgatgatgtcaaagcttggaagtctgtgttaatatctgtgacttcctacactttgggactctttatgattgcgaaagcgccgtggtatctgcttccgctggcttgggcgtggactggaactgcaatcactgggttctttgtgataggtcatgattgtgcacataaatcattttcaaagaacaaattggtggaagacattgtgggtactctagccttcctaccacttgtctacccgtatgagccatggcggtttaagcatgaccgtcatcatgccaaaaccaacatgttagttcatgacacagcttggcagccagttccgcctcaggagtttgattcatcacccacgctgcgaaaggcaatcatttttggatatggcccaattagaccttggttgtccatagctcactgggtgaactggcacttcaatctgaaaaagtttagagcgagcgaggtgaatagggtgaagataagtttggcttgtgttttcgccttcatggctgttggatggccactgatcatatacaaagttggtatattgggatgggtaaaattctggttgatgccatggttgggctatcacttctggatgagcacattcacaatggttcatcatacggctccacacattcctttcaagcctgcggatgagtggaacgcggctcaggcccagcttaatggaactgtacattgtgattaccctagttggattgaaattctctgccatgatatcaacgttcacattccgcatcatattagcccaagaataccgagctacaatctccgtgcagctcacaagtctatacaagagaactggggaaagtatacaaacttggctacatggaactggcgcttgatgaagacgataatgactgtgtgtcatgtctatgacaaagaggagaactacattccttttgaccggttagcccctgaagaatctcagccaataaccttcctcaagaaagcaatgccgaactacacagcctgattctcgatggcctcaatttggtcttctgaaatctcaatatctttttgcagtcgccgatgtcatatgtaagcttttcaagcgatgagcttctcttaacacttcacc

SEQ ID NO: 116744 - protein, 447 aa, Descurainia sophia
MASRIADSLFAFTGPQQQCLPRVPKLASARVSPGVYAVRPINLLLKGSTYRRSRCVAPVKRRIGCIKAVAVPVAPPSADSAEGREQLAESYGFRQIGEDLPDNVTLKDIMDTLPKEVFEIDDVKAWKSVLISVTSYTLGLFMIAKAPWYLLPLAWAWTGTAITGFFVIGHDCAHKSFSKNKLVEDIVGTLAFLPLVYPYEPWRFKHDRHHAKTNMLVHDTAWQPVPPQEFDSSPTLRKAIIFGYGPIRPWLSIAHWVNWHFNLKKFRASEVNRVKISLACVFAFMAVGWPLIIYKVGILGWVKFWLMPWLGYHFWMSTFTMVHHTAPHIPFKPADEWNAAQAQLNGTVHCDYPSWIEILCHDINVHIPHHISPRIPSYNLRAAHKSIQENWGKYTNLATWNWRLMKTIMTVCHVYDKEENYIPFDRLAPEESQPITFLKKAMPNYTA

SEQ ID NO: 116745 - DNA, 1341 bp, Medicago truncatula
  CDS (1)..(1341)
atggcttgcacctctgcaaattcattactccaattaaagggttcttcattccagaggccaattttgaatttgagaacaaacatttctgctccttactcacccggcttatttaacctaaaaggtgatgggttaatccataaagggttcaggcatcaaagtcaaaaacatttgacacctagaaataaagttacagttatacgagctgtggcaattccggtagaaccagctccagtggaaagtgcggagtacagaaaacaactagcagaacgctatggttttgagcaaattggagagccgcttccagacaatgttacattaaaagatgtcattacttctcttcctaagaaggtttttgagattgatgatgttaaagcatggaaatctgttttgatatctgccacttcctatgcgctggggcttcttatgatttctaaagcaccctggtatctacttcctctggcttgggcttggacagggactgctgtaactgggttctttgttataggacatgattgcgctcacaaatcattttcaacaaacaaattggtagaagacattgttggaactctggcctttttgccactaatttatccatatgagccatggcgatttaagcacgacaaacatcatgcaaaaacaaacatgttgaaggaagatactgcttggcagcctgtttggcaggatgagtttgagtcaagtccatttttgaggaaagcaataatatatggatatggtccatttcgttgctggatgtctatagctcactggttggtctctcactttgatttgaagacgttcagaccaaatgaaataaagagggtgaagataagtttggcttgtgttttcgcctttatagcaattggatggccattaattatttacaagactggaatcatgggatggataaaattctggttgatgccatggttgggctatcacttctggatgagcactttcaccatggtgcatcatactgcaccacacataccattcaaaaactcagaagaatggaatgctgcacaagcacagcttaatggaaccgttcattgtgcttaccctcaatggatcgagatcctatgccatgatattaatgtccatattccacaccatatatccccgaaaataccgagctataatttacgagcagcccataaatccatccaagaaaattggggaaagtatctgaacgaggctagttggaattggcgattgatgaagacaatcatgacagtgtgtcatgtgtacgataagcagcaaaattatgtctcctttgatgaagttgctcctaaagaatctcgtccaattagatttttgaagaaagtaatgcctgattatgcctaa

SEQ ID NO: 116746 - protein, 446 aa, Medicago truncatula
MACTSANSLLQLKGSSFQRPILNLRTNISAPYSPGLFNLKGDGLIHKGFRHQSQKHLTPRNKVTVIRAVAIPVEPAPVESAEYRKQLAERYGFEQIGEPLPDNVTLKDVITSLPKKVFEIDDVKAWKSVLISATSYALGLLMISKAPWYLLPLAWAWTGTAVTGFFVIGHDCAHKSFSTNKLVEDIVGTLAFLPLIYPYEPWRFKHDKHHAKTNMLKEDTAWQPVWQDEFESSPFLRKAIIYGYGPFRCWMSIAHWLVSHFDLKTFRPNEIKRVKISLACVFAFIAIGWPLIIYKTGIMGWIKFWLMPWLGYHFWMSTFTMVHHTAPHIPFKNSEEWNAAQAQLNGTVHCAYPQWIEILCHDINVHIPHHISPKIPSYNLRAAHKSIQENWGKYLNEASWNWRLMKTIMTVCHVYDKQQNYVSFDEVAPKESRPIRFLKKVMPDYA

SEQ ID NO: 116747 - DNA, 1332 bp, Brassica napus
  CDS (1)..(1332)
atggcgtcaagaattgctgattatctcttcgccttcacgggcccacaacactgtcttcctagggcacctaagcttgcttctgctcgtctttctcctggtgtgtatgctgtgagaccaattgatcttctgttaaaaggaaccagaagaacattccttgttcctgcaaagaaaaggattggatgtataaaagctgtctctgtccctgtcgcacccccatcagctgataatgcagaagacagggaacagctagcagaaagctatggatttaagcaaattggacagaatcttcctgataacgtcaccttgaaagatatcatggatactcttcccaaagaggtgtttgagattgatgatgtgaaagcttggaagtctgttttgatatctgtgacttcctacgctttggggctcttcatgattgcaaaagctccttggtatctgcttcccttggcttgggcatggacaggaactgcagttacagggttctttgtgataggtcatgattgtgctcataaatcattttcaaagaacaaactggttgaagacattgtgggtactctagccttcctacctcttgtatacccttatgagccatggaggtttaagcacgaccgtcaccacgccaaaaccaacatgttagttcatgacacagcttggcaaccagttcctccagaggagtttgattcgtcacctgttctgcgaaaggcgattatttttggatatggcccaattaggccttggttgtccatagctcactgggtgaactggcacttcaacctgagaaagttcagaccaagtgaagtgaatagggtgaagataagtctagcttgtgttttcgccttcatggccattggttggccgctgatcatatacaaagttggtgtattgggatgggtaaagttctggttgatgccatggttgggctatcacttttggatgagtacgttcacaatggttcatcatacggctccacacattcctttcaaacctgctgatgagtggaacgcagctcaggcccagctcaacggaactgttcattgtgattaccctagttggattgagattctctgccatgatatcaacgtacacatcccgcatcacataagcccaaggataccgagctacaatctccgtgcggctcatcagtctatacaagagaactggggaaagtatacaaacttggctacgtggagttggcggttgatgaagacgataatgactgtgtgccatgtctatgacaaagaggagaactacattcctttcgaccggttagcccctgaagaatcgcaaccaataacattcctcaagaaagcaatgcctgactacgcagcctga

SEQ ID NO: 116748 - protein, 443 aa, Brassica napus
MASRIADYLFAFTGPQHCLPRAPKLASARLSPGVYAVRPIDLLLKGTRRTFLVPAKKRIGCIKAVSVPVAPPSADNAEDREQLAESYGFKQIGQNLPDNVTLKDIMDTLPKEVFEIDDVKAWKSVLISVTSYALGLFMIAKAPWYLLPLAWAWTGTAVTGFFVIGHDCAHKSFSKNKLVEDIVGTLAFLPLVYPYEPWRFKHDRHHAKTNMLVHDTAWQPVPPEEFDSSPVLRKAIIFGYGPIRPWLSIAHWVNWHFNLRKFRPSEVNRVKISLACVFAFMAIGWPLIIYKVGVLGWVKFWLMPWLGYHFWMSTFTMVHHTAPHIPFKPADEWNAAQAQLNGTVHCDYPSWIEILCHDINVHIPHHISPRIPSYNLRAAHQSIQENWGKYTNLATWSWRLMKTIMTVCHVYDKEENYIPFDRLAPEESQPITFLKKAMPDYAA

SEQ ID NO: 116749 - DNA, 1245 bp, Oryza sativa
  CDS (1)..(1245)
atggcgacggcgagcggcgtctccactcccctgcagctcccctccacgcggcgggtgggcggctgctgctcccgccccggcagcccggccccgggcaagaacgcgttcccgcggagagcagccggtggtgccccggcagatgatgaagaaaaacggaagcaaatgtgtgaagattatggattcaaacaaattggagaacagttgccagataatgttactcttaaagatgtaatggatagtctgcctaaagaggtatttgaaatcgatgatctaaaatcttggacttctgttttaatatcagttacttcttatgctcttggtattttcttgatatcaaaagctccctggtatcttcttcccttagcctgggcatggactggtacagcagttacggggttctttgtcataggtcatgattgtgcccacaaatcattttcgaggaataagctggtggaagatattgttggaactctagctttcttgccattgatatacccctatgaaccttggagatttaagcatgacagacatcatgccaagacaaacatgttgatagaagatactgcatggcaacccgttttttcaaaggagttcagaacaaattccttactgaggaaagcaatgatatttgcttatggtcctatcaggccatggatgtctattgctcactggttaatttggcactttgatctaaaaaaattcagaccaaatgagctcccaagggtgaaaataagcttagcatctgtgctagcgttcatggcaattggatggccactgattattctcaaatcaggaatagctggatggttcaagttctggttcatgccatggatggtttatcacttttggatgagcacctttacgatggtacatcacactgctcctcatataccattcaagacatcagaagagtggaatgctgcacaggcacaattaaacggcacagttcactgtgactatcctcggtggatagagatactttgtcatgacataaatgtacatgttccacaccatatttctccaagaattccaagttataaccttcgtgctgcctatgattccataaaacagaactggggcaagtacatcaatgaagccagctggaactggcgcttgatgaagacaatactgactaaatgccatgtttacgacaaggatagatactatgttccctttgatgaggttgcgcctgaggaatcccaaccaattaaattcctcaagaaggtcatgccagattatgcatga

SEQ ID NO: 116750 - protein, 414 aa, Oryza sativa
MATASGVSTPLQLPSTRRVGGCCSRPGSPAPGKNAFPRRAAGGAPADDEEKRKQMCEDYGFKQIGEQLPDNVTLKDVMDSLPKEVFEIDDLKSWTSVLISVTSYALGIFLISKAPWYLLPLAWAWTGTAVTGFFVIGHDCAHKSFSRNKLVEDIVGTLAFLPLIYPYEPWRFKHDRHHAKTNMLIEDTAWQPVFSKEFRTNSLLRKAMIFAYGPIRPWMSIAHWLIWHFDLKKFRPNELPRVKISLASVLAFMAIGWPLIILKSGIAGWFKFWFMPWMVYHFWMSTFTMVHHTAPHIPFKTSEEWNAAQAQLNGTVHCDYPRWIEILCHDINVHVPHHISPRIPSYNLRAAYDSIKQNWGKYINEASWNWRLMKTILTKCHVYDKDRYYVPFDEVAPEESQPIKFLKKVMPDYA

SEQ ID NO: 116751 - DNA, 1260 bp, Saccharomyces kluyveri
  CDS (1)..(1260)
atgtctattgaaacagtcggatcatcgtctggtgttgctattaactccaaggcagtttcctctactgccaccaccgttgttcagccaaaaacagccattgataccaatggcaacgtctttaaggttcctgactacactattaaagacattctttctgctattccaaaagagtgttacaaaagggacactttatggtccttacattacgttgtcagagacatcgctgctattcttgttattggctacctaggtaccaattacattcctgttttattccctaatagtgcattgttgagagggattgcctatgcgatccaatcctacttgatcggtctatttgggtttggcttgtggattttggcccatgaatgtggccactccgctttttcggaatctaatgctgtcaacgataccgttggctgggttttgcactcttggtggatggttccttactttccttggaagttttcgcacagcaagcatcataaagctactggccatatgaccagggacatggttttcattccttacaccaaggatgagtttattacgatgaagaagaaatcaaagtttgccgagatcacagaggaggcacccgtgatgacgctattcaatctgattgctcagcaggttggaggtttacaattatatttggctactaatgctaccggccagccttatcctggagtcaaaaagttcttcaagtcccattattggccaacttctccagtgtttgacgctaaggacttttggtggatcatcatgagtgatatcggtatcgtatcaactctgcttatcaattatttatggtaccgtgcctacggtgctcacgtcgttctgattaactggtttatcccatggctatgggttaaccactggttagtttttgtcacttttttgcaacataccgatccaaccatgccacactacgatgccgaggaatggacttttgccaaaggtgctgctgctaccatcgatagaaactttggctttgttggacaacatatcttccatgacattatcgaaacgcatgttttacaccattattgtagcagaattcccttctacaacgcacgcaaagctacttcggccatcaaggaggttatgggtcaacactaccgttacgaaggcgagaacatgtggaagtctctctggaaagttgctagatcatgtcaatatgttgagggcgacaacggtgttagaatgttcagaaacaccaatggcgttggcgtcaagccggaagatggttccagtcaatga

SEQ ID NO: 116752 - protein, 419 aa, Saccharomyces kluyveri
MSIETVGSSSGVAINSKAVSSTATTVVQPKTAIDTNGNVFKVPDYTIKDILSAIPKECYKRDTLWSLHYVVRDIAAILVIGYLGTNYIPVLFPNSALLRGIAYAIQSYLIGLFGFGLWILAHECGHSAFSESNAVNDTVGWVLHSWWMVPYFPWKFSHSKHHKATGHMTRDMVFIPYTKDEFITMKKKSKFAEITEEAPVMTLFNLIAQQVGGLQLYLATNATGQPYPGVKKFFKSHYWPTSPVFDAKDFWWIIMSDIGIVSTLLINYLWYRAYGAHVVLINWFIPWLWVNHWLVFVTFLQHTDPTMPHYDAEEWTFAKGAAATIDRNFGFVGQHIFHDIIETHVLHHYCSRIPFYNARKATSAIKEVMGQHYRYEGENMWKSLWKVARSCQYVEGDNGVRMFRNTNGVGVKPEDGSSQ

SEQ ID NO: 116753 - DNA, 1302 bp, Gloeobacter violaceus
  CDS (42)..(1100): transl_table=11
ggatccgccttgcgaggggtgaacattcagtaggagcccgcatggtacagcgacagagcttcgaggggacaggccgcgacctggaccgtcaacggattgccgccctggaaaaacaggcttccctcggcgatgtcatccagaccatacccaaagactgttttcggatcagcccggcaaaagcctgggcaagattggttgtcaatgtgctgctggttgtcttaggctacgcggctcttgctctcaacccctggtggtggctgttgccggctctatggattttcaccggcacggcactgacgggctttttcgtcatcgcccacgactgcggccaccgcagcttctcgacgcggcggcgcatcaacgacatcgtcgggcatgtgatgctcttgccgttgctctatccgttccatggctggcggatcaagcacaaccagcaccacaccttcaccaatcagatcgaaatggacaatgcctggcggccgatgtcggtggcggagtaccgcgcgctttcgccgggggtgcgggcaggctatcgctttgcccgcggcatcggttggtggttcgcctcggcggtgcaccagctcaacctgcacttcaagccgtcgctattcaagcccaaggaccgagccgatatccggctctcatccacggcagtgattgcctttgcctgcgtgttgtttccggccctactgtggatgggcggcccctgggcggtcatccagttctggctgatgccctggctggtctatcacttctggatgagcacctttacgctcgtccaccacacccacccggacattcctttttatcccgccgccacctggacgccggtgaccggtcagctgttttcgaatatccactgcgtctacccggcctgggtcgaatttctctgccacgatatcaacgtccacattccccaccatgtctcgacggcgatcccgagctacaacctcagaaaagcgcacaccgccctcaaggcgcactggtcggactacatgcacgagaccgaattttcctggtcgctgatgcgttcgatcacccgcgagtgccacctgcgcgatgaaacgggctactacctgccctgccgagaagtagattaagctctcctacgatccaagcaccttaatctgatagttgatcgggcgatctggatgtggacttcagagacttttgcttagattgacttcctcgcagcatgctgatagcgtaaatgcctccaccaacagcagctgtaataagtcagtagccggtaaagccactctccaagcttgatttcatagccgaaagcacgatgcctccacc

SEQ ID NO: 116754 - protein, 352 aa, Gloeobacter violaceus
MVQRQSFEGTGRDLDRQRIAALEKQASLGDVIQTIPKDCFRISPAKAWARLVVNVLLVVLGYAALALNPWWWLLPALWIFTGTALTGFFVIAHDCGHRSFSTRRRINDIVGHVMLLPLLYPFHGWRIKHNQHHTFTNQIEMDNAWRPMSVAEYRALSPGVRAGYRFARGIGWWFASAVHQLNLHFKPSLFKPKDRADIRLSSTAVIAFACVLFPALLWMGGPWAVIQFWLMPWLVYHFWMSTFTLVHHTHPDIPFYPAATWTPVTGQLFSNIHCVYPAWVEFLCHDINVHIPHHVSTAIPSYNLRKAHTALKAHWSDYMHETEFSWSLMRSITRECHLRDETGYYLPCREVD

SEQ ID NO: 116755 - DNA, 1347 bp, Arabidopsis thaliana
  CDS (1)..(1347)
atggcttccagaattgctgattctctcttcgccttcacgggcccacagcaatgtcttcctagggttcctaagcttgctgcttcttctgctcgtgtttctcctggtgtatatgctgtgaagccgattgatcttctgttaaaaggacgaactcatcgaagtagaagatgtgtagctcctgtgaaaaggagaattggatgtatcaaagcggtggctgctccagttgcaccgccttcagctgacagtgcagaagacagggaacagttagcagaaagctatggattcagacaaattggagaagatcttcctgagaatgtcaccttaaaagatatcatggatacacttcccaaagaggtgtttgagattgatgatctgaaagctttgaagtctgtgttgatatctgtgacttcatacactttggggctcttcatgattgcaaaatcgccgtggtatctgctaccgttggcttgggcatggacaggaactgcaattaccgggttctttgtgataggtcatgattgtgcacataagtcattttcaaagaacaaattggtggaagacattgtgggtactctcgccttcctaccacttgtctacccatatgagccatggcggtttaagcacgaccgccatcacgccaaaaccaacatgttagttcatgacacagcttggcagccagttccgccagaggagtttgagtcatcacccgtgatgagaaaggcaatcatttttggatatggcccaattagaccttggttgtccatagctcactgggtgaactggcacttcaatctgaaaaagttcagagcgagcgaggtgaatagggtgaagataagtttggcttgtgttttcgccttcatggccgttgggtggccactgatcgtatacaaagttggtatattgggatgggtaaaattctggttaatgccatggttgggctatcacttctggatgagcacattcacaatggttcatcatacggctccgcatatacctttcaagcctgcggatgagtggaacgcggctcaggcccagctgaatggaactgttcattgtgactaccctagttggattgaaattctctgccatgatatcaacgttcacatcccgcatcatattagcccaagaataccgagctacaatctccgtgcagctcatgagtctatacaagagaactggggaaagtatacaaacttggctacatggaactggcgattgatgaagacgataatgactgtgtgtcatgtctatgacaaagaggagaactacattccttttgaccggttagcccctgaagaatctcagccaataaccttcctcaagaaagcaatgcctaactacacagcctga

SEQ ID NO: 116756 - protein, 448 aa, Arabidopsis thaliana
MASRIADSLFAFTGPQQCLPRVPKLAASSARVSPGVYAVKPIDLLLKGRTHRSRRCVAPVKRRIGCIKAVAAPVAPPSADSAEDREQLAESYGFRQIGEDLPENVTLKDIMDTLPKEVFEIDDLKALKSVLISVTSYTLGLFMIAKSPWYLLPLAWAWTGTAITGFFVIGHDCAHKSFSKNKLVEDIVGTLAFLPLVYPYEPWRFKHDRHHAKTNMLVHDTAWQPVPPEEFESSPVMRKAIIFGYGPIRPWLSIAHWVNWHFNLKKFRASEVNRVKISLACVFAFMAVGWPLIVYKVGILGWVKFWLMPWLGYHFWMSTFTMVHHTAPHIPFKPADEWNAAQAQLNGTVHCDYPSWIEILCHDINVHIPHHISPRIPSYNLRAAHESIQENWGKYTNLATWNWRLMKTIMTVCHVYDKEENYIPFDRLAPEESQPITFLKKAMPNYTA

SEQ ID NO: 116757 - DNA, 1332 bp, Brassica napus
  CDS (1)..(1332)
atggcgtcaagaattgctgattctctcttcgccttcacgggcccacaacaatgtcttcctagggctcctaagcttgcttctgctcgtctttctcctggtgtgtatgctgtgagaccaattgatcttctgttaaaaggaaccagaagaacattccttgttcctgcaaagaaaaggattggatgtataaaagctgtctttgtccctgtcgcaccaccatcagctgataatgcagaagacagggaacagctagcagaaagctatggattcaaacaaattggacaagatcttcctgataacgtcaccttgaaagatatcatggatacccttcccaaagaggtgtttgagattgatgatgtgaaagcatggaagtctgtgttgatatctgtgacttcctatgctttggggctcttcatgattgcgaaagctccgtggtatctgcttcccttggcttgggcatggacaggaactgcagttacagggttctttgtgataggtcatgattgtgctcataaatcattttcaaagaacaaattggttgaagacattgtgggtactctagccttcctacctcttgtgtacccttatgagccatggcggtttaagcacgaccgtcaccacgccaaaaccaacatgttagttcatgacacagcttggcaaccagttcctccagaggagtttgattcgtcacctgttctgcgaaaggcgattatttttggatatggccctattaggccttggttgtccatagctcactgggtgaactggcacttcaacctgagaaagttcagaccaagtgaagtgaatagggtgaagataagtctggcttgtgttttcgccttcatggccgttggttggccgctgatcatatacaaagttggtgtattgggatgggtaaagttctggttgatgccatggttgggctatcacttttggatgagtacgttcacaatggttcatcatacggctccacacattcctttcaagcctgctgatgagtggaacgcagctcaggcccagctcaacggaactgttcattgtgattaccctagttggattgagattctctgccatgatatcaacgtacacatcccgcatcacataagcccaaggataccgagctacaatctccgtgcggctcatcagtctatacaagagaactggggaaagtatacaaacttggctacgtggaattggcggttgatgaagacgataatgactgtgtgccatgtctatgacaaagaggagaactacattccttttgataggttagcccctgaagaatcgcaaccaataacattcctcaagaaagcaatgcctgactacgcagcctga

SEQ ID NO: 116758 - protein, 443 aa, Brassica napus
MASRIADSLFAFTGPQQCLPRAPKLASARLSPGVYAVRPIDLLLKGTRRTFLVPAKKRIGCIKAVFVPVAPPSADNAEDREQLAESYGFKQIGQDLPDNVTLKDIMDTLPKEVFEIDDVKAWKSVLISVTSYALGLFMIAKAPWYLLPLAWAWTGTAVTGFFVIGHDCAHKSFSKNKLVEDIVGTLAFLPLVYPYEPWRFKHDRHHAKTNMLVHDTAWQPVPPEEFDSSPVLRKAIIFGYGPIRPWLSIAHWVNWHFNLRKFRPSEVNRVKISLACVFAFMAVGWPLIIYKVGVLGWVKFWLMPWLGYHFWMSTFTMVHHTAPHIPFKPADEWNAAQAQLNGTVHCDYPSWIEILCHDINVHIPHHISPRIPSYNLRAAHQSIQENWGKYTNLATWNWRLMKTIMTVCHVYDKEENYIPFDRLAPEESQPITFLKKAMPDYAA

SEQ ID NO: 116759 - DNA, 1627 bp, Glycine max
  CDS (90)..(1364)
aaaaaaatagcaacaaaaacaagaaaaaaggttacctctttcaattttatcccttgttgtgagcttaattcaatttctgctcacacataatggcttgcacgctcgctgattcattactcctattcaagggttcttatcagaaaccagttctgaggagagacattgctgcccggtactccccgggtatatttagtctaaacagtaatgggcttatccagaaaaggttcaggcgtcaaaggaattttgttactaggaataaggttactgtcatacatgccgtggcaattccagtacaaccagctccggtggaaagtgcggagtatagaaaacagctagctgaagactacggtttcaggcaagttggagagccgctttcagatgatgttactttaaaggatgtcatcaatccccttcctaaggaggtctttgagattgatgatgtgaaagcatggaaatctgttctgatatctgtcacttcttatgcactgggtctcttcatgatttccaaagccccctggtatcttcttcctctggcttgggtatggacagggactgcaataactgggttctttgttataggacatgattgtgctcacagatcattttcgtctaacaaattggtagaagacattgttggaactctggcctttatgcctctgatttatccatatgagccttggcgatttaagcatgacaggcatcatgcaaaaacaaacatgttacgtgaagatactgcttggcaccctgtttggaaggacgagtttgaatctactccacttttgaggaaagcaataatatacggatatggtccatttcgatgttggatgtctatagctcactggttgatgtggcactttgatttgaagaagttcagaccaagtgaagtaccaagggtgaagataagtttggcttgtgtttttgcctttatagcaattggatggccattaattatttacaagactggaatcatgggatggataaaattctggttgatgccatggttgggctatcacttctggatgagtacgtttaccatggtacatcatactgcaccgtatataccattcaaatactcagaagagtggaatcgtgcgcaagcacagcttaatggaactgttcattgtgattatcctaaatggatcgagatcctatgtcacgatattaatgtccatattccacaccacatatccccgaggataccaagctataatttaagagcagcccataagtctctccaagaaaactggggacagtatctgaatgaggctagttggaattggagattgatgaagacaatcatgacagtgtgtcaggtgtacgacaaggagaaaagtttatgttgccttcgacgaacttgcccctgaagattctcgtccaattacatttttgaaggaaaccatgcctgtttatgcttaattatgcccaaactggcttttttttctcatatgaaattttttatgtatcaaattaggttcgtatgccattcattttctttttacattttcgatcttgtttaatatagttctactagtatttttcatatcatgtataacgaaaaaattgcttgctgctctcaaagttcacgtattagggtaattatattaccaagttgcggattaaaaaaaaa

SEQ ID NO: 116760 - protein, 424 aa, Glycine max
MACTLADSLLLFKGSYQKPVLRRDIAARYSPGIFSLNSNGLIQKRFRRQRNFVTRNKVTVIHAVAIPVQPAPVESAEYRKQLAEDYGFRQVGEPLSDDVTLKDVINPLPKEVFEIDDVKAWKSVLISVTSYALGLFMISKAPWYLLPLAWVWTGTAITGFFVIGHDCAHRSFSSNKLVEDIVGTLAFMPLIYPYEPWRFKHDRHHAKTNMLREDTAWHPVWKDEFESTPLLRKAIIYGYGPFRCWMSIAHWLMWHFDLKKFRPSEVPRVKISLACVFAFIAIGWPLIIYKTGIMGWIKFWLMPWLGYHFWMSTFTMVHHTAPYIPFKYSEEWNRAQAQLNGTVHCDYPKWIEILCHDINVHIPHHISPRIPSYNLRAAHKSLQENWGQYLNEASWNWRLMKTIMTVCQVYDKEKSLCCLRRTCP

SEQ ID NO: 116761 - DNA, 1740 bp, Spinacia oleracea
  CDS (91)..(1434)
gctctcttcttattttcctcctttcatctcactcttcctctctccatttcaagcccgagaggagtgtgagagagagagaaagagtctgcaatggagtccgcaattaccatcagtaatcacgttaatctcgccttttctctctccagaaaccccagtttatccaccaagaattctgctggcatatcttgcataaaatggcagagaccatgcctaagaaatttaggccatgtgagactcaaccagcaaaggaagggtacaagaagaaagtcaaccttagtgcaggctgtagcagtcccagttgcacaaccttccgccttccccccgacagataacacagaacaccttaaacagctagcagagagatacggtttccaacaaattggtgagccacttcctgatgatgttacaatgagggacataattacctcacttcctaagcaggtgtttgagataaatgacacaaaagcatggggaacagttctaataagtgtgacttcatatgctttgggtatctttatgattgccaaagccccttggtatttgcttcctcttgcctgggcatggacaggcactgcaatcacagggtttttcgtgatagggcatgattgtgctcacaagtccttttcaaagaataagctagttgaagacattgttgggactcttgcatttatgccgcttatttatccttatgaaccatggcgcttcaagcatgatcagcatcatacaaaaactaatatgttgcgtgaagatacagcttggcttccgatcatgaaagaagatatagagtcatctccgggcttgcgtaaagctctaatatacgcttatggtcctcttcgaacttggatgtcaatagctcactggttaaaggttcacttcaatttgaaggatttcagacagagtgaagtgaagcgtgctacgataagcttagctgctgttttcgcatttatggttataggttggcccctgataatatataaaaccggaatagttggatggatcaagttctggctaatgccatggttgggctaccatttttggatgagtactttcacaatagttcatcatacagcgcctcatatcccttttaaaagttcaaaggagtggaatgcagcacaggcacagcttagcggaactgtacactgtgactatccccgttggatagagatcttgtgtcatgatatcagtgtgcatattcctcatcatatctctcctaaaattccaagttacaatttgcgagcagctaatcagtccctaaatgagaactggggagagtacctaaacaagcccaaatcgaattggcgtttgatgaggacaataatgacaacatgtcatatatacgataaagatggaaattacgtctcttttgagaaagctgtccctgaagaatcacagccgatatcaatccctaaaagagtgatgcctgattatgcttgataacatatcattgcgctacatttggtgcagtcaagtttttactttcaacttggccattttgtatcggtagggttaaaggcagaggcaagctagggacaacaaaaaactatcgcgtcgcatctcaggaatgaagcatttagctagctgtacggattataataattttgtaagaaatctgaatgtttcacaataaatttgtgctttctttactgaatatatctctttctcgattgctctcaagataatgtatcatcactacttgggattccattttttagttttccaaaaaaaaaaaaaaaaaaaaaa

SEQ ID NO: 116762 - protein, 447 aa, Spinacia oleracea
MESAITISNHVNLAFSLSRNPSLSTKNSAGISCIKWQRPCLRNLGHVRLNQQRKGTRRKSTLVQAVAVPVAQPSAFPPTDNTEHLKQLAERYGFQQIGEPLPDDVTMRDIITSLPKQVFEINDTKAWGTVLISVTSYALGIFMIAKAPWYLLPLAWAWTGTAITGFFVIGHDCAHKSFSKNKLVEDIVGTLAFMPLIYPYEPWRFKHDQHHTKTNMLREDTAWLPIMKEDIESSPGLRKALIYAYGPLRTWMSIAHWLKVHFNLKDFRQSEVKRATISLAAVFAFMVIGWPLIIYKTGIVGWIKFWLMPWLGYHFWMSTFTIVHHTAPHIPFKSSKEWNAAQAQLSGTVHCDYPRWIEILCHDISVHIPHHISPKIPSYNLRAANQSLNENWGEYLNKPKSNWRLMRTIMTTCHIYDKDGNYVSFEKAVPEESQPISIPKRVMPDYA

SEQ ID NO: 116763 - DNA, 1089 bp, Oryza sativa; identical to SEQ ID NO: 53804
  CDS (1)..(1089)

SEQ ID NO: 116764 - protein, 362 aa, Oryza sativa; identical to SEQ ID NO: 53805

SEQ ID NO: 116765 - DNA, 1134 bp, Brassica napus
  CDS (1)..(1134)
atggttgtcgctatggaccagcgtagcaatgcgaacggagacgaaaggtttgatccgagcgcacaaccaccgttcaagatcggagatataagggcggccattcctaagcattgttgggtaaagagtcctttgagatccatgagctatgtcgccagagacattttcgccgtcgtggctcttgccgtcgccgccgtgtattttgatagctggttcttttggcctctttattgggccgcccaaggaaccctgttctgggctatcttcgtactcggccacgactgtggacatgggagcttctcagacattcctcttctgaatactgcggttggtcatattcttcattccttcattctcgttccataccatggttggagaataagccatcggacacaccaccagaaccatggccatgttgaaaacgacgagtcttgggttccgttgccagaaaaattatacaagaatttgtcccacagtacacggatgctcagatacactgtccctctccccatgctcgcttaccctctctatctgtggtacagaagtcctggtaaagaagggtcacattataacccatacagtagtttatttgccccaagcgagagaaagcttattgcaacttcaactacttgctggtcgatcatgttggccactcttgtttatctatcattcctcgttggtccagtcacagttctaaaagtctatggtgttccttacattatctttgtaatgtggttggacgctgtcacgtacttgcatcatcatggtcacgatgataagttgccttggtacagaggcaaggaatggagttatttacgtggaggattaacaactattgatagagattacgggatcttcaacaacattcatcacgatattggaactcacgtgatccatcatcttttcccacaaatccctcactatcacttggttgatgccacgaaatcagctaaacatgtgttgggaagatactacagagaaccaaagacgtcaggagcaataccgatccacttggtggaaagtttggtggcaagtattaagaaagatcattacgtcagtgacactggtgatattgtcttctacgagacagatccagatctctacgtttatgcttctgacaaatccaaaatcaactaa

SEQ ID NO: 116766 - protein, 377 aa, Brassica napus; identical to SEQ ID NO: 53615

SEQ ID NO: 116767 - DNA, 1299 bp, Brassica napus; identical to SEQ ID NO: 53634
  CDS (1)..(1299)

SEQ ID NO: 116768 - protein, 432 aa, Brassica napus; identical to SEQ ID NO: 53635

SEQ ID NO: 116769 - DNA, 1152 bp, Brassica napus; identical to SEQ ID NO: 53808
  CDS (1)..(1152)

SEQ ID NO: 116770 - protein, 383 aa, Brassica napus; identical to SEQ ID NO: 53809

SEQ ID NO: 116771 - DNA, 1152 bp, Brassica napus; identical to SEQ ID NO: 53810
  CDS (1)..(1152)

SEQ ID NO: 116772 - protein, 383 aa, Brassica napus; identical to SEQ ID NO: 53811

SEQ ID NO: 116773 - DNA, 1146 bp, Glycine max; identical to SEQ ID NO: 53812
  CDS (1)..(1146)

SEQ ID NO: 116774 - protein, 381 aa, Glycine max; identical to SEQ ID NO: 53813

SEQ ID NO: 116775 - DNA, 1152 bp, Triticum aestivum; identical to SEQ ID NO: 53814
  CDS (1)..(1152)

SEQ ID NO: 116776 - protein, 383 aa, Triticum aestivum; identical to SEQ ID NO: 53815

SEQ ID NO: 116777 - DNA, 1332 bp, Triticum aestivum
  CDS (1)..(1332)
atggcgacggcgagcggcctctccgcccctctgcagctcctctcgttccggcgggcgcccgccaagaacctctcgccgcggagagcagccgcgggagctctgtcaggttcacttattgtgaagagattttctttatgcaacgggagaagtcatcaccaatttttaccattgaaacaaaggggaaggttgcaagcagcagtactacctgttactccaccactgcttgatgatgaggaaaaaaggaagcaaatgtctgaagattatggtttcaatcaaattggagaacagctaccagataacattactcttaaagatgtcatggatactctgcctaaagaggtatttgaaatcgatgatgtaaaggcttgggcatctgttctgatatcagttacttcatatgctttcggtcttttccttatctcaaaagctccatggtatcttcttcccgttgcttgggcatgggctggtacagcagtgactgggttttttgtcataggtcatgattgtgcacataaatcattttcaaggaataagctagtggaggatatcgttggaactctagctttcctgccattaatttacccttatgaaccttggagatttaagcatgacagacatcacgccaagacaaatatgttagtagaagatactgcatggcaacctgtttggcaaaacgaaattgaatcgtcttctttcctaaggaaggcaattatatttggttatggtcctatcaggccatggatgtctattgctcactggttgatgtggcactttgatctaaaaaaattccggccaaatgaactccctagggtgaagataagtttggcgtgtgtctttgcattcatggcaattggatggcccctaatcattcttcaatcaggaatagctggatggttcaagttctggttcatgccatggatggtttatcacttttggatgagcacctttacaatggtgcatcacactgctcctcatatacctttcaaatcatcaaaagagtggaatgctgcacaggcgcaattaaacggcacagttcactgtagctatcctcgatggatagagatcctttgccatgacataaatgtacatgtcccgcaccatatttctccgagaattccaagttataaccttcgtgctgcccacgactccattaaacagaactggggcaagtatatcaacgaggccagctggaattggcggttgatgaagacaatactgactacgtgccatgtgtatgacaaagagagatactacgtttcttttgacgagctcgtacctgaggaatctcaaccaataagattccttaagaagttcatgccagattatgcttga

SEQ ID NO: 116778 - protein, 443 aa, Triticum aestivum
MATASGLSAPLQLLSFRRAPAKNLSPRRAAAGALSGSLIVKRFSLCNGRSHHQFLPLKQRGRLQAAVLPVTPPLLDDEEKRKQMSEDYGFNQIGEQLPDNITLKDVMDTLPKEVFEIDDVKAWASVLISVTSYAFGLFLISKAPWYLLPVAWAWAGTAVTGFFVIGHDCAHKSFSRNKLVEDIVGTLAFLPLIYPYEPWRFKHDRHHAKTNMLVEDTAWQPVWQNEIESSSFLRKAIIFGYGPIRPWMSIAHWLMWHFDLKKFRPNELPRVKISLACVFAFMAIGWPLIILQSGIAGWFKFWFMPWMVYHFWMSTFTMVHHTAPHIPFKSSKEWNAAQAQLNGTVHCSYPRWIEILCHDINVHVPHHISPRIPSYNLRAAHDSIKQNWGKYINEASWNWRLMKTILTTCHVYDKERYYVSFDELVPEESQPIRFLKKFMPDYA

SEQ ID NO: 116779 - DNA, 1179 bp, Zea mays; identical to SEQ ID NO: 53816
  CDS (1)..(1179)

SEQ ID NO: 116780 - protein, 392 aa, Zea mays; identical to SEQ ID NO: 53817

SEQ ID NO: 116781 - DNA, 1326 bp, Glycine max
  CDS (1)..(1326)
atggcttgcacgctcgctgattcattactcctattcaagggttcttatcagaaaccagttctgaggagagacattgctgcccggtactccccgggtatatttagtctaaacagtaatgggcttatccagaaaaggttcaggcgtcaaaggaattttgttactaggaataaggttactgtcatacatgccgtggcaattccagtacaaccagctccggtggaaagtgcggagtatagaaaacagctagctgaagactacggtttcaggcaagttggagagccgcttccagatgatgttactttaaaggatgtcatcaattcccttcctaaggaggtctttgagattgatgatgtgaaagcatggaaatctgttctgatatctgtcacttcttatgcactgggtctcttcatgatttccaaagccccctggtatcttcttcctctggcttgggtatggacagggactgcaataactgggttctttgttataggacatgattgtgctcacagatcattttcgtctaacaaattggtagaagacattgttggaactctggcctttatgcctctgatttatccatatgagccttggcgatttaagcatgacaggcatcatgcaaaaacaaacatgttacgtgaagatactgcttggcaccctgtttggaaggacgagtttgaatctactccacttttgaggaaagcaataatatacggatatggtccatttcgatgttggatgtctatagctcactggttgatgtggcactttgatttgaagaagttcagaccaagtgaagtaccaagggtgaagataagtttggcttgtgtttttgcctttatagcaattggatggccattaattatttacaagactggaatcatgggatggataaaattctggttgatgccatggttgggctatcacttctggatgagtacgtttaccatggtacatcatactgcaccgcatataccattcaaatactcagaagagtggaatgctgcgcaagcacagcttaatggaactgttcattgtgattatcctaaatggatcgagatcctatgtcacgatattaatgtccatattccacaccacatatccccgaggataccaagctataatttaagagcagcccataagtctctccaagaaaactggggacagtatctgaatgaggctagttggaattggagattgatgaagacaatcatgacagtgtgtcatgtgtacgacaaggagcaaaattatgttgccttcgacgaacttgcccctgaagattctcgtccaattacatttttgaaggaaaccatgcctgattatgcttaa

SEQ ID NO: 116782 - protein, 441 aa, Glycine max
MACTLADSLLLFKGSYQKPVLRRDIAARYSPGIFSLNSNGLIQKRFRRQRNFVTRNKVTVIHAVAIPVQPAPVESAEYRKQLAEDYGFRQVGEPLPDDVTLKDVINSLPKEVFEIDDVKAWKSVLISVTSYALGLFMISKAPWYLLPLAWVWTGTAITGFFVIGHDCAHRSFSSNKLVEDIVGTLAFMPLIYPYEPWRFKHDRHHAKTNMLREDTAWHPVWKDEFESTPLLRKAIIYGYGPFRCWMSIAHWLMWHFDLKKFRPSEVPRVKISLACVFAFIAIGWPLIIYKTGIMGWIKFWLMPWLGYHFWMSTFTMVHHTAPHIPFKYSEEWNAAQAQLNGTVHCDYPKWIEILCHDINVHIPHHISPRIPSYNLRAAHKSLQENWGQYLNEASWNWRLMKTIMTVCHVYDKEQNYVAFDELAPEDSRPITFLKETMPDYA

SEQ ID NO: 116783 - DNA, 1362 bp, Glycine max; identical to SEQ ID NO: 53818
  CDS (1)..(1362)

SEQ ID NO: 116784 - protein, 453 aa, Glycine max; identical to SEQ ID NO: 53819

SEQ ID NO: 116785 - DNA, 1146 bp, Triticum aestivum; identical to SEQ ID NO: 53820
  CDS (1)..(1146)

SEQ ID NO: 116786 - protein, 381 aa, Triticum aestivum; identical to SEQ ID NO: 53821

SEQ ID NO: 116787 - DNA, 1164 bp, Hordeum vulgare; identical to SEQ ID NO: 53822
  CDS (1)..(1164)

SEQ ID NO: 116788 - protein, 387 aa, Hordeum vulgare; identical to SEQ ID NO: 53823

SEQ ID NO: 116789 - DNA, 1146 bp, Hordeum vulgare; identical to SEQ ID NO: 53824
  CDS (1)..(1146)

SEQ ID NO: 116790 - protein, 381 aa, Hordeum vulgare; identical to SEQ ID NO: 53825

SEQ ID NO: 116791 - DNA, 1164 bp, Zea mays; identical to SEQ ID NO: 53826
  CDS (1)..(1164)

SEQ ID NO: 116792 - protein, 387 aa, Zea mays; identical to SEQ ID NO: 53827

SEQ ID NO: 116793 - DNA, 1299 bp, Brassica napus; identical to SEQ ID NO: 53828
  CDS (1)..(1299)

SEQ ID NO: 116794 - protein, 432 aa, Brassica napus; identical to SEQ ID NO: 53829

SEQ ID NO: 116795 - DNA, 1299 bp, Brassica napus; identical to SEQ ID NO: 53830
  CDS (1)..(1299)

SEQ ID NO: 116796 - protein, 432 aa, Brassica napus; identical to SEQ ID NO: 53831

SEQ ID NO: 116797 - DNA, 1134 bp, Brassica napus; identical to SEQ ID NO: 53832
  CDS (1)..(1134)

SEQ ID NO: 116798 - protein, 377 aa, Brassica napus; identical to SEQ ID NO: 53833

SEQ ID NO: 116799 - DNA, 1314 bp, Brassica napus; identical to SEQ ID NO: 53636
  CDS (1)..(1314)

SEQ ID NO: 116800 - protein, 437 aa, Brassica napus; identical to SEQ ID NO: 53637

SEQ ID NO: 116801 - DNA, 1290 bp, Brassica napus; identical to SEQ ID NO: 53638
  CDS (1)..(1290)

SEQ ID NO: 116802 - protein, 429 aa, Brassica napus; identical to SEQ ID NO: 53639

SEQ ID NO: 116803 - DNA, 1152 bp, Brassica napus; identical to SEQ ID NO: 53836
  CDS (1)..(1152)

SEQ ID NO: 116804 - protein, 383 aa, Brassica napus; identical to SEQ ID NO: 53837

SEQ ID NO: 116805 - DNA, 1299 bp, Brassica napus; identical to SEQ ID NO: 53838
  CDS (1)..(1299)

SEQ ID NO: 116806 - protein, 432 aa, Brassica napus; identical to SEQ ID NO: 53839

SEQ ID NO: 116807 - DNA, 1152 bp, Brassica napus; identical to SEQ ID NO: 53840
  CDS (1)..(1152)

SEQ ID NO: 116808 - protein, 383 aa, Brassica napus; identical to SEQ ID NO: 53841

SEQ ID NO: 116809 - DNA, 1179 bp, Zea mays; identical to SEQ ID NO: 53844
  CDS (1)..(1179)

SEQ ID NO: 116810 - protein, 392 aa, Zea mays; identical to SEQ ID NO: 53845

SEQ ID NO: 116811 - DNA, 1152 bp, Glycine max; identical to SEQ ID NO: 53846
  CDS (1)..(1152)

SEQ ID NO: 116812 - protein, 383 aa, Glycine max; identical to SEQ ID NO: 53847

SEQ ID NO: 116813 - DNA, 1164 bp, Glycine max; identical to SEQ ID NO: 53848
  CDS (1)..(1164)

SEQ ID NO: 116814 - protein, 387 aa, Glycine max; identical to SEQ ID NO: 53849

SEQ ID NO: 116815 - DNA, 1146 bp, Glycine max; identical to SEQ ID NO: 53850
  CDS (1)..(1146)

SEQ ID NO: 116816 - protein, 381 aa, Glycine max; identical to SEQ ID NO: 53851

SEQ ID NO: 116817 - DNA, 1362 bp, Glycine max; identical to SEQ ID NO: 53852
  CDS (1)..(1362)

SEQ ID NO: 116818 - protein, 453 aa, Glycine max; identical to SEQ ID NO: 53853

SEQ ID NO: 116819 - DNA, 1362 bp, Glycine max; identical to SEQ ID NO: 53854
  CDS (1)..(1362)

SEQ ID NO: 116820 - protein, 453 aa, Glycine max; identical to SEQ ID NO: 53855

SEQ ID NO: 116821 - DNA, 1359 bp, Glycine max; identical to SEQ ID NO: 53856
  CDS (1)..(1359)

SEQ ID NO: 116822 - protein, 452 aa, Glycine max; identical to SEQ ID NO: 53857

SEQ ID NO: 116823 - DNA, 1146 bp, Glycine max; identical to SEQ ID NO: 53858
  CDS (1)..(1146)

SEQ ID NO: 116824 - protein, 381 aa, Glycine max; identical to SEQ ID NO: 53859

SEQ ID NO: 116825 - DNA, 1164 bp, Zea mays; identical to SEQ ID NO: 53860
  CDS (1)..(1164)

SEQ ID NO: 116826 - protein, 387 aa, Zea mays; identical to SEQ ID NO: 53861

SEQ ID NO: 116827 - DNA, 1332 bp, Zea mays; identical to SEQ ID NO: 53862
  CDS (1)..(1332)

SEQ ID NO: 116828 - protein, 443 aa, Zea mays; identical to SEQ ID NO: 53863

SEQ ID NO: 116829 - DNA, 1164 bp, Zea mays; identical to SEQ ID NO: 53864
  CDS (1)..(1164)

SEQ ID NO: 116830 - protein, 387 aa, Zea mays; identical to SEQ ID NO: 53865

SEQ ID NO: 116831 - DNA, 1143 bp, Glycine max
  CDS (1)..(1143)
atggttcaagcacagcctctacaacatgttggtaatggtgcagggaaagaagatcaagcttattttgatccaagtgctccaccacccttcaagattgcaaatatcagagcagcaattccaaaacattgctgggagaagaacacattgagatctctgagttatgttctgagggatgtgttggtagtgactgcattggtagctgcagcaatcggcttcaatagctggttcttctggccactctattggcctgcacaaggcacaatgttttgggcactttttgttcttggacatgattgtggtcatggaagtttttcaaacagtcctttgttgaacagcattgtgggccacatcttgcactcttcaattcttgtaccataccatggatggagaattagccacaggactcaccatcagaaccatggccatgttgagaaggatgaatcatgggttccgcttacagagaaagtttacaagaatctagacaacatgacaagaatgatgagattcactcttcctttccccatctttgcataccccttttatttgtggagcagaagccctggaaaagaaggctctcatttcaacccttacagcaacttgttctctcctggtgagagaagagatgtgctaacttcaactctgtgttggggcatcatgctttctgtgcttctctatctttccctcacaatgggtccactttttatgctcaagctctatggggttccctatttgatcttcgtcatgtggctggatttcgtcacgtacttgcatcatcatggttacaagcagaaactgccttggtaccgtggccaggaatggagttatctaaggggtggtcttacaacagtagatcgcgactatggttggatcaacaacattcaccatgacattggcacccatgttatccatcaccttttccctcaaattccacattatcatttaatcgaagcgactaaagcagcaaaggcagtgctaggaaagtattatcgtgagcctcagaaatctgggccattgccacttcatctaataaagtacttgctccacagcataagtcaggatcacttcgttagcgactctggcgacattgtgtactaccagactgattcccagctccacaaagattcttggacccagtccaactaa

SEQ ID NO: 116832 - protein, 380 aa, Glycine max; identical to SEQ ID NO: 53769

SEQ ID NO: 116833 - DNA, 1179 bp, Zea mays; identical to SEQ ID NO: 53866
  CDS (1)..(1179)

SEQ ID NO: 116834 - protein, 392 aa, Zea mays; identical to SEQ ID NO: 53867

SEQ ID NO: 116835 - DNA, 1332 bp, Zea mays
  CDS (1)..(1332)
atgtcgacggcgagcggcgtatccgctggctccgtgctccagctgccctcctttcgggtgccggccaagagatttctgcctcggagaacagccgctggtgctccggctggtaacttttttgtgaagagagatattatatataatagaagctaccaccaattcttaccattgaagcatataggaggcttgcaagcagcagtacttccagttactccaccactattagatggtgaggggaaaaagaaacaaatggctgaagagtatgggttcacacaaattggagatgaactaccagatgatattactcttaaagatgtcatggatactttacctaaagaggtatttgaaatcaatgatgtgaaggcttggacatcagttttgatatcagttacttcttatgcgctgggtttatatttcattgctaagtctccatggtatcttcttcccttggcttgggcttggacaggcacagcagtgactgggttttttgtgataggtcatgattgtgctcacaaatcattttcaaggaataagttggttgaagatgttgttggaaccttggctttcatgccattgatatatccttatgaaccgtggagatttaagcatgaccgacatcatgccaagacaaacatgttgatagaagatactgcatggcaacctgtttggcaaaaggaaattgaatcatcaccttttctaaggaaggcaattatttttggctatggccctatcaggccatggatgtctattgctcactggttgatttggcactttgatctaaaaaaattcagaccaaatgaagttccaagggttaagataagcttagcatgtgtgtttgcattcatggcgattggatggcccttgatcattctcaaatcaggactagctggatggtttaagttctggttcatgccatggatggtttatcatttttggatgagcacttttacaatggtacatcacacagctcctcatataccattcaagtcatctgaagaatggaatgctgcacaagctcaattaaacggcacagttcattgtaactatcctcaatggatagagatcctttgccatgacataaatgtgcatgtcccacaccatatttctccaagaattccaagctataaccttcgtgctgcttatgattccatcaaacagaactggggcaagtatgtcaatgaagccaactggaattggcgattgatgaagacgatactgacgagatgccatgtgtacgacaaggagagatactatgttccgttcgatgagctcgcgcctcaggagtcccaaccaatcaaattccttaggaagttcatgccagattacgcatga

SEQ ID NO: 116836 - protein, 443 aa, Zea mays
MSTASGVSAGSVLQLPSFRVPAKRFLPRRTAAGAPAGNFFVKRDIIYNRSYHQFLPLKHIGGLQAAVLPVTPPLLDGEGKKKQMAEEYGFTQIGDELPDDITLKDVMDTLPKEVFEINDVKAWTSVLISVTSYALGLYFIAKSPWYLLPLAWAWTGTAVTGFFVIGHDCAHKSFSRNKLVEDVVGTLAFMPLIYPYEPWRFKHDRHHAKTNMLIEDTAWQPVWQKEIESSPFLRKAIIFGYGPIRPWMSIAHWLIWHFDLKKFRPNEVPRVKISLACVFAFMAIGWPLIILKSGLAGWFKFWFMPWMVYHFWMSTFTMVHHTAPHIPFKSSEEWNAAQAQLNGTVHCNYPQWIEILCHDINVHVPHHISPRIPSYNLRAAYDSIKQNWGKYVNEANWNWRLMKTILTRCHVYDKERYYVPFDELAPQESQPIKFLRKFMPDYA

SEQ ID NO: 116837 - DNA, 1155 bp, Zea mays; identical to SEQ ID NO: 53868
  CDS (1)..(1155)

SEQ ID NO: 116838 - protein, 384 aa, Zea mays; identical to SEQ ID NO: 53869

SEQ ID NO: 116839 - DNA, 1224 bp, Zea mays; identical to SEQ ID NO: 53870
  CDS (1)..(1224)

SEQ ID NO: 116840 - protein, 407 aa, Zea mays; identical to SEQ ID NO: 53871

SEQ ID NO: 116841 - DNA, 1122 bp, Zea mays; identical to SEQ ID NO: 53872
  CDS (1)..(1122)

SEQ ID NO: 116842 - protein, 373 aa, Zea mays; identical to SEQ ID NO: 53873

SEQ ID NO: 116843 - DNA, 20 bp, Artificial sequence
  primer
atgactgccacgattccccc

SEQ ID NO: 116844 - DNA, 20 bp, Artificial sequence
  primer
ttaaacttttttcagggagc

SEQ ID NO: 116845 - protein, 369 aa, Artificial sequence
  consensus sequence
  Variant (2)..(15): Xaa in position 2 to 15 is any amino acid
  Variant (17)..(38): Xaa in position 17 to 38 is any amino acid
  Variant (39)..(67): Xaa in position 39 to 67 is any or no amino acid
  Variant (69)..(70): Xaa in position 69 to 70 is any amino acid
  Variant (72)..(74): Xaa in position 72 to 74 is any amino acid
  Variant (76)..(82): Xaa in position 76 to 82 is any amino acid
  Variant (84)..(85): Xaa in position 84 to 85 is any amino acid
  Variant (87)..(87): Xaa in position 87 is any amino acid
  Variant (91)..(92): Xaa in position 91 to 92 is any amino acid
  Variant (95)..(102): Xaa in position 95 to 102 is any amino acid
  Variant (105)..(113): Xaa in position 105 to 113 is any amino acid
  Variant (116)..(117): Xaa in position 116 to 117 is any amino acid
  Variant (119)..(121): Xaa in position 119 to 121 is any amino acid
  Variant (123)..(124): Xaa in position 123 to 124 is any amino acid
  Variant (127)..(134): Xaa in position 127 to 134 is any amino acid
  Variant (136)..(139): Xaa in position 136 to 139 is any amino acid
  Variant (141)..(175): Xaa in position 141 to 175 is any amino acid
  Variant (176)..(226): Xaa in position 176 to 226 is any or no amino acid
  Variant (228)..(232): Xaa in position 228 to 232 is any amino acid
  Variant (233)..(234): Xaa in position 233 to 234 is any or no amino acid
  Variant (236)..(238): Xaa in position 236 to 238 is any amino acid
  Variant (240)..(264): Xaa in position 240 to 264 is any amino acid
  Variant (265)..(266): Xaa in position 265 to 266 is any or no amino acid
  Variant (268)..(277): Xaa in position 268 to 277 is any amino acid
  Variant (279)..(284): Xaa in position 279 to 284 is any amino acid
  Variant (286)..(289): Xaa in position 286 to 289 is any amino acid
  Variant (291)..(292): Xaa in position 291 to 292 is any amino acid
  Variant (295)..(299): Xaa in position 295 to 299 is any amino acid
  Variant (300)..(301): Xaa in position 300 to 301 is any or no amino acid
  Variant (303)..(307): Xaa in position 303 to 307 is any amino acid
  Variant (308)..(308): Xaa in position 308 is any or no amino acid
  Variant (311)..(316): Xaa in position 311 to 316 is any amino acid
  Variant (318)..(318): Xaa in position 318 is any amino acid
  Variant (319)..(319): Xaa in position 319 is any or no amino acid
  Variant (321)..(323): Xaa in position 321 to 323 is any amino acid
  Variant (325)..(332): Xaa in position 325 to 332 is any amino acid
  Variant (333)..(335): Xaa in position 333 to 335 is any or no amino acid
  Variant (337)..(337): Xaa in position 337 is any amino acid
  Variant (339)..(340): Xaa in position 339 to 340 is any amino acid
  Variant (342)..(343): Xaa in position 342 to 343 is any amino acid
  Variant (346)..(349): Xaa in position 346 to 349 is any amino acid
  Variant (352)..(352): Xaa in position 352 is any amino acid
  Variant (354)..(357): Xaa in position 354 to 357 is any amino acid
  Variant (359)..(366): Xaa in position 359 to 366 is any amino acid
  Variant (368)..(368): Xaa in position 368 is any amino acid
PXXXXXXXXXXXXXXVXXXXXXXXXXXXXXXXXXXXXXXXXXXXXXXXXXXXXXXXXXXXXXXXXXXPXXWXXXGXXXXXXXVXXHXCGHXXFSXXXXXXXXVGXXXXXXXXXPYXXWXXXHXXHHXXXXXXXXDXXXXPXXXXXXXXXXXXXXXXXXXXXXXXXXXXXXXXXXXXXXXXXXXXXXXXXXXXXXXXXXXXXXXXXXXXXXXXXXXXXXXXXXXXXXHXXXXXXXFXXXEXXXXXXXXXXXXXXXXXXXXXXXXXXXGXXXXXXXXXXPXXXXXXWXXXXTXXHHXXXXXXXPXXXXXXEWXXXXXXLXXTXXXDXXXXXXXXXXXHXIXXHXXHHXXXXIPXYXXXXAXXXXXXXXGXY

SEQ ID NO: 116846 - protein, 33 aa, Artificial sequence
  protein pattern
  Variant (2)..(2): Xaa in position 2 is any amino acid
  Variant (3)..(3): Xaa in position 3 is any or no amino acid
  Variant (5)..(5): Xaa in position 5 is Asp, Glu, Gly, Asn or Ser
  Variant (6)..(6): Xaa in position 6 is any amino acid
  Variant (8)..(8): Xaa in position 8 is any amino acid
  Variant (9)..(9): Xaa in position 9 is Ala, Ile, Leu, Pro or Val
  Variant (12)..(13): Xaa in position 12 to 13 is any amino acid
  Variant (14)..(16): Xaa in position 14 to 16 is any or no amino acid
  Variant (18)..(18): Xaa in position 18 is any amino acid
  Variant (20)..(20): Xaa in position 20 is any amino acid
  Variant (21)..(21): Xaa in position 21 is Ala or Leu
  Variant (22)..(23): Xaa in position 22 to 23 is any amino acid
  Variant (25)..(27): Xaa in position 25 to 27 is any amino acid
  Variant (28)..(28): Xaa in position 28 is Ala, Ile or Leu
  Variant (29)..(32): Xaa in position 29 to 32 is any amino acid
  Variant (33)..(33): Xaa in position 33 is Gly, Pro or Ser
HXXIXXHXXHHXXXXXPXYXXXXAXXXXXXXXX

SEQ ID NO: 116847 - protein, 17 aa, Artificial sequence
  protein pattern
  Variant (2)..(2): Xaa in position 2 is any amino acid
  Variant (3)..(7): Xaa in position 3 to 7 is any or no amino acid
  Variant (9)..(9): Xaa in position 9 is Leu or Met
  Variant (10)..(10): Xaa in position 10 is Asp, Ser or Val
  Variant (11)..(11): Xaa in position 11 is any amino acid
  Variant (12)..(12): Xaa in position 12 is Phe or Val
  Variant (14)..(14): Xaa in position 14 is any amino acid
  Variant (15)..(15): Xaa in position 15 is Ile, Leu or Val
  Variant (16)..(16): Xaa in position 16 is any amino acid
PXXXXXXWXXXXTXXXH

SEQ ID NO: 116848 - DNA, 1056 bp, Thermus thermophilus
  CDS (1)..(1056): transl_table=11
atgcccgaggggatcctgcccattgagcgcgacctcctccgcttcaaggagatcgtgcggggggaggtgaagaagcgcgtgcgggagttcctcacccgggaggagctcttcggccaggtggaaggccgcctcgtctccatccccctgccccagctggagatccccaagatcgtccacggggagcccctaggggaaggcctgggcctcggggggcccggggaggaggccttgggcccgggggggcacattccggtggccgagctggagctggaggagtttttggacctcgtgggggaggccctgaggcttccccgcctaaggcccaagggggagggggaggtcacggaggaggccctgcgccacaccaccatcgcccgcaaggggccgagggggctccgccacgtgcgccgcaccctcaaggagagcctgaagagggccctgcaaagcggggagtaccgccccgaagaccccctcctcgtccccgagcgggaggacctgcgctacaaggccccgaggcgaaagcccatcccccacgcccaggcggtggtcctcttcgccctggacgtctccgggagcatgcgggaagaggagcttaagctcgtcaagaccctctccttctggatcaccctctggatcaagcggcactttcccaggctggaaaggcgctacctcctccacgacgccgaggcctgggaggtccccgaggaggagttcttcaaggcccgggagggcgggggaacgcggatctccagcgccctcctcctggcggaagagatcctcaaggcctaccccgaggccttctacaaccgctacctcttccacttctccgacggggagaactggcagggggacacgcccttggccctcgaggccctaaggcgcctcctcccctccctcgccctctacgggtacgcccaggtggagggcccctacggccaggggcacttcctggaggaggtgcgggaggccctgggaggcagggagggggtcgccctcgccgcggtgcggggccgggaggacctgcccgtggccttgaggcggcttctcggaggttaa

SEQ ID NO: 116849 - protein, 351 aa, Thermus thermophilus
MPEGILPIERDLLRFKEIVRGEVKKRVREFLTREELFGQVEGRLVSIPLPQLEIPKIVHGEPLGEGLGLGGPGEEALGPGGHIPVAELELEEFLDLVGEALRLPRLRPKGEGEVTEEALRHTTIARKGPRGLRHVRRTLKESLKRALQSGEYRPEDPLLVPEREDLRYKAPRRKPIPHAQAVVLFALDVSGSMREEELKLVKTLSFWITLWIKRHFPRLERRYLLHDAEAWEVPEEEFFKAREGGGTRISSALLLAEEILKAYPEAFYNRYLFHFSDGENWQGDTPLALEALRRLLPSLALYGYAQVEGPYGQGHFLEEVREALGGREGVALAAVRGREDLPVALRRLLGG

SEQ ID NO: 116850 - DNA, 1323 bp, Pseudomonas putida KT2440
  CDS (1)..(1323): transl_table=11
ttgtggcttgcagcttgtgggttgcagctgcatccagtcaccggagggaccatgagctacgttatagaccgacgcctgaacggcaagaacaagagcacggtcaaccgccagcgcttcctgcggcggtaccgcgaacatatcaagaaggccgtcgaagaggcggtgagccgccgttccatcatggatatggaacatggcgagcagatcagtattcccgggcgcgacatcgacgaaccggtcttgcatcatggtcgtgggggcaaacagaccatcgtgcatcctggcaacaaagaattcactgccggtgaacacatcccacggccgcaaggcggtggaggcggtggcggtcgcggcaaggccggcaattccggcgagggcatggacgagttcgtcttccagatcacccaggaagaatttctcgaattcatgttcgaagaccttgagctacccaacctggtcaaacgtcacctgactggcgccgacaccttcaagactgttcgcgccggcatcgccaacgaaggcaacccgtcacgcatcaatatcgtgcgcaccctgcgctcggcccatgcccggcgtatcgccctgaccggcagcagccgcgccctgctgcgcgaagcacaaaaggaactcgatcgcctgcgggtcgaagagccggacaatttcaccgatatccaggaagtcgaacaggaaatcgagcgcctgaaggcacgtatcaaccgcctgcccttcctcgacaccttcgacctcaagtacaacctgctggtcaagcaacccaaccccagctcgaaggcagtgatgttctgcctgatggacgtatccggttcgatgacccaagccaccaaggacatcgcaaagcgcttcttcatcctgctgtacctgttcctcaagcgtaactacgagcgcatcgaagtcgtgttcattcgccaccacaccagtgcccgggaagtcgatgaagaagagttcttctactcgcgggaaaccggcggcaccatcgtctccagtgccctaaagctgatgcaggagatcatggccgagcgttacccggccagcgactggaacatctatgccgcgcaggcttctgatggcgacaactggaacgacgactcacccatctgccgcgacatcctctccaaacagatcatgccgcatgtgcagtactacacttacgttgagatcaccccccgtgaacaccaggcgctgtggtatgaatacgagcgtatcggagatgctttccccgacacgttcgcccagcagcagttggtatcggccggcgatatctacccggtcttccgtgaactcttccagcgcaggttagccacatga

SEQ ID NO: 116851 - protein, 440 aa, Pseudomonas putida KT2440
MWLAACGLQLHPVTGGTMSYVIDRRLNGKNKSTVNRQRFLRRYREHIKKAVEEAVSRRSIMDMEHGEQISIPGRDIDEPVLHHGRGGKQTIVHPGNKEFTAGEHIPRPQGGGGGGGRGKAGNSGEGMDEFVFQITQEEFLEFMFEDLELPNLVKRHLTGADTFKTVRAGIANEGNPSRINIVRTLRSAHARRIALTGSSRALLREAQKELDRLRVEEPDNFTDIQEVEQEIERLKARINRLPFLDTFDLKYNLLVKQPNPSSKAVMFCLMDVSGSMTQATKDIAKRFFILLYLFLKRNYERIEVVFIRHHTSAREVDEEEFFYSRETGGTIVSSALKLMQEIMAERYPASDWNIYAAQASDGDNWNDDSPICRDILSKQIMPHVQYYTYVEITPREHQALWYEYERIGDAFPDTFAQQQLVSAGDIYPVFRELFQRRLAT

SEQ ID NO: 116852 - DNA, 1161 bp, Clostridium tetani E88
  CDS (1)..(1161): transl_table=11
atggcaatctttagaatctatacaccaatttcttataatagagcaggggaggatagaaaaaggcatagagaattagtggagaaatctataaaagataatttggtagatgtattactacaggaagatatatctatacaaaaagaaaacataaaaataaaggtacctataaagggggttaaggaatatgagttcacatattctcaaaatagatcctttgtggtagtaggaaaaggaaatgaaaagaaggggcagaaaatagcattaaaaagagcatcagagcaaggtggaggagctggagcaggagaaatagaaggtgaggatatatttgaaactgaagtaactatagaggaaatatttcagagtatatttgatgatttagaacttcctaatttaaaaaagaaaaaatttaataagatattaaatgatagttttaaaaggaaaaaaggatttaaaaaacatggtatatctccaaggttagctaaaagaagaacagctatagaaaaagtaaaaagaaaacaggctacccaaaaggtattgggaagagatatagctgaaagatttccttttaaaaaagatgatttaagatatagtagagttaaacttaataaaaataaagaatataatgcagtaataatatgcataatggacacttccgcttcaatggatcaaatgaaaaaatatatggcaaggtcttttttctttatgatatacaaatttataaaaatgaaatatgaagaggtagatatatgctttatatcccactcaactacggcaaaagaagttacagaagaggaattctttcataaagttgaatctggaggaacatatatatccagtggatacaagaaagcattagaaataataaatacaaggtataatccacagatatataatatatatacatttcatgctagtgatggggataattggaatgaagataatgatagagctgtaaaagtagctaaggaattaagcaatgtatgtaatttgtttgggtatatagaaataatggggtatggatactctaatggcattagaaataaatatctaaaggaaatagaaaaagaaaattttatacctcttatcattgaaaaaaaagaagatctttggagggctttaaaagatatattaaagcaagagatgagggaggagagaggatga

SEQ ID NO: 116853 - protein, 386 aa, Clostridium tetani E88
MAIFRIYTPISYNRAGEDRKRHRELVEKSIKDNLVDVLLQEDISIQKENIKIKVPIKGVKEYEFTYSQNRSFVVVGKGNEKKGQKIALKRASEQGGGAGAGEIEGEDIFETEVTIEEIFQSIFDDLELPNLKKKKFNKILNDSFKRKKGFKKHGISPRLAKRRTAIEKVKRKQATQKVLGRDIAERFPFKKDDLRYSRVKLNKNKEYNAVIICIMDTSASMDQMKKYMARSFFFMIYKFIKMKYEEVDICFISHSTTAKEVTEEEFFHKVESGGTYISSGYKKALEIINTRYNPQIYNIYTFHASDGDNWNEDNDRAVKVAKELSNVCNLFGYIEIMGYGYSNGIRNKYLKEIEKENFIPLIIEKKEDLWRALKDILKQEMREERG

SEQ ID NO: 116854 - DNA, 1260 bp, Bordetella bronchiseptica RB50
  CDS (1)..(1260): transl_table=11
atgaattcgctcattgatcggcggctcaacggccgcaacaaaagcgctgtcaaccgtgagcgctttctaaggcggtacaaggaccagatccgcaaggcagtacaggacctgatccgcgagcggtccatctcggacatggaccagggcggggaaatcaaccttcccgcgcgcgatatctccgagccgagcttccggcacggggaggggggcgatcgcgagatcgtccaccccggcaaccgcgagttcgccaagggcgataccttcgatcgcccgcaaggcggcgacggcggttccggctcgcagcccggcgagggcgaatcggtggatcagttcaccttcagcctgtcgcgcgccgagttcctgaacctgttcttcgaggatctggagctgccgcacctggcgcgcacgcaactgggcgatgtcaagcagcagcgctggcatcgcgccggctacaccaccaccggctcgcccagcatgctgagcgtcaaccgcacgctgaaggcgtcgctgtcgcggcgcgtggcgctgggggtgggcgcgcgcgcggcgctggatgcggccgaacaggaactggaagcggcgcgcgacgccggcgcaccgcaggccgagctggaccggctgctggccgaagtcgagaagtgcgccgcgcgggtggcgcgcgtgcccttcctggacgacctcgacctgcgctaccgcaaccgcgtggcggtggcggtgcccatggcgcgcgccgtcatgttctgcctgatggacgtgtccgggtcgatggacgaaatgaagaaggacctggccaagcgcttcttcacgctgctgtacatgttcctgtcgcgcaagtacgagcatgtggacgtgatcttcatccgccataccgacaacgccgaggaggtggacgagcagacgttcttctacgatcccaagagcggcggcaccatcgtgctgtccgccctggagctgatgcacgagatcgtgcagaagcgctattcgccggcgacgtggaacatctacgcggcgcaggccagcgacggcgactcgtttggcgccgatgcgggcaagagcgcgcgctttctggccgagaacctgctgccggccacgcgctatttcgcctatatcgaggttcccgactcgcaggaggcgcgcaagagcagcctgtgggccgaatacgaacaagagtcggcgtcgcatttcgtgatgcggcgcatatgcgaacgcggggagatcttcccggtgttccatgacctgttcaagaaggaaaccgtatga

SEQ ID NO: 116855 - protein, 419 aa, Bordetella bronchiseptica RB50
MNSLIDRRLNGRNKSAVNRERFLRRYKDQIRKAVQDLIRERSISDMDQGGEINLPARDISEPSFRHGEGGDREIVHPGNREFAKGDTFDRPQGGDGGSGSQPGEGESVDQFTFSLSRAEFLNLFFEDLELPHLARTQLGDVKQQRWHRAGYTTTGSPSMLSVNRTLKASLSRRVALGVGARAALDAAEQELEAARDAGAPQAELDRLLAEVEKCAARVARVPFLDDLDLRYRNRVAVAVPMARAVMFCLMDVSGSMDEMKKDLAKRFFTLLYMFLSRKYEHVDVIFIRHTDNAEEVDEQTFFYDPKSGGTIVLSALELMHEIVQKRYSPATWNIYAAQASDGDSFGADAGKSARFLAENLLPATRYFAYIEVPDSQEARKSSLWAEYEQESASHFVMRRICERGEIFPVFHDLFKKETV

SEQ ID NO: 116856 - DNA, 1098 bp, Bdellovibrio bacteriovorus HD100
  CDS (1)..(1098): transl_table=11
atgtcgatacgcgaagaccataacagattcagagagatcgttaaaggcaaggtcaaagaggatctgcgcaagtacgtctctcagggcgaaatgatcgggaagcgtgaagatgaattcgtgaagattccgcttccgcgcatcgatattcccaacttccggtacggtcccaaacaacagggcggggtcggtcagggggaagggcagccgggtcaggatgttggtgatccgggtgaaggcggacagggtcaggccggcgaggctccgggcgaacaccttgtcgaagtcgaaatgtcgatggacgagctggcggacattctgggtgaaaaactggaattgccgctgattcagcccaaaggcgccaaaaacattgattccctgaagacaaaattcacaggccttgcgccggtggggccagagggcttgcgccacttcaaatcatcttacaaacgtgccttgaagcgcatggtgggttccggaacttataattccgaagacccgctggtgctgccgatccgccgggatatgcagtacaagtcctttaagaaagtgcagcaaccacaaacccaggccgtggtcatctatatgatggacgtgtcgggttccatgggtgaagagcagaaggaaatcgtccgtctggaaagtttctggattaacacctggctgcgcaaacactataagggccttgaaaccagatttatcattcacgacgcctcggccaaagaggtggacgaagacacgttcttccgcaccagtgagtcgggtggaaccctgatcagctcggcttataagctgtgccaggaaatcattcagacggattatcccacgaatgaatggaacatttatccgttccatttttcagatggcgataactggtcgggcgaggatacgcgtctatgtgttaagatgctgcaggaattcttcctgccgaactgtaacgttttcagttatggccaggtggaaagcaaatacggcagcgggcagttcctgaaggacctgcaaaaggaatttggcgaggatgaaagactgacactcagtcagatcgaaaaccgcgacaagatcctggattcaatcaaagacttcctaggaaaaggaaagtag

SEQ ID NO: 116857 - protein, 365 aa, Bdellovibrio bacteriovorus HD100
MSIREDHNRFREIVKGKVKEDLRKYVSQGEMIGKREDEFVKIPLPRIDIPNFRYGPKQQGGVGQGEGQPGQDVGDPGEGGQGQAGEAPGEHLVEVEMSMDELADILGEKLELPLIQPKGAKNIDSLKTKFTGLAPVGPEGLRHFKSSYKRALKRMVGSGTYNSEDPLVLPIRRDMQYKSFKKVQQPQTQAVVIYMMDVSGSMGEEQKEIVRLESFWINTWLRKHYKGLETRFIIHDASAKEVDEDTFFRTSESGGTLISSAYKLCQEIIQTDYPTNEWNIYPFHFSDGDNWSGEDTRLCVKMLQEFFLPNCNVFSYGQVESKYGSGQFLKDLQKEFGEDERLTLSQIENRDKILDSIKDFLGKGK

SEQ ID NO: 116858 - DNA, 1320 bp, Yersinia pestis biovar Microtus str. 91001
  CDS (1)..(1320): transl_table=11
gtgaggccggtggatgcaagcttggcaaagtcgtttgggggatatatgggctatttcattgacagacgacttaacggcaagaataaaagcatggtgaatcgccagcgctttttacgccgctataagtcgcaaattaaacaatcgattgccgatgccatcaacaaacggtcggtaaccgatatagaaagtggcgagtcagtttcaatacctatcgacgacatcaatgagccaatgtttcatcaaggcaatggtgggttgcgccatcgagtgcaccctggcaatgaccactttatcaccaatgaccgggtagaccgccctcaaggcggcggtggcggcggtagcggtcaaggtaatgccggtaaagatggtgaaggtgaggatgagtttgtctttcagatctctaaagatgaatacctggacttactgtttgaagatctcgccctgcccaatctgaaaagaaaccagtataaacagctggcagaatttaagacacaccgagcgggatatacctctaatggcgtgccagccaatatcagtgtggtacgttcactgcagaattcactggctcgccggactgcgatgaccgccagcaaacggcgcgagttgcgtgaactggaggcggcgcttactgtgctggagaattctgagccagcgcaattgttagaagaagaacgcttacgcaaggcgattaccgagttaaagcaaaaaattgctcgggttccgtttattgatacctttgatttacgctataaaaattacgagcgtcgccctgaaccctccagtcaagccgtcatgttctgcttgatggatgtctcgggatccatggaccaagccacgaaagatatggctaagcggttttatattctgctctatctcttcctgagccggacctataaaaacgtcgatgtggtgtatatccgccaccatacgcaagccaaagaagtggatgaacaggagtttttctactcgcaagaaaccggcggaaccatcgtctccagtgcactgaaattgatggatgaagtggttcaagagcgttataacccggcgcagtggaacatttatgccgctcaggcttctgatggtgataactgggcagatgactcaccgttgtgccatgaattactggccaaaaagattctaccggtggtgcgttactacagttatatcgagataacccgccgcgctcatcaaacgttatggcgcgagtatgaagatctggaagagaaattcgacaactttgccatacaacatattcgtgaacccgaagatatttatcccgtcttccgtgagttgttccacaaacagaccgtagataattag

SEQ ID NO: 116859 - protein, 439 aa, Yersinia pestis biovar Microtus str. 91001
MRPVDASLAKSFGGYMGYFIDRRLNGKNKSMVNRQRFLRRYKSQIKQSIADAINKRSVTDIESGESVSIPIDDINEPMFHQGNGGLRHRVHPGNDHFITNDRVDRPQGGGGGGSGQGNAGKDGEGEDEFVFQISKDEYLDLLFEDLALPNLKRNQYKQLAEFKTHRAGYTSNGVPANISVVRSLQNSLARRTAMTASKRRELRELEAALTVLENSEPAQLLEEERLRKAITELKQKIARVPFIDTFDLRYKNYERRPEPSSQAVMFCLMDVSGSMDQATKDMAKRFYILLYLFLSRTYKNVDVVYIRHHTQAKEVDEQEFFYSQETGGTIVSSALKLMDEVVQERYNPAQWNIYAAQASDGDNWADDSPLCHELLAKKILPVVRYYSYIEITRRAHQTLWREYEDLEEKFDNFAIQHIREPEDIYPVFRELFHKQTVDN

SEQ ID NO: 116860 - DNA, 1269 bp, Clostridium thermocellum ATCC 27405
  CDS (1)..(1269): transl_table=11
gtggaaggattaaaccccttaatcccgcaaaaatcaaaccggggggtgattgatgtggctattttcagagaatatgtgagcggcggaaaagacagagctgctgaagacaggcggcgccacagggaattggttgaagaatccataaaaaagaatataggtaatatcattgcagaggaaagtattatcggtcagagcaaggacaaaaaaataaaaataccgataagaagcattaaagaatatcagtttgtatacgggaaaaacggtccttcggtgggttccggagacggaacggaaaagcgcggggaaaaaataggcgaggagaaaacggctaacggcggacagggagttgggcaggccggaaaccaggaaggggaagaaatttatgagacagaaattacaattgaggaactcataaattatctctttgatgatttgaatcttccggatatagataaaaagaggattgcggagcaggaatccataagaagctacaagaacctgggttatcagcgaaaaggaatacccccaagacttgccaagaagcgttccgttattgaaaagataaaaagaaagcaggcatatctgagaaacagcagagaattgggcgatttggacgaaagtgccgaagaggatatcgccgcgcaggagaccttggacggtgtcagaaagagatttcctttcagcgaggatgatttgcgatacagaagggtcagagaggaccgcaaaaaagatttcaatgcagtggttatctgtattatggatgtttccggttccatggaccagacaaagaagtatcttgcccgaagcttttattttttgctgtaccagtttataagattgaaatatgccaatgttgatgttgtttttatagcccataccaccactgcgaaagaagtcagtgaagatgaattttttcacagaggcgaatcgggaggaacatatatcagcagcggctatgaaaaagctcttgaaataatcgagcagagatacaaccccaacagttggaatatatatgcttttcattgcagtgacggcgacaactggtccgaggacaataaaaaagccgtcgaacttggattgaaactctgtgatgtgtgcaacctgtttggatacggtgaaatagtgccgggttattattccaccggaagtactataaaagacgagtttcaaaaaagcattaaaagagacaatttttctgtcataacaataaccaataaagatgatgtgcttccaggattgaagaaactcctggaaaaggaaggagaataa

SEQ ID NO: 116861 - protein, 422 aa, Clostridium thermocellum ATCC 27405
MEGLNPLIPQKSNRGVIDVAIFREYVSGGKDRAAEDRRRHRELVEESIKKNIGNIIAEESIIGQSKDKKIKIPIRSIKEYQFVYGKNGPSVGSGDGTEKRGEKIGEEKTANGGQGVGQAGNQEGEEIYETEITIEELINYLFDDLNLPDIDKKRIAEQESIRSYKNLGYQRKGIPPRLAKKRSVIEKIKRKQAYLRNSRELGDLDESAEEDIAAQETLDGVRKRFPFSEDDLRYRRVREDRKKDFNAVVICIMDVSGSMDQTKKYLARSFYFLLYQFIRLKYANVDVVFIAHTTTAKEVSEDEFFHRGESGGTYISSGYEKALEIIEQRYNPNSWNIYAFHCSDGDNWSEDNKKAVELGLKLCDVCNLFGYGEIVPGYYSTGSTIKDEFQKSIKRDNFSVITITNKDDVLPGLKKLLEKEGE

SEQ ID NO: 116862 - DNA, 1275 bp, Erwinia carotovora subsp. atroseptica SCRI1043
  CDS (1)..(1275): transl_table=11
atggcctattttattgatcgacggctgaacggcaaaaacaaaagcacggtgaaccgccaacgctttctgcgccgctataagtcgcaaataaaacagtcgatttccgaggccattaataagcgttcggtgaccgacatcgaaagcggggagtcagtatcgatccccaatgcagacatcaacgaaccgatgttccatcaggggcgcggaggacaccgccaccgcgtccacccaggtaacgatcacttcgtacagaacgacaaaatcgagcggccacaaggaggtggcggcagtggttccggtcagggtgacgccagtaaagacggcgaaggcgatgatgaatttgtctttcagatctccaaagatgaatatctggacctgctgtttgaagatctggcgctgccgaatctgaagaagacccagcaccgacagatgaccgagtacaaaatgcatcgcgccgggtacaccgctaacggcgttcctgccaatatcagcgtggtacgttcgttgcaaaactcgctggcacgccgtatggcgatgacagcgggtaaacgtcgcacgctgcatgagttggaagagtcgttagaacagctggcatacaccgaaccggcacaattgctggaagaggaacggctacgggaggacatcgccgaactacgcaagaaaatcgcgcgcgtgccttttatcgatacgtttgacctgcgctacaagaactacgagcgccgggccgagccatcgagtcaggccgtgatgttctgtttgatggatgtgtctggatccatggatcaggcgacaaaagacatggcgaaacgcttttatattctgctgtacctgttcctcagcagaaattacaaaaacgtcgacgttgtctacattcgccaccacacgcaggctaaagaagtcgatgaacaggagttcttctactctcaggaaactggcgggaccattgtctccagtgcgctaaagctgatggaggaagtcgtgcgcgagcgttacgacccgtcacaatggaatatctacgccgcacaagcatcggatggcgataactgggctgatgattcaccgctgtgtcaccagattctggcgagtaaacttctgccgatggtgcgttactacagctacattgaaatcacccggcgttcacaccagacgctctggcgtgaatatgaaacgctgcgcgatacgttcgacaatttcgccatgcagcatattcgcgatcaagatgatatctaccctgtcttccgtgaactcttccgtaaacaaaccgtaggacattga

SEQ ID NO: 116863 - protein, 424 aa, Erwinia carotovora subsp. atroseptica SCRI1043
MAYFIDRRLNGKNKSTVNRQRFLRRYKSQIKQSISEAINKRSVTDIESGESVSIPNADINEPMFHQGRGGHRHRVHPGNDHFVQNDKIERPQGGGGSGSGQGDASKDGEGDDEFVFQISKDEYLDLLFEDLALPNLKKTQHRQMTEYKMHRAGYTANGVPANISVVRSLQNSLARRMAMTAGKRRTLHELEESLEQLAYTEPAQLLEEERLREDIAELRKKIARVPFIDTFDLRYKNYERRAEPSSQAVMFCLMDVSGSMDQATKDMAKRFYILLYLFLSRNYKNVDVVYIRHHTQAKEVDEQEFFYSQETGGTIVSSALKLMEEVVRERYDPSQWNIYAAQASDGDNWADDSPLCHQILASKLLPMVRYYSYIEITRRSHQTLWREYETLRDTFDNFAMQHIRDQDDIYPVFRELFRKQTVGH

SEQ ID NO: 116864 - DNA, 1143 bp, Symbiobacterium thermophilum IAM 14863
  CDS (1)..(1143): transl_table=11
atggcctcgacgtctcggcacgactggagcctgcatcggaaggggcccgtcgatcaggcccggcacaatgaaaaggtcaaggaggcgatccggcagaacctgcccgagatcatcgccgaggagtccatcatcacctccgacgggaagcggcttgtcaaagtgcccatccggacgctggaggagtaccgcttccggttcaaccccaaccagggtaagcgcgtgggacagggtgacggcgactcgaaggtcggcgacgtgatcgcacgggccaggcccgggggccagggcggcggcggaacgcagcccggggaccagcccggggtcgactactacgaggccgaggtgacggtcgacgacctggcggagctcatcttcgaggacctcggcctgccggacctgaggccgaagtcgacgcaggagatccccaccgaggaggtgcggttcaccgaggtccggaagaaggggccgatgtccaacctggaccggcggcggaccatcatggagaacctgaagcggaacgcccgccggggcatgcccgttctgggcaacatcaccaacgacgacctgcggttcaaggtgtgggagcaggagatgcgccccagcagcagcgccgtcgtgatcgcgatgcgcgacgcctccggatctatgggcgaatttaagaagtatatcacccggagcctgttcttctggatgattcggttcctgcgcaccaagtaccaggacgtggagatcgtcttcatcacgcaccactccgaggcgcaggaagtggacgaggaagcgttcttcaagatgggcgagagcggcggcacgcgggtctcctcggcctataagctggcgttggagatcatccaggagcggtacgaccccgagcggtggaacatctacccgttccacttcagcgacggcgacaactggagcgacaacgacaacaggctgtgcgtggagctggtgggaaagctgctggaggtctgcaatctgttcgggtacggggagattcgcgagggcgggtacacaagttccctgatgagcgcgttctcggcgatcaaggacccgcggttcgtgatcgtgacgatcacggagaagcgggacgtgtacccggccttgcagaagtggttcagccgcggcggtatggcggtggggtga

SEQ ID NO: 116865 - protein, 380 aa, Symbiobacterium thermophilum IAM 14863
MASTSRHDWSLHRKGPVDQARHNEKVKEAIRQNLPEIIAEESIITSDGKRLVKVPIRTLEEYRFRFNPNQGKRVGQGDGDSKVGDVIARARPGGQGGGGTQPGDQPGVDYYEAEVTVDDLAELIFEDLGLPDLRPKSTQEIPTEEVRFTEVRKKGPMSNLDRRRTIMENLKRNARRGMPVLGNITNDDLRFKVWEQEMRPSSSAVVIAMRDASGSMGEFKKYITRSLFFWMIRFLRTKYQDVEIVFITHHSEAQEVDEEAFFKMGESGGTRVSSAYKLALEIIQERYDPERWNIYPFHFSDGDNWSDNDNRLCVELVGKLLEVCNLFGYGEIREGGYTSSLMSAFSAIKDPRFVIVTITEKRDVYPALQKWFSRGGMAVG

SEQ ID NO: 116866 - DNA, 1188 bp, Symbiobacterium thermophilum IAM 14863
  CDS (1)..(1188): transl_table=11
atggcagacctgccgtttgtcatctcccgggaggactggtccctgcaccgccaggggcagatggaccaggagcggcaccaggcgcggatccgggaggccatccgggccaacctggccgacatcgtgagcgacgaggccattatcgccagcgacggccgcaaggtggtgcggctgccgatccgggtcctgagggagtaccggttccggctggactggcagaagcagccccgggtgggcgaggcggacggccccgtccgccccggtgagcccgtcggccggcccggccgggcagccgaggcggccggcggcagcggcgccggcgacgaggccggcgaagactggttcgagaccgacgtgccgctggaggagctggaggagctgctcttcgctgagctctccctcccccacctcgaacccaaacaggagccccacctgaccgtgctgcaccacgagtggcgggacgtgcggcgccaggggctctacgccaatatcgacaagaagcgcaccttgctggaagcgatgaagcgcaaccggctggccggaaggccgcccctggcggggatccgccgggaggacctgcgcttccggacctgggatgaggccgagatccccggagccagcgccgtgctgatcatcatgatggatacctcgggttccatgggcacgggggagaagtacatcgcccgcagcctctgccactggatggtccgcttcctccgcacccggtatgagcgggtgaagctccacttcgtcgcccacaccaccgaggcgaaggagatggacgaggagtctttcttcacccggggcgaatccggcggcacccgctgctcctcggcctacgagtatgccctgcagctcatcgaccggcggtacccgcccgaccggcacaacctctacgccttccacttctccgacggcgacaacctcatctcggacaacccccgggcggtggccctgctgcggaagctgctggaacgctgcgcgctggtgggctacgggcagatcgagacgcagccccagtacctctccatgccctactaccagcccaacacgctcctcaccctgttccgcgaggagatcgaccacccgcgcttcgtcaccgccctgatccgggaccgctcggagatctacgcggccttgcgggccttcttcccgcggccgggcgccggcgaaaggggggccggatga

SEQ ID NO: 116867 - protein, 395 aa, Symbiobacterium thermophilum IAM 14863
MADLPFVISREDWSLHRQGQMDQERHQARIREAIRANLADIVSDEAIIASDGRKVVRLPIRVLREYRFRLDWQKQPRVGEADGPVRPGEPVGRPGRAAEAAGGSGAGDEAGEDWFETDVPLEELEELLFAELSLPHLEPKQEPHLTVLHHEWRDVRRQGLYANIDKKRTLLEAMKRNRLAGRPPLAGIRREDLRFRTWDEAEIPGASAVLIIMMDTSGSMGTGEKYIARSLCHWMVRFLRTRYERVKLHFVAHTTEAKEMDEESFFTRGESGGTRCSSAYEYALQLIDRRYPPDRHNLYAFHFSDGDNLISDNPRAVALLRKLLERCALVGYGQIETQPQYLSMPYYQPNTLLTLFREEIDHPRFVTALIRDRSEIYAALRAFFPRPGAGERGAG

SEQ ID NO: 116868 - DNA, 1266 bp, Azoarcus sp. EbN1
  CDS (1)..(1266): transl_table=11
atgacccgcatcatcgatcgtcggtttgacagcaagaagaaaagcgcggtcaatcgccagcgcttcatgcgccgcttcaagcagcagattcgccgcgcggtcagcgatgcgatccaggatcgctcgattcgcgatctggacaatggcgaacagatatcgatcccgtcgaaggatctgagtgaaccgcagttccagcacggccgcggcggagtgtgggagcaggttttttcaggcaacgaccagttctcgagcggcgacctgatcaaccgcccgccagcaggcggcggaggtcgcggccagggcaaggccagcaacgagggcgaaggggaggacgacttcgttttccacctgtcgcgcgaggagttcctcgacattttcttcgacgacctcgcgttgccgaacctgatccgcacgcaactggccaagatcaccgactacaagacgcagcgggccggtttcaccgccgacggctcgccggcgaacatcaacatcatccgctcgatgcgcggggcgctgggacgcaggctcgcactcggttccccgtttacgacacggctgcgggaactgcagaaggaactcgacgctgtcatcgaggaccacggcgaggacagcccggaagcgatcgcgctgcgggaggaaatcgcccgggtgcgcgccaagatcgaggcgatcccgttcatcgacagcttcgacctgcgctacaacaaccgcatcaaggtgccgaagccgaccacgcaggcggtgatgttctgcgtgatggatgtctccggctcgatggacgaagagaagaaggccactgccaagcgcttcttcatgctgctctacctgttcctcaatcgcacctacgaacacatcgaggtggtgttcatccgtcaccatacgatcgccaaggaagtcgacgaggacgagttctttcactcgcgcgagtcggggggcacggtcgtgtcgagcgcgctcaagctgatgcacgaagtcatcgcttcgcggtacatgcgcggcagctggaacatctacggtgcccaggcttccgacggggacaactgggacaacgattcgccgatctgccgcgacttgctcgacgcccagatcctgccctactgccagtacttctcgtacatcgagatcactcccggcgagccgcagaacctctggcgcgaatacgagaagctgatgggggctcacaagaacttcgccatgcagagaatcgaagcgccggccgacatctatccggtattccgcgaactgttcaagaagacgctcgtatga

SEQ ID NO: 116869 - protein, 421 aa, Azoarcus sp. EbN1
MTRIIDRRFDSKKKSAVNRQRFMRRFKQQIRRAVSDAIQDRSIRDLDNGEQISIPSKDLSEPQFQHGRGGVWEQVFSGNDQFSSGDLINRPPAGGGGRGQGKASNEGEGEDDFVFHLSREEFLDIFFDDLALPNLIRTQLAKITDYKTQRAGFTADGSPANINIIRSMRGALGRRLALGSPFTTRLRELQKELDAVIEDHGEDSPEAIALREEIARVRAKIEAIPFIDSFDLRYNNRIKVPKPTTQAVMFCVMDVSGSMDEEKKATAKRFFMLLYLFLNRTYEHIEVVFIRHHTIAKEVDEDEFFHSRESGGTVVSSALKLMHEVIASRYMRGSWNIYGAQASDGDNWDNDSPICRDLLDAQILPYCQYFSYIEITPGEPQNLWREYEKLMGAHKNFAMQRIEAPADIYPVFRELFKKTLV

SEQ ID NO: 116870 - DNA, 1275 bp, Pseudomonas fluorescens Pf-5
  CDS (1)..(1275): transl_table=11
atgagctatgtgatcgaccgacgtctcaatggcaagaacaagagcacggtaaaccgccagcggtttctgcggcgctaccgtgaccacattaaaaaggccgtcgaagaggcggttagccggcgctccatcaccgatatggagcatggcgagcaaatcagcattcccgggcgggatatcgacgagccggtgctgcaccacggccgtggcggcaagcagaccgtggttcacccaggcaacaaggaattcactgccggcgagcacattgccaggcctcaaggcggcggtgggggcggtggcggccggggcaaggccggcaactccggcgaaggcatggacgagttcgtgttccagatcacccaggaggaattcctcgaattcatgttcgaggacctggaactgcccaacctggtgaaacgcaacctgaccggaaccgacaccttcaagaccgtacgagccgggatcagcaacgaaggcaacccggcccggatcaatatcatccgtaccttgcggtcggcccacgcgcggcgcattgccttgtccggcagcagccgggccaagctgcgcgaagccaaggaagaactggcgcgcctgaagcgggaagaaccggacaatttcggcgatatccaggagcttgaggcggaaatcgagcgcctgagtgcccggattcaccgcgtgcccttcctcgacaccttcgacctcaagtacaacctgctggtgaaacagcccaaccccagctccaaggcggtgatgttctgcctgatggacgtttccggctccatgacccaggccaccaaggacatcgccaagcgtttcttcatccttctgtacctgttcctcaagcgcaactacgacaagatcgacgtcgtgttcatccgccaccacaccagtgcccgggaagtggacgaagaggagttcttctattcacgggaaaccggcggcaccatcgtctccagcgccctgaagctgatgcaggagatcatggccgaacgctacccgagcaacgagtggaacatctacgctgcccaggcctccgatggcgacaactggaacgacgactcgccgatctgccgcgacatcctgatcaaccagatcatgccgttcgtgcagtactacacctacgtggaaatcaccccgcgcgagcaccaggccctgtggttcgagtacgaacgcatcgccgaggccttttccgatacattcgcccagcagcaactggtttcggccggagacatctatccggtcttccgtgaactcttccagcgcaggttagtgacatga

SEQ ID NO: 116871 - protein, 424 aa, Pseudomonas fluorescens Pf-5
MSYVIDRRLNGKNKSTVNRQRFLRRYRDHIKKAVEEAVSRRSITDMEHGEQISIPGRDIDEPVLHHGRGGKQTVVHPGNKEFTAGEHIARPQGGGGGGGGRGKAGNSGEGMDEFVFQITQEEFLEFMFEDLELPNLVKRNLTGTDTFKTVRAGISNEGNPARINIIRTLRSAHARRIALSGSSRAKLREAKEELARLKREEPDNFGDIQELEAEIERLSARIHRVPFLDTFDLKYNLLVKQPNPSSKAVMFCLMDVSGSMTQATKDIAKRFFILLYLFLKRNYDKIDVVFIRHHTSAREVDEEEFFYSRETGGTIVSSALKLMQEIMAERYPSNEWNIYAAQASDGDNWNDDSPICRDILINQIMPFVQYYTYVEITPREHQALWFEYERIAEAFSDTFAQQQLVSAGDIYPVFRELFQRRLVT

SEQ ID NO: 116872 - DNA, 1263 bp, Ralstonia eutropha JMP134
  CDS (1)..(1263): transl_table=11
atgggcacggtcatcgacaggcgtgagaacggcggcaacaaaagtgccgtcaacaagcagcgctttatcaagcgctaccgagagcagatacgccaggcggttgcgaaggcggtgtccggccggaagatcatggacatcgagcaaagcggtcaggtgtccattccggtcaaggacatctccgagccgatctttcatcacggcccgggcgggcggcgtgagtggatccatcccggcaacaagaagttcgtccggggggattcattcgaccgccagcagcagggcggcggcggaaccggttcgcgcgccagcgatagcggcgagggcgaggacgatttcgtcttcacgctgtcgcgcgaggatttcctgaatttcttcttcgaggacatggcgctgccggacctggccaagcgccaccttgccaagatcgcggaagtgcgcaaggtgcgcgccggctactcgatcgacggcacgccttcgaacctgtcgatcctgcgcaccatgcgcagttcgatcggccggcgcattgcgttgtccagcccgtaccagaagcgcctgcgcgaactggaggacgcttacaacgaggcgctggagaaggaaggtccttacgcggactccgcgctcgagctgatgaaagagatgcggcacctgcgtgcctgcatcgaccgcgtaccgttcatcgagaagctcgacctgcgctacaacaaccgcgtgctcaagaagcggccgcaggcccaggcggtgatgttctgcctgatggacgtctcgggctcgatggacgagagccgcaaggatctcgccaagcgcttcttcatgctgctgtacctgttcctgaaacgtaactacgagcgcatcgacgtggtgttcattcgccatcacaccgtggccaaggaggtggaagaggaggatttcttccattcgcgtgagtccggtggtaccgtggtgtcgagcgcgctgaagctgatggtcgaggtcatccatgaccgctatccgcccagccagtggaacatctactgtgcgcaggcatccgacggcgacaactgggccggggattccgagctgtgtggtcgtttgctgcgcgagtcgatcctgccgctggtgcagtactacgcgtatgtggaggttgcctcggaggaaccgcagaatctctgggaagagtacctgacggtcaaaggtcagttcgagcacttcgcgatgcagcgcatcatcagtccggacgagatttatccggttctgcacgacctgttccagaagcgcgcggcctga

SEQ ID NO: 116873 - protein, 420 aa, Ralstonia eutropha JMP134
MGTVIDRRENGGNKSAVNKQRFIKRYREQIRQAVAKAVSGRKIMDIEQSGQVSIPVKDISEPIFHHGPGGRREWIHPGNKKFVRGDSFDRQQQGGGGTGSRASDSGEGEDDFVFTLSREDFLNFFFEDMALPDLAKRHLAKIAEVRKVRAGYSIDGTPSNLSILRTMRSSIGRRIALSSPYQKRLRELEDAYNEALEKEGPYADSALELMKEMRHLRACIDRVPFIEKLDLRYNNRVLKKRPQAQAVMFCLMDVSGSMDESRKDLAKRFFMLLYLFLKRNYERIDVVFIRHHTVAKEVEEEDFFHSRESGGTVVSSALKLMVEVIHDRYPPSQWNIYCAQASDGDNWAGDSELCGRLLRESILPLVQYYAYVEVASEEPQNLWEEYLTVKGQFEHFAMQRIISPDEIYPVLHDLFQKRAA

SEQ ID NO: 116874 - DNA, 1260 bp, Thiobacillus denitrificans ATCC 25259
  CDS (1)..(1260): transl_table=11
atgagtcaactcgtcgaccgccggctttcgggcaagaaccgcagcgctgtcaaccgccagcgcttcctgcgccgtttcaaggcgcagatccgcaaggcagcggcgcaggccgtgtcgggacggaaagtcgccgatctcgagcgcggcgagaagatttcgatcccgtcgaaggacctctcggaaccgatcttccaccacggtcccggcggtcgccgcaacgtcatcctgcccggcaaccgcgagttcgtcagcggcgaccgcatcgaccgtcccgcgggcgagggcggcggcggaagcggcggatcgcctgacggcgagggcatggacgacttcgtcttcgagctctcgaaagaagagttcatggactacttttttgaagacctcgccctgcccgacatggtgaagaagcagctcgcggccgtgcccgaggtgaagaagtcgcgggcaggcttcgtcagccacggcaacccggccaatctgcacgtcgtgcgctcgatgaagcaggcgatcggccgtcgcctggcgatggccgccggcccgcgcgaggcgctgcggcaggcggaagaagccctcgaggcgctcgtcgccgagggccgaggcgcggaacccgacgccgaggccttacgcgaggagatcgcagcgctcaaggcgcgcgttgcggccgtgcctttcatcgacacctgggatctgcgctatgcgcatcgcgtcgaccagccggtgccgagcagccaggccgtgatgttctgtctgctcgacgtgtcggggtcgatggacgaagaccgcaagaacatcgccaagcgcttcttcatgctgctctatctttttctgaccaagagctacgagcggatcgacgtggtcttcatccgtcatcacaccgtcgccaaggaagtcgacgaggaggagttcttttcctcacgcgagagcggcggcaccgtcgtgtcgagtgcgctcgaattgatgcgagacatcatcctcgcgcgctatccgacctcgaactggaacatctacgccgcgcaggcgtcagatggcgacaactgggacgacgactcgccacgctgccgtgacctgctgctgcagagcatcctgccgctgacccagtatttcgcctacgtcgagatcgaggcagaggagccgcagagcctgtggcgcgagtacgagcgcgtgaaggcggcgagcccacgctttgcgatgcagcgcatccttgcgctcgaagacatctacccggtgttccgcgaattgttcaggaagaaggccgcttga

SEQ ID NO: 116875 - protein, 419 aa, Thiobacillus denitrificans ATCC 25259
MSQLVDRRLSGKNRSAVNRQRFLRRFKAQIRKAAAQAVSGRKVADLERGEKISIPSKDLSEPIFHHGPGGRRNVILPGNREFVSGDRIDRPAGEGGGGSGGSPDGEGMDDFVFELSKEEFMDYFFEDLALPDMVKKQLAAVPEVKKSRAGFVSHGNPANLHVVRSMKQAIGRRLAMAAGPREALRQAEEALEALVAEGRGAEPDAEALREEIAALKARVAAVPFIDTWDLRYAHRVDQPVPSSQAVMFCLLDVSGSMDEDRKNIAKRFFMLLYLFLTKSYERIDVVFIRHHTVAKEVDEEEFFSSRESGGTVVSSALELMRDIILARYPTSNWNIYAAQASDGDNWDDDSPRCRDLLLQSILPLTQYFAYVEIEAEEPQSLWREYERVKAASPRFAMQRILALEDIYPVFRELFRKKAA

SEQ ID NO: 116876 - DNA, 1137 bp, Carboxydothermus hydrogenoformans Z-2901
  CDS (1)..(1137): transl_table=11
gtgggcaattgtataatttccagagaagattggagtcttcaccgcaaaggagaattagataaagaacggcatcaggaaaaagtacgggaagcaattaaaagaaacctgccggaaattttaagtgacgaagccataatcatgagcgatggcaaaaaaataatcaaggttccgattcgcagcattgaacattatcactttcgctacgattttaataaacaaaaacataccgggcagggaagtgggggtacaaaagttggagatgttttgggtaaagaaagtgggagtgccaagggtgataaaggcaaaggagcaggaggtttacccggttatgattactatgaagcggaagtttcgcttgatgaattaacggaaattcttttggaagatttagaactcccccatttaaaaaacaaaagtaaagataaaataacccatgaaaattacgactttcgcgatgttagaaaaaaaggcttaatgggtaatattgaccggaaaaaaacagtatatgaagctttaaaaagaaatcttttaaaaaatagtgaaaatctgtatcaaatcacccaagacgatttaaggtttaagacctgggacgaagtagaaaaacccgagtccaaagcagtggttattgccatgatggatagttccggttccatgggaccttttgagaaatacattgcccgaacttttttcttctggttggtgaaagttttaaaattaaaatatcaaaatgttgaaataatttatttatcccatcataccgaagccaaagaagttacggaaaaggagttttataccaagggtgaaagcggaggtaccaaatgctcctcggtataccaattagctttagacataattaaacagcgttataatccgcagcaatacaatttgtatgcgtttcacttttcggatggggataatttatcttcagataatgagcggtgtttacagcttgtgcttgaactcttaaaggtatgtaatttagtcggttacggagaaattgaaggcccatattattataccgccactttgaaaaatgagtttaaaaaaataaccagtcccaactttgttctgacttcaataaaagataaagcggggatttataccgcgttaaaagcttttttaaaaaaagatggttaa

SEQ ID NO: 116877 - protein, 378 aa, Carboxydothermus hydrogenoformans Z-2901
MGNCIISREDWSLHRKGELDKERHQEKVREAIKRNLPEILSDEAIIMSDGKKIIKVPIRSIEHYHFRYDFNKQKHTGQGSGGTKVGDVLGKESGSAKGDKGKGAGGLPGYDYYEAEVSLDELTEILLEDLELPHLKNKSKDKITHENYDFRDVRKKGLMGNIDRKKTVYEALKRNLLKNSENLYQITQDDLRFKTWDEVEKPESKAVVIAMMDSSGSMGPFEKYIARTFFFWLVKVLKLKYQNVEIIYLSHHTEAKEVTEKEFYTKGESGGTKCSSVYQLALDIIKQRYNPQQYNLYAFHFSDGDNLSSDNERCLQLVLELLKVCNLVGYGEIEGPYYYTATLKNEFKKITSPNFVLTSIKDKAGIYTALKAFLKKDG

SEQ ID NO: 116878 - DNA, 1164 bp, Moorella thermoacetica ATCC 39073
  CDS (1)..(1164): transl_table=11
atgccggtggagtacaacctttcccgggaagactggtccctgcaccgcaagggttaccttgatcagcagcggcaccaggaaaaggtccgggaagccattaaaaaaaacctgcctcacatcatagctgaagagagtatcatcatgggccggggtaaaaaggtggtccgggtgcccatccgcagcctggaggagtatcacttccgctttaactacaaccaggggcagcatgccggccagggcagcggcggtactcggaaggggaccgttattggccgtgaggtcatcgaaggcgctggcgggggggccggggccggcgacgaaccggggatggattactatgaggccgaggtcaccctggaagaggtccaggagatgctcttccgggacctggagcttcccaacctccgggagaaaaagaaaccggtgatggcttcccccgcttatgagtttcgcgacgtgcgccgcaagggcctcatgggcaacctggataaaaaacgtaccctcctggaaaacctcaagcgtaacgccatgaagggcaagctggccatcggcggtattacgccggaggacctgcgctttaaaacctgggaggagaagatccgctacgagaccagcgccgtagtcctggccatgatggatacctccggctccatggggacatatgagaagtatatcgcccgcaccttcttcttctggatggtgcgtttcctgcgcagcaggtaccagcaggtggaactggtctttatcgcccaccatacccaggcccgcgaggtaacggaggaagagttcttcgccaagggtgagagcggcggtacccgctgctcctcggcctaccgcctggccctggagatcatcgaccggcgctatccaccggcggattacaatatctaccccttccattttaccgacggcgacaacctccccagcgacaatgaggcctgcctggaggctgtccaggaactcctgcccagggtcaacctcctgggttacggggagattgtcaatccctattaccgtaccagcaccctgatgaatgtcctcaagcgcatcaaggacgaccgcctggtgacggtggcggtcaaggataagagcgaggtctaccaggctctgcggcaattctttgccgggtcaaaagggggagaagctggtggaacaagaatttaa

SEQ ID NO: 116879 - protein, 387 aa, Moorella thermoacetica ATCC 39073
MPVEYNLSREDWSLHRKGYLDQQRHQEKVREAIKKNLPHIIAEESIIMGRGKKVVRVPIRSLEEYHFRFNYNQGQHAGQGSGGTRKGTVIGREVIEGAGGGAGAGDEPGMDYYEAEVTLEEVQEMLFRDLELPNLREKKKPVMASPAYEFRDVRRKGLMGNLDKKRTLLENLKRNAMKGKLAIGGITPEDLRFKTWEEKIRYETSAVVLAMMDTSGSMGTYEKYIARTFFFWMVRFLRSRYQQVELVFIAHHTQAREVTEEEFFAKGESGGTRCSSAYRLALEIIDRRYPPADYNIYPFHFTDGDNLPSDNEACLEAVQELLPRVNLLGYGEIVNPYYRTSTLMNVLKRIKDDRLVTVAVKDKSEVYQALRQFFAGSKGGEAGGTRI

SEQ ID NO: 116880 - DNA, 1266 bp, Burkholderia thailandensis E264
  CDS (1)..(1266): transl_table=11
gtgcttcatcaaatcatcgaccgcagactggccggcaagaacaagagcattgcaaatcgcgagcgcttcctgcgccgcgtcaagaactacattcgtcgtgcagtgtccgacgcggtgcgcgatcgcagcatcaaggacatccagagcacgcagagcatcacgattccccgcaaggacatcgcggagccgacgttccggcacgggccgggcggcaagcgcgaactcgtgcatccgggcaacgccgactacgtgcgcggcgacaagatcccgcgtccgccaggcggcgccgggggcggaggcagccaggcgagcaacgaaggcgagagtcaggacgacttcgtgttcgagctgtcccgcgaggaattcatgcagtacttcttcgacgatctcgaactgccgcgcctcgtcaagacccatctgctgaccgtgccgagctggaagaacgttcgcgcgggctgggcggcggagggcacgccgaacaacatcgacgtcgtgcgttcgctcagaagcgccctcggccgtcgcatcgcgctcggctcgccgctcgtcaacgaactgcgcgagctcgaggaaaagctcgccgcgctgaaggaggagcagggcgatcaccgcgtcgagatcgcgcagctcgaggatgcgatccaccatctgaagggccgcatctggcgcattccgttcatcgatccgttcgacctgcgctacgtgaatcgcgtgaagctgccgcagccgtcgagccaggcggtgatgttctgtctgatggacgtgtcgggatcgatggacgagcagcgcaaggatctcgcgaagcgcttcttcatcctgctgtacctgttcctgaagcgcaactacgagcggatcgaagtcgtgttcatccgccatcacacgcgcgcggaggaagtcgacgaggacacgttcttccattcgaccgaaagcggcggcacggtcgtgtcgagcgcgctcgagctgatgcgcaaggtgatggacgagcgctattcgccgaccgaatggaacatctacggcgcgcaggcgtccgacggcgacaactggaccgacgattcgccgaagtgccgcaagatcctcgacgaggacatcctgacgaaggtgcgctacttcgcgtacatccaggtgacgcccgaggagcagaacctgtggctcgaatacgcgcaactggcgttgtcgcagccgcatctcgcgatgaagaaagtggaatcggccgccgacatttaccccgtgttccgggaactctttgaaaagcacgtggaaacctga

SEQ ID NO: 116881 - protein, 421 aa, Burkholderia thailandensis E264
MLHQIIDRRLAGKNKSIANRERFLRRVKNYIRRAVSDAVRDRSIKDIQSTQSITIPRKDIAEPTFRHGPGGKRELVHPGNADYVRGDKIPRPPGGAGGGGSQASNEGESQDDFVFELSREEFMQYFFDDLELPRLVKTHLLTVPSWKNVRAGWAAEGTPNNIDVVRSLRSALGRRIALGSPLVNELRELEEKLAALKEEQGDHRVEIAQLEDAIHHLKGRIWRIPFIDPFDLRYVNRVKLPQPSSQAVMFCLMDVSGSMDEQRKDLAKRFFILLYLFLKRNYERIEVVFIRHHTRAEEVDEDTFFHSTESGGTVVSSALELMRKVMDERYSPTEWNIYGAQASDGDNWTDDSPKCRKILDEDILTKVRYFAYIQVTPEEQNLWLEYAQLALSQPHLAMKKVESAADIYPVFRELFEKHVET

SEQ ID NO: 116882 - DNA, 1131 bp, Desulfitobacterium hafniense Y51
  CDS (1)..(1131): transl_table=11
atgagtgatgatattattgtcagccgggaggattggggcttacatcgcaaaggctatctggatcaaaaccggcacaaagagaaagttcaggaagcgatcaaaaagcagcttggggatttaatcgttgatgaaagcatcatcctcagtgatggcaaaaaggctaccaaaataccgatgcgctccttagaagagtttcgctttcgttttgattacaacaagaaaaagcacacaggccaaggaagcaaaagaatgcaggatggcgatatcctggctcgggaaagccagcgcaaacaaggggccggtaaaggtccgggtgccggagatgagccgggagtcgatatttatgaggctgaagtcacttatgaggatctggctacacttctttttgaggaattgcagcttcctaatttggatgataaaaaacgccccttgattgctcatgataaaccggaatttaaagatattcgcaagaaaggcctgatggccaatattgataaaaaacgcactcttatcgaaagcatcaaacggcaggccttggccggcaaggatcaagacctcaaaatacttcctgaggatttgcgctttaagacctgggaaactcatcctaactatgaaaccaatgccgttatcctggctatgatggatacctcagggtccatgggtcagtttgaaaagtatatatcacgaaccttctttttctggatggtgcgtttcttaagggaaaagtatgaaaatgtggaaatgcgctttttggcccatcacactgaagcgaaagaagtcacggaagaggagttttttacccggggagaaagcggtggaactcgttgttcctccgtctatcaactggctttagaaattatccggcgggattatcctcctgcccactataatatttatccggttcattttactgatggcgataatattggctcagacaacacccggtccttgaatctgatgcaaaagcttgtggacgtgagtcaggtagttggctatggcgagattctcagaacccactactccagcaccctcatgtcctctctaaagcgtattacggatcctaagctccgctttgtcacgattcgcgatcgccaagaagtttatgaagcgctgaaaacggtattttcttag

SEQ ID NO: 116883 - protein, 376 aa, Desulfitobacterium hafniense Y51
MSDDIIVSREDWGLHRKGYLDQNRHKEKVQEAIKKQLGDLIVDESIILSDGKKATKIPMRSLEEFRFRFDYNKKKHTGQGSKRMQDGDILARESQRKQGAGKGPGAGDEPGVDIYEAEVTYEDLATLLFEELQLPNLDDKKRPLIAHDKPEFKDIRKKGLMANIDKKRTLIESIKRQALAGKDQDLKILPEDLRFKTWETHPNYETNAVILAMMDTSGSMGQFEKYISRTFFFWMVRFLREKYENVEMRFLAHHTEAKEVTEEEFFTRGESGGTRCSSVYQLALEIIRRDYPPAHYNIYPVHFTDGDNIGSDNTRSLNLMQKLVDVSQVVGYGEILRTHYSSTLMSSLKRITDPKLRFVTIRDRQEVYEALKTVFS

SEQ ID NO: 116884 - DNA, 1272 bp, Burkholderia xenovorans LB400
  CDS (1)..(1272): transl_table=11
gtgcttcatcaaatcatcgaccgcaggttggcaggcaagaacaagagcattgcgaatcgcgaacgttttttgcgtcgcgtcaagaactacattcgtcgcgcagtttcggaagccgtgcgcgatcgcagcatcaaggatattcagaacacccagagcatcaccattccgcgcaaggacattgcggagccgtcgttccggcatgggcccggcggcaagcgggaaatggtgcatccgggcaattccgactacatccgcggcgacaagatccagcgcccgcaagggggcggcggcggaggcgggggcaatcaggccagcaatgaaggcgagggtcaggacgacttcgtgttcgagctgagccgcgaagagttcatgcagtatttcttcgacgacctcgaactgccgcgtctcgtcaaaacccatctgatggccgtgcccacgtggaaaagcatccgcgcgggctgggctgcggaaggcacgccgaataacatcgacgtggtccgttcgctgcgcagcgcgctcggccgccgcatcgcgctcggtgcgccgctcgtcaaccagttgcacgagatggaacggcaactcgagacgatgaaagccgatcccgacgatcgtcgcgaagagatcaagctgctcgaagaggaaattcaccatttgcgcgggcgcatctggcggattccgttcatcgatcccttcgatctgcgctacgtgaaccgcgtgaagcagcccacgccttcgagccaggcggtgatgttctgtctgatggatgtgtccggttccatggacgagcagcgcaaggacctcgccaagcgcttcttcatcctgctgtatctgtttctcaagcgcaattacgagcgtatcgaggtggtgttcatccgccaccatacgcgcgccgaagaggtcgacgaagacaccttcttccattcgaccgaaagcggcggcacggtagtatcgagcgcgctggagctgatgaagaaggtaatggacgagcgttattcgccgactgaatggaatatttacggcgcccaggcgtcggacggcgacaactggaccgacgactcgccaaagtgccgcaagatactctcggatgacatcctggagaaggtgcgctattttgcgtatattcaggtgacaccggaagagcagaacctgtggctcgaatatgcgcaactggcattgagccagccgcacatggcaatgaagaaggtcgagaccgcggccgatatttatccggtgttccgggagttgtttgaaaagcaggcggctaattcatga

SEQ ID NO: 116885 - protein, 423 aa, Burkholderia xenovorans LB400
MLHQIIDRRLAGKNKSIANRERFLRRVKNYIRRAVSEAVRDRSIKDIQNTQSITIPRKDIAEPSFRHGPGGKREMVHPGNSDYIRGDKIQRPQGGGGGGGGNQASNEGEGQDDFVFELSREEFMQYFFDDLELPRLVKTHLMAVPTWKSIRAGWAAEGTPNNIDVVRSLRSALGRRIALGAPLVNQLHEMERQLETMKADPDDRREEIKLLEEEIHHLRGRIWRIPFIDPFDLRYVNRVKQPTPSSQAVMFCLMDVSGSMDEQRKDLAKRFFILLYLFLKRNYERIEVVFIRHHTRAEEVDEDTFFHSTESGGTVVSSALELMKKVMDERYSPTEWNIYGAQASDGDNWTDDSPKCRKILSDDILEKVRYFAYIQVTPEEQNLWLEYAQLALSQPHMAMKKVETAADIYPVFRELFEKQAANS

SEQ ID NO: 116886 - DNA, 1272 bp, Ralstonia metallidurans CH34
  CDS (1)..(1272): transl_table=11
atggctacggtcatcgatcggcgggagaacggcggcaacaagagcgccgtcaatcagcaacgcttcatcaaacgctaccgcgagcagatcaggcaagcggtggcgaaggcggtgtccggtcggaagatcatggacatcgagcagagcgggcaggtgtccattccggtcaaggacatctccgagccgatttttcatcacggccagggtggccggcgcgagtggattcacccgggcaacaagaagttcgtcaggggcgacagcttcgaccgccagcaacagggtggcggcggcggcgggtctcgcgccagcgatagtggcgagggcgaggacgacttcgtcttcacgctgtcgcgcgaggatttcctgaacttcttcttcgaggacatggcgctgccagacctggccaagcgtcacctcgccaagatcgccgaagtgcgcaaggtgcgcgctggcttctcgatcgacggcacgccatcgaatctctcgatcctgcgcacgatgcgcagttcgctcgggcggcgcattgccttgtcgagcccctatctcaagcgcctgcgcgagctcgagctcgaatacaacgacgaagtcgagaaggatccgtactccgagaaggcggaggcgctgatggagaggatgcgccatctgcgcgcccaggtggatcgggtgccgttcatcgagaagctggatctgcgctacaacaatcgcgtgctcaagaagcgtccgcaggcgcaggcggtgatgttctgtctgatggacgtgtcgggctcgatggatgaaagccgcaaggatctggccaagcgcttcttcatgctgctctacctgttcctgaagcggaactacgagcgcatcgacgtggtgttcatccgccatcacacggtggccaaggaagtcgacgaggaggacttcttccattcgcgcgagtccggtggtaccgtggtctcgagcgcgctcaagctgatggtcgaggtgattcacgatcggtatccgccgagccaatggaacatctactgcgcccaggcgtccgatggtgacaactgggccggcgattcggagctttgcgggcgcctgttgcgcgagtcgatcctgccgcttgtgcagtattacgcctacgtggaggtggcttcggaagaaccgcagaatctctgggaggagtacctcacggtgaagggcgagttcgagcacttcgcgatgcagcgcatcatcggtgctgacgagatctatcccgtgttgcacgacctctttcagaagcgggccgcgtggcccggcaggtag

SEQ ID NO: 116887 - protein, 423 aa, Ralstonia metallidurans CH34
MATVIDRRENGGNKSAVNQQRFIKRYREQIRQAVAKAVSGRKIMDIEQSGQVSIPVKDISEPIFHHGQGGRREWIHPGNKKFVRGDSFDRQQQGGGGGGSRASDSGEGEDDFVFTLSREDFLNFFFEDMALPDLAKRHLAKIAEVRKVRAGFSIDGTPSNLSILRTMRSSLGRRIALSSPYLKRLRELELEYNDEVEKDPYSEKAEALMERMRHLRAQVDRVPFIEKLDLRYNNRVLKKRPQAQAVMFCLMDVSGSMDESRKDLAKRFFMLLYLFLKRNYERIDVVFIRHHTVAKEVDEEDFFHSRESGGTVVSSALKLMVEVIHDRYPPSQWNIYCAQASDGDNWAGDSELCGRLLRESILPLVQYYAYVEVASEEPQNLWEEYLTVKGEFEHFAMQRIIGADEIYPVLHDLFQKRAAWPGR

SEQ ID NO: 116888 - DNA, 1110 bp, Myxococcus xanthus DK 1622
  CDS (1)..(1110): transl_table=11
gtgaccttgaagatccaccaggaccactcccgcttcaaacagatcgtccgggggaagatcaaagccaacctgcgcaagtacgtgcagaagggcgagatgattgggaagaaggggaaggacgccatctccatccccatccccttcatcgacatcccccgcttcaagtacggacacaaggaacaggggggcgtcgggcagggtgacggcgacgtcggccaacagctcggccccggggcggtggagcccggcgagggcaagcaggccggccagggcgaaggcgaccacgccatggaggtggacgtcacgctcgacgagctcgcccagattctgggcgaggagctgcagctgcccaacatcgagcggcggcagaacgagcgcatcatcacccagaagatccgctacaccggcgtcaacaccaccggcccggagtcgctgcggcacttcaagcggaccttcaagcaggccctgcggcggcagattgccgctggcacgtatgacccggcgcggcccgtcatcatccccacgcgcgaggaccgccgctaccgcagctacaagctccaggacctgcccgaaacgaacgcggtcatcatctacatgatggacgtgtccggctccatgggtgacgagcagaaggagatcgtccgcatcgagagcttctggctcgatacgtggctgcgccaccaatacaagggcctggaggcgcgctacatcatccacgacgcggtggcgcgcgaggtggaccgcgacacgttcttccacacccgcgaatccggcgggacgatgatctccagcgcctacaagctctgccgggacatcatcctggcggactacccgaagagcgcgtggaacatctacccgttccacttcagcgacggggacaactggagcgcggacgacacgcggcagtgcattgaaatgctgcgcaacgacgtgctgcccaacgtcaaccagttcgcctacggccaggtggagtcgccctacggcagcggccagttcatcaaggatttgcgcgaggcggtgggggacacgcccaacgtcgcgctgagcgaaatcgcggacaaggacgccatctatgcgtccatcaaggacttcctcggcaagggccgctga

SEQ ID NO: 116889 - protein, 369 aa, Myxococcus xanthus DK 1622
MTLKIHQDHSRFKQIVRGKIKANLRKYVQKGEMIGKKGKDAISIPIPFIDIPRFKYGHKEQGGVGQGDGDVGQQLGPGAVEPGEGKQAGQGEGDHAMEVDVTLDELAQILGEELQLPNIERRQNERIITQKIRYTGVNTTGPESLRHFKRTFKQALRRQIAAGTYDPARPVIIPTREDRRYRSYKLQDLPETNAVIIYMMDVSGSMGDEQKEIVRIESFWLDTWLRHQYKGLEARYIIHDAVAREVDRDTFFHTRESGGTMISSAYKLCRDIILADYPKSAWNIYPFHFSDGDNWSADDTRQCIEMLRNDVLPNVNQFAYGQVESPYGSGQFIKDLREAVGDTPNVALSEIADKDAIYASIKDFLGKGR

SEQ ID NO: 116890 - DNA, 1179 bp, Clostridium perfringens ATCC 13124
  CDS (1)..(1179): transl_table=11
atggccatatttagagatcaagcagaaaaccatgtagaacatgatagatctatagaggatagaagacgtcacaggcagttagtagaaaaatctattaaagaaaatttaggagatatactttcagaggagagcataattggagagactaaaaataaaaaatataaaattcctattagaggaataaaggaatatcaatttatttatggtgcaaataataaaggggtcacaacaggtactggagaagaaagacgaggggatagaatttctagtgataagagaaaagctatttctaataataaagcaggaaatcaggagggaaaggatatatatgaaactgagataaccttagaggaacttatggattatatagttgaggatcttgatttacctaacttagataggaagaagtactctgaaataatagttgaaagtgcagctaaaaaaagaggatatcaaaaatatggtgtaaggccaaggcttgcaaagaaaaaaactgttatgtgtaaaatagctagaaaacaaggaaaaaaaagagcattgcgtgaaataggagaagaagcggaaataggaagatttccttttagagaagatgacttaagatattataaagtgaaaaaacatcctaaaaaagaaagcaatgctgtaatgatttttataatggacgtttcaggttctatggataacactaaaaaatatttagctagatcatttttctttgttttatctaggtttataaggagaaaatataataatgtagcctttgaattcatatctcatactactacagctaagaatgttaatgaatatgagtttttccacaaaggggaatctggaggaacgtatatatcttcgggaataaatgctgccatagatttaataaaagaaaagtataacccaggcgtttggaatatatatcctttctatgcttcagacggcgataactggagtgaggataatgaaaaggctatggaagctgtaaatgaaatttcagatttaagtaatatgtttggatatatagagcttttaccatccacttattccactacaatgttctacagatttaaaaaagaaataagtaagaaaaattttgtctctgtaactgtaaaggaaaagaaggatctgtggaatgctataaaatatatgctatctgaagaactacaggaaaagaataaggaatga

SEQ ID NO: 116891 - protein, 392 aa, Clostridium perfringens ATCC 13124
MAIFRDQAENHVEHDRSIEDRRRHRQLVEKSIKENLGDILSEESIIGETKNKKYKIPIRGIKEYQFIYGANNKGVTTGTGEERRGDRISSDKRKAISNNKAGNQEGKDIYETEITLEELMDYIVEDLDLPNLDRKKYSEIIVESAAKKRGYQKYGVRPRLAKKKTVMCKIARKQGKKRALREIGEEAEIGRFPFREDDLRYYKVKKHPKKESNAVMIFIMDVSGSMDNTKKYLARSFFFVLSRFIRRKYNNVAFEFISHTTTAKNVNEYEFFHKGESGGTYISSGINAAIDLIKEKYNPGVWNIYPFYASDGDNWSEDNEKAMEAVNEISDLSNMFGYIELLPSTYSTTMFYRFKKEISKKNFVSVTVKEKKDLWNAIKYMLSEELQEKNKE

SEQ ID NO: 116892 - DNA, 1275 bp, Shewanella sp. ANA-3
  CDS (1)..(1275): transl_table=11
gtgcgtatggcgaactttatcgatagacggttgaatgcgaaaggaaaaagcacagtcaaccgccaacgctttatcaaccgatataagcaacaaatcaaaaaagccgtcagcgatgccgtcacgcgtcgcagtgtaacggatgtagataaaggcgaaaaaatcagtattcccacacgggatatcagtgaacctatgttccatcaaggcaaaggaggcgtaagagacagagtccacccaggcaatgatcaattcacccgcggcgataaaatcgacagacctcaaggcggcgctggcggtggagcgggtaaaggcgatgcctcggattcgggcgaaggtaatgatgactttgtgtttgaaatctcaaaggatgaatacctagagctgctctttgaggacttagaactacccaatctgcagaagaatcgcttaaacaagctcgtcgagtatcaaatctaccgtgcgggtttcaccaatgatggtgtaccagccaatatcaatattgtgcgctcgctgcgttcctccttggcgcgccgcatcgccatgtcggcaagtaaaaagaaattgctcaaagagttagagcaagaactggcggagcttgaaaatatacctggcactaaagccgaactgattttggatttaaaagcccaaattgaggcgctcaagcagaagattgctaaagtcccctttatcgatacctttgacttacgtttcaataactttgcaaggcgcgaggtaccctcgagtcaagcggtcatgttctgcttaatggacgtgtcaggttcgatggatcaagcgacaaaggatatggctaaacgtttctatatcttgctgtacttgtttctcacccgaacctacaaaaacctcgaggtggtccatatccgccaccatacccaggcgaaggaagtggacgagcatgagttcttctactcccaagaaactggcggcacgattgtctcaagcgcattgaaattaatgcacgaaattcagcaggctcgctaccctgccgatgagtggaatatctatgccgcacaagcctctgacggtgataactgggccgatgactcacccacctgtcgacaattattggaacaaaaaatcctgccgctagtacgctattttagctatatcgaaatcaccaatcgtgcgcaccaaaccctgtggcgcgaatacgaatccctacaacaacactacgacaacatagcggtgcaacatattcgtcaagccgaagatatctaccctgtatttagagaattatttaaaaaacaggcggtttaa

SEQ ID NO: 116893 - protein, 424 aa, Shewanella sp. ANA-3
MRMANFIDRRLNAKGKSTVNRQRFINRYKQQIKKAVSDAVTRRSVTDVDKGEKISIPTRDISEPMFHQGKGGVRDRVHPGNDQFTRGDKIDRPQGGAGGGAGKGDASDSGEGNDDFVFEISKDEYLELLFEDLELPNLQKNRLNKLVEYQIYRAGFTNDGVPANINIVRSLRSSLARRIAMSASKKKLLKELEQELAELENIPGTKAELILDLKAQIEALKQKIAKVPFIDTFDLRFNNFARREVPSSQAVMFCLMDVSGSMDQATKDMAKRFYILLYLFLTRTYKNLEVVHIRHHTQAKEVDEHEFFYSQETGGTIVSSALKLMHEIQQARYPADEWNIYAAQASDGDNWADDSPTCRQLLEQKILPLVRYFSYIEITNRAHQTLWREYESLQQHYDNIAVQHIRQAEDIYPVFRELFKKQAV

SEQ ID NO: 116894 - DNA, 1176 bp, Bacillus cereus G9241
  CDS (1)..(1176): transl_table=11
atgggtgaagaaaaccaaccaaattatacgatctcacaggaaaactggtccctccatcgcaaaggatatgacgaccaacaacgccatcaagagaaagtacaagaggcaattaagaataatttacccgatcttgtaacagaagaaagtattgttatgtctaatggtaaggatgttgtaaaaataccgattcgttctttagatgaatataagattaggtacaattatgataaaaataaacatgttgggcaaggaaatggtgacagcaaagttggtgatgtcgttgcgagagatggatcaggtggtcaaaagcaaaaaggaccaggaaaagggcaaggagcaggggatgcggctggagaagattattatgaagctgaagtctctattttggaattagagcaagcatttttcaaagaattagaattacctaatttaaagagaaaagaaatggatgaaaaccggattgaacatgttgaatttaatgatattagaaaaacaggattatggggcaacatcgataagaaaagaacgatgatatccgcatataaacgaaatgcgatgcgtggtaaagcatctttccatccaattcatcaagaagatttaaagttccgtacttggaatgaagtattaaagccagattcaaaagctgttgtattagcgatgatggatacgagtggatcgatgggaatatgggagaaatatatggcacggagcttctttttctggatgacgagatttctacgcacaaagtatgaaacagtagatattgaatttattgcccatcatacggaggcaaaagtagttccagaggaagagtttttctcaaaaggagaaagtggcggaacaatttgttcttctgtatacaaaaaagcacttgagctaatcgataataaatattcaccagaccgctataatatttatccattccatttttcagacggtgataatttaacatcagataatgctagatgtgtaaaacttgttgaggaattaatgaagaagtgtaatatgtttgggtatggggaagtgaatcagtacaaccgccatagtacacttatgtcagcctataaaaatattaaagatgataatttcagatattatattttaaagcaaaaagcagatgtattccacgcgatgaagagcttttttagagaagaagccgagaaaaagatggtttaa

SEQ ID NO: 116895 - protein, 391 aa, Bacillus cereus G9241
MGEENQPNYTISQENWSLHRKGYDDQQRHQEKVQEAIKNNLPDLVTEESIVMSNGKDVVKIPIRSLDEYKIRYNYDKNKHVGQGNGDSKVGDVVARDGSGGQKQKGPGKGQGAGDAAGEDYYEAEVSILELEQAFFKELELPNLKRKEMDENRIEHVEFNDIRKTGLWGNIDKKRTMISAYKRNAMRGKASFHPIHQEDLKFRTWNEVLKPDSKAVVLAMMDTSGSMGIWEKYMARSFFFWMTRFLRTKYETVDIEFIAHHTEAKVVPEEEFFSKGESGGTICSSVYKKALELIDNKYSPDRYNIYPFHFSDGDNLTSDNARCVKLVEELMKKCNMFGYGEVNQYNRHSTLMSAYKNIKDDNFRYYILKQKADVFHAMKSFFREEAEKKMV

SEQ ID NO: 116896 - DNA, 1272 bp, Photobacterium sp. SKA34
  CDS (1)..(1272): transl_table=11
atggcatattttatcgaccgcaggctcaatggtaaaaataaaagtacggtgaatcgccagcgctttttacgccgccataagcagcaaattaaagagtctattgctgatgcggtaaataaacgctcgatcacggatgttgatagtggtgaagatatcactatcccatcacgtgacatccgagaacctagctttcatcaaggtaaaggtggacaacgtgatgttgtccaccctggcaacgaccaattcacaccaggcgatcgtatcgagcgaccgcctggtggggctggtcaaggtggggctggtaaaggagatgcaagtcctgatggcgaaggcaatgatgaatttgttttccaaatatctaaagatgaatatcttgatcttttatttgaagatcttgaattacccaatttacaaaaaaaacaaatgaacaaaatagtcgagtggaaaaccttccgttcaggctataaatcacaaggtgttcccgcaaatattgccattgtgaaaaccttacaaaattcattagcgagacgtaccgcaatgaccgcaggaaaaagaagaaaactgcgtgatttagagcaagcgctcactttattatttaacaccgaacctgctcaaccttttgaagaagaaaggataaagcgagaaattgagtcattgaaacaaaaaataaatagaacaccatttattgatacctttgatcttcgctataaaaattatgaacgccgaccacaaccatcaagccaagcggtaatgttttgtttgatggatgtatcaggctcgatggatcaagccacaaaagatattgctaaacgtttttatattttgctttatctctttttaaaccgtacctataaaaatgtagatgttgtttttatacgccaccatacccaagcaaaagaagtagatgaacacgaatttttctattcccaggaaactggtggcactattgtttcaagcgcactacgtatgatgaacgatattgtaaaagacagatatcgtcctgaagaatggaatatttatgcggctcaggcttctgatggcgataactgggctgatgactcacccggttgtcgagagctattagataagcatatattgccattttcacgttattactcatacatagaaatcacacgacgagcacatcagacattatggcgtgagtatgaagcgctacataacagccatgataactttgcgatgcaaaacatacggactgtagatgatattttcccagtatttagagagctatttaaaaaacaagtaagttaa

SEQ ID NO: 116897 - protein, 423 aa, Photobacterium sp. SKA34
MAYFIDRRLNGKNKSTVNRQRFLRRHKQQIKESIADAVNKRSITDVDSGEDITIPSRDIREPSFHQGKGGQRDVVHPGNDQFTPGDRIERPPGGAGQGGAGKGDASPDGEGNDEFVFQISKDEYLDLLFEDLELPNLQKKQMNKIVEWKTFRSGYKSQGVPANIAIVKTLQNSLARRTAMTAGKRRKLRDLEQALTLLFNTEPAQPFEEERIKREIESLKQKINRTPFIDTFDLRYKNYERRPQPSSQAVMFCLMDVSGSMDQATKDIAKRFYILLYLFLNRTYKNVDVVFIRHHTQAKEVDEHEFFYSQETGGTIVSSALRMMNDIVKDRYRPEEWNIYAAQASDGDNWADDSPGCRELLDKHILPFSRYYSYIEITRRAHQTLWREYEALHNSHDNFAMQNIRTVDDIFPVFRELFKKQVS

SEQ ID NO: 116898 - DNA, 1287 bp, Oceanospirillum sp. MED92
  CDS (1)..(1287): transl_table=11
atgagttacatcatagatcgccgccttaattcgaagaaaaagagcacggtaaaccgacagcgctttcttcgacgctataaaaagcacatcaaggatgctgtcgaagacgctgtaaacaaccgatccattactgacattgataaaggcgggaacgtaacgattccacgcagggatatttctgaacctgtatttcatcacggcgaaggcggaataaagcaaaaagtctttcctggaaacaaagagtttgtggttggagaccagtttcagcgcccgcaaggtggcggaggtggtggtgccggcgatggtaaagccagtaaccaaggtgaaggggaagatgactttactttccaaattgatcaggaagaatttctcgacttcatgtttgatggcctggaactcccctatctggttaaaaaacagctaaaaaataccacgcagtacgaaacaagaagggccggtttcaccaacgcaggcagcccggataaaattcatattgtaagatcactaagagccgctcatgcccgccgtatcgcgttatctggtaaagaacgccgaaaaatacgcgagcttgaggaagagatggagacgttgcgggctcgccttcccgatactgatgcagaaagccagatccagcatctgaaaactgaaatagatgagttaaaggcaaagttaaaacgcgtcccatttctcgatgactttgacatcaagtacaacaatatgatcaaggtaccggtcccttccagcaaagccgttatgttttgcgtaatggatgtttcaggctctatgacccaaagcatcaaggacatggcaaaacgtttcttcattctcctctatctgtttttgaaacgtaattacaagcacattgaagtcgtctttgttcgtcaccatacccacgccaaagaagtcgatgaacaagagttcttctactcccgagaaactggcggaaccattgtttccagtgcattagatttaaccgcagaaatcattgaacaacgatattcaccttccgactggaatatctatgtcgctcaagcctctgacggtgataactgggatggggactcatctaaatgctctgatgttcttaacagcagaatcttaaaaatggttcagtactttgcctatgttgagataacgactggcccccaccagaacttatggcacgaatatgaaaaactccaggcctcctgggccgatagttttgctatgcaacagataagggagccatctgacattttccctgtattccgaagcttgtttgagaaaaaaacggagggtgccgcatga

SEQ ID NO: 116899 - protein, 428 aa, Oceanospirillum sp. MED92
MSYIIDRRLNSKKKSTVNRQRFLRRYKKHIKDAVEDAVNNRSITDIDKGGNVTIPRRDISEPVFHHGEGGIKQKVFPGNKEFVVGDQFQRPQGGGGGGAGDGKASNQGEGEDDFTFQIDQEEFLDFMFDGLELPYLVKKQLKNTTQYETRRAGFTNAGSPDKIHIVRSLRAAHARRIALSGKERRKIRELEEEMETLRARLPDTDAESQIQHLKTEIDELKAKLKRVPFLDDFDIKYNNMIKVPVPSSKAVMFCVMDVSGSMTQSIKDMAKRFFILLYLFLKRNYKHIEVVFVRHHTHAKEVDEQEFFYSRETGGTIVSSALDLTAEIIEQRYSPSDWNIYVAQASDGDNWDGDSSKCSDVLNSRILKMVQYFAYVEITTGPHQNLWHEYEKLQASWADSFAMQQIREPSDIFPVFRSLFEKKTEGAA

SEQ ID NO: 116900 - DNA, 1293 bp, Oceanobacter sp. RED65
  CDS (1)..(1293): transl_table=11
atgagctatattattgatcgccgcttaaatggtaaaaacaaaagtatggtgaaccgtcagcgttttttacgccggtacaagtcccatattaagaaagcggtgaccgacgcggtcaacaagcgttccattaccgatatggagcgtggcgaaaaaatatctatcccgacacgggatactaatgaaccgactttccatcatggccaagggggcgcacggcaacgtgtactccctggcaacaaagaatttcatgctggtgacaaaatcctacgtcccaaaggggaaggacaaggtggtggtgctggtgaaggcaatgccagcaaccaaggggaaggcatcgacgatttttctttttatatctcgaaagaagaatttctcgattatgtctttgaagaccttgccctacctaacatggtcaaaaagacgctaactgaacacgatgcaatggaataccgtcgtgcaggttacacagctacaggcacacccaacaacttagccgttgttaaatccatgcgtagtgctcaagcgcgccgcattgccttaagtgcaagttcacgacgcaagctaagggccgcgaaaaaagagttaggtgaagaattagaaaaagacgaagacttacgcaaccctattaaaattaaagaactagaagagcgaatccaaaaactcgaagagaagattcaacgcattcccttcattgatacctttgatattcattatcgaaatctagtaaaagaacctacccccagtaccaaggctgtaatgttctgtgtgatggatgtttctggctccatgactcaacaaatcaaagatattgcgaaacgcttttatattttgctctatttgtttttagaacgaaattatgaacgaaccgaagtggtgttcattcgtcaccatactagtgcaaaagaagtaaacgaagaagaatttttctatagccgagaaaccggcggtaccattgtatccagcgcgctagaactgatggctgacattattgaagcacgttacaaccccgctgagtggaatatctatggagcacaagccagcgatggtgataactgggatgacgatagccctcaatgtgcagaaatactcagccaacgtattatgcccttgcttcagtatttcgcctatatcgaaattacgccgcacgcacaccaagccttgtggcgagcttatgaagaattagcacctcagctgggcgagcgcttcgctatggaacaaatcactggggccgaagaaatcttccccgttttccgagacttgttctcgcaaaaagatatcaaggaggcggtatga

SEQ ID NO: 116901 - protein, 430 aa, Oceanobacter sp. RED65
MSYIIDRRLNGKNKSMVNRQRFLRRYKSHIKKAVTDAVNKRSITDMERGEKISIPTRDTNEPTFHHGQGGARQRVLPGNKEFHAGDKILRPKGEGQGGGAGEGNASNQGEGIDDFSFYISKEEFLDYVFEDLALPNMVKKTLTEHDAMEYRRAGYTATGTPNNLAVVKSMRSAQARRIALSASSRRKLRAAKKELGEELEKDEDLRNPIKIKELEERIQKLEEKIQRIPFIDTFDIHYRNLVKEPTPSTKAVMFCVMDVSGSMTQQIKDIAKRFYILLYLFLERNYERTEVVFIRHHTSAKEVNEEEFFYSRETGGTIVSSALELMADIIEARYNPAEWNIYGAQASDGDNWDDDSPQCAEILSQRIMPLLQYFAYIEITPHAHQALWRAYEELAPQLGERFAMEQITGAEEIFPVFRDLFSQKDIKEAV

SEQ ID NO: 116902 - DNA, 1272 bp, Vibrio sp. Ex25
  CDS (1)..(1272): transl_table=11
atggcgcaatttatagaccgaaggctcaatggcaagaacaagagcgctgttaatcgacagcgcttcttgaagcgccacaaagagcaaataaaagagtcggtagcagacgcagtgaatcgacgctcgattacgaatacggaaacgggcgaagacgtctctatccctcacaaagacatcaatgagccgatctttcatcaaggcaaaggtggtgttcgcgaacgagttcatcccggcaatgaccaattcattactggtgataaaattgagcgtcccaaaggtggcggtcaaggtagtggctcgggagaaggcaatgccagtccagatggagaaggccaagacgaatttgtattccaaatatcaaaagatgagtacctcgatattttgttcgaagatctcgagctgcctaatctagaaaaaaaccaaattgccaaaattactgaatggaaaacgcaccgcgcaggctttcaaactgctggtatcccttcaaacattgcggtagtacgttcgctgcaacaatctcttgcacgacgtacggcaatgaccgcgggtaagaaacgtcttctcaaagagctagaagatgaacttgctcgtatcaaaaacattgaacccgctcagcagtttgaagagaaccgcttgaaggctgaaattgaagagctgcgtaagaaaattgagggggttccatttattgacaccttcgacttacgctttaaaaactatgaaaaacgccctgtaccatctagtcaagctgtgatgttttgtttgatggacgtatcgggctcgatggatcaagcaacgaaagacatcgcaaaacgtttttacgttctgttatacctgtttttaactcgtacttacgagaatgtagacgtcgtctttattcgccaccacacccaagcgaaagaagtggacgaacacgagttcttctactcgcaagagaccgggggcactattgtatccagcgcattgaaactgatggacgaaatcgtaaaagagcgctatccaattggacaatggaacatttatgctgcgcaagcatctgatggcgataactgggcagatgactcgccaagatgccgcgatctattagtgaacaaactactgccaaactgtcagtactactcctacatagagatcacacgacgctcgcaccaaactctatggcatgagtacgaaaaactcaccgatgaatttccgaacttcgcaatgaaaaacattcgctctgtggaggatattttcccagtcttccgtgaactattccaaaaagaaacggcgtaa

SEQ ID NO: 116903 - protein, 423 aa, Vibrio sp. Ex25
MAQFIDRRLNGKNKSAVNRQRFLKRHKEQIKESVADAVNRRSITNTETGEDVSIPHKDINEPIFHQGKGGVRERVHPGNDQFITGDKIERPKGGGQGSGSGEGNASPDGEGQDEFVFQISKDEYLDILFEDLELPNLEKNQIAKITEWKTHRAGFQTAGIPSNIAVVRSLQQSLARRTAMTAGKKRLLKELEDELARIKNIEPAQQFEENRLKAEIEELRKKIEGVPFIDTFDLRFKNYEKRPVPSSQAVMFCLMDVSGSMDQATKDIAKRFYVLLYLFLTRTYENVDVVFIRHHTQAKEVDEHEFFYSQETGGTIVSSALKLMDEIVKERYPIGQWNIYAAQASDGDNWADDSPRCRDLLVNKLLPNCQYYSYIEITRRSHQTLWHEYEKLTDEFPNFAMKNIRSVEDIFPVFRELFQKETA

SEQ ID NO: 116904 - DNA, 1275 bp, Pseudomonas putida GB-1
  CDS (1)..(1275): transl_table=11
atgagctacgttatagaccgacgcctgaacggcaagaacaagagcacggtcaaccgccaacgcttcctgcggcggtaccgcgaacacatcaagaaagccgtcgaagaggcggtgagccgccgttccatcatggacatggaacacggcgagcaaatcagcattcccggccgcgacatcgacgagccggtgctgcaccatggtcgcgggggcaaacagaccatcgtgcaccctggcaacaaggaattcaccgccggtgaacacatcccgcgcccgcaaggcggtggaggtggcggcggcggtcgcggtaaagcgggcaactccggcgagggcatggacgaattcgtcttccagatcactcaggaagagtttctcgaattcatgttcgaggacctcgagctgcccaacctggtcaagcgtcacctgacgggcgccgacaccttcaagaccgtgcgcgccggtatcgccaacgaaggcaacccgtcgcgtatcaacatcgtgcgcaccctgcgttcggcccacgcccggcgcatcgccctgaccggcagcagccgcgccctgttgcgtgaagcgcaaaaggaactggaccgcctgcgggtcgaagagccagacaacttcaccgatatccaggaagtcgaacaggaaatcgaacgcttgaaggcgcgcatcaaccgcctgcccttcctcgataccttcgacctcaagtacaacctgctggtcaaacaacccaaccccagctcgaaggcggtgatgttctgcctgatggacgtatccggctcgatgacccaggccaccaaggacatcgccaagcgcttcttcatcctgctgtacctgttcctcaagcgtaactacgaccgcatcgaagtggtgttcattcgccatcacaccagtgcccgtgaagtcgatgaggaagagttcttctactcgcgggaaaccggcggcaccatcgtctccagcgccctgaagttgatgcaggagatcatggccgaacgctacccggccagcgactggaacatctacgccgcacaagcctccgacggcgacaactggaacgacgactcgccgatctgccgcgacatcctctccaagcagatcatgccgcatgtgcagtactacacttacgttgagatcaccccccgtgaacaccaggcgctgtggtatgaatacgagcgcatcggcgaagcctaccccgacacgttcgcccagcagcagctggtatcggccggcgacatctacccggtcttccgtgaactcttccaacgcaggttagccacatga

SEQ ID NO: 116905 - protein, 424 aa, Pseudomonas putida GB-1
MSYVIDRRLNGKNKSTVNRQRFLRRYREHIKKAVEEAVSRRSIMDMEHGEQISIPGRDIDEPVLHHGRGGKQTIVHPGNKEFTAGEHIPRPQGGGGGGGGRGKAGNSGEGMDEFVFQITQEEFLEFMFEDLELPNLVKRHLTGADTFKTVRAGIANEGNPSRINIVRTLRSAHARRIALTGSSRALLREAQKELDRLRVEEPDNFTDIQEVEQEIERLKARINRLPFLDTFDLKYNLLVKQPNPSSKAVMFCLMDVSGSMTQATKDIAKRFFILLYLFLKRNYDRIEVVFIRHHTSAREVDEEEFFYSRETGGTIVSSALKLMQEIMAERYPASDWNIYAAQASDGDNWNDDSPICRDILSKQIMPHVQYYTYVEITPREHQALWYEYERIGEAYPDTFAQQQLVSAGDIYPVFRELFQRRLAT

SEQ ID NO: 116906 - DNA, 1296 bp, Marinobacter sp. ELB17
  CDS (1)..(1296): transl_table=11
atgggaagcacccacattattgaccgacgtctgaacggtaaaaacaaaagcgcagtgaatcgggaacgattcctgcgccgttatcgccatcacataaaaaaggccgtggctgaagcggtgaaaaagcgttccattaccgatgtggagcacggggaaagcgtgagcattcccaaccgcgacattcaggaaccgatctttcaccacggccagggcgggcgccaggaagtggtgcaccccggcaatcaggagtttctggcaggcgacacccttcccaaaccgcccgacggtggcggacagggtcaaggcaatggccaggccagccaagatggcgagggaatggacgacttcgcctttcagattactcaggaagaattcctgaacttcctttttgacgatttggcgctgcccaatctggtgcgaaaacgtctgaaagacaccgaatcgttcaaatacgtgcgttctggcttcagcacccaaggggtgcccgccaagctggacgttattcgttctctacgcggggcccacgcccgccgcctgggcttaagtggagcccgccgacataaaatccgcgaactggaagagcagctcgcagcactgagaatcgcgccagatgatctggacgctgcgttcagccacgccgatcagattcaggttctggaagaagaaatcgcacggctgaaaaccaacgtgaagcacattccgtttattgacgaaatcgacttgcgctaccgccagcacctgaagcagccgcaaccagccaccagcgcggtgatgttctgtctgatggacgtgtcaggctctatgacgcaaacccacaaagacatcgctaaacgcttctttattttgctgtacctgttcttgcagaagaactacaaaaaaatcgacgtggtgtttattcgccaccacaccagcgccaaagaggtgaacgaagaagagtttttctattcgcgggaaaccggcggaaccattgtgtccagcgccctgaatctgatgcagaaaatcatcgacagccgctattcaccggccgagtggaacatttacgccgcccaggcatccgacggcgacaactggaatgacgactccccggtgtgcagcaaactgttaacagagcggctgcttccgctggtgcagtattacgcctacatagagattacgccccagaaccaccagatgctctggtacgaatacgagaaaattctggcgcgctttccgcacgcattcgcgatgcagcaaattgccgatgccagcgatatttacccggtcttccgccggctgttcgagaggaaagccgcatga

SEQ ID NO: 116907 - protein, 431 aa, Marinobacter sp. ELB17
MGSTHIIDRRLNGKNKSAVNRERFLRRYRHHIKKAVAEAVKKRSITDVEHGESVSIPNRDIQEPIFHHGQGGRQEVVHPGNQEFLAGDTLPKPPDGGGQGQGNGQASQDGEGMDDFAFQITQEEFLNFLFDDLALPNLVRKRLKDTESFKYVRSGFSTQGVPAKLDVIRSLRGAHARRLGLSGARRHKIRELEEQLAALRIAPDDLDAAFSHADQIQVLEEEIARLKTNVKHIPFIDEIDLRYRQHLKQPQPATSAVMFCLMDVSGSMTQTHKDIAKRFFILLYLFLQKNYKKIDVVFIRHHTSAKEVNEEEFFYSRETGGTIVSSALNLMQKIIDSRYSPAEWNIYAAQASDGDNWNDDSPVCSKLLTERLLPLVQYYAYIEITPQNHQMLWYEYEKILARFPHAFAMQQIADASDIYPVFRRLFERKAA

SEQ ID NO: 116908 - DNA, 1269 bp, Moritella sp. PE36
  CDS (1)..(1269): transl_table=11
atggcacactttattgatcgcagattaaacggaaaaaataaaagtaccgttaatcggcaacgctttatgcgtcgctataactcacaaataaaaaaggcggtatctgatgctgtaaataatcgcagtatccaggatattacatctggagaaagtgtcagcattccaactcgtgacatctccgagcctatattccatcaaggtaaaggcggtgaacgtaccatagtacatccaggtaacgaccagtttattactggtgataaaatcaaacgtccacctcccggaagcggttctggtgccggagatggtgaagccagtgacagcggtgaaggtaatgatgattttagttttcagatttcaaaagacgaatatcttgatttgttatttgaagacctagaattgcctaacttacaagaaaatcaacttaacagtattgttgaaatgaaaacccatcgcgcaggttatacatcaagtggtaccccaggtaacatcgcgcttgtgaaatcattgaaaaactcgttagcaagacgtaccgctttaacggggagtaaaaaaagaaaagtaaaagcattgcaacagcaagttgatgagttaactaatcagggggaaattgaaggccagtttgttgacgaattaaaaaatgaaattgcagcgcttaaagagcggatcagtaaagttccgttcatcgatacatttgatttacgctataacaattttgagcaatatgcggtaccgaatagccaagccgtcatgttctgtctcatggatgtatcaggttctatggaccagccaaccaaagacatggctaagcgtttctatatcttactgtatttatttttaacacgtacttataaaacgattgaggtggtttatatacgccaccatacacaagcaaaagaagtcgatgaacatgaattcttttactcgcaagaaacaggcggcacgattgtatcgtcggcattaaagttgatggataaaattgtcaccgataaatttccggctaacgaatggaatatttacgctgcacaagcttctgatggcgataattgggctgatgattctcctttatgtcgtaagattttacttgataaaatcatgccgcgagtacgttatttcagttatatagaaataacgagtcgtgcacatcaaacattatggcgagaatatgaaaaagtagcggaagaatactcacaatttgccttacaacatatccgccaactcgaagatatttatcctgtattccgtgaattatttaagaaacaggtcgcttag

SEQ ID NO: 116909 - protein, 422 aa, Moritella sp. PE36
MAHFIDRRLNGKNKSTVNRQRFMRRYNSQIKKAVSDAVNNRSIQDITSGESVSIPTRDISEPIFHQGKGGERTIVHPGNDQFITGDKIKRPPPGSGSGAGDGEASDSGEGNDDFSFQISKDEYLDLLFEDLELPNLQENQLNSIVEMKTHRAGYTSSGTPGNIALVKSLKNSLARRTALTGSKKRKVKALQQQVDELTNQGEIEGQFVDELKNEIAALKERISKVPFIDTFDLRYNNFEQYAVPNSQAVMFCLMDVSGSMDQPTKDMAKRFYILLYLFLTRTYKTIEVVYIRHHTQAKEVDEHEFFYSQETGGTIVSSALKLMDKIVTDKFPANEWNIYAAQASDGDNWADDSPLCRKILLDKIMPRVRYFSYIEITSRAHQTLWREYEKVAEEYSQFALQHIRQLEDIYPVFRELFKKQVA

SEQ ID NO: 116910 - DNA, 1167 bp, Bacillus halodurans
  CDS (1)..(1167): transl_table=11
gtgaagaaagggagtcgacataatttcgtggtttcacaggaaaattggaccctccatcgaaaaggttatcaagaccaacgccgccatcaggagaaagtaaaggaagcgatacggaaaaatctacccgaccttgtgagcgaagaaaacatcatcatgtcaaatgggcgcgaagtcattaaaatcccgatccgctcattggatgaatataaaattcgctacaattatgataagaataagcacgtcggtcaaggggatggagacagccaagtcggggacgtgattgcccgtgatccaagtgctggacagcaaggaccgggcaaaggccaaggagcaggtgatcagcctggagaagactattttgaagcagaagtgtcgattctagaattggaggaattgttgtttcgcgagctggagctgccgaacttgcagcaaaaagaagaggatcatctcgtcgtcgaacatatcgagttcaacgatattcgcaaaaaaggcttgatgggcaatatcgataaacggcgaacgattctatctgcaatcaagcgaaatgcattagagggaagacctggacttataccaatttacaatgatgacctaagatttaaaacatggaacgaagtggtccgcccagagtcaaaggccgttgtcctcgcgatgatggatacatcagggagcatggggcgttgggaaaaatatatggctcgcagtttctttttttggatgacgcgctttttgcgtacgaaatatgaaacggtggacattgaattcatcgcccaccatactgaagcaaaagtcgtatcggaagaagactttttctcaaaaggggagagcggtgggacgatttgttcatccgcttatcggaaagcactcgagctcatcaatgaaaaatatgatcctgctcgctacaacatttatccgttccacttctcagatggtgacaatttaacgtctgacaacgctcgctgccttaagcttgtgcatgagctaatggaatcgtccagcatgtttggctacggtgaggtcaatcagtactcccgtcacagcaccttaatgaatgcttataaaaatctaaaagaccctcgattccgctcgtacgtgctaaaagaaaaaggagacgtgtaccgagcgatgaaaaccttctttaaaaaagaggaagaagcggtatcgtaa

SEQ ID NO: 116911 - protein, 388 aa, Bacillus halodurans
MKKGSRHNFVVSQENWTLHRKGYQDQRRHQEKVKEAIRKNLPDLVSEENIIMSNGREVIKIPIRSLDEYKIRYNYDKNKHVGQGDGDSQVGDVIARDPSAGQQGPGKGQGAGDQPGEDYFEAEVSILELEELLFRELELPNLQQKEEDHLVVEHIEFNDIRKKGLMGNIDKRRTILSAIKRNALEGRPGLIPIYNDDLRFKTWNEVVRPESKAVVLAMMDTSGSMGRWEKYMARSFFFWMTRFLRTKYETVDIEFIAHHTEAKVVSEEDFFSKGESGGTICSSAYRKALELINEKYDPARYNIYPFHFSDGDNLTSDNARCLKLVHELMESSSMFGYGEVNQYSRHSTLMNAYKNLKDPRFRSYVLKEKGDVYRAMKTFFKKEEEAVS

SEQ ID NO: 116912 - DNA, 1272 bp, Vibrio cholerae
  CDS (1)..(1272): transl_table=11
atggcgcaatttatcgacagaaggctaaacggcaaaaataaaagtaccgtcaaccgacaacgctttttacgccgttacaaagagcagattaaagagtcggttgcggatgccgttaaccgccgctcaatcactaataccgagtctggagaagatgtttctattccaactcgtgacattaaagagccgatgtttcatcaaggcaaaggcggcgtgcgtgaacgtgtgcatccgggcaatgaccaatttattcgtggcgataaaatcgatcgccctaaaggtggccaaggcagcggcggctcaggtgaaggtgaggccagtgccgatggtgaaggcagcgatgatttcgtattccaaatttccaaagatgaatacctcgatattctgtttgaagatttggcgctgccgaatctcaagaaaaaccaagttaacaaaatcaccgaatggaaaacccatcgcgcaggttttcaaacctcgggggttccctccaatatttcagtggtgcgttcactgcaacaatctttagcgcgccgtacggcgatgaccgctggtaaacgccgtttgatgagtgagttggaagaggaactcgaacgtattcagcgcagcgaaccaccacaaatcatggaagagatgcgcatcaagcaagagattgaggagctacgcaataaaatcgatagcgtgccctttatcgacacctttgatttgcgcttcaaaaactacgaaaagcgcccgattccctccagtcaggcggtaatgttctgtctgatggacgtgtcaggctcgatggatcaagcgaccaaggatattgcaaaacgcttttatgtactgctgtacctgttcttaactcgcacttatgaaaacgtggaagtggtatttattcgccaccatacccaagctaaagaagtgaatgagcacgacttcttctactcgcaagaaaccggcggcaccatagtgtccagtgcactcaagctgatgcatgaaatcattgaagctcgctacccactgggtgagtggaacatctatggtgcacaagcctctgatggggataactgggcagacgattcaccacgctgcaaagagttactctctaacaagctgctgccctattgccaatactatgcctatatcgaaatcacgcgtcgctcacaccaaacgttgtggcacgaatatgaaaaattacaggcctccttcgataacttcgcgatgaagaacatccgcagtgttgaagatattttccctgtgtttagggagctgttccaaaaggaaaatgcgtag

SEQ ID NO: 116913 - protein, 423 aa, Vibrio cholerae
MAQFIDRRLNGKNKSTVNRQRFLRRYKEQIKESVADAVNRRSITNTESGEDVSIPTRDIKEPMFHQGKGGVRERVHPGNDQFIRGDKIDRPKGGQGSGGSGEGEASADGEGSDDFVFQISKDEYLDILFEDLALPNLKKNQVNKITEWKTHRAGFQTSGVPSNISVVRSLQQSLARRTAMTAGKRRLMSELEEELERIQRSEPPQIMEEMRIKQEIEELRNKIDSVPFIDTFDLRFKNYEKRPIPSSQAVMFCLMDVSGSMDQATKDIAKRFYVLLYLFLTRTYENVEVVFIRHHTQAKEVNEHDFFYSQETGGTIVSSALKLMHEIIEARYPLGEWNIYGAQASDGDNWADDSPRCKELLSNKLLPYCQYYAYIEITRRSHQTLWHEYEKLQASFDNFAMKNIRSVEDIFPVFRELFQKENA

SEQ ID NO: 116914 - DNA, 1272 bp, Vibrio vulnificus
  CDS (1)..(1272): transl_table=11
atggcgcaatttatagaccgtaggctcaatggcaagaacaagagcgctgtcaacagacagcgcttcatgagacgctataaagagcagataaaagagtcggtagcggacgcggtgaatcgtcgctcgatcaccaatacggagacgggtgaggacgttgctattccgcacaaagacatcaaagagcctcttttccatcaaggtaaaggggggttacgagaacgtgtccatccaggcaatgaccagttcattactggcgataaaatcgaaagacccaaaggtggccaaggaggcggtggtgctggagacggtgatgccagtgctgatggcgaagggcaagacgattttgttttccaaatttccaaagatgagtacttagacctgttatttgaagacttggctttgccaaatctaaagaaaaatcaggtgaacaaaattaccgagtggaagaaacaccgcgcgggctatcaaaccgcagggatgccttccaacatttctattgtgcgctccttgcaacaatcccttgcgcgtcgcaccgcaatgtctgcgggcaaaaagcgtttattgcacgagctagagctggagttggaacgcatccagaatcaagagcccgcacaaaagctggaggaaatgaaacttaaacaagaaatcgcagaactgcgtaaagcgattgaaagcgtgccctttatcgatacgtttgacttacgtttcaaaaactatgagcgcaagcccgttccttcaagccaagccgtcatgttttgtctgatggacgtttcaggctccatggatcaagcgactaaagacattgccaagcgcttttatgtgctgctctatctgttccttaatcgtacgtatgaaaacgtggaagtggtgtttatacgtcaccatacgcaagcaaaagaggtcgatgagcacgagtttttctactcacaagaaaccgggggcaccatcgtttccagtgctctgaaattgatggatgaaattgttaaagctcgctatcccgttggcgaatggaacatctacgctgcacaagcttctgatggggataactgggctgacgattcacctcgttgcaaagagttgttaaccaacaagttgttacctaactgccaatactacgcctatatcgaaattactcgacgttcacaccaaacgctgtggcatgaatatgaaaagcttgaggagagctttgataattttgcgatgaagaatattcgcagcgttgaagacatcttcccggtattcagagagctgtttcacaaggaaacggcatag

SEQ ID NO: 116915 - protein, 423 aa, Vibrio vulnificus
MAQFIDRRLNGKNKSAVNRQRFMRRYKEQIKESVADAVNRRSITNTETGEDVAIPHKDIKEPLFHQGKGGLRERVHPGNDQFITGDKIERPKGGQGGGGAGDGDASADGEGQDDFVFQISKDEYLDLLFEDLALPNLKKNQVNKITEWKKHRAGYQTAGMPSNISIVRSLQQSLARRTAMSAGKKRLLHELELELERIQNQEPAQKLEEMKLKQEIAELRKAIESVPFIDTFDLRFKNYERKPVPSSQAVMFCLMDVSGSMDQATKDIAKRFYVLLYLFLNRTYENVEVVFIRHHTQAKEVDEHEFFYSQETGGTIVSSALKLMDEIVKARYPVGEWNIYAAQASDGDNWADDSPRCKELLTNKLLPNCQYYAYIEITRRSHQTLWHEYEKLEESFDNFAMKNIRSVEDIFPVFRELFHKETA

SEQ ID NO: 116916 - DNA, 1269 bp, Shewanella oneidensis
  CDS (1)..(1269): transl_table=11
atggcgaactttatcgatagacggttgaatgcgaaaggaaaaagcacagtcaaccgccagcgctttatcaaccgatacaagcaacaaatcaaaaaagctgtcagcgatgccgtcacgcgtcgcagtgtaacggatgtagataaaggcgaaaaaatcagtatccccacacgggatatcagtgaacctatgttccatcaaggcaaaggaggcgtgagagacagagttcaccctggaaatgatcagttcacccgcggcgataaaatcgataggcctcagggaggctctggcggcggtgcgggtaaaggtgatgcctccgattcgggtgaaggtaatgatgactttgtgtttgaaatatccaaagatgaataccttgaattgttatttgaggatttagagctccctaatctgcaaaaaaatcgcctcaacaagctcgttgagtatcaaatctaccgcgctggattcaccaatgatggtgttcccgccaatatcaacattgtgcgctccttacgttcatcattggcgcgccgcattgccatgtcagcgagtaaaaagaaattactcaaagagtcagagcaagaactggccgaacttgaaaatattccagggacaaaagctgagcttatcttggatctaaaagcgcaaattgaagagttaaagcggaaaatcgccaaggtaccgtttatcgatacctttgacttacgcttcaataacttttcaaggcgtgaagtgccttcaagccaagcggtaatgttctgcttaatggacgtgtcaggttctatggatcaagccacaaaagatatggcaaaacgtttttatatcctgttgtatttgttcctcacccgcacctacaaaaaccttgaagtggtgtatatccgtcaccatacccaagcgaaggaagtggatgaacatgagttcttttactcccaagaaacgggcggcactatcgtttcgagcgcattgaaattaatgcacgaaattcagcaggcgcgctaccctgccgatgagtggaatatctatgcggcacaagcctctgacggcgataactgggccgatgattctcccacctgtaagcaattattagagcaaaaaatcctgccgttagtgcgttactttagctatatcgaaatcaccaaccgcgcccatcaaaccctgtggcgtgaatacgaatccctacaacaacactacgacaacatagcagtgcaacacattcgtcaagccgaagatatctaccctgtgtttagagaattattcaaaaaacaggcagtttaa

SEQ ID NO: 116917 - protein, 422 aa, Shewanella oneidensis
MANFIDRRLNAKGKSTVNRQRFINRYKQQIKKAVSDAVTRRSVTDVDKGEKISIPTRDISEPMFHQGKGGVRDRVHPGNDQFTRGDKIDRPQGGSGGGAGKGDASDSGEGNDDFVFEISKDEYLELLFEDLELPNLQKNRLNKLVEYQIYRAGFTNDGVPANINIVRSLRSSLARRIAMSASKKKLLKESEQELAELENIPGTKAELILDLKAQIEELKRKIAKVPFIDTFDLRFNNFSRREVPSSQAVMFCLMDVSGSMDQATKDMAKRFYILLYLFLTRTYKNLEVVYIRHHTQAKEVDEHEFFYSQETGGTIVSSALKLMHEIQQARYPADEWNIYAAQASDGDNWADDSPTCKQLLEQKILPLVRYFSYIEITNRAHQTLWREYESLQQHYDNIAVQHIRQAEDIYPVFRELFKKQAV

SEQ ID NO: 116918 - DNA, 1323 bp, Pseudomonas putida; identical to SEQ ID NO: 116850
  CDS (52)..(1323): transl_table=11

SEQ ID NO: 116919 - protein, 423 aa, Pseudomonas putida
MSYVIDRRLNGKNKSTVNRQRFLRRYREHIKKAVEEAVSRRSIMDMEHGEQISIPGRDIDEPVLHHGRGGKQTIVHPGNKEFTAGEHIPRPQGGGGGGGRGKAGNSGEGMDEFVFQITQEEFLEFMFEDLELPNLVKRHLTGADTFKTVRAGIANEGNPSRINIVRTLRSAHARRIALTGSSRALLREAQKELDRLRVEEPDNFTDIQEVEQEIERLKARINRLPFLDTFDLKYNLLVKQPNPSSKAVMFCLMDVSGSMTQATKDIAKRFFILLYLFLKRNYERIEVVFIRHHTSAREVDEEEFFYSRETGGTIVSSALKLMQEIMAERYPASDWNIYAAQASDGDNWNDDSPICRDILSKQIMPHVQYYTYVEITPREHQALWYEYERIGDAFPDTFAQQQLVSAGDIYPVFRELFQRRLAT

SEQ ID NO: 116920 - DNA, 1272 bp, Pseudomonas syringae pv
  CDS (1)..(1272): transl_table=11
atgagctatgtgatcgaccgacgtctcaacggcaagaacaagagcacggtaaaccggcagcggtttctgcggcgttaccgtgaccacatcaagaaggcagtggaggaagccgtcagccgacgctccattaccgacatggagcacggcgaacagatcagtattcccggacgcgacatcgacgaaccggtcctgcaccacggtcgcggcggcaagcagaccgttgttcatcctggcaacaaggaattcaccacaggcgagcacatcgcccgccctcaaggcggtgcgggcggtaaagggcctggcaaggcgggtaattccggcgagggcatggacgagttctcgtttcagatcactcaggaagagtttcttgagttcatgttcgaagacctcgagctgccgaatctggtcaaacgcaatctgaccggtacggacaccttcaaaacagtgcgcgccggcatcagtaacgaaggcaatccatcgcgcatcaatattatccgtaccttgcgctccgcccatgcgcggcgcattgccctgtcgggcagcagccgcgcgaaactcagggaagcgaccagcgagcttgagcgcataaagcgcgaagagccggacaactttggtgacattcaggcgctggaagtcgagatcgaccgactcaaagcacgtattcgtcgggtgccctacctcgatacgttcgacctcaagtacaacctgctggtcaaacaacccaaccccagctccaaggccgtgatgttctgtctgatggacgtttccggctccatgacccaagcaaccaaggacatcgccaagcgcttcttcatcctgttgtacctgttcctgaaacgtaactacgacaagatcgacgttgttttcattcgccaccacaccagtgcccgcgaagtggacgaagaagagttcttttattcacgggaaaccggcggcaccatcgtttccagcgcgttgaaactgatgcaggaaatcatggctgcgcgttaccccagcagcgactggaacatctacgcggcccaggcctcggacggcgacaactggaatgacgactcgcctatctgccgggaaatcctcaccaaacaaatcatgcctttcgtgcagtactacacgtacgtggaaatcacgccgcgtgaacatcaggccctgtggtacgaatacgagcgcatcggtgatgacttcgccgacacgttcgcccagcagcagctggtctcggccggtgatatctatccggtattccgcgaactcttccagcgaaggttagtgtcatga

SEQ ID NO: 116921 - protein, 423 aa, Pseudomonas syringae pv
MSYVIDRRLNGKNKSTVNRQRFLRRYRDHIKKAVEEAVSRRSITDMEHGEQISIPGRDIDEPVLHHGRGGKQTVVHPGNKEFTTGEHIARPQGGAGGKGPGKAGNSGEGMDEFSFQITQEEFLEFMFEDLELPNLVKRNLTGTDTFKTVRAGISNEGNPSRINIIRTLRSAHARRIALSGSSRAKLREATSELERIKREEPDNFGDIQALEVEIDRLKARIRRVPYLDTFDLKYNLLVKQPNPSSKAVMFCLMDVSGSMTQATKDIAKRFFILLYLFLKRNYDKIDVVFIRHHTSAREVDEEEFFYSRETGGTIVSSALKLMQEIMAARYPSSDWNIYAAQASDGDNWNDDSPICREILTKQIMPFVQYYTYVEITPREHQALWYEYERIGDDFADTFAQQQLVSAGDIYPVFRELFQRRLVS

SEQ ID NO: 116922 - DNA, 1176 bp, Bacillus anthracis
  CDS (1)..(1176): transl_table=11
atgggtgaagaaaaccaaccaaattatacgatttcacaggaaaactggtccctccatcgcaaaggatatgacgaccaacaacgccatcaagaaaaagtacaagaggcaattaagaataatttacccgatcttgtaacagaagaaagcattgttatgtctaatggtaaggatgttgtaaaaataccgattcgttctttagatgaatataagattaggtacaattatgataaaaacaaacacgttgggcaaggaaatggtgacagcaaagttggtgatgtcgttgcgagagatggatcaggtggtcaaaagcaaaaaggaccaggaaaagggcaaggagcaggagatgcggctggggaagattattatgaagctgaagtctctattttagaattagagcaagcatttttcaaagaattagaattacctaatttaaagagaaaagaaatggatgaaaaccggattgaacatgttgaatttaatgatattagaaaaacaggattatggggtaacatcgataagaaaagaacgatgatatctgcatataaacgaaatgcgatgcgtggtaaagcatctttccacccaattcatcaagaagatttaaagttccgcacttggaatgaagtattaaagccagattcaaaagctgttgtattagcgatgatggatacaagtggatcgatgggaatatgggagaaatatatggcacggagcttctttttctggatgacgagatttctacgcacaaagtatgaaacagtagatattgaatttattgcccatcatacggaggcaaaagtagttccggaggaagagtttttctcaaaaggagaaagtggcggaacaatttgttcttctgtatacaaaaaagcactcgagctaattgataataaatactcaccagaccgctataatatttatccattccatttttcagacggtgataatttaacatcagataatgctagatgtgtaaaacttgttgaagagttaatgaagaagtgtaacatgtttggatatggggaagtgaatcagtacaaccgccatagtacacttatgtcagcctataaaaatattaaagatgagaatttcagatattatattttaaagcaaaaagcagatgtattccatgcgatgaagagcttctttagagaagaatcaggagagaaaatggcatag

SEQ ID NO: 116923 - protein, 391 aa, Bacillus anthracis
MGEENQPNYTISQENWSLHRKGYDDQQRHQEKVQEAIKNNLPDLVTEESIVMSNGKDVVKIPIRSLDEYKIRYNYDKNKHVGQGNGDSKVGDVVARDGSGGQKQKGPGKGQGAGDAAGEDYYEAEVSILELEQAFFKELELPNLKRKEMDENRIEHVEFNDIRKTGLWGNIDKKRTMISAYKRNAMRGKASFHPIHQEDLKFRTWNEVLKPDSKAVVLAMMDTSGSMGIWEKYMARSFFFWMTRFLRTKYETVDIEFIAHHTEAKVVPEEEFFSKGESGGTICSSVYKKALELIDNKYSPDRYNIYPFHFSDGDNLTSDNARCVKLVEELMKKCNMFGYGEVNQYNRHSTLMSAYKNIKDENFRYYILKQKADVFHAMKSFFREESGEKMA

SEQ ID NO: 116924 - DNA, 1176 bp, Clostridium acetobutylicum
  CDS (1)..(1176): transl_table=11
atggcaatttttagagattacagtattaatcctacagaacatgatagaactataggggataggagaagacatagagaactggttgaaaaagctattaaggataatcttgctgatatagtatcagaagaaagtataattggagaaagtaaaagtaagaaaataaaaataccaatacgaggccttaaagaatataagttcctttatggaaataacagttcatctgtaggaagcggaactggaaacgaaaaaaaaggggatattataggaaaagagcaaatgggcaatggctctaaaggaaaaggtaaaggtgcaggaaacagcgagggagaagatatttatgaaacagaagtaactatcgaagaagttttttcgtatcttcttgaagacttaaatttgcctaatcttgataaaaagaaatattctgaaatagtaacagatagttcaaagaaaaaagcaggttatcaaaagtatggtataaggccaaggcttgctaaaaaaagaacagttatagaaaaaataaaaagagagcagtcaagaaaaagagcaataaaagaattaggtaaggatgataaggtagaaagattaccgttcagtgaagaagatttaagatatcatagaataaaagaaaagccaaaaaaagaatgtaatgcagcaataatgtgtgtaatggattgttctggttcaatggatagtacgaaaaaatatcttgcacgttctttctttttcatactctctaagtttataagaatgaaatatgttaatgtggaaatagcgtttatttcacactctacagttgggcgtgaagtaactgaaacagaattttttcacaaagtagaatcgggcgggacatatatttctagtggattaaatacggctatggatataataaaggaaagatttaatccagctacgtggaatatttacggattttacgtaagtgatggtgataatttcactgaggacgatgaaagagcaataaagtctatgagaaagttctgtgaaattgcaaatatgattggttatgctgaaattttaccttattcatattcaggaacgatgaaatacaagtttgataattatgtaaaggataaaaacttcatatcttcaaccataagaaataaggaagatttatggcctgttcttaaaaaaatgctcataaaggaattaaaggagtga

SEQ ID NO: 116925 - protein, 391 aa, Clostridium acetobutylicum
MAIFRDYSINPTEHDRTIGDRRRHRELVEKAIKDNLADIVSEESIIGESKSKKIKIPIRGLKEYKFLYGNNSSSVGSGTGNEKKGDIIGKEQMGNGSKGKGKGAGNSEGEDIYETEVTIEEVFSYLLEDLNLPNLDKKKYSEIVTDSSKKKAGYQKYGIRPRLAKKRTVIEKIKREQSRKRAIKELGKDDKVERLPFSEEDLRYHRIKEKPKKECNAAIMCVMDCSGSMDSTKKYLARSFFFILSKFIRMKYVNVEIAFISHSTVGREVTETEFFHKVESGGTYISSGLNTAMDIIKERFNPATWNIYGFYVSDGDNFTEDDERAIKSMRKFCEIANMIGYAEILPYSYSGTMKYKFDNYVKDKNFISSTIRNKEDLWPVLKKMLIKELKE

SEQ ID NO: 116926 - DNA, 1272 bp, Pseudomonas aeruginosa
  CDS (1)..(1272): transl_table=11
atgagctacgtcatcgaccggcgtctgaacggcaagaacaagagcacggtgaaccgccagcgcttcctgaggcgctaccgtgaacacatcaagaaggccgtcgaggaggccgtcagccggcgttccattaccgacatggagcacggcgagcagatcagcattcccgggcgcgatatcgacgaaccggtgctgcaccatggccgtggcgggcggcagaccgtcgtccaccccggcaacaaggaattcaccgccggcgagcacatcgcccgtccatccggcggcgggggcggccgcggcggcggcaaggccagcaacagcggcgaaggcatggacgacttcgtcttccagatcacccaggaggaattcctcgacttcatgttcgaggacctggagctgcccaacctggtcaagcgccacatcaccggcaccgacaccttcaagaccgtccgcgccggcatcagcaacgacggcaacccgtcgcgcatcaacatcgtccgcaccctgcgctcggcccatgcgcggcgcatcgcgctgtccggcggcagccgggccaagctgcgcgcggcgctgaaggaactggagcggatcaagcgcgaagagccggacaacctcggcgatatccaggaactcgagctggaaatcgccaagctccgcgcgcgcatcgaccgggtgccgttcctcgataccttcgatctcaagtacaacctgctggtcaagcagcccaaccccacctccaaggcggtgatgttctgcctgatggacgtctccggctcgatgacccaggcgaccaaggacatcgccaagcgcttcttcatcctgctctacctgttcctcaagcggaactacgagaagatcgaagtggtgttcatccgccaccacaccagcgcccgcgaggtcgacgaggaggagttcttctactcccgcgagaccggcggcaccatcgtctccagcgcgctgaagatgatgcaggagatcatggccgagcgttatccgacccatgagtggaacatctacgccgcccaggcctcggacggcgacaactggaacgacgactcgccggtgtgccgggacatcctcctcaagcagatcatgccgttcgtccagtactacacctacgtcgagatcaccccgcgcgaacaccaggccctgtggttcgagtacgagcgcgtgcgcgaagccttcgaagacagcttcgcccagcagcagatcgtctcggcatcggacatctacccggtgttccgcgagctgttccagaggaggctcgtcgcatga

SEQ ID NO: 116927 - protein, 423 aa, Pseudomonas aeruginosa
MSYVIDRRLNGKNKSTVNRQRFLRRYREHIKKAVEEAVSRRSITDMEHGEQISIPGRDIDEPVLHHGRGGRQTVVHPGNKEFTAGEHIARPSGGGGGRGGGKASNSGEGMDDFVFQITQEEFLDFMFEDLELPNLVKRHITGTDTFKTVRAGISNDGNPSRINIVRTLRSAHARRIALSGGSRAKLRAALKELERIKREEPDNLGDIQELELEIAKLRARIDRVPFLDTFDLKYNLLVKQPNPTSKAVMFCLMDVSGSMTQATKDIAKRFFILLYLFLKRNYEKIEVVFIRHHTSAREVDEEEFFYSRETGGTIVSSALKMMQEIMAERYPTHEWNIYAAQASDGDNWNDDSPVCRDILLKQIMPFVQYYTYVEITPREHQALWFEYERVREAFEDSFAQQQIVSASDIYPVFRELFQRRLVA

SEQ ID NO: 116928 - DNA, 1284 bp, Bradyrhizobium japonicum
  CDS (1)..(1284): transl_table=11
gtgcccattcacattattgacaggcgcctgaatccaggcggcaagagtcttgagaaccgccagcggttcttgcgtcgggccaaatccctggtgcagggcgccgtcaagaagacctcgcaggaacgcgacatcaaggacgtcctggagggtggtgaggtcacgatcccgctcgacgggatgcatgagccgcgtttccgccgcgaaggcggaacgcgcgacatggtgttgcccggaaacaagaagttcgtcgagggcgactatctgcagcgttccggccagggcagcgccaaggattccggtcccggcgaaggcgacagcgaggacgccttccgcttcgtgctgagccgcgacgaattcgtcgatctcttcctcgacgacctcgagctgccggatcttgccaagcgcaagatcgcgcagaccgagagcgagggcatccagcgcgccggctacaccacgtcgggctcgcccgccaacatctcggtgagccggacggtgaagctcgcgctcgcccgccgcatcgcgctcaagcgtccccgcaaggacgagatcgaagagctcgaagccgcaatcgcggcatgcaccgacgaggacgagcgtgtggtgcttctcgccgagctggaaaagctgatggcgaagacgaagcggattccgttcatcgatccgctcgacatccgctaccgccgcttcgagacggtgccgaagccggtcgcgcaggccgtgatgttctgcctgatggacgtctccggctcgatgtccgagcacatgaaggatctcgccaaacgcttctacatgctgctctacgtgttcctgaagcgccgctacaagcacgtcgagatcgtcttcatccgccacaccgaccgcgccgaggaggtggacgagcagaccttcttctacggcccggcctccggcggcacgctggtctccagcgcgctccaggcgatgcacgacatcgtgcgcgagcgcttcaatccatcggactggaatatctacgcagcgcaggcctccgacggcgacaactcctattccgacggcgagctcactgggcttctgctgaccgacaagatcctgccggtctgccagttctttgcctatctcgaggtcggcgagtccggcggcagcgccttcgatctctccgactcctcgctctggaccctctatgagcgcctgcgcaacagcggcgcaccgctctcgatgcgcaaggtcagcgagcgcagcgagatcttcccggtgttccacgacctgttccagcgccgcgaaacctctcaggagaaagccgctccatga

SEQ ID NO: 116929 - protein, 427 aa, Bradyrhizobium japonicum
MPIHIIDRRLNPGGKSLENRQRFLRRAKSLVQGAVKKTSQERDIKDVLEGGEVTIPLDGMHEPRFRREGGTRDMVLPGNKKFVEGDYLQRSGQGSAKDSGPGEGDSEDAFRFVLSRDEFVDLFLDDLELPDLAKRKIAQTESEGIQRAGYTTSGSPANISVSRTVKLALARRIALKRPRKDEIEELEAAIAACTDEDERVVLLAELEKLMAKTKRIPFIDPLDIRYRRFETVPKPVAQAVMFCLMDVSGSMSEHMKDLAKRFYMLLYVFLKRRYKHVEIVFIRHTDRAEEVDEQTFFYGPASGGTLVSSALQAMHDIVRERFNPSDWNIYAAQASDGDNSYSDGELTGLLLTDKILPVCQFFAYLEVGESGGSAFDLSDSSLWTLYERLRNSGAPLSMRKVSERSEIFPVFHDLFQRRETSQEKAAP

SEQ ID NO: 116930 - DNA, 1272 bp, Vibrio parahaemolyticus
  CDS (1)..(1272): transl_table=11
atggcgcaatttatagaccgaaggctcaatggcaagaacaagagcgctgttaacagacagcgcttcttgaagcgccataaagagcagatcaaagagtcggtagctgacgcagtgaatcgacgctcgatcacgaatacagaaacgggcgaagacgtctcaataccgcacaaagacattaacgagccgattttccatcaagggaaaggtggcgtgcgtgaacgcgtgcaccctggtaacgatcagtttattacgggtgataaaatcgagcgtccaaaaggtggaggtcaaggcagtggctctggtgaaggtaatgcgagtccagatggcgaaggccaagatgaatttgtgttccaaatttcaaaagatgaatatctggatatcctttttgaagacttagagctaccgaatctagaaaaaaatcaaatcgctaaaattacggaatggaaaactcaccgagcaggtttccaaaccgcggggatcccttccaatatttccgttattcgttcattgcagcaatcgttagctcgtcgaaccgccatgactgcaggcaaaaagcgacttcttaaagaactcgaagacgagttgactcgcatcaaaaatattgagccagcacaacaacttgaagaaaatcgtctgaaaaaggaaatcgaagaactgcgcaagaaaattgaaaatgtgccgttcatcgatactttcgatttacgttttaaaaactacgaaaaacgaccagtcccttctagccaagccgtgatgttttgtctgatggacgtatctggttctatggatcaagcgaccaaagacatcgcgaaacgcttctatgtgctgttgtatctgttcttaactcgcacctatgaaaacgtagacgttgtgtttattcgccaccacacgcaagccaaagaagtcgatgaacacgaatttttctactcgcaagaaaccggtggcaccatcgtatctagcgctttgaaattaatggatgaaatcgtcaaggagcgttacccggttggtcagtggaacatctacgcagcccaagcgtccgatggggataactgggcggatgactcaccacgatgccgagatttacttgtgaataagttgctgccaaattgtcagtactattcttatatagaaatcacgcgtcgctcacatcaaaccttatggcacgagtatgagaagctcaccgacgagtttccaaacttcgctatgaagaatattcgctctgtggaggatatcttcccagtcttccgagaactattccaaaaagaaacggcgtaa

SEQ ID NO: 116931 - protein, 423 aa, Vibrio parahaemolyticus
MAQFIDRRLNGKNKSAVNRQRFLKRHKEQIKESVADAVNRRSITNTETGEDVSIPHKDINEPIFHQGKGGVRERVHPGNDQFITGDKIERPKGGGQGSGSGEGNASPDGEGQDEFVFQISKDEYLDILFEDLELPNLEKNQIAKITEWKTHRAGFQTAGIPSNISVIRSLQQSLARRTAMTAGKKRLLKELEDELTRIKNIEPAQQLEENRLKKEIEELRKKIENVPFIDTFDLRFKNYEKRPVPSSQAVMFCLMDVSGSMDQATKDIAKRFYVLLYLFLTRTYENVDVVFIRHHTQAKEVDEHEFFYSQETGGTIVSSALKLMDEIVKERYPVGQWNIYAAQASDGDNWADDSPRCRDLLVNKLLPNCQYYSYIEITRRSHQTLWHEYEKLTDEFPNFAMKNIRSVEDIFPVFRELFQKETA

SEQ ID NO: 116932 - DNA, 1284 bp, Escherichia coli O157
  CDS (1)..(1284): transl_table=11
atgacctggtttattgaccggcgtctgaacggcaaaaacaaaagcatggtgaatcgccagcgttttttacgccgttataaagcgcaaattaaacagtcgatctccgaggccattaataagcgttcggtgactgacgtcgacagcggcgagtccgtatccattcccacggaagatattagcgaaccaatgtttcatcaggggcgtggcggtctgcgccaccgcgtgcatccgggcaatgaccatttcgttcagaacgaccgaattgaacgtccccagggtggcggcggaggttccggcagtggtcagggccaggccagccaggatggtgaaggtcaggatgaatttgtctttcagatttcgaaagatgagtatcttgatctgctctttgaagatttggccttaccgaatctgaaacaaaaccaacaacgccagctgaccgaatataaaacgcatcgggcgggttataccgctaacggcgttccggccaatatcagcgttgtgcgttccttgcagaactcactggcgcgacgcacagccatgacggcaggcaagcggcgggaacttcatgcactggaagagaatttggccatcatcagcaacagtgaacctgcgcagctgctggaagaggaacgtctgcgcaaagaaattgcagaattacgtgccaaaattgaacgcgtcccttttattgacaccttcgatttacgttacaagaactacgagaagcggcccgatccctccagccaggcagtgatgttttgcctgatggacgtttccggttcaatggatcaatccactaaagatatggctaagcgtttttatattctgctgtatctgttcctcagcagaacgtataagaacgtggaagtcgtatacatccgccatcatacccaggcgaaagaagtcgatgaacatgagtttttctactcgcaggaaactggcggcaccattgtttccagcgccctgaaactgatggatgaggtagtgaaagagcgttataacccggcacagtggaatatttacgctgcacaagcatcggacggcgataactgggccgatgactctccgctttgccatgaaattctggcgaaaaaattattacccgttgttcgttattacagctatatcgaaattacccgtcgcgcgcatcagacactgtggcgagaatatgagcatctgcaatctactttcgacaactttgcgatgcagcatatccgcgaccaggatgatatttatccggtgttccgtgaactgtttcataagcaaaatgcaacagctaaagactaa

SEQ ID NO: 116933 - protein, 427 aa, Escherichia coli O157
MTWFIDRRLNGKNKSMVNRQRFLRRYKAQIKQSISEAINKRSVTDVDSGESVSIPTEDISEPMFHQGRGGLRHRVHPGNDHFVQNDRIERPQGGGGGSGSGQGQASQDGEGQDEFVFQISKDEYLDLLFEDLALPNLKQNQQRQLTEYKTHRAGYTANGVPANISVVRSLQNSLARRTAMTAGKRRELHALEENLAIISNSEPAQLLEEERLRKEIAELRAKIERVPFIDTFDLRYKNYEKRPDPSSQAVMFCLMDVSGSMDQSTKDMAKRFYILLYLFLSRTYKNVEVVYIRHHTQAKEVDEHEFFYSQETGGTIVSSALKLMDEVVKERYNPAQWNIYAAQASDGDNWADDSPLCHEILAKKLLPVVRYYSYIEITRRAHQTLWREYEHLQSTFDNFAMQHIRDQDDIYPVFRELFHKQNATAKD

SEQ ID NO: 116934 - DNA, 1284 bp, Escherichia coli O6
  CDS (1)..(1284): transl_table=11
atgacctggtttattgaccggcgtctgaacggcaaaaataaaagcatggtgaatcgccagcgtttcttacgccgttataaagcgcaaattaaacagtcgatctccgaggccataaataagcgttcggtgactgacgtcgacagcggcgagtccgtatccattcccacggaagatattagcgaaccgatgtttcatcaggggcgtggaggcctgcgccaccgcgtgcatccgggcaatgaccatttcgtccagaacgaccgaattgagcgtccccagggtggtggcggaggttccggcagtggtcagggccaggccagccaggatggtgaaggtcaggatgaatttgtctttcagatttcgaaagatgagtatcttgatctgctctttgaagatttggccttaccgaatctgaaacaaaaccaacaacgccagctgaccgaatataaaacgcatcgggcgggttataccgctaacggcgttccggccaatatcagcgttgtacgttcattgcagaactcactggcgcggcgcacagccatgacggcgggcaagcggcgggaacttcatgcactggaagagaatttggccatcatcagcaacagtgaacctgcgcaactgctggaagaggaacggctgcgcaaagagattgctgaattgcgcgccaaaattgaacgcgttcctttcattgacactttcgatttacgttacaagaactacgaaaaacggcccgatccctccagccaggcagtgatgttttgcctgatggacgtttccggttcaatggatcagtccactaaagatatggctaaacgtttttatattctgctgtatctgttcctcagcagaacgtataagaacgtggaagtcgtatacatccgccatcatacccaggcgaaagaagtcgatgaacatgagtttttctactcgcaggaaactggcggcaccattgtttccagcgccctaaaactgatggatgaggtagtgaaagagcgttataacccggcacagtggaatatttacgcagcccaagcatcagacggcgataactgggccgatgactctccgctttgccatgaaattctggcgaaaaaaatattacccgttgttcgttattacagctatatcgaaattacacgtcgcgcgcatcagacactgtggcgagaatatgagcatctgcaatctactttcgacaactttgcgatgcagcatatccgcgaccaggatgatatttatccggtgttccgtgaactgtttcataaacaaaatgcaacagctaaagactaa

SEQ ID NO: 116935 - protein, 427 aa, Escherichia coli O6
MTWFIDRRLNGKNKSMVNRQRFLRRYKAQIKQSISEAINKRSVTDVDSGESVSIPTEDISEPMFHQGRGGLRHRVHPGNDHFVQNDRIERPQGGGGGSGSGQGQASQDGEGQDEFVFQISKDEYLDLLFEDLALPNLKQNQQRQLTEYKTHRAGYTANGVPANISVVRSLQNSLARRTAMTAGKRRELHALEENLAIISNSEPAQLLEEERLRKEIAELRAKIERVPFIDTFDLRYKNYEKRPDPSSQAVMFCLMDVSGSMDQSTKDMAKRFYILLYLFLSRTYKNVEVVYIRHHTQAKEVDEHEFFYSQETGGTIVSSALKLMDEVVKERYNPAQWNIYAAQASDGDNWADDSPLCHEILAKKILPVVRYYSYIEITRRAHQTLWREYEHLQSTFDNFAMQHIRDQDDIYPVFRELFHKQNATAKD

SEQ ID NO: 116936 - DNA, 1284 bp, Escherichia coli
  CDS (1)..(1284): transl_table=11
atgacctggtttattgaccggcgtctgaacggcaaaaacaaaagcatggtgaatcgccagcgttttttacgccgttataaagcgcaaattaaacagtcgatctccgaggccattaataagcgttcggtgactgacgtcgacagcggcgaatccgtatccattcccacggaagatattagcgaaccgatgtttcatcaggggcgtggcggtctgcgccaccgcgtgcatccgggcaatgaccatttcgtccagaacgaccgaattgaacgtccccagggtggcggcggaggttccggcagtggtcagggccaggccagccaggatggtgaaggtcaggatgaatttgtctttcagatttcgaaagatgagtatcttgatctgctctttgaagatttggccttaccgaatctgaaacaaaaccaacaacgccagctgaccgaatataaaacgcatcgggcgggttataccgctaacggcgttccggccaatatcagcgttgtgcgttcattgcagaactcactggcgcgacgcacagccatgacggcaggcaagcggcgggaacttcatgcactggaagagaatttggccatcatcagcaacagtgaacctgcgcaactgctggaagaggaacgtctgcgcaaagaaattgcagaattacgtgccaaaattgaacgcgtcccttttattgacaccttcgatttacgttacaagaactacgagaagcggcccgatccctccagccaggcagtgatgttttgcctgatggacgtttccggttcaatggatcaatccactaaagatatggctaagcgtttttatattctgctgtatctgttcctcagcagaacgtataagaacgtggaagtcgtatacatccgccatcatacccaggcgaaagaagtcgatgaacatgagtttttctactcgcaggaaacaggcggcaccattgtttccagcgccctgaaactgatggatgaggtagtgaaagagcgttataacccggcacagtggaatatttacgctgcacaagcatcggacggcgataactgggccgatgactctccgctttgccatgaaatcctggcgaaaaaattattacctgttgttcgttattacagctatatcgaaattacccgtcgtgcacatcagacattgtggcgagaatatgagcatctgcaatctactttcgacaactttgcgatgcagcacatccgcgaccaggatgatatttatccggtgttccgtgaactgtttcataaacaaaatgcaacagctaaaggctaa

SEQ ID NO: 116937 - protein, 427 aa, Escherichia coli
MTWFIDRRLNGKNKSMVNRQRFLRRYKAQIKQSISEAINKRSVTDVDSGESVSIPTEDISEPMFHQGRGGLRHRVHPGNDHFVQNDRIERPQGGGGGSGSGQGQASQDGEGQDEFVFQISKDEYLDLLFEDLALPNLKQNQQRQLTEYKTHRAGYTANGVPANISVVRSLQNSLARRTAMTAGKRRELHALEENLAIISNSEPAQLLEEERLRKEIAELRAKIERVPFIDTFDLRYKNYEKRPDPSSQAVMFCLMDVSGSMDQSTKDMAKRFYILLYLFLSRTYKNVEVVYIRHHTQAKEVDEHEFFYSQETGGTIVSSALKLMDEVVKERYNPAQWNIYAAQASDGDNWADDSPLCHEILAKKLLPVVRYYSYIEITRRAHQTLWREYEHLQSTFDNFAMQHIRDQDDIYPVFRELFHKQNATAKG

SEQ ID NO: 116938 - DNA, 1287 bp, Salmonella typhi
  CDS (1)..(1287): transl_table=11
atgacctggttcatagaccgacgtcttaacggcaaaaataaaagcacggtgaatcgccagcgctttttgcgtcgttataaagcacaaattaagcagtcgatttccgaagcgattaataaacgctcagtgaccgatgtcgacagcggagagtccgtctctattccaaccgatgatattagcgaaccgatgtttcatcaggggcgcggcggtctgcgccatcgcgtccatccgggtaacgatcactttatccagaatgatcgcattgagcgtccgcaaagcggtggcggcggcggttccggcagcggtcaaggtcaggccagccaggacggcgaaggccaggatgagtttgtttttcagatttcaaaagatgagtatctggatctgctctttgaagatttagcgctgcctaatctgaaaaaaaaccagcatcgccagcttaacgagtataaaactcaccgcgccggtttcacctcaaacggcgtgccggccaatatcagcgtggtacgttcgctacaaaactctctggcgcgccgtacagcaatgacggcaggaaaacgccgcgaactgcacgcgctggaaacggaactggagaccatcagccacagcgaaccagcgcaactgcttgaagaggagcggttacgtcgggagattgccgaactacgggctaaaatcgagcgagtgccgtttatcgacacttttgatttacgctataaaaattatgaaaaacgacctgagccctccagccaggcggtgatgttctgtctgatggacgtctcgggttcgatggaccaggcaaccaaagatatggccaagcgtttttacattctgctttatctgtttttgagccgaacgtataagaacgtagaagtggtttatatccgccaccatacccaggcgaaggaagtggatgaacatgagttcttttattcgcaagagaccggggggacgattgtctccagcgcgcttaaactcatggacgaagtagttaaagagcgctacgaccccagtcagtggaacatctatgcggcgcaagcgtcagacggtgataactgggccgacgattcaccgctgtgtcatgagattctggcgaaaaagctgctgccggtagtgcgctattacagctatatcgagattacccgccgcgcccaccagaccttatggcgcgagtatgaacatctgcaggcgacgttcgataacttcgccatgcagcatattcgcgatcaggaggatatttatccggtattccgcgaattgtttcagaaacagagcgccaatcaaagtgcataa

SEQ ID NO: 116939 - protein, 428 aa, Salmonella typhi
MTWFIDRRLNGKNKSTVNRQRFLRRYKAQIKQSISEAINKRSVTDVDSGESVSIPTDDISEPMFHQGRGGLRHRVHPGNDHFIQNDRIERPQSGGGGGSGSGQGQASQDGEGQDEFVFQISKDEYLDLLFEDLALPNLKKNQHRQLNEYKTHRAGFTSNGVPANISVVRSLQNSLARRTAMTAGKRRELHALETELETISHSEPAQLLEEERLRREIAELRAKIERVPFIDTFDLRYKNYEKRPEPSSQAVMFCLMDVSGSMDQATKDMAKRFYILLYLFLSRTYKNVEVVYIRHHTQAKEVDEHEFFYSQETGGTIVSSALKLMDEVVKERYDPSQWNIYAAQASDGDNWADDSPLCHEILAKKLLPVVRYYSYIEITRRAHQTLWREYEHLQATFDNFAMQHIRDQEDIYPVFRELFQKQSANQSA

SEQ ID NO: 116940 - DNA, 1287 bp, Salmonella typhimurium
  CDS (1)..(1287): transl_table=11
atgacctggttcatagaccgacgtcttaacggcaaaaataaaagcacggtgaatcgccagcgctttttgcgtcgttataaagcacaaattaagcagtcgatttccgaagcgattaataaacgctctgtgaccgatgtcgacagcggagagtccgtctctattccaaccgatgatattagcgaaccgatgtttcatcaggggcgcggcggtctgcgccatcgcgtccatccgggtaacgatcactttatccagaatgatcgcattgagcgtccgcaaggcggtggcggcggcggttccggcagcggtcaaggtcaggccagccaggacggcgaaggccaggatgagtttgtttttcagatttcaaaagatgagtatctggatctgctctttgaagatttagcgctgcctaatctgaagaaaaaccagcatcgccagcttaacgagtataaaactcaccgcgccggtttcacctcaaacggcgtaccggccaatatcagcgtggtacgttcgctacaaaactctctggcgcgccgtacagcaatgacggcaggaaaacgccgcgaactgcacgcgctggaaacggaactggagaccatcagccacagcgaaccagcgcaactgcttgaagaggagcggttacgtcgggagattgccgaactacgggctaaaatcgagcgagtgccgtttatcgacacctttgatttacgctataaaaattatgaaaaacggcctgagccctccagccaggcggtgatgttctgtctgatggacgtctcgggttcgatggaccaggcaaccaaagatatggccaagcgtttttacattctgctctatctgtttttgagccgaacgtataagaacgtcgaagtggtttatatccgccaccatacccaggcgaaggaagtggacgaacatgagttcttttattcgcaagagaccggcgggacgattgtctccagcgcgcttaaactcatggacgaagtggttaaagagcgctacgaccccggtcagtggaacatctatgcggcgcaagcgtcagacggtgataactgggccgacgattcaccgctgtgtcatgagattctggcgaaaaagctgctgccggtagtgcgctattacagctatatcgagattacccgccgcgcccaccagaccttatggcgcgagtatgaacatctgcaggcgacgttcgataacttcgccatgcagcatattcgcgatcaggaggatatttatccggtattccgcgaattgtttcagaaacagagcgccaatcaaagtgcataa

SEQ ID NO: 116941 - protein, 428 aa, Salmonella typhimurium
MTWFIDRRLNGKNKSTVNRQRFLRRYKAQIKQSISEAINKRSVTDVDSGESVSIPTDDISEPMFHQGRGGLRHRVHPGNDHFIQNDRIERPQGGGGGGSGSGQGQASQDGEGQDEFVFQISKDEYLDLLFEDLALPNLKKNQHRQLNEYKTHRAGFTSNGVPANISVVRSLQNSLARRTAMTAGKRRELHALETELETISHSEPAQLLEEERLRREIAELRAKIERVPFIDTFDLRYKNYEKRPEPSSQAVMFCLMDVSGSMDQATKDMAKRFYILLYLFLSRTYKNVEVVYIRHHTQAKEVDEHEFFYSQETGGTIVSSALKLMDEVVKERYDPGQWNIYAAQASDGDNWADDSPLCHEILAKKLLPVVRYYSYIEITRRAHQTLWREYEHLQATFDNFAMQHIRDQEDIYPVFRELFQKQSANQSA

SEQ ID NO: 116942 - DNA, 1179 bp, Bacillus subtilis
  CDS (1)..(1179): transl_table=11
atgtcccaaaatgacagcggccattttttgatttctgaggaaaactggtccctccatcgcaaaggcttcgatgaccagcagcgccaccagaaaaaagtgcaggaagcgatcaaaaacaatcttccggacctcgtaactgaggaaagcattattatgtctaatggaaaagatgtagtgaagatcccaatccgttcacttgatgagtataaaatccgttataactatgataaaaataaacatgtagggcaaggagacggcgagagccaggttggagatgttgtggcccgggatggatcagacaaaaaacaagggcctggaaaagggcagggtgccggtgatcaggcaggcgaggattattatgaagcggaagtttcattaatggatttagaagaagcgctttttaaagaattagagcttccgaatctccagcaaaaagagcgggacaatatcattcatacagatatcgagtttaatgatatccgtaaaacagggttaaccggtaatattgataagaaaagaacgatgatgtcagcctttaaacgaaacgcaatgtcaggaaaaccgtcgttctacccaatttatccggaggacctgaaatataagacgtggaatgacatcacaaagcccgaatcaaaagccgtcgttttagccatgatggatacaagcggcagtatgggggtttgggaaaaatacatggccagaagcttctttttctggatgacccgttttttgcggacaaaatacgagactgtggaaattgaatttattgcccatcatacagaagcaagagtggtctcggaggaggattttttctcaaagggagaaagcggcggaacaatttgttcttccgtatatcggaagtcgcttgagcttattgatgaaaagtacaatcccgcccgctataacatttacccgtttcatttttctgacggtgacaacctgacatctgataacgcgcgctgtgtgaagctggtcaatgatattatgaagaaggccaatctgttttgctacggcgaggtcaatcagtacaacaggcattcaacgttaatgtctgcatataaaaatgtaaaagatgagaaatttaagtactatattttaaaacagaaatctgatgtttttcaggctctaaagaactttttcagaaatgaagagtctggtgtaagccatcaattttcgtaa

SEQ ID NO: 116943 - protein, 392 aa, Bacillus subtilis
MSQNDSGHFLISEENWSLHRKGFDDQQRHQKKVQEAIKNNLPDLVTEESIIMSNGKDVVKIPIRSLDEYKIRYNYDKNKHVGQGDGESQVGDVVARDGSDKKQGPGKGQGAGDQAGEDYYEAEVSLMDLEEALFKELELPNLQQKERDNIIHTDIEFNDIRKTGLTGNIDKKRTMMSAFKRNAMSGKPSFYPIYPEDLKYKTWNDITKPESKAVVLAMMDTSGSMGVWEKYMARSFFFWMTRFLRTKYETVEIEFIAHHTEARVVSEEDFFSKGESGGTICSSVYRKSLELIDEKYNPARYNIYPFHFSDGDNLTSDNARCVKLVNDIMKKANLFCYGEVNQYNRHSTLMSAYKNVKDEKFKYYILKQKSDVFQALKNFFRNEESGVSHQFS

SEQ ID NO: 116944 - DNA, 20 bp, Artificial sequence
  primer
atgcccgaggggatcctgcc

SEQ ID NO: 116945 - DNA, 25 bp, Artificial sequence
  primer
ttaacctccgagaagccgcctcaag

SEQ ID NO: 116946 - protein, 422 aa, Artificial sequence
  consensus sequence
  Variant (2)..(7): Xaa in position 2 to 7 is any amino acid
  Variant (9)..(16): Xaa in position 9 to 16 is any amino acid
  Variant (18)..(40): Xaa in position 18 to 40 is any amino acid
  Variant (43)..(47): Xaa in position 43 to 47 is any amino acid
  Variant (49)..(61): Xaa in position 49 to 61 is any amino acid
  Variant (62)..(64): Xaa in position 62 to 64 is any or no amino acid
  Variant (66)..(69): Xaa in position 66 to 69 is any amino acid
  Variant (70)..(71): Xaa in position 70 to 71 is any or no amino acid
  Variant (73)..(73): Xaa in position 73 is any amino acid
  Variant (74)..(76): Xaa in position 74 to 76 is any or no amino acid
  Variant (78)..(81): Xaa in position 78 to 81 is any amino acid
  Variant (82)..(88): Xaa in position 82 to 88 is any or no amino acid
  Variant (90)..(90): Xaa in position 90 is any amino acid
  Variant (92)..(96): Xaa in position 92 to 96 is any amino acid
  Variant (97)..(98): Xaa in position 97 to 98 is any or no amino acid
  Variant (100)..(100): Xaa in position 100 is any amino acid
  Variant (102)..(110): Xaa in position 102 to 110 is any amino acid
  Variant (112)..(116): Xaa in position 112 to 116 is any amino acid
  Variant (118)..(119): Xaa in position 118 to 119 is any amino acid
  Variant (121)..(121): Xaa in position 121 is any amino acid
  Variant (124)..(124): Xaa in position 124 is any amino acid
  Variant (126)..(146): Xaa in position 126 to 146 is any amino acid
  Variant (147)..(147): Xaa in position 147 is any or no amino acid
  Variant (149)..(156): Xaa in position 149 to 156 is any amino acid
  Variant (158)..(164): Xaa in position 158 to 164 is any amino acid
  Variant (166)..(180): Xaa in position 166 to 180 is any amino acid
  Variant (181)..(227): Xaa in position 181 to 227 is any or no amino acid
  Variant (230)..(239): Xaa in position 230 to 239 is any amino acid
  Variant (241)..(243): Xaa in position 241 to 243 is any amino acid
  Variant (246)..(249): Xaa in position 246 to 249 is any amino acid
  Variant (252)..(252): Xaa in position 252 is any amino acid
  Variant (257)..(260): Xaa in position 257 to 260 is any amino acid
  Variant (262)..(263): Xaa in position 262 to 263 is any amino acid
  Variant (265)..(266): Xaa in position 265 to 266 is any amino acid
  Variant (268)..(273): Xaa in position 268 to 273 is any amino acid
  Variant (276)..(278): Xaa in position 276 to 278 is any amino acid
  Variant (280)..(286): Xaa in position 280 to 286 is any amino acid
  Variant (288)..(288): Xaa in position 288 is any amino acid
  Variant (290)..(290): Xaa in position 290 is any amino acid
  Variant (292)..(292): Xaa in position 292 is any amino acid
  Variant (294)..(294): Xaa in position 294 is any amino acid
  Variant (297)..(297): Xaa in position 297 is any amino acid
  Variant (299)..(300): Xaa in position 299 to 300 is any amino acid
  Variant (303)..(305): Xaa in position 303 to 305 is any amino acid
  Variant (307)..(307): Xaa in position 307 is any amino acid
  Variant (311)..(312): Xaa in position 311 to 312 is any amino acid
  Variant (316)..(325): Xaa in position 316 to 325 is any amino acid
  Variant (326)..(326): Xaa in position 326 is any or no amino acid
  Variant (328)..(332): Xaa in position 328 to 332 is any amino acid
  Variant (336)..(339): Xaa in position 336 to 339 is any amino acid
  Variant (345)..(347): Xaa in position 345 to 347 is any amino acid
  Variant (348)..(348): Xaa in position 348 is any or no amino acid
  Variant (350)..(352): Xaa in position 350 to 352 is any amino acid
  Variant (354)..(368): Xaa in position 354 to 368 is any amino acid
  Variant (369)..(369): Xaa in position 369 is any or no amino acid
  Variant (371)..(371): Xaa in position 371 is any amino acid
  Variant (373)..(412): Xaa in position 373 to 412 is any amino acid
  Variant (413)..(421): Xaa in position 413 to 421 is any or no amino acid
KXXXXXXRXXXXXXXXIXXXXXXXXXXXXXXXXXXXXXXXIPXXXXXEXXXXXXXXXXXXXXXXGXXXXXXGXXXXRXXXXXXXXXXXGXGXXXXXXXGXDXXXXXXXXXEXXXXXFXXLXLPXLXXXXXXXXXXXXXXXXXXXXXXGXXXXXXXXRXXXXXXXRXXXXXXXXXXXXXXXXXXXXXXXXXXXXXXXXXXXXXXXXXXXXXXXXXXXXXXXXXXXXXXDLXXXXXXXXXXPXXXAVXXXXMDXSGSMXXXXKXXAXXFXXXXXXFLXXXYXXXXXXXIXHXTXAXEVXEXXFFXXXEXGGTXXSSAXXXXXXXXXXXYXXXXXNIYXXXXSDGDNXXXXDXXXCXXXXXXXXXXXXXXXXYXEXXXXXXXXXXXXXXXXXXXXXXXXXXXXXXXXXXXXXXXXXXXXXXXXXF

SEQ ID NO: 116947 - protein, 35 aa, Artificial sequence
  protein pattern
  Variant (2)..(4): Xaa in position 2 to 4 is any amino acid
  Variant (5)..(6): Xaa in position 5 to 6 is any or no amino acid
  Variant (8)..(9): Xaa in position 8 to 9 is any amino acid
  Variant (10)..(10): Xaa in position 10 is Phe or Tyr
  Variant (11)..(18): Xaa in position 11 to 18 is any amino acid
  Variant (20)..(20): Xaa in position 20 is any amino acid
  Variant (21)..(21): Xaa in position 21 is Ala, Ser or Thr
  Variant (22)..(22): Xaa in position 22 is any amino acid
  Variant (25)..(25): Xaa in position 25 is Ile, Met or Val
  Variant (26)..(26): Xaa in position 26 is Phe, Ile or Leu
  Variant (27)..(28): Xaa in position 27 to 28 is any amino acid
  Variant (29)..(29): Xaa in position 29 is Leu or Met
  Variant (31)..(31): Xaa in position 31 is Thr or Val
PXXXXXDXXXXXXXXXXXPXXXAVXXXXXDXSGSM

SEQ ID NO: 116948 - DNA, 534 bp, Saccharomyces cerevisiae
  CDS (1)..(534)
atgaagcataccacatcgacaatgttacgcactactagactatggaccacccgcatgcccgctgtgagcaaattgtttttgagaaacagctccggcaatgccctaaacaagaataaactaccatttttgtactcatcccaaggacctcaagccgtgaggtacacttcccaacatgagtggatagctgtgcatcaggacaagactgcctttgtcggaattacaaaatacgccactgattccttaggggacgctacctatgttgagttgccagaagtgggcactgagatttcccaaggtgagtcgctagggtccattgagtccgtcaagtcagcctccgagatctaccagcctgccgatggtaccgtagaggaaattaacactaatcttgaggaaaatccaggtgtggtgaacgaagatcctatgggtgacggctggctagtcaaaatgaagcttggtgagggcgttaatgtggaacaggtcgagggtctaatgtccttagaacagtacgaaaagacactggttcatgatgactga

SEQ ID NO: 116949 - protein, 177 aa, Saccharomyces cerevisiae
MKHTTSTMLRTTRLWTTRMPAVSKLFLRNSSGNALNKNKLPFLYSSQGPQAVRYTSQHEWIAVHQDKTAFVGITKYATDSLGDATYVELPEVGTEISQGESLGSIESVKSASEIYQPADGTVEEINTNLEENPGVVNEDPMGDGWLVKMKLGEGVNVEQVEGLMSLEQYEKTLVHDD

SEQ ID NO: 116950 - DNA, 736 bp, Triticum aestivum
  CDS (140)..(634)
agccaaacaatttccttttccctatcctcccacagcctctttccactactaccaccgagccaccatcccctacaaggagagggcaaagaacacacattcactttgttgcttcaggttgcaacagctaaattaggctacaatggctctgaggctgtgggcaagctcagctgccaatgccctcaagatttcaagcagcggcgccagggccgctgccccggcctactcgatctccagatacttctccaccgttattgatggcttgaagtacacttcctcccacgagtgggtcaagaacgacggctccgtggccacgattggcatcagtgaccacgcccagggccatctcggggaggtggtgttcgtggagctgccggagaccggcacgaaggtgagccagggtggggccttcggcaacgtggagagtgtgaaggccaccagcgacgtcaactcgcccatctccggcgaggtcgtcgaggtcaattcgaagctgtccgagaccccgggcctgatcaactcgagcccgtacgaggaggggtggatgatcaaggtgaagccgagcagcccggcggagctggagggcctgctggactcggccaagtacaccaagcactgcgaggaggaggacgcccactagtgctcccttgttcgcttatcaatccttttgctgcaaccatatcgaatactcttgtctacaataattaaaccagcttcaccatgcgttcagttcatcggttcc

SEQ ID NO: 116951 - protein, 164 aa, Triticum aestivum
MALRLWASSAANALKISSSGARAAAPAYSISRYFSTVIDGLKYTSSHEWVKNDGSVATIGISDHAQGHLGEVVFVELPETGTKVSQGGAFGNVESVKATSDVNSPISGEVVEVNSKLSETPGLINSSPYEEGWMIKVKPSSPAELEGLLDSAKYTKHCEEEDAH

SEQ ID NO: 116952 - DNA, 622 bp, Zea mays subsp. mays
  CDS (37)..(537)
attttttcccactttcctttgagaaaacagagcaaaatggcactgagaatgtgggcttcctctacagcaaacgctcttaagctctcttcttctacctccaaatctcatctccttcctgcgttctccatctccagatgcttctcctcagtgttggaaggactcaagtatgcaacttcacacgagtgggtgaaacatgatggctcggtggctaccattggcatcactgaccatgcccaggaccatctaggagaagttgtgtttgtggagctgccagaagagaaaagctcagtgagcaaagaaaagaactttggagctgtggagagtgtgaaggcaacaagtgagattctatctccaatctctggtgaagtcattgaggttaacacaaagctaaccgattcacctggtttgatcaactcaagcccctatgaagatggttggatgataaaggtgaaaccaagcaaccctgcagagttggaaaccttgatgggttcaaaggaatacaccaagttctgcgaagaggaagatgctgctcactagagggtttcatctgtctatgtttcgtaccctatctctctcagctttgtatctctgtaatactaatttggttgaaagatgatcattc

SEQ ID NO: 116953 - protein, 166 aa, Zea mays subsp. mays
MALRMWASSTANALKLSSSTSKSHLLPAFSISRCFSSVLEGLKYATSHEWVKHDGSVATIGITDHAQDHLGEVVFVELPEEKSSVSKEKNFGAVESVKATSEILSPISGEVIEVNTKLTDSPGLINSSPYEDGWMIKVKPSNPAELETLMGSKEYTKFCEEEDAAH

SEQ ID NO: 116954 - DNA, 477 bp, Oryza sativa (japonica cultivar-group)
  CDS (1)..(477)
atggccatggccgcctccaggttgctgtgggcttcccgcgccgcctcctacctcaagatctccactttccccagggccttctccaccgtgctgaaggatctgaagtatgctgacactcatgaatgggttaaggttgagggtgattcggcaaccgttggaattacagaccatgcccagcaccatttgggtgatgttgtgtatgtggagcttccagaagttggcagcagtgtatcccagggaaagaactttggtgctgttgaaagtgtgaaggcaaccagcgatatctactctccagtatctggagaggtggttgcagtgaacgatggactaggcgatgaacctggattggttaatacaagtccatacgagagtgggtggatcatcaaggtcaaggttagtgattcaggtgagctcaattcattgatggatgacgcgaaatactcgaaattctgcgaggaagaagatagcaagcattga

SEQ ID NO: 116955 - protein, 158 aa, Oryza sativa (japonica cultivar-group)
MAMAASRLLWASRAASYLKISTFPRAFSTVLKDLKYADTHEWVKVEGDSATVGITDHAQHHLGDVVYVELPEVGSSVSQGKNFGAVESVKATSDIYSPVSGEVVAVNDGLGDEPGLVNTSPYESGWIIKVKVSDSGELNSLMDDAKYSKFCEEEDSKH

SEQ ID NO: 116956 - DNA, 435 bp, Pyrococcus abyssi GE5
  CDS (1)..(435): transl_table=11
ttgttgggaaaagagaatgtggtggttaatatgattgaggttggagaatacaaggttaaggaaggcctctattataccaaggaacatgagtgggctcaagtgctggaagatggaacagttctcgttggaataactgattacgctcagaaggagcttggagatatagcctatgttgagctccctgaagttggaaaggaggttaaaaagggagaagttctttgtgaagttgaaagcgttaaagccgttagtgaagtgtacgcacctgtaagcggagaagttattgaggtcaacgaggaactaagtgacagccccgagaagataaacgaagatccttatggggcttggatagctaagatcaaaccaaataacttagaagaggaacttaaagagttgatggacgcagagaagtatgctgaattcttaaagagcctttaa

SEQ ID NO: 116957 - protein, 144 aa, Pyrococcus abyssi GE5
MLGKENVVVNMIEVGEYKVKEGLYYTKEHEWAQVLEDGTVLVGITDYAQKELGDIAYVELPEVGKEVKKGEVLCEVESVKAVSEVYAPVSGEVIEVNEELSDSPEKINEDPYGAWIAKIKPNNLEEELKELMDAEKYAEFLKSL

SEQ ID NO: 116958 - DNA, 471 bp, Arabidopsis thaliana
  CDS (1)..(471)
atggcttgtagactcttttgggcttctagggttgcttctcatctaaggatctccgttgctcaacgagggttttcttccgtggttttgaaggatttgaaatatgctgattcacatgaatgggtgaagattgacgggaataaagcaacctttggtataacggatcacgcgcaggaccatttaggagatgtggtctatgtggagttacctgatgtaggacattcggtgtcacaagggaagagttttggagcagttgaaagtgtgaaagcaactagcgatatcaattctccagtctcgggtaaggtggttgaagtcaatgaggagctgaccgagtcccctggattggtgaactctagcccgtatgaacaaggatggatcataaaagttgagctgagtgatgcaggcgaggcagagaagctgatggattcagacaagtactctaagttctgcgaagaagaagacgccaagcactga

SEQ ID NO: 116959 - protein, 156 aa, Arabidopsis thaliana
MACRLFWASRVASHLRISVAQRGFSSVVLKDLKYADSHEWVKIDGNKATFGITDHAQDHLGDVVYVELPDVGHSVSQGKSFGAVESVKATSDINSPVSGKVVEVNEELTESPGLVNSSPYEQGWIIKVELSDAGEAEKLMDSDKYSKFCEEEDAKH

SEQ ID NO: 116960 - DNA, 435 bp, Xylella fastidiosa 9a5c
  CDS (1)..(435): transl_table=11
ttggttaaactatctcctccttcccgatgtacttcttccatgagcgatatccctggcgacctcaagttcctcaaatcccacgaatgggtccggatcgaagacaacaatcgtgccatcgttggtatttccgaccatgcacaaaatctgctcggtgatctggtgtatgtcgaattacccaatattggcgatcacctggacgctggcaccaccgctgcagtcattgagtcggtcaaggcagcctcagatatctacagtccagtcaccggcaaagtgattgaagtcaatactacgttaagcgacaaacctgagacgatcaatgaagatccctacggtgaaggctggattatggtcattgagatgcaagcccctgaggagattagtgatctactttctcccgatgattacaccaaagtgctggaaagtgacgaacattga

SEQ ID NO: 116961 - protein, 144 aa, Xylella fastidiosa 9a5c
MVKLSPPSRCTSSMSDIPGDLKFLKSHEWVRIEDNNRAIVGISDHAQNLLGDLVYVELPNIGDHLDAGTTAAVIESVKAASDIYSPVTGKVIEVNTTLSDKPETINEDPYGEGWIMVIEMQAPEEISDLLSPDDYTKVLESDEH

SEQ ID NO: 116962 - DNA, 369 bp, Thermoplasma acidophilum DSM 1728
  CDS (1)..(369): transl_table=11
atgacagaggtaccagagggtttgaactacacgaagacgcacgaatggtacagaaaggatggaaacacagcgaccataggaataactgattatgctcagtcccagatgacggatatagtctacgtcgatcttccaaaggttggggataagaagaaggccggagacgttcttctgacaatagaatccgtgaaatcagcagaggatgtttattccccaataacaggaacggtaaccgccgtaaacgaagaggtcgcaaagcatccggaatcaataaacaaggatccttacggcagctggctggtcaagatggccattgagagtgagggagaacacctgtctgcatcggagtacaggaagttaatacaatga

SEQ ID NO: 116963 - protein, 122 aa, Thermoplasma acidophilum DSM 1728
MTEVPEGLNYTKTHEWYRKDGNTATIGITDYAQSQMTDIVYVDLPKVGDKKKAGDVLLTIESVKSAEDVYSPITGTVTAVNEEVAKHPESINKDPYGSWLVKMAIESEGEHLSASEYRKLIQ

SEQ ID NO: 116964 - DNA, 510 bp, Schizosaccharomyces pombe 972h-
  CDS (1)..(510)
atgttagctcgttctgcccttcgctctggtttccttccctctcttacctcatctgtaaagaccggtttctgtttgaaggcagcagctcctactttatccatgaaatggagcgcggtaaaatattactcaactaaacactttactaaggaacatgaatgggttaaagtcgatggagatgttggaactgtaggaattacctcttatgctgcgaatgctcttggtgaagttgtattcgttgaattgccagaacctgagactaccgtgagtgtaggtgatggcatcggtgctgttgagtcagtcaagtcggctagtgatgtatattctccagtgtctggtacagttacttctatcaatgaatctcttggtgattcaccagataaggtgagctcgtctcccgaggaagaaggttggatttgcaaaatcaagttatcatcacctgacgaattgaaatcactattaaatgatgaaagttacgctcaattttgcaaggaagaagacgcgtcccattaa

SEQ ID NO: 116965 - protein, 169 aa, Schizosaccharomyces pombe 972h-
MLARSALRSGFLPSLTSSVKTGFCLKAAAPTLSMKWSAVKYYSTKHFTKEHEWVKVDGDVGTVGITSYAANALGEVVFVELPEPETTVSVGDGIGAVESVKSASDVYSPVSGTVTSINESLGDSPDKVSSSPEEEGWICKIKLSSPDELKSLLNDESYAQFCKEEDASH

SEQ ID NO: 116966 - DNA, 369 bp, Brucella suis 1330
  CDS (1)..(369): transl_table=11
atggccaatatcctgttcaccgaagatcatgagtggatcaacgtcgaaaacggcgttgccacggttggcatcacgatccacgcacaggaacagctcggcgacctcgttttcgtcgaattgccggaagtgggccgcaccgttgccaagggcgatggcgtggtggttgtggagtcggtcaaggccgcttccgacgtctacgcgccggtcgatggcgaagtggtggaagtcaacgatgctgtcgcgagcgatccttcccttatcaatcaggctgccgaaggcgaaggctggctgttcaagctgaagcttgccgatgaaggccagctcacgggcctgctcgacaaggccggttatgaaaagctgatcgggtga

SEQ ID NO: 116967 - protein, 122 aa, Brucella suis 1330
MANILFTEDHEWINVENGVATVGITIHAQEQLGDLVFVELPEVGRTVAKGDGVVVVESVKAASDVYAPVDGEVVEVNDAVASDPSLINQAAEGEGWLFKLKLADEGQLTGLLDKAGYEKLIG

SEQ ID NO: 116968 - DNA, 393 bp, Salmonella enterica subsp. enterica serovar Typhi Ty2
  CDS (1)..(393): transl_table=11
ttgatgagcaacgtacccgcagaactgaaatacagcaaagaacacgaatggctgcgtaaagaagcggatggcacttacaccgttggcattactgaacacgctcaggagctgttgggcgatatggtttttgttgatctgccggaagtcggcgcgaccgtaagcgcgggcgacgactgcgccgtggcggagtccgtaaaagcggcgtccgacatttatgcgccggtaagcggcgagatcgtggcggtaaacgatgcgctgagcgactccccggagctggtgaacagcgaaccgtatgccggtggctggatctttaaaatcaaagccagcgatgaaagcgagcttgaatcgctgctggatgccaccgcgtatgaggcattgttagaagacgaataa

SEQ ID NO: 116969 - protein, 130 aa, Salmonella enterica subsp. enterica serovar Typhi Ty2
MMSNVPAELKYSKEHEWLRKEADGTYTVGITEHAQELLGDMVFVDLPEVGATVSAGDDCAVAESVKAASDIYAPVSGEIVAVNDALSDSPELVNSEPYAGGWIFKIKASDESELESLLDATAYEALLEDE

SEQ ID NO: 116970 - DNA, 609 bp, Rhodopirellula baltica SH 1
  CDS (1)..(609): transl_table=11
ttgcgaccagcaagtttgaaagagtgttcccgcaaggttttgtgcatggcgaaaccgatgtcgccgcggccaattgattcaacgagcgcaattcaaatgaatgattccaattcggaccttggggagcaattcacgttcgcaatgggcgagtttgatgcgtcgtttcccaagggttatcgctacgcgaaaaatcacatgtgggcgacgccatcgccggaccaatcagccgccacgggcgatgctcattgcgtgtggcggtttggtttgtcagcgtacgccgtgcgtttgctgcaggacgtctattttctggattggattgtcgaagccgggacgccactgactgctcgcaagacgattggatcaatcgagagcaaaaaggccgagagtgatctgttttctcctatcgccggagaactgatcgtgatcaatgcggatgcattggatgagccttccgtgatcaacgcgtcgccctacgtcgacggttggctgatcgaaattcgcggcaatacgtctgaagaaaatttgttatcgtcggacgcatacgccgagcatctcaacgaggcatgggaggttgctcagcgaaccatcaaaggccaagccaaccactga

SEQ ID NO: 116971 - protein, 202 aa, Rhodopirellula baltica SH 1
MRPASLKECSRKVLCMAKPMSPRPIDSTSAIQMNDSNSDLGEQFTFAMGEFDASFPKGYRYAKNHMWATPSPDQSAATGDAHCVWRFGLSAYAVRLLQDVYFLDWIVEAGTPLTARKTIGSIESKKAESDLFSPIAGELIVINADALDEPSVINASPYVDGWLIEIRGNTSEENLLSSDAYAEHLNEAWEVAQRTIKGQANH

SEQ ID NO: 116972 - DNA, 390 bp, Prochlorococcus marinus subsp. marinus str. CCMP1375
  CDS (1)..(390): transl_table=11
atgatttttgattttccaaaaaagtttcgctttgctgatagtcatgaatatgcctgtcccgaaggagatttagttcgaataggcattagtgcttttgctgtagatcaattaggggacatagtttttgttgatcttcctggaattggcactttgttagaacaaggaatcagttttggctctgtcgagtccgttaaggctgtagaggacatgaatgctccgattggaggggaggtattacaaataaatgaatctgttctaaatagtcctgaagagttgcaaaatgatccacatggagaagggtggctattacttgttaagccttctgatgcaagtcaattagacaaattgatgtcatcagaaatatattctgaaaaagtgtcttcgaaataa

SEQ ID NO: 116973 - protein, 129 aa, Prochlorococcus marinus subsp. marinus str. CCMP1375
MIFDFPKKFRFADSHEYACPEGDLVRIGISAFAVDQLGDIVFVDLPGIGTLLEQGISFGSVESVKAVEDMNAPIGGEVLQINESVLNSPEELQNDPHGEGWLLLVKPSDASQLDKLMSSEIYSEKVSSK

SEQ ID NO: 116974 - DNA, 390 bp, Prochlorococcus marinus subsp. pastoris str. CCMP1986
  CDS (1)..(390): transl_table=11
atgtcttataagtttccaaattatctaagatatgctgatacacatgaatatgtgaaggaagaaaatggattgtttaaaattggtgttagtgagtttgctattgatcaattaggagacattgtttttgttgaattagtcgagaagggaactaatttacaaaaaggagaaacttttggaacaattgaatctgtcaaggctgttgaagaagtatatcttcctttttcaggtgaagtgatttctgtaaatgaaggagttattgataatccagaaattttgcaaaatgatccaattggtgatggatggttgctgattattaaatcagaatcaaatgttttgttagacgaattaatgaattcagatgaatataagtcaaaggttgttccgaattaa

SEQ ID NO: 116975 - protein, 129 aa, Prochlorococcus marinus subsp. pastoris str. CCMP1986
MSYKFPNYLRYADTHEYVKEENGLFKIGVSEFAIDQLGDIVFVELVEKGTNLQKGETFGTIESVKAVEEVYLPFSGEVISVNEGVIDNPEILQNDPIGDGWLLIIKSESNVLLDELMNSDEYKSKVVPN

SEQ ID NO: 116976 - DNA, 399 bp, Prochlorococcus marinus str. MIT 9313
  CDS (1)..(399): transl_table=11
atggctttccaattccccgaccactttcggtttgccgatacccatgaatacgccagtttggatggtgaattggtgcggataggcatcagtgcctttgctgttgatcagttgggtgacattgtgtttgtggatttgccggaggtgggcgatcggctgaatcggggcaccactttcgggtccgttgagtcggtgaaagctgtcgaggatttgcatgctccgatcagcggtgagctggtgcggattaatgagtcggtgctttccagcccggatgaacttcaaaatgatcctcatggtgaggggtggttgctcgtcgttcgcccggcggacccagctcaattgcaggatctgatggacgcagccacctatgccaacaaggtggctatcgaatcaagcaactaa

SEQ ID NO: 116977 - protein, 132 aa, Prochlorococcus marinus str. MIT 9313
MAFQFPDHFRFADTHEYASLDGELVRIGISAFAVDQLGDIVFVDLPEVGDRLNRGTTFGSVESVKAVEDLHAPISGELVRINESVLSSPDELQNDPHGEGWLLVVRPADPAQLQDLMDAATYANKVAIESSN

SEQ ID NO: 116978 - DNA, 390 bp, Synechococcus sp. WH 8102
  CDS (1)..(390): transl_table=11
atggcgttcgagtttcccgcttccttccgcttcgctgatagccacgagtacgccaatgccgacggtgagcttgtgcgggtgggcatcagtgcctttgccgtggatcagttgggggacatcgtgttcgtagatctccccgacgtgggcgacagcctcgacaagggcgccacgtttggatcggttgaatcggtgaaggctgttgaggatatgtacgccccggtggccggcgaggtggtgcagcgaaatgaagcggtgctcgcaagccctgaggagttgcagaacgatccccatggggaaggttggttgctggtgctgcgccccagtgatccctcccagctggaagccctgatggatgccggcacttacggcaccaaggtgaacgcaggctga

SEQ ID NO: 116979 - protein, 129 aa, Synechococcus sp. WH 8102
MAFEFPASFRFADSHEYANADGELVRVGISAFAVDQLGDIVFVDLPDVGDSLDKGATFGSVESVKAVEDMYAPVAGEVVQRNEAVLASPEELQNDPHGEGWLLVLRPSDPSQLEALMDAGTYGTKVNAG

SEQ ID NO: 116980 - DNA, 387 bp, Chromobacterium violaceum ATCC 12472
  CDS (1)..(387): transl_table=11
atgagcaacattcccgccgaactgaaatacgtcgacagccacgaatggctgcgcctggaagccgacggctccgtgaccgtgggcatcaccgcgcacgcgcaggaattgctgggcgacatcgtcttcgtcgagctgccgaaagtcggcgcgagtctggccaaggatgagcaggccggcgtggtggagtcggtgaaggccgcttccgacgtctactgtccgatcgccggcgaagtgctggccgtcaacgaggagctggagggcgagccggagctggccaacagcgatccgtacggcgacggctggttcttcaagatcaagccggccaacgccgccgatctgaacggcctgatggacgccgccgcctacgccaaggaaatcggcgcctga

SEQ ID NO: 116981 - protein, 128 aa, Chromobacterium violaceum ATCC 12472
MSNIPAELKYVDSHEWLRLEADGSVTVGITAHAQELLGDIVFVELPKVGASLAKDEQAGVVESVKAASDVYCPIAGEVLAVNEELEGEPELANSDPYGDGWFFKIKPANAADLNGLMDAAAYAKEIGA

SEQ ID NO: 116982 - DNA, 381 bp, Porphyromonas gingivalis W83
  CDS (1)..(381): transl_table=11
atgaaaactcctgcagaactgaagtattctaaggatcatgagtgggctcgccaagaaggcgacgttgtcttcatcggtatcacggactatgctcaaggcgaattgggcgaaattgtctatgtggacgttactaccgaaggcgaaacgctcgaggctgatgaggttttcggatcgatcgaagctgtgaagactgtttccgacctgatgatgcctatcgccggcgaggtattggaagtgaaccctgatctggaagagcaacccgaactcgtaaacagcgatccctacggtgccggttggattatcaaggttaaggctgcaaatgctgccgacttcgacaacctcctgagtgctgccgaatacgaaaaactgatagctcaataa

SEQ ID NO: 116983 - protein, 126 aa, Porphyromonas gingivalis W83
MKTPAELKYSKDHEWARQEGDVVFIGITDYAQGELGEIVYVDVTTEGETLEADEVFGSIEAVKTVSDLMMPIAGEVLEVNPDLEEQPELVNSDPYGAGWIIKVKAANAADFDNLLSAAEYEKLIAQ

SEQ ID NO: 116984 - DNA, 390 bp, Gloeobacter violaceus PCC 7421
  CDS (1)..(390): transl_table=11
atggccctggaatacccggaggaactaaaatatctcgactcccacgagtacctgcgcgtcgagggagacaccgtggtggtgggcgtcacgtcctatgccgtcgatcaactcggcgacatcgtctttgtctcgcttccggaggaaggcgatcgcatcaaccgcggcgacagcttcggttcgatcgaatcggtcaaggcggtcgaagaactgtacgccccgctctccggcacggttttgtcggtcaacaccgtcgcagtcgaagatccggcgcttatcggtagcgatccctatggcgacggttggctcatcaaggtccgtctcgccgaccctgccgacgagttgggcgaaacgatgactgccgaggaataccgcgagcgcgtcgaaggctga

SEQ ID NO: 116985 - protein, 129 aa, Gloeobacter violaceus PCC 7421
MALEYPEELKYLDSHEYLRVEGDTVVVGVTSYAVDQLGDIVFVSLPEEGDRINRGDSFGSIESVKAVEELYAPLSGTVLSVNTVAVEDPALIGSDPYGDGWLIKVRLADPADELGETMTAEEYRERVEG

SEQ ID NO: 116986 - DNA, 375 bp, Geobacter sulfurreducens PCA
  CDS (1)..(375): transl_table=11
atggaaacctatttcaccaaagagcacgagtgggtcaaggtcaaggaaggcgtggccgccgtggggatcaccgagtacgccgctcaccagctgggagacgttaccttcgtggagctgccgcaggtcgggaagcaggtgaagcagttcgaggtgctggcggccatcgagtcggtgaaggcggccagtgacatctacgccccggtttcggggaaggtgacccaggtgaacgaagcccttgacgatcgtcccgagatcgtgaacgaggccgccgaggaggcggggtggattgcctggatcgagatgggggatacctctgaactgaacggtctcctgacccgcgaacagtacgacgagtatctgaagggcctcgaataa

SEQ ID NO: 116987 - protein, 124 aa, Geobacter sulfurreducens PCA
METYFTKEHEWVKVKEGVAAVGITEYAAHQLGDVTFVELPQVGKQVKQFEVLAAIESVKAASDIYAPVSGKVTQVNEALDDRPEIVNEAAEEAGWIAWIEMGDTSELNGLLTREQYDEYLKGLE

SEQ ID NO: 116988 - DNA, 399 bp, Geobacter sulfurreducens PCA
  CDS (1)..(399): transl_table=11
atggattttcctgaagagctcaagtacagcaaggaacacgtttgggtcagggaagagggggatcgggcggtcatcgggctgaccgattatgcccaggatgccttgggcaccatcagtgccatagaactgcccacagttggggatgaactggagcaggaggattccttcggctcccttgaggcacgcaagactgcgtcggaactttacgctcccatcagcgggacggtgctggaggtaaacgaggaattggacgcggctccggaggtcatcaatgacgacccctatgacgggggctggattgcggcggtctcccttgatgaccctgaagaactcaagtcgctcctgtcggcggaagattacgcagagtatgtaagccagaccgacgaagacgaagaataa

SEQ ID NO: 116989 - protein, 132 aa, Geobacter sulfurreducens PCA
MDFPEELKYSKEHVWVREEGDRAVIGLTDYAQDALGTISAIELPTVGDELEQEDSFGSLEARKTASELYAPISGTVLEVNEELDAAPEVINDDPYDGGWIAAVSLDDPEELKSLLSAEDYAEYVSQTDEDEE

SEQ ID NO: 116990 - DNA, 390 bp, Bdellovibrio bacteriovorus HD100
  CDS (1)..(390): transl_table=11
atgggatttcatattcctgaagattactactacacaaaagaacacgaatgggctcaagttgacgagaacatcgtaaccgtaggcatcactgagttcgctcaagaccaattgggtgaagtggtttacgtggaacttccagaagaaggtcaaaaaatcactcaaggccaaactttcggtgttattgagtccgttaaagccgtgagcgacctttacgctcctgtttccggcactgtaatcgaagtaaacgcgtccctgggcgacgatccttctgttttgaacgacgatccagtaaatgaaggctggttggttcgtatcgaaatggatactgaaaaagagctcgcaaacctgatgagagctccagattacaaaaaattgatcagcgagaagtaa

SEQ ID NO: 116991 - protein, 129 aa, Bdellovibrio bacteriovorus HD100
MGFHIPEDYYYTKEHEWAQVDENIVTVGITEFAQDQLGEVVYVELPEEGQKITQGQTFGVIESVKAVSDLYAPVSGTVIEVNASLGDDPSVLNDDPVNEGWLVRIEMDTEKELANLMRAPDYKKLISEK

SEQ ID NO: 116992 - DNA, 513 bp, Nasonia vitripennis
  CDS (1)..(513)
atggcgcgactggtagcgcagatcgccaggtgcaccgccaggtcgatgctatttaatcacgaggctgccgcattcaaggctgctccgaaatcttccagcctcgttcggcacatcgcgagcacacatcgcttggaagctgaaaggaggtacaccgacaaacatgagtgggtaacgctgaatggcaatattggtacagtaggaatttcggattacgcacaagatgctcttggagacgttgtttatgcacaacttccagacatcggccaagtgatcaaaaaagaagatgaatgtggagccctggagtcggtcaaggcagcctctgagataatgagcccctgcagtggcaaagtcctcgagaagaacgaagccgtcgagagcaaaccgggtcttatcaacacgtcctgctacgacgagggatggctcttcaagatcgaactgagcgatcccgaggagataaaaactcttatggacgaagatgcctacaacgagtacctcaagactgaccctcattaa

SEQ ID NO: 116993 - protein, 170 aa, Nasonia vitripennis
MARLVAQIARCTARSMLFNHEAAAFKAAPKSSSLVRHIASTHRLEAERRYTDKHEWVTLNGNIGTVGISDYAQDALGDVVYAQLPDIGQVIKKEDECGALESVKAASEIMSPCSGKVLEKNEAVESKPGLINTSCYDEGWLFKIELSDPEEIKTLMDEDAYNEYLKTDPH

SEQ ID NO: 116994 - DNA, 537 bp, Magnaporthe grisea 70-15
  CDS (1)..(537)
atggcttcaattgcacgctgcctgagggctgccaggcctgcaggagtttcaatcctcgccaagaccccgcgaccggcgccggccgtcggcaaaatgaatgtggttcggccgttttcggtcactgccataaacccgatccgcaagtacaccaaagaccacgaatggattgacctcagcgccgacaagaagactggcgtcatcggtatctctgagtatgcggccgaagccctgggcgacgtcgtatacgtcgagctgcccgacataggcaaggatatttccaagggcgatgccattggcgccgtcgagtctgtcaagtcggctgccgacatcaactcccccatctcgtgcaaagtcacacaggtcaacaacgttctcgaggaggcgcccggcaccatcaacaaggtccccgaggatgattcccacggcggtggctggattgccaaggtcgaggttggcgagcagggcgtcaaggagctggatgagcttatggatgccgaggcctacaaggctttcactgctgccgagggcgaccactaa

SEQ ID NO: 116995 - protein, 178 aa, Magnaporthe grisea 70-15
MASIARCLRAARPAGVSILAKTPRPAPAVGKMNVVRPFSVTAINPIRKYTKDHEWIDLSADKKTGVIGISEYAAEALGDVVYVELPDIGKDISKGDAIGAVESVKSAADINSPISCKVTQVNNVLEEAPGTINKVPEDDSHGGGWIAKVEVGEQGVKELDELMDAEAYKAFTAAEGDH

SEQ ID NO: 116996 - DNA, 522 bp, Gibberella zeae PH-1
  CDS (1)..(522)
atgtctggtctctttgctcgtcaagcttgggctactgcctccaaggtccgatctactgctctgcgagcaccaaaggttgcgtttacctgcagagtcaacaacattgctccccgacgatcattttcagtttccatgaaccttctggctagaaaatacactgagagccacgaatggattgacgtagccgccgatggcaagacctgcacaattggcatttcaaactacgccgctgaagctctcggcgacgtagtctacgtggaactccccgcagtaggcgaagagacagcccagggcgagtcctttggcagcgtcgagtccgtcaagtcagcctctgacatcaactcgcccgtttctggttccgtcgtcgaggtcaacgaccccatcgtcgagacacctgctgatctcggcaaggaccctgagaagagtggctggttgatcaaggttgaggctgaggatgtttctgctttggatgcactgatggatgaggctgcttatgccgagcacatcaagggggagcactaa

SEQ ID NO: 116997 - protein, 173 aa, Gibberella zeae PH-1
MSGLFARQAWATASKVRSTALRAPKVAFTCRVNNIAPRRSFSVSMNLLARKYTESHEWIDVAADGKTCTIGISNYAAEALGDVVYVELPAVGEETAQGESFGSVESVKSASDINSPVSGSVVEVNDPIVETPADLGKDPEKSGWLIKVEAEDVSALDALMDEAAYAEHIKGEH

SEQ ID NO: 116998 - DNA, 507 bp, Gibberella zeae PH-1
  CDS (1)..(507)
atggcttcaattgctcgctctctgcgcttcgccgcccctctaacaaggggtatcgctcctcgcgctcccattgcccgccctatccgagctttctcctccaccaaattgagcctcgctcgcaaatacacaaaagaccacgaatggatcgatctctccgccgataagaagcacggtttcgtcggtatctcagagtacgctgccgagcagctcggtgatgtagtctacgttgagctccccgaagccggtcagtgggttgagcaaggtgacgctgtcggcgccgtcgagtcagtcaagtctgccagcgacatcaacgctcccgttcgtttgcgtgttgtccaagtcaacgataacctcgaagagaagccctccacgattaacaaggttcccgaggacgatagcgccggtggtggctggatcgcaaaggtcgaggttgacgaggagggcgccaagcagtttgagaagctattggatgccgaggcttacaagacttttgctggagccgattaa

SEQ ID NO: 116999 - protein, 168 aa, Gibberella zeae PH-1
MASIARSLRFAAPLTRGIAPRAPIARPIRAFSSTKLSLARKYTKDHEWIDLSADKKHGFVGISEYAAEQLGDVVYVELPEAGQWVEQGDAVGAVESVKSASDINAPVRLRVVQVNDNLEEKPSTINKVPEDDSAGGGWIAKVEVDEEGAKQFEKLLDAEAYKTFAGAD

SEQ ID NO: 117000 - DNA, 519 bp, Candida glabrata CBS 138
  CDS (1)..(519)
atgttctctagagttgttgttagatcaagcaggtttgtagcttctccactacgtttggctctcagatgtcaatccacaaacgctttaaacaagagccagttgccatttactcactctggtgaaggaccattggccgtcaagtacacttctcaacacgaatggatcgctgcacacagtgacggtaccgcattcttaggtataacgaaatatgctgccgatgccctaggtgatgccacttacattgagatcccagaagctgacactgaggtctccgccggtgactctgtctcatctgttgagtcagtcaagtctgcctccgaagtatacaccccattgtcaggtacggtggtggaaggtaacgcagctctagaagagtctccacaattgatcaacactgacccactgggtgaaggttggatcgccaagataaaattagagaacccagaagagatcaacaccacagaaggtctactgactttagaacaatacgagcaatcactagagcacgatgagcattaa

SEQ ID NO: 117001 - protein, 172 aa, Candida glabrata CBS 138
MFSRVVVRSSRFVASPLRLALRCQSTNALNKSQLPFTHSGEGPLAVKYTSQHEWIAAHSDGTAFLGITKYAADALGDATYIEIPEADTEVSAGDSVSSVESVKSASEVYTPLSGTVVEGNAALEESPQLINTDPLGEGWIAKIKLENPEEINTTEGLLTLEQYEQSLEHDEH

SEQ ID NO: 117002 - DNA, 528 bp, Kluyveromyces lactis NRRL Y-1140
  CDS (1)..(528)
atgttctcttcatctatttctcgtactgcttttgtctcttctcgtattgcgaagagcacagtttctcgtttgttcttgagagctcaatcgacaaatgctttaaaccaatctcaattgcctttcactttctctcaaaccggtccaaaaaccgttaaatacactacacagcatgaatgggttgctgctcatccagatggatctgccttcattggtattaccaagtacgcagccgatgcacttggtgatgccacttacgtcgaattgccagatgttgataccgaattagaggctggcgattcgtttggttctgttgaatccgtcaagtctgcatctgaaatttactctcctgtcgctggtactgtcgtggaagtgaacgaagctttgtctgactcgccacaattgatcaacagcgacccagctggtgaaggttggatcatcaagattaaaattaacgatgaggcagatttacaatccgatgaattgttatcgctagagcagtacgaagctcatctaaaggaagaccattga

SEQ ID NO: 117003 - protein, 175 aa, Kluyveromyces lactis NRRL Y-1140
MFSSSISRTAFVSSRIAKSTVSRLFLRAQSTNALNQSQLPFTFSQTGPKTVKYTTQHEWVAAHPDGSAFIGITKYAADALGDATYVELPDVDTELEAGDSFGSVESVKSASEIYSPVAGTVVEVNEALSDSPQLINSDPAGEGWIIKIKINDEADLQSDELLSLEQYEAHLKEDH

SEQ ID NO: 117004 - DNA, 573 bp, Debaryomyces hansenii CBS767
  CDS (1)..(573)
atgtttagaaacttaatcaacgccagaatctcgaccagagtaggatcccagttagcaaagaatgcaattggtgccagaattaacgccgctaaggtcgcaccaggggttagtttcatgagatacaactccagcaatttcaagttgaactctgactcttttgttgtcaaataccaggaagctggtcctaaatccgtcaagttcaccgaagaacacgaatggattgcattccaaagagatgacagtgtgttccttggtatcacccaatatgccagtgaagcattaggggaagctaccttcgtcgaattaccagaagtcggtgacaccgtcgaagtgggtgaatcgatcggttctgtcgaatcggtcaagtctgcttccgaaatctactccccagttgccggtgaaattgtcgctgtcaacgaagagttggaatcaaggccacaactcatcagcgatgatccaatgggtaacgcttggattgctcaaataaaattgaacgagccagccgaagtggtagaaggtcaagaatcgttattgagtgaaactcaatacgaagagttgttggatagtaactaa

SEQ ID NO: 117005 - protein, 190 aa, Debaryomyces hansenii CBS767
MFRNLINARISTRVGSQLAKNAIGARINAAKVAPGVSFMRYNSSNFKLNSDSFVVKYQEAGPKSVKFTEEHEWIAFQRDDSVFLGITQYASEALGEATFVELPEVGDTVEVGESIGSVESVKSASEIYSPVAGEIVAVNEELESRPQLISDDPMGNAWIAQIKLNEPAEVVEGQESLLSETQYEELLDSN

SEQ ID NO: 117006 - DNA, 519 bp, Yarrowia lipolytica CLIB122
  CDS (1)..(519)
atgcttcgaactctggcccgatcttccctccgattcgctccccgagccaccatggctcctacaatggctcctctgaccatgatgcgactcaaccacaccctcatcaagggctccattcccgacaagtactccaacaagtacaccctcaagttcaccgaggatcacgactgggttgccttccacgaggacggcgttgccttcattggtatcaccaagtacgctgctgaggcccttggagatgccactttcgttgaggttgaggaggccggtaacgagatcgagaaggacgatgcttttggaaacgtcgagtccgtcaaggctaccaacgacatcattgctcccttcgacttcgaggtggtcgagtctaactttgacgttgccgacactccctctctcatcaacaaggagcccaacggaaacggttacctcgccaaggtcaagcccatcgagggtgccgaggagactgagggtctgctcactgccgaggagtacgatgagttcctcaagaacgcccactaa

SEQ ID NO: 117007 - protein, 172 aa, Yarrowia lipolytica CLIB122
MLRTLARSSLRFAPRATMAPTMAPLTMMRLNHTLIKGSIPDKYSNKYTLKFTEDHDWVAFHEDGVAFIGITKYAAEALGDATFVEVEEAGNEIEKDDAFGNVESVKATNDIIAPFDFEVVESNFDVADTPSLINKEPNGNGYLAKVKPIEGAEETEGLLTAEEYDEFLKNAH

SEQ ID NO: 117008 - DNA, 522 bp, Aspergillus nidulans FGSC A4
  CDS (1)..(522)
atgtctgccgccgctcgatttatccgcccctttgcctcccgcgcccttgcacagaagcttcctttgagctccgtccgcagggtctcgcccgcaattggtttcccgcggggaacagtccgcagcttttctcagagcacattcttgcaagtgaagaagtacacagagtctcacgaatggattgagctcgctgatgacggcaagactgccaaaatcggaatcacagaatacgccgccaagtccctaggtgatgtcgtctacgttgagctccccgagccgggcactgaggttggtgccggcgagcccgttggcgccgtcgagtccgtcaaatctgcttcagacgtgctctctcccgtctctggaactgtgacgaagggcaacgaggtcctcagtgacaaggccaaattcatcaacgagagcccggagggtgaggcatggattgccgagatcgaagtcagcgatgcctccgaggtggatgggctgctcgaccttaaggcttacaaggccactattgatgaggagtaa

SEQ ID NO: 117009 - protein, 173 aa, Aspergillus nidulans FGSC A4
MSAAARFIRPFASRALAQKLPLSSVRRVSPAIGFPRGTVRSFSQSTFLQVKKYTESHEWIELADDGKTAKIGITEYAAKSLGDVVYVELPEPGTEVGAGEPVGAVESVKSASDVLSPVSGTVTKGNEVLSDKAKFINESPEGEAWIAEIEVSDASEVDGLLDLKAYKATIDEE

SEQ ID NO: 117010 - DNA, 534 bp, Candida albicans SC5314
  CDS (1)..(534): transl_table=12
atgattagaacattattaagaccaacttcattgagacttgttacaccaacttttagatctttctccacattttcaaccagatttcaattgatagataaagattcacacgcctacaaatatttatatgaaaaaacccccgttgttacaaaattcactgaagatcatgaatgggttcatttatatgatgatgattctgcttttgttggtattactcaatacgctgctcaagctttaggcgatgtcacatttgttgacttgccagaagttggtgatcatttggaattgaatgagactttgggttctgttgaatcagttaaatcatcagctgatgtttactctccagttgatggtgaagttgttggggttaatctcaaattagaaagtgaaccaggtattttaaaccacgatccaacgaaaggtggatggattgttcacattaaattggatgacccaactcaagtcactaaatctgaaactttaatgagtgaagaacaatataagaagtttttagaagaagaagaagaaggccattaa

SEQ ID NO: 117011 - protein, 177 aa, Candida albicans SC5314
MIRTLLRPTSLRLVTPTFRSFSTFSTRFQLIDKDSHAYKYLYEKTPVVTKFTEDHEWVHLYDDDSAFVGITQYAAQALGDVTFVDLPEVGDHLELNETLGSVESVKSSADVYSPVDGEVVGVNLKLESEPGILNHDPTKGGWIVHIKLDDPTQVTKSETLMSEEQYKKFLEEEEEGH

SEQ ID NO: 117012 - DNA, 495 bp, Tribolium castaneum
  CDS (1)..(495)
atggtcatccaccggttcgtaagatgtgtcaacaattcaacagcgagacaattaatctttaaccaatgccgcaaacacgctattaataggtcgattttcacaactccctcgttctgggcagaacgcttatatacagacaaacacgagtgggtggaagttgatggtaaaaccgggaaagtgggaatatcacaatacgctcaggaggcgctgggggatgtagtttacgcacaactgccagatgtcgacactgtcctaaaacaaaaagacgaatgtggggctcttgaaagtgtgaaagctgcaagtgaggtttatagtcccatttctggtaaagttgtagagaaaaatacaagtgttgaagaaacgccgtctttgatcaactcgtcatgttatgataaggggtggttgtttaaaatcgaattgtccgatactggggaacttaagagtttaatgactgaaacacaatataatgaatatcttaaaacacaagagcattag

SEQ ID NO: 117013 - protein, 164 aa, Tribolium castaneum
MVIHRFVRCVNNSTARQLIFNQCRKHAINRSIFTTPSFWAERLYTDKHEWVEVDGKTGKVGISQYAQEALGDVVYAQLPDVDTVLKQKDECGALESVKAASEVYSPISGKVVEKNTSVEETPSLINSSCYDKGWLFKIELSDTGELKSLMTETQYNEYLKTQEH

SEQ ID NO: 117014 - DNA, 390 bp, Prochlorococcus marinus str. MIT 9301
  CDS (1)..(390): transl_table=11
atgtcttacaaatttccagacaacctcaactatgctgatactcatgaatatgtcttggaagaaaatggattattaaaaattggagttagtgaattcgctatagatcaattaggagatattgtttttgttgaattagctgatgaaggtgcgactttagagaaaggcgagacttttggaacaatagaatcagttaaggccgttgaggaagtctatctacctttttctggggaaatagtatctgtaaatgaaagtgttattgagaaccctgagcttttgcagagtgatccgattggagacggttggttagtcattttgaaaccagaatcaaaagcatcaattgctgatttgatgacttctgaggaataccaatcaaaggttgtaccaaaataa

SEQ ID NO: 117015 - protein, 129 aa, Prochlorococcus marinus str. MIT 9301
MSYKFPDNLNYADTHEYVLEENGLLKIGVSEFAIDQLGDIVFVELADEGATLEKGETFGTIESVKAVEEVYLPFSGEIVSVNESVIENPELLQSDPIGDGWLVILKPESKASIADLMTSEEYQSKVVPK

SEQ ID NO: 117016 - DNA, 387 bp, Thermus thermophilus HB27
  CDS (1)..(387): transl_table=11
atggacatacccaaggaccgcttctataccaagacccacgagtgggccctgcccgaaggcgacacggtgctcgtcggcatcaccgactacgcccaggacgccctcggcgacgtggtttacgtggagctacccgaggtgggccgggtggtggagaagggcgaggcggtggccgtggtggagagcgtgaagaccgcttccgacatctacgcccccgtggccggggagatcgtggaggtcaacctcgccctggagaagacccctgagctcgtcaaccaggacccctacggggagggctggatcttccgcctgaagcccagagacatgggcgacctggacgagctcttggacgccgagggctaccaggaggtcctggaaagcgaagcctag

SEQ ID NO: 117017 - protein, 128 aa, Thermus thermophilus HB27
MDIPKDRFYTKTHEWALPEGDTVLVGITDYAQDALGDVVYVELPEVGRVVEKGEAVAVVESVKTASDIYAPVAGEIVEVNLALEKTPELVNQDPYGEGWIFRLKPRDMGDLDELLDAEGYQEVLESEA

SEQ ID NO: 117018 - DNA, 369 bp, Bartonella quintana str. Toulouse
  CDS (1)..(369): transl_table=11
atgtctcaaatttattttacacaagatcatgaatggcttagcgttgaaggacaagtagtgactgtggggatcacaaattatgcccaagaacaattaggtgatttggtttttgttgatttgccacaaagcgggacgaaactttccaagggggatgctgctgctgttgtggaatcggtgaaggcggcttcagatgtttatgcacctcttgatggtgaagtggtcgaaattaatgaagctttggcaaatagtcctgaactggtaaaccagaaagctgaaaaagaaggatggctctggaaaatgacagtgcaggatgaaacgcaacttgaagggttgctggatgaggctgcttataaaacattgattggatga

SEQ ID NO: 117019 - protein, 122 aa, Bartonella quintana str. Toulouse
MSQIYFTQDHEWLSVEGQVVTVGITNYAQEQLGDLVFVDLPQSGTKLSKGDAAAVVESVKAASDVYAPLDGEVVEINEALANSPELVNQKAEKEGWLWKMTVQDETQLEGLLDEAAYKTLIG

SEQ ID NO: 117020 - DNA, 375 bp, Acinetobacter sp. ADP1
  CDS (1)..(375): transl_table=11
atgaatcatccttcagaattgaagtatgcaactacccatgaatgggtacgaattgaaggtgatcttatcgtcactggaattagtgatcatgcacaagatgccttaggcgatcttgtctatgtagaagttcctgaagtagggagccatatgactgctggcacacaagctggcgtggttgagtctgtaaaaacagcttcagacattcatgcaccagtatcgggtacagtggttgaagtcaatactgcactggaagatgatccagactttatcaatgacgaaccttatggcaaaggctggatttataaaatgaaaccagacaacatcgcagacgtagatcaacttctctccaataccgattacgaagctggtttataa

SEQ ID NO: 117021 - protein, 124 aa, Acinetobacter sp. ADP1
MNHPSELKYATTHEWVRIEGDLIVTGISDHAQDALGDLVYVEVPEVGSHMTAGTQAGVVESVKTASDIHAPVSGTVVEVNTALEDDPDFINDEPYGKGWIYKMKPDNIADVDQLLSNTDYEAGL

SEQ ID NO: 117022 - DNA, 393 bp, Erwinia carotovora subsp. atroseptica SCRI1043
  CDS (1)..(393): transl_table=11
atgagcaatgtaccaacagaattaaaatatgccacgtcacacgaatgggtactgcatgaaggcgacggtatctacagcgtgggcattaccgaacacgcgcaggagcttctgggtgacatggtttttatcgatttaccggaagtcggcacggtggtcgcggcaggcgatgactgcgcggttgcggagtcggtaaaagcggcctcggatatttatgcaccgatcagcggtgaggtcgtggaagttaacgaagacctggaaaattcccctgagctggtcaacagcgcgccttataccgacggctggctgtttcgtatcaaaatttctgatgagtctgatttggatgaactgcttgatgccgaaggctatcaggcgtcgttagaagaagacgagtag

SEQ ID NO: 117023 - protein, 130 aa, Erwinia carotovora subsp. atroseptica SCRI1043
MSNVPTELKYATSHEWVLHEGDGIYSVGITEHAQELLGDMVFIDLPEVGTVVAAGDDCAVAESVKAASDIYAPISGEVVEVNEDLENSPELVNSAPYTDGWLFRIKISDESDLDELLDAEGYQASLEEDE

SEQ ID NO: 117024 - DNA, 387 bp, Symbiobacterium thermophilum IAM 14863
  CDS (1)..(387): transl_table=11
atggcgaacgtaccggcggatctcaagtactcgaaggagcacgagtggatcagggtcgaaggcaacatcggcatcgtgggcatcacctggttcgcccaggatcagttgggcgacgtggtcttcgtcgagctgcctgaggtggggcgtgaactgaagcagaacgagcagttcggcgtggtggagtcggtcaagaccgtttcggacctgtactgcccggcctccggcaaggtggtggaggtcaacacgaagctggagagctcgccggagctgatcaaccaggacccctacggcgagggctggattctgaagctggagctctcgaacccggccgaactggacaacctgctggatgcggcggcttacgacgcgtttaccaaggagggctaa

SEQ ID NO: 117025 - protein, 128 aa, Symbiobacterium thermophilum IAM 14863
MANVPADLKYSKEHEWIRVEGNIGIVGITWFAQDQLGDVVFVELPEVGRELKQNEQFGVVESVKTVSDLYCPASGKVVEVNTKLESSPELINQDPYGEGWILKLELSNPAELDNLLDAAAYDAFTKEG

SEQ ID NO: 117026 - DNA, 384 bp, Bacillus licheniformis ATCC 14580
  CDS (1)..(384): transl_table=11
atgagcacaccgaaagagttgcgttattcagaagaacacgaatgggtgaaaaccgaaggagataaagtcagaatcggcattacagactttgcacaatctgagcttggagacatcgtatttgtcgagcttcctgaagtgggagacgaaatcaaagcggacgagccttttggcagcgttgaatccgtaaagaccgtttctgagctgtatgccccgatcaacggaaaagtggtcgaagtgaacgaagatctggaagacagccctgaattcgtcaacgagtctccgtatgaaaaggcttggatgattgtcgtcgagccgtcagacgcttctgaaatcgaaaacctgatgacagccgggcaatatgaggacatgataaaagaagactaa

SEQ ID NO: 117027 - protein, 127 aa, Bacillus licheniformis ATCC 14580
MSTPKELRYSEEHEWVKTEGDKVRIGITDFAQSELGDIVFVELPEVGDEIKADEPFGSVESVKTVSELYAPINGKVVEVNEDLEDSPEFVNESPYEKAWMIVVEPSDASEIENLMTAGQYEDMIKED

SEQ ID NO: 117028 - DNA, 378 bp, Legionella pneumophila subsp. pneumophila str. Philadelphia 1
  CDS (1)..(378): transl_table=11
atgaatgatttgaaattcacaacaacccatgaatggctgagagaagatgaggaagaggtcacagtaggaattacagatcatgcgcaagaattattgggggatatggtatttgtagaactacccgaaataggtgatgaagtgagtgcaggccaagaattaggcgtggtggagtcagtgaaagcagcttctgatttttatgctcccattagtggtgttgtaacggcggttaacgaagccgttggtaaaaaccctgccctggtaaaccacgatccctaccatgaaggctggctcgtgaagctaaagcccagccatcctgatgaaatcaaaagcctgttaagtgatgagcaatatcaaaatgagatagctgaggaaaattaa

SEQ ID NO: 117029 - protein, 125 aa, Legionella pneumophila subsp. pneumophila str. Philadelphia 1
MNDLKFTTTHEWLREDEEEVTVGITDHAQELLGDMVFVELPEIGDEVSAGQELGVVESVKAASDFYAPISGVVTAVNEAVGKNPALVNHDPYHEGWLVKLKPSHPDEIKSLLSDEQYQNEIAEEN

SEQ ID NO: 117030 - DNA, 381 bp, Burkholderia pseudomallei K96243
  CDS (1)..(381): transl_table=11
atgagcaacgtcccggccgaactgaaatacaccgacgaacacgagtggattcgcaccgaagccgacggcacgctgacgatcggcatcaccgaccacgcgcaaaccacgctcggcgacatcgtcttcctcgagctgccgaaagtcggctcgcaagtgaaggcgggcgacgccatcggcgtcgtcgaatcggtgaaagccgcgtcggacatctactcgcccgtgaccggcgaagtgatcgcgatcaacacggacgtggccgatgcgccggaagaggtgaacggcgacgcgtacggcgcatggctcttcaagatcaagctggcggccgacgcctcgaccgactgcctgctcgacgccgccgcctacgagaagctggtcggctga

SEQ ID NO: 117031 - protein, 126 aa, Burkholderia pseudomallei K96243
MSNVPAELKYTDEHEWIRTEADGTLTIGITDHAQTTLGDIVFLELPKVGSQVKAGDAIGVVESVKAASDIYSPVTGEVIAINTDVADAPEEVNGDAYGAWLFKIKLAADASTDCLLDAAAYEKLVG

SEQ ID NO: 117032 - DNA, 387 bp, Azoarcus sp. EbN1
  CDS (1)..(387): transl_table=11
atgagcaacgttcccgccgagctgaaatacacgaagtcccacgaatggatccgcgtcgaagccgacggctccctgacgatcggcgtcaccgaccacgcgcaggaagcgctcggcgacgtggttttcctcgagctcccggaagccggtcggcagctcgcggccggcgaggcgtgcgccgtcatcgaatcggtcaaggcggcttccgacatctacgcgccggtcgacggcgaagtcatcgcatcgaaccaggacgccgtcgacgcaccggagtctgtcaatgccgacgcctacgcggcgtggctgttcaagctcaagccggccaacgccggcgacgtcgcggcgctgctcgacgcccagggctaccaggccgagatcgcgaacgcctga

SEQ ID NO: 117033 - protein, 128 aa, Azoarcus sp. EbN1
MSNVPAELKYTKSHEWIRVEADGSLTIGVTDHAQEALGDVVFLELPEAGRQLAAGEACAVIESVKAASDIYAPVDGEVIASNQDAVDAPESVNADAYAAWLFKLKPANAGDVAALLDAQGYQAEIANA

SEQ ID NO: 117034 - DNA, 441 bp, Silicibacter pomeroyi DSS-3
  CDS (1)..(441): transl_table=11
ttgtccacaaggtttttacaaaaccttgcccccgcctgtggtaaccgaaacatactatctgaaggatcgacaaacatgaccatctattactccgaagatcacgaatggctcagcgtcgagggcgagatcgccacgctgggtatcaccaaacacgctgccgaccagctgggcgaggtggtgttcatcgaacagaaagaggccggtgatgcctttgcccagggcgacgagatcggcgtgatcgaatcggtcaaggcggcttcggagatctatgcccctgttgatggcgaagtggtcgaggtgaacgaggaactggccgacaatcccggcgctctgaacgacagccccgagggcgatgcctggatctacaagatcaagctcagcgatcccgcccagcttgacggcttgatggatctcgccgcctataccgacatgatcggctaa

SEQ ID NO: 117035 - protein, 146 aa, Silicibacter pomeroyi DSS-3
MSTRFLQNLAPACGNRNILSEGSTNMTIYYSEDHEWLSVEGEIATLGITKHAADQLGEVVFIEQKEAGDAFAQGDEIGVIESVKAASEIYAPVDGEVVEVNEELADNPGALNDSPEGDAWIYKIKLSDPAQLDGLMDLAAYTDMIG

SEQ ID NO: 117036 - DNA, 441 bp, Bacillus clausii KSM-K16
  CDS (1)..(441): transl_table=11
atgagcgatttcctgtatgataaacttcgaaaagaccacattggaggggttaacatgagtaatttacctgaagagctaaagtattccgaagaacatgagtgggtaaaaacggaagacggcaaagtccgtatcggcatcactgattttgcccaatctgaactaggcgatattgtcttcgtcgaacttcctgaagtgggcgatgagattgaagcggacgagccatttggcagcgttgagtccgtcaagactgtatctgaattgtatgcgccaattagcggaaaagtcgttgaagtgaatgaagaacttgatgattccccagagcttgtcaatgagtcaccgtacgaaaaagcgtggatgatcgtggttgagccggctgacgcaagtgaagtggacaagctgatgtcagcaggagaatatgcggagatgattagcgaagattaa

SEQ ID NO: 117037 - protein, 146 aa, Bacillus clausii KSM-K16
MSDFLYDKLRKDHIGGVNMSNLPEELKYSEEHEWVKTEDGKVRIGITDFAQSELGDIVFVELPEVGDEIEADEPFGSVESVKTVSELYAPISGKVVEVNEELDDSPELVNESPYEKAWMIVVEPADASEVDKLMSAGEYAEMISED

SEQ ID NO: 117038 - DNA, 381 bp, Bacteroides fragilis NCTC 9343
  CDS (1)..(381): transl_table=11
atgaacttcccacagaatgtaaagtacactaacgaacacgaatggatccgcctcgaaggcgatgtagcttatgtaggtatcaccgactacgctcaggagcaactgggcgacatcgtatttgtcgatattcctactgaaggcgaaacactggaagcgggagaagtgttcggtacgatcgaagtagttaaaacaatctctgacctcttcctgcccgtagccggtgaagtggtagaacaaaacccggcactggaagagaatccggaattagtgaataaagatccgtatggcgaaggctggctcatcaaaatgaaacctgccaatgcagcagaccttgacaacttgctggatgccgaaggatacaaagcagtggtaaatgcataa

SEQ ID NO: 117039 - protein, 126 aa, Bacteroides fragilis NCTC 9343
MNFPQNVKYTNEHEWIRLEGDVAYVGITDYAQEQLGDIVFVDIPTEGETLEAGEVFGTIEVVKTISDLFLPVAGEVVEQNPALEENPELVNKDPYGEGWLIKMKPANAADLDNLLDAEGYKAVVNA

SEQ ID NO: 117040 - DNA, 390 bp, Colwellia psychrerythraea 34H
  CDS (1)..(390): transl_table=11
atgagcaacattccttcagaattaaaatatgcaacttcacacgaatgggttcgcgttgacagcgacggtatcgctacagttggtatcagtgaacatgcccaaggccttttaggtgatatggtatttgttgaattacctgacgttgatgattcaatcagcgctggtgatgatgttgctgttgcagaatcagtaaaagcagcttcagacatttacgcaccagtttcaggtactgttgttgcaatcaacgaagcacttgaagacgctcctgagttacttaactctgacgcttttggtgaaggttggttatttcaagttaaacttgacgatgtaagtgagttagaaaacttacttgatgcagaaggttataagaactctatcgacgaagattaa

SEQ ID NO: 117041 - protein, 129 aa, Colwellia psychrerythraea 34H
MSNIPSELKYATSHEWVRVDSDGIATVGISEHAQGLLGDMVFVELPDVDDSISAGDDVAVAESVKAASDIYAPVSGTVVAINEALEDAPELLNSDAFGEGWLFQVKLDDVSELENLLDAEGYKNSIDED

SEQ ID NO: 117042 - DNA, 387 bp, Colwellia psychrerythraea 34H
  CDS (1)..(387): transl_table=11
atgagcacagtagaaaaagattatcaatttgccccaagtcacgagtgggttaaaaataacaacgacggtactgttactatcggtatttcaaaccacgcgcaagaattgctaggtgatgttgttttcattgaattaccagaacaaggcgatgaaataacggcaggcgaacaatttaccctcgtagaatcagtaaaagccgcttcagacgtatatgcgcctgtttcgggtgaaatcattgaaattaatgaagcactagaagactcaccagagtcaattaaccaatcggcatttgttgaaggctggattgtaaaagttaagctttcagagcctgagcagttagaaaacttactcagttatgaggcatataatgccggtatcgaagaataa

SEQ ID NO: 117043 - protein, 128 aa, Colwellia psychrerythraea 34H
MSTVEKDYQFAPSHEWVKNNNDGTVTIGISNHAQELLGDVVFIELPEQGDEITAGEQFTLVESVKAASDVYAPVSGEIIEINEALEDSPESINQSAFVEGWIVKVKLSEPEQLENLLSYEAYNAGIEE

SEQ ID NO: 117044 - DNA, 381 bp, Thermobifida fusca YX
  CDS (1)..(381): transl_table=11
ttgagcgttcccgcggagctgggttacaccaaggagcacgagtgggtggcgatcaacgaagggatcgctaccgtcggcatcacagccttcgctgccgaagcgctgggagacattgtctacgtcgaaccgccggaagtcggttcgaccgtcaccgccggtgaaagctgcggtgagatcgaatctcacaagtcggtcagcgagctctattctccggttgacggtgaggttgtcgatgtcaaccaggctgcggtggacgaccccgagttgatcggctccgacccttacggccggggctggttgttcaaggtggagctcgctgaggagcccgccgatttgctcaccccggagcagtacacacagctcaccgaaggtgaaggttag

SEQ ID NO: 117045 - protein, 126 aa, Thermobifida fusca YX
MSVPAELGYTKEHEWVAINEGIATVGITAFAAEALGDIVYVEPPEVGSTVTAGESCGEIESHKSVSELYSPVDGEVVDVNQAAVDDPELIGSDPYGRGWLFKVELAEEPADLLTPEQYTQLTEGEG

SEQ ID NO: 117046 - DNA, 381 bp, Ralstonia eutropha JMP134
  CDS (1)..(381): transl_table=11
atgaatttccccgctgacctgaaatacaccgagtcgcacgagtgggtgcgtgtcgaagccgacggcaccctgacgattggcatcaccgaccacgcgcaggacgcgctcggcgacatcgtcttcctggaactgcccgaagtcggcaagtcggtcggcgccggcgacgcgctggccgtggtggagtcggtgaaggccgcttccgacatctacgccccggtggccggcgaagtgatcgccgtgaacgaggccgccacggccgcaccggaaagcgtgaacgccgacgcgttcgacgcgtggctattcaagctcaagccggccaacgccgacgacgtgaatggcctgatgtcggctgacgcctacaaggccagcgtcggcgcctga

SEQ ID NO: 117047 - protein, 126 aa, Ralstonia eutropha JMP134
MNFPADLKYTESHEWVRVEADGTLTIGITDHAQDALGDIVFLELPEVGKSVGAGDALAVVESVKAASDIYAPVAGEVIAVNEAATAAPESVNADAFDAWLFKLKPANADDVNGLMSADAYKASVGA

SEQ ID NO: 117048 - DNA, 390 bp, Thiobacillus denitrificans ATCC 25259
  CDS (1)..(390): transl_table=11
atgtccatccccgcagacctcaaatacacgcagagccacgaatgggtacgcgccgaagccgacggcagcgtcacggtaggcatcacccaccacgcccaggacctcctcggcgacatggtgttcatcgagaacccggccgtcggccgcacgctcgccaagggcgaagagtgcgccgtcgtcgagtcggtgaaggccgcatccgacgtctatgcgccggtcgccggcgaagtaatcgccgccaacggcgaagtcgaatccagccccgagtcggtgaaccaggacgcctacaccgcgtggctgttcaagatcaagccggccaaccccgccgacgtcgacgcactgctcgacgccgcggcgtaccagaaggtggtcgagtcggaagcacattga

SEQ ID NO: 117049 - protein, 129 aa, Thiobacillus denitrificans ATCC 25259
MSIPADLKYTQSHEWVRAEADGSVTVGITHHAQDLLGDMVFIENPAVGRTLAKGEECAVVESVKAASDVYAPVAGEVIAANGEVESSPESVNQDAYTAWLFKIKPANPADVDALLDAAAYQKVVESEAH

SEQ ID NO: 117050 - DNA, 393 bp, Anabaena variabilis ATCC 29413
  CDS (1)..(393): transl_table=11
atgtcgtcgtttgaataccctcaagatttaagatatttggatactcatgaatatgtgaggttagatggcgaaatcgctactatcggtattacagaatttgctgtagatcaattgggtgatgtggtttttctagaactgccagatattggcgatttactgactaaaggagacactttcggcacaattgaatcagtcaaagccgtcgaagacttgaacgcaccaatcacaggaacagttgtagaacgcaacgaaattttgattgaatctcccgacgcagttgcagatgatccctacggtgaaggatggttcttgaaagtacgtgtgaatgaccctgacgaagtaaatgatgctttgacggcagatgaatatcgtgctgaggtagaaggggaatag

SEQ ID NO: 117051 - protein, 130 aa, Anabaena variabilis ATCC 29413
MSSFEYPQDLRYLDTHEYVRLDGEIATIGITEFAVDQLGDVVFLELPDIGDLLTKGDTFGTIESVKAVEDLNAPITGTVVERNEILIESPDAVADDPYGEGWFLKVRVNDPDEVNDALTADEYRAEVEGE

SEQ ID NO: 117052 - DNA, 384 bp, Pseudomonas fluorescens PfO-1
  CDS (1)..(384): transl_table=11
atgagcgagttgcgttttactgaagatcacgaatggctgcgcgccgaagccgatggttctgtcaccgttggcatcaccgctttcgcgcagaacgccctgggcgacgtggtgttcgtgcaactgcctgaattgcaggcttacgagaaaggcgccgaagccgccaccgtggaatcggtaaaagccgccagcggcgtttacatgccactggacggtgaagtcctggccaccaacccggccctggaagacagccctgaactggtgaacgaagatccgctgggcgaaggctggttcttccgcttcaagccagccgacgcgaccgccgtcgccaagctgctggatcaggacgcctacgaccgcctgatcaaagcccaagccgaagcctga

SEQ ID NO: 117053 - protein, 127 aa, Pseudomonas fluorescens PfO-1
MSELRFTEDHEWLRAEADGSVTVGITAFAQNALGDVVFVQLPELQAYEKGAEAATVESVKAASGVYMPLDGEVLATNPALEDSPELVNEDPLGEGWFFRFKPADATAVAKLLDQDAYDRLIKAQAEA

SEQ ID NO: 117054 - DNA, 357 bp, Rhodobacter sphaeroides 2.4.1
  CDS (1)..(357): transl_table=11
atgaaatacaccaaggagcatgaatggctgcgggtcgagggcgacctcgtcgtggtcggcatcaccgaacatgcggcgacgcagctcggcgatgtcgtgttcatcgagctgcccgagatcgagaccgtggtcgcggagggcgacgaggtggcggtgatcgagagcgtgaaggccgcctcggacatttcggcgccgatggacggcgagatcgtcgcggtgaacgagaagctcgtcgacaagcccggcctcgtcaacgacgacccgatggccgcctggttcttcaagatgaaggtcgacgacctctcggtgctcgacgacttcatggacgaggacgaatatcaggatctgatcggctga

SEQ ID NO: 117055 - protein, 118 aa, Rhodobacter sphaeroides 2.4.1
MKYTKEHEWLRVEGDLVVVGITEHAATQLGDVVFIELPEIETVVAEGDEVAVIESVKAASDISAPMDGEIVAVNEKLVDKPGLVNDDPMAAWFFKMKVDDLSVLDDFMDEDEYQDLIG

SEQ ID NO: 117056 - DNA, 393 bp, Carboxydothermus hydrogenoformans Z-2901
  CDS (1)..(393): transl_table=11
atgagtgtggtacctaaggatttaaagtacagccgtgagcatgagtggattaaggtagatggcaatatcggtattatcggtattaccgattttgcccaaaaatctttgggagatatcgtatttattgagcttcccggtgtgggggatgaaatttccgccggagatagctttggagttgtagagtcggtaaaagctgcttccgacttatatgctcccgtttccggaaaagttgtggaagttaatgaagaagttattgaatcgccgcaactggtaaatgaagatccctatggtaaggggtggatgattaaagtggaaattagtaacgaagcggagttagacgaactgctctcccccgaagattacgaaaaacttctggaagaggaaggagagtaa

SEQ ID NO: 117057 - protein, 130 aa, Carboxydothermus hydrogenoformans Z-2901
MSVVPKDLKYSREHEWIKVDGNIGIIGITDFAQKSLGDIVFIELPGVGDEISAGDSFGVVESVKAASDLYAPVSGKVVEVNEEVIESPQLVNEDPYGKGWMIKVEISNEAELDELLSPEDYEKLLEEEGE

SEQ ID NO: 117058 - DNA, 468 bp, Burkholderia sp. 383
  CDS (1)..(468): transl_table=11
atggcgcccggcgcaacaccacacccggcgcgccccggcggcgcgtcagcaaaacgaataaacccttttaatcaggagcttccgatgagcaacgtcccggccgatctgaaatacaccgacgaacacgagtggatccgcaccgaagcagacggcacgctgacggtcggcatcaccgatcacgcacagagcacgcttggcgacatcgtgttcctcgagttgccgcaagccggcaagcaggtgaaggcaggcgacgccatcggcgtcgtcgagtcggtgaaggctgcatccgacatctactcgccggtatcgggcgagatcatcgcgttcaaccaggacgctgcggacacgccggaagatgtcaatggcgatccgtacgaagcctggctgttcaagatcaagctcgccgccggcgccaataccgacaacctgctcagcgccgacgcttacaagaagctgatcggcgactaa

SEQ ID NO: 117059 - protein, 155 aa, Burkholderia sp. 383
MAPGATPHPARPGGASAKRINPFNQELPMSNVPADLKYTDEHEWIRTEADGTLTVGITDHAQSTLGDIVFLELPQAGKQVKAGDAIGVVESVKAASDIYSPVSGEIIAFNQDAADTPEDVNGDPYEAWLFKIKLAAGANTDNLLSADAYKKLIGD

SEQ ID NO: 117060 - DNA, 399 bp, Geobacter metallireducens GS-15
  CDS (1)..(399): transl_table=11
atggattttcctgatgaactgaagtacagcaaggaacatgtatgggtcagggtcgagggtgaccgtgccgtgatcggcattaccgattatgcccaggagagcctcggcaccatcagtgccgtggagctcccggccgtcggcgacgagcttgagcaggacgactccttcggctcggtggaggcccgcaagtgcctggcggagctctatgcgccggtcagcggcaccgtggccgaggttaatgacgagctggagtcggccccggaaatcctgaacgacgacccctacgatggcggctggatcgcggtggtggaacttgccgaccccgaggagttgaaatcccttctgtcggcagaggactatgccgaatccgtaagccaggaagacgaagaagacgaatag

SEQ ID NO: 117061 - protein, 132 aa, Geobacter metallireducens GS-15
MDFPDELKYSKEHVWVRVEGDRAVIGITDYAQESLGTISAVELPAVGDELEQDDSFGSVEARKCLAELYAPVSGTVAEVNDELESAPEILNDDPYDGGWIAVVELADPEELKSLLSAEDYAESVSQEDEEDE

SEQ ID NO: 117062 - DNA, 384 bp, Desulfovibrio desulfuricans G20
  CDS (1)..(384): transl_table=11
atgaatattcccgcagaactgaagttctcgaaaagtcatgaatgggtccgccttgaaggcgatgaggcagtgatcggcataaccgagtttgctcaggaacagctgggcgatcttactttcattgaactgcccgccgcaggcgataccctgacagcaggcgaagaaatggggtccgtcgagtccgtcaaagccgcaagtgaactgtacgcacctgtctccggcgaagtgacagaggtgaacctgcaccttgaagatgctcccgaagccgtaaacgaatcgccctacgacaaaggctggatgctgaaggtcaaagtgtctgccgtggctggcagtctgctttccgcagaagaatacgcagccctcatcgaaagcgaagcgcactag

SEQ ID NO: 117063 - protein, 127 aa, Desulfovibrio desulfuricans G20
MNIPAELKFSKSHEWVRLEGDEAVIGITEFAQEQLGDLTFIELPAAGDTLTAGEEMGSVESVKAASELYAPVSGEVTEVNLHLEDAPEAVNESPYDKGWMLKVKVSAVAGSLLSAEEYAALIESEAH

SEQ ID NO: 117064 - DNA, 381 bp, Rhodospirillum rubrum ATCC 11170
  CDS (1)..(381): transl_table=11
atgagcaaactctatttcaccgaagatcacgaatgggtcagcgtcgatgacgatggcatcggcaccatcggcatcaccgattacgcccagaagcagcttggcgacgtggttttcgtcgaactgcccgaaatcggccgcgagatcgagcgcggcggcgacgccgccgtcgtcgaatcggtcaaggcggccagcgaggtctattcgccggtcagcggcgaggtggtcgaagccaatgacagcctgcccgaggcgccgggacaggtgaacaccgacgccctgggcgacggctggttcttcaaggtgcggctgagcgagccggccgagcttgacgagctgatggatcaagaagcctacgacgccttcgtcggcgagctcgattaa

SEQ ID NO: 117065 - protein, 126 aa, Rhodospirillum rubrum ATCC 11170
MSKLYFTEDHEWVSVDDDGIGTIGITDYAQKQLGDVVFVELPEIGREIERGGDAAVVESVKAASEVYSPVSGEVVEANDSLPEAPGQVNTDALGDGWFFKVRLSEPAELDELMDQEAYDAFVGELD

SEQ ID NO: 117066 - DNA, 417 bp, Moorella thermoacetica ATCC 39073
  CDS (1)..(417): transl_table=11
gtgcaaattgccacctacaactttcccgacgagctctattacgacgacaagcacagctgggccagaatagaaggtgacgttgccaccgtcgggttgaccgacttctcccagcaactggctggtgccttcgtccatatcaacctgcccaaggcaggcaaaaccgtggcccggggtaaaccgctggcagccgtggaatccggcaagtgggtgggccgggcctatgccccggtgagcggggaagtcattgccgtcaacgaaaatctcaagaagcagaccggcctgatcaacagcgatccctacggggaaggatggattgccaaaatcaaaatgagcaacccggcagaggtggccggcctcttacagggagaggccctcaaggcctttatcgagcaggaaatagccaaacaccagaaataa

SEQ ID NO: 117067 - protein, 138 aa, Moorella thermoacetica ATCC 39073
MQIATYNFPDELYYDDKHSWARIEGDVATVGLTDFSQQLAGAFVHINLPKAGKTVARGKPLAAVESGKWVGRAYAPVSGEVIAVNENLKKQTGLINSDPYGEGWIAKIKMSNPAEVAGLLQGEALKAFIEQEIAKHQK

SEQ ID NO: 117068 - DNA, 393 bp, Moorella thermoacetica ATCC 39073
  CDS (1)..(393): transl_table=11
atgaatttcccggctcatctgcattatagtaaagaccatgagtgggtagaagtcgatggtaaccgtgcccgtatcggtattaccgactatgcccaggagtccctgggggacatagtttttgtggaactgccccaggtaggggatgaactggcgacgggcgacagctttggggtcgtcgagtcggtaaagtcggcttccgacgtctatgcgccggtgggcggcaaggtggtggctgttaacgaagccctcctggacgccccccaggacatcaacgccgacccctacggcaagggctggatgattgaactggaattgagcgatccgagtgaagtagaaagcctcatggatgccagtgcttacctggaactggtaaaggaggagaagggggagtaa

SEQ ID NO: 117069 - protein, 130 aa, Moorella thermoacetica ATCC 39073
MNFPAHLHYSKDHEWVEVDGNRARIGITDYAQESLGDIVFVELPQVGDELATGDSFGVVESVKSASDVYAPVGGKVVAVNEALLDAPQDINADPYGKGWMIELELSDPSEVESLMDASAYLELVKEEKGE

SEQ ID NO: 117070 - DNA, 381 bp, Burkholderia thailandensis E264
  CDS (1)..(381): transl_table=11
atgagcaacgtcccggccgaactgaaatacaccgacgaacacgagtggattcgcaccgaagccgacggcacgctgacgatcggcatcaccgaccacgcgcaaaccacgctcggcgacatcgtcttcctcgagttgccgaaagtcggctcgcaggtgaaggcgggcgacgccgtcggcgtcgtcgaatcggtgaaagccgcgtcggacatctactcgcccgtgaccggcgaagtgatcgcgatcaacacggatgtggccgacgcgccggaagaggtgaacggcgacgcgtacggcgcatggctcttcaagatcaagctggcggccggcgcatcgaccgacagcctgctcgacgccgccgcctacgagaagctggtcggctga

SEQ ID NO: 117071 - protein, 126 aa, Burkholderia thailandensis E264
MSNVPAELKYTDEHEWIRTEADGTLTIGITDHAQTTLGDIVFLELPKVGSQVKAGDAVGVVESVKAASDIYSPVTGEVIAINTDVADAPEEVNGDAYGAWLFKIKLAAGASTDSLLDAAAYEKLVG

SEQ ID NO: 117072 - DNA, 381 bp, Frankia sp. CcI3
  CDS (1)..(381): transl_table=11
gtgtacccggacgacctgaagtacacccgtgagcacgaatggatccggctcgacgggagcacggcacgggtcggcatcacgtcctacgcgcaggaggcgctgggcgacatcgtctttgtctctctgcccgacctcggctccgcggtccaggccggtgagtccttcggagaggtcgagtcgaccaagagcgtgtccgagatctacgcgccgatcgccggagaggtgacggcgcgcaacgaggcacttgccggtgcgccggaactgatcaactctgatccctatggggaaggctggctcgtcgagctcacggtcgcggatgtcgtcgacgtcaccggcctactgaccgccgaagagtacgcggagcacgtgaaggaaaactga

SEQ ID NO: 117073 - protein, 126 aa, Frankia sp. CcI3
MYPDDLKYTREHEWIRLDGSTARVGITSYAQEALGDIVFVSLPDLGSAVQAGESFGEVESTKSVSEIYAPIAGEVTARNEALAGAPELINSDPYGEGWLVELTVADVVDVTGLLTAEEYAEHVKEN

SEQ ID NO: 117074 - DNA, 372 bp, Novosphingobium aromaticivorans DSM 12444
  CDS (1)..(372): transl_table=11
atgacccgctatttcaccaaggaccacgaatggatcgcggtcgagggcagcgaagcgaccgtcggcatcaccgactacgcacagagccagctcggtgacatcaccttcgtcgaactgcccggcgagggcagcgaagtcggcaagggcgacagcgcatcggtggtggacagcgtcaaggccgcgtcggacgtgtacgccccggtttcgggcaaggtcactctcgccaatgccgcgctcgaagagcagcccgaactggtcaacaccgaccctgaaggcgagggctggctgtggaagatgaccctggccgatgccgccgaactcgacggcctgatggacgaggctgcctatcaggcctacgtcgcggagctttga

SEQ ID NO: 117075 - protein, 123 aa, Novosphingobium aromaticivorans DSM 12444
MTRYFTKDHEWIAVEGSEATVGITDYAQSQLGDITFVELPGEGSEVGKGDSASVVDSVKAASDVYAPVSGKVTLANAALEEQPELVNTDPEGEGWLWKMTLADAAELDGLMDEAAYQAYVAEL

SEQ ID NO: 117076 - DNA, 393 bp, Saccharophagus degradans 2-40
  CDS (1)..(393): transl_table=11
atgagcgaattgcgaagcgaattgaaatacctagagagtcacgagtgggctcgagttgaagaagacggtacggtaactattggtattaccgaccacgctcaagaagccttgggtgatgtagtgtttgtagaagtgccagaggtgggcagccaagtatctattggcgaagaagccggtgtggttgaatctgttaaagctgcttccgatatttactcgcccgtttctggtgaagtaattgccgttaacgaagccttggaagatgcccccgaaactgtaaacagctcgccttacgacgatggttggttctttaaagttaagccagatgatttagatgagctagaaaaagcgctttctatggaagattacaaagctgctattgaaagcgacgactaa

SEQ ID NO: 117077 - protein, 130 aa, Saccharophagus degradans 2-40
MSELRSELKYLESHEWARVEEDGTVTIGITDHAQEALGDVVFVEVPEVGSQVSIGEEAGVVESVKAASDIYSPVSGEVIAVNEALEDAPETVNSSPYDDGWFFKVKPDDLDELEKALSMEDYKAAIESDD

SEQ ID NO: 117078 - DNA, 381 bp, Acidobacteria bacterium Ellin345
  CDS (1)..(381): transl_table=11
atggcctatccagccgacttcaaatacaccaaagaacacgaatggatctctgccgacggtaaaatcggcatcaccgaccacgcgcaatcctctctcggcgatatcgtcttcgtcgaactccccaaagtcggcgccaccatcaccaagggccagagcttcggctccgtcgaatccgtgaaggccgtcagcgacctcttcgccccggtcagcggtaaagtcaccgccgtcaacgaagaactcgccaccacgcccgaaaaagtaaacaccgacgcccacgccgcctggatggtcaaagtcgagctcaccaacccgtccgaactcaacgacctcctaagcgccgccgactacgaaaagttcgccgccgaagaagccggccactaa

SEQ ID NO: 117079 - protein, 126 aa, Acidobacteria bacterium Ellin345
MAYPADFKYTKEHEWISADGKIGITDHAQSSLGDIVFVELPKVGATITKGQSFGSVESVKAVSDLFAPVSGKVTAVNEELATTPEKVNTDAHAAWMVKVELTNPSELNDLLSAADYEKFAAEEAGH

SEQ ID NO: 117080 - DNA, 360 bp, Silicibacter sp. TM1040
  CDS (1)..(360): transl_table=11
atgaaatacaccgaagaacacgaatggctgcaggtcgaaggcgacgttgtgactgttggcatcacctcccacgcggccgagcagctgggcgatgtggtctttgttgagcttcccgaagtgggcagcgaagtctccaaggacgacgagatcgtggtcatcgaatccgttaaggcagcgtcggacattctcgcgccgctcgacggtgaagtggtcgaagtcaacgaggccatcgtggacgcgccgtccaaggtcaatgaggacccggaaggcgaagcttggttcttcaaactcaaagtctccgacatgtcgccgatggacgactacatggacgaggctggctacaaagacttcattggctga

SEQ ID NO: 117081 - protein, 119 aa, Silicibacter sp. TM1040
MKYTEEHEWLQVEGDVVTVGITSHAAEQLGDVVFVELPEVGSEVSKDDEIVVIESVKAASDILAPLDGEVVEVNEAIVDAPSKVNEDPEGEAWFFKLKVSDMSPMDDYMDEAGYKDFIG

SEQ ID NO: 117082 - DNA, 390 bp, Myxococcus xanthus DK 1622
  CDS (1)..(390): transl_table=11
atggccgacaacatccccggcgacctgaagtacacccgtgagcacgagtgggcccgcgtccagggcacctcggtggtggtgggcgtcacgcagcacgcgcaggagtccctgggcgacgtggtctacgtggagctgcccaaggtgggctccacggtgacggagggcaagcagttcggcgtcatcgagtccaccaaggcggtgtcggagctgtactcgccgctgacgggcaaggtggtgaaggtgaacgacgggctgtcggacaacccctccaccgtgaacaccgacccctacggtgcgggctggattgtggaaatcgagccctcggaccccaagcaggtggacggactcatggacgccgccgcgtacaccgccctgctccagaacagctga

SEQ ID NO: 117083 - protein, 129 aa, Myxococcus xanthus DK 1622
MADNIPGDLKYTREHEWARVQGTSVVVGVTQHAQESLGDVVYVELPKVGSTVTEGKQFGVIESTKAVSELYSPLTGKVVKVNDGLSDNPSTVNTDPYGAGWIVEIEPSDPKQVDGLMDAAAYTALLQNS

SEQ ID NO: 117084 - DNA, 396 bp, Mycobacterium sp. MCS
  CDS (1)..(396): transl_table=11
gtgagcgagatcccagccgagctgtactacaccgacgaacacgagtgggtgctccgtacgggtgacgacacgctgcgcgtcggcatcaccgactatgcgcaggcggcgctcggtgacgtcgtgttcgtacagctgcccgacgtcggcgccgagctgacctcgggggagtcgttcggcgaggtggagtcgaccaagtcggtatccgatctgtatgcccccgtcagcgcgaaagtgcttgccgtcaacggaaatctggaggccagccccgatctggtcaactccgatccgtacggcgagggctggctggtcgacctgcagctcgacgccgacgacatggaggcggcgctgggcggtctgctggacgcggacggctaccgtggcgtggtgaccgagtga

SEQ ID NO: 117085 - protein, 131 aa, Mycobacterium sp. MCS
MSEIPAELYYTDEHEWVLRTGDDTLRVGITDYAQAALGDVVFVQLPDVGAELTSGESFGEVESTKSVSDLYAPVSAKVLAVNGNLEASPDLVNSDPYGEGWLVDLQLDADDMEAALGGLLDADGYRGVVTE

SEQ ID NO: 117086 - DNA, 381 bp, Rubrobacter xylanophilus DSM 9941
  CDS (1)..(381): transl_table=11
gtggctgagataccgcaggatctcgtctacaccagaacccatgagtgggcccgcatagagggcgacgccgccaccgtcggtataaccgaccacgcccaggaggagctcggcgacgtggtcttcgtggagctcccggaggtgggaagctccgtgcaggccggagagcccttcggcaccatagagtccgtgaaggccgtctcagacctctactccccagtgagcggagaggtgaccgaggtgaacacctccctcgaggagagcccggagaaggtgaacgaagacccctacggcgagggctggctcctccgcgtcaggctctccgaggagcccgacctcctctcccccgaggagtacgcccgccgcctcgaagaggaggagtag

SEQ ID NO: 117087 - protein, 126 aa, Rubrobacter xylanophilus DSM 9941
MAEIPQDLVYTRTHEWARIEGDAATVGITDHAQEELGDVVFVELPEVGSSVQAGEPFGTIESVKAVSDLYSPVSGEVTEVNTSLEESPEKVNEDPYGEGWLLRVRLSEEPDLLSPEEYARRLEEEE

SEQ ID NO: 117088 - DNA, 369 bp, Mesorhizobium sp. BNC1
  CDS (1)..(369): transl_table=11
atgagcaagacctatttcacagaagaccacgagtggatccgcgtcgaaggagagacggcgaccgtgggcatcaccgattatgcccaggagcaactgggcgatctcgtcttcgtcgagctgcccgaaacgggcaagacgctcaagaagggagacgcggcggtggtggttgaatccgtgaaggccgcctccgatgtctatgctccagtggacggcgaagtgaccgaagtgaacgaagcgctgtccagcgaacccgctctcgtcaacggcgccccgatggatggcggctggctgtggaagatgaagctttccgacaaaagccagctcgaaggccttatggacgaggcaggctacaaggcgacgatcgcctag

SEQ ID NO: 117089 - protein, 122 aa, Mesorhizobium sp. BNC1
MSKTYFTEDHEWIRVEGETATVGITDYAQEQLGDLVFVELPETGKTLKKGDAAVVVESVKAASDVYAPVDGEVTEVNEALSSEPALVNGAPMDGGWLWKMKLSDKSQLEGLMDEAGYKATIA

SEQ ID NO: 117090 - DNA, 381 bp, Cytophaga hutchinsonii ATCC 33406
  CDS (1)..(381): transl_table=11
atgaactttccttctgaattaaaatacagcaaagatcacgaatgggttcgtgtagaaggccagacagcttatgttggcattactgattttgcgcaaaaagaattaggtgatattgtttacctggatgtaacatctgttggacaaacgattgataaagaagcaatcttcggaacaattgaagcagtaaaaacagtttcagatttatttatgccggttagcggggaagtattagaattcaatgctgaattggaatctgcgcctgaattagttaattcagatccatatggtaaaggctggatcgtgaaggttacgttagcgaatgcttcagacctggatgctttattagatgcagccgcctatacaacactggttggtgcttaa

SEQ ID NO: 117091 - protein, 126 aa, Cytophaga hutchinsonii ATCC 33406
MNFPSELKYSKDHEWVRVEGQTAYVGITDFAQKELGDIVYLDVTSVGQTIDKEAIFGTIEAVKTVSDLFMPVSGEVLEFNAELESAPELVNSDPYGKGWIVKVTLANASDLDALLDAAAYTTLVGA

SEQ ID NO: 117092 - DNA, 396 bp, Trichodesmium erythraeum IMS101
  CDS (1)..(396): transl_table=11
atgacactagaatttccagatgaccttaaatattctgactcccatgaatatgtgaggatggatggggaaattgccactgttggtattagtgcctatgctatcgaccagttgggggatattgtatttatcgagcttccagaagtgggagacagtatagaaaaagaagaaccatttggcactattgaatctgtgaaagcagtggaagatcttaaagctcctgtcactggtacagtaatagagcgtaatgaagatatattagatgagcatgagaaattatcagaagacccatacatagaaggttggttattgaaagtgcgtgttaaagaccctgatgaattaaatggagatgatatttactctgctgatgattatcgtaaacttgtagaaggagagtaa

SEQ ID NO: 117093 - protein, 131 aa, Trichodesmium erythraeum IMS101
MTLEFPDDLKYSDSHEYVRMDGEIATVGISAYAIDQLGDIVFIELPEVGDSIEKEEPFGTIESVKAVEDLKAPVTGTVIERNEDILDEHEKLSEDPYIEGWLLKVRVKDPDELNGDDIYSADDYRKLVEGE

SEQ ID NO: 117094 - DNA, 393 bp, Alkalilimnicola ehrlichei MLHE-1
  CDS (1)..(393): transl_table=11
atgacccaggtaccagacaacctcaagtacaaccgcacccacgagtggacccgcttggaggacgacggcacgctcaccatcggcatcaccgatcacgcccagagcgaactgggcgatttggtgttcgtggagacgcccacggtggggcgccactacgacgccgaggaggcctgcgccgtggtggaatcggtcaaggccgcctccgacatctacgcgccggtgggcggcgaggtgatcgaggccaattcagagctgcaggacagcccggagctggtcaacaccgacccctacggcgagggttggatcatgcgcatccgcccggacgacagcgacgacctggagcaactgctggacccggaggactaccaggacctggtggccgacgaggagtaa

SEQ ID NO: 117095 - protein, 130 aa, Alkalilimnicola ehrlichei MLHE-1
MTQVPDNLKYNRTHEWTRLEDDGTLTIGITDHAQSELGDLVFVETPTVGRHYDAEEACAVVESVKAASDIYAPVGGEVIEANSELQDSPELVNTDPYGEGWIMRIRPDDSDDLEQLLDPEDYQDLVADEE

SEQ ID NO: 117096 - DNA, 372 bp, Hyphomonas neptunium ATCC 15444
  CDS (1)..(372): transl_table=11
atgaccacctactacaccaaagatcatgaatgggttcgcgtcgaaggcgacaccggcactgtgggcatcacctcctacgccgccggacagctcggcgatgttgtctatgttgagcttcctgaagccggcgcgagccttgccaagggcgacggctttgccgttgtcgaaagcgtgaaagctgcttcggacgtgtatgcgccaatttccggcgccgttctggaatccaataccggtcttgccgacgcgcctgaaaaggtcagcgaagcggccgagagcgatgcctggttcgtccgcgtcaagatttcggacactgccgagcttgaaggcctgatggatctggccgcctacactgaatattgcgaagggctctga

SEQ ID NO: 117097 - protein, 123 aa, Hyphomonas neptunium ATCC 15444
MTTYYTKDHEWVRVEGDTGTVGITSYAAGQLGDVVYVELPEAGASLAKGDGFAVVESVKAASDVYAPISGAVLESNTGLADAPEKVSEAAESDAWFVRVKISDTAELEGLMDLAAYTEYCEGL

SEQ ID NO: 117098 - DNA, 384 bp, Solibacter usitatus Ellin6076
  CDS (1)..(384): transl_table=11
atgtatccagaaaatttccggtatacgaaggaacacgagtgggtcctcgcggaaggcgactcaggcacagtcgggatcaccgaccacgcccagcaggaactcggcgatatcgtctatgtggacctgcccaaggtcggttcgcacgtggaggcaggtaagtcgctcgggtcggtggagagcgtgaaggcggtttccgacatctactctccggtcagcggagaggtcgtagagatcaaccagaccctggccgacgcccccgagaccctgaacacagatccgcacggcgcggcctggctggtgaagatcaagctgagcggcgccgccgaagttcagaatctgatgtcggccgccgactatctaagttatataggagctcaaaagtag

SEQ ID NO: 117099 - protein, 127 aa, Solibacter usitatus Ellin6076
MYPENFRYTKEHEWVLAEGDSGTVGITDHAQQELGDIVYVDLPKVGSHVEAGKSLGSVESVKAVSDIYSPVSGEVVEINQTLADAPETLNTDPHGAAWLVKIKLSGAAEVQNLMSAADYLSYIGAQK

SEQ ID NO: 117100 - DNA, 399 bp, Mycobacterium avium 104
  CDS (1)..(399): transl_table=11
gtgagcgacatcccgcccgacctgcactacaccgccgaacacgaatgggttcgccgaagcggtgatgacaccgtgcgggtgggcatcaccgacttcgcccagtcggcgttgggtgacgtcgttttcgttcagctgcccgaggtgggcgcgcagctgaccgccggggaatccttcggcgaggtcgaatccacgaaatcggtgtcggacctctacgccccggtgtcgggcacggtgacggcggtcaacaccgacctggaaggcagcccgcagctggtcaactccgacccgtacggggccggctggttgctggatgtccaggtgtccgacgccgccgccttggagtcggccatcaccgcactgctcgacgccgaggcctaccgcggaacgctgaccgaatga

SEQ ID NO: 117101 - protein, 132 aa, Mycobacterium avium 104
MSDIPPDLHYTAEHEWVRRSGDDTVRVGITDFAQSALGDVVFVQLPEVGAQLTAGESFGEVESTKSVSDLYAPVSGTVTAVNTDLEGSPQLVNSDPYGAGWLLDVQVSDAAALESAITALLDAEAYRGTLTE

SEQ ID NO: 117102 - DNA, 396 bp, Mycobacterium smegmatis str. MC2 155
  CDS (1)..(396): transl_table=11
gtgagcgagatcccagccgacctgtactacacctccgagcacgagtgggtgttgcgcaccggtgacgacacggtgcgcgtcggcatcaccgactacgcgcagtccgccctcggcgacgtggtgttcgtccagctgcccgacgtcggcgccgacgtcgcctcgggcgacgcgttcggcgaggtcgaatccaccaagtcggtgtcggatctctacgcaccggtcaccgcgaaagtcgttgccgtcaacggtgatctggaaggcagccccgagctggtcaactccgatccgtacggcgagggctggctggtcgacctgcgggtcgaggcgggcaccctcgacgaggcgctcggcggtttgctggacgcggagggctaccgcgcggtcgtcaccgagtga

SEQ ID NO: 117103 - protein, 131 aa, Mycobacterium smegmatis str. MC2 155
MSEIPADLYYTSEHEWVLRTGDDTVRVGITDYAQSALGDVVFVQLPDVGADVASGDAFGEVESTKSVSDLYAPVTAKVVAVNGDLEGSPELVNSDPYGEGWLVDLRVEAGTLDEALGGLLDAEGYRAVVTE

SEQ ID NO: 117104 - DNA, 387 bp, Nocardioides sp. JS614
  CDS (1)..(387): transl_table=11
ttgtaccccgacgacttgaagtacacgaccgagcacgagtgggtccgcgagcccggggagcacgagggctcggtccggatcgggatcacccactacgcgcaggacgccctgggcgacatcgtctacgtctccctcccggagctcgggtcgaccgtcgaggccggcagcacctgcggtgagctggagtccaccaagtcggtgagcgacgtctacgcgccggtctccggcgaggtggtggcccgcaacgacgcgctggacgcgacgccggagctggtgaacaacgacccgtacggcggcggctggctcttcgaggtggtcccgagcgaccgcgccgggctggacgggctgctggacgccacggcgtaccaggcctcgctcgacgcctga

SEQ ID NO: 117105 - protein, 128 aa, Nocardioides sp. JS614
MYPDDLKYTTEHEWVREPGEHEGSVRIGITHYAQDALGDIVYVSLPELGSTVEAGSTCGELESTKSVSDVYAPVSGEVVARNDALDATPELVNNDPYGGGWLFEVVPSDRAGLDGLLDATAYQASLDA

SEQ ID NO: 117106 - DNA, 378 bp, Magnetospirillum magnetotacticum MS-1
  CDS (1)..(378): transl_table=11
atgagcagcaagcgtttcaccaaggatcatgagtggatcgaggtcgagggcgatatcggcaccgtcggcatcagcgactatgcccagcacgctttgggcgacgttgtcttcgtcgaggttcccgatgcgggccgcgatttggccaagggcgccgaggccgccgtggtggaatcggtgaaggccgcgtccgaggtctattccccggtgtcgggcatcgtgaccgctggcaatcaggccatcgtcgaccagcccggcctggtcaacgaggccgccgagagcaccgcctggttcttcaagctgaagctgaccaatccgggcgaggtcggcgacctgatggatcaggccgcctacgacgcgtatctcaagaccctggaatag

SEQ ID NO: 117107 - protein, 125 aa, Magnetospirillum magnetotacticum MS-1
MSSKRFTKDHEWIEVEGDIGTVGISDYAQHALGDVVFVEVPDAGRDLAKGAEAAVVESVKAASEVYSPVSGIVTAGNQAIVDQPGLVNEAAESTAWFFKLKLTNPGEVGDLMDQAAYDAYLKTLE

SEQ ID NO: 117108 - DNA, 390 bp, Nostoc punctiforme PCC 73102
  CDS (1)..(390): transl_table=11
atgtcttttgaatatcctcaagattttagatacctcgattctcatgaatacgttcgaatagatggcgaaattgccactattggcattactgagtttgccgtacatgaattgggtgatatcgtctttttggaactgccagaaattggcgatgctcttaccaggggagaaaactttggcacaattgaatcagtgaaagccgttgaagaactgaattcaccagtcacaggcactgttatagaacgcaatgaagccttaattaattctcctgaagaagtttcagaagacccctatggtgagggatggtttttgaaagtgcgcgtcaatgaccctggtgaaattgaggatgccttgacagcagatgagtatcgtgcacaggtggaaggcgagtaa

SEQ ID NO: 117109 - protein, 129 aa, Nostoc punctiforme PCC 73102
MSFEYPQDFRYLDSHEYVRIDGEIATIGITEFAVHELGDIVFLELPEIGDALTRGENFGTIESVKAVEELNSPVTGTVIERNEALINSPEEVSEDPYGEGWFLKVRVNDPGEIEDALTADEYRAQVEGE

SEQ ID NO: 117110 - DNA, 408 bp, Bifidobacterium longum DJO10A
  CDS (1)..(408): transl_table=11
atgagtgatgacaacgaaaacgaacagccgctgaacctcgacattcccgaccacctcgaatactccgaggagcatgcttgggtggaccgttcggtcgaccccgcaatcatcggcatcaccgaatacgccgccgaccagcttggcgaacttgtgttcgtggatttgcctgagcctggcgcccgtgtggaggccggcgacgagatcgtggagcttgaatcctccaaggccgtccagccgttgatcagccccgtggcgggtacggtcaagtatgtgaaccgtgacgtggcggacgacccgtccgtggtcaacggcgatccgtacggcgaaggctggctgctgaaggtcgagcttgacgacgatgagccggagctgctgagcgccgacgaatacgcgaaggtcgtgcggtag

SEQ ID NO: 117111 - protein, 135 aa, Bifidobacterium longum DJO10A
MSDDNENEQPLNLDIPDHLEYSEEHAWVDRSVDPAIIGITEYAADQLGELVFVDLPEPGARVEAGDEIVELESSKAVQPLISPVAGTVKYVNRDVADDPSVVNGDPYGEGWLLKVELDDDEPELLSADEYAKVVR

SEQ ID NO: 117112 - DNA, 399 bp, Crocosphaera watsonii WH 8501
  CDS (1)..(399): transl_table=11
atggatctagaatttcctgaagatttaaaatatttggatacccacgagtacatccgtttagatggagaaattgccactattggcattagttcttatgcgatcgagcaattaggggatctcgtctttttagagttacccgaagtaggggactccttagaattaggaactagctttggttctattgagtcggttaaggcagcagaagacctttatccccccgtttcaggaaccgtggttgatcgcaatgaagaaatgattgaaagccccgaggcgatcgctgatgatccctacggtgatggatggttattaaaagtccgtattgaaaacctcgatgacgaatcagaagataccatgtctgctcaagactatcgtgctttggttgaaggggaagagacttaa

SEQ ID NO: 117113 - protein, 132 aa, Crocosphaera watsonii WH 8501
MDLEFPEDLKYLDTHEYIRLDGEIATIGISSYAIEQLGDLVFLELPEVGDSLELGTSFGSIESVKAAEDLYPPVSGTVVDRNEEMIESPEAIADDPYGDGWLLKVRIENLDDESEDTMSAQDYRALVEGEET

SEQ ID NO: 117114 - DNA, 384 bp, Prosthecochloris aestuarii DSM 271
  CDS (1)..(384): transl_table=11
atgaatattcctgcagatcttctctacacgaaggaccacgagtggataaaggtgcttgatgacggcacgacagcgcttgtcggtattactgattttgctcagtcagagcttggcgatattgtgtttgtcgaaacaaaacctgttggcaccgaactcagcgagcatgatgtgttcggtacagtcgaggcagtcaaaaccgttgccgatctgttcgctccggtcgatggtgtgattgtggaggtcaatgaagcgcttgacgcagccgaagtggtcaattccagtccgtatgaggatggctggatggtgaaagtatcgctgaaggatgcttcccagttcgacgctctgatgagtgcggcagaatacagcgagatggtgggcgagtaa

SEQ ID NO: 117115 - protein, 127 aa, Prosthecochloris aestuarii DSM 271
MNIPADLLYTKDHEWIKVLDDGTTALVGITDFAQSELGDIVFVETKPVGTELSEHDVFGTVEAVKTVADLFAPVDGVIVEVNEALDAAEVVNSSPYEDGWMVKVSLKDASQFDALMSAAEYSEMVGE

SEQ ID NO: 117116 - DNA, 384 bp, Kineococcus radiotolerans SRS30216
  CDS (1)..(384): transl_table=11
atgtccaacgtccccgccgacctccgctacaccagcgagcacgaatgggtgcgcgtcgaggcggacggcaccgtccgggtcggcatcaccgaccacgcccaggacgccctcggggacgtcgtctacgtctcgctgcccgctgagggcgagaccgtcaccgccggcggcgcgtgcggcgaggtggagtccaccaagagcgtcagcgagatcaccgcgccggtctccggcacggtctccgggcacaaccccggtctggagacgcgtccggacctggtgaacaccgacccctacggcgagggctggatgttcaccatcgccccctccgacaccgccgaggtcgagggcctgctcgacgccgaggcgtacgccgcccacgccggctga

SEQ ID NO: 117117 - protein, 127 aa, Kineococcus radiotolerans SRS30216
MSNVPADLRYTSEHEWVRVEADGTVRVGITDHAQDALGDVVYVSLPAEGETVTAGGACGEVESTKSVSEITAPVSGTVSGHNPGLETRPDLVNTDPYGEGWMFTIAPSDTAEVEGLLDAEAYAAHAG

SEQ ID NO: 117118 - DNA, 396 bp, Xylella fastidiosa Dixon
  CDS (1)..(396): transl_table=11
atgagcgatatccctggcgacctcaagttcctcaaatcccacgaatgggtccggatcgaagacaacaatcgtgccatcgttggcatttccgaccatgcacaaaatctgctcggtgatctggtgtatgtcgaattacccaatattggcgatcacctggacgctggcgctaccgctgcagtcattgagtcggtcaaggcagcctcagatatctacagcccagttaccggaaaagtgattgaagtcaatactacgttaagcgacaaacctgagacgatcaatgaagatccctacggtgaaggttggattatggtcattgagatgcaagcccctgaggaaatcagtgatctactttctcccgatgattacaccgaagtgctggaaagtgacgaacactga

SEQ ID NO: 117119 - protein, 131 aa, Xylella fastidiosa Dixon
MSDIPGDLKFLKSHEWVRIEDNNRAIVGISDHAQNLLGDLVYVELPNIGDHLDAGATAAVIESVKAASDIYSPVTGKVIEVNTTLSDKPETINEDPYGEGWIMVIEMQAPEEISDLLSPDDYTEVLESDEH

SEQ ID NO: 117120 - DNA, 378 bp, Croceibacter atlanticus HTCC2559
  CDS (1)..(378): transl_table=11
atgaatatcccacaagaattaaaatatactaaagatcacgaatggattaagattgaaggtgatgtagcaactgtaggtattactgattttgctcaaggcgaattaggagatatcgtatatgttgaagtagaaactgtagatgaaactctagatagagaagaagtatttggtacggttgaagctgtgaagactgtttcagatcttttcttaccgcttactggtgagattatagagtttaatgaaacgttagaagacgagccagaattagtaaactcagacccatacggaaaaggctggatggttaaaattaaattttctgaagcttcagaagtagaagacttgttagatgctgaagcctataaagaattggttggttaa

SEQ ID NO: 117121 - protein, 125 aa, Croceibacter atlanticus HTCC2559
MNIPQELKYTKDHEWIKIEGDVATVGITDFAQGELGDIVYVEVETVDETLDREEVFGTVEAVKTVSDLFLPLTGEIIEFNETLEDEPELVNSDPYGKGWMVKIKFSEASEVEDLLDAEAYKELVG

SEQ ID NO: 117122 - DNA, 360 bp, Sulfitobacter sp. EE-36
  CDS (1)..(360): transl_table=11
atgaagtttaccgaagagcacgaatggctgcgggttgaaggcgacgagatcgttgttggcatcaccattcacgccgccgaacaactgggtgacgtggtgtttgtcgaactgcccgacgaaggcacgaccgtcagcaaggacgacgaggtcgtcgtgatcgaatccgtcaaagccgcgtctgatattctggcaccgatcgatggcgagatcatcgaggtcaacagcacgctgtccgacaaccccgcgatggtgaatgacgatccgcagggcgaggcgtggttcttcaagatgaaggcgtccgatccaagccagatggacgagttcatggacgaagccgcctatcagaagttcatcgggtaa

SEQ ID NO: 117123 - protein, 119 aa, Sulfitobacter sp. EE-36
MKFTEEHEWLRVEGDEIVVGITIHAAEQLGDVVFVELPDEGTTVSKDDEVVVIESVKAASDILAPIDGEIIEVNSTLSDNPAMVNDDPQGEAWFFKMKASDPSQMDEFMDEAAYQKFIG

SEQ ID NO: 117124 - DNA, 360 bp, Roseovarius nubinhibens ISM
  CDS (1)..(360): transl_table=11
atgaaattcacagaagaacatgaatggctgcgcgaggaagacgggcttatcgtcgtcggcatcaccgagcatgcggcagagcagcttggcgatgtggtctttgtcgagctgcccgaggaaggcaccgaagtggccaaggatgacgaggtcgtggtgatcgaatccgtcaaggcggcgtcggatatcctcgcccccatcgatggcgagatcgtcgaggtgaacagcgtgctcgccgatgagccggccaaggtcaatgacgatccgctgggcgatgcgtggttcttcaagatcaaggcgtcggacccgtcgcagatggacgacatgatggatgaagccgcctacaaggcctttatcggctga

SEQ ID NO: 117125 - protein, 119 aa, Roseovarius nubinhibens ISM
MKFTEEHEWLREEDGLIVVGITEHAAEQLGDVVFVELPEEGTEVAKDDEVVVIESVKAASDILAPIDGEIVEVNSVLADEPAKVNDDPLGDAWFFKIKASDPSQMDDMMDEAAYKAFIG

SEQ ID NO: 117126 - DNA, 360 bp, Oceanicola batsensis HTCC2597
  CDS (1)..(360): transl_table=11
atgaaattcaccgaagaacacgaatggctgcggcccgacggcgacgagatcgtggtcggcatcaccgaacacgccgccgaacagctgggcgacatcgtcttcgtcgaactgcccgaggtcggcaccgaggtctcgaaggacgacgaatgcgtcgtgatcgaatcggtcaaggcggcgtcggacatcctcgcgccgctcgacggcgagatcaccgaggtgaacgaggcgctggtcgaggatcccggcaaggtgaacgaggatcccatgggcgacgcctggttcttcaagatcaagccctcggagccgtcccagatggacgactacctctccgagaaggaataccaggacctgatctcctga

SEQ ID NO: 117127 - protein, 119 aa, Oceanicola batsensis HTCC2597
MKFTEEHEWLRPDGDEIVVGITEHAAEQLGDIVFVELPEVGTEVSKDDECVVIESVKAASDILAPLDGEITEVNEALVEDPGKVNEDPMGDAWFFKIKPSEPSQMDDYLSEKEYQDLIS

SEQ ID NO: 117128 - DNA, 372 bp, Erythrobacter sp. NAP1
  CDS (1)..(372): transl_table=11
atgccgcgctattttaccgatgaacacgaatggatcgatgtcgagggcgagagcgccacggttggcatcaccgactacgctcaggaacagctgggcgatatcgtctttgtcgaattgcccgacgtcggcacgatgctcgacaagggcggcgatgcggcagtggtcgagagcgtcaaggcggcgagtgatgtctacgctccgatatcgggcgaagtgaccgagaccaacggcgccctcgaagaagaccctgcgctcgtcaattcatcgcccgaagaggaaggctggttctttcgcatgacgatcggcgacaattccgagctcgaaggcctgatggatgaaaagggctacaaggctttcgtagacagcctgtga

SEQ ID NO: 117129 - protein, 123 aa, Erythrobacter sp. NAP1
MPRYFTDEHEWIDVEGESATVGITDYAQEQLGDIVFVELPDVGTMLDKGGDAAVVESVKAASDVYAPISGEVTETNGALEEDPALVNSSPEEEGWFFRMTIGDNSELEGLMDEKGYKAFVDSL

SEQ ID NO: 117130 - DNA, 390 bp, Pseudoalteromonas tunicata D2
  CDS (1)..(390): transl_table=11
atgagcaatatcccaagcgatttaaaatacgcatcatcacacgagtgggttcgcgctgaaggtaacggtgtttacactgttggtattacagagcacgcacaagaacttttaggtgacatggtgtttgttgagttaccagatgttgaagctgaatatgaagccggtgatgattgcgctgttgcagaatcagtaaaagcagcgtctgatatctacgcaccaattagcgggactattgttgaagtgaatgaagtacttgaaaattcaccagagactgtaaatcaagagccttatggtgatggttggttattccgcattaaagcatcagatgagtctgagcttgataacctacttgatgctgaaggttacgaaaactcaatcgacgaagaataa

SEQ ID NO: 117131 - protein, 129 aa, Pseudoalteromonas tunicata D2
MSNIPSDLKYASSHEWVRAEGNGVYTVGITEHAQELLGDMVFVELPDVEAEYEAGDDCAVAESVKAASDIYAPISGTIVEVNEVLENSPETVNQEPYGDGWLFRIKASDESELDNLLDAEGYENSIDEE

SEQ ID NO: 117132 - DNA, 399 bp, Photobacterium sp. SKA34
  CDS (1)..(399): transl_table=11
atgagttacgttcctcttgaattacaatatacccacagccacgaatggattcgttctgaaggtgatgggatttatacgattggtattacagaccatgctcaatcattacttggtgatatggtttatgttgaattacctgatattgaatcgcccacagacgtgggggaagagtgtgcgatggctgaatctgtaaaagcggcctcagatatttatgcccccttgtctggtgtcgtgatagctattaacgatgaattagattcggcgccagagctcatcaatagtgatccctatggtgacggttggttatttcagattagggtgaatgatgttaacgaactgaatgatttattgatggcggaagattacgccaccattattgttgaagatgaagaacagtaa

SEQ ID NO: 117133 - protein, 132 aa, Photobacterium sp. SKA34
MSYVPLELQYTHSHEWIRSEGDGIYTIGITDHAQSLLGDMVYVELPDIESPTDVGEECAMAESVKAASDIYAPLSGVVIAINDELDSAPELINSDPYGDGWLFQIRVNDVNELNDLLMAEDYATIIVEDEEQ

SEQ ID NO: 117134 - DNA, 381 bp, Photobacterium sp. SKA34
  CDS (1)..(381): transl_table=11
atggaatcaacattaaagtttaccagtagccacgaatggatccgtaataacggtgatggaacagtgacggttggtatttctgatcatgcgcaaggtttattaggcgatgtggtatttgttgatttacctgaagttggtgatacgacagatgctggtgatgcattctctttagtggaatcagtaaaagccgcttctgacatttacgcccctatcacaggtgaagttgttgccattaatgaagatttagaagacagccctgaactggttaatgaagaaccttatgaaggcggctggattgcaaccatcaagcttagcaatactgatgaattgacaacattaattgatgctgaaacctatcttgcttcaattgaagaagactaa

SEQ ID NO: 117135 - protein, 126 aa, Photobacterium sp. SKA34
MESTLKFTSSHEWIRNNGDGTVTVGISDHAQGLLGDVVFVDLPEVGDTTDAGDAFSLVESVKAASDIYAPITGEVVAINEDLEDSPELVNEEPYEGGWIATIKLSNTDELTTLIDAETYLASIEED

SEQ ID NO: 117136 - DNA, 393 bp, Oceanospirillum sp. MED92
  CDS (1)..(393): transl_table=11
atgagtaacatcccatctgaactgaaatacgttgctagtcatgaatggattcgcgttgagggtgacggcacagttacaatcggtgtcactgatcacgcacaggatctgttgggtgatgtagtttttgttgaactgccagaagttggtgctgaagttgctatgggcgacgagtcaggtgttgttgagtctgttaaggcggcatcggatatttatgctccacttagcggtgaagttgtggaagttaacgaagaattggaagattcgcctgaactggttaattctgacccttacgctgatggctggttcttcaaactgaaactgtctgatcaggatgagctgaatgaactgctggatgcagaagcttacaatgatctgtgcgagtcagaagcttaa

SEQ ID NO: 117137 - protein, 130 aa, Oceanospirillum sp. MED92
MSNIPSELKYVASHEWIRVEGDGTVTIGVTDHAQDLLGDVVFVELPEVGAEVAMGDESGVVESVKAASDIYAPLSGEVVEVNEELEDSPELVNSDPYADGWFFKLKLSDQDELNELLDAEAYNDLCESEA

SEQ ID NO: 117138 - DNA, 390 bp, Oceanospirillum sp. MED92
  CDS (1)..(390): transl_table=11
atgagcattccatctaactacctttttgcaccaagccacgagtgggtactggacaacggtgacggcactgtaactgttggtatctctgaccacgctcaggagctgctgggtgatgttgtattcgttgaactgccagaagaaggccgtgaagttgaagccggcgaagagttctctctggttgagtctgtaaaagcagcgtctgacatctacgcgccaatctctggtgaagtcgttgcagttaacgaagagctggaagacgcgcctgagactgttaacgaatccccattcggtgacggctggatcgttaagatcaaagttgcagatgcttctgaactggaaaaactgctaaacgctgaagcgtacgcagctacgattgctgaagaagcgtga

SEQ ID NO: 117139 - protein, 129 aa, Oceanospirillum sp. MED92
MSIPSNYLFAPSHEWVLDNGDGTVTVGISDHAQELLGDVVFVELPEEGREVEAGEEFSLVESVKAASDIYAPISGEVVAVNEELEDAPETVNESPFGDGWIVKIKVADASELEKLLNAEAYAATIAEEA

SEQ ID NO: 117140 - DNA, 381 bp, Flavobacteria bacterium BBFL7
  CDS (1)..(381): transl_table=11
atgaatatcccagcagaattaaagtatactaaagatcacgagtggattcgtatagaaggtgatacagcaactgtaggtattactgactttgcacaaagcgagttaggagatatcgtgtatgtagaagttgaaaccgttgatgaaacactagatgtagaggaagtttttggaacagttgaggctgttaaaacagtgtctgatttatttttaccattaactggagaaattacagctttcaatgagaagctagaagatgagccagaactagtaaattcagatccttatggtgatggatggatgattaaaatgaccttctctgatgctgctcaagttgaagaattattaactgcagatgcttacaaagagttaataggtggctaa

SEQ ID NO: 117141 - protein, 126 aa, Flavobacteria bacterium BBFL7
MNIPAELKYTKDHEWIRIEGDTATVGITDFAQSELGDIVYVEVETVDETLDVEEVFGTVEAVKTVSDLFLPLTGEITAFNEKLEDEPELVNSDPYGDGWMIKMTFSDAAQVEELLTADAYKELIGG

SEQ ID NO: 117142 - DNA, 387 bp, gamma proteobacterium HTCC2207
  CDS (1)..(387): transl_table=11
atgagcgaattcccagcagaattaaagtacgccagcagtcatgagtggaccagattagaaagcgacggaagtgttgtggtcggaattaccgaccatgctcaggatgcgctgggcgatgtggtctacatagagctgcccgaagtgggcgcccatgttgatgccggtgctgaagttgccgtgatcgagtcggttaaggcagcctcggatatttactccccggtcacaggcgatgtaacagaaatcaacccagctcttgaagatgagccagaggcagtaaatagctctccctatggtgatggctggttattccgtgtgatgccttcagatgcagcgagcatgggtgatctaatggacgccgatgcttacgcggcctccgtagaagagtag

SEQ ID NO: 117143 - protein, 128 aa, gamma proteobacterium HTCC2207
MSEFPAELKYASSHEWTRLESDGSVVVGITDHAQDALGDVVYIELPEVGAHVDAGAEVAVIESVKAASDIYSPVTGDVTEINPALEDEPEAVNSSPYGDGWLFRVMPSDAASMGDLMDADAYAASVEE

SEQ ID NO: 117144 - DNA, 384 bp, Oceanobacter sp. RED65
  CDS (1)..(384): transl_table=11
atggcacaagtacctgcgaatctaaaatacgtttcttcgcacgagtggatccgcgatgagggcgatggcgtggttactgttggcgttactgattttgcccaagagcaactaggcgatgtagtattcgttgagcttcctgaagaaggtgtagagatcaataaagaagacgcgattgccgttgtagaatctgtaaaagccgccagcgatatctatgctccagtatcaggtgaagtcatcgcagtaaacgaaggtctagcggacgaacctgaaaaagtgaacgaagaaccttacgacggagcttggttcttcaaagtaaaactcagtgaaccgagtgaaatggatgctctactaagtgctgaacagtacgaagctgagtgccagtaa

SEQ ID NO: 117145 - protein, 127 aa, Oceanobacter sp. RED65
MAQVPANLKYVSSHEWIRDEGDGVVTVGVTDFAQEQLGDVVFVELPEEGVEINKEDAIAVVESVKAASDIYAPVSGEVIAVNEGLADEPEKVNEEPYDGAWFFKVKLSEPSEMDALLSAEQYEAECQ

SEQ ID NO: 117146 - DNA, 387 bp, Desulfitobacterium hafniense DCB-2
  CDS (1)..(387): transl_table=11
atgaatccagtagaattaaagtacagcaaatctcatgagtgggctaaggtcgaaggaaatactgtgactttggggattacggctcacgctcaggacagcttaggagatgtggtctttgtggagctgcctgataacgataccacggtggtggccggggaggcctttggaaccgttgaatccgtcaaggccgtgtcggatatgattgctccggtcagcggcaaggttatcgattataatcaagaggtgctggattctccggaacttctcaatgatgatccttatggtgagggatggctgattaaggtggaagtggatgatctgacggtattggatgaactcttatcagccgcggaatatgaggcgtttcttgcggaggagggccaataa

SEQ ID NO: 117147 - protein, 128 aa, Desulfitobacterium hafniense DCB-2
MNPVELKYSKSHEWAKVEGNTVTLGITAHAQDSLGDVVFVELPDNDTTVVAGEAFGTVESVKAVSDMIAPVSGKVIDYNQEVLDSPELLNDDPYGEGWLIKVEVDDLTVLDELLSAAEYEAFLAEEGQ

SEQ ID NO: 117148 - DNA, 390 bp, Alteromonadales bacterium TW-7
  CDS (1)..(390): transl_table=11
atgagcaatatccctactgaattaaaatacgcttcttcacacgagtgggttcgcgacgaaggtgacggtacctttacagttggtattacagaacacgcgcaagaactacttggcgacatggtgtttgttgaattaccagaagtaggcgacgaagtagacgcaggcgaagactgtgcagtagcggagtcggttaaagctgcttcagacatttacgcaccaattggtggtgaagtgattgctattaatgaagagctagaagacgcacctgaaacagtaaacaacgacgcgtacggcgacggttggttattccgtcttaaagcatctgatgtgtctgagctagacaacctattagacgctgaaggctactcgcacactatcgacgaagagtaa

SEQ ID NO: 117149 - protein, 129 aa, Alteromonadales bacterium TW-7
MSNIPTELKYASSHEWVRDEGDGTFTVGITEHAQELLGDMVFVELPEVGDEVDAGEDCAVAESVKAASDIYAPIGGEVIAINEELEDAPETVNNDAYGDGWLFRLKASDVSELDNLLDAEGYSHTIDEE

SEQ ID NO: 117150 - DNA, 450 bp, marine gamma proteobacterium HTCC2143
  CDS (1)..(450): transl_table=11
atgcgtcgagttgatcatagagagactctctatgagttttctatccttgaggatttaacaatgagtagcacgcctatcgagttaaaatatgccagcagccacgagtgggctcgattggacgatgatggcacaattactgtgggtattaccgatcacgctcaggaagcgctcggcgatgtggtgtttgttgaatgtcctgaggtcggatcgactttggccgccggagacgaagctggtgtagtggaatctgttaaggcagcgtcagatatttacgcacccctgagcggagaagttattgctgttaacgaagtgttagaagaagcgcctgaaaccgtcaatagtgatccctattttgacggctggttttacaaattgcagccaacagaccttactgagctcgataatttaatgagcgctgaagactacgacacgcaatgtgacgaagaataa

SEQ ID NO: 117151 - protein, 149 aa, marine gamma proteobacterium HTCC2143
MRRVDHRETLYEFSILEDLTMSSTPIELKYASSHEWARLDDDGTITVGITDHAQEALGDVVFVECPEVGSTLAAGDEAGVVESVKAASDIYAPLSGEVIAVNEVLEEAPETVNSDPYFDGWFYKLQPTDLTELDNLMSAEDYDTQCDEE

SEQ ID NO: 117152 - DNA, 393 bp, marine gamma proteobacterium HTCC2080
  CDS (1)..(393): transl_table=11
atgagcaataatccgttggaactaaagtatgccaaaagccatgaatgggctcgaatcgaagaagatggcacagtaactgtgggcataaccgatcatgctcaggagagtttgggtgatgtggtctatgttgaactgcccagcatgggagaccaacttgccggtggagatcaagctggattggttgagtcggttaaggctgcgtcagatattttctcccccgtgacgggtgaggttattgccctcaatgaaaacttggaggaggaacctgagttaattaacagtgatccttacaacgatggatggttttttagggtaaaagtagaggacctcagcgaactagagggcatgctggcagccgatgattacgccgaagcctgtactggtgacgactaa

SEQ ID NO: 117153 - protein, 130 aa, marine gamma proteobacterium HTCC2080
MSNNPLELKYAKSHEWARIEEDGTVTVGITDHAQESLGDVVYVELPSMGDQLAGGDQAGLVESVKAASDIFSPVTGEVIALNENLEEEPELINSDPYNDGWFFRVKVEDLSELEGMLAADDYAEACTGDD

SEQ ID NO: 117154 - DNA, 879 bp, Populus tremuloides
  CDS (111)..(578)
gacataaaaactcagatggctttagtacgaggaaagggaaactagagagagtggtgtgttttgaaagagaagcagagtttgtcttagaattcaccaccttttctattattatggcttcaagattgttatgggcttcaagggctgcttcttacctcaggatctctgtttctcatagagggtttgcttctgttataaaggacttgaagtacgctgaaagtcatgaatgggtgaaggttgctggtaatactgctaccgttggtataacggatcatgctcaagatcatttaggtgatgtagtgtatgttgaattaccagaagtgggtgctactgtaaatcagggttctggatttggtgcagttgaaagtgtcaaggctaccagtgatgtttattctcctgtttcgggaaatgtggttgaagttaatgaagaactgagcaactctcctggtttggtcaattcaagcccctatgaaaagggatggattatgaaggttgaaattaaagatgccagtgaactagagaccttgaagaactcagatgactatgctaagttctgtgaagaagaagatgcaaagcattgagtcgactgttgccaaagtagaactggaggcacctcttacaatgaatatttcctcttattgcttaaccggatgatgcctcatgaaggagctaaaagttgcacctttctatcttgagatattctttttccaacaatgtgttttctgatttttcttttctcgtgagtgacaaaattggtagaaactatccctcaatagcacaaataatcactccaggttttcgtccatgatgtggcctgttaggtagttgaaaacttttctgattaagttttgaattctttgataaaaaaaaaaaaaaaaaaaa

SEQ ID NO: 117155 - protein, 155 aa, Populus tremuloides
MASRLLWASRAASYLRISVSHRGFASVIKDLKYAESHEWVKVAGNTATVGITDHAQDHLGDVVYVELPEVGATVNQGSGFGAVESVKATSDVYSPVSGNVVEVNEELSNSPGLVNSSPYEKGWIMKVEIKDASELETLKNSDDYAKFCEEEDAKH

SEQ ID NO: 117156 - DNA, 519 bp, Aspergillus niger
  CDS (1)..(519)
atgtctttcgccgccagatccctccgccccttcgcttctcgcgtcctgtcgcagaagctccccctctcttccgtctgcagggccgcacccgccagtttcccgcggggaagtgtccggagcttctcccagagcccactttctcaattgaagaagtacaccgagtcgcacgagtggatcgagctcgccgctgacggcaagactgccaagatcggcattactgaatacgctgccaagtcccttggtgacgttgtgttcgttgagctccccgaggttgatctggaggttagcgccggtgagcccgtcggtgctgtggagtccgtcaagtccgcttcggacgtcctttctcctgtctcgggaactgttacgcagggcaatgctgtgctggacgacaatgccaagttcatcaaccagagccccgagggtgacgcctggattgcggagatcaaggtgaacgatgtcgcggagttggacggacttttggacgaggctgcttacaaggctaccattgatgaggagtaa

SEQ ID NO: 117157 - protein, 172 aa, Aspergillus niger
MSFAARSLRPFASRVLSQKLPLSSVCRAAPASFPRGSVRSFSQSPLSQLKKYTESHEWIELAADGKTAKIGITEYAAKSLGDVVFVELPEVDLEVSAGEPVGAVESVKSASDVLSPVSGTVTQGNAVLDDNAKFINQSPEGDAWIAEIKVNDVAELDGLLDEAAYKATIDEE

SEQ ID NO: 117158 - DNA, 480 bp, Chlamydomonas incerta
  CDS (1)..(480)
atggcccttcgcgcgttcggcagcctcgccctcggcaagctgggtctgcaggcccaagtcatgcagttcgctggcgcgactgctatgcgcacctacgctactgtcgagaagggctacaagtacgcgccttcgcacgagtgggccaaggttgacggcgatgtggcgaccgtcggcatttcggaccacgctcagggcgagctgggtgatgtggtgtacgtggagctgcccgatgtgggcaaggcggtgaagaagggcgagaccttcggcgtagttgagtccgtcaaggccgccagcgatgtctactcgcccatcagcggcgaggccgtggaggtcaactccgtgctggttgacaagcccggcacggtcaactcctcgcctttcaaggagggttggatcatcaaggtgaagctgtcgaacaagggcgagctgtccagcctgctggactcggatgcctatgccaaggagtgtgagaagcactaa

SEQ ID NO: 117159 - protein, 159 aa, Chlamydomonas incerta
MALRAFGSLALGKLGLQAQVMQFAGATAMRTYATVEKGYKYAPSHEWAKVDGDVATVGISDHAQGELGDVVYVELPDVGKAVKKGETFGVVESVKAASDVYSPISGEAVEVNSVLVDKPGTVNSSPFKEGWIIKVKLSNKGELSSLLDSDAYAKECEKH

SEQ ID NO: 117160 - DNA, 468 bp, Medicago truncatula
  CDS (1)..(468)
atggcttgcaggcagttatgggcttcaagagcagcatcatacctcaggatctctctctttcacagaagcttctctaacgttttgaacaatctgaagtatgctgattctcatgaatgggtgaaagttgacggaaagtctgcaaccattggcataactgatcatgcccaagatcatttgggtgatgttgtgtatgttgaattgccagaagtgggaacggcagtgacacaaggagatggttttggtgcagttgaaagtgtgaaggcaactagtgacatcaactctcctgtttcaggaaaagtgattgaagttaatgaagagctcagcaactctccagctttggtcaactcaagcccttatgaaaatggatggataattaaagttgagatgagtgacagtggcgaacttgacaaattgatggattcagaaaagtataccaagttctgtgaagaagaagattccagtcattaa

SEQ ID NO: 117161 - protein, 155 aa, Medicago truncatula
MACRQLWASRAASYLRISLFHRSFSNVLNNLKYADSHEWVKVDGKSATIGITDHAQDHLGDVVYVELPEVGTAVTQGDGFGAVESVKATSDINSPVSGKVIEVNEELSNSPALVNSSPYENGWIIKVEMSDSGELDKLMDSEKYTKFCEEEDSSH

SEQ ID NO: 117162 - DNA, 522 bp, Aspergillus oryzae
  CDS (1)..(522)
atgtctgccatcgccagatccgtccgccccttcgcctctcgcgtgctttcccagaagctccctctggccgccgcatgcagggtttcgcccgcaactgctttcccgcggggaagtgttaggaacttctcccaaagcccattcatggagctgaagaagtacaccgagtctcacgaatggattgagttggccgctgacggcaagactgccaaggtcggaattacagagtacgctgcccattccttgggcgacgttgtgttcgttgagcttcctgaggtcgacgccgaggtcagcgccggggaacccgttggagctgtagagtctgtcaagtcggcttccgacgtcaactctcctgtcagcggtaaggtgatcaacgtcaactcaattctggaggataaggccaagttcatcaacgagagccccgagggtgacgcctggatcgctgagatcgaggtcaaggacgcctcagagcttgacaacctgcttgatgccaaggcctacaaggaaacccttggtgatgagtag

SEQ ID NO: 117163 - protein, 173 aa, Aspergillus oryzae
MSAIARSVRPFASRVLSQKLPLAAACRVSPATAFPRGSVRNFSQSPFMELKKYTESHEWIELAADGKTAKVGITEYAAHSLGDVVFVELPEVDAEVSAGEPVGAVESVKSASDVNSPVSGKVINVNSILEDKAKFINESPEGDAWIAEIEVKDASELDNLLDAKAYKETLGDE

SEQ ID NO: 117164 - DNA, 489 bp, Flaveria pringlei
  CDS (1)..(489)
atggctcttagaatctgggcttcttccacagccaatgctctaaggttatcctctgcaaccagacctcatttctcccctctttcaagatgcttctcttcagttttggatgggttgaagtatgcaagttcacatgaatgggtcaagcatgaaggttctgttgctactattggtattactgaccatgctcaggaccatcttggagaggtggtgtttgtggacttgcctgataccggtggctcagtgaccaaagccaccgggttcggggcagtagaaagtgtcaaagccaccagtgacgttaactccccgatctctggagagatcgtggaggtgaacacgaagctcagcgagactcctggtttgatcaattcgagcccgtatgaagacggatggatgattaaggtgaaaccaagcaacccatcagagttggaatctttaatgggtgcaaaagagtacacaaagttctgtgaagaagaagatactgctcactag

SEQ ID NO: 117165 - protein, 162 aa, Flaveria pringlei
MALRIWASSTANALRLSSATRPHFSPLSRCFSSVLDGLKYASSHEWVKHEGSVATIGITDHAQDHLGEVVFVDLPDTGGSVTKATGFGAVESVKATSDVNSPISGEIVEVNTKLSETPGLINSSPYEDGWMIKVKPSNPSELESLMGAKEYTKFCEEEDTAH

SEQ ID NO: 117166 - DNA, 387 bp, Eubacterium acidaminophilum
  CDS (1)..(387): transl_table=11
atgagcaaaatagtacaaggactttattacacaactcaccatgactgggttaaggttgacggaaacaaggcatatgtaggtgctacagactacgcacagcacgctctaggagatatagtatacgttgagcttccagaagtgggagaagaatttggcgttgaagatgcatacggcgttatagaatcagttaaggcggcttcagatgcttacgctccactaagcggaaaaatagttgaagttaacagcgagcttgaagatgctcctgagagcataaacgaagctccatacgaaaaatggcttgtagctatagaaatgagcgacgcatcagaactagaaaaactaatggacgctagcgcttacgaagacttctgcaacaaggaggcttaa

SEQ ID NO: 117167 - protein, 128 aa, Eubacterium acidaminophilum
MSKIVQGLYYTTHHDWVKVDGNKAYVGATDYAQHALGDIVYVELPEVGEEFGVEDAYGVIESVKAASDAYAPLSGKIVEVNSELEDAPESINEAPYEKWLVAIEMSDASELEKLMDASAYEDFCNKEA

SEQ ID NO: 117168 - DNA, 372 bp, Aspergillus fumigatus
  CDS (1)..(372)
atgagtggattgagctgggcgaggatggcaagacaggccaatttctccccagccaagattggcatcacagagtacgccgccaagtcccttggtgatgtcgtgtttgtagagcttcccgacgccgaccttgaggttagcgctggtgaggccgtgggtgccgttgagtcagtcaagtcggcttcagacgtcctgtcgcccgtctctggaaaggttgtgcaggggaacagcgttctcgaggacaatgccaagttcatcaaccagagcccggagggtgacgcctggatcgccaagatcgaggtcagtgacgttgcggagttggatggtctactcgatgaggccgcctacaaggcgagcattgacgcggaccactaa

SEQ ID NO: 117169 - protein, 123 aa, Aspergillus fumigatus
MSGLSWARMARQANFSPAKIGITEYAAKSLGDVVFVELPDADLEVSAGEAVGAVESVKSASDVLSPVSGKVVQGNSVLEDNAKFINQSPEGDAWIAKIEVSDVAELDGLLDEAAYKASIDADH

SEQ ID NO: 117170 - DNA, 749 bp, Populus tremuloides
  CDS (47)..(544)
ggccagccaaagcacgcatatccaaagcaaacaaagaagagataacatggcactgaggttgtgggcttcttcaacggccaatgcactgagaatctctgttgcctcctccgctgctcacctctctccttcatactccctctcaagatgcttctctactgttgtagatgggttgaagtatgcatcttcacatgagtgggtgaagcatgaaggtccggtggccactattggcattacagatcatgctcaggatcatctgggagaagtggtgttcgtagacttgccagaaccggaaggttctgtcagccaagggaagagctttggagcagtggaaagcgtgaaagcaactagtgatatcaattctccaatctccggcgagattgttgaggttaatacaaagcttagtgaaactcctggactgataaataaaagtccatatgaagagggatggatgatcaaggtgaagccaagcgacccatcagaattacagtccctacttggtccaaaggaatacacaaaattctgcgaggaagaagaatctcattaggatttgagtactctttgcaaatgttattgtcttgaactaacctattctaagaacgtaaaaaggtttcatgtcctctgaattcttgtcaattatcacaaaaaatattttcgaacttcgtccagtattttcttgtttttcatgttgtaattttgcatgttttttttaatcgggaaccgttttttccctcaaaaaaaaaaaaaaaaaa

SEQ ID NO: 117171 - protein, 165 aa, Populus tremuloides
MALRLWASSTANALRISVASSAAHLSPSYSLSRCFSTVVDGLKYASSHEWVKHEGPVATIGITDHAQDHLGEVVFVDLPEPEGSVSQGKSFGAVESVKATSDINSPISGEIVEVNTKLSETPGLINKSPYEEGWMIKVKPSDPSELQSLLGPKEYTKFCEEEESH

SEQ ID NO: 117172 - DNA, 677 bp, Flaveria cronquistii
  CDS (50)..(538)
gcttctttttcatcatcctaacacacacaaacacacatttgcagactaaatggctcttagaatgtgggcttcttccacagccaatgctctaaggctatcctctgctactagacctcatttctcccctctttccagatgcttctcttcagttttggatggattgaagtatgcaaattcacatgagtgggtgaagcatgaaggctctgttgctactattggtatcactgaccatgctcaggaccatctcggggaggtggtgtttgtggatttaccagaaaccggtggctctgtgactaaagccaccggttttggtgcagtagaaagtgtcaaagccaccagtgacgttaactccccgatctctggagagatcgttgaggtgaactcaaagctgtccgagactcctggtttgatcaattcgagcccatatgaagatggatggatgattaaggtgaagccaagcaacccatcggagctggattctttaatgggtgcaaaagagtacacaaagttctgtgaagaagaagatgctgctcactagacatgagcatacatcatgtcttatgattttttttttcatttcatcctcgactacgactaactgaaatctcagtcgttcaataatcatattgtttgaaggttcgatcgattaatctttaaaacatggtacaagttggaat

SEQ ID NO: 117173 - protein, 162 aa, Flaveria cronquistii
MALRMWASSTANALRLSSATRPHFSPLSRCFSSVLDGLKYANSHEWVKHEGSVATIGITDHAQDHLGEVVFVDLPETGGSVTKATGFGAVESVKATSDVNSPISGEIVEVNSKLSETPGLINSSPYEDGWMIKVKPSNPSELDSLMGAKEYTKFCEEEDAAH

SEQ ID NO: 117174 - DNA, 783 bp, Populus tremuloides
  CDS (65)..(532)
agtcagtgtagtgtgttctgtaagagaagtacagtttgtttgagattcatcactttctcttattatggcttcaagattgttgtgggcttcaagggctgcttcttaccttaggatctctgtttctcatagagggtttgcttctgttgtaaaggacttgaagtatgctgaaagtcatgaatgggtaaaggttgatggtaaaactgctactgttggtataaccgatcatgctcaagatcatttaggtgatgttgtgtatgttgaattaccggaagtgggtgctactgtgagtcagggttctggatttggcgcagttgaaagtgtcaaggctaccagtgatgtctattctcctgtttctggagatgtggttgaagttaatgaagaactgaacagctctcctggtttggtcaattcaagcccctatgagaagggatggattatgaaggttgaaattaaagatgacagtgaactaaagaacttgaagaactcagatgagtacgctaagttctgtgaagaagaagatgcaaagcattgagtggactgttggcaaagtagaactggaggcagttcttacaaagggcatatttccactaatcgcttaaccagatgatgcctcatgaaggacgctgaaagttgcaagtttctatcttgagatatattttttccaacaaagtgttttctgattcccttttcctgtgtgacaaatttggtagaaacaatcattcaatagaataaataatctctccaggttttcatccaatgaaaaaaaaaaaaaaaaaaaaaaaa

SEQ ID NO: 117175 - protein, 155 aa, Populus tremuloides
MASRLLWASRAASYLRISVSHRGFASVVKDLKYAESHEWVKVDGKTATVGITDHAQDHLGDVVYVELPEVGATVSQGSGFGAVESVKATSDVYSPVSGDVVEVNEELNSSPGLVNSSPYEKGWIMKVEIKDDSELKNLKNSDEYAKFCEEEDAKH

SEQ ID NO: 117176 - DNA, 498 bp, Arabidopsis thaliana
  CDS (1)..(498)
atggcactaagaatgtgggcttcttctacagcaaacgctctcaagctttcttcttctgtttccaagtctcatctctctcctttctccttctctagatgcttctccacagttttggagggtttgaagtatgcaaattcacatgagtgggttaaacatgaaggctctgttgccaccattggcatcactgcccatgctcaggaccatttaggtgaagtggtgtttgttgaactgccagaggacaatacttcagtgagcaaagagaaaagctttggagcagtggagagtgtgaaggcaacaagtgagatcttatcaccaatctcaggtgaaatcattgaggttaacaagaagctcacagaatcacctggcttgatcaactcaagcccctatgaagatggttggatgatcaaagtgaaaccaagtagccccgcggagttggaatctttgatgggtccaaaggaatacaccaagttctgcgaggaggaagatgctgctcactag

SEQ ID NO: 117177 - protein, 165 aa, Arabidopsis thaliana
MALRMWASSTANALKLSSSVSKSHLSPFSFSRCFSTVLEGLKYANSHEWVKHEGSVATIGITAHAQDHLGEVVFVELPEDNTSVSKEKSFGAVESVKATSEILSPISGEIIEVNKKLTESPGLINSSPYEDGWMIKVKPSSPAELESLMGPKEYTKFCEEEDAAH

SEQ ID NO: 117178 - DNA, 384 bp, Pseudomonas putida
  CDS (1)..(384): transl_table=11
atgagcgagttgcgtttcactgaagatcacgaatggctgcgcgtcgaagccgatggcagcgtcaccgtgggcatcaccgcctacgcccagaatgcccttggcgacgtggttttcgtgcaactgccagagttgcagcagtatgaaaaaggcaacgaagcgtccaccgtcgaatcggtcaaggccgccagcggcgtgtacatgccactgacgggtgaagtggtcgaggtcaacggccagctcgaagacagccctgaactggtcaacgaagacccgatgggcgaaggctggttcttccgcttcatccctgccgatgcagaagccgtaaccgctctgctcgaccaggacgcctacgaccgcctgctcaaagccaacgacgacgcctga

SEQ ID NO: 117179 - protein, 127 aa, Pseudomonas putida
MSELRFTEDHEWLRVEADGSVTVGITAYAQNALGDVVFVQLPELQQYEKGNEASTVESVKAASGVYMPLTGEVVEVNGQLEDSPELVNEDPMGEGWFFRFIPADAEAVTALLDQDAYDRLLKANDDA

SEQ ID NO: 117180 - DNA, 417 bp, Sulfolobus acidocaldarius
  CDS (1)..(417): transl_table=11
atgagtgtagtaatcgacggtaaatatctaattcttaaagataggcattacaccgagaccgatgagtggatattaatcaacgggaacattgcaacagttggaataacagattacgctcagaagaaacttaaggatatagtaggaatagaactaccacaagtgggtagagaagtaactataggagaacaagttgctgtcgtggaatctgttaaggctgctgcagatatattttcccctctctccggtagtgtactagaagtaaataaggaattacagagttcccctgagacaattaataaggatccttatggtaggggatggatattcaaactaaagataaaagatgagaaagaggtatctaaattactaaatttcgaacaatacattatttcgataaaacaaagagagggaatttaa

SEQ ID NO: 117181 - protein, 138 aa, Sulfolobus acidocaldarius
MSVVIDGKYLILKDRHYTETDEWILINGNIATVGITDYAQKKLKDIVGIELPQVGREVTIGEQVAVVESVKAAADIFSPLSGSVLEVNKELQSSPETINKDPYGRGWIFKLKIKDEKEVSKLLNFEQYIISIKQREGI

SEQ ID NO: 117182 - DNA, 414 bp, Sulfolobus solfataricus
  CDS (1)..(414): transl_table=11
atgaatgaaatgaaagtaggtagatacgtagttctgacagatagattatacacagagactgacgaatgggtggtgctttctaatgataacgtggcagtaattggaataactgattacgcacaaaagaagttaagagatatagtaggaattgaattacctcaactgcagaaggaagtgaaagctggagaatctgtaggagttatagaatctgttaaagctgctgcagatattttctctccattaagtgggataatagttgaggtaaacaataaattacttgagcatccagagataataaataaggatccgtatggtgaaggctggattttcaagttaaaggcgtctaagttatctgaagaaaaagaaaaactacttagcccggaaaagtatattgaaaaaataaagggtgggtag

SEQ ID NO: 117183 - protein, 137 aa, Sulfolobus solfataricus
MNEMKVGRYVVLTDRLYTETDEWVVLSNDNVAVIGITDYAQKKLRDIVGIELPQLQKEVKAGESVGVIESVKAAADIFSPLSGIIVEVNNKLLEHPEIINKDPYGEGWIFKLKASKLSEEKEKLLSPEKYIEKIKGG

SEQ ID NO: 117184 - DNA, 378 bp, Thermoanaerobacter tengcongensis
  CDS (1)..(378): transl_table=11
atgaaagttttggaagatttgtattactcaaaggaccatgtatgggtaaaagtagaaggggacaaagcttatattggcataactgattatgcccaggactctttaggggatgcggagtacattgaacttcctgaagttggaacagagtttacagctggagatgtgcttggagttatagaatctgcaaaagcggcttctgacgtttatatacctgtagacggagaagtaattgaagtgaacaatgctgtagctgaagacccttctttggtaaatagcgatccctatggaagctggcttgttgctgtaaggttgaaagataaagctcaagttgaaaagcttatgaaggcagaagagtacaaaaaatttttggaaacgtaa

SEQ ID NO: 117185 - protein, 125 aa, Thermoanaerobacter tengcongensis
MKVLEDLYYSKDHVWVKVEGDKAYIGITDYAQDSLGDAEYIELPEVGTEFTAGDVLGVIESAKAASDVYIPVDGEVIEVNNAVAEDPSLVNSDPYGSWLVAVRLKDKAQVEKLMKAEEYKKFLET

SEQ ID NO: 117186 - DNA, 501 bp, Arabidopsis thaliana
  CDS (1)..(501)
atggcactgagaatgtgggcttcctctacagcaaatgctctcaagctctcttcttctgcctccaaatctcatctcttgccagctttctccatctccagatgcttctcctcagtgttggaaggacttaagtatgcaaattcacatgagtgggtgaaacatgaaggctcagttgctacaattggtatcactgaccatgcgcaggaccatttaggagaagttgtgtttgtggagctgcctgaagcaaacagttcagtgagcaaagaaaaaagctttggagctgttgagagtgttaaggccacaagtgagattctatctccaatctctggtgaagtcattgaggttaacacaaagctcaccgagtcacctggtttgatcaactcaagcccttatgaagatggttggatgataaaggtgaaaccgagcagccccgcggagttggaagctctgatgggtccaaaggaatacaccaagttctgcgaagaagaagacgctgctcactag

SEQ ID NO: 117187 - protein, 166 aa, Arabidopsis thaliana
MALRMWASSTANALKLSSSASKSHLLPAFSISRCFSSVLEGLKYANSHEWVKHEGSVATIGITDHAQDHLGEVVFVELPEANSSVSKEKSFGAVESVKATSEILSPISGEVIEVNTKLTESPGLINSSPYEDGWMIKVKPSSPAELEALMGPKEYTKFCEEEDAAH

SEQ ID NO: 117188 - DNA, 381 bp, Thermoanaerobacter tengcongensis
  CDS (1)..(381): transl_table=11
atggaagttttagaaggcctttattattcaaaagaccatgagtgggtaaaagtagagggagacaaggtatacataggaatcacagactatgctcagcattcactgggaaacatcgtttacgttgaacttccggaggtaggatctgaactttctgctggagatgtacttggagtagtagaatctgtaaaagctgcttcagacgtgtacactccagtagacataaaagtgttggaagtaaacaattctctggtggaagacccatcccttataaacaatgacccatatggaagctggatggtgatagcagagcttaaagacaaatctcagttagataaactaatgaaggccgatgagtacagaaaattcttagaggaggagtga

SEQ ID NO: 117189 - protein, 126 aa, Thermoanaerobacter tengcongensis
MEVLEGLYYSKDHEWVKVEGDKVYIGITDYAQHSLGNIVYVELPEVGSELSAGDVLGVVESVKAASDVYTPVDIKVLEVNNSLVEDPSLINNDPYGSWMVIAELKDKSQLDKLMKADEYRKFLEEE

SEQ ID NO: 117190 - DNA, 516 bp, Aquifex aeolicus
  CDS (1)..(516): transl_table=11
atggaagacttctacgttgaagattaccttgtaaagggagatcgctactacacaaaagagcacgagtgggtcagggttaaaaacggctttgcggaagttggtataacagattacgcccagaaacaactgggagacatagtttacgtggaccttcccgagaagggaaaggaggtggatgcgggagacaccttggctaacatagagtccgttaaaaacgtagctcccgtttacgcacccgttacgggcacagttgtggaggtaaacgaggacctcaaagacgagccggggataataaacgacgacccgtatgaggcgggctggatagctgttatagagatgaaggatcccacggaagtggaagatttgatgacagcacaggattacgcagagtacctcaaagaaattgtagaagaggaaaaggaagaagaagttgaagtaaaagaagaggaattaatagaaaccgagtccatagaagagttgtccgaagaagaactcggatacgaggagaataaatga

SEQ ID NO: 117191 - protein, 171 aa, Aquifex aeolicus
MEDFYVEDYLVKGDRYYTKEHEWVRVKNGFAEVGITDYAQKQLGDIVYVDLPEKGKEVDAGDTLANIESVKNVAPVYAPVTGTVVEVNEDLKDEPGIINDDPYEAGWIAVIEMKDPTEVEDLMTAQDYAEYLKEIVEEEKEEEVEVKEEELIETESIEELSEEELGYEENK

SEQ ID NO: 117192 - DNA, 432 bp, Aeropyrum pernix
  CDS (1)..(432): transl_table=11
gtgggcgggcaagttattgaggttgaggtggctggcgtcaggttcctcctacgcaaggacctcaggtacacggagagcgacgagtgggccaggctggaggacggggtagccactgtaggtataacggacttcgcgcagaaggagctgaaggacattgttggcgtggagctccctgagaaggggaggaaggttaagaagggggaggcggtggcgacggtcgagtccataaaggctactgcagacatctacgcccccctctctggcgagatagtcgacgtcaacgagaagctcctagaccagccggagctgataaacgacgacccctacggtgagggatggatattcaagatcaaagtcgaggatccaggcgagttcgaaagcctcctcacgcctgagcagtatgttgagagcgtcaggaagaggaaggagtaa

SEQ ID NO: 117193 - protein, 143 aa, Aeropyrum pernix
MGGQVIEVEVAGVRFLLRKDLRYTESDEWARLEDGVATVGITDFAQKELKDIVGVELPEKGRKVKKGEAVATVESIKATADIYAPLSGEIVDVNEKLLDQPELINDDPYGEGWIFKIKVEDPGEFESLLTPEQYVESVRKRKE

SEQ ID NO: 117194 - DNA, 363 bp, Agrobacterium tumefaciens
  CDS (1)..(363): transl_table=11
atgctgaaatttaccgcagaacacgaatggctgaagttcgaaggcgatatcgccaccgtcggcatcaccagccacgccgctgaacagcttggcgatctcgtttttgtcgagctgccggaagtgggcgcaaccttcgccaaggatggcgatgctgcgaccgtggaatccgtcaaggcggcgtccgacgtctattgtccgctggatggcgaagtggtcgaaatcaaccaggccatcgttgatgacccctcgctggtcaattccgatccgcagggtgccggctggttcttcaagctgaagctttccaatgccgcggatgccgagacactgctcgatgaagcagcctacaaggagctgatcgcgtaa

SEQ ID NO: 117195 - protein, 120 aa, Agrobacterium tumefaciens
MLKFTAEHEWLKFEGDIATVGITSHAAEQLGDLVFVELPEVGATFAKDGDAATVESVKAASDVYCPLDGEVVEINQAIVDDPSLVNSDPQGAGWFFKLKLSNAADAETLLDEAAYKELIA

SEQ ID NO: 117196 - DNA, 384 bp, Bacillus anthracis
  CDS (1)..(384): transl_table=11
atgagcattccaaataatttacgttactctgaagaacacgaatgggtaaaaactgaaggtaatgaagttgttatcggtattactcactttgcacaaaatgaactaggcgatatcgtattcgttgaacttcctgaagtaggtgcaacaatcgaagctgacgagccattcggaagcgtagaatctgttaaaacagtttctgaattatacgcacctgtaagcggtaaagttgtagcagtaaacgaagaattaagtgaccaaccagaacttgttaacgaatctccatacgagggtgcatggatggttaaagttgaactttctgatgcaagccaagttgagaagttattaactgctgaaaaatatgcagaaatgacaaaccaagactaa

SEQ ID NO: 117197 - protein, 127 aa, Bacillus anthracis
MSIPNNLRYSEEHEWVKTEGNEVVIGITHFAQNELGDIVFVELPEVGATIEADEPFGSVESVKTVSELYAPVSGKVVAVNEELSDQPELVNESPYEGAWMVKVELSDASQVEKLLTAEKYAEMTNQD

SEQ ID NO: 117198 - DNA, 387 bp, Bacillus halodurans
  CDS (1)..(387): transl_table=11
gtgtcaaatttaccaaacgagttaaagtattcagaagagcatgagtgggtaaaagttgagggagacaaagttcgtatcggaattacggattttgctcaatcagagctaggtgatattgtctttgtagagcttccagaagttggtgatgaagtggaagcggacgagccttttggcagcgtagaatcagtaaagacagtctctgaactgtacgctcctgtttccggaaaagtagtagaagtcaacgaagagcttgacgataaccctgagtacgttaacgaatctccatacgaaaaagcatggatgattgtcgttgaaccatcagacgcctctcaagtggaagagctcatgagcgctgacgaatacaaggaaatgatcagcgaagaataa

SEQ ID NO: 117199 - protein, 128 aa, Bacillus halodurans
MSNLPNELKYSEEHEWVKVEGDKVRIGITDFAQSELGDIVFVELPEVGDEVEADEPFGSVESVKTVSELYAPVSGKVVEVNEELDDNPEYVNESPYEKAWMIVVEPSDASQVEELMSADEYKEMISEE

SEQ ID NO: 117200 - DNA, 381 bp, Bacteroides thetaiotaomicron
  CDS (1)..(381): transl_table=11
atgaactttccacagaacttgaagtacacgaatgaacacgagtggattcgcgtagaaggagacatcgcttacgtaggtatcacagattacgcacaggaacaactgggcgatattgtattcgttgatattcctaccgtaggagaaacgttggaagccggagaaactttcggaacgattgaagtggtaaagaccatttccgatcttttcttaccgttggcaggcgagatactcgaacagaacgaagctttggaagaaaatccggagctggtaaacaaagacccttacggcgaaggctggctgatcaagatgaagcctgctgatgccagtgctgcggaagacctgctcgatgccgaagcatacaaggcagtggtcaacggctga

SEQ ID NO: 117201 - protein, 126 aa, Bacteroides thetaiotaomicron
MNFPQNLKYTNEHEWIRVEGDIAYVGITDYAQEQLGDIVFVDIPTVGETLEAGETFGTIEVVKTISDLFLPLAGEILEQNEALEENPELVNKDPYGEGWLIKMKPADASAAEDLLDAEAYKAVVNG

SEQ ID NO: 117202 - DNA, 366 bp, Caulobacter crescentus
  CDS (1)..(366): transl_table=11
atgcgtttcaccaaggatcacgagtgggtcatcgtcgagggcgatgtggccacggtcggcatcaccgcctacgccgccgagcagctgggcgacgtcgtgttcgtcgagaccccggaagcgggcaaggtcgtcaagcagggcgaaggcctggccgtcgtcgagagcgtcaaggccgcctcggacgtctacgccccggtgtcgggcgaggtgatcgagggcaacggcgagctggccggcgccccggagaccgtcaacgccctgccggaaagcggcggctggttcgccaagatcaagctcgccaacccggccgagctcgacgccctgatggaccgcgacgcctacgaagccttcctgggcactctgtag

SEQ ID NO: 117203 - protein, 121 aa, Caulobacter crescentus
MRFTKDHEWVIVEGDVATVGITAYAAEQLGDVVFVETPEAGKVVKQGEGLAVVESVKAASDVYAPVSGEVIEGNGELAGAPETVNALPESGGWFAKIKLANPAELDALMDRDAYEAFLGTL

SEQ ID NO: 117204 - DNA, 384 bp, Chlorobium tepidum
  CDS (1)..(384): transl_table=11
atgaacatccctgacaatctccgctataccaaagatcacgaatggatcaagctgcttgaagatggcctgaccgctctggtcggcatcaccgactttgcgcagtccgagcttggcgacatcgtgttcgtcgaaaccaaaccggttggaacaaaggttgctgcgcacggtacgtttggaaccgttgaggcggtcaaaacggttgccgatctgttcgctcctgcggctggcgaaattgtcgaggtcaatgctggactcgacgatgcggcgattgttaactccgatccctacaacgagggctggattgtcaagatgaagctcgataatcctgccgatgtcgaggcactactctctccggcggactacagcgccctgatcggtgagtaa

SEQ ID NO: 117205 - protein, 127 aa, Chlorobium tepidum
MNIPDNLRYTKDHEWIKLLEDGLTALVGITDFAQSELGDIVFVETKPVGTKVAAHGTFGTVEAVKTVADLFAPAAGEIVEVNAGLDDAAIVNSDPYNEGWIVKMKLDNPADVEALLSPADYSALIGE

SEQ ID NO: 117206 - DNA, 363 bp, Deinococcus radiodurans
  CDS (1)..(363): transl_table=11
atgaccaccacccccaccgaccgcaaatacgccgcctcccacgaatggctcacccaagacggcaccgtgggcatctccgaccacgcgcaggagcagctcggcgacgtggtgtacgtcgaactgcccgaagtgggccgcgaagtgaaggccggcgaagccgtcgccgtcgtggaatcggtcaagaccgccagcgacatctacgccccggccagcggcacgattaccgccgtcaacgacgaactgagcggcagccccgaaaaggtcaacgaaagcccctacgaaggcggctggctgttcaagctcgacgtgaccgaggaaggcgacctgctggacgcggcggcgtatgaggcgcaggcgaactga

SEQ ID NO: 117207 - protein, 120 aa, Deinococcus radiodurans
MTTTPTDRKYAASHEWLTQDGTVGISDHAQEQLGDVVYVELPEVGREVKAGEAVAVVESVKTASDIYAPASGTITAVNDELSGSPEKVNESPYEGGWLFKLDVTEEGDLLDAAAYEAQAN

SEQ ID NO: 117208 - DNA, 498 bp, Drosophila melanogaster
  CDS (1)..(498)
atggtattcataacgaaattcgcaaggattgggctgcaggccgcccgccagcttagtgtcacgccccttggcgccgtccaggctcgcgccattcacctgacaagccttctagccaaagaacgccgatacacaaacaaacacgagtgggtggaggtggtatccggcagcaatgccatagtaggcatctccagctacgcccaggaggctctcggggatgtggtgttcgcccaactcccagaacccggcacggaactcaagcaggatgacgaatgtggggccctggagagcgttaaagcggctagcgaggtgtattcacccgttagtggcaaggtaattgaaaagaatgccgaggtggaggacacaccggccctagtcaacagcagttgctatgaaaagggctggcttttcaaggtggacctgaaaaatcccaaggaactcgaagcccttatgaccgaggatcagtacaaagccttcctgagcagcagtggggatcactag

SEQ ID NO: 117209 - protein, 165 aa, Drosophila melanogaster
MVFITKFARIGLQAARQLSVTPLGAVQARAIHLTSLLAKERRYTNKHEWVEVVSGSNAIVGISSYAQEALGDVVFAQLPEPGTELKQDDECGALESVKAASEVYSPVSGKVIEKNAEVEDTPALVNSSCYEKGWLFKVDLKNPKELEALMTEDQYKAFLSSSGDH

SEQ ID NO: 117210 - DNA, 390 bp, Escherichia coli O157
  CDS (1)..(390): transl_table=11
atgagcaacgtaccagcagaactgaaatacagcaaagaacacgaatggctgcgtaaagaagccgacggcacttacaccgttggtattaccgaacatgctcaggagctgttaggcgatatggtgtttgttgacctgccggaagtgggcgcaacggttagcgcgggcgatgactgcgcggttgccgaatcagtaaaagcggcgtcagacatttatgcgccagtaagcggtgaaatcgtggcggtaaacgacgcactgagcgactccccggaactggtgaacagcgaaccgtatgcaggtggctggatctttaaaatcaaagccagcgatgaaagcgaactggaatcactgctggatgcgaccgcatacgaagcattgttagaagacgagtaa

SEQ ID NO: 117211 - protein, 129 aa, Escherichia coli O157
MSNVPAELKYSKEHEWLRKEADGTYTVGITEHAQELLGDMVFVDLPEVGATVSAGDDCAVAESVKAASDIYAPVSGEIVAVNDALSDSPELVNSEPYAGGWIFKIKASDESELESLLDATAYEALLEDE

SEQ ID NO: 117212 - DNA, 393 bp, Escherichia coli O6
  CDS (4)..(393): transl_table=11
ttgatgagcaacataccagcagaactgaaatacagcaaagaacacgaatggttgcgtaaagaagccgacggcacttacaccgttggcatcaccgaacacgctcaggagctgttaggcgatatggtgtttgttgacctaccggaagtgggcgcaacggttagcgcgggcgatgactgcgcggttgccgaatcggtaaaagcggcgtcagatatttatgcgccagtaagcggtgaaatcgtggcggtaaacgatgcactgagcgattctccggaactggtgaacagcgaaccgtatgcaggcggctggattttcaaaatcaaagccagcgatgaaagcgaactggaatcactgctggatgcaaccgcatacgaagcattgttagaagacgagtaa

SEQ ID NO: 117213 - protein, 129 aa, Escherichia coli O6
MSNIPAELKYSKEHEWLRKEADGTYTVGITEHAQELLGDMVFVDLPEVGATVSAGDDCAVAESVKAASDIYAPVSGEIVAVNDALSDSPELVNSEPYAGGWIFKIKASDESELESLLDATAYEALLEDE

SEQ ID NO: 117214 - DNA, 628 bp, Flaveria anomala
  CDS (1)..(489)
atggctcttagaatgtgggcttcttccacagccaatgctctaaggctatcctctgctactagaccccatttctcacctctttccagatgcttctcttcagttttggatggattgaagtatgcaaattcacatgagtgggtgaagcatgaaggctctgttgctactattggtatcactgaccatgctcaggatcatcttggagaggtggtgtttgtggatttaccagaagccggtggctctgtgaccaaagccaccggctttggtgctgtagaaagtgtcaaagctaccagtgacgttaactccccgatctctggagagatcgttgaggtgaactcgaagttgtccgagactcctggtttgatcaattcgagcccgtatgaagatggatggatgattaaggtgaagccaagcaacccgtcggagctggattctttaatgggtgcaaaagagtacacaaagttctgtgaagaagaagatgctgctcactagacatgaacataaatcatgtcttatgatttttttttctttccgtttcatcctcgacttcgactaactgaaatctcagtcgttcaataatcatattgtttgaaggttcgtttgatttatctttaaatcatggtacaagttg

SEQ ID NO: 117215 - protein, 162 aa, Flaveria anomala
MALRMWASSTANALRLSSATRPHFSPLSRCFSSVLDGLKYANSHEWVKHEGSVATIGITDHAQDHLGEVVFVDLPEAGGSVTKATGFGAVESVKATSDVNSPISGEIVEVNSKLSETPGLINSSPYEDGWMIKVKPSNPSELDSLMGAKEYTKFCEEEDAAH

SEQ ID NO: 117216 - DNA, 694 bp, Flaveria pringlei
  CDS (60)..(548)
ctttttcaacaccctaacacacacacaatcacacacacacacacacacttgcagactaaatggctcttagaatctgggcttcttccacagccaatgctctaaggctatcctctgctactagacctcatttctcacctctttccagatgcttctcttcagttttggatggattgaagtatgcaaattcacatgagtgggtgaagcatgaaggttctgttgctactattggtatcactgaccatgctcaggatcatcttggggaggtggtgtttgtggatttaccagaagccggtggctctgtgaccaaagccaccggctttggtgcagtagaaagtgtcaaagccaccagtgacgttaactccccgatctctggagagatcgttgaggtgaactcgaagttgtctgagactcctggtttgatcaattcgagcccgtatgaagatggatggatgattaaggtgaagccaagcaacccgtcggagctggattctttaatgggtgcaaaagagtacacaaagttctgcgaagaagaagattctgctcactagacagacatgaacataaatcatgtctcatgatttttttttttttcgtttcatcctcgacttcgactaactgaaatctcagtcgttcaataatcatattgtttcaaggtttgatcaatttatctttaaattatgctacaagttggaac

SEQ ID NO: 117217 - protein, 162 aa, Flaveria pringlei
MALRIWASSTANALRLSSATRPHFSPLSRCFSSVLDGLKYANSHEWVKHEGSVATIGITDHAQDHLGEVVFVDLPEAGGSVTKATGFGAVESVKATSDVNSPISGEIVEVNSKLSETPGLINSSPYEDGWMIKVKPSNPSELDSLMGAKEYTKFCEEEDSAH

SEQ ID NO: 117218 - DNA, 650 bp, Flaveria trinervia
  CDS (1)..(498)
atggctcttagaatctgggcttcttccacagccaaggctctaaggctatcctctgcttctagacctcatttctcaccacttttcagatgcttctcttcagctgcagttttggatggattgaagtatgcaaattcacatgagtgggtgaagcatgaaggttctgttgctactattggtatcactgatcatgctcaggatcatcttggggaggtggtgtttgtggaattaccagaagtcggtggctctgtgaccaaagccaccggctttggtgcagtagaaagtgtcaaagccactagtgacgttaactccccgatctctggagagatcgttgaggtgaactcgaagttgaccaagactcctggtttgatcaataagagcccgtatgaagatggatggatgattaaggtgaagccaagcaacccgtcggagctggattcgttaatgggtccaaaagagtacacaaagttctgcgaagaagaaggtgctgctgctcactagacatgaacataaatcaactctcatgaattttttttttcttttcatcctcgacttcgactaactgaaatctcagtcgttcaataatcatattgtttgaaggtttgatcaatttatctttagattatggtacaagttggaatacgttcaatctt

SEQ ID NO: 117219 - protein, 165 aa, Flaveria trinervia
MALRIWASSTAKALRLSSASRPHFSPLFRCFSSAAVLDGLKYANSHEWVKHEGSVATIGITDHAQDHLGEVVFVELPEVGGSVTKATGFGAVESVKATSDVNSPISGEIVEVNSKLTKTPGLINKSPYEDGWMIKVKPSNPSELDSLMGPKEYTKFCEEEGAAAH

SEQ ID NO: 117220 - DNA, 393 bp, Leptospira interrogans serogroup Icterohaemorrhagiae serovar
  CDS (1)..(393): transl_table=11
atggcagaaacacaggctcccacaggttatcttttctccgaaaaacacgaatgggtaaaagtagaaggagacatggctcttatcggtatttcggattttgctcaatccgcattaggtgatattgtgtttgtagatcttccaaaaaccggaaagaacattaaacaatttgaaaccttcggaacaatcgaatcggtaaaagcggctgaagacttatacgctcctattggtggagaagtgattgaatccaattcggctctttctaaaaatccgggagacgtcaactctaaaccattcgattcctggatgattaaggtgaaaggtttttccacttccgaactggacaaacttttaactccggaaaaatacaaggccttagtcgccggattagaataa

SEQ ID NO: 117221 - protein, 130 aa, Leptospira interrogans serogroup Icterohaemorrhagiae serovar
MAETQAPTGYLFSEKHEWVKVEGDMALIGISDFAQSALGDIVFVDLPKTGKNIKQFETFGTIESVKAAEDLYAPIGGEVIESNSALSKNPGDVNSKPFDSWMIKVKGFSTSELDKLLTPEKYKALVAGLE

SEQ ID NO: 117222 - DNA, 378 bp, Listeria innocua
  CDS (1)..(378): transl_table=11
atgagtttaccaaaagacttattgtacacagaagaacatgaatgggtgaaagcagaagacggtagttatattattggaattactgactttgcccaagatcaattaggggatattgtatttgtcgaattgccagaagttggcgatacagtaacaaaaggtgattcaatcggtagcattgaatccgttaaaacagtatctgatttttatgcgccagtaactggtaaagtagttgctgttaatgaaacattagaagatgagccagaactaattaatagcaacccgtatgacactggttggattttaaaacttactgaagtagaagaagcggatgtaactgctcttttatcaagtgatgattacgaaaaaggattagattaa

SEQ ID NO: 117223 - protein, 125 aa, Listeria innocua
MSLPKDLLYTEEHEWVKAEDGSYIIGITDFAQDQLGDIVFVELPEVGDTVTKGDSIGSIESVKTVSDFYAPVTGKVVAVNETLEDEPELINSNPYDTGWILKLTEVEEADVTALLSSDDYEKGLD

SEQ ID NO: 117224 - DNA, 378 bp, Listeria monocytogenes serotype 4b
  CDS (1)..(378): transl_table=11
atgagtttaccaaaagacttattgtacacagaagaacatgaatgggtgaaagcagacgagggtagttatgttattgggattacggactttgctcaagatcaattaggggatatcgtatttgttgaattgccagaggttggcgacactgtagctaaaggcgactctattggtagcattgagtctgtaaaaacagtatctgatttttatgcaccagtaactggtaaagtagttgctgttaacgaaacattagaagatgaaccagaattaattaatagcaatccatacgatacaggctggattttaaaacttgaagaagtagaagaagcggatgtaaaggctcttttatcaagtgacgattacgaaaaagtattagattaa

SEQ ID NO: 117225 - protein, 125 aa, Listeria monocytogenes serotype 4b
MSLPKDLLYTEEHEWVKADEGSYVIGITDFAQDQLGDIVFVELPEVGDTVAKGDSIGSIESVKTVSDFYAPVTGKVVAVNETLEDEPELINSNPYDTGWILKLEEVEEADVKALLSSDDYEKVLD

SEQ ID NO: 117226 - DNA, 378 bp, Listeria monocytogenes
  CDS (1)..(378): transl_table=11
atgagtttaccaaaagacttattgtacacagaagaacacgaatgggtgaaagcagacgatggtagttatgttattggaattacggactttgctcaagatcaattaggggatatcgtatttgttgaattgccagaggttggcgacactgtaacaaaaggtgactccattggtagcattgaatctgtaaaaacagtatctgatttttacgcaccagtaactggtaaagtagttgctgttaacgaaacattagaagatgaaccagaattaattaatagcaatccatacgatacaggctggattttaaaacttgaagaagtagaagaagcggatgtaaaggctcttttatcaagtgacgattacgaaaaagtattagattaa

SEQ ID NO: 117227 - protein, 125 aa, Listeria monocytogenes
MSLPKDLLYTEEHEWVKADDGSYVIGITDFAQDQLGDIVFVELPEVGDTVTKGDSIGSIESVKTVSDFYAPVTGKVVAVNETLEDEPELINSNPYDTGWILKLEEVEEADVKALLSSDDYEKVLD

SEQ ID NO: 117228 - DNA, 492 bp, Mesembryanthemum crystallinum
  CDS (1)..(492)
atggctttgagaatgtgggcttcttcagcagccaatgctcttggtgtctcttgtgcccccaaatctcatcttctcccagctctttctctctccagatgcttctccactgttttggatggattgaagtatgcatcctcccatgaatgggtgaaacatggaggttcagtggccaccattggcattactgatcatgctcagggacatctaggggatgtggtgtttgcagagctgccagaaggaggagcagtatcagcagggaaaccctttgcttcagtggagagtgtgaaagctacaagtgatgtcaactcccccatctcaggtgaaattgttgaggttaacaccaagctttctgattcccctggtttgctcaattcaagtccatatgaagaagggtggatggtcaaagtgaagccaagcaatccagcggagttggaaagcctgatgggttctaaagagtacacaaaattctgtgaggaagaagatgctcattaa

SEQ ID NO: 117229 - protein, 163 aa, Mesembryanthemum crystallinum
MALRMWASSAANALGVSCAPKSHLLPALSLSRCFSTVLDGLKYASSHEWVKHGGSVATIGITDHAQGHLGDVVFAELPEGGAVSAGKPFASVESVKATSDVNSPISGEIVEVNTKLSDSPGLLNSSPYEEGWMVKVKPSNPAELESLMGSKEYTKFCEEEDAH

SEQ ID NO: 117230 - DNA, 405 bp, Mycobacterium bovis
  CDS (1)..(405): transl_table=11
gtgagcgatatcccgtccgatctgcactacaccgccgaacacgagtggattcgccgcagtggcgacgacaccgtccgggtggggatcaccgactatgcacagtcggcgcttggcgacgtcgttttcgttcagctacccgttatcggcaccgcggtcaccgccggcgagaccttcggcgaagtggaatcgacgaaatctgtgtcggatctctatgcgcccatttcgggtaaggtgtctgcggtcaacagcgatctggacggcactccgcaattggtgaattccgacccctacggagccggctggctgctggacatccaggtcgacagctcggatgtcgctgccctggagtcagctttgacgacactgctcgacgctgaggcctaccgcggcacactgaccgagtga

SEQ ID NO: 117231 - protein, 134 aa, Mycobacterium bovis
MSDIPSDLHYTAEHEWIRRSGDDTVRVGITDYAQSALGDVVFVQLPVIGTAVTAGETFGEVESTKSVSDLYAPISGKVSAVNSDLDGTPQLVNSDPYGAGWLLDIQVDSSDVAALESALTTLLDAEAYRGTLTE

SEQ ID NO: 117232 - DNA, 399 bp, Mycobacterium leprae
  CDS (1)..(399): transl_table=11
gtgagtgatatcccgtccgatctgcattacactgctgagcatgagtggattcggcgcagtcgcgaagacaccgtccgggtcgggctcaccgacttcgcgcagtcgacactgggtgatgtggttttcgtccagctgccagaagttggcgctgagttagcggcgggcaaatccttcggcgaagtggaatcgacgaaatcggtgtcggacttgtatgcaccggtgtcgggtacagtgtcggcggtaaacaccgatctggaaggcagtccccaactagtgaactctgacccatacggcgctggctggctactggatgttcacgtctccgacgtcggggctttggagtcagctatcgcaacgctgcttgacgccgagacttatcgcggcacgctaaccaaatga

SEQ ID NO: 117233 - protein, 132 aa, Mycobacterium leprae
MSDIPSDLHYTAEHEWIRRSREDTVRVGLTDFAQSTLGDVVFVQLPEVGAELAAGKSFGEVESTKSVSDLYAPVSGTVSAVNTDLEGSPQLVNSDPYGAGWLLDVHVSDVGALESAIATLLDAETYRGTLTK

SEQ ID NO: 117234 - DNA, 405 bp, Mycobacterium tuberculosis
  CDS (1)..(405): transl_table=11
gtgagcgatatcccgtccgatctgcactacaccgccgaacacgagtggattcgccgcagtggcgacgacaccgtccgggtggggatcaccgactatgcacagtcggcgcttggcgacgtcgttttcgttcagctacccgttatcggcaccgcggtcaccgccggcgagaccttcggcgaagtggaatcgacgaaatctgtgtcggatctctatgcgcccatttcgggtaaggtgtctgaggtcaacagcgatctggacggcactccgcaattggtgaattccgacccctacggagccggctggctgctggacatccaggtcgacagctcggatgtcgctgccctggagtcagctttgacgacactgctcgacgctgaggcctaccgcggcacactgaccgagtga

SEQ ID NO: 117235 - protein, 134 aa, Mycobacterium tuberculosis
MSDIPSDLHYTAEHEWIRRSGDDTVRVGITDYAQSALGDVVFVQLPVIGTAVTAGETFGEVESTKSVSDLYAPISGKVSEVNSDLDGTPQLVNSDPYGAGWLLDIQVDSSDVAALESALTTLLDAEAYRGTLTE

SEQ ID NO: 117236 - DNA, 387 bp, Neisseria meningitidis serogroup B
  CDS (1)..(387): transl_table=11
atgagcaacaacatcccggccgaactgaaatacgttgccagccatgaatggctgcgccttgaagaagacggtacgattaccgtcggcattacccaccacgcgcaagagctgttgggcgacatcgtgttcgtcgagctgcccgaagtcggcgcgaaccttgccgctgaagagcaagccggtgtggttgagtctgtaaaagccgcgtccgacgtgtacgcaccgattgcaggcgaagtcgttgccgtcaacgaagatttgccaagcgctccggaaactgccaacagcgatccttacggtgcaggctggttcttcaaactcaaaccggcaaacgttgccgattacgacagtctgctgactgccgaacaatacgcgggcgaagtggattaa

SEQ ID NO: 117237 - protein, 128 aa, Neisseria meningitidis serogroup B
MSNNIPAELKYVASHEWLRLEEDGTITVGITHHAQELLGDIVFVELPEVGANLAAEEQAGVVESVKAASDVYAPIAGEVVAVNEDLPSAPETANSDPYGAGWFFKLKPANVADYDSLLTAEQYAGEVD

SEQ ID NO: 117238 - DNA, 390 bp, Nitrosomonas europaea
  CDS (1)..(390): transl_table=11
atgagcgttccggcagaactgaaatatacagaatcacacgaatgggtcagattggaagcagatggcagtgtcacggtaggaattacccagcatgcccaggaattactgggggacatggtattcgttcagttgcccgatgtcgggcgcgcgctggcacagcgtgaagattgcgctgtggtggagtcggtcaaggcagcatcggatatttatgcgccactgggtggagaagtcattgcagtcaactctgaagtggaaacatctccggaaaaaataaacgaggattgctacgcagcctggctgttcaagctcaaaccggccaatgctggtgaagtggatggtctgctcgatgccggcggatatcagaaactgctggatagcgaagcgcattga

SEQ ID NO: 117239 - protein, 129 aa, Nitrosomonas europaea
MSVPAELKYTESHEWVRLEADGSVTVGITQHAQELLGDMVFVQLPDVGRALAQREDCAVVESVKAASDIYAPLGGEVIAVNSEVETSPEKINEDCYAAWLFKLKPANAGEVDGLLDAGGYQKLLDSEAH

SEQ ID NO: 117240 - DNA, 381 bp, Oceanobacillus iheyensis
  CDS (1)..(381): transl_table=11
atgagtttgccacaagatttattgtattctaaggagcatgaatgggtaaaacaagaagatggaaaattacgcattgggattacagactttgctcaagatgaattaggagacattgtgtttgttgaacttcctgaaattggtgaagaattaaaagtcgatgatccttttggtagtgtagaatctgtaaagacagtatctgagctctatgcacccgtaagtggaaaagtagtcgaaatcaacgatgacttggaagatagcccagagtatgttaatgaatctccatatgaaaaagcttggatgatagtgattgaaccatctgatgaaaaggaacttgaagagctattatccgcagagaattacgaggcatttatacaagactaa

SEQ ID NO: 117241 - protein, 126 aa, Oceanobacillus iheyensis
MSLPQDLLYSKEHEWVKQEDGKLRIGITDFAQDELGDIVFVELPEIGEELKVDDPFGSVESVKTVSELYAPVSGKVVEINDDLEDSPEYVNESPYEKAWMIVIEPSDEKELEELLSAENYEAFIQD

SEQ ID NO: 117242 - DNA, 498 bp, Pisum sativum
  CDS (1)..(498)
atggcacttaggatgtgggcttcttcaactgccaatgcactcaaactctcctcttcctctagattacatctctcccctaccttttccatctccagatgtttctctaatgttttggatggactcaagtacgcaccttcacatgaatgggtcaagcatgaaggatcagtagccactattggtatcactgaccatgcccaggaccatcttggagaggttgtgtttgtggagcttccagaacctggtgtctcagttacaaagggtaaaggtttcggagctgttgaaagtgtgaaggcaacaagtgatgtaaactctcctatttccggtgaggttatcgaggttaatactgggctcaccggaaagcctggcctcatcaattcaagcccctatgaagatggatggatgataaaaataaagccaactagtccagatgaattagaatccttgttgggtgcaaaagagtacacaaagttttgtgaggaagaagatgctgcacattga

SEQ ID NO: 117243 - protein, 165 aa, Pisum sativum
MALRMWASSTANALKLSSSSRLHLSPTFSISRCFSNVLDGLKYAPSHEWVKHEGSVATIGITDHAQDHLGEVVFVELPEPGVSVTKGKGFGAVESVKATSDVNSPISGEVIEVNTGLTGKPGLINSSPYEDGWMIKIKPTSPDELESLLGAKEYTKFCEEEDAAH

SEQ ID NO: 117244 - DNA, 375 bp, Picrophilus torridus
  CDS (1)..(375): transl_table=11
atgtccagggttccagacaatctttattatacaaaaagccatgaatggtttttaatagaaaatggtgttgcaacggttggaataacagattatgcccagcatcagcttacagatattgtctatgtggattttccaaaaaatggtgagcacaaaaataagggcgaaacacttttaacaatagaatctgttaaatctgccgaggatgtttattctcctgtaacaggagagatcattgaaataaacagggatctggaatcaaaaccagagctgataaacgaggatccatataaaaactggcttgttaaaataaggctttcaaatgataactttgatgggatgtccggtgaggagtacaaaaagtacataggcgaataa

SEQ ID NO: 117245 - protein, 124 aa, Picrophilus torridus
MSRVPDNLYYTKSHEWFLIENGVATVGITDYAQHQLTDIVYVDFPKNGEHKNKGETLLTIESVKSAEDVYSPVTGEIIEINRDLESKPELINEDPYKNWLVKIRLSNDNFDGMSGEEYKKYIGE

SEQ ID NO: 117246 - DNA, 405 bp, Pyrococcus furiosus
  CDS (1)..(405): transl_table=11
atgattgaagttggagaatacaaaattaaggaaggtttgtactatacaaaggagcatgaatgggttcaggtcttagaagacggaactgttttagttggtataactgactatgctcaaaaagagttaggagacctggcctatgttgaacttcccgaagtgggaaaggtcgtagagaagggagatgtcctttgtgaagttgagagcgttaaagccgttagtgaagtctatgctcccgtaagtggggaagtaatagaagtgaatgaagaacttgcagatagtccagagaaaataaatgaagatccctatgaagcttggatagccaagattaagccaaagaacttagaagaagagcttaaagagttaatggatgcaaaagcctacgcagaatacttaaagaccctctaa

SEQ ID NO: 117247 - protein, 134 aa, Pyrococcus furiosus
MIEVGEYKIKEGLYYTKEHEWVQVLEDGTVLVGITDYAQKELGDLAYVELPEVGKVVEKGDVLCEVESVKAVSEVYAPVSGEVIEVNEELADSPEKINEDPYEAWIAKIKPKNLEEELKELMDAKAYAEYLKTL

SEQ ID NO: 117248 - DNA, 405 bp, Pyrococcus kodakaraensis
  CDS (1)..(405): transl_table=11
atgatcgaagtcggggaatacaaggtcaaggaaggcctctactacacgaaagaccacgagtgggctcaagttcttgatgacggcacggttctcgttggcataagcgattacgcccagaaggagctgggagacctcgcctacgtcgagcttccggaagtcggcaaggaagtcagcaagggcgacgttctctgtgagattgagagcgtcaaggcagtcagcgaggtctacgccccagtcagcggcgaggtcatcgaggtcaacgaggccctcgaggacagccccgagctcctcaacgaggatccctacgagaactggatcgccaagctcaagccgaccaaccttgaggaagagctcaaggagcttatggacgcccaagcctacgccgaatacctgaggagcctttga

SEQ ID NO: 117249 - protein, 134 aa, Pyrococcus kodakaraensis
MIEVGEYKVKEGLYYTKDHEWAQVLDDGTVLVGISDYAQKELGDLAYVELPEVGKEVSKGDVLCEIESVKAVSEVYAPVSGEVIEVNEALEDSPELLNEDPYENWIAKLKPTNLEEELKELMDAQAYAEYLRSL

SEQ ID NO: 117250 - DNA, 384 bp, Ralstonia solanacearum
  CDS (1)..(384): transl_table=11
atgagcaacacgcccgtagagctgaagtacaccgaatcccacgagtgggtccgcacggaggccgacggcacgctgaccatcggcatcaccgacctggcgcaggagcagctcggcgacatcgtcttcctggagctgccggacaccggccgccaggtcaagcagggtgaagcgattgccgtggtggagtcggtcaaggccgcctccgacatctacgcgccggtgtcgggcgaagtgatcgccagcaacgccgatgccaccgagtcgcccgagtcggtcaatgaagacgcctatgacgcctggctgttcaagatcaagccggccaacgccgacgacgtgaacgccctgctgtcggccgaccagtaccaagccaaagccggggcgtaa

SEQ ID NO: 117251 - protein, 127 aa, Ralstonia solanacearum
MSNTPVELKYTESHEWVRTEADGTLTIGITDLAQEQLGDIVFLELPDTGRQVKQGEAIAVVESVKAASDIYAPVSGEVIASNADATESPESVNEDAYDAWLFKIKPANADDVNALLSADQYQAKAGA

SEQ ID NO: 117252 - DNA, 378 bp, Rhizobium loti
  CDS (1)..(378): transl_table=11
atgaacctcatggcaaagacctatttcacatcagatcacgaatggctccgcgttgagggcggcatcgccaccgtcggcatcaccgactacgcgcaggagcagctcggcgacctcgtcttcgtcgaactgccggaaacgggcaagaagctgaccaagggcgacaccgccgtcgtggtcgaatccgtcaaggcggcttccgacgtttacgcgccggtcgacggcgagatcaccgaggccaacggcacgctgtcttccgacccgtcgctggtcaactcggcggcaaccggcgccggctggctgtggaagatgaggcttgccgacgaaagccagctcgccggcctcatggatgaggccgcctacaaagcccatatcgcctga

SEQ ID NO: 117253 - protein, 125 aa, Rhizobium loti
MNLMAKTYFTSDHEWLRVEGGIATVGITDYAQEQLGDLVFVELPETGKKLTKGDTAVVVESVKAASDVYAPVDGEITEANGTLSSDPSLVNSAATGAGWLWKMRLADESQLAGLMDEAAYKAHIA

SEQ ID NO: 117254 - DNA, 399 bp, Rhodopirellula baltica
  CDS (1)..(399): transl_table=11
atggcacgagacccttcgaccctgcgttatgccgagacccatgagtgggtggacgttcaagaagaaggcggcgacaagttcgcaacgatcggtatctctgcctttgccgtcgaacagctcaacgacttggtctatatggaccttcccgaagttggacgcacactggaagttggcgaagaattcggtgaagtcgaatccgtgaaagcggttagtccgttgtacagcccggttgctggcgaagtcgtcgcagttcacaccgatctgccagacaacttggacaacttgaacgacgatgcgttcgattttggatggattctgaaagtgaaattgtcagcggatctgcctgagacgttgatggactttgccgcttatcaaaaacagtgttccgaagcaggttga

SEQ ID NO: 117255 - protein, 132 aa, Rhodopirellula baltica
MARDPSTLRYAETHEWVDVQEEGGDKFATIGISAFAVEQLNDLVYMDLPEVGRTLEVGEEFGEVESVKAVSPLYSPVAGEVVAVHTDLPDNLDNLNDDAFDFGWILKVKLSADLPETLMDFAAYQKQCSEAG

SEQ ID NO: 117256 - DNA, 390 bp, Salmonella typhimurium
  CDS (1)..(390): transl_table=11
atgagcaacgtacccgcagaactgaaatacagcaaagaacacgaatggctgcgtaaagaagcggatggcacttacaccgttggcattactgaacacgctcaggagctgttgggcgatatggtttttgttgatctgccggaagtcggcgcgaccgtaagcgcgggcgacgactgcgccgtggcggagtccgtaaaagcggcgtccgacatttatgcgccggtaagcggcgagatcgtggcggtaaacgatgcgctgagcgactccccggagctggtgaacagcgaaccgtataccggtggctggatctttaaaatcaaagccagcgatgaaagcgaacttgaatcgctgctggatgccaccgcgtatgaggcattgttagaagacgaataa

SEQ ID NO: 117257 - protein, 129 aa, Salmonella typhimurium
MSNVPAELKYSKEHEWLRKEADGTYTVGITEHAQELLGDMVFVDLPEVGATVSAGDDCAVAESVKAASDIYAPVSGEIVAVNDALSDSPELVNSEPYTGGWIFKIKASDESELESLLDATAYEALLEDE

SEQ ID NO: 117258 - DNA, 390 bp, Shewanella oneidensis
  CDS (1)..(390): transl_table=11
atgagcaatattccgacagaactgaaatacgcctcttcacacgaatggatccgcaaggaagaagacggtagctacactgtgggtatcactgagcacgctcaagagctgttaggtgacatggttttcgttgaactgccagaagtgggtgacactgtcacggcgggcgacgactgtgcagtggcggaatcagtgaaagcggcttctgacatctacgcgccaatctctggtgaagtgattgccgtgaacgaagcactggaagattctccagagctggtaaacagcgacgcttacggcgaaggctggttcttccgcgttatgccttctgacgaatcagaagttgacgcactgctcgatgcagaaggttaccaagctgttatcgacgaagaataa

SEQ ID NO: 117259 - protein, 129 aa, Shewanella oneidensis
MSNIPTELKYASSHEWIRKEEDGSYTVGITEHAQELLGDMVFVELPEVGDTVTAGDDCAVAESVKAASDIYAPISGEVIAVNEALEDSPELVNSDAYGEGWFFRVMPSDESEVDALLDAEGYQAVIDEE

SEQ ID NO: 117260 - DNA, 381 bp, Staphylococcus aureus
  CDS (1)..(381): transl_table=11
ttggcagtaccaaatgaattgaaatattcaaaagagcatgaatgggttaaagttgaaggtaatgtagcaataattggaatcacagaatacgcacaaagcgagttaggtgatattgttttcgttgaattaccagaaacagatgatgaaattaatgaaggggatacgtttggtagcgtagaatcagttaaaactgtatcagaattatatgcaccaatctctggtaaagtagttgaagtcaacgaagaactagaagatagtcccgaatttgtaaatgaatctccatacgaaaaagcatggatggtaaaagtagaaattagtgatgaaagtcagattgaagctttattaacagctgaaaaatattcagaaatgattggtgaataa

SEQ ID NO: 117261 - protein, 126 aa, Staphylococcus aureus
MAVPNELKYSKEHEWVKVEGNVAIIGITEYAQSELGDIVFVELPETDDEINEGDTFGSVESVKTVSELYAPISGKVVEVNEELEDSPEFVNESPYEKAWMVKVEISDESQIEALLTAEKYSEMIGE

SEQ ID NO: 117262 - DNA, 381 bp, Staphylococcus epidermidis
  CDS (1)..(381): transl_table=11
gtggcagtaccgagcgaatttaaatattctaaagagcatgagtgggttaaaattgaaaataatgtagcaacaattggtattacagaatacgcacaaaacgaattaggtgatatcgtatttgttgagctacctgaaactgacgatgaattaaatgaaggtgacacattcggtagtgtggaatcagtaaaaacagtatcagagttgtatgcgccaatttctgggaaaattgttgaagttaatgaagaattggaagatagcccagaatttgtaaatgaatcgccatacgaaaaagcatggatggttaaaattgaaattagtgacgatagtcaattagaagaattattatcagcagatcaatactcagaaatgattggtgaataa

SEQ ID NO: 117263 - protein, 126 aa, Staphylococcus epidermidis
MAVPSEFKYSKEHEWVKIENNVATIGITEYAQNELGDIVFVELPETDDELNEGDTFGSVESVKTVSELYAPISGKIVEVNEELEDSPEFVNESPYEKAWMVKIEISDDSQLEELLSADQYSEMIGE

SEQ ID NO: 117264 - DNA, 381 bp, Staphylococcus epidermidis
  CDS (1)..(381): transl_table=11
gtggcagtaccgagcgaatttaaatattctaaagagcatgagtgggttaaaattgaaaataatgtagcaacagttggtattacagaatacgcacaaaacgaattaggtgatatcgtatttgttgagctacctgaaactgacgatgaattaaatgaaggtgacacattcggtagtgtggaatcagtaaaaacagtatcagagttgtatgcgccaatttctgggaaaattgttgaagttaatgaagaattggaagatagcccagaatttgtaaatgaatcgccatacgaaaaagcatggatggttaaaattgaaattagtgacgatagtcaattagaagaattattatcagcagatcaatactcagaaatgattggtgaataa

SEQ ID NO: 117265 - protein, 126 aa, Staphylococcus epidermidis
MAVPSEFKYSKEHEWVKIENNVATVGITEYAQNELGDIVFVELPETDDELNEGDTFGSVESVKTVSELYAPISGKIVEVNEELEDSPEFVNESPYEKAWMVKIEISDDSQLEELLSADQYSEMIGE

SEQ ID NO: 117266 - DNA, 378 bp, Streptomyces coelicolor
  CDS (1)..(378): transl_table=11
atgagcaacccccagcagctgcgctacagcaaggagcacgagtggctgtcgggcgccgaggacggcgtctcgacggtcggcatcacggagcacgcggccaacgcgctcggtgacgtcgtcttcgtccagctccccgaggtcggcgactcggtgaccgcgggcgagacctgcggcgaactggagtcgaccaagtccgtctccgacctgtactcccccgtctccggtgagatcaccgaggtcaacgaggacgtcgtcaacgacccgtcgctggtgaacagcgcccccttcgagggcggctggctgttcaaggtgcggatcacggacgagccggccgacctgctctccgccgacgagtacaccgccttcgccggcgcctga

SEQ ID NO: 117267 - protein, 125 aa, Streptomyces coelicolor
MSNPQQLRYSKEHEWLSGAEDGVSTVGITEHAANALGDVVFVQLPEVGDSVTAGETCGELESTKSVSDLYSPVSGEITEVNEDVVNDPSLVNSAPFEGGWLFKVRITDEPADLLSADEYTAFAGA

SEQ ID NO: 117268 - DNA, 399 bp, Synechocystis sp
  CDS (1)..(399): transl_table=11
atggaactggaacatcctgacgatctctattatttggattcccacgagtacgtccgctttgatggggaaacggccaccattggcctgagtgcctttgccgtggatgagctgggggatattgtctttgtggagttacccgaagaaggggacaaagtggaatttgagcagtccatgggggcagtggaatcggtcaaggccgcctcggatttatattcccctgtgacgggcactgtgatcgaaaaaaactcagctttggaagatcagccggagttgctcaatcaagacccctacggggaagaaggttggttgatcaaggtgcgcctagatgatgtggaagatgccaaagaaggattgatggccgccggagactaccgcgccaccctagagacgggagattag

SEQ ID NO: 117269 - protein, 132 aa, Synechocystis sp
MELEHPDDLYYLDSHEYVRFDGETATIGLSAFAVDELGDIVFVELPEEGDKVEFEQSMGAVESVKAASDLYSPVTGTVIEKNSALEDQPELLNQDPYGEEGWLIKVRLDDVEDAKEGLMAAGDYRATLETGD

SEQ ID NO: 117270 - DNA, 375 bp, Thermotoga maritima
  CDS (1)..(375): transl_table=11
ttgaagatgaaaaagtacacgaaaactcacgaatgggtgtcgattgaggacaaagtagcaacggttggaataacgaatcacgctcaggaacagctcggcgatgtggtctacgtggatcttcctgaagtcggcagagaggtgaagaaaggggaagttgtggcgagtatagagtctgtgaaagccgcagcggacgtgtacgctcctctcagtgggaagatcgtggaagtgaacgagaaactcgatactgaacctgaactcataaacaaggatccagaaggagaaggctggcttttcaaaatggaaatatccgatgaaggcgaactcgaagatcttctggatgaacaggcttatcaggaattctgtgctcaggagtag

SEQ ID NO: 117271 - protein, 124 aa, Thermotoga maritima
MKMKKYTKTHEWVSIEDKVATVGITNHAQEQLGDVVYVDLPEVGREVKKGEVVASIESVKAAADVYAPLSGKIVEVNEKLDTEPELINKDPEGEGWLFKMEISDEGELEDLLDEQAYQEFCAQE

SEQ ID NO: 117272 - DNA, 369 bp, Thermoplasma volcanium
  CDS (1)..(369): transl_table=11
atgaccaacgttcctgatggtttgaaatacacaaagacgcacgagtggtacaaggttgataacggtattgcgactgtaggaataacagattatgctcagtctcagatgactgatatagtttatgtcgatcttcctgaggtgggcgataagaagaaggttggtgatgtacttcttacaatagaatccgtaaaatcagcagaagatgtttactctcccctaacgggggagatcactgaggtgaatcaggaattaaccaagcatccagaaaatataaacaaggacccctatggaaactggctcgttaagatgaaagtcgagaaggagggggaatacctaactgctgaacagtacaggaaattgattcaatga

SEQ ID NO: 117273 - protein, 122 aa, Thermoplasma volcanium
MTNVPDGLKYTKTHEWYKVDNGIATVGITDYAQSQMTDIVYVDLPEVGDKKKVGDVLLTIESVKSAEDVYSPLTGEITEVNQELTKHPENINKDPYGNWLVKMKVEKEGEYLTAEQYRKLIQ

SEQ ID NO: 117274 - DNA, 366 bp, Tropheryma whipplei
  CDS (1)..(366): transl_table=11
gtgttcgatgaaagtgacctggtctacagcaaggaacatgagtgggtttttatcgatgatgatattgcctgggttggtattacaaaatatgccgtgaaaaaacttggcgatattgtctacattgaccttccatcgcaagatgctcttatagttcagggtgagtgtgttggggaaattgagtcaactaaatccgtcagcgaaatatactcgcctgtttccggaagggttatagcagttaatgaggatgttatttcgtcccccggattattgaactcagattcctctgtgtggcttttcaaagctgagtgtgaaaatattccagaattgatggactggggccagtacagcgaatacacgaaagaatag

SEQ ID NO: 117275 - protein, 121 aa, Tropheryma whipplei
MFDESDLVYSKEHEWVFIDDDIAWVGITKYAVKKLGDIVYIDLPSQDALIVQGECVGEIESTKSVSEIYSPVSGRVIAVNEDVISSPGLLNSDSSVWLFKAECENIPELMDWGQYSEYTKE

SEQ ID NO: 117276 - DNA, 381 bp, Vibrio parahaemolyticus
  CDS (1)..(381): transl_table=11
atggacaaaacactgaagtttacagatagccacgagtgggtacgtgacaacggtgacggcacagtgacaatcggtatttctgagcatgcgcaagaaatgttgggtgacgtagtattcgttgacctgccagacgtggaagacgaagtagaagctggcgaaagcttctctttggttgagtctgtaaaagcggcttcagacatctactcaccagtaaccggtgaagtagttgaaatcaacgaagagctagaagacagcccagagctaatcaacgaagaaccatacgaaggtggctggatcgtgaaagtgaaactttctgacccatctgagttggatgacttaaaagatgcggaagaatacctaagctctatcgaagaagagtaa

SEQ ID NO: 117277 - protein, 126 aa, Vibrio parahaemolyticus
MDKTLKFTDSHEWVRDNGDGTVTIGISEHAQEMLGDVVFVDLPDVEDEVEAGESFSLVESVKAASDIYSPVTGEVVEINEELEDSPELINEEPYEGGWIVKVKLSDPSELDDLKDAEEYLSSIEEE

SEQ ID NO: 117278 - DNA, 381 bp, Vibrio vulnificus
  CDS (1)..(381): transl_table=11
atggacaaaacactgaagtttacagaaagccacgagtgggttcgcgacaacggtgacggcactgtaactatcggtatctctgagcacgctcaagaaatgctgggtgatgtggtattcgtcgagctacctgagcttgaagcggaaatcgaagcaggtgaaagcttttcactggttgaatccgtaaaagcggcgtcagacatctacgcaccagtaaccggtgaagtcgttgaagtgaatgaagagctttctgatagcccagagctaatcaacgaggaaccgtacgaaggcggttggattgttaaggtgaaactgtctgatccttcagagcttgataatctgaaagatgcagaagagtacctaaactcaatcgaagaagattaa

SEQ ID NO: 117279 - protein, 126 aa, Vibrio vulnificus
MDKTLKFTESHEWVRDNGDGTVTIGISEHAQEMLGDVVFVELPELEAEIEAGESFSLVESVKAASDIYAPVTGEVVEVNEELSDSPELINEEPYEGGWIVKVKLSDPSELDNLKDAEEYLNSIEED

SEQ ID NO: 117280 - DNA, 396 bp, Xanthomonas axonopodis pv
  CDS (1)..(396): transl_table=11
atgagcgagatccctggcgacctcaagttcctcaaatcccacgagtgggcccgcgtcgagagcaacggtcgcgtgaccgtcggcatttccgaccacgcgcagggcttgctgggtgacctggtttacgtcgaattgccaggtgtcggcgacaccgtgcaggtcggcaacggcgctgcggtggtggaatcggtcaaggccgcctccgacgtctacagcccggtcagcggcaccgtcgtcgaggtcaacagcgcgttgagcgacaagccggaaaccatcaacgaagacgcctacggcgaaggctggatcttcgtcgtcgagatcgacgacaaggaacagctcaacgacctgttggacccggacgactatgccgagctgctcgaagacgacgatcactga

SEQ ID NO: 117281 - protein, 131 aa, Xanthomonas axonopodis pv
MSEIPGDLKFLKSHEWARVESNGRVTVGISDHAQGLLGDLVYVELPGVGDTVQVGNGAAVVESVKAASDVYSPVSGTVVEVNSALSDKPETINEDAYGEGWIFVVEIDDKEQLNDLLDPDDYAELLEDDDH

SEQ ID NO: 117282 - DNA, 513 bp, Saccharomyces cerevisiae
  CDS (1)..(513)
atgttacgcactactagactatggaccacccgcatgcccgctgtgagcaaattgtttttgagaaacagctccggcaatgccctaaacaagaataaactaccatttttgtactcatcccaaggacctcaagccgtgaggtacacttcccaacatgagtggatagctgtgcatcaggacaagactgcctttgtcggaattacaaaatacgccactgattccttaggggacgctacctatgttgagttgccagaagtgggcactgagatttcccaaggtgagtcgctagggtccattgagtccgtcaagtcagcctccgagatctaccagcctgccgatggtaccgtagaggaaattaacactaatcttgaggaaaatccaggtgtggtgaacgaagatcctatgggtgacggctggctagtcaaaatgaagcttggtgagggcgttaatgtggaacaggtcgagggtctaatgtccttagaacagtacgaaaagacactggttcatgatgactga

SEQ ID NO: 117283 - protein, 170 aa, Saccharomyces cerevisiae
MLRTTRLWTTRMPAVSKLFLRNSSGNALNKNKLPFLYSSQGPQAVRYTSQHEWIAVHQDKTAFVGITKYATDSLGDATYVELPEVGTEISQGESLGSIESVKSASEIYQPADGTVEEINTNLEENPGVVNEDPMGDGWLVKMKLGEGVNVEQVEGLMSLEQYEKTLVHDD

SEQ ID NO: 117284 - DNA, 483 bp, Oryza sativa
  CDS (1)..(483)
atggccgccgccgccgccgcctcaagggcgctctgggcttgccgcaccgcctcctaccttcggatctcctccttccccagggctttctccaccgtccttaaagatctaaaatatgctgatactcatgagtgggtgaaggttgagggtgattcagcaaccataggggtcacagaccatgctcaggaccatttgggtgatgttgtgtatgttgagcttccagaagttggttccacagtatcacaaggaacgaactttggtgcggttgaaagtgtgaaagcaaccagtgatatcaatgcaccagtatctggagagattattcaagtaaatgatgaactaagtgaaaaaccaggatttataaatggaagtccatatgagaagggatggatcatcaaggttaagataagtgatccaagtgagttaaactcgctgatggatgatgagaagtacaagaagttttgtgaggaagaagatggcaaacactga

SEQ ID NO: 117285 - protein, 160 aa, Oryza sativa
MAAAAAASRALWACRTASYLRISSFPRAFSTVLKDLKYADTHEWVKVEGDSATIGVTDHAQDHLGDVVYVELPEVGSTVSQGTNFGAVESVKATSDINAPVSGEIIQVNDELSEKPGFINGSPYEKGWIIKVKISDPSELNSLMDDEKYKKFCEEEDGKH

SEQ ID NO: 117286 - DNA, 495 bp, Oryza sativa
  CDS (1)..(495)
atggctctgaggctgtgggctagctcagctgccaatgccctcaagatctcatgcagtggagccaccagggctgcacctgcctactcaatctccagatacttctccactgttcttgatgggttgaagtacagctcctctcatgagtgggtcaagaatgatggctctgtggccacaattggaattacagaccatgctcagggccatctgggagaggtggtgttcgtggagctgccggaggcgggggcgaaggtgagccagggaggtgcattcggcaacgtggagagtgtgaaggccaccagcgacatcaactcccccatctccggtgaggtcgtcgaggttaacgacaagctctctgagacacccggcctgattaactcaagcccgtacgaggacgggtggatgatcaaggtgaagccgagcagcccgtcggagctggacgccctgctggacccggccaagtacaccaagcactgcgaggaggaagacgctcactag

SEQ ID NO: 117287 - protein, 164 aa, Oryza sativa
MALRLWASSAANALKISCSGATRAAPAYSISRYFSTVLDGLKYSSSHEWVKNDGSVATIGITDHAQGHLGEVVFVELPEAGAKVSQGGAFGNVESVKATSDINSPISGEVVEVNDKLSETPGLINSSPYEDGWMIKVKPSSPSELDALLDPAKYTKHCEEEDAH

SEQ ID NO: 117288 - DNA, 471 bp, Brassica napus
  CDS (1)..(471)
atggctgcaagattcttgtgggcttccagggttgcttctcatctaaggatctccatcgcccaacgagggtttgcgtcagtggttttgaaggatctgaagtatgctgagtcacatgaatgggtgaagattgatgggaacaaagcaacctttggtataacggatcacgctcaggaccacttgggtgatgtggtctatgttgagttgcctgacttgggacgttccgtgtcacaaggtgagagctttggagcggttgagagtgtgaaagctaccagtgatatcaattctccagtctccggtaaggtggttgaagtcaatgaggtgctgagcgagtcccctggattggtgaacacgagcccgtatgaagatggatggatcataaaggtggagctgagtgatgcagaagaggcaaagaagctgatggattctgacaagtactccaagttctgcgaagaagaagacgccaagcactga

SEQ ID NO: 117289 - protein, 156 aa, Brassica napus
MAARFLWASRVASHLRISIAQRGFASVVLKDLKYAESHEWVKIDGNKATFGITDHAQDHLGDVVYVELPDLGRSVSQGESFGAVESVKATSDINSPVSGKVVEVNEVLSESPGLVNTSPYEDGWIIKVELSDAEEAKKLMDSDKYSKFCEEEDAKH

SEQ ID NO: 117290 - DNA, 501 bp, Brassica napus
  CDS (1)..(501)
atggcactgagaatgtgggcttcttctacagcaaacgctctcaagctttcttcttctgtctccaagtctcagctctctcctgctttctccatctctagatgcttctcttcagtgctggagggattgaagtatgcaaattcacatgagtgggttaaacatgaaggctctgttgccactattggtattactgaccatgctcaggaccatttaggagaagtggtgtttgtggaactgccagaggaaaatggttcggtgagaaaagagaaaagctttggagctgtggagagtgtgaaggcgacaagtgagattttatctcccatctcaggtgaagtcattgaggttaacaagacgctctcagaagcaccaggcttgatcaactcaagcccctatgaagatggatggatgatcaaagtgaagccgagcaacccctcagagttagaatctttgatgggttcaaaggaatacaccaagttctgtgaagaggaagacgctgctcattag

SEQ ID NO: 117291 - protein, 166 aa, Brassica napus
MALRMWASSTANALKLSSSVSKSQLSPAFSISRCFSSVLEGLKYANSHEWVKHEGSVATIGITDHAQDHLGEVVFVELPEENGSVRKEKSFGAVESVKATSEILSPISGEVIEVNKTLSEAPGLINSSPYEDGWMIKVKPSNPSELESLMGSKEYTKFCEEEDAAH

SEQ ID NO: 117292 - DNA, 480 bp, Zea mays
  CDS (1)..(480)
atggccatggccgccgcctcctcccggctgttctgggcgtcccgcgccgccgcctacctcaggatctccaccttccccagggccttcgccaccgtgctgaaggatctgaagtatgctgacactcatgaatgggtgaaagttgagggtgattcagcaaccgtggggattactgaccatgcccaggatcatttgggtgatgttgtttttgtggagctaccagaagttggcatcagtgtatcccagggaaagaactttggtgctgttgagagtgtgaaggcaaccagcgatatcaattcaccagtgtctggagaggtggttgaagtgaacgagaaactaagtgaggagcctggattggttaatgcaagtccatatgagaagggatggattatcaaggtcaagctcagcaattcaggtgacctcaattcgctcatggatgatgataagtactcgaaattctgtgaagaagaagacaaccattga

SEQ ID NO: 117293 - protein, 159 aa, Zea mays
MAMAAASSRLFWASRAAAYLRISTFPRAFATVLKDLKYADTHEWVKVEGDSATVGITDHAQDHLGDVVFVELPEVGISVSQGKNFGAVESVKATSDINSPVSGEVVEVNEKLSEEPGLVNASPYEKGWIIKVKLSNSGDLNSLMDDDKYSKFCEEEDNH

SEQ ID NO: 117294 - DNA, 471 bp, Brassica napus
  CDS (1)..(471)
atggctgcaagattcttgtgggcttccagagtcgcttctcatctaaggatctccatcgcccaacgagggtttgcgtcagtggttttgaaggatctgaagtatgctgagtcacatgaatgggtgaagattgatgggaacaaagcaacctttggtataacggatcacgcgcaggaccacttgggtgatgtggtctatgttgagttgcctgacttgggacgttccgtgtcacaaggtgagagctttggagcggttgagagtgtgaaagctaccagtgatatcaattctccagtctccggtaaggtggttgaagtcaatgaggtgctgagcgagtcccctggattggtgaacacgagcccgtatgaagatggatggatcataaaggtggagctgagtgatgcagaagaggcaaagaagctgatggattctgacaagtactccaagttctgcgaagaagaagacaccaagcactga

SEQ ID NO: 117295 - protein, 156 aa, Brassica napus
MAARFLWASRVASHLRISIAQRGFASVVLKDLKYAESHEWVKIDGNKATFGITDHAQDHLGDVVYVELPDLGRSVSQGESFGAVESVKATSDINSPVSGKVVEVNEVLSESPGLVNTSPYEDGWIIKVELSDAEEAKKLMDSDKYSKFCEEEDTKH

SEQ ID NO: 117296 - DNA, 471 bp, Brassica napus
  CDS (1)..(471)
atggctgctaggtttttgtgggcttctagggctgcttctcatctaaggatctccgttgcccagcgagggtttgcttccgtggtgttgaaggatttgaaatatgctgattcacatgaatgggtgaagattgatgggaataaagcgacatttggtataacggatcacgcgcaggaccacttgggcgatgtggtctatgttgagcttcctgatctgggacgttcggtgtcacaaggtgagagctttggagcggttgaaagtgtgaaagcaactagtgatatcaattctccagtctctggtaaggtggttgaagtcaatgaggtgctgaccgagtcccctggattggtgaacacgagcccatatgaagaaggatggatcataaaggtggagctgagtgatgcgggcgaggtagagaagctgatggattcagacaagtactctaagttctgtgaagaagaggacgccaagcactga

SEQ ID NO: 117297 - protein, 156 aa, Brassica napus
MAARFLWASRAASHLRISVAQRGFASVVLKDLKYADSHEWVKIDGNKATFGITDHAQDHLGDVVYVELPDLGRSVSQGESFGAVESVKATSDINSPVSGKVVEVNEVLTESPGLVNTSPYEEGWIIKVELSDAGEVEKLMDSDKYSKFCEEEDAKH

SEQ ID NO: 117298 - DNA, 501 bp, Brassica napus
  CDS (1)..(501)
atggcactgagaatgtgggcttcctctacagcaaacgctcttaagctctcttcttctacctccaaatctcatctccttcctgctttctccatctccagatgcttctcctcagtgttggaaggactcaagtatgcaaattcacacgagtgggtgaaacatgatggctcggtggctaccattggcatcactgaccatgcccaggaccatctaggagaagttgtgtttgtggagctgccagaagagaaaagctcagtgagcaaagaaaagaactttggagctgtggagagtgtgaaggccacaagtgagattctatctccaatctctggtgaagtcattgaggttaacacaaagctaaccgattcacctggtttgatcaactcaagcccctatgaagatggttggatgataaaggtgaaaccaagcaaccctgcagagttggaaaccttgatgggtccaaaggaatacaccaagttctgcgaagaggaagatgctgctcactag

SEQ ID NO: 117299 - protein, 166 aa, Brassica napus
MALRMWASSTANALKLSSSTSKSHLLPAFSISRCFSSVLEGLKYANSHEWVKHDGSVATIGITDHAQDHLGEVVFVELPEEKSSVSKEKNFGAVESVKATSEILSPISGEVIEVNTKLTDSPGLINSSPYEDGWMIKVKPSNPAELETLMGPKEYTKFCEEEDAAH

SEQ ID NO: 117300 - DNA, 501 bp, Brassica napus
  CDS (1)..(501)
atggcactgagaatgtgggcttcctctacagcaaacgctctcaagctctcttcttctgcctccaaatctcatctccttccagctttctccatctctagatgcttctcctcagtgttggaaggacttaaatatgcaaattcacatgagtgggtgaaacatgaaggctcagtggctactattggcatcagtgaccatgcccaggatcatttaggagaagttgtgtttgtggagctgcctgaagaaaaaagttcagtgaccaaagaaaaaaactttggagcagtggaaagtgtgaaggcaacaagtgagattatatctccaatctctggtgaagtcatcgaggttaacacaaagctcgctgattcacctggcttgattaactcaagcccttacgaagatggttggatgataaaggtgaaaccaagcaaccccgcagagctggaatccttgatgggtccaaaggaatacaccaagttctgcgaagaggaagatgctgctcactag

SEQ ID NO: 117301 - protein, 166 aa, Brassica napus
MALRMWASSTANALKLSSSASKSHLLPAFSISRCFSSVLEGLKYANSHEWVKHEGSVATIGISDHAQDHLGEVVFVELPEEKSSVTKEKNFGAVESVKATSEIISPISGEVIEVNTKLADSPGLINSSPYEDGWMIKVKPSNPAELESLMGPKEYTKFCEEEDAAH

SEQ ID NO: 117302 - DNA, 471 bp, Brassica napus
  CDS (1)..(471)
atggctgctaggtttttgtgggcttctagggctgcttctcatctaaggatctccgttgcccagcgagggtttgcttccgtggtgttgaaggatttgaaatatgctgattcacatgaatgggtgaagattgatgggaataaagcgacgtttggtataacggatcacgcgcaggaccacttgggcgatgtggtctatgttgagcttcctgatctgggacgttcggtgtcacaaggtgagagctttggagcggttgaaagtgtgaaagcaactagtgatatcaattctccagtctctggtaaggtggttgaagtcaatgaggtgctgacggagtcccctggattggtgaacacgagcccatatgaagaaggatggatcataaaggtggagctgagtgatgcgggaaaggcaaaaaagctgatggattcagacaagtactctaagttctgtgaagaagaggacgccaagccctga

SEQ ID NO: 117303 - protein, 156 aa, Brassica napus
MAARFLWASRAASHLRISVAQRGFASVVLKDLKYADSHEWVKIDGNKATFGITDHAQDHLGDVVYVELPDLGRSVSQGESFGAVESVKATSDINSPVSGKVVEVNEVLTESPGLVNTSPYEEGWIIKVELSDAGKAKKLMDSDKYSKFCEEEDAKP

SEQ ID NO: 117304 - DNA, 501 bp, Brassica napus
  CDS (1)..(501)
atggcactgagaatgtgggcttcttccacagcaaacgctctcaagctctcctcttctgcttccaaatcccatctccttccagctttctccatctccagatgcttctcctcagtgttggaaggactcaagtatgcaaattcacatgagtgggtcaaacatgaaggctcagtggctaccattggcatcagtgaccatgcccaggaccatttaggagaagttgtgtttgtggagctgccagaagagaaaagttcagtgagcaaagaaaaaaactttggagcagtggagagtgtaaaggccacaagtgagattatatctccaatctctggtgaagtcattgaggttaacacaaagctcgccgattcacctggtttgattaactcaagcccctatgaagaaggttggatgataaaggtgaaaccaagcaacccagcagagttggaatccttgatgggtccaaaggaatacacaaagttctgcgaagaggaagacgcggctcactag

SEQ ID NO: 117305 - protein, 166 aa, Brassica napus
MALRMWASSTANALKLSSSASKSHLLPAFSISRCFSSVLEGLKYANSHEWVKHEGSVATIGISDHAQDHLGEVVFVELPEEKSSVSKEKNFGAVESVKATSEIISPISGEVIEVNTKLADSPGLINSSPYEEGWMIKVKPSNPAELESLMGPKEYTKFCEEEDAAH

SEQ ID NO: 117306 - DNA, 468 bp, Glycine max
  CDS (1)..(468)
atggcttgcagacagttgtgggcttcaagagctgcttcctacctcaggatctccgtgtttcacagaagcttctctaacgttttgaatgatctgaagtatgctgattctcatgagtgggtgaaggttgatggaaattctgcaactgttggcataactgatcatgcccaagatcatttgggtgaggttgtgtatgttgaattgcctgaagtgggagccaccgtgacacaaggagaaggttttggtgcagctgaaagtgtgaaggcaactagtgatattaactctcctgtttcaggaaaagtggtcgaagttaatgaaaaacttaccagttctcctgctttggtcaacacaagcccttacaaagatggatggataattaaagtggagatgagtgacagtggtgaactaaacaacctgatggattcagaaaagtactccaagttctgtgaagaagaagattccaaccattga

SEQ ID NO: 117307 - protein, 155 aa, Glycine max
MACRQLWASRAASYLRISVFHRSFSNVLNDLKYADSHEWVKVDGNSATVGITDHAQDHLGEVVYVELPEVGATVTQGEGFGAAESVKATSDINSPVSGKVVEVNEKLTSSPALVNTSPYKDGWIIKVEMSDSGELNNLMDSEKYSKFCEEEDSNH

SEQ ID NO: 117308 - DNA, 498 bp, Glycine max
  CDS (1)..(498)
atggcactcaggatgtgggcttcttccactgccaatgcactcaaactctcttctgtctccagacctcatctcttgcctcctttttctttctccagatgcttatcttccgtcttggatggacttaagtacgctgattcacatgaatgggtcaagcacgaaggctcagtcgccaccattggtatcactgaccatgcccaggaccatcttggagaggttgtgtatgtggagctgccagaaccaggtggcacagtttccaagaagtctggcttcggagccgttgaaagtgttaaagcaacaagtgatataaactctccaatctcgggggagatcgttgaggttaacaaaaagctcacagaaacgcctggcctggtcaactcaagcccatacgaagatggatggatgatcaaagtaaagccaagcgatccatctgaattagattccttgatgggtccaaaggagtacacaaaattttgtgaggaagaagatgcaagtcattaa

SEQ ID NO: 117309 - protein, 165 aa, Glycine max
MALRMWASSTANALKLSSVSRPHLLPPFSFSRCLSSVLDGLKYADSHEWVKHEGSVATIGITDHAQDHLGEVVYVELPEPGGTVSKKSGFGAVESVKATSDINSPISGEIVEVNKKLTETPGLVNSSPYEDGWMIKVKPSDPSELDSLMGPKEYTKFCEEEDASH

SEQ ID NO: 117310 - DNA, 498 bp, Glycine max
  CDS (1)..(498)
atggcactcaggatgtgggcttcttccactgccaatgcactcaaagtctcttctacctccagacctcatctcttgcatcctttttctttctccagatgcttgtcttccgtcttggatggacttaagtatgcagattcacacgaatgggtcaagcacgaaggctcagtcgccaccattggtatcactgaccatgcccaggaccatcttggagaggttgtgtatgtggagctgccagaatcaggtggcacagttacccagaagtctggcttcggagccgttgaaagtgttaaagcaacaagtgacataaactctccaatctcgggggagattgttgaggttaacaaaaagctcacagagacacctggcctggtcaactcaagcccatacgaagatggatggatgatcaaagtaaagccaagtgatccatctgaattagattccttgatgggtccaaaagagtacacaaaattttgtgaagaagaagatgctagtcattaa

SEQ ID NO: 117311 - protein, 165 aa, Glycine max
MALRMWASSTANALKVSSTSRPHLLHPFSFSRCLSSVLDGLKYADSHEWVKHEGSVATIGITDHAQDHLGEVVYVELPESGGTVTQKSGFGAVESVKATSDINSPISGEIVEVNKKLTETPGLVNSSPYEDGWMIKVKPSDPSELDSLMGPKEYTKFCEEEDASH

SEQ ID NO: 117312 - DNA, 468 bp, Glycine max
  CDS (1)..(468)
atggcttgcaggcaattgtgggcttcaagagctgcctcttacctgaggatctctgtgtttcacagaggcttttctaatgttgttaaagatttgaagtatgctgattctcatgagtgggtgaaagttgatgaaaattctgcaaccgtcggcataactgatcatgcccaagatcatttaggtgatgttgtatatgttgaattgccagaagtgggagcagctgtaacacaaggaggtagttttggtgcagttgaaagtgtgaaggcaactagtgacattaactctcctgtttcaggaaaagttgttgaagttaatgaagcgcttaacagctctcctgctttgatcaattcaagcccttataaagatggatggataattaaagttgaaataaatgacaatggtgaactaaacaacttgatggattcagatcaatactccaaattctgtgaagaagaagattccaagcactga

SEQ ID NO: 117313 - protein, 155 aa, Glycine max
MACRQLWASRAASYLRISVFHRGFSNVVKDLKYADSHEWVKVDENSATVGITDHAQDHLGDVVYVELPEVGAAVTQGGSFGAVESVKATSDINSPVSGKVVEVNEALNSSPALINSSPYKDGWIIKVEINDNGELNNLMDSDQYSKFCEEEDSKH

SEQ ID NO: 117314 - DNA, 468 bp, Glycine max
  CDS (1)..(468)
atggcttgcaggcaattgtgggcttcaagagctgcctcttacctgaggatctctgtgtttcacagaggcttttctaatgttgttaaagatttgaagtatgctgattctcatgagtgggtgaaagttgatgaaaattctgcaaccgtcggcataactgatcatgcccaagatcatttaggtgatgttgtatatgttgaattgccagaagtgggagcagctgtaacacaaggaggtagttttggtgcagttgaaagtgtgaaggcaactagtgacattaactctcctgtttcaggaaaagttgttgaagttaatgaagcgcttaacagctctcctgctttgatcaattcaagcccttataaagatggatggataattaaagttgaaataagtgacaatggtgaactaaacaacttgatggattcagatcaatactccaagttctgtgaagaagaagattccaagcactga

SEQ ID NO: 117315 - protein, 155 aa, Glycine max
MACRQLWASRAASYLRISVFHRGFSNVVKDLKYADSHEWVKVDENSATVGITDHAQDHLGDVVYVELPEVGAAVTQGGSFGAVESVKATSDINSPVSGKVVEVNEALNSSPALINSSPYKDGWIIKVEISDNGELNNLMDSDQYSKFCEEEDSKH

SEQ ID NO: 117316 - DNA, 498 bp, Glycine max
  CDS (1)..(498)
atggcactcaggatgtgggcttcttccactgccaatgcactcaaactctcttctgtctccagacctcatctcttgcctcctttttctttctccagatgcttatcttccgtcttggatggacttaagtacgctgattcacatgaatgggtcaagcacgaaggctcagtcgccaccattggtatcactgaccatgcccaggaccatcttggagaggttgtgtatgtggagctgccagaaccaggtggcacagtttccaagaagtctggcttcggagccgttgaaagtgttaaagcaacaagtgatataaactctccaatctcgggggagatcgttgaggttaacaaaaagctcacagaaacgcctggcctgatcaactcaagcccatacgaagatggatggatgatcaaagtaaagccaagcgatccatctgaattagattccttgatgggtccaaaggagtacacatcattttgtgaggaagaagatgcaagtcattaa

SEQ ID NO: 117317 - protein, 165 aa, Glycine max
MALRMWASSTANALKLSSVSRPHLLPPFSFSRCLSSVLDGLKYADSHEWVKHEGSVATIGITDHAQDHLGEVVYVELPEPGGTVSKKSGFGAVESVKATSDINSPISGEIVEVNKKLTETPGLINSSPYEDGWMIKVKPSDPSELDSLMGPKEYTSFCEEEDASH

SEQ ID NO: 117318 - DNA, 471 bp, Helianthus annuus
  CDS (1)..(471)
atggctatggcatcatcaaggttatgggcttccaaagctgcttcatacctcaggatctccactttcaacagaccttttgcaactcttgtgaaggatctaaagtatgctgactcacatgaatgggcaaaaatcgaaggtaactcagcaaccatcgggattacagaccatgcccaggatcacttgggtgatgtggtgtatgttgagttaccagaagttgggacagaagtaacccaaggcaacggttttggtgcagttgaaagcgttaaggctaccagtgatattaactcccctgtttctggcaaagtggtccaagtcaatgaagaactcaacacctcaccaggcttggtaaatggaagcccgtatgagaatggatggattataaaggtggagatgagcaatgtggatgaagtcaaatctctaatggacagtgaacagtattctaagttctgtgaagaagaagatgaccactga

SEQ ID NO: 117319 - protein, 156 aa, Helianthus annuus
MAMASSRLWASKAASYLRISTFNRPFATLVKDLKYADSHEWAKIEGNSATIGITDHAQDHLGDVVYVELPEVGTEVTQGNGFGAVESVKATSDINSPVSGKVVQVNEELNTSPGLVNGSPYENGWIIKVEMSNVDEVKSLMDSEQYSKFCEEEDDH

SEQ ID NO: 117320 - DNA, 468 bp, Helianthus annuus
  CDS (1)..(468)
atggcatcaagactctgggcatctaaagctgcttcatacctcaagatctctaccttcaacttcaacagaggctttgcttccgtggtgaaggatttgaagtacgccgagtctcacgaatgggtcaaagtcgatggtaagtcagccaccgttggcatcacagaccatgcccaggatcacctaggagacgtggtctatgtcgaattaccggaggttggagccgctgtgacccaaggcagcagtttcggcgcagtcgagagtgtaaaggccaccagtgatattaattcccctgtttcaggaaaggttgttgaagtcaatgaagagctcagtagctcacctggcttggttaatggaagcccgtatgagaatggttggatcataaaggtggagataagtgacactaatgaggtaaactcgttaatggactcggaacagtattcaaagttctgtgaagaagaagataatcactag

SEQ ID NO: 117321 - protein, 155 aa, Helianthus annuus
MASRLWASKAASYLKISTFNFNRGFASVVKDLKYAESHEWVKVDGKSATVGITDHAQDHLGDVVYVELPEVGAAVTQGSSFGAVESVKATSDINSPVSGKVVEVNEELSSSPGLVNGSPYENGWIIKVEISDTNEVNSLMDSEQYSKFCEEEDNH

SEQ ID NO: 117322 - DNA, 477 bp, Hordeum vulgare
  CDS (1)..(477)
atggccatggccgcctccagatcgctctgggcctcccgcgccgcctccttcctcaggatctccaccttccccagggccttctccaccgtgctgaaggacttgaagtatgctgacacccatgaatgggtgaaggttgagggtgattcggcaaccgttgggattacagaccatgcccaggaccatttgggtgatgttgtgtatgtggagctgccagaagtaggtgcttctgtaactcagggaacgaactttggtgccgtcgaaagtgtgaaggcaaccagtgatatcaactcaccggtgtctggagaggtcattgctgtgaatgatgaactactagagaaaccagcattggtcaatggagatccatatgagggcggctggataatcaaggtcaaggtcagcaatgcaggtgagctcaactcgctgatggatgacgagaagtactcgaaattctgcgaggaagaggacagcaagcattaa

SEQ ID NO: 117323 - protein, 158 aa, Hordeum vulgare
MAMAASRSLWASRAASFLRISTFPRAFSTVLKDLKYADTHEWVKVEGDSATVGITDHAQDHLGDVVYVELPEVGASVTQGTNFGAVESVKATSDINSPVSGEVIAVNDELLEKPALVNGDPYEGGWIIKVKVSNAGELNSLMDDEKYSKFCEEEDSKH

SEQ ID NO: 117324 - DNA, 495 bp, Hordeum vulgare
  CDS (1)..(495)
atggctctgaggctgtgggcgagctcagctgccaatgccctcaagatttcaagcagcggcgccagggccgctgcccccgcctactcgatctccagatacttctccactgttattgatggcttgaagtacacttcctcccacgagtgggtcaagaacgacggctccgtggccacgattggcatcagtgaccacgcccagggccatctcggggaggtggtgttcgtggagctgccggaggccggcacgaaggtgagccagggcggagccttcggcaacgtggagagtgtgaaggccaccagcgacgtcaactcgcccatctccggcgaggtcgtcgaggtcaactcgaagctgtccgaggcccccggcctgatcaactcgagcccgtacgaggaggggtggatgatcaaggtgaagccgagcagccccgcggagctggagggcctgctggactcggccaagtacaccaagcactgcgaggaggaggacgcccactag

SEQ ID NO: 117325 - protein, 164 aa, Hordeum vulgare
MALRLWASSAANALKISSSGARAAAPAYSISRYFSTVIDGLKYTSSHEWVKNDGSVATIGISDHAQGHLGEVVFVELPEAGTKVSQGGAFGNVESVKATSDVNSPISGEVVEVNSKLSEAPGLINSSPYEEGWMIKVKPSSPAELEGLLDSAKYTKHCEEEDAH

SEQ ID NO: 117326 - DNA, 495 bp, Hordeum vulgare
  CDS (1)..(495)
atggctctgaggctgtgggcgagctcagctgccaatgccctcaagatttcaagcagcggcgccagggccgctgcccccgcctactcgatctccagatacttctccactgttattgatggcttgaagtacacttcctcccacgagtgggtcaagaacgacggctccgtggccacgattggcatcagtgaccacgcccagggccatctcggggaggtggtgttcgtggagctgccggaggccggcacgaaggtgagccagggcggagccttcggcaacgtggagagtgtgaaggccaccagcgacgtcaactcgcccatctccggcgaggtcgtcgaggtcaactcgaagctgtccgaggcccccggcctgatcaactcgagcccgtacgaggaggggtggatgatcaaggtgaagccgagcagccccgcggagctggagggcctgctggactcggccaattacaccaagcactgcgaggaggaggacgcccactag

SEQ ID NO: 117327 - protein, 164 aa, Hordeum vulgare
MALRLWASSAANALKISSSGARAAAPAYSISRYFSTVIDGLKYTSSHEWVKNDGSVATIGISDHAQGHLGEVVFVELPEAGTKVSQGGAFGNVESVKATSDVNSPISGEVVEVNSKLSEAPGLINSSPYEEGWMIKVKPSSPAELEGLLDSANYTKHCEEEDAH

SEQ ID NO: 117328 - DNA, 492 bp, Linum usitatissimum
  CDS (1)..(492)
atggcactaagaatatgggcatcttcaactgctaatgctttgcgactctcagttgcctccaaagctcctgctttctcttccctctccagatgcttctccactgtaatggatggagttaagtacgcaaagtcacacgagtgggtgaagcatgatggttctgtggctcttgttggcatcactgatcacgctcaggatcatcttggggaagttgtgttcgtggagttgccggagagtgggagttcagtgagccaaggaggaagctttgctaacattgagagtgttaaagctaccagtgatgtcaactccccaatttcaggggacattgttgaagttaacaccaagctcactgaaaccccaggactggtgaactcaagcccatatgaagatgggtggatgataaaggtgaagccaagcaacccagcagagttggagagcttgatgggtccaaccgaatacaccaaattctgtgatgaagaagatgctgctcattga

SEQ ID NO: 117329 - protein, 163 aa, Linum usitatissimum
MALRIWASSTANALRLSVASKAPAFSSLSRCFSTVMDGVKYAKSHEWVKHDGSVALVGITDHAQDHLGEVVFVELPESGSSVSQGGSFANIESVKATSDVNSPISGDIVEVNTKLTETPGLVNSSPYEDGWMIKVKPSNPAELESLMGPTEYTKFCDEEDAAH

SEQ ID NO: 117330 - DNA, 477 bp, Triticum aestivum
  CDS (1)..(477)
atggccatggccgcctccagatcgctctgggcctcccgcgccgcctcctacctcaagatctccgccttccccagggccttctccaccgtgctgaaggatctgaagtatgctgaaacccatgaatgggtaaaggttgatggtgattccgcaaccgttgggattacagaccatgcccaggaccatttgggtgatgttgtatatgtggagctgccagaagttggcgcttctgtatctcagggaacaaactttggtgctgttgaaagtgtgaaggcaaccagtgacatcaactcgccggtgtctggagaggtcattgcagtgaatgacgaactactagagaaaccagcattggtcaatggagatccatatgagggcggctggatcatcaaggtcaaggtcagcgatgcaggtgagctcaactcactgatggacgacaagaagtactcaaaattctgcgaggaagaggacagcaagcattaa

SEQ ID NO: 117331 - protein, 158 aa, Triticum aestivum
MAMAASRSLWASRAASYLKISAFPRAFSTVLKDLKYAETHEWVKVDGDSATVGITDHAQDHLGDVVYVELPEVGASVSQGTNFGAVESVKATSDINSPVSGEVIAVNDELLEKPALVNGDPYEGGWIIKVKVSDAGELNSLMDDKKYSKFCEEEDSKH

SEQ ID NO: 117332 - DNA, 495 bp, Triticum aestivum
  CDS (1)..(495)
atggctctgaggctgtgggcgagctcagctgccaatgccctcaagatttcaagcagcggcgccagggctgctgccccggcttattcgatctccagatacttctccaccgttattgatggcttgaagtacacttcctcccacgagtgggtcaagaacgacggctccgtggccacgattggcatcagtgaccacgcccagggccatctcggggaggtggtgttcgtggagctgccggaggccggcacgaaggtgagccagggcggagccttcggcaacgtggagagtgtgaaggccaccagcgacgtcaactcgcccatctccggcgaggtcgtcgaggtcaactcaaagctgtccgagacccccggcctgatcaactcgagcccgtacgaggaggggtggatgatcaaggtgaagccgagcagcccggcggagctggagggcctgctggactcggccaagtacaccaagcactgcgaggaggaggacgcccactag

SEQ ID NO: 117333 - protein, 164 aa, Triticum aestivum
MALRLWASSAANALKISSSGARAAAPAYSISRYFSTVIDGLKYTSSHEWVKNDGSVATIGISDHAQGHLGEVVFVELPEAGTKVSQGGAFGNVESVKATSDVNSPISGEVVEVNSKLSETPGLINSSPYEEGWMIKVKPSSPAELEGLLDSAKYTKHCEEEDAH

SEQ ID NO: 117334 - DNA, 477 bp, Triticum aestivum
  CDS (1)..(477)
atggccatggccgcctccagatcgctctgggcctcccgcgccgcctcctacctcaagatctccgccttccccagggccttctccaccgtgctgaaggatctgaagtatgctgaaacccatgaatgggtcaaggttgatggtgattccgcaatcgttgggattacagaccatgcccaggaccatttgggtgatgttgtgtatgtggagctgccagaagttggcgcctctgtctcccagggaaccaactttggtgctgttgaaagtgtgaaggcaaccagcgacatcaactcgccggtgtctggagaggtcattgcagtgaatgatgaactactagagaaaccagcattggtcaatggagatccatatgcgggcggctggatcatcaaggtcaaggtcagcgatgcaggtgagctcaactcactgatggaccacaagaagtactcgaaattctgcgaggaagaggacagcaagcattaa

SEQ ID NO: 117335 - protein, 158 aa, Triticum aestivum
MAMAASRSLWASRAASYLKISAFPRAFSTVLKDLKYAETHEWVKVDGDSAIVGITDHAQDHLGDVVYVELPEVGASVSQGTNFGAVESVKATSDINSPVSGEVIAVNDELLEKPALVNGDPYAGGWIIKVKVSDAGELNSLMDHKKYSKFCEEEDSKH

SEQ ID NO: 117336 - DNA, 495 bp, Triticum aestivum
  CDS (1)..(495)
atggctctgaggctgtgggcgagctcagctgtcaatgccctcaagatttcaagcaggggtgccagggctgttgccccggcctattcgatctccagatacttctccactgttattgatggcttgaagtacacttcctcccacgagtgggtcaagaacgacggctccgtggccacgattggcatcagtgaccacgcccagggccatctcggggaggtggtgttcgtggagctgccggaggccggcaccaaggtgagccagggcggaaccttcggcaacgtggacagtgtgaaggccaccatcgacgtctactcgcccatctccggcgaggtcgtcgaggtcaactcaaagctgtccgagacccccggccttatcaactcgagcccttacgaagaggggtggatgatcaaggtgaagccgatcagcccggcggagctggagggcctgctggactcggccaagtacaccaagcactgcgaggaggaggacgcccactag

SEQ ID NO: 117337 - protein, 164 aa, Triticum aestivum
MALRLWASSAVNALKISSRGARAVAPAYSISRYFSTVIDGLKYTSSHEWVKNDGSVATIGISDHAQGHLGEVVFVELPEAGTKVSQGGTFGNVDSVKATIDVYSPISGEVVEVNSKLSETPGLINSSPYEEGWMIKVKPISPAELEGLLDSAKYTKHCEEEDAH

SEQ ID NO: 117338 - DNA, 480 bp, Zea mays
  CDS (1)..(480)
atggccatggccgccgcctcctcccggctgctctgggcgtcccgcgccgccgcctacctcaggatctccaccttccccagggccttctccaccgtgctgaaggatctgaagtatgctgacactcatgaatgggtgaaagttgagggtgattcagcaaccgtggggattactgaccatgcccaggatcatttgggtgatgttgtttttgtggagctaccagaagttggcatcagtgtatcccagggaaagaactttggtgctgttgagagtgtgaaggcaaccagcgatatcaattcaccagtgtctggagaggtggttgaagtgaacgagaaactaagtgaggagcctggattggttaatgcaagtccatatgagaagggatggattatcaaggtcaagctcagcaattcaggtgacctcaattcgctcatggatgatgataagtactcgaaattctgtgaagaagaagacaaccattga

SEQ ID NO: 117339 - protein, 159 aa, Zea mays
MAMAAASSRLLWASRAAAYLRISTFPRAFSTVLKDLKYADTHEWVKVEGDSATVGITDHAQDHLGDVVFVELPEVGISVSQGKNFGAVESVKATSDINSPVSGEVVEVNEKLSEEPGLVNASPYEKGWIIKVKLSNSGDLNSLMDDDKYSKFCEEEDNH

SEQ ID NO: 117340 - DNA, 495 bp, Zea mays
  CDS (1)..(495)
atggctctgaggatgtgggcgagctcagccgccaatgcgctcaagctctcggcgggcggcgccggagcccgggctgctgccttctctatctccaggttcttctccactgttcacgatgggttgaagtacactcagtctcacgaatgggtcaagacgacgggcgacgtcgccaccgttggcatcacggaccatgctcagggccacctgggagaggtggtgttcgtggagctgccggaacccggcacgaaggtggccgcgggaggacccttcggcaacgtggagagtgtcaaggccaccagcgacgtcaactccccgatctccggcgaggtcgtcgaggtcaatgccaaactgtcagagacgcccggcctgatcaacacgagcccgtacgaggacgggtggatgatcaaggtgaagccgagcagcccgggggaggcggacgccctgctggacgccgccaagtacaccaagcactgcgaggaggaagacgctcactag

SEQ ID NO: 117341 - protein, 164 aa, Zea mays
MALRMWASSAANALKLSAGGAGARAAAFSISRFFSTVHDGLKYTQSHEWVKTTGDVATVGITDHAQGHLGEVVFVELPEPGTKVAAGGPFGNVESVKATSDVNSPISGEVVEVNAKLSETPGLINTSPYEDGWMIKVKPSSPGEADALLDAAKYTKHCEEEDAH

SEQ ID NO: 117342 - DNA, 480 bp, Zea mays
  CDS (1)..(480)
atggccatggccgccgcctcctcccggctgctctgggcgtcccgcgccgccgcctacctcaggatctccaccttccccagggccttctccaccgtgctgaaggatctgaagtatgctgacactcatgaatgggtgaaagttgagggtgattcagcaaccgtggggattactgaccatgcccaggaccatttgggtgatgttgtttatgtggagctaccagaagctggcatcagtgtatcccagggaaagaactttggtgctgttgagagtgtgaaggcaaccagcgatatcaattcaccagtgtctggagaggtggttgaagtgaacgagaaactaagtgaggagcctggattggtgaatgcaagtccatatgagaagggatggattatcaaggtcaagctcagcaattcaggtgacctcaattcgctcatggatgatgataagtactcgaaattctgcgaggaagaagacggtcattga

SEQ ID NO: 117343 - protein, 159 aa, Zea mays
MAMAAASSRLLWASRAAAYLRISTFPRAFSTVLKDLKYADTHEWVKVEGDSATVGITDHAQDHLGDVVYVELPEAGISVSQGKNFGAVESVKATSDINSPVSGEVVEVNEKLSEEPGLVNASPYEKGWIIKVKLSNSGDLNSLMDDDKYSKFCEEEDGH

SEQ ID NO: 117344 - DNA, 507 bp, Zea mays
  CDS (1)..(507)
atggctctgaggatgtgggcgagctcagccgccaatgcgctcaagctctcggcgggcggcggcggagcccgggctgctgctgccggcccggccttctctatctccaggttcttctccactgttcacgatgggttgaagtacactcagtctcacgaatgggtcaagacgacgggcgacgtcgccaccgttggcatcacggaccatgctcagggccacctgggagaggtggtgttcgtggagctgccggaacccggcacgaaggtcgccgcgggaggacccttcggcaacgtggagagtgtcaaggccaccagcgacgtcaactccccgatctccggcgaggtcgtcgaggtcaatgccaaactgtcagagacgcccggcctgatcaacacgagcccgtacgaggacgggtggatgatcaaggtgaagccgagcagcccgggggaggcggacgccctgctggacgccgccaagtacaccaagcactgcgaggaggaagacgctcactag

SEQ ID NO: 117345 - protein, 168 aa, Zea mays
MALRMWASSAANALKLSAGGGGARAAAAGPAFSISRFFSTVHDGLKYTQSHEWVKTTGDVATVGITDHAQGHLGEVVFVELPEPGTKVAAGGPFGNVESVKATSDVNSPISGEVVEVNAKLSETPGLINTSPYEDGWMIKVKPSSPGEADALLDAAKYTKHCEEEDAH

SEQ ID NO: 117346 - DNA, 483 bp, Zea mays
  CDS (1)..(483)
atggccatggccgccgcgtcccggtcccgggcgctgtgggcgtcccgcgccgccgcctacctcaggatctccaccttccccagggccttctccaccgtgctgaaggatctgaaatatgctgacactcatgaatgggtgaaggttgagggcgattcagcaaccgtggggattactgaccatgctcaggaccatttgggtgatgttgtctacgtggagctgccagaagttggcgtcagtgtatcccaggggaagaacttcggtgctgtcgagagcgtgaaggcgaccagcgatatcaattcgccagtgtccggagaggtggttgaggtgaaccggaagctaagcgaggagcctggattggtgaacgcaagcccgtacgagaaggggtggattatcaaggtcaagctcagcgattcaggcgagctcagttcgctcatggatggtgacaagtactcgaaattctgcgaggaagaagacggtcattga

SEQ ID NO: 117347 - protein, 160 aa, Zea mays
MAMAAASRSRALWASRAAAYLRISTFPRAFSTVLKDLKYADTHEWVKVEGDSATVGITDHAQDHLGDVVYVELPEVGVSVSQGKNFGAVESVKATSDINSPVSGEVVEVNRKLSEEPGLVNASPYEKGWIIKVKLSDSGELSSLMDGDKYSKFCEEEDGH

SEQ ID NO: 117348 - DNA, 25 bp, Artificial sequence
  primer
atgaagcataccacatcgacaatgt

SEQ ID NO: 117349 - DNA, 25 bp, Artificial sequence
  primer
tcagtcatcatgaaccagtgtcttt

SEQ ID NO: 117350 - protein, 133 aa, Artificial sequence
  consensus sequence
  Variant (2)..(4): Xaa in position 2 to 4 is any amino acid
  Variant (8)..(11): Xaa in position 8 to 11 is any amino acid
  Variant (12)..(27): Xaa in position 12 to 27 is any or no amino acid
  Variant (31)..(32): Xaa in position 31 to 32 is any amino acid
  Variant (34)..(36): Xaa in position 34 to 36 is any amino acid
  Variant (40)..(40): Xaa in position 40 is any amino acid
  Variant (42)..(42): Xaa in position 42 is any amino acid
  Variant (44)..(44): Xaa in position 44 is any amino acid
  Variant (45)..(45): Xaa in position 45 is any or no amino acid
  Variant (48)..(48): Xaa in position 48 is any amino acid
  Variant (49)..(49): Xaa in position 49 is any or no amino acid
  Variant (51)..(62): Xaa in position 51 to 62 is any amino acid
  Variant (67)..(68): Xaa in position 67 to 68 is any amino acid
  Variant (70)..(73): Xaa in position 70 to 73 is any amino acid
  Variant (75)..(76): Xaa in position 75 to 76 is any amino acid
  Variant (78)..(82): Xaa in position 78 to 82 is any amino acid
  Variant (84)..(85): Xaa in position 84 to 85 is any amino acid
  Variant (87)..(89): Xaa in position 87 to 89 is any amino acid
  Variant (91)..(93): Xaa in position 91 to 93 is any amino acid
  Variant (95)..(96): Xaa in position 95 to 96 is any amino acid
  Variant (98)..(100): Xaa in position 98 to 100 is any amino acid
  Variant (101)..(105): Xaa in position 101 to 105 is any or no amino acid
  Variant (107)..(117): Xaa in position 107 to 117 is any amino acid
  Variant (118)..(126): Xaa in position 118 to 126 is any or no amino acid
  Variant (128)..(132): Xaa in position 128 to 132 is any amino acid
YXXXHEWXXXXXXXXXXXXXXXXXXXXGITXXAXXXLGDXVXVXXLPXXGXXXXXXXXXXXXESVKXXSXXXXPXXGXXXXXNXXLXXXPXXXNXXPXXXXXXXXWXXXXXXXXXXXXXXXXXXXXLXXXXXY

SEQ ID NO: 117351 - protein, 23 aa, Artificial sequence
  protein pattern
  Variant (2)..(3): Xaa in position 2 to 3 is any or no amino acid
  Variant (7)..(7): Xaa in position 7 is Ala, Ser or Thr
  Variant (8)..(8): Xaa in position 8 is Ala, Thr or Val
  Variant (9)..(9): Xaa in position 9 is Glu or Ser
  Variant (10)..(10): Xaa in position 10 is Asp, Glu or Gly
  Variant (11)..(13): Xaa in position 11 to 13 is any amino acid
  Variant (15)..(15): Xaa in position 15 is any amino acid
  Variant (16)..(16): Xaa in position 16 is Ala, Asp, Gly, Asn, Ser or Thr
  Variant (18)..(18): Xaa in position 18 is any amino acid
  Variant (19)..(19): Xaa in position 19 is Ala, Ile, Leu or Val
  Variant (20)..(22): Xaa in position 20 to 22 is any amino acid
EXXSVKXXXXXXXPXXGXXXXXN

SEQ ID NO: 117352 - DNA, 1098 bp, Saccharomyces cerevisiae
  CDS (1)..(1098)
atggctggaaagaaaattgctggtgttttgggtgctactggttccgttggtcaacgtttcattctgttgttggcaaatcaccctcatttcgaactgaaagttcttggtgcctcttctagatcagctggcaagaaatacgttgacgctgtgaactggaagcaaaccgatttgctaccggaatctgctaccgatattattgtttccgaatgtaaatctgaattctttaaagagtgtgacatcgtcttttccggattggatgctgactatgctggcgctatcgaaaaggaattcatggaagctggtatcgccattgtttccaatgccaagaattatagaagagaacaagatgtgccattgattgttcctgttgtcaatcctgagcatttggatattgtagctcaaaagcttgacaccgccaaggctcaaggtaagccaagaccagggttcattatctgtatttccaattgttccactgcaggtttggttgcaccattgaagcctttgattgaaaaattcggtcctattgatgctttgaccactactactttgcaagcaatctcaggtgctggtttctccccaggtgtaccaggtattgatattctagacaatattattccatacattggtggtgaagaagacaagatggaatgggagaccaagaaaatcttggctccattagcagaagacaagacacacgtcaaactattgactccagaagaaatcaaagtctctgctcaatgtaacagagtcgctgtttccgatgggcacaccgaatgtatctctttgaggttcaagaacagacctgctccatccgtcgagcaagtcaagacatgcctaaaagaatacgtctgcgatgcctacaaattaggctgtcattctgctccaaagcaaactattcatgttttggaacaaccagacagacctcaaccaaggttggacaggaacagagacagcggttacggtgtttccgttggtagaatcagagaagacccattgttagatttcaaaatggttgtcctttcccacaacaccattattggtgccgctggttctggtgtcttgattgccgaaatcttactagcaagaaacttgatttaa

SEQ ID NO: 117353 - protein, 365 aa, Saccharomyces cerevisiae
MAGKKIAGVLGATGSVGQRFILLLANHPHFELKVLGASSRSAGKKYVDAVNWKQTDLLPESATDIIVSECKSEFFKECDIVFSGLDADYAGAIEKEFMEAGIAIVSNAKNYRREQDVPLIVPVVNPEHLDIVAQKLDTAKAQGKPRPGFIICISNCSTAGLVAPLKPLIEKFGPIDALTTTTLQAISGAGFSPGVPGIDILDNIIPYIGGEEDKMEWETKKILAPLAEDKTHVKLLTPEEIKVSAQCNRVAVSDGHTECISLRFKNRPAPSVEQVKTCLKEYVCDAYKLGCHSAPKQTIHVLEQPDRPQPRLDRNRDSGYGVSVGRIREDPLLDFKMVVLSHNTIIGAAGSGVLIAEILLARNLI

SEQ ID NO: 117354 - DNA, 1128 bp, Oryza sativa (japonica cultivar-group)
  CDS (1)..(1128)
atgcaggccgccgccgccgccgtccaccgcccgcacctcctcggcgcctaccccggcggtggccgcgcgcgccgcccgtcgtccaccgtgcggatggcgcttcgggaggacgggccgtcggtggcgatcgtgggcgcgacgggcgccgtcggccaggagttcctccgcgtcatctcctcccggggcttcccctaccggagcctccgcctcctcgccagcgagcgctccgcggggaagcgcctcccgttcgagggccaggagtacaccgtccaggacctcgccgcgccgggcgcgttcgacggggtggacatcgcgctcttcagcgccggcggcggggtcagccgcgcccacgctcccgcggccgtcgccagcggcgccgtcgtcgtggacaacagctccgccttccggatggaccccgaggtgccgctcgtcatccccgaggtcaatcccgaggccatggcgcacgtccggctgggaaagggggctattgtggccaacccgaactgttccaccatcatctgcctcatggctgccacacctctgcaccgccacgccaaggtggtaaggatggttgtcagcacttaccaagcagcaagtggtgctggggctgcggccatggaagaactcaaacttcaaactcaagaggtcttggcggggaaagcaccaacatgcaacattttcagtcagcagtatgcttttaatatattttcacataatgcaccaattgttgaaaatgggtacaatgaggaggagatgaagatggtgaaggagaccagaaaaatctggaatgataaagatgtgaaggtaactgcaacctgcatacgagttcctgtgatgcgtgcacatgctgaaagtgtgaatctacagtttgaaaagccacttgatgaggatactgcaagggaaatcttgagggcagctgaaggtgttaccattattgatgaccgtgcttccaatcgcttccccacacctcttgaggtatcggataaagatgatgtagcagtgggtagaattcgtcaggatttgtcgcaagatgataacaaagggctggacatatttgtttgtggagatcaaatacgtaaaggtgctgcactcaatgctgtgcagattgctgaaatgctactcaagtga

SEQ ID NO: 117355 - protein, 375 aa, Oryza sativa (japonica cultivar-group)
MQAAAAAVHRPHLLGAYPGGGRARRPSSTVRMALREDGPSVAIVGATGAVGQEFLRVISSRGFPYRSLRLLASERSAGKRLPFEGQEYTVQDLAAPGAFDGVDIALFSAGGGVSRAHAPAAVASGAVVVDNSSAFRMDPEVPLVIPEVNPEAMAHVRLGKGAIVANPNCSTIICLMAATPLHRHAKVVRMVVSTYQAASGAGAAAMEELKLQTQEVLAGKAPTCNIFSQQYAFNIFSHNAPIVENGYNEEEMKMVKETRKIWNDKDVKVTATCIRVPVMRAHAESVNLQFEKPLDEDTAREILRAAEGVTIIDDRASNRFPTPLEVSDKDDVAVGRIRQDLSQDDNKGLDIFVCGDQIRKGAALNAVQIAEMLLK

SEQ ID NO: 117356 - DNA, 1035 bp, Mesorhizobium loti MAFF303099
  CDS (1)..(1035): transl_table=11
atgagtttcaaggttgcagtcgtcggcgccacgggcaatgtgggccgggaaatgctcaacatactggaagagcgcggctttccggtaagcgaagtggtggcgctcgcgtcgcggcgcagccagggcacggaagtgtcgttcggcgaccgcacgctgaaggtcaaggcgctcgaccagtatgatttttccgacaccgacatctgcgtcatgtcggccggcggcaatgtctccaaggaatggtcgccgaagatcggcaagcagggctgcgtcgtcatcgataattcgtcggccttccgctacgaccaggacgtgccgctgatcgtgccggaagtgaatccggacgcgatctcgctgttcacgcgcaagaacatcatcgccaacccgaactgctcgacggcgcagctggtcgtggcgctgaagccgctgcatgatttcgccaccatcaagcgcgtcgtcgtcgccacctaccagtcggtgtcgggcgccggcaaggaaggcatggacgagctcttcacgcagacccgtgccgtgttcgtcgccgaccaggtcgacgtcaagaagttcaccaagcgcatcgccttcaacgtcattccgcatatcgacgtcttcctcgacgacggcttcaccaaggaagagtggaagatggtcgccgagaccaagaagatgctcgaccccaagatcaagctgacggcgacctgcgtgcgcgtgccggtgttcatcggccattcggaagccgtcaacatcgagttcgagaagccgatcaccgccgacgaggcgcgcgacatcctgcgtgacgcgccgggctgccaggtcttggacaagcgcgaggacggcggctacatcacgccgctggaatcggccggcgaggacgccaccttcatctcgcgcatccgcgaggattcgaccgtcgacaacggcctgtcgatgtgggtcgtctccgacaatctgcgcaagggcgcggcgctcaacgcggtccagatcgccgagcttctggtcgagcgcggcctgatccagccgaagaagaaggcggcctga

SEQ ID NO: 117357 - protein, 344 aa, Mesorhizobium loti MAFF303099
MSFKVAVVGATGNVGREMLNILEERGFPVSEVVALASRRSQGTEVSFGDRTLKVKALDQYDFSDTDICVMSAGGNVSKEWSPKIGKQGCVVIDNSSAFRYDQDVPLIVPEVNPDAISLFTRKNIIANPNCSTAQLVVALKPLHDFATIKRVVVATYQSVSGAGKEGMDELFTQTRAVFVADQVDVKKFTKRIAFNVIPHIDVFLDDGFTKEEWKMVAETKKMLDPKIKLTATCVRVPVFIGHSEAVNIEFEKPITADEARDILRDAPGCQVLDKREDGGYITPLESAGEDATFISRIREDSTVDNGLSMWVVSDNLRKGAALNAVQIAELLVERGLIQPKKKAA

SEQ ID NO: 117358 - DNA, 1008 bp, Pyrococcus abyssi GE5
  CDS (1)..(1008): transl_table=11
atgaagagggttgcagtcttaggtgcaacgggtttagtcggtaggacgtttgtgaagttgctaggggggcatccatggtttaaagttgaaaaattgatagcatcagaaaaatcagctggaaagaaatatggggacttagttgaagattctccagaggagttcagggattattatgtaataagcctcaacgaatttctagagaatccaggagttgatcttgtttttaacgcccttccggcatcgatatcaagagacgtggaggaaaagttagcccaagaaattccagtgttcacaaacgcgagggcacatcgctatgatgaagacgtgccaatactcgttccagaggttaataaagatcacctaaaactagtagaagtccaaagaaagaggagaggatggaaaggcttcatagtaactaatcccaactgttctacagcaatactaacactttcgctggcacctctcaggaatttcggaattaaaaaagttagagtagcgacaatgcaagcaataagtggggctggattctctggactttcagcgtatgcaattcaagacaacgtgattccattcataagcggagaagaatggaagatagaaaatgagagcaaaaaaatcatgggaaaattaaagggagatgaaattgaacctgcatctttcgatgtcattgcaatagcaacaagggttccagttatccatgggcatactgaagcagttttcgtagagttagagaatccagacattaagagtataagggaagcaatcgagaactttgatccgctaaaggatttaaagttgccctcttatgagaaacctatagtttatacggaaatccctcagcccagattgcacagggatagaggtagaggcttaaccgttacagtgggaagactcgaaagaactagtgaaggagtgaagtatgtagctctcggacataaccttgtgagaggcgctgcaggaggctcagttttaaacgctgagctcgcctataaacttaagatcatctag

SEQ ID NO: 117359 - protein, 335 aa, Pyrococcus abyssi GE5
MKRVAVLGATGLVGRTFVKLLGGHPWFKVEKLIASEKSAGKKYGDLVEDSPEEFRDYYVISLNEFLENPGVDLVFNALPASISRDVEEKLAQEIPVFTNARAHRYDEDVPILVPEVNKDHLKLVEVQRKRRGWKGFIVTNPNCSTAILTLSLAPLRNFGIKKVRVATMQAISGAGFSGLSAYAIQDNVIPFISGEEWKIENESKKIMGKLKGDEIEPASFDVIAIATRVPVIHGHTEAVFVELENPDIKSIREAIENFDPLKDLKLPSYEKPIVYTEIPQPRLHRDRGRGLTVTVGRLERTSEGVKYVALGHNLVRGAAGGSVLNAELAYKLKII

SEQ ID NO: 117360 - DNA, 1005 bp, Pyrococcus horikoshii OT3
  CDS (1)..(1005): transl_table=11
atgaaagtcgccgttcttggggccacgggagttgttggaagaactttcgtaaagcttcttgaaaatcatccttggtttaaagttgaaaagctagtagcttctgaaagatcggccggcaaacgatatggagaaatcgttgaagattccccggaagaattcaaggattacacgataataggtcttaaggaattccttgaggatcctggggttgatctcgtatttaatgccctccctgcatcgatatcaaaggaggtagaagagaaacttgcacaggaaattccagttttcacaaacgcaaggagtcaccgctatgatgaagatgttccaattttagtcccagaagtgaatagtgatcatttaaagcttgtagaagtccagagaaagcggaggaagtggagggggttcatagtaactaatcctaactgctcgacagcaatacttactgtttcactagcacccctcagggcctttggcataaagaaggttagggtagctacgatgcaagctattagcggagctgggttctctgggctttcagcctatgcaattcacgacaacgttataccttttataaatggagaagagtggaaaatagagaacgaaagcagaaaaatactcggtaaatttactggagataaagtagaaccagccgagatagaggtagctgcaatagctacgagggttccagttctacacgggcatactgaagcggtcttcgttgagcttgaaaaatttgatatcgaagagataagggaggcatttgaaaactttgatccccttagaagccttgagcttccatcgtatgaaaagcccatagtatatacagagattccccagccgagattgcatagagatagaggaaaagggttaacagttacagtgggtagacttcaagaaatatcaggaggtataaaatatgttgttttaggccataatttagttagaggagctgcagggggttccatccttaatgctgagcttgcttataaactgggaataatataa

SEQ ID NO: 117361 - protein, 334 aa, Pyrococcus horikoshii OT3
MKVAVLGATGVVGRTFVKLLENHPWFKVEKLVASERSAGKRYGEIVEDSPEEFKDYTIIGLKEFLEDPGVDLVFNALPASISKEVEEKLAQEIPVFTNARSHRYDEDVPILVPEVNSDHLKLVEVQRKRRKWRGFIVTNPNCSTAILTVSLAPLRAFGIKKVRVATMQAISGAGFSGLSAYAIHDNVIPFINGEEWKIENESRKILGKFTGDKVEPAEIEVAAIATRVPVLHGHTEAVFVELEKFDIEEIREAFENFDPLRSLELPSYEKPIVYTEIPQPRLHRDRGKGLTVTVGRLQEISGGIKYVVLGHNLVRGAAGGSILNAELAYKLGII

SEQ ID NO: 117362 - DNA, 1050 bp, Aeropyrum pernix K1
  CDS (1)..(1050): transl_table=11
gtgagggccgcggtactgggggcctccggcctggtgggccaggtcttcctaaggctcctcgagggccacccctacttcgaggtcgcggcggtggcctccagccccggtaaggccggtttggatgccgccgaagccatagactggatcctccccggcgggcctcccggctatctggagggcatgaggatgtcgaggcccgagccgggggcgctgagggctgagggcgtcgagctagtcttctcagccctcccctcccaggcggccgcggagctggagcccgcccttgccagggagggcttcgaggttttctccaactcgagcaacatgaggctcgaccccgacatacccctggtcaacggagaggtgaaccccggccacctggcgctcgccaaggctcagagggagaggggctggaggggtgtcgtggtgaagaaccccaactgcaccacagccatactaacactagccctcaagcccatagtggacgcggcgggcctaagggaggttcacgtggcgaccatgcaggccatctccggcgccgggaggcggggtgtgccgggctacgggatagtggacaacataatcccccacataccgggggaggaggggaaggttgaggccgagtcgcgcaagatcctcggcagcctccggggcgggaggctcgagcccgccgccttcagtgtggccgctaccaccaccagggtccccgtgctggagggacacctcgaggtggtctacctcaagaccgcccgccccatggagcccggggaggctgtggaggccctggagtcctacaggggcatcccccaggagctggggctccccacagcccccccgaagcccctcagggtgctccgcggcgaggacaggccccagccccggctagacagggctgcgggcggggggatgacggtctctgtggggagggttgaggcgaaggaggggggctggctgaggatggtggttctgggccacaacctggttaggggggctgcgggggccgctctgctggcggccgagctctggctacggcggggggagtggctgtga

SEQ ID NO: 117363 - protein, 349 aa, Aeropyrum pernix K1
MRAAVLGASGLVGQVFLRLLEGHPYFEVAAVASSPGKAGLDAAEAIDWILPGGPPGYLEGMRMSRPEPGALRAEGVELVFSALPSQAAAELEPALAREGFEVFSNSSNMRLDPDIPLVNGEVNPGHLALAKAQRERGWRGVVVKNPNCTTAILTLALKPIVDAAGLREVHVATMQAISGAGRRGVPGYGIVDNIIPHIPGEEGKVEAESRKILGSLRGGRLEPAAFSVAATTTRVPVLEGHLEVVYLKTARPMEPGEAVEALESYRGIPQELGLPTAPPKPLRVLRGEDRPQPRLDRAAGGGMTVSVGRVEAKEGGWLRMVVLGHNLVRGAAGAALLAAELWLRRGEWL

SEQ ID NO: 117364 - DNA, 1128 bp, Arabidopsis thaliana
  CDS (1)..(1128)
atggcgacgttcactcatcaaaccccacaaacccatttcctctctcgccttcctctcagagctaaacctagacacttctccgcaagagtcaaaatgtctctccaagaatctgcgccttcactcgccgtcgttggcgttaccggagccgtcggacaagaattcctctccgtcttatccgatcgagacttcccttatagctccatcaagatgcttgcatcgaaacgctccgcagggaagcgtgttgccttcgatggccatgaatacacggtggaggagctcacggcggatagcttcaacggtgtagacatagctttgttcagtgctggtggatccataagcaaagagtttggtcctctggcggcggagaaaggaaccattgttgttgataatagctcggcttttagaatggttgatggagttccgcttgtgattcctgaagtgaatccagaagcaatgaaagggatcaaagttggaatgggcaaaggggctttgattgcaaaccctaattgctccaccattatctgtttgatggctgttacgcctcttcatcatcacgcaaaggtgaagagaatggtggttagtacatatcaagcagctagtggtgctggtgctgcagctatggaagagcttgttcagcagactcgtgaggttttagagggtaaacctccgacttgtaacatcttcgggcagcagtatgcatttaacttgttttcacataatgctcctattcttgacaacggttacaacgaagaggaaatgaaacttgtgaaggagacaaggaagatctggaatgacacagaagtaaaagtaacagcaacgtgtatacgtgttccagttatgcgtgctcatgcagagagtgtgaatcttcagtttgagaatcctcttgatgagaacacagcaagggagatactgaagaaagcacctggagtttatataatagatgaccgtgcttcaaatactttccctactccactcgatgtctctaacaaagacgatgtagcggttggtaggataaggcgagacgtgtctcaagatggcaatttcgggctggacatattcgtttgtggagaccaaatacgcaaaggagctgctctgaatgctgttcagatcgctgagatgcttctctga

SEQ ID NO: 117365 - protein, 375 aa, Arabidopsis thaliana
MATFTHQTPQTHFLSRLPLRAKPRHFSARVKMSLQESAPSLAVVGVTGAVGQEFLSVLSDRDFPYSSIKMLASKRSAGKRVAFDGHEYTVEELTADSFNGVDIALFSAGGSISKEFGPLAAEKGTIVVDNSSAFRMVDGVPLVIPEVNPEAMKGIKVGMGKGALIANPNCSTIICLMAVTPLHHHAKVKRMVVSTYQAASGAGAAAMEELVQQTREVLEGKPPTCNIFGQQYAFNLFSHNAPILDNGYNEEEMKLVKETRKIWNDTEVKVTATCIRVPVMRAHAESVNLQFENPLDENTAREILKKAPGVYIIDDRASNTFPTPLDVSNKDDVAVGRIRRDVSQDGNFGLDIFVCGDQIRKGAALNAVQIAEMLL

SEQ ID NO: 117366 - DNA, 1032 bp, Halobacterium sp. NRC-1
  CDS (1)..(1032): transl_table=11
atgaccacagttggcgtactcggtgcgaccggcgcggttggacagcgcttcgtacagttgctcgccgggcacgagaccttcgagttgtccgtcgtgactgccagccccgacagcgccggtgaaacgtaccgtgacgccgcgaactgggggctcgacacgccggttccggagtccatcgcggagttgcccgtgcagccgaccacgccggctgcgatcccagacgacacggccctcctgttctcggcgctgcccagcgacgtgggggcggaggttgagccggccctctgcgaggctgggttcgtcgtctcctcgaacgcgagcaacgagcgccgcgccggcgacgtgcccctcgtggtgccggaggtgaacgccgaccatctggggttgatcgacgtgcaacgcgacgcgcgcgggtgggacggcgcgctcgtgaagaacccgaactgttcgaccatcacgatggtccccacgctggcggccctcaccgagttcggcctggatcgcgtgcacgtcgcgaccctgcaggccgtctccggggcgggctactcgggggtcacgtcgatggagatcctggacaacgtcgtgccccacatcggcggcgaggagcggaagatggagaccgaatcccggaagctcctcggggagttcacgggggccgaagtccaacaccacgacgccgtcgtgtccgcctcctgcaaccgcgtccccaccttggacgggcacttggagaacgtcttcgtcgaaaccagcgaccaccccgcgcccgcggacgtggcggccgcctttgaggacgcgccgacactcgacctcccgagcgcgcccgacccgctcatcgagaccttcaccgcccccgagcgcccgcagccccgcctcgaccggatgcgcggcgacggcatggcgatcgccgccggcggcatccagaccaccgacaccggcatccagtacaactgcctcgcgcacaacaccatccggggcgcggccggcgcgagcatcctgaacggcgaactgctcgcccgcgagggctgggtctga

SEQ ID NO: 117367 - protein, 343 aa, Halobacterium sp. NRC-1
MTTVGVLGATGAVGQRFVQLLAGHETFELSVVTASPDSAGETYRDAANWGLDTPVPESIAELPVQPTTPAAIPDDTALLFSALPSDVGAEVEPALCEAGFVVSSNASNERRAGDVPLVVPEVNADHLGLIDVQRDARGWDGALVKNPNCSTITMVPTLAALTEFGLDRVHVATLQAVSGAGYSGVTSMEILDNVVPHIGGEERKMETESRKLLGEFTGAEVQHHDAVVSASCNRVPTLDGHLENVFVETSDHPAPADVAAAFEDAPTLDLPSAPDPLIETFTAPERPQPRLDRMRGDGMAIAAGGIQTTDTGIQYNCLAHNTIRGAAGASILNGELLAREGWV

SEQ ID NO: 117368 - DNA, 1053 bp, Sulfolobus solfataricus P2
  CDS (1)..(1053): transl_table=11
gtggctgataagataaaagtttcgttactaggctctaccggaatggtagggcaaaaaatggtaaggatgctttcaaaacatccctatatagaattagtgaaagtaagtgcgtcacctcaaaagattggtaaaaaatacaaagacgccgtaaaatggatagaacctggggatattcctgaaaatgtggctgaattaccaatagtctccaccgagtacgaagatcataaggatgtcgatgttgtcctttcagcactacctaatgaattagcagaagatgttgaattaaagttagtaaaacagggaaaaatagttgtatctaatgcctcaccatttagaatggatccagatgtaccactaatcaatccagaagtaaattgggagcatttagagttattaaaatatcaaaaaagcagtaaaaactggaacggtctattagtcaaaaatcctaactgtactgcggcaatactttccatgccaattaaacccttagaaagattaatcaaaattaatgctacgtatatagtaactttacaagcagtaagcggagctggttatagtggtttaccgtttatggcaatagatgggaatgtagtaccttggattaaaggggaagaagagaaaattcctaaggaaataaataaaatgttaggaaaattcgaagccggaaagctaaaatcttccagcttagaaattcatccaaccactaccagagttcctgtaaaagttgggcatatgggtgtaattaatattgtaactgatgataatgtagatgaaaaagaagttcaaaaagcgttagatagttttgcgtcattacctcagcataagaacttacctactgcaccaaataaaccaattattgtatttaaggatgaggatagaccccaaccagctagagacttacaatattatgatggaatggcagtaacagtgggcagagtaaaatttgaaggaaatgtgttacgattagttgtccttggtgacaatctagtaagaggagctgctggaataacgattttaaccctagaggtcatgaaagaattaggttatttctaa

SEQ ID NO: 117369 - protein, 350 aa, Sulfolobus solfataricus P2
MADKIKVSLLGSTGMVGQKMVRMLSKHPYIELVKVSASPQKIGKKYKDAVKWIEPGDIPENVAELPIVSTEYEDHKDVDVVLSALPNELAEDVELKLVKQGKIVVSNASPFRMDPDVPLINPEVNWEHLELLKYQKSSKNWNGLLVKNPNCTAAILSMPIKPLERLIKINATYIVTLQAVSGAGYSGLPFMAIDGNVVPWIKGEEEKIPKEINKMLGKFEAGKLKSSSLEIHPTTTRVPVKVGHMGVINIVTDDNVDEKEVQKALDSFASLPQHKNLPTAPNKPIIVFKDEDRPQPARDLQYYDGMAVTVGRVKFEGNVLRLVVLGDNLVRGAAGITILTLEVMKELGYF

SEQ ID NO: 117370 - DNA, 1071 bp, Sulfolobus solfataricus P2
  CDS (1)..(1071): transl_table=11
atgaggagaacacttaaagcagctatcttgggatccacaggattagttggaatagaatatgtcagaatgttagctaatcatccatacattaaagtagggtatctagctggaaaaggttcagtaggtaaaccttatggagaagtcgtgagatggcaaactataggtcaagttccaactgaaatagccgacatggaagttaaaccgactgatccgaaattaatggatgatgtagatattgtattttcacccttacctcaaggtgctgcaggtccagtagaggaggaattcgctaaacatggattcccggtaatcagcaattctccagatcatagatttgatcccgacgtacccttgctaattccggaagtaaatccacatacaatatcacttattgataagcagagagaaagacgtgactggaggggttttatagttacaacaccattatgcactgcccaaggggctgcaattccattagcaccaatatatatgaactttaaaatagatagtagcttgataacaactattcaatcgttatctggtgccggttatcctggaataccttcgcttgatgtgatagataatgtattgcctttaggtgacaattacgataataagactgttaaggagattagcaggattttaagcgagacgaaaaggatggttgatgatgatgataataacctatcattaggtgcaacaactcatagggtagcaactattcatggccactatgaggtaatttatatcacatttaaagaagatgtcactgtagaaaagattggagagactttagattcgtttagaggagaaccacaaaacctaaaactacctacggcaccagacaaacctatacttttgattaatcaagatgcgagacctcaagtatattttgacagatgggcagggaatccacccggtatgagcgtagtagttgggagattaggccaaataaataggagaactattaggttagtatcagtgatccataacactgtaagaggagctgctggaggagggatattagcaactgaactgttaattgagaaaggatatattgataaaaggtaa

SEQ ID NO: 117371 - protein, 356 aa, Sulfolobus solfataricus P2
MRRTLKAAILGSTGLVGIEYVRMLANHPYIKVGYLAGKGSVGKPYGEVVRWQTIGQVPTEIADMEVKPTDPKLMDDVDIVFSPLPQGAAGPVEEEFAKHGFPVISNSPDHRFDPDVPLLIPEVNPHTISLIDKQRERRDWRGFIVTTPLCTAQGAAIPLAPIYMNFKIDSSLITTIQSLSGAGYPGIPSLDVIDNVLPLGDNYDNKTVKEISRILSETKRMVDDDDNNLSLGATTHRVATIHGHYEVIYITFKEDVTVEKIGETLDSFRGEPQNLKLPTAPDKPILLINQDARPQVYFDRWAGNPPGMSVVVGRLGQINRRTIRLVSVIHNTVRGAAGGGILATELLIEKGYIDKR

SEQ ID NO: 117372 - DNA, 1083 bp, Clostridium acetobutylicum ATCC 824
  CDS (1)..(1083): transl_table=11
atgaataaattaagggttggattaattggtggaacaggcatggttggacaaagatttgcatgtcttttaaaagatcatccttggttcgaggttacactaattgctgcaagtaaaaaatcagctggtcttacctatgaggaagctgtaaaagatagatggaaaatgaatgagccaattcctgaaggagttaaaaatcttatagttaaagatgcgtttgatgtagatgaaatttcaagcatggttgatttcgttttttgcgccatttccttaaataaagaagaaactagacttcttgaagaggactatgcaaaacatgaaatgcctgttatatctaataactctgcaaacagatacgtacaagatgtgcctgtcttaattcctgaaataaataacaatcatacagaaataatagatattcaaaaaaagagattaggaactaaaagaggatttataagtgttaaacctaactgttctatacaaagctatgttcctcctataagtgctcttttaaaatatgaaccagaaacaattcttgcctgtacctaccaagctatttctggagcaggaaaaacctttaaagaatgtcctgaaatacttgataatgttataccttacattaaaggtgaagaagagaaaagtgaaaatgaacctctaaaaatatggggaaaaatagagaataataaaattgtaaatgcttcctctcctcttataactactcaatgtataagagttcctgtaacggatggtcatttggctgctgtatttgttaatttcaaaacgaaaccttcaaaacaggaaataatagatgcttgggaaaattttaaagcccctgaatgtgctttaaatttgccaagtgctccaaaaaaattcctacattattttgatgaacctgatagaccacaaacaaaactagacagagattttgaaaatggtatgggaataactatgggaagacttcgtgaggataaattatttcaatataagtttgtatgcttatctcataatactcttcgtggagcagctggtggcggtgttttaagtgctgagctcttaaaaactcaaggatatttaacctctaaataa

SEQ ID NO: 117373 - protein, 360 aa, Clostridium acetobutylicum ATCC 824
MNKLRVGLIGGTGMVGQRFACLLKDHPWFEVTLIAASKKSAGLTYEEAVKDRWKMNEPIPEGVKNLIVKDAFDVDEISSMVDFVFCAISLNKEETRLLEEDYAKHEMPVISNNSANRYVQDVPVLIPEINNNHTEIIDIQKKRLGTKRGFISVKPNCSIQSYVPPISALLKYEPETILACTYQAISGAGKTFKECPEILDNVIPYIKGEEEKSENEPLKIWGKIENNKIVNASSPLITTQCIRVPVTDGHLAAVFVNFKTKPSKQEIIDAWENFKAPECALNLPSAPKKFLHYFDEPDRPQTKLDRDFENGMGITMGRLREDKLFQYKFVCLSHNTLRGAAGGGVLSAELLKTQGYLTSK

SEQ ID NO: 117374 - DNA, 1080 bp, Clostridium acetobutylicum ATCC 824
  CDS (1)..(1080): transl_table=11
atgaataaaaaactaagggttggtttacttggtggtacaggtcttgtgggacaaagatttgctaccttactagataatcatccatattttgaagtaacatgcattgcagcaagtccacgttctgcaggtcaaaagtattctgatgctgtaaaaggaagatggaagcttgacatacctatgccagaatatataaaagattttattgtaaaagatatttatgatatcgatgaaatttcaaaggaagttgattttgtcttttgtgctgtaaatatggacaagagcgaaattaaaaaaatagaagagaattatgcaaaacacgaaataccagtggtatctaacaattctgcacacagatttacagaagacgttccagtaataattccagaaattaatcctgaacatcttgatataattccaaagcaaaaggaaagattgggaacaaaaaagggctttatagttgcaaaaccaaattgttcaattcaaagctacgttcctgcaataagcgcacttttggaatttaaaccaacaaaaatattagtctgtacttatcaagctatctctggaagcggaaaaacctttgaacaatttcctgaaatagtagataatacaatcccttatattcctggagaagaacaaaaaagcgaagatgaacctttaaaggtttggggacatatagaaggaaataaaatagtttcgaaaaaagatcctttaataacttcacaatgtattagagttgcagtttcagacggacacctagcagcaacctttgtttcttttgaaaataagcctacaaaagaacaaatagtcgaaaaattaaaaaattataagggtaaacctcaattgcttaatctcccaactgcccctgaacaatttataacctactttgaggatgaattcagaccacagccaaagcttgatagaaatatcgaaaaaggtatgggcataagcattggaagacttagagaagatactctctttgactataaatttgtaggtctttctcataacgctttaagaggtgcagccggaggagctgttttaactgctgaattattatacaaagaaggatatttatattaa

SEQ ID NO: 117375 - protein, 359 aa, Clostridium acetobutylicum ATCC 824
MNKKLRVGLLGGTGLVGQRFATLLDNHPYFEVTCIAASPRSAGQKYSDAVKGRWKLDIPMPEYIKDFIVKDIYDIDEISKEVDFVFCAVNMDKSEIKKIEENYAKHEIPVVSNNSAHRFTEDVPVIIPEINPEHLDIIPKQKERLGTKKGFIVAKPNCSIQSYVPAISALLEFKPTKILVCTYQAISGSGKTFEQFPEIVDNTIPYIPGEEQKSEDEPLKVWGHIEGNKIVSKKDPLITSQCIRVAVSDGHLAATFVSFENKPTKEQIVEKLKNYKGKPQLLNLPTAPEQFITYFEDEFRPQPKLDRNIEKGMGISIGRLREDTLFDYKFVGLSHNALRGAAGGAVLTAELLYKEGYLY

SEQ ID NO: 117376 - DNA, 1041 bp, Agrobacterium tumefaciens str. C58
  CDS (1)..(1041): transl_table=11
ttgatcatgggtttcaaagttgcaattgtaggcgctaccggcaatgtcggtcgcgaaatgctcaacatcctggccgaacgtggttttccggcagatgaagtcgtgccgctcgcttcctcccgctcgcagggcacggaagtctcctatggcgatcgcacgctgaaggtttccaacctcgaaaactacgatttttccgacacggatatttgcctgatgtcggccggcggcgagatttccaagaagtggtcgccgaagatcggtcagcagggttgcgtcgtcatcgataactcgtctgcatggcgctatgatcaggatgttccgctgatcgttccggaagtcaatgccgatgcgatctcgggcttcacgcgcaagaacatcattgccaaccccaattgctccacggcccagctcgttgtcgcgctgaagccgctgcatgatttcgccaagatcaagcgcgtcgttgtgtccacctatcagtcggtttccggcgccggcaaggaaggcatggacgagctgttccagcagacccgcgccgtcttcgtggccgatccggtcgaaaccaagaagttcaccaagcgcatcgccttcaacgtcatcccgcatatcgacgtcttcatggaagacggctacaccaaggaagagtggaaggttctggccgaaaccaagaagatgcttgatcccaagatcaaggtcacctgcacggccgtgcgcgttccggtcttcatcggccattcggaatcggtcaatatcgagttcgaaaacgagatcactgccgatcaggcgcgtgacatcctgcgcgaagcgccgggttgcctcgtcatcgacaagcatgaagatggcggctacatcacccccgttgaatccgccggtgaagatgcgacctatatttcgcgtatccgcgaggatgcgacggtcgagaacggcctcaacatctgggttgtttcggataatctgcgcaagggcgctgccctcaatgccatccagatcgccgaactgctggtcaatcgtggtctcatcaagccccgcaaggcggctgcctga

SEQ ID NO: 117377 - protein, 346 aa, Agrobacterium tumefaciens str. C58
MIMGFKVAIVGATGNVGREMLNILAERGFPADEVVPLASSRSQGTEVSYGDRTLKVSNLENYDFSDTDICLMSAGGEISKKWSPKIGQQGCVVIDNSSAWRYDQDVPLIVPEVNADAISGFTRKNIIANPNCSTAQLVVALKPLHDFAKIKRVVVSTYQSVSGAGKEGMDELFQQTRAVFVADPVETKKFTKRIAFNVIPHIDVFMEDGYTKEEWKVLAETKKMLDPKIKVTCTAVRVPVFIGHSESVNIEFENEITADQARDILREAPGCLVIDKHEDGGYITPVESAGEDATYISRIREDATVENGLNIWVVSDNLRKGAALNAIQIAELLVNRGLIKPRKAAA

SEQ ID NO: 117378 - DNA, 1053 bp, Sulfolobus tokodaii str. 7
  CDS (1)..(1053): transl_table=11
gtggcagacaaaataaaagtttcacttctaggctctactgggatggtaggacaaaaaatggtaaaaatgttagcaaagcatccctatttagagttagtaaaagttagtgcttccccttcgaaaattggtaaaaaatataaagatgcagtaaagtggatagagcaaggagacataccagaagaagtacaagatttaccaatagtttcaacaaattatgaagatcataaagacgttgatgtagtattgtcagctttaccaaatgaattagcagaatcaatagaacttgaacttgtgaaaaacggaaagatagttgtgtctaatgctagtccatttagaatggacccagatgtaccattaattaacccagaaattaattgggaacacctagaattacttaaatttcaaaaggaaagaaaaggttggaaaggtattctagtaaaaaatcctaattgtacagctgctataatgtcaatgccaataaaacccttaattgaaatagcaacaaaatctaaaataataattactacactacaagcagtaagtggagctggatataatggaatatcatttatggcaatagagggtaatataatcccatacattaaaggagaagaagacaaaatagcaaaagaactaactaaattaaacggaaaacttgaaaataatcaaataattccagcaaacttagactcaactgttacatcaattagagtacctacaagagtaggacatatgggagttattaatattgttacaaatgagagaatcaacatagaggaaataaagaaaacactaaagaattttaaatctttacctcaacagaaaaatttacctactgcaccaaaacaaccaataatagtaagagatgaagaagatagaccacagccgattattgatgtaaatgcagaaagtggcatggcagtaactgtgggcagaataagacatgaaaataacgtgcttaggttagtcgttttaggagataatttagttagaggagctgctggaataacaatacttactgtagaagttatgaaagaattagggtacatttag

SEQ ID NO: 117379 - protein, 350 aa, Sulfolobus tokodaii str. 7
MADKIKVSLLGSTGMVGQKMVKMLAKHPYLELVKVSASPSKIGKKYKDAVKWIEQGDIPEEVQDLPIVSTNYEDHKDVDVVLSALPNELAESIELELVKNGKIVVSNASPFRMDPDVPLINPEINWEHLELLKFQKERKGWKGILVKNPNCTAAIMSMPIKPLIEIATKSKIIITTLQAVSGAGYNGISFMAIEGNIIPYIKGEEDKIAKELTKLNGKLENNQIIPANLDSTVTSIRVPTRVGHMGVINIVTNERINIEEIKKTLKNFKSLPQQKNLPTAPKQPIIVRDEEDRPQPIIDVNAESGMAVTVGRIRHENNVLRLVVLGDNLVRGAAGITILTVEVMKELGYI

SEQ ID NO: 117380 - DNA, 1080 bp, Sulfolobus tokodaii str. 7
  CDS (1)..(1080): transl_table=11
gtgatactcatgaggagaacattaaaagccgcaatattaggtgctactggtttagtaggaatcgaatacgtaagaatgctatcaaatcatccttatattaaaccagcatatttagctggaaaaggttcagtgggtaaaccgtatggtgaggtagtaagatggcaaacagtaggacaagttcctaaggaaatagctgatatggaaataaaaccaactgatcctaagttaatggatgatgtagacataatattttctccattacctcaaggtgctgctggcccagtagaagaacaatttgcaaaagaaggattccctgtgattagtaattcaccagatcatagatttgatcctgatgttcccttattggttcctgaactaaatcctcatactattagcttaattgatgagcaaagaaaaagaagagaatggaaaggatttatagtaactacaccactatgcacagcccagggtgcagcaataccattaggtgctatatttaaagattataagatggatggagcatttataactactattcaatcgctatctggtgccggttatccaggaataccatcattagatgtagtagataatatcttgcctttaggtgatggatacgatgccaagacgataaaagagatcttcagaattttaagcgaagttaagagaaatgtagatgaacctaaattagaagatgtaagcttagcagcaacaactcatagaatagctactatacatggtcattatgaagtactatatgtatcgttcaaagaggaaactgctgctgaaaaagttaaggagactttagaaaactttagaggggaaccacaagatctaaaattaccaactgcaccttcaaagccaattatcgttatgaatgaggatacaagacctcaagtctattttgatagatgggctggggatattccaggaatgagtgtagttgtaggtagattaaagcaagtgaataagagaatgataaggttagtatcattaattcataacacggtcagaggagccgcaggaggaggtatattagcagctgaattacttgtcgaaaaaggatatattgaaaagtaa

SEQ ID NO: 117381 - protein, 359 aa, Sulfolobus tokodaii str. 7
MILMRRTLKAAILGATGLVGIEYVRMLSNHPYIKPAYLAGKGSVGKPYGEVVRWQTVGQVPKEIADMEIKPTDPKLMDDVDIIFSPLPQGAAGPVEEQFAKEGFPVISNSPDHRFDPDVPLLVPELNPHTISLIDEQRKRREWKGFIVTTPLCTAQGAAIPLGAIFKDYKMDGAFITTIQSLSGAGYPGIPSLDVVDNILPLGDGYDAKTIKEIFRILSEVKRNVDEPKLEDVSLAATTHRIATIHGHYEVLYVSFKEETAAEKVKETLENFRGEPQDLKLPTAPSKPIIVMNEDTRPQVYFDRWAGDIPGMSVVVGRLKQVNKRMIRLVSLIHNTVRGAAGGGILAAELLVEKGYIEK

SEQ ID NO: 117382 - DNA, 1017 bp, Thermoplasma acidophilum DSM 1728
  CDS (1)..(1017): transl_table=11
atggataaattgagggtaggtctccttggatcaacgggcgttgttgggtctctgctatcgaagatgatagccatccatccatactttgatcttgcgaacgtctatgcctctgatagaagcgctggacaaagatatggcaacgttgtctatggtggtgcaagcgatctttataggaatctagaagtgaaggagagcaaccctgaccggataatcagcgaccacaatgatataatttttagtgctgttagtgatgaaaaagctggtttgatagagagacgtttggcagaggctgggttgcctatttttaccaacgcatcagcaaaccgtctcgaagatgatgttttcttgatagttccagagataaatggcgatctggttggcagcatcaagaggaagggtttcataatagcaaatggaaattgcagcacgattggccttgcccttggtattgatccggtcatccgcgggagatccgcagtgaaaatcatagttacgaccatgcaggctgtcagcggggcaggttatcctggggtttcatcgctggatataatcgacaatatgatcccgtacatacagaaggaggagacaaagatagaaagagaaacgaaaaagatattctccggaaaactggacacagaaatattcgctactactacgcgcgtgcctgttaaaattgggcatatggaatctgttcatatagaattcgatcaggtattggacccatcagagataagggcagaatttcgcagttatggcaatgggctgttgaaaactgtctatccatccctaccagatagatcggtgattttactggaaaaagatgacagaccccagcccgcgctggacgccacaaacggtggatcagcgctgaaagcagggatggccgtttcagttggaagattaagagtcagaagtcgtagtctggatcttgttcttctggttaataaccttgttaggggtgcagccggttcgaccctgctaaatgctgagatagcctacaaggagggtataatttga

SEQ ID NO: 117383 - protein, 338 aa, Thermoplasma acidophilum DSM 1728
MDKLRVGLLGSTGVVGSLLSKMIAIHPYFDLANVYASDRSAGQRYGNVVYGGASDLYRNLEVKESNPDRIISDHNDIIFSAVSDEKAGLIERRLAEAGLPIFTNASANRLEDDVFLIVPEINGDLVGSIKRKGFIIANGNCSTIGLALGIDPVIRGRSAVKIIVTTMQAVSGAGYPGVSSLDIIDNMIPYIQKEETKIERETKKIFSGKLDTEIFATTTRVPVKIGHMESVHIEFDQVLDPSEIRAEFRSYGNGLLKTVYPSLPDRSVILLEKDDRPQPALDATNGGSALKAGMAVSVGRLRVRSRSLDLVLLVNNLVRGAAGSTLLNAEIAYKEGII

SEQ ID NO: 117384 - DNA, 1086 bp, Brucella melitensis 16M
  CDS (1)..(1086): transl_table=11
gtggcctgcggggttccgaatctggaagcggagagggacaggagacgaaaaatgggtttcaaggttgcagttgcaggcgccaccggtaatgtcgggcgcgaaatgctcaatattctcgaagagcgcggttttccggcggatgaggtcgtgccgctcgcctcgcgccgtagccagggcacggaagtttcctatggcgacaagacgctgaaggttcgcgcgctcgacacctatgatttttccgatacggatatctgcctgatgtcggctggcggttcggtatcgcaggagtggtcgccgaagatcggcaggcagggctgcgttgtcatcgataattcgtccgcatggcgctatgacgccgatgtgccgctgatcgtgccggaagtaaacccggacgccattgcgggcttcaccaagaagaatataatcgccaacccgaactgctcgactgcccagctcgtcgttgctctgaagccattgcatgatgcagccaagatcaagcgcgtcgttgtttccacctatcagtcggtttcaggtgctggcaaggaaggcatggacgaactgttcgagcagtcgcgcgcggttttcgttgccgatccgatcagcacgaagaagtttactaagcgcatcgccttcaacgtgatcccgcatatcgatgtctttatggaagacggctacaccaaggaagaatggaaaatggtggccgaaaccaagaagatgctcgatccgaagatcaagcttacggcaacggcggttcgtgtgccggtcttcattggtcactcggaagctgtcaatatcgagtttgaaaatccgatcacgccggaagaggcgcgcgagattctgcgcgaagcgccgggctgccaggtgatcgacaagcatgaaaacggcggttacatcacgccttatgaatccgcgggtgaagatgcgaccttcatcagccgcatccgcgaggacatcacggttgaaaacggcctggccatgtgggtcgtatccgacaatctgcgcaagggcgctgccctgaatgcaatccagattgccgagcttctggtggcgcgcggtctcatcaagccgaaggcgcttgccgcctga

SEQ ID NO: 117385 - protein, 361 aa, Brucella melitensis 16M
MACGVPNLEAERDRRRKMGFKVAVAGATGNVGREMLNILEERGFPADEVVPLASRRSQGTEVSYGDKTLKVRALDTYDFSDTDICLMSAGGSVSQEWSPKIGRQGCVVIDNSSAWRYDADVPLIVPEVNPDAIAGFTKKNIIANPNCSTAQLVVALKPLHDAAKIKRVVVSTYQSVSGAGKEGMDELFEQSRAVFVADPISTKKFTKRIAFNVIPHIDVFMEDGYTKEEWKMVAETKKMLDPKIKLTATAVRVPVFIGHSEAVNIEFENPITPEEAREILREAPGCQVIDKHENGGYITPYESAGEDATFISRIREDITVENGLAMWVVSDNLRKGAALNAIQIAELLVARGLIKPKALAA

SEQ ID NO: 117386 - DNA, 1020 bp, Pyrobaculum aerophilum str. IM2
  CDS (1)..(1020): transl_table=11
atggatcgctataaggtatatattctgggggccacggggttagtggggcagaggtacgtccagctcttggcaagacacccctggtttgaaatagtggggatggcggcctctgagaaaagcgcagggaagcggctggcggagacggggtgggtcttggaagagccgccgcctcctgaggtggccgagatgaggctggagaagcttgaggcggacaaagtgccaaaagtcgacttcgtcttctccgcccttcccagcgaggtggccgctaaggtggagccagaattagccgccaaggggtacaccattttgtccaactctagcaatatgagaatggagcccgacgtgccgcttgtaataccagaggtaaaccccgaggacctctccctagttgaaaagcagaaggcggggagggggtggagaggcgctgttgtgaagaagcccaactgcacaactacaatcctaaacctgcccctcaagccaatactagacgagtggggcattgagagagtccacgtcgttacaatgcaagcgctgtccggggcggggtacgcgggagtcccctcggtggcgataatggacaacataatcccctatataaagggggaggaggaaaaggtggtggccgagacgaggaaaatactcaaggcggatttcgacgtatacgtcacaaccactagggcgcctgtgttagacggccatttagaagtggtttacgtggacacgaagagggatttcgggctagaggccgtggccgactccctagagcgatttagaggactgccccaagagcttaaattgccaacggcgcctgaaaaacccatagaagtgaagagacaaatagacaggccgcagccgaggctggacagatgggccgggaagggaatggccgttgtggtagggaggctgagaaagctctccccccggaagttagcaatggtcgtgctggggcacaacaccgtaaggggagccgccggtaattcagtactcacagcggagttaatgatagcaaaccgcgtttaa

SEQ ID NO: 117387 - protein, 339 aa, Pyrobaculum aerophilum str. IM2
MDRYKVYILGATGLVGQRYVQLLARHPWFEIVGMAASEKSAGKRLAETGWVLEEPPPPEVAEMRLEKLEADKVPKVDFVFSALPSEVAAKVEPELAAKGYTILSNSSNMRMEPDVPLVIPEVNPEDLSLVEKQKAGRGWRGAVVKKPNCTTTILNLPLKPILDEWGIERVHVVTMQALSGAGYAGVPSVAIMDNIIPYIKGEEEKVVAETRKILKADFDVYVTTTRAPVLDGHLEVVYVDTKRDFGLEAVADSLERFRGLPQELKLPTAPEKPIEVKRQIDRPQPRLDRWAGKGMAVVVGRLRKLSPRKLAMVVLGHNTVRGAAGNSVLTAELMIANRV

SEQ ID NO: 117388 - DNA, 1005 bp, Pyrococcus furiosus DSM 3638
  CDS (1)..(1005): transl_table=11
atgaaagcagccgttttaggagcaactggactcgtaggaaggactttcgtgaaattactcagcggacacccatggtttaaagtcagtaagcttgtagcatctgaaaagtctgcaggtaaggagtacggagaaatagtcgaggactcaccaaaagagtttagaaaaaatgtaataatcagcctagaggagtttttaaaagaccccgatgttgatatagtcttcaatgctctcccagcctcaatatccagagaagttgaagaaaaacttgcgcaagagattccagtttttacaaatgctagagctcacagatatgacgaagatgttcctattttggttccagaggtaaacatgaatcacctgggaataattgaagttcagaaaaagaacaggggttgggatggttttatagtcacaaaccccaactgttcaactgctatacttacggtatctttagctccattagttgaatttgggataaagaaggttagagttgcaacaatgcaagctattagtggagctggattttcaggactttcggcatatgcaattcatgacaatgtaattcccttcataaatggagaggagtggaagatagaaaatgagagcaagaaaatattgggaaaattcaacggtgagagaatagaaaacgcagacttcgacatctctgccatagcaacgagagttccagttattcatggtcatacggaggcagtatttgtggagttggagaaggtaaacattgaagagataagagaagcatttgacagctttgatccattgagagactataagctcccctcttatgagaaaccgatagtatattcagaagttccacaacccagacttcacagggatagggggaaaggactaactggaactgtaggtagactcgagaaaataaacggtggagtgaagtacgtaacacttggtcataatctcgtcagaggagcggctggaggttcagttctcaacgctgaactcgcctacaggcttggctatctctga

SEQ ID NO: 117389 - protein, 334 aa, Pyrococcus furiosus DSM 3638
MKAAVLGATGLVGRTFVKLLSGHPWFKVSKLVASEKSAGKEYGEIVEDSPKEFRKNVIISLEEFLKDPDVDIVFNALPASISREVEEKLAQEIPVFTNARAHRYDEDVPILVPEVNMNHLGIIEVQKKNRGWDGFIVTNPNCSTAILTVSLAPLVEFGIKKVRVATMQAISGAGFSGLSAYAIHDNVIPFINGEEWKIENESKKILGKFNGERIENADFDISAIATRVPVIHGHTEAVFVELEKVNIEEIREAFDSFDPLRDYKLPSYEKPIVYSEVPQPRLHRDRGKGLTGTVGRLEKINGGVKYVTLGHNLVRGAAGGSVLNAELAYRLGYL

SEQ ID NO: 117390 - DNA, 1065 bp, Methanopyrus kandleri AV19; identical to SEQ ID NO: 47596
  CDS (1)..(1065): transl_table=11

SEQ ID NO: 117391 - protein, 354 aa, Methanopyrus kandleri AV19; identical to SEQ ID NO: 47597

SEQ ID NO: 117392 - DNA, 1029 bp, Methanosarcina acetivorans C2A
  CDS (1)..(1029): transl_table=11
atggtagcagttaaagcgggtattttaggcgccaccggcgctgtagggcagcgatttgtagaagcacttgcaaaccacccctggtttgagattacagcccttgcagcgtccgaaagaagcgctggcaaaacgtatcgagaagcggcaggatggaggctggatacagccatgccggaaagtgtcgaaaacatagaggttgttcccgtagacccgaaaaccgttgaagcggatgtggtcttttcggctcttcctgcagaccttgccctttcagtggaacccgagtttgcaaaagccgggtttgcagttgcaagcaatgcatcttcctacaggatggaaaaagacatccctctggtgattcccgaagtaaaccccgaacacctgggactccttgaggtccagcaggacacaaggggctgggacggatacatcattactaaccctaactgctccacaattgtcatgacaattaccttaaagcccctcatacagtttgggcttgaaaccgtacaggtagcaaccatgcaggcgatttccggagcaggtttctccggcgttgcagccatggcaatctatgataacgtaatcccctatatagggagcgaagaaaagaagatggagactgaaaccttaaagctcctcggggaatttaatggctcggaaatcgtgcctgcagacatgaaggtcagtgcttcctgccacagggtccctgtagtcgacgggcacacggaagccatctgggcaggcatgagggataaacccacccctgaagaggtaagagaatccttcctcaaatttgacccgaagctcggagaactcccctcagaaccagggaaagcccttatagtccgggacgaagtcgacaggccccagccgcgccttgaccgcaatatgggaaaaggcatgagtgtttcggtgggcaggatcagagaaggaatccgttacatcgcaatggggcacaacacaatccggggagctgcaggggcaagtgtccttaatgcggaactcctgcactcaatgggcaagctctga

SEQ ID NO: 117393 - protein, 342 aa, Methanosarcina acetivorans C2A
MVAVKAGILGATGAVGQRFVEALANHPWFEITALAASERSAGKTYREAAGWRLDTAMPESVENIEVVPVDPKTVEADVVFSALPADLALSVEPEFAKAGFAVASNASSYRMEKDIPLVIPEVNPEHLGLLEVQQDTRGWDGYIITNPNCSTIVMTITLKPLIQFGLETVQVATMQAISGAGFSGVAAMAIYDNVIPYIGSEEKKMETETLKLLGEFNGSEIVPADMKVSASCHRVPVVDGHTEAIWAGMRDKPTPEEVRESFLKFDPKLGELPSEPGKALIVRDEVDRPQPRLDRNMGKGMSVSVGRIREGIRYIAMGHNTIRGAAGASVLNAELLHSMGKL

SEQ ID NO: 117394 - DNA, 1029 bp, Methanosarcina mazei Go1
  CDS (1)..(1029): transl_table=11
atggcagcagttaaagcgggtattttaggcgccactggcgctgtagggcagagatttgtagaagcacttgcaaaccatccatggtttgagatcacagcccttgcagcatccgaaaggagcgccggcaaaacgtatagagaagcggcaggctggaggcttgacacagccatgccggaaagtgtcgaaaacatagaggttgttcctgtagacccaaaaacagttgatgcagatgtggtcttttcagctcttcctgcagaccttgcccttacagtggaatccgagtttgcaaaagccgggtttgcagttgcaagcaatgcatcttcctacaggatggaaaaagacatccctcttgtaatccctgaagtaaaccccgaacacctggggctccttgaagtccagcaggatacaaggggctgggacggatacattatcactaaccctaactgctccacaattgtcatgacagttaccctgaagcccctgatgcagtttgggctcgaaaccgtacaggtcgccacaatgcaggcgatttccggagcaggtttctccggagttgcagccatggcaatctatgacaatgtaatcccctatataggaagcgaagaaaaaaagatggaaactgaaaccttaaagctcctgggagaattcaacggctcagaaatcgtgcctgcagatatgaaggtcagcgcttcctgccacagggtgcctgtagttgacgggcacacggaagccatctgggcaggcatgagagaaaaccccacgcctgaagaagtaagggaagccttcctgaaattcgacccaaaacttggagaactcccctcagagccgaaaaaagctctcatagtgcgggacgaagtagatagacctcagccgcgccttgaccgcaacatgggaaaaggcatgagtgtctcagtggggaggatcagagaaggtatccgatacatcgcaatggggcacaacacgatccgcggagctgcgggcgcgagtgtcctgaatgccgagcttctgcattcgatgggcaagctctga

SEQ ID NO: 117395 - protein, 342 aa, Methanosarcina mazei Go1
MAAVKAGILGATGAVGQRFVEALANHPWFEITALAASERSAGKTYREAAGWRLDTAMPESVENIEVVPVDPKTVDADVVFSALPADLALTVESEFAKAGFAVASNASSYRMEKDIPLVIPEVNPEHLGLLEVQQDTRGWDGYIITNPNCSTIVMTVTLKPLMQFGLETVQVATMQAISGAGFSGVAAMAIYDNVIPYIGSEEKKMETETLKLLGEFNGSEIVPADMKVSASCHRVPVVDGHTEAIWAGMRENPTPEEVREAFLKFDPKLGELPSEPKKALIVRDEVDRPQPRLDRNMGKGMSVSVGRIREGIRYIAMGHNTIRGAAGASVLNAELLHSMGKL

SEQ ID NO: 117396 - DNA, 1077 bp, Streptococcus agalactiae 2603V/R
  CDS (1)..(1077): transl_table=11
atgggatataccgttgctatcgtaggtgctacaggtgccgtaggaacacaaatgattcgtcaattagaacaatcgaatttaccaatagaacaagtgaaacttttatcatcaagtcgctcagcaggtaaaattttacattttaaagatgaggctatacgtgttgaagagacaacaaaagaatcattttacgatgttgatattgccttgttttcagctggtggatctatttcagcaaagttcgctccttatgcagtaaagtctggagcagttgtagtagataacacgtcatattttcgtcagaatcctgatgttccactagttgttcctgaagtaaatgctcatgccatgattggtcataatggtatcatagcttgccccaattgttctactattcaaatgatgattgctttagagcccattcgtcaaaaatgggggatagagcgtgttatagtttccacctatcaagctgtttcgggttcaggtgcacgtgctgttgaagaaactaaggaacagttgagacaagttttaaatgataacctttcacctgatcaattaattgcaacagtcttgccatgttctagcgatcaaaaacattatcctatcgcattcaatgcattacctcaaattgatatttttactgataatgattatacgtacgaagaaatgaaaatgactttggagacaaagaaaattatggaagatgctactattaaggtttcagctacctgcgtccgtattcccgttttatcggggcattctgagtccatttatattgagacgaaagaattagcctcaatctctgaaattaaaaaggctattgcaaattttcctggtgccgtcctacaagaccttccatctcagcaaatttaccctcaagcgattaatgctgtaggccatagggagacctttgttggtcgtattcgaaaagaccttgatcaagaaaatggtgttcatatgtgggtagtttcagataatctactgaagggggcagcttggaattctgttcaaattgcagaaacattgcataagaatgggctggttaaaccagcaaaagagttaaaatttgaattaatatag

SEQ ID NO: 117397 - protein, 358 aa, Streptococcus agalactiae 2603V/R
MGYTVAIVGATGAVGTQMIRQLEQSNLPIEQVKLLSSSRSAGKILHFKDEAIRVEETTKESFYDVDIALFSAGGSISAKFAPYAVKSGAVVVDNTSYFRQNPDVPLVVPEVNAHAMIGHNGIIACPNCSTIQMMIALEPIRQKWGIERVIVSTYQAVSGSGARAVEETKEQLRQVLNDNLSPDQLIATVLPCSSDQKHYPIAFNALPQIDIFTDNDYTYEEMKMTLETKKIMEDATIKVSATCVRIPVLSGHSESIYIETKELASISEIKKAIANFPGAVLQDLPSQQIYPQAINAVGHRETFVGRIRKDLDQENGVHMWVVSDNLLKGAAWNSVQIAETLHKNGLVKPAKELKFELI

SEQ ID NO: 117398 - DNA, 1095 bp, Bifidobacterium longum NCC2705
  CDS (1)..(1095): transl_table=11
atgtccgaaaaattgaaggtcggcatccttggtgccaccggtatggtcggtcagcgttttatcacgctgcttgagaatcacccgtggttcgaggtggtcacgcttgccgcttccgcgcacagcgccggcaagacgtatgccgaggctgtcggcgaccgttggaagatggaaaccccgatgcccgaatatgtcaagaacatggtggtcgtcgatggcgacgatgccgagtccgtggcctctggcgttgatttcatgttctctgcggtaaacatgccgaaggaccagattcgcgccattgaagagcgttatgccaagaccgagaccccggtggtctccaacaacagcgcccaccgctggaccccggacgtgccgatggtggtgccggagatcaacccggagcacttcgaggtgatcgagcaccagcgcaagcgcctgggcaccactcgtggttttatcgccgtcaagccgaactgctcgattcaggcctacacgccggcgctggccgcgtggaaggaattcgagccgcgcgaggtggttgtgagcacctaccaggcaatttccggcgcgggcaagaccttcaaggactggcccgagatggtgggcaacatcatcccgttcatctccggtgaggaagcaaagtctgagaaggaaccgctcaaggtgttcggccatgtggacgccgccaagggcgagatcgtgccgttcgacggcgacctcaagatcacttcccagtgcatccgcgtgcccgtgctcaacggccacaccgccaccgtgttcctgaacttcggcaagaaggccaccaaggaagagctcatcgaccgtctggtgaactacacgtccaaggcttccgagctggagctgccgcacgcaccgaagcacttcatccagtacctcaccgaggatgaccgcccgcaggtcaagctcgacgtggactacgagggtggcatgggcgtttccatcggccgtctgcgtgaggattccatcttcgattggaagttcgtgggtctggcccacaacaccctgcgtggtgcagccggcggtgcccttgaatgcgccgaaatgctcaaggctctcggctacatcaccaagaagtag

SEQ ID NO: 117399 - protein, 364 aa, Bifidobacterium longum NCC2705
MSEKLKVGILGATGMVGQRFITLLENHPWFEVVTLAASAHSAGKTYAEAVGDRWKMETPMPEYVKNMVVVDGDDAESVASGVDFMFSAVNMPKDQIRAIEERYAKTETPVVSNNSAHRWTPDVPMVVPEINPEHFEVIEHQRKRLGTTRGFIAVKPNCSIQAYTPALAAWKEFEPREVVVSTYQAISGAGKTFKDWPEMVGNIIPFISGEEAKSEKEPLKVFGHVDAAKGEIVPFDGDLKITSQCIRVPVLNGHTATVFLNFGKKATKEELIDRLVNYTSKASELELPHAPKHFIQYLTEDDRPQVKLDVDYEGGMGVSIGRLREDSIFDWKFVGLAHNTLRGAAGGALECAEMLKALGYITKK

SEQ ID NO: 117400 - DNA, 1035 bp, Brucella suis 1330
  CDS (1)..(1035): transl_table=11
atgggtttcaaggttgcagttgcaggcgccaccggtaatgtcgggcgcgaaatgctcaatattctcgaagagcgcggttttccggcggatgaggtcgtgccgctcgcctcgcgccgtagccagggcacggaagtttcctatggcgacaagacgctgaaggttcgcgcgctcgacacctatgatttttccgatacggatatctgcctgatgtcggctggcggttcggtatcgcaggagtggtcgccgaagatcggcaggcagggctgcgttgtcatcgataattcgtccgcatggcgctatgacgccgatgtgccgctgatcgtgccggaagtaaacccggacaccattgcgggcttcaccaagaagaatataatcgccaacccgaactgctcgactgcccagctcgtcgttgctctgaagccattgcatgatgcagccaagatcaagcgcgtcgttgtttccacctatcagtcggtttcaggtgctggcaaggaaggcatggacgaactgttcgagcagtcgcgcgcggttttcgttgccgatccgatcagcacgaagaagtttactaagcgcatcgccttcaacgtgatcccgcatatcgatgtctttatggaagacggctacaccaaggaagaatggaaaatggtggccgaaaccaagaagatgctcgatccgaagatcaagcttacggcaacggcggttcgtgtgccggtcttcattggtcactcggaagctgtcaatatcgagtttgaaaatccgatcacgccggaagaggcgcgcgagattctgcgcgaagcgccgggctgccaggtgatcgacaagcatgaaaacggcggttacatcacgccttatgaatccgcgggtgaagatgcgaccttcatcagccgcatccgcgaggacatcacggttgaaaacggcctggccatgtgggtcgtatccgacaatctgcgcaagggcgctgccctgaatgcaatccagattgccgagcttctggtggcgcgcggtctcatcaagccgaaggcgcttgccgcctga

SEQ ID NO: 117401 - protein, 344 aa, Brucella suis 1330
MGFKVAVAGATGNVGREMLNILEERGFPADEVVPLASRRSQGTEVSYGDKTLKVRALDTYDFSDTDICLMSAGGSVSQEWSPKIGRQGCVVIDNSSAWRYDADVPLIVPEVNPDTIAGFTKKNIIANPNCSTAQLVVALKPLHDAAKIKRVVVSTYQSVSGAGKEGMDELFEQSRAVFVADPISTKKFTKRIAFNVIPHIDVFMEDGYTKEEWKMVAETKKMLDPKIKLTATAVRVPVFIGHSEAVNIEFENPITPEEAREILREAPGCQVIDKHENGGYITPYESAGEDATFISRIREDITVENGLAMWVVSDNLRKGAALNAIQIAELLVARGLIKPKALAA

SEQ ID NO: 117402 - DNA, 1035 bp, Bradyrhizobium japonicum USDA 110
  CDS (1)..(1035): transl_table=11
atgggttacaaagtcgcagtcgtcggcgcgaccggcaatgtcggacgggaaatgctcaacatcctcgatgagcgcaaattccccgcggacgaggtcgtggccctcgcgtcacgccgcagcgtcggcgtcgaggtctcctatggcgaccgcaccctgaaggtcaaagcgctcgagcactacgacttctccgacgtcgacatctgcctgatgtcggcgggcggctcggtgtcgaaggaatggtcgccgaagatcggcgccgccggcacggtcgtgatcgacaattcctcggcctggcgcatggacccggacgtgccgctgatcgtgcccgaggtgaacgcggatgcggccgcgggcttcaagacgaagaacatcatcgccaacccgaactgctcgacggcgcagctcgtggtcgcgctgaagccgctgcacgacaaggcgacaatcaagcgcgtcgtggtctccacctatcaatcggtgtcgggcgccggcaaggatgcgatggacgaattgttctcgcagaccaaggccgtctacaccaacagcgagatcgtcaataagaagtttcccgcgcgcatcgccttcaacatcattccccagatcgacgtcttcatggaggacggctacaccaaggaagagtggaagatgatgatggagaccaagaagattcttgatcccaagatcaagctctccgcgacctgcgtgcgcgtgcctgtcttcgtcggccactccgaggccgtcaacatcgagttcgagaacccgatcagcgccgacgaagcgcgcaacatcctgcgcacagcgccgggctgcctcgtcatcgacaagcatgagcccggcggctacgccacgccgtatgaagccgccggcgaggacgcgacctatatcagccgcatccgcgaggacgcgacagtggagaacggcctcgtgctgtggtgcgtgtccgacaatttgcgcaagggcgccgcgctcaacgcgatccagatcgccgaagtgctgatcaaccgcaagctgatcagcgcgaagaagaaggcggcgtaa

SEQ ID NO: 117403 - protein, 344 aa, Bradyrhizobium japonicum USDA 110
MGYKVAVVGATGNVGREMLNILDERKFPADEVVALASRRSVGVEVSYGDRTLKVKALEHYDFSDVDICLMSAGGSVSKEWSPKIGAAGTVVIDNSSAWRMDPDVPLIVPEVNADAAAGFKTKNIIANPNCSTAQLVVALKPLHDKATIKRVVVSTYQSVSGAGKDAMDELFSQTKAVYTNSEIVNKKFPARIAFNIIPQIDVFMEDGYTKEEWKMMMETKKILDPKIKLSATCVRVPVFVGHSEAVNIEFENPISADEARNILRTAPGCLVIDKHEPGGYATPYEAAGEDATYISRIREDATVENGLVLWCVSDNLRKGAALNAIQIAEVLINRKLISAKKKAA

SEQ ID NO: 117404 - DNA, 1047 bp, Methanococcus maripaludis S2
  CDS (1)..(1047): transl_table=11
atgaacataaaagtaggtattttgggagctactggaaacgttggacagagatttatacagatgcttgaaaatcatcccgtttttgaactcgaagcgcttggtgcatcacagaggagtgcgggaaaaacttacaaagatgcatgctactggtaccagaccgaaccaattcccgaagaaattgcaaatgcaactgttgtttcaactgatcctaacgataaagcttatgaagacgttgatattgttttttcagcgctacctgcagatctagcaaaaacacttgagccagaatttgctaaagctggaaaatacgtattttcaaacgcttcagcaatgaggatggaatcagacgttccattaattgttccagaagtaaaccctgaacactttggaatgcttgatgttcaaaaaagcaacaggtgctcagatggtgcaataattacaaatccaaactgttcaacaattggggcagtaatttcattaaaaccgataatggataaatttggaattgatttagtaaatatcaccacaatgcaggcaataagcggtgcaggatacagtggagttccatcaatggcaattttagacaatatggttccatacattggcggtgaagaagaaaaaatgcagacagaagcattaaaaattcttggaagtatcgacggaaacaattttaaaaacggaaactttaaaattggagtatcctgtaacagagttccagtaattgatggccacactgaaagtatattcgtaaaaacaactgaagaagcaactcctgaagaaattgcaaaagtaatggatgattttgatcctttaaaaggtttaaatttaccaagctacgcaaaaccaattgtgctaagggaagaaaatgacagacctcaaccaagactcgacagaaatactggaaatggaatgtcaattgttgttggaagagttagaaaagatccaatctttagtgtaaagtacactgcacttgaacacaacactataaggggcgctgcaggagcaagtgttttaaatgctgaattattcgttcaaaaatacctttaa

SEQ ID NO: 117405 - protein, 348 aa, Methanococcus maripaludis S2
MNIKVGILGATGNVGQRFIQMLENHPVFELEALGASQRSAGKTYKDACYWYQTEPIPEEIANATVVSTDPNDKAYEDVDIVFSALPADLAKTLEPEFAKAGKYVFSNASAMRMESDVPLIVPEVNPEHFGMLDVQKSNRCSDGAIITNPNCSTIGAVISLKPIMDKFGIDLVNITTMQAISGAGYSGVPSMAILDNMVPYIGGEEEKMQTEALKILGSIDGNNFKNGNFKIGVSCNRVPVIDGHTESIFVKTTEEATPEEIAKVMDDFDPLKGLNLPSYAKPIVLREENDRPQPRLDRNTGNGMSIVVGRVRKDPIFSVKYTALEHNTIRGAAGASVLNAELFVQKYL

SEQ ID NO: 117406 - DNA, 1353 bp, Magnaporthe grisea 70-15
  CDS (1)..(1353)
atgacgtctcaattccccaccaagaagtgtggcgtcctcggcgcgaccggctcggttggccaacgctttattctccttctccagcagcacccatccttcaccctcgtcgcagtcggcgcctcatcccggtccgccggcaaggcctacaaggatgccgtgcgctggaagcagtcctcccctatggtgcaggctgtcgccgacctggtggtccgcgagtgccgcccttccgagtttgcagactgcgacgtcgtcttctcgggcctcgactcggacgtggccggtgatgtcgagatggcgttcctcaaggcggatctagccgtcttctccaacgccaagaactacaggcgcgacccgctggtccccttggttgtgcccaccgtcaacctgccgcacctgagcatgatcccgcaccagcgcaagcaccacggcctgaacaaaggtttcctggtctgcaacagcaactgcgccgtcattgggctcgtcatcccctttgccgcgctgcaggcgcgcttcgggcccatcgaaaccgtctccgttgtgaccatgcaggccgtctcgggtgccggctacccgggtgtgtcgtccatggacatcatcgacaacgtggtgccctacatcgccggcgaggaggacaagcttgagagcgaggcccgaaagatcctcggcggcatcaacgccgaggccaccgcctttgaggagcagacgtcgatgcgcgtcagcgccagctgcaaccgcgtccccgtgctcgacggccacacggcctgcgtctcgctgcgtttcgcaaacaggccccctcccccggccgaggccgtcaaagccgccatggccacctacgtgagtgaggcagagtcgctgggctgcccttccgccccgtcgccgtccataatggtgtttgaggaggcggatagacctcagcccaggctcgatagggatctctcgaggggttataccgtcagcgtgggccgggtccgcgaggacgagagcgggatttttgacattaagtttgttgcgttgagccacaacaccgtaatcggagcagcaggatcatccattctgaatgccgaggcagccgttctgaagggctacctactgaaatggtatcggcgaggaaacatctttgaccttcacacgcggctccatgcccacatgtctcaagtatcttccaagcttatgagcaaccagaaaacgtcgtacaaatttgcgccgttgacgattacggcacaaagatctagataccgttccaaacgagactcgtttttcggcgtccggctggggaacacaatacacagatgctaccccgggcccgagtgggcgctgagacgtgatgaaccaaagtttcagtgcgacggatga

SEQ ID NO: 117407 - protein, 450 aa, Magnaporthe grisea 70-15
MTSQFPTKKCGVLGATGSVGQRFILLLQQHPSFTLVAVGASSRSAGKAYKDAVRWKQSSPMVQAVADLVVRECRPSEFADCDVVFSGLDSDVAGDVEMAFLKADLAVFSNAKNYRRDPLVPLVVPTVNLPHLSMIPHQRKHHGLNKGFLVCNSNCAVIGLVIPFAALQARFGPIETVSVVTMQAVSGAGYPGVSSMDIIDNVVPYIAGEEDKLESEARKILGGINAEATAFEEQTSMRVSASCNRVPVLDGHTACVSLRFANRPPPPAEAVKAAMATYVSEAESLGCPSAPSPSIMVFEEADRPQPRLDRDLSRGYTVSVGRVREDESGIFDIKFVALSHNTVIGAAGSSILNAEAAVLKGYLLKWYRRGNIFDLHTRLHAHMSQVSSKLMSNQKTSYKFAPLTITAQRSRYRSKRDSFFGVRLGNTIHRCYPGPEWALRRDEPKFQCDG

SEQ ID NO: 117408 - DNA, 1095 bp, Gibberella zeae PH-1
  CDS (1)..(1095)
atggcttctcaattccctaccaggaagtgcggtgtcctcggtgccactggctctgtcggccagcgcttcatccttcttctcgctcagcacccttacctcaccctccacgccattggcgcctcatctcgatctgctggcaagaagtacaaggatgctgttcgatggaagcaagcctctcccatgggcgaaatcgccgacatggttgttagagagtgcaaggccgaggagttccaggactgcgatgttgtattcagtggtcttgattcggacgtcgctggcgatattgagatggctttcatcaaggccgacatccccgtcttctccaacgcaaagaactaccgccgcgaccctctagtacctctcgtcgtccctaccgtcaacctccctcatctcgacctcatcccccaccagcgttccgtccacaagcttaacaagggcttcctcgtttgcaactccaactgcgccgtcattggtcttgtcggacccttcgccgccctccaggctgcctttggacccatctctaccgtttccatcgtcactctccaggccgtctccggtgccggttaccctggtgtttccagcatggatgtgatcgacaacatcgtccctttcatctcaggtgaagaggataaactcgagacagaagcccgcaagattctcggccgtctcgatgataatggcactgcctttattgaccaagagggtcttcgagtctctgctacttgcaaccgcgtccccgtcatggacggtcacactgcctgtgtcagcttgagctttgagcgcaagccctctccctcagctgaggaggtccgcaaggctctccgtgactacaagtgcgaggcccaggcccttggctgcccttcggcacccgagcctgctatcaaggtctttggtgatgacgagcctgaccgtcctcagccccgtctcgatcgcgaccttggccgtggttatactgtgagtgttggccgtgtacgtgaggatgaggccggtatttttgacattaagttcactgctctgagccacaacaccgtcattggtgctgctggttcctcgatattgaacgccgaggctgccattctcaagggttatatctaa

SEQ ID NO: 117409 - protein, 364 aa, Gibberella zeae PH-1
MASQFPTRKCGVLGATGSVGQRFILLLAQHPYLTLHAIGASSRSAGKKYKDAVRWKQASPMGEIADMVVRECKAEEFQDCDVVFSGLDSDVAGDIEMAFIKADIPVFSNAKNYRRDPLVPLVVPTVNLPHLDLIPHQRSVHKLNKGFLVCNSNCAVIGLVGPFAALQAAFGPISTVSIVTLQAVSGAGYPGVSSMDVIDNIVPFISGEEDKLETEARKILGRLDDNGTAFIDQEGLRVSATCNRVPVMDGHTACVSLSFERKPSPSAEEVRKALRDYKCEAQALGCPSAPEPAIKVFGDDEPDRPQPRLDRDLGRGYTVSVGRVREDEAGIFDIKFTALSHNTVIGAAGSSILNAEAAILKGYI

SEQ ID NO: 117410 - DNA, 1074 bp, Candida glabrata CBS 138
  CDS (1)..(1074)
atgaagactgctggtgtattaggtgctactggttccgtgggccaaagatttatcctgctgttggctgaccacccggactttgagctgaaggtgttgggtgcttctccaaggtctgccggcaagaagtacgtcgatgctgtcaactggaagcagactgacctgctgcctgagtccgccaaggacatcgttgtcgtcgagtgtaaagcagaggagttcaaggactgtgacgtcgtcttctccggtctagacgcagactacgctggccctatcgagaaggagttcatggaggctggtcttgccgtcatctccaacgccaagaactacagaagagaggaagacgtcccactggtggtccctatcgtgaacccagaacacttggacatcgtcgcacaaaagaagaagcagaacccaaaggccggtttcatcatctgtatctctaactgttccaccgccggtctggtcgccccactaaagcctctggttgaaaagtacggcccaattgatgctttgaccactaccactttgcaagccatctccggtgccggtttctccccaggtgtgccaggtatcgacatcctagacaacatcatcccatacatcggaggtgaagaagacaagatggaatgggaaactaagaaaatcttgggtaagttgtccccagacaattccaccgtcgaactgatctccgaggatgatctaaaggtctccgctcaatgtaacagagtcgccgtttccgacggtcacaccgagtgcatctccttcagattcaagaacagaaacgtcccatccgtcgaagagttgaagaagaccttgtctgactacgtctgtgacgcttacaagttgggctgtcattccgccccaaagcaaactatccacgtcctagagcaaaacgacagacctcaaccaagactagacagaaacagagacaacggttacggtgtctccgtcggtagagtcagagccgacccagtcctggacttcaagatggtcgtcctgtcccacaacaccatcatcggtgctgccggttcaggtatcttgatcgctgaaatcctgttggctaagaacttgatttaa

SEQ ID NO: 117411 - protein, 357 aa, Candida glabrata CBS 138
MKTAGVLGATGSVGQRFILLLADHPDFELKVLGASPRSAGKKYVDAVNWKQTDLLPESAKDIVVVECKAEEFKDCDVVFSGLDADYAGPIEKEFMEAGLAVISNAKNYRREEDVPLVVPIVNPEHLDIVAQKKKQNPKAGFIICISNCSTAGLVAPLKPLVEKYGPIDALTTTTLQAISGAGFSPGVPGIDILDNIIPYIGGEEDKMEWETKKILGKLSPDNSTVELISEDDLKVSAQCNRVAVSDGHTECISFRFKNRNVPSVEELKKTLSDYVCDAYKLGCHSAPKQTIHVLEQNDRPQPRLDRNRDNGYGVSVGRVRADPVLDFKMVVLSHNTIIGAAGSGILIAEILLAKNLI

SEQ ID NO: 117412 - DNA, 1095 bp, Kluyveromyces lactis NRRL Y-1140
  CDS (1)..(1095)
atgggtaagaaagtcgctggtgtcttaggagctactggttccgttgggcaaagatttatcttgttgttagctgaccatccagattttgaattgaaggttttgggtgcttcttccagatctgcaggtaagaagtatgtcgatgctgtgaactggaaacaaaccgatttgttaccagaatttgctaagtccatcattgtttctgaatgtaccgctgatgccttcaaggactgtgatgttgtgttctctggtttggatgctgactatgctggtccaattgagaaggaattcaaggaacatgggttagctgttatttctaatgctaagaactacagaagagaagaagatgtgccattaatcgttccaatcaccaacccagaacatttggatttggttaacgcgaacttggtaaaggccaagcaagaaggtaagccaagacctggttttattatttgtatctcaaactgttctactgctggtttagtggccccattgaaaccattagttgaaaaattcggtcctatttctctattgaccactaccactttacaagccatttccggggctggtttctctccaggtgtcccaagtatcgatatcttagataacatcatcccttacattggcggcgaagaagacaagatcgaatgggagaccaagaagatcttgggtgctttgagtcaagataaatctcaaattaacctattgagcgatgacgaaatcaaggtttctgctcaatgtaaccgtgttgctgtctctgacggtcacactgaatgtatctctttgaagttcaagaaccagccagctccatctgtcgaagaagtaaaacaatgtctaagagactatgtctgtgatgctgctaagttgggatgccattctgcgccaaaacaaaccatccatgtcttggaacaaaatgatagaccacaaccaagattggacagaacaagagacaatggttacggtgtatctgttggtagagtcagagaagatcctgtattggacttcaaaatggttgtattgtcccacaacaccgttatcggtgctgcaggtgcaggtatcttgattgccgaaattctattagccaagaacatcatctaa

SEQ ID NO: 117413 - protein, 364 aa, Kluyveromyces lactis NRRL Y-1140
MGKKVAGVLGATGSVGQRFILLLADHPDFELKVLGASSRSAGKKYVDAVNWKQTDLLPEFAKSIIVSECTADAFKDCDVVFSGLDADYAGPIEKEFKEHGLAVISNAKNYRREEDVPLIVPITNPEHLDLVNANLVKAKQEGKPRPGFIICISNCSTAGLVAPLKPLVEKFGPISLLTTTTLQAISGAGFSPGVPSIDILDNIIPYIGGEEDKIEWETKKILGALSQDKSQINLLSDDEIKVSAQCNRVAVSDGHTECISLKFKNQPAPSVEEVKQCLRDYVCDAAKLGCHSAPKQTIHVLEQNDRPQPRLDRTRDNGYGVSVGRVREDPVLDFKMVVLSHNTVIGAAGAGILIAEILLAKNII

SEQ ID NO: 117414 - DNA, 1098 bp, Debaryomyces hansenii CBS767
  CDS (1)..(1098)
atggcattaaagaaagcaggtgttttaggagccactggttctgtcggtcaacgttttattttactcttagccaaccatcctgaatttgaaattcatgcattaggtgcatctggtcgttcagctggaaagagctataaggacgctgttacatggaaacagacggaattgcttccagaaattgccaaaaatgttaaggttgaggaatgtaagccagaagggtcattttccgagtgtgatgttgtgttctcgggattggatgctgattttgctgggcaaattgaaaaggactttgttgaagcaggtttgatcgttatttcgaacgccaaaaactacagaagagaggctgatgtgccattggttgtgccaattgtgaatccagaacatttgtctattgttgaaaagaaggttgaagctgccaaggctgatggtaaggaaaagccaggatttatcatctgtatttctaactgctctactgccggtttggttgctccattgaagcctttggttgatgcctacggtccaattgaattattgacaaccaccactttacaggctatatctggtggtggattctcgccaggtgttccaggtattgacgtgttggacaacattgttccatacatcagtggtgaagaagagaagatggaatgggaaacgaagaaaattttgggaggtgttaataacgatggaactgaattcaagattttgtctgatgacgacattaaggtgagtgctcaatgtaatcgtgttgctgttagtgatggacacaccgaatgtatctctttgaagtttgccaacagaccaccaccatcccttgaccaagtcaaacaaaccttgagagattatgtttgtgatgcctcgaagttgggttgtcactcggctccaaaacaaaccatccacgttttagaagaagacgacagaccacaacctagattggacagagatagagatagcggatacggagtttctgttggtagaattagagaagaccctgttttagatttcaagatggttgtcttatctcacaacactattattggtgctgctggtgctggtatattgattgccgaaatcttgttagccaagaacgtcatctag

SEQ ID NO: 117415 - protein, 365 aa, Debaryomyces hansenii CBS767
MALKKAGVLGATGSVGQRFILLLANHPEFEIHALGASGRSAGKSYKDAVTWKQTELLPEIAKNVKVEECKPEGSFSECDVVFSGLDADFAGQIEKDFVEAGLIVISNAKNYRREADVPLVVPIVNPEHLSIVEKKVEAAKADGKEKPGFIICISNCSTAGLVAPLKPLVDAYGPIELLTTTTLQAISGGGFSPGVPGIDVLDNIVPYISGEEEKMEWETKKILGGVNNDGTEFKILSDDDIKVSAQCNRVAVSDGHTECISLKFANRPPPSLDQVKQTLRDYVCDASKLGCHSAPKQTIHVLEEDDRPQPRLDRDRDSGYGVSVGRIREDPVLDFKMVVLSHNTIIGAAGAGILIAEILLAKNVI

SEQ ID NO: 117416 - DNA, 1095 bp, Yarrowia lipolytica CLIB122
  CDS (1)..(1095)
atggtcaagactaaaaaggctggagttctcggtgccaccggatctgtgggccagcgattcattctgctgctctcggagcaccccgagttcgagctgtctgttctgggagcttcttctcgatctgccggcaagaagtacgttgatgcttgtgactggaagcagacggatgttctccccgaggctgctggccagaccgtggtcaaggagtgcactcccgagaactttgccgagtgcgacgtggtcttttccggcctggacgccgactacgctggtgacattgagaaggcttttgttgacgccggtctcgtggtgatttccaacgccaagaactaccgacgagagcctaccgtgcccctggttgtccccaccgccaactccgagcacctggactgcttttccgagcgagtggttgctgcccgaaaggctggcaagaagcagggctaccagatctgcaactccaactgctctaccgccggccttgtgatccctctcaaggctctggtcgacgcctttggccccattgacaaggtcattgtcacaaccatgcaggccgtttccggtgctggcttctctcccggtgtcccctccatggatgttctcgataacctcatcccttacatttccggcgaggaggacaagatggagtgggagaccaagaagattctgggccacgtcagcgccgacggagccacctttgagaacattcccgactcggagctcaaggtctctgccacctgcaaccgagtggctgtcattgacggccacaccgaatgtgtcgccttctccttcaagtccgacaagaagccctccgtcgacgaggtcaagaaggtgctcaacgactacgtgtccgagccacaaaagctgggctgtccctccgcccccaagaaggccatccacctgcttgagcagcccgacagaccccagccccgtctggaccgaaaccgagacaacggctacgccgcatctgtcggccgagtccgagaggacgccgtgctcgacttcaagttcaccgttctatcccacaacactgtcattggtgctgccggatccggtattctgattgccgagactctgctgaagaagaatctcatctag

SEQ ID NO: 117417 - protein, 364 aa, Yarrowia lipolytica CLIB122
MVKTKKAGVLGATGSVGQRFILLLSEHPEFELSVLGASSRSAGKKYVDACDWKQTDVLPEAAGQTVVKECTPENFAECDVVFSGLDADYAGDIEKAFVDAGLVVISNAKNYRREPTVPLVVPTANSEHLDCFSERVVAARKAGKKQGYQICNSNCSTAGLVIPLKALVDAFGPIDKVIVTTMQAVSGAGFSPGVPSMDVLDNLIPYISGEEDKMEWETKKILGHVSADGATFENIPDSELKVSATCNRVAVIDGHTECVAFSFKSDKKPSVDEVKKVLNDYVSEPQKLGCPSAPKKAIHLLEQPDRPQPRLDRNRDNGYAASVGRVREDAVLDFKFTVLSHNTVIGAAGSGILIAETLLKKNLI

SEQ ID NO: 117418 - DNA, 1092 bp, Aspergillus nidulans FGSC A4
  CDS (1)..(1092)
atggcgtcgtttcccaaaaagaagtgcggtgttcttggtgccaccggctcggtaggccaaagattcattctgttgctcgcggagcatcctttcctggagctacatgccatcggtgcctcagagcggtctgcgggcaagaaatacaaggacgcagtacgatggaaacagagtacgccaatgtctgagaagctcagcgacctagttctacggaactgcaaggccgagaatttcactgattgcgacctcgtgttctctggcttaaacagtgatgttgcaggtgatctagaaatggaattcatcaaggctgatatccctgtcttctcaaacgcgaagaactaccgcaaacatcccgttgtcccgctcgttgttcccacagttaaccctaatcacctcgacctcattcctcaccagcgcaaacatttcggcctgaagaagggatttttggtctgtaactctaactgcgccgtcatcggaatcgttattccatttgctgccctccaggccaagttcggcccagtcgaagaggtagaggttttcacagaacaagccgtgtctggagctggctacccgggcgttcccagtatggatatcatggacaacgttatccccttcatcagcggcgaggaggataaacttgagaatgaagcccagaagatccttggttcactgacagcggatgccaccgctttcgacgagcagcaaggacttaggatcggagccacctgcacaagagttggtgtcaccgacggccacatggcgttcgtttctctgcgtttcaagaaccgcccagctcccagcgctgaacaagtggtgcaagccatgagagaataccagtcagaagctcagaagcttggatgtccatctgccccggccgaggccatcaaagtgttcgatgagcccgacaggccgcagccaagactagaccgagacatcaacaggggttacacagtcagcgtgggacgagtgcgcgagggtaaccagggtggttatttcgatatacgattcgcagctctctcacacaacactgtcatcggggctgctggatcttcaatcctcaacgccgaagtggcagttatcaagggatacatctag

SEQ ID NO: 117419 - protein, 363 aa, Aspergillus nidulans FGSC A4
MASFPKKKCGVLGATGSVGQRFILLLAEHPFLELHAIGASERSAGKKYKDAVRWKQSTPMSEKLSDLVLRNCKAENFTDCDLVFSGLNSDVAGDLEMEFIKADIPVFSNAKNYRKHPVVPLVVPTVNPNHLDLIPHQRKHFGLKKGFLVCNSNCAVIGIVIPFAALQAKFGPVEEVEVFTEQAVSGAGYPGVPSMDIMDNVIPFISGEEDKLENEAQKILGSLTADATAFDEQQGLRIGATCTRVGVTDGHMAFVSLRFKNRPAPSAEQVVQAMREYQSEAQKLGCPSAPAEAIKVFDEPDRPQPRLDRDINRGYTVSVGRVREGNQGGYFDIRFAALSHNTVIGAAGSSILNAEVAVIKGYI

SEQ ID NO: 117420 - DNA, 1098 bp, Candida albicans SC5314
  CDS (1)..(1098): transl_table=12
atgtcagtaaagaaagctggagttttgggagctacaggttccgtgggtcaaagatttatattattgttatccaaacacccagaatttgaaatacatgctttgggtgcatcatcaagatctgctggtaagaagtataaagatgcagctagttggaaacaaactgaaacattaccagagacagagcaagacattgttgtacaagaatgtaaaccagaaggtaactttttagaatgtgatgtcgttttttcaggattggatgctgatgttgcaggtgatattgaaaaatcatttgttgaagcaggtttggctgttgtttcaaacgcaaaaaactacagaagagaaaaagacgttccattggtcgtacctattgttaacccagagcatattgatgttgttgaaaataaagtgaaacaagctgtttccaaaggtggcaaaaaaccaggtttcatcatttgtatctccaactgttccactgctggtttagttgcacctttgaaacctttagttgaaaaatttggtcctattgacgcattaacaactaccacattacaggccatttctggtgccgggttttcacctggtgtttctggaatggatattttagataacattgttccatacattagtggtgaagaggataaattagaatgggaaaccaaaaaaatattgggtggcgtcaatgccgaaggaactgagtttgttccaattccagaaagtgagatgaaagtcagtgcccaatgtaaccgtgtaccagtcattgatggacacactgaatgtatttcattaagatttgctaatagaccagctccatctgttgaagacgtgaaacaatgtttgagagaatatgaatgtgctgccagtaaattaggctgtcattctgcaccaaagcaaaccatccatgtgttggatcaaccagatagaccacaacctagattagacagggacagagacagtgggtatggtgtatccgttggtagaattagagaagattcgttgttagactttaaaatggttgttttatcgcacaataccattattggtgctgctggtgctggtattttgattgctgaaattttgaaagcaaagaatattatctag

SEQ ID NO: 117421 - protein, 365 aa, Candida albicans SC5314
MSVKKAGVLGATGSVGQRFILLLSKHPEFEIHALGASSRSAGKKYKDAASWKQTETLPETEQDIVVQECKPEGNFLECDVVFSGLDADVAGDIEKSFVEAGLAVVSNAKNYRREKDVPLVVPIVNPEHIDVVENKVKQAVSKGGKKPGFIICISNCSTAGLVAPLKPLVEKFGPIDALTTTTLQAISGAGFSPGVSGMDILDNIVPYISGEEDKLEWETKKILGGVNAEGTEFVPIPESEMKVSAQCNRVPVIDGHTECISLRFANRPAPSVEDVKQCLREYECAASKLGCHSAPKQTIHVLDQPDRPQPRLDRDRDSGYGVSVGRIREDSLLDFKMVVLSHNTIIGAAGAGILIAEILKAKNII

SEQ ID NO: 117422 - DNA, 1107 bp, Ustilago maydis 521
  CDS (1)..(1107)
atgacgtcttcttcctcacaacagaagctcaaagtcggcctgctcggcgctacgggcacagtaggtcagcgattcatccttcaacttgctgatcacccgcaattcgagctcgccgctctgggtgcatcgtcttcttcggcaggtaagccgtacttggaagcagtacaagggaggtggaagcagatccgaagggttcccgataatgttgcacagatgcccgtatacgaatgcaagccggaatactttgccgagtgccaagtagtcttctccggtctggattcaggtccagctggacccgtcgaggacgctttccgtagagccgagttgagagtgttttccaatgcaaagaactaccgtaccgatccattgtgcccattggtggtgccactggtcaacccggagcacatggagatcttgccattccagagacagcaagtggggaccaagaagggattcatcgttaccaacgccaactgctctaccacgggcatcgtcgtaccgctgaaagcgctcgaggccaagtttggaccgctggaaaagattctagtcaacacgatgcaggccatttcgggtgctggttaccctggagtttcttcgctcgacatcttggacaacgttgtgccgttcatcagcggtgaggaggagaagatcgagtgggagaccgccaagatcttgggtggcatcaaaacggacaaaaccgcttttgactaccatgaagagcacccactcaaggtttcggcgcactgcaaccgtgttccggtcatcgatggccacatggagtgcgtttctgtgtcgttcaagaaccgacctgcaccctcggttgacgaggtcaaaaagtgcctgcaagagtttaccacggaagcacagaccatcggcgttcactcggctcctaagcaggccattacggtgcacgaggagcaggaccgcccgcaaccacgcctcgatcgtgactggcagaacggtgctggtgtcaatgtcggaagggtacgcgaatgtcccgtgtttgacatcaagtttgtcgtgctctcgaacaatgtcatgatcggtgctgctaccagctcggtcatgaacgcagagatcgcgctcgccaagggttacctttcgtaa

SEQ ID NO: 117423 - protein, 368 aa, Ustilago maydis 521
MTSSSSQQKLKVGLLGATGTVGQRFILQLADHPQFELAALGASSSSAGKPYLEAVQGRWKQIRRVPDNVAQMPVYECKPEYFAECQVVFSGLDSGPAGPVEDAFRRAELRVFSNAKNYRTDPLCPLVVPLVNPEHMEILPFQRQQVGTKKGFIVTNANCSTTGIVVPLKALEAKFGPLEKILVNTMQAISGAGYPGVSSLDILDNVVPFISGEEEKIEWETAKILGGIKTDKTAFDYHEEHPLKVSAHCNRVPVIDGHMECVSVSFKNRPAPSVDEVKKCLQEFTTEAQTIGVHSAPKQAITVHEEQDRPQPRLDRDWQNGAGVNVGRVRECPVFDIKFVVLSNNVMIGAATSSVMNAEIALAKGYLS

SEQ ID NO: 117424 - DNA, 1068 bp, Candidatus Protochlamydia amoebophila UWE25
  CDS (1)..(1068): transl_table=11
atgatgagcggagatttcttctttcgtaacaaaattcctgttgcgattttaggggccacaggttgtgtagggcaaaagttcgtgcaacttttaagcaaacatccgtggtttgaaatttttgctctatgtgcttctgaaaaatcagctgggaaaacttatcaagaagctgttcattggactttgcctactccaattccagacgaagtcaaacaaatgcaggtgcttacttgcgaaacttctttagattgtcagctagttttttctgctctagactcatcgattgccggatttattgaaacccgctttgctgaagctggccatcttgtcatttctaattctcgcaatcatcgaatggaagcgaatgtgcctctagtgattggagaagtcaacccagagcatctagagctagccaaatcccaaccttttcaacgaggcatgatcattaccaaccctaattgctccgttattggaatggttatggctttaaaacctttgatgcctttggggatagacgctgttcatgttgtcaccatgcaagcaatttctggggctggatatcctggtgtggcaagtttggatatcaatgataatattattccttttattaagggggaggaaggcaagcttgaaagcgaacctttaaaaattttaggggatttacagggcactactctccagcctgcttcgattaaaattagtgctcaatgtaatcgtgtacctatcatagatgggcatgttgcatgcttatctatcaaattaaatggctctgcatctcctgaaactatcattcaagcgtggcgtgaattttctggtgagccacaaaaatttcagttgccttcagctcccttacatcccatttattattttgatgatcctttttatcctcaacccagatttcatcgacttttagataaagaaatggctgtttctattggtcgtttacgtccttgttctctaatggattataaatttactctgctttctcacaatatgactcgaggagcagcaggatcggctctactcaatgccgagcttcttgttaaaaaaggctgggtttactggtcttaa

SEQ ID NO: 117425 - protein, 355 aa, Candidatus Protochlamydia amoebophila UWE25
MMSGDFFFRNKIPVAILGATGCVGQKFVQLLSKHPWFEIFALCASEKSAGKTYQEAVHWTLPTPIPDEVKQMQVLTCETSLDCQLVFSALDSSIAGFIETRFAEAGHLVISNSRNHRMEANVPLVIGEVNPEHLELAKSQPFQRGMIITNPNCSVIGMVMALKPLMPLGIDAVHVVTMQAISGAGYPGVASLDINDNIIPFIKGEEGKLESEPLKILGDLQGTTLQPASIKISAQCNRVPIIDGHVACLSIKLNGSASPETIIQAWREFSGEPQKFQLPSAPLHPIYYFDDPFYPQPRFHRLLDKEMAVSIGRLRPCSLMDYKFTLLSHNMTRGAAGSALLNAELLVKKGWVYWS

SEQ ID NO: 117426 - DNA, 1017 bp, Picrophilus torridus DSM 9790
  CDS (1)..(1017): transl_table=11
ttgtcaaagataagggtttcattgcttggttcaacaggcatggttggccagaagatggtaaggctccttgaaaatcatccctatatagagctggccaaggtaagcgcatcaccaaataacacaggtaaaaggtatatagatgcagtaagatgggttgaaaattcagagatcccggagtatgtctctgatatgaatcttgtttccagtgatccaaatgatcatagggatgttgattttgttttgtctgcactgccaagtgagattgcggagggtatagaaacaaggctggtttctaatggaataaatgttatttcaaatgcctcgcctctaagaatgaggagcgatataccattaataaatccggaaataaactatgagcacctatatatgcttgaggacagggatacaaaatatgtaaaaaatccgaactgcacaacaacgataatgtccatgccgctttttgatataataaattctgattatgaaaggatgtatttaacgacaatgcaggccgtaagcggtgctggtttttctggccttccatacatggcaataaataataatataataccatatataaatggcgaggaggaaaagatacctgcagagatatcaaagatctttggatacagaaacgatgataaaatagtaaacagaaacataaaaatgagcgtgacaactgtcagggtacctgttgccgttgatcatgcaggcgttctttatataaacataaaaaattttgatattgaaaactttataaaagatataaggaattttaaacctttatcaagattcagcggcttaacaatggcaccaaggcagccgataattatacatgaaaaaaacgatgcaccacaggttcacgatgtctcaggcatggaaatacatataggcaggctcagctataacgatgacacattaagaatgtacatacttggtgataatttaataaggggtgctgcaggaataacgctgctaacacttgaattaatgcatgcaatgaaattagataattaa

SEQ ID NO: 117427 - protein, 338 aa, Picrophilus torridus DSM 9790
MSKIRVSLLGSTGMVGQKMVRLLENHPYIELAKVSASPNNTGKRYIDAVRWVENSEIPEYVSDMNLVSSDPNDHRDVDFVLSALPSEIAEGIETRLVSNGINVISNASPLRMRSDIPLINPEINYEHLYMLEDRDTKYVKNPNCTTTIMSMPLFDIINSDYERMYLTTMQAVSGAGFSGLPYMAINNNIIPYINGEEEKIPAEISKIFGYRNDDKIVNRNIKMSVTTVRVPVAVDHAGVLYINIKNFDIENFIKDIRNFKPLSRFSGLTMAPRQPIIIHEKNDAPQVHDVSGMEIHIGRLSYNDDTLRMYILGDNLIRGAAGITLLTLELMHAMKLDN

SEQ ID NO: 117428 - DNA, 1017 bp, Bartonella henselae str. Houston-1
  CDS (1)..(1017): transl_table=11
atgagctttaaagttgcagttgtcggagcaaccggaaatgttggtcgtgaaatgcttacaattcttgaagaacgtggttttcctactcatgaaattgttcctttagcatcacgccgctctctagggcaaagcgtttcctatggtgacaaaactttaaaagtcaaagcgcttgatacatacgatttttccgatacggacctctgcctcatgtctgctggaggaagtatttctaaagaatatgcccctaaaatcgctgctgctggctgtgtggtaatcgacaactcatccacttggcgctatgatagcaatattccgttgattgtacctgaagtcaatgcacaagccattgatcaattttccaagcgcaatattatagccaaccccaattgttcaacaattcaacttgtcttagctttaaaacctctccatgaggcagcgtgcattaaacgtgttgttgtgtctacttaccaatcggtttctggagcgggtaaagaagggatggatgaactctttgaacaatcacgagcagtttttgttgcagatccaatcacatcaaaaaaatttaccaaacgcattgccttcaacattattccccatatcgatgtcttcatggaagatgggtatacaaaagaagaatggaaaatggccgttgagacaaagaagattcttgatcctaagatcaaattaacagccacagctgttcgggttcctgtctttattggtcatgcggaagctgttcatgttgaatttgaaaaaccactaagcgcccatgaagcacaaacacttctacgcgatgcaccaggctgtcagcttatcgataaacacaaagatggcggctatataaccccttatgaaagtactggcgaagatgccacctttattagccgtgttcgtgaagacatcaccgttgaaaatggcttagctttctgggttgtggctgacaatttaagaaagggagcagcattgaacgcagttcaaatcgctgaattactcatctctcgtaatttgataaagtag

SEQ ID NO: 117429 - protein, 338 aa, Bartonella henselae str. Houston-1
MSFKVAVVGATGNVGREMLTILEERGFPTHEIVPLASRRSLGQSVSYGDKTLKVKALDTYDFSDTDLCLMSAGGSISKEYAPKIAAAGCVVIDNSSTWRYDSNIPLIVPEVNAQAIDQFSKRNIIANPNCSTIQLVLALKPLHEAACIKRVVVSTYQSVSGAGKEGMDELFEQSRAVFVADPITSKKFTKRIAFNIIPHIDVFMEDGYTKEEWKMAVETKKILDPKIKLTATAVRVPVFIGHAEAVHVEFEKPLSAHEAQTLLRDAPGCQLIDKHKDGGYITPYESTGEDATFISRVREDITVENGLAFWVVADNLRKGAALNAVQIAELLISRNLIK

SEQ ID NO: 117430 - DNA, 1008 bp, Thermococcus kodakarensis KOD1
  CDS (1)..(1008): transl_table=11
atgagggttgccgttctcggtgccacgggaatggtcgggagaactttcgtgaggcttcttgctggccatccctggttcagagttgagaaactggttgcctctgagaggagtgccggaaggaagtacggagagctggtcgatgattcgccagaggagttcagagatgtggaggtgacttccctccctgaatttctcagagacccggacgttgacattgtcttcaacgccctcccagcatcgatctcaagggaggtggagggggagctagctcaaagccttcctgtgttcaccaacgcgaggagccaccgctacgatcctgacgtgcccatattagttcccgaggtaaatctggagcaccttgagctgatagaggttcagagggagaggaggggctgggaaggcttcatagtgacgaacccgaactgctcgacggccatactcacggtctcgctcgcggcgctccgcggtttcggaatcagggaggtcaaagtggcgacgatgcaggcaataagcggggcaggttattctggcctctctgccctggcaatccaggacaacgtgattccctccatcccaggggaggagtggaagatcgaaaacgagagcaggaagatcctcggcgagctcgacggagtggaggtaaagcccgccgaattcagaataagcgcaatggctacccgcgttccagtgctacacgggcacactgaggctgtctttgtcaagcttgaagagggaagcctagaggaggtcagggaggccttcgaatccttcgacccgcttggagagctcggccttccaagctacgagaggcccctcgtctactccgatgttccccagccgcggctccacagggacaggggaaggggcctaaccgttacggtcgggaggcttgaggggagcagcgggagcttcaagtacgtggtaacgggccacaacctcgtcaggggtgccgctggaggttcggttctcaacgccgagctggcttataagctcggctatctgaagtag

SEQ ID NO: 117431 - protein, 335 aa, Thermococcus kodakarensis KOD1
MRVAVLGATGMVGRTFVRLLAGHPWFRVEKLVASERSAGRKYGELVDDSPEEFRDVEVTSLPEFLRDPDVDIVFNALPASISREVEGELAQSLPVFTNARSHRYDPDVPILVPEVNLEHLELIEVQRERRGWEGFIVTNPNCSTAILTVSLAALRGFGIREVKVATMQAISGAGYSGLSALAIQDNVIPSIPGEEWKIENESRKILGELDGVEVKPAEFRISAMATRVPVLHGHTEAVFVKLEEGSLEEVREAFESFDPLGELGLPSYERPLVYSDVPQPRLHRDRGRGLTVTVGRLEGSSGSFKYVVTGHNLVRGAAGGSVLNAELAYKLGYLK

SEQ ID NO: 117432 - DNA, 1029 bp, Methanosarcina barkeri str. Fusaro
  CDS (1)..(1029): transl_table=11
atggtagcaatcaaagcgggtattttaggcgccacaggcgctgttgggcagagatttgtagaagcacttgcaaaccacccctggtttgagattacagcccttgcagcatccgagagaagcgctggcaaaacatataaagaagctgcaggctggaggttagatacagctatgccggaaagtgttgaagatatcaaagttgtcccggtagatccaaaagccgtagatgcggacgtggtgttctcggcacttcctgcagaccttgccctgacagtagaacccgaatttgcaaaagccgggtttgcagtggcaagcaatgcctcctcctacaggatggaaaatgacatacctcttgtgattcctgaggtaaatccagaacatcttgggcttctcgaagtccagcaggatacaagaggatgggacggatatatcattacaaaccccaattgttccactattgtcatgaccgttactttaaagcctcttatgcagtttggactcgaaaccacacaggtagccacaatgcaggcgatctcaggggcaggtttttccggagttgccgcaatggcaatttatgacaatataattccttacataggaaacgaagaaaagaagatggaaaccgaaactttaaagctcctcggagagtttaacggctctgaaatcgtgcctgcagatatgagagtcagtgcttcctgccacagggtccctgtaatagatgggcataccgaagctatctgggctggaatgagggataaaccaacgcctgaagaagtaaggaaagctttcctgaactttgaccccaggctgaaagaacttccttccgaacctgcaaaacctttaattgtaagagatgaaagtgacaggcctcagccgcgccttgaccgcaacatgggaaaaggtatgagcgtttcagtgggccgtataagagaaggaatccgctatatagcaatgggacataacaccatccgcggagcagccggggcaagtgtattgaacgcggaactcctgcattcaatgggcaaactttaa

SEQ ID NO: 117433 - protein, 342 aa, Methanosarcina barkeri str. Fusaro
MVAIKAGILGATGAVGQRFVEALANHPWFEITALAASERSAGKTYKEAAGWRLDTAMPESVEDIKVVPVDPKAVDADVVFSALPADLALTVEPEFAKAGFAVASNASSYRMENDIPLVIPEVNPEHLGLLEVQQDTRGWDGYIITNPNCSTIVMTVTLKPLMQFGLETTQVATMQAISGAGFSGVAAMAIYDNIIPYIGNEEKKMETETLKLLGEFNGSEIVPADMRVSASCHRVPVIDGHTEAIWAGMRDKPTPEEVRKAFLNFDPRLKELPSEPAKPLIVRDESDRPQPRLDRNMGKGMSVSVGRIREGIRYIAMGHNTIRGAAGASVLNAELLHSMGKL

SEQ ID NO: 117434 - DNA, 1077 bp, Streptococcus agalactiae A909
  CDS (1)..(1077): transl_table=11
atgggatataccgttgctatcgtaggtgctacaggtgccgtaggaacacaaatgattcgtcaattagaacaatcgaatttaccaatagaacaagtgaaacttttatcatcaagtcgctcagcaggtaaaattttacattttaaagatgaggctatacgtgttgaagagacaacaaaagaatcattttacgatgttgatattgccttgttttcagctggtggatctatttcagcaaagttcgctccttatgcagtaaagtctggagcagttgtagtagataacacgtcatattttcgtcagaatcctgatgttccactagttgttcctgaagtaaatgctcgtgccatgactggtcataatggtatcatagcttgccctaattgttctactattcaaatgatgattgctttagagcccattcgtcaaaaatgggggatagagcgtgttatagtttccacctatcaagctgtttcgggttcaggtgcacgtgctgttgaagaaactaaggaacagttgagacaagttttaaatgataatctttcacctgatcaattaattgcaacagtcttgccatgttctagcgatcaaaaacattatcctatcgcattcaatgcattacctcaaattgatatttttactgataatgattatacgtacgaagaaatgaagatgactttggagacaaagaaaattatggaagatgctactattaaggtttcagctacctgcgtccgtattcccgttttatcgggtcattctgagtccatttatattgagacgaaagaattagcttcaatctctgaaattaaaaaggctattgcagattttcctggtgccgtcctacaagaccttccatctcagcaaatttaccctcaagcgattaatgctgtaggctatagggagacctttgttggtcgtattcgaaaagaccttgatcaagaaaatggtgttcatatgtgggtagtttcagataatctattgaagggggcagcttggaattctgttcaaatcgcagaaacattgcataagaatgggctggttaaaccagcgaaagagttaaaatttgaattaatatag

SEQ ID NO: 117435 - protein, 358 aa, Streptococcus agalactiae A909
MGYTVAIVGATGAVGTQMIRQLEQSNLPIEQVKLLSSSRSAGKILHFKDEAIRVEETTKESFYDVDIALFSAGGSISAKFAPYAVKSGAVVVDNTSYFRQNPDVPLVVPEVNARAMTGHNGIIACPNCSTIQMMIALEPIRQKWGIERVIVSTYQAVSGSGARAVEETKEQLRQVLNDNLSPDQLIATVLPCSSDQKHYPIAFNALPQIDIFTDNDYTYEEMKMTLETKKIMEDATIKVSATCVRIPVLSGHSESIYIETKELASISEIKKAIADFPGAVLQDLPSQQIYPQAINAVGYRETFVGRIRKDLDQENGVHMWVVSDNLLKGAAWNSVQIAETLHKNGLVKPAKELKFELI

SEQ ID NO: 117436 - DNA, 1020 bp, Carboxydothermus hydrogenoformans Z-2901
  CDS (1)..(1020): transl_table=11
ttgagctataatgtggtagtaattggagctaccggtgcggtaggaggagaaattctaaaaattttagaggaaagaaactttcccgtaaaagaacttcgactgggggcaacttcccgttctgccggtaaagaagtggtttttcggggagaaacgtataaggtgttagaaacaacaccggaaatatttgatggtatggatattgccttatttgccgggggttctgccagtaaagaatttgcccgcattgctgcagcaaaaggggtaacggtaattgataatagcagtgcttttcgtttagagccggacgtaccattggtggttcctgaagtaaatcccgaggatgttaaatggcacaaaggtataattgccaatcccaattgttcgacaatccagatggttgtggcgttaaagcctttgcatgattatggaaaaattaaacgggtggttgtttcgacctatcaagcagtttccggtgctggcattgaagccatagaagaattaaagcagcaggttaaggcgtatttaaacggtgaagaggcggtacccaacgtctttccgtatcctattgcttttaatttaattcctcacatcgatgtattccaggatatgtattatacaaaagaagaatggaaaatggttttagagacgcaaaagataatgcatgatccggaaattaaagtaaccgccacaactgtaagggtaccggtctttagaagtcactcggaaagcattaacattgaaacggaaattaaaattacccgggagaaagctattgagcttttgaaaaaggctccgggggtaaaagtaattgacaatcctgaagaaaagctgtacccaatgcccttgtatgcctcggaccaggatgaggtttttgtgggaagaatccgggaagataatacaatttccaatggcttaaatctttgggttgttgcggaccaattacggaagggtgcagctacaaatgctgttcagattgctgaactactaataaagtacgggtgtgtgaagcaaaatggctaa

SEQ ID NO: 117437 - protein, 339 aa, Carboxydothermus hydrogenoformans Z-2901
MSYNVVVIGATGAVGGEILKILEERNFPVKELRLGATSRSAGKEVVFRGETYKVLETTPEIFDGMDIALFAGGSASKEFARIAAAKGVTVIDNSSAFRLEPDVPLVVPEVNPEDVKWHKGIIANPNCSTIQMVVALKPLHDYGKIKRVVVSTYQAVSGAGIEAIEELKQQVKAYLNGEEAVPNVFPYPIAFNLIPHIDVFQDMYYTKEEWKMVLETQKIMHDPEIKVTATTVRVPVFRSHSESINIETEIKITREKAIELLKKAPGVKVIDNPEEKLYPMPLYASDQDEVFVGRIREDNTISNGLNLWVVADQLRKGAATNAVQIAELLIKYGCVKQNG

SEQ ID NO: 117438 - DNA, 1008 bp, Moorella thermoacetica ATCC 39073
  CDS (1)..(1008): transl_table=11
atggcgaatttgaatgttgccgtagtaggtaccggagctgtaggccagaccatgcttaaagttctggaggaaaggaattttcccgtcggcaggttaaaggtcctggcgaccagtcgctccgcaggaaagaaagtcaccttcaagggcgaggagtaccgcgttgaggaaaccactccggaatccttcgccggggttaacgtagccctctttgccgggggtgaagccagtaaaatctttggccgggcggcggtggccgccggagcagtggtaattgataatagcaataacttccgtatggatccggaggtacccttggtggtaccggaggttaatccccaggatgtacgctggcataaagggctgattgccaaccccaactgctccaccattcagatggtggttgccctgaagcccctgtatgacgccgccggcatcaagcgggtagtagtctcgacctaccaggctgtttctggcgccggccaggaagccatcgatgagctgcggaaacagagccagcaggtcttggagggcagggaagtgagcggcagggtcttcccctggcagattgccttcaactgcctgccccatatcgatatcttcctggagaacggttatagcaaggaagaaatgaagatggtcaacgagaccaagaaaattatgggagataatgatatccgggtgacggccaccacggtacgggttccggtctttaacggccattcggaagcaattaatgtagagacaagggaaaagctgacggcctcccaggccagggaactcttgagccgggcccccggggtggtggtagtcgacgatcttgataataaggcctatcccctggccatccaggccgacggccgggacgaggtattcgtcgggcgtatccgggaggatttctccattgccaacggcctgaacctgtgggtggttgccgataacctgcgcaagggtgcagcgaccaatgccgtgcagattgccgaattactgctgcaggaaggccttctttag

SEQ ID NO: 117439 - protein, 335 aa, Moorella thermoacetica ATCC 39073
MANLNVAVVGTGAVGQTMLKVLEERNFPVGRLKVLATSRSAGKKVTFKGEEYRVEETTPESFAGVNVALFAGGEASKIFGRAAVAAGAVVIDNSNNFRMDPEVPLVVPEVNPQDVRWHKGLIANPNCSTIQMVVALKPLYDAAGIKRVVVSTYQAVSGAGQEAIDELRKQSQQVLEGREVSGRVFPWQIAFNCLPHIDIFLENGYSKEEMKMVNETKKIMGDNDIRVTATTVRVPVFNGHSEAINVETREKLTASQARELLSRAPGVVVVDDLDNKAYPLAIQADGRDEVFVGRIREDFSIANGLNLWVVADNLRKGAATNAVQIAELLLQEGLL

SEQ ID NO: 117440 - DNA, 1056 bp, Acidobacteria bacterium Ellin345
  CDS (1)..(1056): transl_table=11
atgcaagataagaaaattcccataggtattttgggggcgacgggtatggtcgggcagcgctttattcagctgctccaaggtcacccctggtttgagattgtttggctcgcggcgtcggaacgttccgagggcaagagctatgcggaagccgtccgctggcgtatgaagacgcgcctgccggagaacatcgccaacatgcagatgtccccggcggacccggccaatgctcctaaagtgatttttgcggcgctcgattctggtccagcgaaagagctcgaaccgaagtttgcgaaagcgggctgcgcggtagtaacgaactcctcggcgttccgcatgtatccggatgtgccacttgtggtaccggaagtgaatccggaccacatcgcgatcctggagcaccagcagtggcgcaaggacaccggcggctatatcgtgaccaatccgaattgctgcgcgattggtttggtaatggccctcgctcctctgcatcagcgattcaccatcgacaggctattcgtcagcacgatgcaggcagtcagcggagctggctatccgggcgtgcctacgctcgacattctcggaaatgtgattccatacatcggcggagaagagccgaagctcgaagctgagactaagaagcttctcggaactcacacttcggaaggcatcaaagacgctaccttcgcgatcaccgcgcactgcaaccgcgtgcccgtggaagatggacacaccgagtgcgtatcgctgagtttcgctcgtaaggcgagtgaagccgagattctcgatgcatggcgtcagtactctggcgtgcctcagcagttgggacttccctctgctccacccgtggtgctgatatatgacgagcgtccggagcgccctcagccgcggtttgatgtggatgccggcggtgggatgacagcgacgattggccgcttgcgaccgtgcggactgctcgattggaaatttgtggtgctctcgcacaatacgatccgcggtgcagcgggcgcggcgatcctgaacgcggagttgttgaaggcgaagggattcctttcgtga

SEQ ID NO: 117441 - protein, 351 aa, Acidobacteria bacterium Ellin345
MQDKKIPIGILGATGMVGQRFIQLLQGHPWFEIVWLAASERSEGKSYAEAVRWRMKTRLPENIANMQMSPADPANAPKVIFAALDSGPAKELEPKFAKAGCAVVTNSSAFRMYPDVPLVVPEVNPDHIAILEHQQWRKDTGGYIVTNPNCCAIGLVMALAPLHQRFTIDRLFVSTMQAVSGAGYPGVPTLDILGNVIPYIGGEEPKLEAETKKLLGTHTSEGIKDATFAITAHCNRVPVEDGHTECVSLSFARKASEAEILDAWRQYSGVPQQLGLPSAPPVVLIYDERPERPQPRFDVDAGGGMTATIGRLRPCGLLDWKFVVLSHNTIRGAAGAAILNAELLKAKGFLS

SEQ ID NO: 117442 - DNA, 1089 bp, Myxococcus xanthus DK 1622
  CDS (1)..(1089): transl_table=11
atggccaggcttcgtgcggccctcatcggtgccactggactcgccggacagcaattcatcgccgccctgaagaatcacccctccatcgaactgacggggctcgcggcctcgcctcgctcggcgggcaagacgtatgcggaggcgctgaaaacggcgagtggcatgacggcctggttcgtcccggagccgctgcccgccgagctcgccggcatgaaggtggtggccggtgacgcgctcgaggccaaggattacgacctggtcttctccgccgtggaggcggacgtggcacgcgagctggagcctcggctggcgaaggacatccccgtcttttccgccgccagcgcgttccgatacgaagacgacgtcccgttgctgattccccccgtcaacgccgcgcacgcgcccctcatccgggagcagcagcgccggcgtggctggaagggcttcatcgtccccatccccaactgcacgaccaccggcctggcggtgacgctggcgccgctggtggagcgcttcggggtgaaggcggtgctgatgaccagcctccaggccatgtccggcgccggccgctcgccgggcgtcatcggcatggacatcctcgacaacgtcatcccctatattcccaaggaggagcacaaggtcgaggtggagacgaagaagattctcggcgcgctgcgtccagcgggtgacggcctcacgccgcatgacgttcgggtgtcctgcacctgcacccgcgtggcggtgatggagggccacaccgagtccgtcttcgtctcattggacaagaaggcgactgtggccgaagtgacccaggccctgcgggagtggaagggtgccgagctggctcggaacctgccgtccgccgcaccgcgctggattgaagtgctggacgatcctttccgaccccagccccgtttggaccgggacacgcatggcggtatggccaccaccgtcggacgcatccgcgaggatggcgtcctggagaacggcttcaagtacgtgctggtgtcgcacaacaccaagatgggagccgcgcgaggcgccatcctcgtggccgagctgctgttggcccagggcttggtgggctga

SEQ ID NO: 117443 - protein, 362 aa, Myxococcus xanthus DK 1622
MARLRAALIGATGLAGQQFIAALKNHPSIELTGLAASPRSAGKTYAEALKTASGMTAWFVPEPLPAELAGMKVVAGDALEAKDYDLVFSAVEADVARELEPRLAKDIPVFSAASAFRYEDDVPLLIPPVNAAHAPLIREQQRRRGWKGFIVPIPNCTTTGLAVTLAPLVERFGVKAVLMTSLQAMSGAGRSPGVIGMDILDNVIPYIPKEEHKVEVETKKILGALRPAGDGLTPHDVRVSCTCTRVAVMEGHTESVFVSLDKKATVAEVTQALREWKGAELARNLPSAAPRWIEVLDDPFRPQPRLDRDTHGGMATTVGRIREDGVLENGFKYVLVSHNTKMGAARGAILVAELLLAQGLVG

SEQ ID NO: 117444 - DNA, 1035 bp, Mesorhizobium sp. BNC1
  CDS (1)..(1035): transl_table=11
atgggtttcaaaattgctgtcgcgggcgctaccggcaatgtcggccgggagatgctcaacatcctggaagaacgcggcttcccagccgatgaggtggtgccgctcgcctcgcggcggtccgttggcacggaagtctcctacggcgaccgttcgctcaaggtgcgggcgctggagaaccacgatttttccgacaccgacatttgcctgatgtctgctggcggctccgtttcgaaggaattttcgccgcgcatcggcaagcagggctgtgtcgtcatcgataattcctcggcctggcgctacgacgccgacgtgccgctgatcgtgccggaagtgaatccggatgcggtagacggcttccgcaagaagaacatcatcgccaatcccaattgctcgacggcgcagctcgtcctggcgctcaagcccctacacgacatcgccaagatcaagcgcgtggtcgtcgccacctatcaatctgtttccggcgccggcaaggaagggatggacgagctcttcgagcagacccgcgccgtcttcgtcgccgatccgatctcgaataagaaattcaccaagcgtatcgccttcaacgtcattccgcacatcgacgtcttcatggaagacggcttcaccaaggaagagtggaagatggtggccgagaccaagaagatgctcgatcccaagatcaagctcacggccacctgtgtacgcgtgcctgttttcattgggcactccgaagcggtcaatatcgagttcgaaaagcctatcacggccgacgaggcgcgcgatattctgcgcgaggcgccgggctgccttgtcgtcgacaagcgcgaggacggcggctacgtcacgccctacgagagcgccggggaggacgccacctatatcagtcgcatccgcgaagactccaccgtggagaatgggctggccatgtgggtagtctcggacaacctgcgcaagggcgcggccctcaacgccgtgcagatcgccgaactgctcgtcgcccgcgggctgatcgagccgaagaagcaggccgcctga

SEQ ID NO: 117445 - protein, 344 aa, Mesorhizobium sp. BNC1
MGFKIAVAGATGNVGREMLNILEERGFPADEVVPLASRRSVGTEVSYGDRSLKVRALENHDFSDTDICLMSAGGSVSKEFSPRIGKQGCVVIDNSSAWRYDADVPLIVPEVNPDAVDGFRKKNIIANPNCSTAQLVLALKPLHDIAKIKRVVVATYQSVSGAGKEGMDELFEQTRAVFVADPISNKKFTKRIAFNVIPHIDVFMEDGFTKEEWKMVAETKKMLDPKIKLTATCVRVPVFIGHSEAVNIEFEKPITADEARDILREAPGCLVVDKREDGGYVTPYESAGEDATYISRIREDSTVENGLAMWVVSDNLRKGAALNAVQIAELLVARGLIEPKKQAA

SEQ ID NO: 117446 - DNA, 1101 bp, Oenococcus oeni PSU-1
  CDS (1)..(1101): transl_table=11
atggtcaaagaatacaatgtagcaattctaggtgcgagtggcgcagtcggtagaagaatgcgcgaacaattggaacaatcgacaattccggtcaagtcactgaaactgttggcttccaatcgttcggcaggtaaaaaaagtactttcagaggaaaagaatacacgattgaagaaactaaaccggaatcttttgacggtattgatctggtcttatcttcagccggaggatcggtttccaaacgctttttaccggaagcagttcggcgtggcgcagttgcagttgacaacacttcatattttcgaatggacaaaaacgttccattagttgttcctgaagttaattccggggttttaaagaatcatcatgggataatttccaatccaaattgttccacgattcaaatggttgttgccttgaaacccatttttgatgctttcggtctaaaacaggtaatcgtttcgacttatcaggcagcttccggagctggtcaatctgcttggaatgaattggaaagggaaagttccgagtatttaaaagatcaaaaaatgcaggcaaaaattttgcctgttaagggggctgaaaagcattatccacttgcatttaatcttttaccacaaatcgatgtttttgaagacgacgcttatactcacgaagaatggaagatgattcacgaaacgaaaaaaattttttttgatgacatgaattcgtctaaaattaaagttacagctacaactgttcgtgtccctgttccggttggccatggcgagacagtctactttcaagttgaaaaggctaatgaagcttctgctgaagcaattcaaaatgcggttgccgatggtgctggtttggttttgcaggatgacccttcacaacaactttatccgcagccgatcaatgcggcgggcaaacgagaaacattcgttggccggattcgtccggacttagaaaatgatggcagctactggatgtgggttgtttccgacaatcttttaaaaggggcagcttggaatgccgtgcagattgccgaagaacttgttaaaaaagatcttgtacgtgttgcggatccggaaaaatcatacgaaatgtataaggagaactaa

SEQ ID NO: 117447 - protein, 366 aa, Oenococcus oeni PSU-1
MVKEYNVAILGASGAVGRRMREQLEQSTIPVKSLKLLASNRSAGKKSTFRGKEYTIEETKPESFDGIDLVLSSAGGSVSKRFLPEAVRRGAVAVDNTSYFRMDKNVPLVVPEVNSGVLKNHHGIISNPNCSTIQMVVALKPIFDAFGLKQVIVSTYQAASGAGQSAWNELERESSEYLKDQKMQAKILPVKGAEKHYPLAFNLLPQIDVFEDDAYTHEEWKMIHETKKIFFDDMNSSKIKVTATTVRVPVPVGHGETVYFQVEKANEASAEAIQNAVADGAGLVLQDDPSQQLYPQPINAAGKRETFVGRIRPDLENDGSYWMWVVSDNLLKGAAWNAVQIAEELVKKDLVRVADPEKSYEMYKEN

SEQ ID NO: 117448 - DNA, 1095 bp, Leuconostoc mesenteroides subsp. mesenteroides ATCC 8293
  CDS (1)..(1095): transl_table=11
atgactagagaatatagtgttgccattcttggcgcaacaggtgctgtgggcacacgacttattgaacaattagagcaatcaacgattcccgtgaagaatataaaattgcttgcttcgtcacgttcagcaggtaagacacttcaatttaaaggtacagacgtggttgttgaggaagcaactccagaaagttttgatggggttgatttagttttggctagcggtggtggttcagtttcagcacgatttgcacccgaagctgtgaaacgcggcgctgtggttgttgataattcaagccaatggcgaatgaatgatgatgtcccgttaattgttcctgaagttaatgaagcagatttgaaacaacaccaaggaattattgccaaccctaactgttcaacgattcaaatggttgttgctctagcgcccattaaagctaaatatggtttgacacgtgttatcgtgtcaacttatcaagctgcttctggtgcgggacaatctgcatggcaagagctagtttcagaaactgatgcccacaatgctggtaaagaaatgcatgctgagattttgccggttaaaagtgctaagcatcattatcccctagcttataatttactgccacaaatagatgtttttgaagaagacggttacactcatgaagaatggaagatgattcatgagactaaaaaaattatgttcggtgataaaaattctaaagcagttaaagtgacagcaacagcggtccgggtacctgttcctattggtcatggcgagactgtttattttgaaacggatgccggatcaggagcgacagccgctgatattcaagcgattctgagtgaagccccaggagttgttttggaagacaatccaaaggaacagttgtacccacagccaattaatgccgaaggaaaacgcgaaacattcgtcggccgtgtgcgtcccgatttggaaaatgatgatagtttccatatgtgggttgtctcagataacctgcttaaaggtgctgcttggaatacagtgcaaattgcagaacgtcttgttgacttagacttggtcagagtcccagaagacgcagcaaataagtttgtcacagcataa

SEQ ID NO: 117449 - protein, 364 aa, Leuconostoc mesenteroides subsp. mesenteroides ATCC 8293
MTREYSVAILGATGAVGTRLIEQLEQSTIPVKNIKLLASSRSAGKTLQFKGTDVVVEEATPESFDGVDLVLASGGGSVSARFAPEAVKRGAVVVDNSSQWRMNDDVPLIVPEVNEADLKQHQGIIANPNCSTIQMVVALAPIKAKYGLTRVIVSTYQAASGAGQSAWQELVSETDAHNAGKEMHAEILPVKSAKHHYPLAYNLLPQIDVFEEDGYTHEEWKMIHETKKIMFGDKNSKAVKVTATAVRVPVPIGHGETVYFETDAGSGATAADIQAILSEAPGVVLEDNPKEQLYPQPINAEGKRETFVGRVRPDLENDDSFHMWVVSDNLLKGAAWNTVQIAERLVDLDLVRVPEDAANKFVTA

SEQ ID NO: 117450 - DNA, 1050 bp, Solibacter usitatus Ellin6076
  CDS (1)..(1050): transl_table=11
atgcaaacgcgaatcgaagtaggcattctcggcgccaccgggatggtgggccagcatttcatcaagttcctgcagggccacccgtggttcgacctgaagtggctcggagccagcgaccgctccgccggcaagcagtataaggacgccatgacatggcacctggcgggcggcactccggattcggtggcggggctcacggtggaagaatgcaaaccgggcaacgcgccgcgcctgcttttttccgcgatggatgcgggagtggctacggacatcgagcgggccttcgcgcaggcggggcatgtggtggtgtcgaattcgcgcaatcaccgtatggagcaggacgtgccgctgatggtgccggagatcaatcccgatcacctgaagctggtgccgggccagcagcgggcgcgcggttggaaggggcagattgtcaccaatccgaactgttccaccatcggcctggtgatggggctgggcccgatgaagcagttcgggatcacgaagattctggtgaccacgatgcaggcaatttccggcgccggatatcccggggttgcatccatggacattatggggaacgtggtgccctatatcggcagcgaagaagaaaagatggagatggagacgcagaagatcatgggcgatttcgccggtgatcggattgtgccgctggcggcgaaggtgagcgcgcactgcaatcgcgttggcgtggtggacggccatacggaaacggtgtcggtggagttttccatgaagcccaccgaggccgacttgcggcatgcgatcgagagcttcacggcggtgccgcaggagcgcaaactgccgagcgcgccgggacgtccggtgatttacatgaaagaagccaaccgtccgcagccgcgcaaggatgcggagcgcgagcgcgggatggcggcattcgtagggcggctgcgggcctgcccggtgctggactataagttcgtggtgctgagccacaacacgattcgcggagccgcgggcgcggcggtgctgaatgccgagctgatgcattcggaagggatgctggactga

SEQ ID NO: 117451 - protein, 349 aa, Solibacter usitatus Ellin6076
MQTRIEVGILGATGMVGQHFIKFLQGHPWFDLKWLGASDRSAGKQYKDAMTWHLAGGTPDSVAGLTVEECKPGNAPRLLFSAMDAGVATDIERAFAQAGHVVVSNSRNHRMEQDVPLMVPEINPDHLKLVPGQQRARGWKGQIVTNPNCSTIGLVMGLGPMKQFGITKILVTTMQAISGAGYPGVASMDIMGNVVPYIGSEEEKMEMETQKIMGDFAGDRIVPLAAKVSAHCNRVGVVDGHTETVSVEFSMKPTEADLRHAIESFTAVPQERKLPSAPGRPVIYMKEANRPQPRKDAERERGMAAFVGRLRACPVLDYKFVVLSHNTIRGAAGAAVLNAELMHSEGMLD

SEQ ID NO: 117452 - DNA, 1017 bp, Magnetospirillum magnetotacticum MS-1
  CDS (1)..(1017): transl_table=11
atgggttacaaggttgctgtgatcggcgctacgggcaatgtgggccgggcgatgctgcaaattctggcggatcgcaagttccctgccgatgaggtcgtcgccctggccagcgagcgctcggtgggccgtgaggtctccttcggggacaaggtactgaagtgcaaggatctggccacgttcgacttcaagggctgcgatatcgccttgtcgtcgccgggcgccaaggtctccgccctgcacagcccgcgcgccgccgccgctggctgtgtggtgattgacaatacctcgcacttccgcatggagcccgacgtgcccctggtggtgcccgaggtcaacccggaagccatcgcccagtacaagaagcgcggcatcatcgccaatcccaattgctccaccattcagatggtggttgcgttgaagccgctgcacaagctgggcaagatcaagcgcgtggtcgtctccacctaccagtcggtgtcgggcgccggtaaggaaggcatggacgaactttacgaccagacaaagggcattctggtccatgacgccatcaagccgcagaagtttcccaagcagatcgccttcaacctgattcctcagatcgacgtcttcatggatgacggctcgaccaaggaagagtggaagatggtggtggagaccgccaagatcctcgatcccgatatctcggtgaccgcgacttgcgtgcgcgtgccggtcttcgtcagccattcggaatccatcaatgtggaattcgagcgccccgtcagcgtggccgaggccaccaaggccctgcgcgaggccgagggcgtggtggtgatggatacccgcgagccgggcggctatatcacgccgctcgacaccaccggcgaagacccggtctatatcagccgcatccgcaaggacccgacggtcaagaacggcctgaacttctggtgcgtggccgacaacctgcgtaagggcgcggccttgaacgccgtgcagatcgccgaggttctcatccgcgattacctgaagaagtaa

SEQ ID NO: 117453 - protein, 338 aa, Magnetospirillum magnetotacticum MS-1
MGYKVAVIGATGNVGRAMLQILADRKFPADEVVALASERSVGREVSFGDKVLKCKDLATFDFKGCDIALSSPGAKVSALHSPRAAAAGCVVIDNTSHFRMEPDVPLVVPEVNPEAIAQYKKRGIIANPNCSTIQMVVALKPLHKLGKIKRVVVSTYQSVSGAGKEGMDELYDQTKGILVHDAIKPQKFPKQIAFNLIPQIDVFMDDGSTKEEWKMVVETAKILDPDISVTATCVRVPVFVSHSESINVEFERPVSVAEATKALREAEGVVVMDTREPGGYITPLDTTGEDPVYISRIRKDPTVKNGLNFWCVADNLRKGAALNAVQIAEVLIRDYLKK

SEQ ID NO: 117454 - DNA, 1095 bp, Bifidobacterium longum DJO10A
  CDS (1)..(1095): transl_table=11
atgtccgaaaaattgaaggtcggcatccttggtgccaccggtatggtcggtcagcgttttatcacgctgcttgagaatcacccgtggttcgaggtggtcacgcttgccgcttccgcgcacagcgccggcaagacgtatgccgaggctgtcggcgaccgttggaagatggaaaccccgatgcccgaatatgtcaagaacatggtggtcgtcgatggcgacgatgccgagtccgtggcctctggcgttgatttcatgttctctgcggtaaacatgccgaaggaccagattcgcgccattgaagagcgttatgccaagaccgagaccccggtggtctccaacaacagcgcccaccgctggaccccggacgtgccgatggtggtgccggagatcaacccggagcacttcgaggtgatcgagcaccagcgcaagcgcctgggcaccactcgtggttttatcgccgtcaagccgaactgctcgattcaggcctacacgccggcgctggccgcgtggaaggaattcgagccgcgcgaggtggttgtgagcacctaccaggcgatttccggcgcgggcaagaccttcaaggattggcccgagatggtgggcaacatcatcccgttcatctccggtgaggaagcgaagtccgagaaggagccgctcaaggtgttcggccatgtggacgccgccaagggcgagatcgtgccgttcgacggcgacctcaagatcacttcccagtgcatccgcgtgcccgtgctcaacggccacaccgccaccgtgttcctgaacttcggcaagaaggccaccaaggaagagctcatcgaccgtctggcgaactacacgtccaaggcttccgagctggagctgccgcacgcaccgaagcacttcatccagtacctcaccgaggatgaccgcccgcaggtcaagctcgacgtggactacgagggtggcatgggcgtttccatcggccgtctgcgtgaggattccatcttcgattggaagttcgtgggtctggcccacaacaccctgcgtggtgcagccggcggtgcccttgaatgcgccgaaatgctcaaggctctcggctacatcaccaagaagtag

SEQ ID NO: 117455 - protein, 364 aa, Bifidobacterium longum DJO10A
MSEKLKVGILGATGMVGQRFITLLENHPWFEVVTLAASAHSAGKTYAEAVGDRWKMETPMPEYVKNMVVVDGDDAESVASGVDFMFSAVNMPKDQIRAIEERYAKTETPVVSNNSAHRWTPDVPMVVPEINPEHFEVIEHQRKRLGTTRGFIAVKPNCSIQAYTPALAAWKEFEPREVVVSTYQAISGAGKTFKDWPEMVGNIIPFISGEEAKSEKEPLKVFGHVDAAKGEIVPFDGDLKITSQCIRVPVLNGHTATVFLNFGKKATKEELIDRLANYTSKASELELPHAPKHFIQYLTEDDRPQVKLDVDYEGGMGVSIGRLREDSIFDWKFVGLAHNTLRGAAGGALECAEMLKALGYITKK

SEQ ID NO: 117456 - DNA, 1035 bp, Xanthobacter autotrophicus Py2
  CDS (1)..(1035): transl_table=11
atgggttacaaggtcgccgtcgtcggcgccacgggcaacgtgggccgggagatcctctcgatcctcgccgagcggggctttcccgcggacgaggttgtggcgcttgcttcgcgccgctcgcagggcgtggaagtctccttcggtgacaaaaccctcaaggtgaaggcgctcgaaacctacgacttctccgacaccgacatctgcctgatgtcggcaggcggtgccgtgtcgaaggaatggtcgccgaagatcggcgcgcagggctgcgtcgtcatcgacaattcgtcccagtggcgcatggatccggacgtgccgctgatcgtgcccgaggtgaatgcggacgccatcgtcgacttcaccaagaagaacatcatcgccaatcccaactgctccacggcgcagttggtggtggcgctgaagccgctgcacgatgccgccaccatcaagcgcgtggtggtttccacctaccagtccgtctccggcgccggcaaggacgccatggacgagctgttcacccagacccgggcgatcttcgtctccgatccggtggagccgaagaagttccccaagcgcatcgccttcaacctcattccccagatcgacgtcttcctcgacgacggctcgaccaaggaagagtggaagatggtggccgagaccaagaagatcctcgatccgaagatcaagctcacggccacctgcgtgcgtgtgccggtgttcatctcccactcggaatcggtgaacgtcgagttcgagaaggagctgtccgccgaggacgcgcgcaagatcctgcgcgaggccccgggtatcctcgtcatcgacacccgtgagccgggcggctacgccaccccgcacgaggccgccggcgaggacgccaccttcatctcgcgcctgcgcgatgacccgaccgtggacaacgccatcaacttctggtgcgtgtccgataacctgcgcaagggcgcagccctcaacgcggtgcagatcgccgaggtgctggtgaaccgcaagctcatcactgcccgcagcaaggcagcctga

SEQ ID NO: 117457 - protein, 344 aa, Xanthobacter autotrophicus Py2
MGYKVAVVGATGNVGREILSILAERGFPADEVVALASRRSQGVEVSFGDKTLKVKALETYDFSDTDICLMSAGGAVSKEWSPKIGAQGCVVIDNSSQWRMDPDVPLIVPEVNADAIVDFTKKNIIANPNCSTAQLVVALKPLHDAATIKRVVVSTYQSVSGAGKDAMDELFTQTRAIFVSDPVEPKKFPKRIAFNLIPQIDVFLDDGSTKEEWKMVAETKKILDPKIKLTATCVRVPVFISHSESVNVEFEKELSAEDARKILREAPGILVIDTREPGGYATPHEAAGEDATFISRLRDDPTVDNAINFWCVSDNLRKGAALNAVQIAEVLVNRKLITARSKAA

SEQ ID NO: 117458 - DNA, 1092 bp, Aspergillus niger
  CDS (1)..(1092)
atggcctcgtatcctaagaagaagtgcggtgttttgggcgccaccggctccgtgggccagcgtttcatcctcctgcttgccgaccacctcttcctggagctgcacgccgtcggtgcgtctgagcgttctgcgggcaagcagtacaaggatgccgtgagatggaagcagtctacggctatgtctgagaagcttagcacactcgtcctccgcgactgcaaggccgaacagttcgctgactgcgatctcgtcttctctgggcttaacagcgacattgcgggtgatgttgagatggaattcatcaaggccgatatccccgtcttctcgaatgcgaagaactaccgcaagcatcctctcgtccctctcgtcgttcccaccgtcaacccccagcacctggatctcatccctcaccagcgcaaacacttcggcctgaagaagggattcttggtttgcaactccaactgcgcagtcattggcattgttatcccattcgctgccctgcaggccaagtttggacccgttgaggaggtggaggtcttcaccgagcaggctctctctggagctggataccctggcgtgcccagcatggatatcctggacaacgtcattccttttatcagcggtgaggaagacaagcttgagaacgaggcccagaagatcctgggctccttgaacgccgatgctactgctttcgaagagcagtccggcctacgggttggcgccacctgcactcgcgttggagttactgacggtcacatggcatttgtttccttgcgcttcaagaaccgccctgctcccagcgcagagcaggtggctcaggccatgagggagtaccagtcggaggctcagaagctgggcgctccttctgcacccgcccaggctatccgagtgttcgacgagcccgacagaccccagcctagactggaccgggacatctccaagggctacaccgttagcgtcggacgggtgcgcgacggcaacgagggtggctacttcgatctccgtttcgctgctctttcgcacaacaccgttatcggcgctgctggatcatccatcctcaacgcggaggttgctgtcatcaagggctacatctaa

SEQ ID NO: 117459 - protein, 363 aa, Aspergillus niger
MASYPKKKCGVLGATGSVGQRFILLLADHLFLELHAVGASERSAGKQYKDAVRWKQSTAMSEKLSTLVLRDCKAEQFADCDLVFSGLNSDIAGDVEMEFIKADIPVFSNAKNYRKHPLVPLVVPTVNPQHLDLIPHQRKHFGLKKGFLVCNSNCAVIGIVIPFAALQAKFGPVEEVEVFTEQALSGAGYPGVPSMDILDNVIPFISGEEDKLENEAQKILGSLNADATAFEEQSGLRVGATCTRVGVTDGHMAFVSLRFKNRPAPSAEQVAQAMREYQSEAQKLGAPSAPAQAIRVFDEPDRPQPRLDRDISKGYTVSVGRVRDGNEGGYFDLRFAALSHNTVIGAAGSSILNAEVAVIKGYI

SEQ ID NO: 117460 - DNA, 1092 bp, Aspergillus oryzae
  CDS (1)..(1092)
atggcatcatctcctaagaagaagtgcggtgtcctcggtgccacaggctctgtgggccagaggtttatccttttgctcgccgatcacccttttctagagcttcatgccgtcggtgcatcggagcgctcagccggaaaggcctacaaggacgccgtaagatggaagcagactacggctatgtctgagaagctcagcaaccttgttctccgggattgcaaagcctctcaattcaccgactgtgatcttgtgttctccggtctgaacagcgatatcgcgggcgaagttgaaatggagttcatcaaggccgaaatccctgtattttcgaacgcaaagaactaccgcaagcatcccttggttcccctcgttgtgccaacagtcaaccctcatcactttgatttgatccctcaccaaaggaaagaattcggcttgaagaaggggttccttgtgtgcaactccaactgcgcagtcattggtatcgtcatccccttcgcagctctccaggccaagtttggccctgttgaagaggtcgaagtctttaccgagcaggccttgtcgggtgctggctaccccggtgtacccagcatggacatcctggataacgtcatccctttcattagcggtgaagaagataagctcgagaatgaggcccagaagatcttgggttctgtgaatgcagatgctaccgccttcgaggagcaggctggtcttcgagttggagccacttgcactcgggttcacgttagcgacggtcatatggcatttgtttcgctgagatttaagaaccgcccagcaccgagcgccgaacaggtcgtgcaggcactgagagagtaccagtccgaagcgcagaagttgggggctccttctgctcctaaggaggcgattagggtattcgatgaggcggacaggccgcaaccaagactcgacagagatatctgcggcggatacactgttagcgtgggccgggtgcgtgaaggcgcccagggaggctactttgacctccgctttgctgctctttcacacaacacggtcattggagccgctggatcctcgatcatcaatgctgagattgcagttctgaagggatacatctaa

SEQ ID NO: 117461 - protein, 363 aa, Aspergillus oryzae
MASSPKKKCGVLGATGSVGQRFILLLADHPFLELHAVGASERSAGKAYKDAVRWKQTTAMSEKLSNLVLRDCKASQFTDCDLVFSGLNSDIAGEVEMEFIKAEIPVFSNAKNYRKHPLVPLVVPTVNPHHFDLIPHQRKEFGLKKGFLVCNSNCAVIGIVIPFAALQAKFGPVEEVEVFTEQALSGAGYPGVPSMDILDNVIPFISGEEDKLENEAQKILGSVNADATAFEEQAGLRVGATCTRVHVSDGHMAFVSLRFKNRPAPSAEQVVQALREYQSEAQKLGAPSAPKEAIRVFDEADRPQPRLDRDICGGYTVSVGRVREGAQGGYFDLRFAALSHNTVIGAAGSSIINAEIAVLKGYI

SEQ ID NO: 117462 - DNA, 1098 bp, Cryptococcus neoformans
  CDS (1)..(1098)
atgtccccccgcccgcagatcaaggtcggcgtcctcggagcaaccggcacagtcggccagcgcttcattgagctcctcgccgcccacccctactttgccctccacgccctcggcgcctcctccaggtccgcagggcagcagtacgcccgtgtcgtccgctggaagctcgcgagccccatcccagacgccgtccgccacatggtcgtccacgagtgcaggccggacgcccccggcttcgccgaatgtggcgtcgtcttcagcggcctcgacgccgacgtcgcgggcgatatcgaaaacgcattcagagcggccgacctcgtcgtgtactcgaacgcgaaaaactaccgcagagacccgctgtgcccgctcatcgtccccctcgtcaacccgtcccacctctccatcatcccctaccagcgcgaacagctcggcctcaaaaagggctacattgtcaccaacgccaactgctccaccaccggcatcgtcgtccccctcgccgccctcgaaaaggcctttgggcccctcgacaccgtcatcgtcaccaccctccaggccatctctggcgcaggctaccccggcgtaagcagcttggatatcatggacaacgtcgtccccctcatcagtggcgaagaagacaagatcgaatgggagaccaacaagatcctcggcggcgtcacgcccgacaacaaggcgttcgacctccacgcgcccaaacagatcaacgtctccgccacatgcacccgtgtccccgtcatcgacggccataccggatgcgtctctgtcaagtttgccagatcgcccccgccctccgtcgcagaggtcgaaaacgctttcagagaatacacatgcgacgcgcagcaccttggcgtcccctccgccccagcccaggccatcgtcgtccacgatgcgccagacaggccgcagcccaggctcgataaaaacctccacaacggtgcctgtgtgagcgtcggcaggatcagagagtgtcccgtctttgacatcaagtttgtctgcttgatcgataatgtcagactgggtgccgctacgtcttcaatcatcaatgccgagattgcggtcgagaagggtttgatccagtag

SEQ ID NO: 117463 - protein, 365 aa, Cryptococcus neoformans
MSPRPQIKVGVLGATGTVGQRFIELLAAHPYFALHALGASSRSAGQQYARVVRWKLASPIPDAVRHMVVHECRPDAPGFAECGVVFSGLDADVAGDIENAFRAADLVVYSNAKNYRRDPLCPLIVPLVNPSHLSIIPYQREQLGLKKGYIVTNANCSTTGIVVPLAALEKAFGPLDTVIVTTLQAISGAGYPGVSSLDIMDNVVPLISGEEDKIEWETNKILGGVTPDNKAFDLHAPKQINVSATCTRVPVIDGHTGCVSVKFARSPPPSVAEVENAFREYTCDAQHLGVPSAPAQAIVVHDAPDRPQPRLDKNLHNGACVSVGRIRECPVFDIKFVCLIDNVRLGAATSSIINAEIAVEKGLIQ

SEQ ID NO: 117464 - DNA, 1182 bp, Ustilago maydis
  CDS (43)..(1143)
aattccgcacgagccttgatcaacaagagcacgcatcatacgatgacgtcttcttcctcacaacagaagctcaaagtcggcctgctcggcgctacgggcacagtaggtcagcgaatcatccttcaacttgctgatcacccgcaattcgagctcgccgctctgggtgcatcgtcttcttcggcaggtaagccgtacttggaagcagtacaagggaggtggaagcagatccgaagggttcccgataatgttgcacagttgcccgtatacgaatgcaagccggaatactttgcgagtgcagtagtctctccggtctggattcaggtccagcggaccgtcgaggacgctttccgtagagccgagttgagagtgttttccaatgcaaagaactaccgtaccgatccattgtgcccattggtggtgccactggtcaacccggagcacatggagatcttgccattccagagacagcaagtggggaccaagaagggattcatcgttaccaacgccaactgctctaccacgggcatcgtcgtaccgctgaaagcgctcgaggccaagtttggaccgctggaaaagattctagtcaacacgatgcaggccatttcgggtgctggttaccctggagtttcttcgctcgacatcttggacaacgttgtgccgttcatcagcggtgaggaggagaagatcgagtgggagaccgccaagatcttgggtggcatcaaaacggacaaaaccgcttttgactaccatgaagagcacccactcaaggtttcggcgcactgcaaccgtgttccggtcatcgatggccacatggagtgcgtttctgtgtcgttcaagaaccgacctgcaccctcggttgacgaggtcaaaaagtgcctgcaaggatttaccacggaagcacagaccatcggcgttcactcggctcctaagcaggccattacggtgcacgaggagcaggaccgcccgcaaccacgcctcgatcgtgactggcagaacggtgctggtgtcaatgtcggaagggtacgcgaatgtcccgtgtttgacatcaagtttgtcgtgctctcgaacaatgtcatgatcggtgctgctaccagctggttcatgaacgcagagatcgcgctcgccaagggttacctttcgtaatcatcatgtgtggtcacctgaaatcgcatacttttcgcc

SEQ ID NO: 117465 - protein, 366 aa, Ustilago maydis
MTSSSSQQKLKVGLLGATGTVGQRIILQLADHPQFELAALGASSSSAGKPYLEAVQGRWKQIRRVPDNVAQLPVYECKPEYFASAVVSPVWIQVQRTVEDAFRRAELRVFSNAKNYRTDPLCPLVVPLVNPEHMEILPFQRQQVGTKKGFIVTNANCSTTGIVVPLKALEAKFGPLEKILVNTMQAISGAGYPGVSSLDILDNVVPFISGEEEKIEWETAKILGGIKTDKTAFDYHEEHPLKVSAHCNRVPVIDGHMECVSVSFKNRPAPSVDEVKKCLQGFTTEAQTIGVHSAPKQAITVHEEQDRPQPRLDRDWQNGAGVNVGRVRECPVFDIKFVVLSNNVMIGAATSWFMNAEIALAKGYLS

SEQ ID NO: 117466 - DNA, 1023 bp, Aquifex aeolicus
  CDS (1)..(1023): transl_table=11
atgggttacagagtcgcgatagttggagctacgggagaggtaggaagaacatttctgaaggtccttgaagagaggaattttcccgttgatgaactcgtactctacgcttcggagcgttcagagggaaaggttctaacttttaaggggaaggagtacacagtaaaggctcttaataaagaaaattcttttaaaggtatagacatagcacttttttccgcaggaggttccacgagtaaagaatgggctcccaagtttgcaaaagacggcgtcgttgtaatagataactcctccgcttggagaatggaccccgacgttcctcttgttgttcccgaggtaaatccagaagacgtaaaggactttaagaagaagggaataatagcaaatccaaactgttccaccatacagatggttgtggctctaaaacctatatatgacaaagcgggaattaagagggtagtagtttctacgtatcaggctgtttcgggtgccggggctaaagcgattgaggacctcaaaaatcaaactaaagcctggtgcgaagggaaggaaatgccaaaagcccagaagtttcctcaccaaatagccttcaacgcccttccccacatagatgttttctttgaagacggctacacgaaggaagaaaataagatgctctacgaaacgaggaagataatgcacgacgagaacataaaggttagtgcaacctgcgtaaggattcccgttttctacggacattcggaaagcatatccatggaaacggaaaaggaaatatctcctgaagaggctagggaagtgctgaaaaacgctccgggggtaattgtaattgacaaccctcagaacaacgagtacccgatgcctataatggccgagggcagggacgaggtatttgtcggaaggataagaaaagacagggtctttgagccagggctttccatgtgggtagttgcggacaacataagaaagggtgcggctaccaacgctgttcaaattgcagaacttttagtgaaagaaggactaatctaa

SEQ ID NO: 117467 - protein, 340 aa, Aquifex aeolicus
MGYRVAIVGATGEVGRTFLKVLEERNFPVDELVLYASERSEGKVLTFKGKEYTVKALNKENSFKGIDIALFSAGGSTSKEWAPKFAKDGVVVIDNSSAWRMDPDVPLVVPEVNPEDVKDFKKKGIIANPNCSTIQMVVALKPIYDKAGIKRVVVSTYQAVSGAGAKAIEDLKNQTKAWCEGKEMPKAQKFPHQIAFNALPHIDVFFEDGYTKEENKMLYETRKIMHDENIKVSATCVRIPVFYGHSESISMETEKEISPEEAREVLKNAPGVIVIDNPQNNEYPMPIMAEGRDEVFVGRIRKDRVFEPGLSMWVVADNIRKGAATNAVQIAELLVKEGLI

SEQ ID NO: 117468 - DNA, 1032 bp, Archaeoglobus fulgidus
  CDS (1)..(1032): transl_table=11
atgcgatacagtgtcggagtacttggggctaccggaatggtggggcagaagttcatccagatgcttgcagagcatccctggttcaagctgacgagccttgcagcgtcggaaagaagagtggggaagaagtatggtgaagaagtggactggatagtctccagagaggttccggacattgccaaggacatcgaaatggtgccaatggaccctaagcatgtggatgctgacatcgtcttctcagcgctgccctcagacatcgcaagagaggttgagccgaagtttgccgaggctggatttgtcgttgcgagcaatgcatcagcctacagaatggctgaagacgtcccccttgtcattcctgaggtgaatcccgagcatctcggcctgattgaagtgcaaaagaaaaacaggggctgggatggcttcatcgtgacgaatcccaactgcacgaccatcgttctcgtcctctcgctgaagccgctgatggacctcggcctcaggactgtgagggttgcttcaatgcaggccttgagcggtgcaggttatcctggcgtcccctccctcgccataaccgacaacgtgattcccttcataaagggtgaggaggacaaagtggaggaggagccgctcaagcttctcggcaagtttaacggccggaagattgagtttgcggacataaaagtctcagcctcctgccacagagtccccgtcattgatggtcacactgaagctgtctgggttgagtttgaccgggaggtgagcgttgaagaggccaaggcagccttcgagtcccttaagcccctcgacctgccaacttcgccagagaaggtcataattgtcagggaggagccggacaggccccagcccagactcgacagggatgctggaaacgggatgagcatcacggttggcaggataaggaaggatggtgagagggggctgaagtacatagtattgggccacaacaccgtcagaggagcagcgggagcaagcatccttaacgctgaactgatgataaaggagaagattatctaa

SEQ ID NO: 117469 - protein, 343 aa, Archaeoglobus fulgidus
MRYSVGVLGATGMVGQKFIQMLAEHPWFKLTSLAASERRVGKKYGEEVDWIVSREVPDIAKDIEMVPMDPKHVDADIVFSALPSDIAREVEPKFAEAGFVVASNASAYRMAEDVPLVIPEVNPEHLGLIEVQKKNRGWDGFIVTNPNCTTIVLVLSLKPLMDLGLRTVRVASMQALSGAGYPGVPSLAITDNVIPFIKGEEDKVEEEPLKLLGKFNGRKIEFADIKVSASCHRVPVIDGHTEAVWVEFDREVSVEEAKAAFESLKPLDLPTSPEKVIIVREEPDRPQPRLDRDAGNGMSITVGRIRKDGERGLKYIVLGHNTVRGAAGASILNAELMIKEKII

SEQ ID NO: 117470 - DNA, 1041 bp, Bacillus subtilis
  CDS (1)..(1041): transl_table=11
atgggaagaggtttacacgtagctgttgtcggagcgacaggggctgtgggacaacaaatgcttaaaacacttgaagacagaaactttgaaatggacacacttacattgctatcttcaaaacgctctgcggggacaaaagtcacgtttaaaggccaagagctgactgttcaggaagcttctcctgagagctttgaaggggtaaatattgctttgttcagcgccggcggaagcgtatcacaagcattggcaccagaagctgtaaaacgcggcgctattgttatagataatacgagtgcgttccgcatggatgaaaatacaccgcttgttgtgccagaagtgaatgaggcagacttgcatgaacacaacggcattattgccaatccaaactgctctacaatccaaatggttgcggcacttgaaccgatccgcaaagcatatggcttaaacaaggtcatcgtatcaacttaccaggcagtatcaggagcgggtaatgaagctgtaaaagagctttacagccaaacacaggcgattttaaataaagaagaaatagagcctgagatcatgcctgtaaaaggtgacaaaaaacactatcaaatcgccttcaacgcgattccgcaaatcgataaattccaagataacggctatacgtttgaggaaatgaaaatgataaatgaaacgaaaaaaatcatgcacatgcctgaccttcaagtagcggctacatgtgtgagactgccaatccaaactgggcactcagagtccgtctacatcgaaatagaccgtgatgacgctacagttgaagatattaaaaatctattgaaagaagctccgggcgtgacacttcaggatgatccaagccagcagctttatccgatgcctgctgatgctgtcggcaaaaacgatgtgtttgtaggccgcatccgcaaagacttggacagagcaaacggttttcatttatgggttgtttctgataacctattaaaaggcgcggcatggaactctgttcaaattgcagaaagcctgaaaaaactaaacctcgtataa

SEQ ID NO: 117471 - protein, 346 aa, Bacillus subtilis
MGRGLHVAVVGATGAVGQQMLKTLEDRNFEMDTLTLLSSKRSAGTKVTFKGQELTVQEASPESFEGVNIALFSAGGSVSQALAPEAVKRGAIVIDNTSAFRMDENTPLVVPEVNEADLHEHNGIIANPNCSTIQMVAALEPIRKAYGLNKVIVSTYQAVSGAGNEAVKELYSQTQAILNKEEIEPEIMPVKGDKKHYQIAFNAIPQIDKFQDNGYTFEEMKMINETKKIMHMPDLQVAATCVRLPIQTGHSESVYIEIDRDDATVEDIKNLLKEAPGVTLQDDPSQQLYPMPADAVGKNDVFVGRIRKDLDRANGFHLWVVSDNLLKGAAWNSVQIAESLKKLNLV

SEQ ID NO: 117472 - DNA, 1050 bp, Leptospira interrogans
  CDS (1)..(1050): transl_table=11
atgagtagggtcaaagttgccgttttaggcgccactggttccgttggtcagaggttcattcaattgttggatcatcatccttttttcgaagttacgcatctttgcgcttctgagaatagtgccggtaaaacatacggtgaagtaatgaaaacccggtggaaaatttcttccgatattcctgcttatgctaaaaatttagtaatcactactcctgatcctgctaaaacgaaagacgttgtattagccttttctggtttagattcgaatgtcgccggtgaagtagaaaaaaattatgcaaacgccggtattcatatcatttctaattctaaaaatcatagaatggatccgacggttccgattctttctgcggaggtgaattcttctcatttggaagttctgacttctcaaaaaacgaaaggtaagattattaccaattcgaactgtacgatcatgggtgttacaatttctctcaaacctcttttggatcgttttggaattgagtccgttatgctcttttctatgcaggcgatcagcggcgctggttatcctggagttccaacgatggatattttaggaaacgtaattcctcatatcggaggtgaagaagaaaaagcggagatagaacctcttaaatgtttgggtaaagtcgagaatggaaaaattttacacgccgatttttcaatttccgcacattgtaaccgtgttcccgtttttgacggtcatacggtttgtgtttccgttaagtttaaaaagaaaccttctagggaagaaattatttcctcttggaaagatttttccggagaaccacagacgttaggtcttcctttagcaccaaatccggttatcctttttagagaagaagaagataggccgcaacctaggttggatttagataccggcaaaggaatgactacggtgataggtcgtcttaggccagatcctattttagattggaaatatgtcgttttaagccataatacaattcgaggagcggcgggtgctgcgttattaaatgcagaacttctttacaaaaaaaaattcttgggataa

SEQ ID NO: 117473 - protein, 349 aa, Leptospira interrogans
MSRVKVAVLGATGSVGQRFIQLLDHHPFFEVTHLCASENSAGKTYGEVMKTRWKISSDIPAYAKNLVITTPDPAKTKDVVLAFSGLDSNVAGEVEKNYANAGIHIISNSKNHRMDPTVPILSAEVNSSHLEVLTSQKTKGKIITNSNCTIMGVTISLKPLLDRFGIESVMLFSMQAISGAGYPGVPTMDILGNVIPHIGGEEEKAEIEPLKCLGKVENGKILHADFSISAHCNRVPVFDGHTVCVSVKFKKKPSREEIISSWKDFSGEPQTLGLPLAPNPVILFREEEDRPQPRLDLDTGKGMTTVIGRLRPDPILDWKYVVLSHNTIRGAAGAALLNAELLYKKKFLG

SEQ ID NO: 117474 - DNA, 1044 bp, Methanobacterium thermoautotrophicum
  CDS (1)..(1044): transl_table=11
atggttaatgtgggtgttctgggagcaacaggaatggttggacagcggttcattcagatgcttgataaacatcctgaatttgagcttacaaccctggcggcttcttcacgatccgccgggaaaccctacggggaggtggcaaactggtaccttgactgtgagatgccagaatctgtgagggacatggaggtcgttgaaacggatccctcagctgttggggacgttgatatactcttctcagccctccctgcagacgtggcgaggaaggttgaaccaaaatttgcagagaaatacatagtggcatcaaatgccagtgcaatgaggatggaaccggatgtccccctcgtgatacctgaggtcaaccctgagttccttgacctcatagaggtgcagcagaggaggagggggtgggacgggttcattgtcaccaaccccaactgctcaacaatagccctgaccctcacactcaagcccatctacgacgcctacacaataaaaagggtctatgtatcaaccatgcaggcggtttccggtgccggttacaatggagtcccctcaatggccatacttgataacctggtgcccttcatcggcggtgaggaggaaaagattgaaacagagaccctccacctgctgggagaactcgatgaaggcgttgtgaaaccagccagctttggcgtgagtgcatcatgtcaccgcgtacccgtcgttgacggtcataccgaggcggtcttcattgaactggatgatgaatttgatattgatgatgtcagggaggcaatggataaattcaggggactcccacagaagctgggtctccactccgcccctgaaaaacctgtggtggtgagggatgaggaaaacagaccccagccaaggatggacagggacatggacggtggaatggctgttaccgtcggaaggctcagagaggacgctgcattcaaaaacagtttaaggtacgtccttgtgggtcataacaccgtgaggggtgcggcgggggcatcgattctgaatgcagaactcataaatgagatactctag

SEQ ID NO: 117475 - protein, 347 aa, Methanobacterium thermoautotrophicum
MVNVGVLGATGMVGQRFIQMLDKHPEFELTTLAASSRSAGKPYGEVANWYLDCEMPESVRDMEVVETDPSAVGDVDILFSALPADVARKVEPKFAEKYIVASNASAMRMEPDVPLVIPEVNPEFLDLIEVQQRRRGWDGFIVTNPNCSTIALTLTLKPIYDAYTIKRVYVSTMQAVSGAGYNGVPSMAILDNLVPFIGGEEEKIETETLHLLGELDEGVVKPASFGVSASCHRVPVVDGHTEAVFIELDDEFDIDDVREAMDKFRGLPQKLGLHSAPEKPVVVRDEENRPQPRMDRDMDGGMAVTVGRLREDAAFKNSLRYVLVGHNTVRGAAGASILNAELINEIL

SEQ ID NO: 117476 - DNA, 1074 bp, Schizosaccharomyces pombe
  CDS (1)..(1074)
atggctataaaaaaagttggaatcctcggtgcaacaggcaccgttggacagcgtttcattaccctcctttccgatcatcctgagtttaagatcgctgttcttggcgcttctgctcgttctgcgggaaaaccatatgcagttgctactaaatggaaacaatctattgcaatgcctaaagagatttcccaaatgagtgtaaaggcttgtgatcccaaggagttttcggaatgcgatattgtgtttagcggcttagatgctgactttgctggcgaaattgaaaaaagttttcgtgatgctaatttagtcatcgtttcgaatgctaaaaactatcgtcgtgagcctaccgtgccacttgttgtccccaccgtcaacacagatcatttggacgttatcaagtaccagcgtcaagaaaacaaactggatcgtggatgcattatcactaactctaactgttctactgctgctgttgtagtacctttgaaagctctacaagatgcttttggtcctatcgctcaaacaaatgtagttagtatgcaagctatttctggtgctggataccctggtgtttccagtcttgacattttggataacatcgttccatttattggcggtgaagaagaaaaaattgaatgggagacacgtaaaatcttgggctctgtcaatagcacaatttctggatatgagttgactgataacgttgtttctgctcagtgcaatcgtgttcctgttattgatggccatttgatgtgtatttctgtgaagtttgccaagacctctcctactcctgatcaagttcgcgaagtattggcaaactatgtttctgaacctcaaaagttaggctgctacagtgcccctaaacaagccatttatgttttcgatgattctactcctgaccgccctcaacctagactcgatcgtaacaatgaaaatggttatgcagtatcagttggtcgtatcagatctgattccatctttgatattaaatttgtctccctcgtccataacacagttttgggtgctgctggtgctggtattttgaatgctgaagttgcggtgaagaagggacttatgtaa

SEQ ID NO: 117477 - protein, 357 aa, Schizosaccharomyces pombe
MAIKKVGILGATGTVGQRFITLLSDHPEFKIAVLGASARSAGKPYAVATKWKQSIAMPKEISQMSVKACDPKEFSECDIVFSGLDADFAGEIEKSFRDANLVIVSNAKNYRREPTVPLVVPTVNTDHLDVIKYQRQENKLDRGCIITNSNCSTAAVVVPLKALQDAFGPIAQTNVVSMQAISGAGYPGVSSLDILDNIVPFIGGEEEKIEWETRKILGSVNSTISGYELTDNVVSAQCNRVPVIDGHLMCISVKFAKTSPTPDQVREVLANYVSEPQKLGCYSAPKQAIYVFDDSTPDRPQPRLDRNNENGYAVSVGRIRSDSIFDIKFVSLVHNTVLGAAGAGILNAEVAVKKGLM

SEQ ID NO: 117478 - DNA, 24 bp, Artificial sequence
  primer
atggctggaaagaaaattgctggt

SEQ ID NO: 117479 - DNA, 27 bp, Artificial sequence
  primer
ttaaatcaagtttcttgctagtaagat

SEQ ID NO: 117480 - protein, 395 aa, Artificial sequence
  consensus sequence
  Variant (5)..(5): Xaa in position 5 is any amino acid
  Variant (8)..(13): Xaa in position 8 to 13 is any amino acid
  Variant (15)..(26): Xaa in position 15 to 26 is any amino acid
  Variant (27)..(27): Xaa in position 27 is any or no amino acid
  Variant (30)..(30): Xaa in position 30 is any amino acid
  Variant (31)..(31): Xaa in position 31 is any or no amino acid
  Variant (33)..(33): Xaa in position 33 is any amino acid
  Variant (35)..(57): Xaa in position 35 to 57 is any amino acid
  Variant (58)..(76): Xaa in position 58 to 76 is any or no amino acid
  Variant (78)..(99): Xaa in position 78 to 99 is any amino acid
  Variant (100)..(103): Xaa in position 100 to 103 is any or no amino acid
  Variant (105)..(106): Xaa in position 105 to 106 is any amino acid
  Variant (108)..(111): Xaa in position 108 to 111 is any amino acid
  Variant (113)..(116): Xaa in position 113 to 116 is any amino acid
  Variant (120)..(121): Xaa in position 120 to 121 is any amino acid
  Variant (123)..(123): Xaa in position 123 is any amino acid
  Variant (126)..(139): Xaa in position 126 to 139 is any amino acid
  Variant (140)..(154): Xaa in position 140 to 154 is any or no amino acid
  Variant (157)..(164): Xaa in position 157 to 164 is any amino acid
  Variant (166)..(179): Xaa in position 166 to 179 is any amino acid
  Variant (180)..(181): Xaa in position 180 to 181 is any or no amino acid
  Variant (183)..(183): Xaa in position 183 is any amino acid
  Variant (186)..(186): Xaa in position 186 is any amino acid
  Variant (191)..(198): Xaa in position 191 to 198 is any amino acid
  Variant (199)..(229): Xaa in position 199 to 229 is any or no amino acid
  Variant (231)..(232): Xaa in position 231 to 232 is any amino acid
  Variant (234)..(235): Xaa in position 234 to 235 is any amino acid
  Variant (237)..(237): Xaa in position 237 is any amino acid
  Variant (239)..(241): Xaa in position 239 to 241 is any amino acid
  Variant (242)..(242): Xaa in position 242 is any or no amino acid
  Variant (244)..(248): Xaa in position 244 to 248 is any amino acid
  Variant (250)..(251): Xaa in position 250 to 251 is any amino acid
  Variant (253)..(261): Xaa in position 253 to 261 is any amino acid
  Variant (262)..(275): Xaa in position 262 to 275 is any or no amino acid
  Variant (277)..(279): Xaa in position 277 to 279 is any amino acid
  Variant (282)..(282): Xaa in position 282 is any amino acid
  Variant (284)..(285): Xaa in position 284 to 285 is any amino acid
  Variant (288)..(339): Xaa in position 288 to 339 is any amino acid
  Variant (340)..(358): Xaa in position 340 to 358 is any or no amino acid
  Variant (361)..(361): Xaa in position 361 is any amino acid
  Variant (363)..(372): Xaa in position 363 to 372 is any amino acid
  Variant (373)..(380): Xaa in position 373 to 380 is any or no amino acid
  Variant (382)..(384): Xaa in position 382 to 384 is any amino acid
  Variant (388)..(393): Xaa in position 388 to 393 is any amino acid
GATGXVGXXXXXXLXXXXXXXXXXXXXASXXSXGXXXXXXXXXXXXXXXXXXXXXXXXXXXXXXXXXXXXXXXXXXDXXXXXXXXXXXXXXXXXXXXXXXXXXVXXNXXXXRXXXXVPLXXPXVNXXXXXXXXXXXXXXXXXXXXXXXXXXXXXNCXXXXXXXXLXXXXXXXXXXXXXXXXTXQAXSGAGXXXXXXXXXXXXXXXXXXXXXXXXXXXXXXXXXXXXXXXIXXNXXPXIXXXXEXXXXXEXXKXXXXXXXXXXXXXXXXXXXXXXXAXXXRVXVXXGHXXXXXXXXXXXXXXXXXXXXXXXXXXXXXXXXXXXXXXXXXXXXXXXXXXXXXXXXXXXXXXXXXXXXXXXGRXRXXXXXXXXXXXXXXXXXXNXXXGAAXXXXXXAE

SEQ ID NO: 117481 - protein, 24 aa, Artificial sequence
  protein pattern
  Variant (2)..(2): Xaa in position 2 is any amino acid
  Variant (3)..(3): Xaa in position 3 is Asp, Ser or Thr
  Variant (4)..(4): Xaa in position 4 is Ala or Asn
  Variant (5)..(5): Xaa in position 5 is Ala, Asn, Ser or Thr
  Variant (6)..(8): Xaa in position 6 to 8 is any amino acid
  Variant (10)..(10): Xaa in position 10 is any amino acid
  Variant (11)..(12): Xaa in position 11 to 12 is any or no amino acid
  Variant (14)..(14): Xaa in position 14 is any amino acid
  Variant (15)..(16): Xaa in position 15 to 16 is any or no amino acid
  Variant (18)..(19): Xaa in position 18 to 19 is Ile, Leu, Met or Val
  Variant (20)..(20): Xaa in position 20 is any amino acid
  Variant (22)..(23): Xaa in position 22 to 23 is any amino acid
VXXXXXXXRXXXDXXXPXXXPXXN

SEQ ID NO: 117482 - DNA, 924 bp, Saccharomyces cerevisiae
  CDS (1)..(924)
atggttcagcaactaagcctttttggatctattggtgatgacggctacgatttactaatttcaactttgaccacaatatcaggtaatcctccgctactgtataacagtttatgcactgtctggaaaccaaatccatcttacgacgtcgagaacgtgaactctagaaaccaattggttgaaccaaatagaataaaactttccaaagaggtgccattttcttacctgatcgatgaaacaatgatggataagccattaaactttagaatcttgaaatcttttacaaacgataaaatcccgcttaactatgctatgacacggaatatcttgcacaacacagttccgcaagtcaccaacttcaacagcacaaacgaagatcaaaacaacagtaagcatacagaagatactgtaaatgaaagtcgaaacagcgatgacatcatagatgtcgacatggatgcaagtcccgccccttcaaacgagtcatgttccccttggtcattgcaaatttcagatattcctgctgcaggaaacaatagaagtgtttcaatgcaaacgatagctgagactatcatattatcttcagctggcaaaaactcttcagtatcctcgctcatgaacggattgggttatgtattcgaatttcagtatcttacaattggtgtgaaattttttatgaagcatggtttaatacttgagttacaaaaaatttggcaaatagaagaagcaggcaattcacaaataacaagcggagggttccttttaaaagcatacatcaatgttagtagggggaccgatatcgatcgtataaactatacagagactgccttgatgaacttaaaaaaggaactacaaggctatatagagttaagtgtacccgatagacagtcaatggactcgagggtagcacatggaaatattctaatataa

SEQ ID NO: 117483 - protein, 307 aa, Saccharomyces cerevisiae
MVQQLSLFGSIGDDGYDLLISTLTTISGNPPLLYNSLCTVWKPNPSYDVENVNSRNQLVEPNRIKLSKEVPFSYLIDETMMDKPLNFRILKSFTNDKIPLNYAMTRNILHNTVPQVTNFNSTNEDQNNSKHTEDTVNESRNSDDIIDVDMDASPAPSNESCSPWSLQISDIPAAGNNRSVSMQTIAETIILSSAGKNSSVSSLMNGLGYVFEFQYLTIGVKFFMKHGLILELQKIWQIEEAGNSQITSGGFLLKAYINVSRGTDIDRINYTETALMNLKKELQGYIELSVPDRQSMDSRVAHGNILI

SEQ ID NO: 117484 - DNA, 801 bp, Candida glabrata CBS 138
  CDS (1)..(801)
atggtgcaaagacttagtcttatggctacaattgccgatgatgactttccgttgttcaaaacttcaataaatatactgacaggttcacctgcagtggtatatgccaatcttatggtggtatggaagcccaatcctaactatgaggtcgataatcttaattcgaagaatgaattagtggagcctacaaggatgacaaccgcaacaagcatacccttggaattgatcttgaatgatcctgtatcaaaaaataacggtgtggattctgatgaaatactaaacaccatgaaggaacaagaattcccaataaaacaagaacaactatttgatatgatcaacaatccttcaaataatacgataaattggacccttaccactgctgatatacccgccgctgggagcaatagaaaggttagtatgcaggctatccaggaggcaactatcgtacatcaagctggtaataaccctacactcgctaatgttatggctgagttggggtatagctttgattacatgtatgttactgttggtgttagatttgtgcataaacgtgatgtgataattcattgccataaagtatgggatatcgcggaggacaacataatacaagtaacaaaaggaggttacgtggtacatacatttgttacagtaaatagggctaccgatattgaaagactgaacttagcagaagcaaaccttctttccctacaaagagatttatctggttatctagattttaaagttccagacagaaaatctatggatagcagaacaaatttgacacaaaaagatatcaccttatag

SEQ ID NO: 117485 - protein, 266 aa, Candida glabrata CBS 138
MVQRLSLMATIADDDFPLFKTSINILTGSPAVVYANLMVVWKPNPNYEVDNLNSKNELVEPTRMTTATSIPLELILNDPVSKNNGVDSDEILNTMKEQEFPIKQEQLFDMINNPSNNTINWTLTTADIPAAGSNRKVSMQAIQEATIVHQAGNNPTLANVMAELGYSFDYMYVTVGVRFVHKRDVIIHCHKVWDIAEDNIIQVTKGGYVVHTFVTVNRATDIERLNLAEANLLSLQRDLSGYLDFKVPDRKSMDSRTNLTQKDITL

SEQ ID NO: 117486 - DNA, 768 bp, Kluyveromyces lactis NRRL Y-1140
  CDS (1)..(768)
atggtacagcaactagcattattttccgcaattgaagatgaatcttacccgttaagtgtcgagacgttaacaatattatccagtaatagaccgagactctttgccaatttcaacaagatttacaagccaaatccctctctacaaatcgaaaaagttaatgctaaaaaccaattggtggaacaaactagagttaaactaagtacagcggtcccgctgtcaaagttaggtaatggtgcggagttaaactaccatttcatggaaaagttgagtaacgatgacatcgaatccttcaatgtgaaaagttatattcaggatatcgatagtaacaacaagaccaattgggccttccaaatatcagatatacctgctgcaggaaacaacagaaaactttcgagtcagactatccatgaatcagtgatacagagcagtagtggatcagtatcttcatttatcgatgaattgggatacgtaaatgacttccagtatatcaacgtcggcgtcaagttccagttcctaagtggcgtggtaatggaaatctataaagtatggcaagttgtacagaaggatcaagaggtatcaatgaaattaatcacaaaagatgggtttatgatcaaggcaatgtataatgtgaataaaagcacagatatcgagtcccttaataatggtagccaacttcttttgaaattaaagaccgatttacgagattatatcgagttggatattcctgataggaaatgcatggataccaggttaaaccacttggattaa

SEQ ID NO: 117487 - protein, 255 aa, Kluyveromyces lactis NRRL Y-1140
MVQQLALFSAIEDESYPLSVETLTILSSNRPRLFANFNKIYKPNPSLQIEKVNAKNQLVEQTRVKLSTAVPLSKLGNGAELNYHFMEKLSNDDIESFNVKSYIQDIDSNNKTNWAFQISDIPAAGNNRKLSSQTIHESVIQSSSGSVSSFIDELGYVNDFQYINVGVKFQFLSGVVMEIYKVWQVVQKDQEVSMKLITKDGFMIKAMYNVNKSTDIESLNNGSQLLLKLKTDLRDYIELDIPDRKCMDTRLNHLD

SEQ ID NO: 117488 - DNA, 1026 bp, Debaryomyces hansenii CBS767
  CDS (1)..(1026)
atggtacaccagttatcgcttgtatctatggtttcgcatagtaattatgttcagaccatctcgacattacaggcattgactggattattgactccacagccaatttcaacgtatacattggtcaccaaacctcatgatgttttcaaaccgaaatttgaacctggaaaagtgaatcagatcgaacaattttatatgagatgtgtaacgacatggaatgatgagactggaaacaaatttgatcttgcatctcctgttcttgaaaacgacactgacattttagtgaatagattatttttgggagttgatgatcgtaggaattggaccatgcagatatccgatattcccattgctggtaagaatcaggcatgctctgcacagacaatatatgagagtacattggtacaccaccatacaaaagtaatggataaagaaaaagttcaatcagacgtatctaacgaatcaaacatggacattgatgataaggatgaagacaaaaaggaaaatatcaagaaggaagaaagtggcgaggaagtcaaaggaagtggtgaagaagtcaaaggaagtggtgaagaagtcaaaggaagcggtgaagaagccaagaaaagcggagaagaagccaaagaacatagtgaaggcaatgctagtcagaccgtaaaagaattggtagtgttaaatcgaagggattcgttcttacaattcttagaagatttaggctacgatgttataaatcagttttggatgaaaggtgtacgtttcttccatggtgatatagtcattgagattttcaaggtatttgttagagatgacgagaaggacgcagaaaaggacaaaattaggctcaagctattagacccatccaacactttccaaataaggacatacataaatgttccaaaatcgacagatgtagaactaattaatcaagggaccaaggatttattaaagttacaggagtttttgaaaaatttgatcaaactagaaattcctgatagaatgtttatggattctagagttacttataaatag

SEQ ID NO: 117489 - protein, 341 aa, Debaryomyces hansenii CBS767
MVHQLSLVSMVSHSNYVQTISTLQALTGLLTPQPISTYTLVTKPHDVFKPKFEPGKVNQIEQFYMRCVTTWNDETGNKFDLASPVLENDTDILVNRLFLGVDDRRNWTMQISDIPIAGKNQACSAQTIYESTLVHHHTKVMDKEKVQSDVSNESNMDIDDKDEDKKENIKKEESGEEVKGSGEEVKGSGEEVKGSGEEAKKSGEEAKEHSEGNASQTVKELVVLNRRDSFLQFLEDLGYDVINQFWMKGVRFFHGDIVIEIFKVFVRDDEKDAEKDKIRLKLLDPSNTFQIRTYINVPKSTDVELINQGTKDLLKLQEFLKNLIKLEIPDRMFMDSRVTYK

SEQ ID NO: 117490 - DNA, 1056 bp, Candida albicans SC5314
  CDS (1)..(1056): transl_table=12
atggttcatcaactatccttggtttcttcgattccacataataagtatttgcaaacaatttctactctacaagcattgactggtttaattcaacccgaatcaatttccacatacacattacttgcaaagccatcatatgcattcaagcccaagtttgagcctgggaaagtcaatcagatcgaacaatattatatgagatgtataaccacatggaattcagataaacagggagatgatgagaaggttgaaaagggattcgatattctggaaccgtttataaacaaggaatcaaacattgtagtaagaaaattgtttacggaggaagacagtgttgaaagggtttggacattacaagtaagtgacatccctgtagccggtaagaaccagggatgctgtcaacaacaaatatatgaaagtacgttagtgcacacccatacagcaattgagattaaagttgggaatggtgatccaatagatatagatacaaacaatgataaacagggtgacaataataccgataaaccgaaacaagaacacgatggtaaacttccagaggcaatcgatgaagacataataaaaaatggagatgaaaaaaagactacgcatgatgacaatgattctgatatcatggaaattgatgagccaaaccctgaaacacagacccttccacagtcattatcaaacggtgtatcacagaggacgactaggaaagactcattcttaatctttctttctgacttgggatacgaggtgataaaccaatattggcagaaaggagttcgatttttctacggtgacataattatagagatatataaaatattcatcagagatgagagcagccaagctgattcaaatgaaggaataaaattgaaattgttagatgattcaaatcaatttcaaatcaaagcatacattaatattaacaaatccaccgagattgactcaattaacctgggtgtcaaagaactaatcaaattgcaagagtttcttaaaaatttatttgtattagagattcccgaccgaatgttcatggacagcagaatcaagcagtag

SEQ ID NO: 117491 - protein, 351 aa, Candida albicans SC5314
MVHQLSLVSSIPHNKYLQTISTLQALTGLIQPESISTYTLLAKPSYAFKPKFEPGKVNQIEQYYMRCITTWNSDKQGDDEKVEKGFDISEPFINKESNIVVRKLFTEEDSVERVWTLQVSDIPVAGKNQGCCQQQIYESTLVHTHTAIEIKVGNGDPIDIDTNNDKQGDNNTDKPKQEHDGKLPEAIDEDIIKNGDEKKTTHDDNDSDIMEIDEPNPETQTLPQSLSNGVSQRTTRKDSFLIFLSDLGYEVINQYWQKGVRFFYGDIIIEIYKIFIRDESSQADSNEGIKLKLLDDSNQFQIKAYININKSTEIDSINSGVKELIKLQEFLKNLFVLEIPDRMFMDSRIKQ

SEQ ID NO: 117492 - DNA, 25 bp, Artificial sequence
  primer
atggttcagcaactaagcctttttg

SEQ ID NO: 117493 - DNA, 27 bp, Artificial sequence
  primer
ttatattagaatatttccatgtgctac

SEQ ID NO: 117494 - protein, 351 aa, Artificial sequence
  consensus sequence
  Variant (3)..(3): Xaa in position 3 is any amino acid
  Variant (8)..(10): Xaa in position 8 to 10 is any amino acid
  Variant (12)..(15): Xaa in position 12 to 15 is any amino acid
  Variant (17)..(21): Xaa in position 17 to 21 is any amino acid
  Variant (24)..(25): Xaa in position 24 to 25 is any amino acid
  Variant (27)..(27): Xaa in position 27 is any amino acid
  Variant (29)..(30): Xaa in position 29 to 30 is any amino acid
  Variant (31)..(31): Xaa in position 31 is any or no amino acid
  Variant (33)..(42): Xaa in position 33 to 42 is any amino acid
  Variant (45)..(45): Xaa in position 45 is any amino acid
  Variant (46)..(49): Xaa in position 46 to 49 is any or no amino acid
  Variant (51)..(56): Xaa in position 51 to 56 is any amino acid
  Variant (59)..(61): Xaa in position 59 to 61 is any amino acid
  Variant (63)..(79): Xaa in position 63 to 79 is any amino acid
  Variant (80)..(103): Xaa in position 80 to 103 is any or no amino acid
  Variant (105)..(127): Xaa in position 105 to 127 is any amino acid
  Variant (128)..(141): Xaa in position 128 to 141 is any or no amino acid
  Variant (143)..(167): Xaa in position 143 to 167 is any amino acid
  Variant (168)..(203): Xaa in position 168 to 203 is any or no amino acid
  Variant (205)..(209): Xaa in position 205 to 209 is any amino acid
  Variant (211)..(213): Xaa in position 211 to 213 is any amino acid
  Variant (215)..(215): Xaa in position 215 is any amino acid
  Variant (217)..(224): Xaa in position 217 to 224 is any amino acid
  Variant (225)..(240): Xaa in position 225 to 240 is any or no amino acid
  Variant (242)..(248): Xaa in position 242 to 248 is any amino acid
  Variant (252)..(255): Xaa in position 252 to 255 is any amino acid
  Variant (258)..(260): Xaa in position 258 to 260 is any amino acid
  Variant (263)..(263): Xaa in position 263 is any amino acid
  Variant (265)..(271): Xaa in position 265 to 271 is any amino acid
  Variant (272)..(272): Xaa in position 272 is any or no amino acid
  Variant (274)..(275): Xaa in position 274 to 275 is any amino acid
  Variant (277)..(292): Xaa in position 277 to 292 is any amino acid
  Variant (293)..(302): Xaa in position 293 to 302 is any or no amino acid
  Variant (304)..(309): Xaa in position 304 to 309 is any amino acid
  Variant (312)..(314): Xaa in position 312 to 314 is any amino acid
  Variant (318)..(320): Xaa in position 318 to 320 is any amino acid
  Variant (322)..(326): Xaa in position 322 to 326 is any amino acid
  Variant (328)..(329): Xaa in position 328 to 329 is any amino acid
  Variant (331)..(333): Xaa in position 331 to 333 is any amino acid
  Variant (335)..(339): Xaa in position 335 to 339 is any amino acid
  Variant (341)..(342): Xaa in position 341 to 342 is any amino acid
  Variant (346)..(347): Xaa in position 346 to 347 is any amino acid
MVXQLSLXXXIXXXXYXXXXXTLXXLXGXXXPXXXXXXXXXXKPXXXXXPXXXXXXVNXXXQXXXXXXXXXXXXXXXXXXXXXXXXXXXXXXXXXXXXXXXXXLXXXXXXXXXXXXXXXXXXXXXXXXXXXXXXXXXXXXXVXXXXXXXXXXXXXXXXXXXXXXXXXXXXXXXXXXXXXXXXXXXXXXXXXXXXXXXXXXXXXGXXXXXSXXXIXEXXXXXXXXXXXXXXXXXXXXXXXXSXXXXXXXLGYXXXXQYXXXGVXFXXXXXXXXEXXKXXXXXXXXXXXXXXXXXXXXXXXXXXFXXXXXXNVXXXTDIXXXNXXXXXLXXLXXXLXXXXXLXXPDRXXMDSR

SEQ ID NO: 117495 - DNA, 1230 bp, Saccharomyces cerevisiae
  CDS (1)..(1230)
atggttaaagaaactaagttttacgatattctaggtgttccagtaactgccactgatgtcgaaattaagaaagcttatagaaaatgcgccttaaaataccatccagataagaatccaagtgaggaagctgcagaaaagttcaaagaagcttcagcagcctatgaaattttatcagatcctgaaaagagagatatatatgaccaatttggtgaagatggtctaagtggtgctggtggcgctggcggattcccaggtggtggattcggttttggtgacgatatcttttcccaattctttggtgctggtggcgcacaaagaccaagaggtccccaaagaggtaaagatatcaagcatgaaatttctgcctcacttgaagaattatataagggtaggacagctaagttagcccttaacaaacagatcctatgtaaagaatgtgaaggtcgtggtggtaagaaaggcgccgtcaagaagtgtaccagctgtaatggtcaaggtattaaatttgtaacaagacaaatgggtccaatgatccaaagattccaaacagagtgtgatgtctgtcacggtactggtgatatcattgatcctaaggatcgttgtaaatcttgtaacggtaagaaagttgaaaacgaaaggaagatcctagaagtccatgtcgaaccaggtatgaaagatggtcaaagaatcgttttcaaaggtgaagctgaccaagccccagatgtcattccaggtgatgttgtcttcatagtttctgagagaccacacaagagcttcaagagagatggtgatgatttagtatatgaggctgaaattgatctattgactgctatcgctggtggtgaatttgcattggaacatgtttctggtgattggttaaaggtcggtattgttccaggtgaagttattgccccaggtatgcgtaaggtcatcgaaggtaaaggtatgccaattccaaaatacggtggctatggtaatttaatcatcaaatttactatcaagttcccagaaaaccatttcacatcagaagaaaacttgaagaagttagaagaaattttgcctccaagaattgtcccagccattccaaagaaagctactgtggacgaatgtgtactcgcagactttgacccagccaaatacaacagaacacgggcctccaggggtggtgcaaactatgattccgatgaagaagaacaaggtggcgaaggtgttcaatgtgcatctcaatga

SEQ ID NO: 117496 - protein, 409 aa, Saccharomyces cerevisiae
MVKETKFYDILGVPVTATDVEIKKAYRKCALKYHPDKNPSEEAAEKFKEASAAYEILSDPEKRDIYDQFGEDGLSGAGGAGGFPGGGFGFGDDIFSQFFGAGGAQRPRGPQRGKDIKHEISASLEELYKGRTAKLALNKQILCKECEGRGGKKGAVKKCTSCNGQGIKFVTRQMGPMIQRFQTECDVCHGTGDIIDPKDRCKSCNGKKVENERKILEVHVEPGMKDGQRIVFKGEADQAPDVIPGDVVFIVSERPHKSFKRDGDDLVYEAEIDLLTAIAGGEFALEHVSGDWLKVGIVPGEVIAPGMRKVIEGKGMPIPKYGGYGNLIIKFTIKFPENHFTSEENLKKLEEILPPRIVPAIPKKATVDECVLADFDPAKYNRTRASRGGANYDSDEEEQGGEGVQCASQ

SEQ ID NO: 117497 - DNA, 1905 bp, Oryza sativa
  CDS (171)..(1463)
atcctgctcactttccgctacaccacgtccccgtgactcttctgcgacgacagaaagtctcctctcactccccttccactctctccaccacactcgcgcctactctcgagcgttgacccgatcacactcatacgccactccccactctcacaccccgacagaccgcaatcatggtcaaggacaccaaattctacgacaccctcggctgcgcgcccgacgctaccgagtctcagctcaagaccgcataccgcaagggcgccctcaagcaccaccccgacaagaacgcacactcgcccgaatccgaggagaagttcaaggagatctcacacgcatacgaagtcctctcagacccccaaaagcgccaaatctacgaccagtatggtgaggagggtctcgagcagggtggtggaatgggcggcggcggaggcatggctgccgaggacttgttcgcacagttcttcggcggcggcggtggaggcggaggcttcggtggcatgggcggcatgttcggcggtcgcgagcccggccccaagaaggctcgcaccatccaccacgttcacaaggtctctctcgaggacatctaccgcggcaaggtttccaagcttgccctgcagaagagcgtcatctgctccaagtgtgatggccgcggtggtaaggagggtgctgtgaagacttgccagggctgccagggccagggtatgaagaccatgatgcgccagatgggtcccatgatccagcgattccagaccgtctgccccgactgcaacggtgagggggagcaggtccgcgagaaggacaagtgcaagcagtgctccggaaagaagaccatcatcgagcgcaaggtgctccacgtccacgtcgacaagggtgtgcaaagcggcaccaagatcgacttcagaggcgagggtgaccagatgcctggcgttgagcccggtgatgtgcagttcgagatcgagcagaagcctcaccctcgcttccagcgcaagggtgacgacctctactaccacgccgagatcgaccttcttactgcgctcgccggcggtgccatctacgttgagcaccttgacgagcgctggttgaccgtcgagatcctgcccggcgaggttatcgcaccaggcgaggtcaaggtcatccgcggccagggtatgccctcataccgccaccacgaccacggcaacctttacatccagttcgacgtcaagttccccacatccatccaaggccctgccgacaaggacggccagtccacctccatgtccgcacaacagatcaaggccctcgaatccgtccttcctcctcgcaagccccaatcgatccctcctcccgatgctatgaccgaggacttccagctcgagcgcgtagaccccatggagggctcccgctccaagggcgcccacagcatggacgaggacgatgacgagatgggcggcggtggcgagcgcgtgcagtgcgcgtcgcagtaagccagccagagagcggtcctggtcggcgcggttccccgtatagaaaggaggagtggctacgaagtcgacgaaaaatccgaaggcggaagcgcgttgaagaagatgataccagataccctccgttttcttcggggaaaactccagaagtatagcgggtttgcgggagcattagtagcaaggtctattcccttaattgcttttgtttcagcagatcaccggagctcctcacagcgggcaagaacgcccctgcgggttcactcgtctttcggctggctgttcttccctcgaagatatatctcacgtcttatatgttgaacgatgcatggcgaaagcatggggtccggaatttgtttttgctgttgttgctcggtgttgttgtatacgacaaagatagatcctgggttgcgtttgtttggcagtaatcatattcttttctttcctg

SEQ ID NO: 117498 - protein, 430 aa, Oryza sativa
MVKDTKFYDTLGCAPDATESQLKTAYRKGALKHHPDKNAHSPESEEKFKEISHAYEVLSDPQKRQIYDQYGEEGLEQGGGMGGGGGMAAEDLFAQFFGGGGGGGGFGGMGGMFGGREPGPKKARTIHHVHKVSLEDIYRGKVSKLALQKSVICSKCDGRGGKEGAVKTCQGCQGQGMKTMMRQMGPMIQRFQTVCPDCNGEGEQVREKDKCKQCSGKKTIIERKVLHVHVDKGVQSGTKIDFRGEGDQMPGVEPGDVQFEIEQKPHPRFQRKGDDLYYHAEIDLLTALAGGAIYVEHLDERWLTVEILPGEVIAPGEVKVIRGQGMPSYRHHDHGNLYIQFDVKFPTSIQGPADKDGQSTSMSAQQIKALESVLPPRKPQSIPPPDAMTEDFQLERVDPMEGSRSKGAHSMDEDDDEMGGGGERVQCASQ

SEQ ID NO: 117499 - DNA, 1858 bp, Sorghum bicolor
  CDS (149)..(1411)
aagatccaggcgcccttccgctgcagcgccgcctctcgccctccccgcgtcgtcgccctcgccccgctcaccgcgggccggcgtgcggtggagatcagtccttgctcgaactgactcgttcctttgctgcaagtacctactatcagccatgtttggacgcatgccaaggaagagcagtaacaataccaagtattacgaggttcttggtgtgtctaagaccgcaagtcaggatgagctaaagaaagcatacagaaaagctgccataaaaaaccatcctgataagggtggagaccctgagaagtttaaagagttgtctcaagcttatgatgttcttagcgacccagagaagagggagatctatgaccagtatggagaagatgcccttaaggagggaatgggaggcggcggcagcagtgatttccatagcccatttgacatttttgagcaactttttccgggttctagcggctttggtggtggctcaagaggacgcagacaaaagcgtggtgaagatgtggtacatactatgaaggtttccttagaagatctgtataacgggacaaccaagaaactatctttatcgcggagtgctttgtgctccaagtgtaagggtaaaggatccaagagtggggcatcaggaacttgccatggttgccgtggtgctggaatgaggacaatcacaagacagataggccctggcatgatccaacagatgaacactgtttgccctgaatgcaaaggatcaggcgagatcataagtgacaaggataaatgcccaagctgtaaaggaagcaaggtagtccaggagaagaaggtcttggaggttcatgtggagaaaggaatgcaacatagccaaaagattgtattccagggtcaagctgatgaagctcctgatacggttacaggagacattgtttttgtcttgcaacttaaagaccatccaaagtttaagaggaagtatgatgacttatatgttgagcacacaatctctctcactgaggcactgtgtggcttccagtttgttcttactcatcttgatggccggcagcttctgatcaaatctaaccctggggaggttattaaaccaggtcaacacaaggccattaatgacgagggtatgcctcagcatgggcgtcctttcatgaagggtcgtctgtttgttgaattcaacgtcgagtttcctgagcctggtgtgctctccactgcccagtgccgatcattggagaagatccttccaccgaaaccagggagccaactgtcagacatggagctggaccagtgtgaggagaccaccctgcatgatgtcaacatagaagaggagatgaggcgcaggcagcagcagaggcggcaggaggcctatgatgaggacgaggaggaggctggaccaagggtgcaatgtgcccagcagtaagatttgggtttatcagaacactgttgtcccaaaatttccgcaggatttatccatcccatcatctcgattcttttttggcaaaaatgtatccattctgaacttaaaactgtgtagttactagtgtctgtcagggaaaaaaaaagagagttcagaatgacatgttctttgtttgaacatctagccccaggattcaaccctggtcattcagctacaatttactgagcatgccagtgcaatgcgtactggcttagttaagctccacgtcgatgttattttgtgtacccgtctaaaaagtgtccagctcatggtgtgctactattttgatgttgtaaggaacattgagtttgttggtggtaatgatttgtgatgcaccgtggtggtccttggaagcggaaaaaaaaaaaaaaaaaaggcccctattaatgacagtttggctatttggaggtc

SEQ ID NO: 117500 - protein, 420 aa, Sorghum bicolor
MFGRMPRKSSNNTKYYEVLGVSKTASQDELKKAYRKAAIKNHPDKGGDPEKFKELSQAYDVLSDPEKREIYDQYGEDALKEGMGGGGSSDFHSPFDIFEQLFPGSSGFGGGSRGRRQKRGEDVVHTMKVSLEDLYNGTTKKLSLSRSALCSKCKGKGSKSGASGTCHGCRGAGMRTITRQIGPGMIQQMNTVCPECKGSGEIISDKDKCPSCKGSKVVQEKKVLEVHVEKGMQHSQKIVFQGQADEAPDTVTGDIVFVLQLKDHPKFKRKYDDLYVEHTISLTEALCGFQFVLTHLDGRQLLIKSNPGEVIKPGQHKAINDEGMPQHGRPFMKGRLFVEFNVEFPEPGVLSTAQCRSLEKILPPKPGSQLSDMELDQCEETTLHDVNIEEEMRRRQQQRRQEAYDEDEEEAGPRVQCAQQ

SEQ ID NO: 117501 - DNA, 1266 bp, Triticum aestivum
  CDS (1)..(1266)
atgttcgggcgcgggccgccgaagaagagcgacagcacgcgctactacgagatcctgggcgtgcccaaggacgcgtcccaggacgacctcaagaaggcctaccgcaaggccgccatcaagaaccaccccgacaagggaggcgacccagagaagttcaaggagctagctcaggcttatgaggttctgagtgatcctgagaagcgagagatctatgaccagtatggtgaggatgccctcaaggagggaatgggaggtggaggaatgcatgatccttttgacatcttccagtcattctttggtggtggcggcaaccccttcggaggtggcgggagcagtaggggcaggcggcagcgcaggggtgaggatgtggttcatcctctgaaggttagccttgaggaactgtacaacggaacatcaaagaagctctctcttgcccgcaatgtgctctgctcgaagtgcaatggcaaggggtcaaagtccggggcttcgatgaagtgtgccggctgccaaggtgctggttacaaggtgcagataaggcagctgggaccaggaatgattcagcaaatgcagcagccttgcaatgagtgcaggggaagtggggagaccatcagcgacaaggatcgctgtgggcagtgcaaaggcgagaaggtggtgcacgagaagaaagtcctggaggtggtggtcgagaagggaatgcagcatgggcagaagatcaccttccccggcgaggcggatgaagcgcctgatactgttactggagacataatcttcgtcctccagcagaaggagcaccccaaattcaagcggaagggcgatgacctcttctacgagcacaccctgaccctgaccgaggcactgtgtggcttccagtatgtcctggctcatttggacggcaggcagctgctcatcaagtccaaccctggcgaagtcgtcaagcctgattcgttcaaggcgatcaacgacgagggcatgcccatgtaccagaggccgttcatgaagggcaagctgtacatccacttcacggttgattttcccgactcgctgagcctggaccagtgcaaggcgctcgagactgtcctgccgcccaagccggcgtcgcagtacacggacatggagctggacgagtgcgaggagacgatggcctacgacattgacatcgaggaggagatgcggaggcgacagcagcagcaggcacaggaggcctacgacgaggacgaggacatgcccggtggcggcggccagcgggtgcagtgcgcccagcagtag

SEQ ID NO: 117502 - protein, 421 aa, Triticum aestivum
MFGRGPPKKSDSTRYYEILGVPKDASQDDLKKAYRKAAIKNHPDKGGDPEKFKELAQAYEVLSDPEKREIYDQYGEDALKEGMGGGGMHDPFDIFQSFFGGGGNPFGGGGSSRGRRQRRGEDVVHPLKVSLEELYNGTSKKLSLARNVLCSKCNGKGSKSGASMKCAGCQGAGYKVQIRQLGPGMIQQMQQPCNECRGSGETISDKDRCGQCKGEKVVHEKKVLEVVVEKGMQHGQKITFPGEADEAPDTVTGDIIFVLQQKEHPKFKRKGDDLFYEHTLTLTEALCGFQYVLAHLDGRQLLIKSNPGEVVKPDSFKAINDEGMPMYQRPFMKGKLYIHFTVDFPDSLSLDQCKALETVLPPKPASQYTDMELDECEETMAYDIDIEEEMRRRQQQQAQEAYDEDEDMPGGGGQRVQCAQQ

SEQ ID NO: 117503 - DNA, 1263 bp, Triticum aestivum
  CDS (1)..(1263)
atggtaaaagataccaaactatatgatactctgggtatttccccgacctgtactgaagccgagttaaaaaaagcatacaaaatcggagcacttaaacaccatcctgataaaaacgcctcaaatccagccgccgcagaaaaatttaaagaaatatcgcacgcatatgaagtactatctgaccctcaaaaaagacacatatacgaccaatatggcgaagagggccttgagggaggtggtggtgctgcgggagggatgaacgcagaagatttattctctcaattcttcagcggtggctctgccttcggaggtggaggattgggtggcatgttcgggggagggccacagcaacgtggccccccaaaagcccgcaccattcatcacgttcacaaggtatctctagaagatatctaccgcggtaaaatctcaaaactggcactacaaaagtcagtcatatgccacaagtgtgagggacggggtggcaaagatggtgcagtaaaaaaatgtgccggctgtgatggacatggaatgaaaacaatgatgcgtcaaatgggtcctatgattcagcggtttcaaactcactgccccgactgcaatggtgagggagaagtcatccgagagaaagataaatgtaagacgtgtaacggtaaaaagaccaacgtggaacgcaaagtactccacgttcatgtggacagaggtgttcgatcggggcaccggattgaatttaaaggtgaaggagaccaaacccccggagttcaacctggagatgttatctttgaaattgagcagaaaccacatccaagattccaacgaaaagacgatgaccttatttaccacgcagagatcgaccttgttactgccttagcgggcgggtcaatcttcattgagcacttagacgaaagatggctgagtgtggagatacttcctggagaggttatctcacctggatccgttaagatgatacgcggtcagggtatgccatcccatcgtcaccacgactatggaaatatgtttgtacagtttgatgtcaaattccccgaaagtaactttgctgcaaattccgaggcatacgcagctctgaagagtattattccgccgactgtggtacctatcactccacccactgataccatgactgaaactgtatacttcgaagacattgaccctactcaacaagctcgtgcacagggtgcgacagcaatggatgaagacgatgaagatggccatccagccggcgccgaacgggttcaatgtgcgtcacagtaa

SEQ ID NO: 117504 - protein, 420 aa, Triticum aestivum
MVKDTKLYDTLGISPTCTEAELKKAYKIGALKHHPDKNASNPAAAEKFKEISHAYEVLSDPQKRHIYDQYGEEGLEGGGGAAGGMNAEDLFSQFFSGGSAFGGGGLGGMFGGGPQQRGPPKARTIHHVHKVSLEDIYRGKISKLALQKSVICHKCEGRGGKDGAVKKCAGCDGHGMKTMMRQMGPMIQRFQTHCPDCNGEGEVIREKDKCKTCNGKKTNVERKVLHVHVDRGVRSGHRIEFKGEGDQTPGVQPGDVIFEIEQKPHPRFQRKDDDLIYHAEIDLVTALAGGSIFIEHLDERWLSVEILPGEVISPGSVKMIRGQGMPSHRHHDYGNMFVQFDVKFPESNFAANSEAYAALKSIIPPTVVPITPPTDTMTETVYFEDIDPTQQARAQGATAMDEDDEDGHPAGAERVQCASQ

SEQ ID NO: 117505 - DNA, 1056 bp, Bombyx mori
  CDS (1)..(1056)
atgggcaaagactactataaaatattgggaataacaaaaggtgcttcggacgatgacatcaagaaagcctacagaaaattggcattaaagtaccacccggacaagaacaaggctgcgggcgcagaggaaaggtttaaagaagtggcagaagcttatgaggttttatcggacaagaagaaaagagaaatttatgatgcgcacggcgaagaaggcctaaagggtggtatgggcgggcagaatggtcctggtggcggtcaatcattttcctacacgttccacggcgacccgaaagcaacgttcgcgcagttctttggttcggccagcccgttccaggaattcttcgatctgaatggaggtggaactacaacgttcttcgaccgcgacatggatgtggatatggatcctttcagtaacataagcatggggcaggcgcgaccaggtggccccggtggtgctttccgcagtcacagcttggatttccagggttcacctagtaggaaggagaagacgcaggacccccccatcgaacacgatttatacgtatcattagaagatatcgcccggggtggtgtcaagaagatgaagatatcgcgacgtgtaatacagcaagagggtacctcgaagaaggaagacaaggtgttgaccatacacgtgaagcctggctggaaagctggaactaagattaccttccagaaagaaggtgatcgaggtcgtaataaaatcccagcagacatagtgtttatcatccgagataaggcacatccactattcaagcgagaaggcagtgacataagatacacagctaaaatctcactcaaacaggcactctgtggcacaaccatggaagtaccaactatgtctggagaaaagttaacagtcaacttacatggtgaaatagtaaaacctcacacagtcaaaaggttcccaggctatggactaccgttccccaaggaacccacaagaaagggtgacctgcttgtagcatttgacatcaagtttcctgaacgcttaaccacaggagtcaaagaaatattaatggacactttacctaattaa

SEQ ID NO: 117506 - protein, 351 aa, Bombyx mori
MGKDYYKILGITKGASDDDIKKAYRKLALKYHPDKNKAAGAEERFKEVAEAYEVLSDKKKREIYDAHGEEGLKGGMGGQNGPGGGQSFSYTFHGDPKATFAQFFGSASPFQEFFDLNGGGTTTFFDRDMDVDMDPFSNISMGQARPGGPGGAFRSHSLDFQGSPSRKEKTQDPPIEHDLYVSLEDIARGGVKKMKISRRVIQQEGTSKKEDKVLTIHVKPGWKAGTKITFQKEGDRGRNKIPADIVFIIRDKAHPLFKREGSDIRYTAKISLKQALCGTTMEVPTMSGEKLTVNLHGEIVKPHTVKRFPGYGLPFPKEPTRKGDLLVAFDIKFPERLTTGVKEILMDTLPN

SEQ ID NO: 117507 - DNA, 1206 bp, Bombyx mori
  CDS (1)..(1206)
atggttaaggagaccacatattatgacattttgggcgtgaaaccaaattgcaccactgatgaattaaagaaagcctatcgaaaattagctctaaaataccaccctgacaagaacccaaatgagggtgagaaatttaaacagatatctcaggcctatgaggtgctctcgaatcctgacaaaaggcgaatttatgatcaaggtggtgaacaagcattaaaggaagggggtggtagtggtggtggattttcttcaccaatggatctctttgacatgttctttggaggtggatttagtggaggtagacgccgcaaggaacgcaaaggcaaagatgtaattcatcaattatcagtaacattggaggagttgtactgtggcacagtcagaaaactgacgcttcaaaagaacgtgatctgtgagaaatgtgagggacgtggtggtaaaaagggtgcagttcaaacttgtccagtgtgccgtggctctggtatgcaagtacaaattcaacagctaggcccgggtatgatacagcagattcaaacagtatgctgcgaatgccgtggacaaaaagagattgtagatcctaaagaccgttgcaaagtctgtgagggacgtaaaatagtacgtgatcgtaaaattcttgaagttcatgtggataaaggtatggttgatgggcaaaagattgtgtttagtggagaaggtgatcaagaaccaaatcttgaacctggcgacctcattattgttttggatgaaaaggaacatggaatatttaaacgttctggaaatgatctcattttacgcatgaacatagaacttgtggaagctttgtgtggtttccaaaaagtaataaggactctggatgaaagagacattgttataactgtgatgcctggtgaggttaccaaacatggtgaagtcaagtgtgtactgaacgaaggaatgcctatgtacaaaaatccatttgaaaaaggacaactgattgtacaattcattgttaatttcccatcgcgtgttccgccagaattaattcctgcattggaaaactgtctacctgctcgacctagggttgaaatacctgaattggctgaagaatgccaattgatggacttcgttcctgaacaagagatgcgaagagaccgtcaacgaggcaacgcgtatgacgaagatgatgagcatcctggattaaacagagtccaatgtgcaactagctaa

SEQ ID NO: 117508 - protein, 401 aa, Bombyx mori
MVKETTYYDILGVKPNCTTDELKKAYRKLALKYHPDKNPNEGEKFKQISQAYEVLSNPDKRRIYDQGGEQALKEGGGSGGGFSSPMDLFDMFFGGGFSGGRRRKERKGKDVIHQLSVTLEELYCGTVRKLTLQKNVICEKCEGRGGKKGAVQTCPVCRGSGMQVQIQQLGPGMIQQIQTVCCECRGQKEIVDPKDRCKVCEGRKIVRDRKILEVHVDKGMVDGQKIVFSGEGDQEPNLEPGDLIIVLDEKEHGIFKRSGNDLILRMNIELVEALCGFQKVIRTLDERDIVITVMPGEVTKHGEVKCVLNEGMPMYKNPFEKGQLIVQFIVNFPSRVPPELIPALENCLPARPRVEIPELAEECQLMDFVPEQEMRRDRQRGNAYDEDDEHPGLNRVQCATS

SEQ ID NO: 117509 - DNA, 1254 bp, Oryza sativa (japonica cultivar-group); identical to SEQ ID NO: 64081
  CDS (1)..(1254)

SEQ ID NO: 117510 - protein, 417 aa, Oryza sativa (japonica cultivar-group); identical to SEQ ID NO: 64082

SEQ ID NO: 117511 - DNA, 1251 bp, Oryza sativa (japonica cultivar-group); identical to SEQ ID NO: 63813
  CDS (1)..(1251)

SEQ ID NO: 117512 - protein, 416 aa, Oryza sativa (japonica cultivar-group); identical to SEQ ID NO: 63814

SEQ ID NO: 117513 - DNA, 1284 bp, Arabidopsis thaliana
  CDS (1)..(1284)
atgcgaagattcaactgggttctgcggcatgtacaagctcgaagaacttttgattccgcgatcggattgcgtcaagggtctcagaagccgttgttcgagcgatacattcacgctacaggtataaacaactccagtgctcgtaattactatgatgttctcggtgtttctcctaaagctacacgggaggagattaaaaaatcatttcatgagcttgcgaaaaaattccaccctgatacaaatagaaataatccgtcagcaaaaaggaagttccaggaaataagagaggcatatgagaccctgggaaattcggaaagaagagaagaatatgataagctgcagtatcggaattcggattatgtaaataatgacggtggtgattcagagaggttcagacgtgcataccagtccaatttctcggatactttccacaagattttttctgagatatttgagaacaatcagataaaacctgatattcgggtggaactgtcgctttctctttccgaagctgcagaagggtgcacaaaacgtttgtcttttgatgcatatgtcttttgtgattcctgtgatgggcttggccaccctagcgatgctgccatgagcatttgtccaacatgcaggggggttggacgagtaactattcctccttttacagcatcatgccagacgtgcaaggggacgggacacattattaaggaatactgcatgtcttgtagaggatcaggtattgtggaaggcacaaagacagctgaacttgtgatccctggaggggtggagtctgaagctacaatcacaatcgtaggtgctggtaatgtaagttcaagaacaagtcaacctgggaacttgtatatcaaactaaaggttgctaatgattcaactttcactagggatggctcagatatatatgtggatgctaatattagctttacacaagctattttggggggcaaagttgtggtgccaacactttcaggcaagatacagctagatataccaaaggggactcagcctgatcaacttcttgttttaagaggcaaaggactaccgaagcaaggcttttttgtagatcatggagatcagtatgttcgcttccgcgttaactttcctactgaagtgaatgaacgtcagcgtgctatactggaagagtttgcaaaggaagaaatcaacaatgagttgagcgactctgctgaaggaagttggtggaatctaacgggtcctcagatcatccgcgacttctcgttaatggtgctgctggcgctattgttgagcaggttaatgggatga

SEQ ID NO: 117514 - protein, 427 aa, Arabidopsis thaliana
MRRFNWVLRHVQARRTFDSAIGLRQGSQKPLFERYIHATGINNSSARNYYDVLGVSPKATREEIKKSFHELAKKFHPDTNRNNPSAKRKFQEIREAYETLGNSERREEYDKLQYRNSDYVNNDGGDSERFRRAYQSNFSDTFHKIFSEIFENNQIKPDIRVELSLSLSEAAEGCTKRLSFDAYVFCDSCDGLGHPSDAAMSICPTCRGVGRVTIPPFTASCQTCKGTGHIIKEYCMSCRGSGIVEGTKTAELVIPGGVESEATITIVGAGNVSSRTSQPGNLYIKLKVANDSTFTRDGSDIYVDANISFTQAILGGKVVVPTLSGKIQLDIPKGTQPDQLLVLRGKGLPKQGFFVDHGDQYVRFRVNFPTEVNERQRAILEEFAKEEINNELSDSAEGSWWNLTGPQIIRDFSLMVLLALLLSRLMG

SEQ ID NO: 117515 - DNA, 1047 bp, Arabidopsis thaliana
  CDS (1)..(1047)
atgggagttgattattacaaggttttacaggttgatagaagcgctaacgacgatgaccttaagaaagcttatagaaaactcgctatgaaatggcatcctgataagaaccctaacaacaaaaaagacgctgaggctaagttcaagcagatctctgaggcctacgatgttcttagcgatcctcaaaagagagctgtatatgatcaatacggtgaggaagggttaaaagggaatgtgccacctcccaatgctgctactagtggagcatcctacttctcaacaggagatggatcttcgtctttcagattcaacccgagaagtgcagatgatatattcgctgagtttttcgggttctcgaccccgtttggtggcggtggtggtggcactggagggcagagattcgctagccgcatgtttggtgatgatatgtatgcctcgtttggtgaaggagcaggtggaggaggagctatgcatcatcatcaccatcatcatcatcacgctgcagctaggaaagtggctcctatcgagaacaagttgccttgtagccttgaagatctctacaaaggaaccaccaagaagatgaagatctccagggagattgtagatgtcagcggtaaggcaatgcaagtggaagagattctaacgattggagtgaaacccgggtggaagaaaggcacaaagatcacattcccagagaaaggcaatgagcatccaggtgtgattccagcggatctagtcttcatcattgacgagaaaccccatccagtgtttacccgtgagggcaacgacctgattgtcacacagaaagtctcactagctgatgccttaacaggctacaccgcaaacatagcgacccttgatggccgtacacttacaatcccgatcacaaatgtgatccatccagagtatgaagaggtggttcctaaagagggaatgccactccagaaagatcagacaaagaaagggaacttaaggatcaagttcaatatcaagtttccagcgagattaactgcggaacagaaagctgggtttaagaagcttattgggtga

SEQ ID NO: 117516 - protein, 348 aa, Arabidopsis thaliana
MGVDYYKVLQVDRSANDDDLKKAYRKLAMKWHPDKNPNNKKDAEAKFKQISEAYDVLSDPQKRAVYDQYGEEGLKGNVPPPNAATSGASYFSTGDGSSSFRFNPRSADDIFAEFFGFSTPFGGGGGGTGGQRFASRMFGDDMYASFGEGAGGGGAMHHHHHHHHHAAARKVAPIENKLPCSLEDLYKGTTKKMKISREIVDVSGKAMQVEEILTIGVKPGWKKGTKITFPEKGNEHPGVIPADLVFIIDEKPHPVFTREGNDLIVTQKVSLADALTGYTANIATLDGRTLTIPITNVIHPEYEEVVPKEGMPLQKDQTKKGNLRIKFNIKFPARLTAEQKAGFKKLIG

SEQ ID NO: 117517 - DNA, 1251 bp, Treponema pallidum subsp. pallidum str. Nichols
  CDS (1)..(1251): transl_table=11
gtgtttggatgtagcctgcgtaggcggtgcttcaggcgtcctgcttttgtgccggtttcgcgtgcacaccctgtttttctgtgtgtgcgcgcaaatgtagacaaagattctctagacggggtgatcgtggcaaagaaggattattacgaggttctcggtatctcaaagaccgcgagtggagaagaaatcaaaaaggcgtaccggcggctggctattcagtttcatcctgaccgtaatcagggaaataaagaggcggaggaacgcttcaaggaggctaccgaagcctatgaggtgctcattgatgcacagaagcgtgccgcgtacgatcggtatggctttgatggcctgaaggatatgcacggtgcgcatggctttaactcttcggcctttcaggggttcgaagatatttttgggggtggcttttctgatatctttgaaaatatttttgggacttcgtctcgccgcggcggttcagggaacgacggctcgggtggctccgggcgtggggcaaacttgcgttatgatttgcaaatctcttttgaagaagcagtgtacgggaaaaagagtgagctgcactatgtgcgcgacgaaacgtgtattacctgcaagggtgccggctcggccagcggtgggcgtaagatgtgtccagattgcaagggtacggggcagattcggcgtagtacaggttttttctctattgcgcaaagttgtgcgcgctgtggtggtgaggggacgattatcgaaagtccctgtgcacggtgtgcgggtagtggcattgagcgtaaaaagcaaaaaattatcgtcagtattccggcaggtgtagaagaagggcggcgcattactattccccgtcagggaaacgccggtcgcgcaggcggtgcctacggggacctgtacgtgtttgtgtttgttcgtgcgcatgagtatttcgaacgtgaaggtgctgacctgtactgtgcaacttcgatatcggtaacccaagcgattttgggcgcgcaggtgacggtgcgggcattagatggatctgcgcagcaggtgcgggttccggccggcacgcagggaggtgcgcttttgcgtgttaagggtatgggggtcccactggcgcgcggggcgggggatttgtacgtaaaggtattggtgcgtattccaactacgctttctgcacggtcgcgtgcgctcttagcggagatttctcaagaggaaggggaaaacgcccatccgccgttgcttgaactttcaagtctcaagtag

SEQ ID NO: 117518 - protein, 416 aa, Treponema pallidum subsp. pallidum str. Nichols
MFGCSLRRRCFRRPAFVPVSRAHPVFLCVRANVDKDSLDGVIVAKKDYYEVLGISKTASGEEIKKAYRRLAIQFHPDRNQGNKEAEERFKEATEAYEVLIDAQKRAAYDRYGFDGLKDMHGAHGFNSSAFQGFEDIFGGGFSDIFENIFGTSSRRGGSGNDGSGGSGRGANLRYDLQISFEEAVYGKKSELHYVRDETCITCKGAGSASGGRKMCPDCKGTGQIRRSTGFFSIAQSCARCGGEGTIIESPCARCAGSGIERKKQKIIVSIPAGVEEGRRITIPRQGNAGRAGGAYGDLYVFVFVRAHEYFEREGADLYCATSISVTQAILGAQVTVRALDGSAQQVRVPAGTQGGALLRVKGMGVPLARGAGDLYVKVLVRIPTTLSARSRALLAEISQEEGENAHPPLLELSSLK

SEQ ID NO: 117519 - DNA, 939 bp, Deinococcus radiodurans R1
  CDS (1)..(939): transl_table=11
atggcttacaaggactactacgacgtgctcggcgtgtcccgctccgcgtcggacgccgacatcaaatccgcttaccgcaagctcgccaagcagtaccaccccgacaagaaccagggtgacgagaaggccgccgacaagttcaaggaaatcggcgaagcctacgcggtcctcaacgaccccgaaaagcgcaaactgtacgaccagtacggccacaccgggcaagtgccgcccggctacggcgacgccggcatgggcggcgggttccagggtggcgacttcggcggcttcgaccccggccagttctcggacttcttccagcagatgttcggcggacgcggcggaatgggcggaatgggaggccggggcggctttgctggcggtcaggtcaacctcgacgacctgttcggcggcgccagcggtggtctgggcggggccggggccgggcggcggttcgtgcagaacgtggaaggcgagttgcaggtgacgctgcgtgaggcgctggaaggctccgacgaggtcatcaacgtagacggcaagcgcctctcgctgcgcgttcctgccggcacccgcgacggcgcccggctgcggctggcgggtcagggcccgggcggcggcgacgtgctgctgaccatccgggtgctggaagatgcccgctttgaacttgacggcgacgacctgacgactacggtggatgtgcccgcgcccgtcgcggctctgggcggtgaggtcaaagtgcaactcctgagcggcaaatcaggcaacctcaacgtcccggcaggcagcagcggcggacgcaagatgcgcctgcgcggccagggctggcccaagaagagcggcggtaacggcgacctgtacgtgcggctgaatgtcacggtgcccaaagacctcagcgacgaggaaaaagagctgtacacgaaattgcgcgacttgcagaaataa

SEQ ID NO: 117520 - protein, 312 aa, Deinococcus radiodurans R1
MAYKDYYDVLGVSRSASDADIKSAYRKLAKQYHPDKNQGDEKAADKFKEIGEAYAVLNDPEKRKLYDQYGHTGQVPPGYGDAGMGGGFQGGDFGGFDPGQFSDFFQQMFGGRGGMGGMGGRGGFAGGQVNLDDLFGGASGGLGGAGAGRRFVQNVEGELQVTLREALEGSDEVINVDGKRLSLRVPAGTRDGARLRLAGQGPGGGDVLLTIRVLEDARFELDGDDLTTTVDVPAPVAALGGEVKVQLLSGKSGNLNVPAGSSGGRKMRLRGQGWPKKSGGNGDLYVRLNVTVPKDLSDEEKELYTKLRDLQK

SEQ ID NO: 117521 - DNA, 1152 bp, Mycoplasma pulmonis UAB CTIP
  CDS (1)..(1152): transl_table=4
gtgctaaaatgtttaactatgaataaaaaagaagactactacaaaattttaggcattgacaaaagcgctaatgaaaaggaaattaaaaaagcatatcgtaaactagcaatggaacatcaccctgatcgttcatcttcaaaagaatctgaagctaaaatgcgagagatcaatgaagcctatgaagtgctttcaaatccagaaaaaaaagccatatatgacaaatatggtcatgaagctgctaacaatcctggatttaatggctttaatgcaggaagcgcaggatttggaaactttggcggcttttctaattttggaggctttgattcaatctttgaagagttttttggtggatcaagatctcattcaaaacaaaactctaactatccttatccaggagagtcttattctacacaagttaaaattagttttttagattcagttcatggaagagtcattagccaaaaattagataaatataaagattgtgaaagttgtaatggaactggagctcgttcaaaaagtgatattaaaacttgttcaacatgtaatggtagaggtagtgttgaaaagcttgtcaattccttatttggtaaaattaaacaatctgttacatgttctacatgtaatggtttaggtcaagaaattactcataaatgtccaagctgtaaaggtgctaaaaaaattaaagaatctattagtcaaaaaatttcaattccagctggagttattagcggtcaagaggttcttttaagaggttttggaggacctggatttaacggcggacccaacggtgatttatacattagagtttatgtaactgaacacccttattatcaaagaattaacgatgacatttacgttgattttccaatttcaatagttaacttaattttagaaaaaccagttgtagttcccactccatatggagatgaaaaaataaaaattaaatcaacctttaaaaatgatcaaatcatcacttttaaaggtaaaggcttcaaaagaaaaaaccgagttggtgatttaaagataagactaaaatttgaaatcccaaatttttcttcaaaagtcaaaaaaaaccttgaatcacttttatcagagactaacgattcaataaacgaagattttgttaaaaaggttaatagcataaaataa

SEQ ID NO: 117522 - protein, 383 aa, Mycoplasma pulmonis UAB CTIP
MLKCLTMNKKEDYYKILGIDKSANEKEIKKAYRKLAMEHHPDRSSSKESEAKMREINEAYEVLSNPEKKAIYDKYGHEAANNPGFNGFNAGSAGFGNFGGFSNFGGFDSIFEEFFGGSRSHSKQNSNYPYPGESYSTQVKISFLDSVHGRVISQKLDKYKDCESCNGTGARSKSDIKTCSTCNGRGSVEKLVNSLFGKIKQSVTCSTCNGLGQEITHKCPSCKGAKKIKESISQKISIPAGVISGQEVLLRGFGGPGFNGGPNGDLYIRVYVTEHPYYQRINDDIYVDFPISIVNLILEKPVVVPTPYGDEKIKIKSTFKNDQIITFKGKGFKRKNRVGDLKIRLKFEIPNFSSKVKKNLESLLSETNDSINEDFVKKVNSIK

SEQ ID NO: 117523 - DNA, 1185 bp, Haemophilus influenzae Rd KW20
  CDS (1)..(1185): transl_table=11
gtgtatttattttcagcaacaaattacaaaattactatggcaaaaaaagattactacgaagtccttggcctacaaaaaggggcgagtgaggacgaaatcaaacgtgcgtataaacgtttagcgtctaaacatcaccccgataaaaaccaaggcagtaaagaagcagaagaaaaattcaaagaaattaatgaagcttatgaagtattaggcgacgatcaaaaacgcgcagcctacgatcaatatggccacgcagcctttgaacaaggtggtggcgcaggtggcttcggtggcggctttggtggtgctgattttggtgatatgttcggtgatatttttggcgatattttcggcggtggtggacgtggtcgtcagcgcgttgttcgtggcgaagacttacgttatgacttagaaattagcctagaagaagccgtaaaaggtacaaccaaagatattcaaatcaatactcttgcacattgtgatagctgtggtggctctggggctgaaaaaggttctaaagtggaaacttgtccgcattgccacggttctggtcgaattcgtcgtcagcaaggtttctttgtatctgaaagtatctgtccaacttgtcatggtagcggtaagaaaattgaaaaaccttgtcgcaactgtcatggagaaggacgagttcataagaaagaaaatctttcagtaaaaattcctgcaggcgtagatacgggcaaccagcttcgcttagctggaaaaggtgcagcaggtgaaaatggcgcaccagcgggagatttatatgttgtgattcacgtgagagaacataatatttttgaacgtgatggctctaatctttactgtgaagtaccgattagctttgctactgcagcgcttggcggtgaaattgaagtgccaactttagatggtagagtgaaacttaaaatccctgctgaaacgcaaacaggaaaattattccgcatgcgaggcaaaggtgtcgcttctacacgtagtggttatgcgggtgatttaatttgccgtatcgtggtagaaacgccagttaatttaaccagcgaacaaaaagaattactccacaaacttgaggaaagtttacaaggtaaagatttaagtaaacatgcaccaaaatcttcaggatttttagacggtgtgaaaaaattctttgataatttgggtaaatctgacaaataa

SEQ ID NO: 117524 - protein, 394 aa, Haemophilus influenzae Rd KW20
MYLFSATNYKITMAKKDYYEVLGLQKGASEDEIKRAYKRLASKHHPDKNQGSKEAEEKFKEINEAYEVLGDDQKRAAYDQYGHAAFEQGGGAGGFGGGFGGADFGDMFGDIFGDIFGGGGRGRQRVVRGEDLRYDLEISLEEAVKGTTKDIQINTLAHCDSCGGSGAEKGSKVETCPHCHGSGRIRRQQGFFVSESICPTCHGSGKKIEKPCRNCHGEGRVHKKENLSVKIPAGVDTGNQLRLAGKGAAGENGAPAGDLYVVIHVREHNIFERDGSNLYCEVPISFATAALGGEIEVPTLDGRVKLKIPAETQTGKLFRMRGKGVASTRSGYAGDLICRIVVETPVNLTSEQKELLHKLEESLQGKDLSKHAPKSSGFLDGVKKFFDNLGKSDK

SEQ ID NO: 117525 - DNA, 1224 bp, Schizosaccharomyces pombe 972h-
  CDS (1)..(1224)
atggtgaaagaaactaaactatacgaagtcttgaacgttgatgtcactgcttctcaagctgaattgaagaaagcttaccgcaagcttgctttaaaatatcatcccgacaaaaaccctaatgccggcgataagtttaaggaaattagccgtgcttatgaaattcttgctgatgaagagaaacgtgctacttatgatcgttttggtgaagaaggtttacaaggtggtggtgccgatggtggtatgtctgctgatgacttgtttgcttccttttttggtggtggaatgtttggtggtggtatgccccgtggtcctcgcaagggcaaggatcttgttcataccatcaaggttactttggaggacctctatcgtggtaagactacaaagcttgctttgcaaaagaaggtcatttgccccaagtgtagcggtcgtggtggcaaggaaggctctgtcaaatcttgtgcctcttgtaatggtagcggtgtcaaattcattactcgtgccatgggtccaatgatacaacgtatgcaaatgacctgtcctgattgtaatggtgcaggtgaaaccatccgcgatgaagaccgttgcaaagaatgtgatggtgccaaggtcatttctcaacgtaaaatccttaccgtacatgttgagaagggtatgcacaatggtcagaagattgtatttaaggaagaaggcgagcaagctcctggaatcattcccggtgatgtaatctttgtcattgatcaaaaggaacatcctcgtttcaagcgcagtggtgatcatttgttttatgaggctcatgtcgatttactcactgctttggctggtggtcaaattgtcgtcgagcacctggacgaccgttggcttactatccccatcatccccggagagtgcattcgtcccaatgaactcaaagttcttcctggtcaaggtatgctttctcaacgccatcatcaacctggaaacctttacattcgcttccatgtcgactttcctgaacccaacttcgctaccccagaacagcttgcattgcttgaaaaggctttacctccccgtaagattgagagcgctcccaaaaatgctcacactgaggaatgtgttttggcaactgtcgatcctactgagaaggttcgcattgacaataacgtggaccccactactgccacttcgatggatgaagatgaagatgaagaaggtggacaccccggtgttcaatgtgctcaacagtaa

SEQ ID NO: 117526 - protein, 407 aa, Schizosaccharomyces pombe 972h-
MVKETKLYEVLNVDVTASQAELKKAYRKLALKYHPDKNPNAGDKFKEISRAYEILADEEKRATYDRFGEEGLQGGGADGGMSADDLFASFFGGGMFGGGMPRGPRKGKDLVHTIKVTLEDLYRGKTTKLALQKKVICPKCSGRGGKEGSVKSCASCNGSGVKFITRAMGPMIQRMQMTCPDCNGAGETIRDEDRCKECDGAKVISQRKILTVHVEKGMHNGQKIVFKEEGEQAPGIIPGDVIFVIDQKEHPRFKRSGDHLFYEAHVDLLTALAGGQIVVEHLDDRWLTIPIIPGECIRPNELKVLPGQGMLSQRHHQPGNLYIRFHVDFPEPNFATPEQLALLEKALPPRKIESAPKNAHTEECVLATVDPTEKVRIDNNVDPTTATSMDEDEDEEGGHPGVQCAQQ

SEQ ID NO: 117527 - DNA, 1212 bp, Drosophila melanogaster
  CDS (1)..(1212)
atggttaaggagactggatattatgatatacttggcgtgaagcctaatgccacgcccgacgagctgaagaaggcttaccgcaagctggccctcaagtaccatccggacaagaaccccaacgagggcgagaaattcaaggccatttcgcaggcttacgaagtgctgtccgatgcggacaagcgacaggtgtacgacgaaggcggcgaggcggccatcaagaagggcggcgcagattccggtgacttccgcaatcctatggacttctttgagaagttctttggcgctggattcggaggtagtggcggtggacgcaggcgcgagaggcgtggcaaggacgtggtgcaccagatgtccgtacagctggaggagctgtacaatggagcgacccgcaagctgcagctccagaagaatgtgatctgcgacaagtgcgagggtcgcggcggcaagaagggcagcattgagaagtgcttgcagtgccgtggtaacggtgtggagacacgggttcagcagatcgcccccggcatcatgcagcacatcgagcaggtgtgccgcaagtgttcgggaactggcgagaccattcaggagaaggaccgctgcaagaactgcagtggccgcaaaacggtgcgggaacgcaaggtattggaagtgcacattgagaagggaatgcgggatggccagaagatcgtgttcacgggagagggcgatcatgagccggaatctcagccgggcgatattattattcttttggacgagaaggagcactccacattcgcgcacgccggacaggatttaatgatgaagatgccgttgcaacttgtcgaagcgctctgcggattccagcgaatcgttaaaacgctcgatgatcgcgatctgattgtgtccacacagcccggcgaggttatcaggcatgagatgaccaagtgtattgccgaggagggtatgcccattttcaagaaccccatggagaagggcacgttgatcatccagttcgaggtgatcttcccggaggtgatcaatccgtcggtggtgcccacgcttaaacagtgcctacccccggcgccggaggttgacattccaatcgatgcagagcagacggttttggaggactttgatcccaagcaacgtcgccagcaacaccagcgcatggcctacgatgaggacgatggcggctatcaggatggcccacgcgtccagcagtgcacatcgagttaa

SEQ ID NO: 117528 - protein, 403 aa, Drosophila melanogaster
MVKETGYYDILGVKPNATPDELKKAYRKLALKYHPDKNPNEGEKFKAISQAYEVLSDADKRQVYDEGGEAAIKKGGADSGDFRNPMDFFEKFFGAGFGGSGGGRRRERRGKDVVHQMSVQLEELYNGATRKLQLQKNVICDKCEGRGGKKGSIEKCLQCRGNGVETRVQQIAPGIMQHIEQVCRKCSGTGETIQEKDRCKNCSGRKTVRERKVLEVHIEKGMRDGQKIVFTGEGDHEPESQPGDIIILLDEKEHSTFAHAGQDLMMKMPLQLVEALCGFQRIVKTLDDRDLIVSTQPGEVIRHEMTKCIAEEGMPIFKNPMEKGTLIIQFEVIFPEVINPSVVPTLKQCLPPAPEVDIPIDAEQTVLEDFDPKQRRQQHQRMAYDEDDGGYQDGPRVQQCTSS

SEQ ID NO: 117529 - DNA, 1128 bp, Thermosynechococcus elongatus BP-1; identical to SEQ ID NO: 63827
  CDS (1)..(1128): transl_table=11

SEQ ID NO: 117530 - protein, 375 aa, Thermosynechococcus elongatus BP-1; identical to SEQ ID NO: 63828

SEQ ID NO: 117531 - DNA, 1170 bp, Drosophila melanogaster
  CDS (1)..(1170)
atggacaacctaaatttatacgacgttcttaaagtggctccggatgcaactgatgaggaaataaaaaagaactaccgaaaattggcaaaagagttccatccagacaagaatcccgatgcgggcgacaagtttaaagaaatatccttcgcctacgaagtgctgtccgatcccgagaagcggcgcatctacgaccgatatggattgaagggcctgcaagagggcgccgagggattctctgatgcctccgaattcttcgcccagtggttccccttcgatcgagtctcgtccgaaggtcggggcaggcgcaatggcaaagtcgtggtaaaagtggagctgaccctggaggagatctacgtcggcggcatgaagaagaaggtggagtacaatcgccagaagctgtgctccaagtgtaacggcgatggcggtcccaaggaagcgcacgagagctgcgagacctgcggcggagctggacgagcggccgcatttaccttcatgggtctcagccccttcgatacgacctgtccgacttgcgatggcaggggcttcaccataagggacgacaagaagtgcagtccctgccagggcagtggtttcgtagagcagaagatgaagcgggacctggttgtggagcgaggagcaccgcacatgctaaaagttcccttcgcaaatgagggccaccaaatgcgaggcggcgaatttggggatctgattgtagtcatctcccagatggaacatccaatctttcagcgccgccatgccaatctgtacatgcgagacctggagatcaacatcacggaggccttgtgcggctactcgcattgtttcaagcacttggatggacgaaacgtctgtctgcgcacgtaccctggtgaagtgttgcagcacaaccagatcaagatggtgcgaggcagtggtatgcctgtttttaacaaggccaccgacagtggagatctctacatgaagtttaaggttaagtttccggacaacgactttgccacggcaccgcagttggccatgctggaggacttactccctcccagacagccgatagtgatcccaaagaacgccgaggaagtgcaaatgacggactataagccgcagccacgacagcaggaagacgaggacggacagtcgtctcactttgagggcgtacagtgccagacggcttag

SEQ ID NO: 117532 - protein, 389 aa, Drosophila melanogaster
MDNLNLYDVLKVAPDATDEEIKKNYRKLAKEFHPDKNPDAGDKFKEISFAYEVLSDPEKRRIYDRYGLKGLQEGAEGFSDASEFFAQWFPFDRVSSEGRGRRNGKVVVKVELTLEEIYVGGMKKKVEYNRQKLCSKCNGDGGPKEAHESCETCGGAGRAAAFTFMGLSPFDTTCPTCDGRGFTIRDDKKCSPCQGSGFVEQKMKRDLVVERGAPHMLKVPFANEGHQMRGGEFGDLIVVISQMEHPIFQRRHANLYMRDLEINITEALCGYSHCFKHLDGRNVCLRTYPGEVLQHNQIKMVRGSGMPVFNKATDSGDLYMKFKVKFPDNDFATAPQLAMLEDLLPPRQPIVIPKNAEEVQMTDYKPQPRQQEDEDGQSSHFEGVQCQTA

SEQ ID NO: 117533 - DNA, 1191 bp, Mycoplasma gallisepticum R
  CDS (1)..(1191): transl_table=4
ataaataaatattatatgtcttcaaaaagagattattacgaaatattagaagtatcccgttcagctacacagcaagatattaaaaaagcctttagaaaactggctatgaaatatcaccctgatcgcaataaagattcagatgctgaagagaagttcaaagaagttaatgaagcttacgaggtactaagcgatgaagagaaaagaaaactttatgacacttatggtcatgaaggtttaaacgcgtctggattccaccaaggtggattcaatccttatgacgtgtttaactctgtatttagcgggtttgatttcgaaggtgggtttggtgatgttttttcacaattctttggtggtggaggcagtggttttcacaaccaagaatacattgaagaagttgatgttaatttagttcatgagattaagatcaacttcttagaagcagccaatggttgtattaaaaacgttaagtataccagacaagttacttgtccggattgtaacgggtcaggttcagctgatggtgatgtaattacatgtagtgattgtaatggcgaagggtttcttgttgaacaaagaagaacattactaggaatgttccaaaccaaaaagacctgtccttcttgtaaaggtgaaggtcaaacgatcaaaaataaatgtaagaaatgtaaatcacgtagaatggttgatgaagtcgttgaaagaaaagtctcaatcgattcaaatgtcttttatcaagatgttgtaatcgttcgcggggaaggacacatttataagaatctagtgggggatcttttcttaagagtgaagatcgaaccttctagggtgtttgaattacgcgataaccacgtggtggttaacgttttagttgatccattggtggctatcactggtggaacaatcttaattccgactttaaaagagatcaaagaaattaatctaaaagccggaactaaaaatggtgatatcatcacgattgctaatggtggaattaacttaaaactagactcacgggtttatggtgctaattacaaccaaaaaggtgatctaatcgttgtaatcaactatgcaagacctagtgaatactctaaacaagagattactaaacttaaagagttcattaaaccaaataaggaagtaaacttatacgaaaccttaatgaagaaagaacttaataataaggattcgcaataa

SEQ ID NO: 117534 - protein, 396 aa, Mycoplasma gallisepticum R
MNKYYMSSKRDYYEILEVSRSATQQDIKKAFRKLAMKYHPDRNKDSDAEEKFKEVNEAYEVLSDEEKRKLYDTYGHEGLNASGFHQGGFNPYDVFNSVFSGFDFEGGFGDVFSQFFGGGGSGFHNQEYIEEVDVNLVHEIKINFLEAANGCIKNVKYTRQVTCPDCNGSGSADGDVITCSDCNGEGFLVEQRRTLLGMFQTKKTCPSCKGEGQTIKNKCKKCKSRRMVDEVVERKVSIDSNVFYQDVVIVRGEGHIYKNLVGDLFLRVKIEPSRVFELRDNHVVVNVLVDPLVAITGGTILIPTLKEIKEINLKAGTKNGDIITIANGGINLKLDSRVYGANYNQKGDLIVVINYARPSEYSKQEITKLKEFIKPNKEVNLYETLMKKELNNKDSQ

SEQ ID NO: 117535 - DNA, 1161 bp, Vibrio vulnificus YJ016
  CDS (1)..(1161): transl_table=11
ttggtgacgaacaatatgtcaaaacgtgatttttacgaagtattaggcgttagccgcgatgcctcagagcgagacatcaaaaaggcgtataagcgcttggctatgaaatttcacccagatcgcaatcagggtgacgagtctgctgcggataagtttaaagaagtaaaagaagcgtacgaaattctgaccgatccacagaaaaaagcagcttacgatcaatatggccacgctgcatttgaacaaggcggtggcggcttcggcggtggttttggtggcggtggtgctgactttggtgacatcttcggcgacgtttttggcgatatttttggtggtggtcgccgtggtggtggtcacgctcgtccacagcgtggtgccgatctgcgctacaacatggaactgtcgctagaagaagccgtacgtggcgtctcgaaggaaatagaagttccgacattggttcattgtgacacttgtgaaggcacaggggcgaagaaaggtacttcagctgaaacctgtggcacctgtcatggccatggccaagttcagatgcgccaaggtttcttcgctgtacagcaaacctgtccaacttgtcacggcaaaggcaagatcatcaaagacccatgtaatgtgtgtcatggtcaaggccgcaagcagaaaaccaaaacgctcaatgttaagattccagcaggggttgacacaggcgatcgcattcgtctctctggtgaaggggaagcaggcgaacgcggcgccccagcgggagacttgtatgtacaagtgcacgtgagagagcaccacatctttgaacgtgaaggtaataacctttactgcgaagtgccagtaagttttgctatggcggcactgggcggcgaagtggaagtgccgacactcgatggccgtgttaatttgaaagtaccatcagagacccaaacgggccgcatgttccgtatgcgtggcaaaggcgtaaaaggcgttcgcggcggcgcaatcggtgatttgattgtgaaacttgtggtcgagacgccagtgaacttgagttcacgtcaaaaagagttgctgaaagagtttgaagagtcttgctgtggtgaagcggccaccaagcacaaaccaaaatcagaaggcttctttaatggtgtgaagaagttctttgacgatttgaccagttag

SEQ ID NO: 117536 - protein, 386 aa, Vibrio vulnificus YJ016
MVTNNMSKRDFYEVLGVSRDASERDIKKAYKRLAMKFHPDRNQGDESAADKFKEVKEAYEILTDPQKKAAYDQYGHAAFEQGGGGFGGGFGGGGADFGDIFGDVFGDIFGGGRRGGGHARPQRGADLRYNMELSLEEAVRGVSKEIEVPTLVHCDTCEGTGAKKGTSAETCGTCHGHGQVQMRQGFFAVQQTCPTCHGKGKIIKDPCNVCHGQGRKQKTKTLNVKIPAGVDTGDRIRLSGEGEAGERGAPAGDLYVQVHVREHHIFEREGNNLYCEVPVSFAMAALGGEVEVPTLDGRVNLKVPSETQTGRMFRMRGKGVKGVRGGAIGDLIVKLVVETPVNLSSRQKELLKEFEESCCGEAATKHKPKSEGFFNGVKKFFDDLTS

SEQ ID NO: 117537 - DNA, 1182 bp, Treponema denticola ATCC 35405
  CDS (1)..(1182): transl_table=11
atgtttttagaggttccgaaatttttacactgggagtttttagtgccggcatctaaaagagactattatgaggttttgggcgtagataaaaaagcctcaaacgatgacatcaaaaaagcatatcgaaaattagcaatcaaatatcatcccgataaaaaccaaggggataaggctgctgaagaaaaatttaaagaagcaaccgaagcttatgaaattcttatcgacgaaaaaaagcgcagcatgtatgaccaattcggccatgccggcgtagacggaatgtcgggcggcggaggctatgatccttccgccttccaaggttttgaggatatcttcggcggaagcttttcggatatttttgaaaatctattcggaggagggttttcttcccgctcatcaggtttcggcggccgccatgcaggtcctgtccgcggttctaacctgcgctatgatcttcaaatttcttttgttgatgccgtttacggtaaaaaagccgaactcagttatacccgcaatgaaaaatgttccgaatgtcatggaacaggcagcgaaagcggaagctcaaaaagaatgtgtcccgattgtaagggtacgggacaagtgcgccaaagtaccggtttcttttccatatcgagaccatgtcctacctgcggcggcgaaggctccataatcgaaaaaccatgtaaaaaatgcggaggaaacggcttagagcgtaagaaacagcgcataatcgttaccattcctgccggtgtcgaaaacggaaaacggattacgattcccagtcaaggaaatgccggtcaggccggcggagactacggcgacctctttgtatttatctttgttcaagctcatccttattttgaacgtaacggaatagacctctactgtgctgttcccatatcaatgactcaggcagccttgggcggggaaataaacatcaaatctctcgatgaaaaaacattgagactaaaaattccggccggaacacaaaacggaaaacttttaaggattcgaggcgaaggtgttcctacgggaataggccgaaagggcgatctttatattcaaattcaagtgcaaattccttcaaaattgtcatcaaattcaaaaaaacttttgcaagaaatttcggcgattgaaggtgaaaatgaaaatcctaatcttatccctttaaaagatttaccttaa

SEQ ID NO: 117538 - protein, 393 aa, Treponema denticola ATCC 35405
MFLEVPKFLHWEFLVPASKRDYYEVLGVDKKASNDDIKKAYRKLAIKYHPDKNQGDKAAEEKFKEATEAYEILIDEKKRSMYDQFGHAGVDGMSGGGGYDPSAFQGFEDIFGGSFSDIFENLFGGGFSSRSSGFGGRHAGPVRGSNLRYDLQISFVDAVYGKKAELSYTRNEKCSECHGTGSESGSSKRMCPDCKGTGQVRQSTGFFSISRPCPTCGGEGSIIEKPCKKCGGNGLERKKQRIIVTIPAGVENGKRITIPSQGNAGQAGGDYGDLFVFIFVQAHPYFERNGIDLYCAVPISMTQAALGGEINIKSLDEKTLRLKIPAGTQNGKLLRIRGEGVPTGIGRKGDLYIQIQVQIPSKLSSNSKKLLQEISAIEGENENPNLIPLKDLP

SEQ ID NO: 117539 - DNA, 1200 bp, Apis mellifera
  CDS (1)..(1200)
atggtaaaagaaactacattttatgatgtattgggtgtaaaacctggatgtacacaagaagatttaaagaaagcttatagaaaacttgcactgaaatatcatcctgataaaaatcctaatgaaggagaaaaatttaaacaaatttcacaagcatatgaagttttgtcaaatcctgaaaagaaacgaatttatgatcaaggtggagaacaagctttaaaagaaggaggagcaggtggcaatgtattctcttcaccgcgagacatatttgatatgttctttggtggaggtttaggaggaagaagtggtcgcaggagagaacacagaggacaagatgttatacatcagttatctgtatcgttggaggaattgtataagggaactgttcgcaaattagcattacaaaaaaatgttatttgtgataaatgcgaaggtatcggtggaaagaaaggttctgtggaacaatgttcaacatgtcatggttctggcatgcaagttcaaatacaacaattgggtcctggaatgttgcagcatttacaaactatatgtgtagactgcaaaggtcaaggggatcgcataaatccacgtgatcgttgtaaacaatgcggtggtagaaaaactattagagatagaaaaattttggaagttcatgttgatccaggtatggtacataatcagaagatcgtctttgctggagaaggtgatcaagaaccagattatgagccaggagatattgttattcttcttgaagaaaaagaacatgaagttttcaaacgttcgcgtcatgatttaattatgaggatgcaattagaacttgtagaagctctgtgtggatttcagaaagttattcgcactttagatggaagagatttagtaataacctcatatcctggaactgttgtaaagcacggagacttaaagtgcattctaaatgaaggaatgccaatttataaagatcctttcacacatggcaggcttataattcaatttgtagtgaatttcccgaaatctatggacccttccgtcattccaacacttgaacaatgcctaccaccaagagaagaagttataattccagaaggagcggaagactgttctcttatggatttggatccagaacaagaagtaaggcgaagagaacaacgagaagcgtatgaggaagacgaaagaggttcttcaggtgtccaatgtgccacaaattaa

SEQ ID NO: 117540 - protein, 399 aa, Apis mellifera
MVKETTFYDVLGVKPGCTQEDLKKAYRKLALKYHPDKNPNEGEKFKQISQAYEVLSNPEKKRIYDQGGEQALKEGGAGGNVFSSPRDIFDMFFGGGLGGRSGRRREHRGQDVIHQLSVSLEELYKGTVRKLALQKNVICDKCEGIGGKKGSVEQCSTCHGSGMQVQIQQLGPGMLQHLQTICVDCKGQGDRINPRDRCKQCGGRKTIRDRKILEVHVDPGMVHNQKIVFAGEGDQEPDYEPGDIVILLEEKEHEVFKRSRHDLIMRMQLELVEALCGFQKVIRTLDGRDLVITSYPGTVVKHGDLKCILNEGMPIYKDPFTHGRLIIQFVVNFPKSMDPSVIPTLEQCLPPREEVIIPEGAEDCSLMDLDPEQEVRRREQREAYEEDERGSSGVQCATN

SEQ ID NO: 117541 - DNA, 1077 bp, Strongylocentrotus purpuratus
  CDS (1)..(1077)
atggctatttacacatggaacgtatgcttacttctcctccagttgtctttgactgtattagcagggagagacttttacaaaatcctgggagttcctcgagatgcgactactaaccaaatcaagaaggcatacaggaaactagccatgcaatatcatcctgataaaaatatagatgatccggaagctagtgagaaatttcaggatcttggtgctgcttatgaggttctctctgatgaggatcagaggaagacctatgatgcacgaggtgaagaaggtttgaaggatatgggtcatggacatcatggtgatccattctcaagtttctttggagacttcaattttgcttttggtggtaatggcggacagaggagaggtcaggatataccaaggggtgatgacatcacagttgaccttgatgtgaccttggaagaactctactcaggaaactttgttgaggttgtaagatacaagcctgtagcaacagaagcacctggtacaaggaaatgtaactgtcgtcaagagatgcagactgtccagctcggtccaggcagattccaaatgacacaaaaagaagtctgtgatgcatgccccaatgtcaaatttgtaagtgaagagaagcttctagaaattgagattgaacctgggatgcgcgatggccaagaatacccatttgtagcagaaggtgaaccccatattgacggagagcctggggatctccgatttcaaataattgctttaaagcatgctatctttgaaaggaaaggggatgatctttacaccaacataacaatatcattagtggatgctctcactggttttgagatggatatcaaacatttagatggtcataaagttcatataatgcgagataaagtgacatggccaggtgctaagatgaggaagaaaggagaaggcatgcctaactatgataacaacaatgtcaaaggaactcttattgtcacatttgatgttgattttcccaaaggagatatgacacaagaacaaaaagacagtctacaatctttactcaagcaaacgtcagcacaaactgtttataatggacttcaaggattttag

SEQ ID NO: 117542 - protein, 358 aa, Strongylocentrotus purpuratus
MAIYTWNVCLLLLQLSLTVLAGRDFYKILGVPRDATTNQIKKAYRKLAMQYHPDKNIDDPEASEKFQDLGAAYEVLSDEDQRKTYDARGEEGLKDMGHGHHGDPFSSFFGDFNFAFGGNGGQRRGQDIPRGDDITVDLDVTLEELYSGNFVEVVRYKPVATEAPGTRKCNCRQEMQTVQLGPGRFQMTQKEVCDACPNVKFVSEEKLLEIEIEPGMRDGQEYPFVAEGEPHIDGEPGDLRFQIIALKHAIFERKGDDLYTNITISLVDALTGFEMDIKHLDGHKVHIMRDKVTWPGAKMRKKGEGMPNYDNNNVKGTLIVTFDVDFPKGDMTQEQKDSLQSLLKQTSAQTVYNGLQGF

SEQ ID NO: 117543 - DNA, 1194 bp, Nasonia vitripennis
  CDS (1)..(1194)
atggttaaagagacaacgttctacgacctactgggtgtcaagcccggatgttcacaggaagacttgaagaaggcgtatagaaagcttgctcttaaataccaccctgacaaaaatcccaatgaaggagaaaggtttaagcaaatttcacaagcctacgaagtcctttcaaacccggagaagaagaagatctacgatcagggaggtgaacaggctctgaaggagggcggcatgggtggcggtggcttctcctcgccgatggatatgtttgagatgatcttcggcatgcgcggaaacgatagccgtcgccggcggaagggacaggacgttatccaccagctgtctgtatctctggaagagctgtacaagggcgcggtgcgcaagctcgccctgcaaaagaacaacgtgatctgtgataagtgcgagggcatcggtggcaagaaggacgccgtggagaagtgctcgacctgtcagggaaccggctaccaagtacaggtccagcaactcgctcccggtatgattcagcagttccgctcacagtgcggtgactgccgcggtcaaggtgagcgtatcaaacctaaggaccgctgtaagcagtgcagcggcaagaagactatcagagacagaaagatcctggaagtctttgttgacaagggtatggtcgacggacagaaaatcgttttcacggacgagggagaccaggaacctgacagagaacccggtgacattgtcatcttgttggatgagaagcaacacgacgttttcagacgctcggataacgatctcataatgcgcatgaacctggagcttgtcgaagctctgtgcggcttccaaaaggtaatccagacgctggaccagcgagacctcgtggtgacatccctccctggtcaggtggtcaaacatggcgacctcaagtgcatcccaggcgagggtatgcccgtttggaaggatccgttcaacaaaggcagactcatcattcagtttgtcgttaacttcccggcatccatcgatccgaccattatcccgacgctggagcagtgcctgccaccgcgagaggaagtgatgatacccgatggtgcagaggaatgcaacctggtcgatctcgatccagagcaagagagcaggcggagagatacgcgccaagcttacgaggaggatgaaggcggtccatcccgcgtccaatgcgccacgaactaa

SEQ ID NO: 117544 - protein, 397 aa, Nasonia vitripennis
MVKETTFYDLLGVKPGCSQEDLKKAYRKLALKYHPDKNPNEGERFKQISQAYEVLSNPEKKKIYDQGGEQALKEGGMGGGGFSSPMDMFEMIFGMRGNDSRRRRKGQDVIHQLSVSLEELYKGAVRKLALQKNNVICDKCEGIGGKKDAVEKCSTCQGTGYQVQVQQLAPGMIQQFRSQCGDCRGQGERIKPKDRCKQCSGKKTIRDRKILEVFVDKGMVDGQKIVFTDEGDQEPDREPGDIVILLDEKQHDVFRRSDNDLIMRMNLELVEALCGFQKVIQTLDQRDLVVTSLPGQVVKHGDLKCIPGEGMPVWKDPFNKGRLIIQFVVNFPASIDPTIIPTLEQCLPPREEVMIPDGAEECNLVDLDPEQESRRRDTRQAYEEDEGGPSRVQCATN

SEQ ID NO: 117545 - DNA, 1197 bp, Nasonia vitripennis
  CDS (1)..(1197)
atggttaaagagacaacgttctacgacctactgggtgtcaagcccggatgttcacaggaagacttgaagaaggcgtatagaaagcttgctcttaaataccaccctgacaaaaatcccaatgaaggagaaaggtttaagcaaatttcacaagcctacgaagtcctttcaaacccggagaagaagaagatctacgatcagggaggtgaacaggctctgaaggagggcggcatgggtggcggtggcttctcctcgccgatggatatgtttgagatgatcttcggcatgcgcggaaacgatagccgtcgccggcggaagggacaggacgttatccaccagctgtctgtatctctggaagagctgtacaagggcgcgggcgcggtgcgcaagctcgccctgcaaaagaacgtgatctgtgataagtgcgagggcatcggtggcaagaaggacgccgtggagaagtgctcgacctgtcagggaaccggctaccaagtacaggtccagcaactcgctcccggtatgattcagcagttccgctcacagtgcggtgactgccgcggtcaaggtgagcgtatcaaacctaaggaccgctgtaagcagtgcagcggcaagaagactatcagagacagaaagatcctggaagtctttgttgacaagggtatggtcgacggacagaaaatcgttttcacggacgagggagaccaggaacctgacagagaacccggtgacattgtcatcttgttggatgagaagcaacacgacgttttcagacgctcggataacgatctcataatgcgcatgaacctggagcttgtcgaagctctgtgcggcttccaaaaggtaatccagacgctggaccagcgagacctcgtggtgacatccctccctggtcaggtggtcaaacatggcgacctcaagtgcatcccaggcgagggtatgcccgtttggaaggatccgttcaacaaaggcagactcatcattcagtttgtcgttaacttcccggcatccatcgatccgaccattatcccgacgctggagcagtgcctgccaccgcgagaggaagtgatgatacccgatggtgcagaggaatgcaacctggtcgatctcgatccagagcaagagagcaggcggagagatacgcgccaagcttacgaggaggatgaaggcggtccatcccgcgtccaatgcgccacgaactaa

SEQ ID NO: 117546 - protein, 398 aa, Nasonia vitripennis
MVKETTFYDLLGVKPGCSQEDLKKAYRKLALKYHPDKNPNEGERFKQISQAYEVLSNPEKKKIYDQGGEQALKEGGMGGGGFSSPMDMFEMIFGMRGNDSRRRRKGQDVIHQLSVSLEELYKGAGAVRKLALQKNVICDKCEGIGGKKDAVEKCSTCQGTGYQVQVQQLAPGMIQQFRSQCGDCRGQGERIKPKDRCKQCSGKKTIRDRKILEVFVDKGMVDGQKIVFTDEGDQEPDREPGDIVILLDEKQHDVFRRSDNDLIMRMNLELVEALCGFQKVIQTLDQRDLVVTSLPGQVVKHGDLKCIPGEGMPVWKDPFNKGRLIIQFVVNFPASIDPTIIPTLEQCLPPREEVMIPDGAEECNLVDLDPEQESRRRDTRQAYEEDEGGPSRVQCATN

SEQ ID NO: 117547 - DNA, 1035 bp, Anopheles gambiae str. PEST
  CDS (1)..(1035)
atggggaaagatttctacaaaattctcggcgtgtcgaagaatgccagcgacgatgagatcaagaaggcgtaccgcaagctggccctaaagtatcacccggacaagaacaaagcgccgcaggcggaggaacggttcaaggaggtggcggaagcgtacgaggtgctgtcggacaagaagaagcgcgacatctacgaccagtacggcgaggaggggctgaagggtggcgcgggcggcatgccgggtgcgggcggccagagcggccagttccagtacaacttccacggcgatccgcgcgccacgttcgcccagttcttcggcaccagcgacccgttcagcgtgttcttcggcacggacgggggtggcaacatcttccaccaggagatggacggcgatccgttcggtgtcggcgggtttccgggcggtgcgttccggtcgcagtcgttcaacgtgcacgggtcgccgcagcgcaagcagaagctgcaggatccgccgatcgagcacgatctgtacgtgtcgctcgaggacgtcaacgcgggctgccagaagaagatgaagatctcgaagatggtgatgggccaggatgggtcggcgcggaaggaggagaagatcctgagcatcaacgtgaagccgggctggaaggcgggcacgaagataacgttcccgcgcgagggcgaccaaattccgggcaaggtgccggccgacatcgtgttcatcatccgggacaaaccgcacgcgcatttcaagcgcgaaggcagcgacatcaagtacacggccaagatctccctgcggcaggcgctgtgcggtacggtggtgaaggtgccgacgctgagcggcgaaacgcttaccatctcgacggcgggcgaagtggtgaagccacacacggtcaagcgactgcagaaccgggggctgcccttcccgaaggaaccgagccggaggggcgacctggtggtggcgttcgatatccgcttccccgatcaggtgtcccccagtacgaaggaaatcctggccgacctgttcccgatggatgtggcctaa

SEQ ID NO: 117548 - protein, 344 aa, Anopheles gambiae str. PEST
MGKDFYKILGVSKNASDDEIKKAYRKLALKYHPDKNKAPQAEERFKEVAEAYEVLSDKKKRDIYDQYGEEGLKGGAGGMPGAGGQSGQFQYNFHGDPRATFAQFFGTSDPFSVFFGTDGGGNIFHQEMDGDPFGVGGFPGGAFRSQSFNVHGSPQRKQKLQDPPIEHDLYVSLEDVNAGCQKKMKISKMVMGQDGSARKEEKILSINVKPGWKAGTKITFPREGDQIPGKVPADIVFIIRDKPHAHFKREGSDIKYTAKISLRQALCGTVVKVPTLSGETLTISTAGEVVKPHTVKRLQNRGLPFPKEPSRRGDLVVAFDIRFPDQVSPSTKEILADLFPMDVA

SEQ ID NO: 117549 - DNA, 1302 bp, Gibberella zeae PH-1
  CDS (1)..(1302)
atggatgatcctttcaacgctggctctccgggcccggaagaggtcgatctctacgaacttctcgaaatcgacagaaccgcaacaccagaccagataaagaaggcttaccgaaaggccgctctcaaataccacccagacaaggttgccgaggagcaacgtgaagagtcagaagccaagttcaaggaagtcacacaagcctacgaaattctcagcgatgagcagaagcgcgagctttacgatgttcacggtatggccgctttcgacaagtcccgcggtggccccggcggtcctgaggtcgacctcaacgatatcctttcccagatgttcggtttcggcatgggtcccggaggccctggaggtcctggcggccccggcggccctcgtcgacccagacgtggccctgatgaggagcaagagtacaaggtgaccctggaagagctttaccgtggtaagactgtcaagtttgccgccaacaaacaggtgctctgcggtcagtgtaagggttctggtggcaaggagaaggccaaggctgcgtcttgcgaacgttgcaagggtaacggtatcgtcgaggccttccgacaaatcggccccggcatgatgcgacgtgagactgttctttgcgaccattgccagggcgctggccaggttttcaaggagaaggaccgatgcaagaagtgcaagggcaagcgaacaagccaagaaaagaaggtcctcgagatttacatcccccgaggttctatgcagggcgagcgcatcgttcttgaaggcgaggccgatcagcacccggaccagacgcctggtgatatcgtcttcactctggttgaagagcctcatgatgtcttcactcgcatcggccacgatttgtctgccgagctgactgtgacacttggcgaggctctatcaggtttctcccgtactgtcttcaagcacctcgatggacgaggtatccatatcgaacgcccccgaggcaagattctgcgaccaggtgactgcctcaagatccctggtgagggtatgcccatgaagcgtggcgaggccaagggtgatctgtaccttattgtcaaggttgagttccctgaggacggatggctgaaggaggactccgagcacgatgctctgcagaagatgctgcccactgctcccgccaacgttgaggctgaggaggttgatgaggtcgagtacgaggatgatgccgacattgagaagatgggcgaaaactcaggcgacggccgattcggcggtgactgggaagacgatgacgacgacatgggtgatggtcaagctcagtgccagacacagtaa

SEQ ID NO: 117550 - protein, 433 aa, Gibberella zeae PH-1
MDDPFNAGSPGPEEVDLYELLEIDRTATPDQIKKAYRKAALKYHPDKVAEEQREESEAKFKEVTQAYEILSDEQKRELYDVHGMAAFDKSRGGPGGPEVDLNDILSQMFGFGMGPGGPGGPGGPGGPRRPRRGPDEEQEYKVTLEELYRGKTVKFAANKQVLCGQCKGSGGKEKAKAASCERCKGNGIVEAFRQIGPGMMRRETVLCDHCQGAGQVFKEKDRCKKCKGKRTSQEKKVLEIYIPRGSMQGERIVLEGEADQHPDQTPGDIVFTLVEEPHDVFTRIGHDLSAELTVTLGEALSGFSRTVFKHLDGRGIHIERPRGKILRPGDCLKIPGEGMPMKRGEAKGDLYLIVKVEFPEDGWLKEDSEHDALQKMLPTAPANVEAEEVDEVEYEDDADIEKMGENSGDGRFGGDWEDDDDDMGDGQAQCQTQ

SEQ ID NO: 117551 - DNA, 1254 bp, Gibberella zeae PH-1
  CDS (1)..(1254)
atggtcaaggaaaccaagtactacgacacactgggtgtcgcccctactgctactgagcaggaactgaagaaggcttacaaggtcggagccctcaagtaccaccctgacaagaacgcacacaaccccgatgccgaagaaaagttcaaggaggtttcgcatgcctacgaaattctctccgatccccagaagcgacaagtctacgaccagtatggtgaggccggcctcgagggcggtgccggaggtggtggcatggccgctgaggacttgtttgctcagttcttcggaggtggtggcttcggtggcatgggcggtatgtttggcggcggcggtatgaaccgcggcccccccaaggcccgaaccattcaccacacccacaaggtatcactagaagacatctatcggggtaagatctcgaagcttgctcttcaacggtcaatcatttgccctaagtgcgaaggccttggtggaaaggagggtgcggttaagcgttgcactggctgtgatggccacggtatgaagaccatgatgcgccagatgggtcccatgatccagcgcttccagactgtctgccccgactgtaacggagagggtgagatcatcaaggagaaggaccgctgcaagcagtgcaacggaaagaagaccactgtcgaccgcaaggtcctccacgtccacgtcgacaagggtgtccgcagtggcaccaaggtcgagttccgaggcgagggtgaccaagcaccaggtgttcaggcaggtgacgtcgttttcgagattgagcagaagccccatgctcgcttcactcgtcgcgaagatgatttgctttataactgcgatattgagcttgttacagctttggctggtggtaccatctacatcgagcacctcgatgaccgatggctggccgttgacatcctccccggcgaggctatctctcaagatgctgtcaagatgattcgcggccagggtatgccttcgcccaggcaccacgacttcggcaacatgtaccttaagttcaacgtcaagttccccgagaagaactggaccgatgacgccgagactttcgagactctccgaaaggttctccccgctccctccgtccagaacatcccccccggtgatgctatgtctgagcccgccagcctcgaggatctcgacaactccgcccaaagcagagtcttcggtggctctgatggcatgatggatgacgatgacgaggatggccaccccggtggtgagcgcgtgcagtgcgcttcccagtaa

SEQ ID NO: 117552 - protein, 417 aa, Gibberella zeae PH-1
MVKETKYYDTLGVAPTATEQELKKAYKVGALKYHPDKNAHNPDAEEKFKEVSHAYEILSDPQKRQVYDQYGEAGLEGGAGGGGMAAEDLFAQFFGGGGFGGMGGMFGGGGMNRGPPKARTIHHTHKVSLEDIYRGKISKLALQRSIICPKCEGLGGKEGAVKRCTGCDGHGMKTMMRQMGPMIQRFQTVCPDCNGEGEIIKEKDRCKQCNGKKTTVDRKVLHVHVDKGVRSGTKVEFRGEGDQAPGVQAGDVVFEIEQKPHARFTRREDDLLYNCDIELVTALAGGTIYIEHLDDRWLAVDILPGEAISQDAVKMIRGQGMPSPRHHDFGNMYLKFNVKFPEKNWTDDAETFETLRKVLPAPSVQNIPPGDAMSEPASLEDLDNSAQSRVFGGSDGMMDDDDEDGHPGGERVQCASQ

SEQ ID NO: 117553 - DNA, 1224 bp, Candida glabrata CBS 138
  CDS (1)..(1224)
atggttaaggatactaagttgtacgacacgctgggtgtgtcgcctggtgcgagcgatgcagagatcaagaaggcgtacaggaagagtgcgttgaagtaccatccggacaagaacccttctgaggaggctgctgagaagtttaaggaggtttccagtgcttatgagattctttcagactcgcagaagcgtgaggtgtacgaccagttcggtgaggaaggtctgagcggaaacggtggtgccggtttcccaggcggcttcggttttggcgaggacatcttctcgcagttcttcggcggtgccaccggtggcaggcctagaggtcctcagcgtggtagggacatcaagcacgagatggctgcctctctggaggagctttacaagggtagaaccgccaagctggcgctgaacaagcagatcttgtgtaagagctgtgaaggtagaggtggtaaggaaggcgctgtcaagaagtgtagcagctgtaacggtcaaggtatcaagttcgtcaccagacagatgggtcctatgatccagagattccaaaccgagtgtgacgtgtgtcacggtacaggtgatatcatagacgccaaggaccgttgtaagtcttgtaacggtaagaaggtcgacaacgagagaaagatccttgaggtccgtatcgagccaggtatgaaagacggccagaagatcgtcttcaaaggtgaagccgaccaagcaccagatgtcatccctggtgatgtcgtcttcgtgatcagtgaaaagccacacaagcacttccaaagagccggtgacgacttgatctacgaggccgagatcgacctactaaccgctttggccggtggccagttcgccctggaacacgtttccggtgactggttgaaggtcgatatcgttccaggtgaagttatcgccccaggtgcccgcaagatcgtcgaaggtaaaggtatgcctattcagaaatacggtggttacggtaacttgttgatcaagttcaacatcaagttcccagaaaaccacttcacatccgaagaaaacttgaagaaactggaagaaatcttgccaccaagaagacaaatcaacatacctgccaaggcccaagtcgatgactgtgttctaagcgaattcgacccatccaagtttggtcaatccaatggtagaagcggtgcaaactacgactctgacgacgaggatgcccacggtggtgaaggtgttcaatgtgcatctcaatga

SEQ ID NO: 117554 - protein, 407 aa, Candida glabrata CBS 138
MVKDTKLYDTLGVSPGASDAEIKKAYRKSALKYHPDKNPSEEAAEKFKEVSSAYEILSDSQKREVYDQFGEEGLSGNGGAGFPGGFGFGEDIFSQFFGGATGGRPRGPQRGRDIKHEMAASLEELYKGRTAKLALNKQILCKSCEGRGGKEGAVKKCSSCNGQGIKFVTRQMGPMIQRFQTECDVCHGTGDIIDAKDRCKSCNGKKVDNERKILEVRIEPGMKDGQKIVFKGEADQAPDVIPGDVVFVISEKPHKHFQRAGDDLIYEAEIDLLTALAGGQFALEHVSGDWLKVDIVPGEVIAPGARKIVEGKGMPIQKYGGYGNLLIKFNIKFPENHFTSEENLKKLEEILPPRRQINIPAKAQVDDCVLSEFDPSKFGQSNGRSGANYDSDDEDAHGGEGVQCASQ

SEQ ID NO: 117555 - DNA, 1230 bp, Kluyveromyces lactis NRRL Y-1140
  CDS (1)..(1230)
atggttaaggatacaaaactatacgatcttttgggggtttctccaggtgctgatgacaaccaaatcaagaaggcttatagaaaaagcgccttaaaattccatccagataagaatccaagtgaagaagctgctgagaaattcaaagaaatcacttccgcttacgaaatcttatctgattctcaaaagagagaagtatatgaccagtttggtttggaaggtctttctggccaaggtgcaggcggtccaggtggcttcggtggcttcggtgaagacttattctctcaattctttggtggcggtagttcaagaccaagaggtcctcaaaagggtagggatattagacatgaaattccagccactttagaacaattattcaaaggtagaactgccaaactggcattaaacaaacagttaatctgtaagtcatgtgaaggtcgtggtggtaaggaaggtagtgttaagaaatgtactgcttgtagcggtcaaggtttcaagttcgtaaccagacaaatgggtcctatgatccaaagattccaagttgagtgtgaatcttgtcatggtgctggtgaaataatcgatccaaagggccgttgtaaggtctgtagcggtaagaaggttgtaaacgaaagaaaggttttagaagtcaacattgaaccaggtatgaaagacggccaaagaatcgttttccagggtgaagctgaccaatctccaggtattattccaggtgacgttgtctttgtcgtttctgaacaaccacatccagtcttcaaaagagatggtaacgacttacactacgacgctgaaatcgatttgctatctgctattgcaggtggtcaatttgccgtcaaacacgtatcaggtgaatatttgaaggtcgaaatcgtaccaggtgaagtgatctctccaggttctgttaaagttatagaaggcaaaggtatgccaattccaaaatacggtggttacggtaacttgttgatcaagttcaacatcaagttcccacctgcacacttcacggacgatgaaaccttgaagaagctcgaggaaattctaccaccaagaaatgtaccttctattcctgcggacgcagaagttgaagattgtgttttagcagacttcgactccagtaagcatggtgctagagctggtggtaacggcagaggccaaagctatgattcagatgatgaagacggacaccacggtgctgaaggtgttcaatgtgcctcacagtaa

SEQ ID NO: 117556 - protein, 409 aa, Kluyveromyces lactis NRRL Y-1140
MVKDTKLYDLLGVSPGADDNQIKKAYRKSALKFHPDKNPSEEAAEKFKEITSAYEILSDSQKREVYDQFGLEGLSGQGAGGPGGFGGFGEDLFSQFFGGGSSRPRGPQKGRDIRHEIPATLEQLFKGRTAKLALNKQLICKSCEGRGGKEGSVKKCTACSGQGFKFVTRQMGPMIQRFQVECESCHGAGEIIDPKGRCKVCSGKKVVNERKVLEVNIEPGMKDGQRIVFQGEADQSPGIIPGDVVFVVSEQPHPVFKRDGNDLHYDAEIDLLSAIAGGQFAVKHVSGEYLKVEIVPGEVISPGSVKVIEGKGMPIPKYGGYGNLLIKFNIKFPPAHFTDDETLKKLEEILPPRNVPSIPADAEVEDCVLADFDSSKHGARAGGNGRGQSYDSDDEDGHHGAEGVQCASQ

SEQ ID NO: 117557 - DNA, 1221 bp, Debaryomyces hansenii CBS767
  CDS (1)..(1221)
atggttaaggaaacaaagttttacgatcaattaggtgtgtcgccatcagctggagataccgaattaaagaaagcttatagaaaggctgcattgaaatatcatccagataagaatccatcaccagaagccgctgaaaagttcaaggaactctcacatgcttacgagattctttcggatgaacagaagagagaagtgtatgatagctatggtgaagaagggttatcaggtgccggtggtatgggcggcggtatgggagcagaagacatcttttcgcaattcttcggaggaggatttggcggtatgggtggcggagcttcccgtggaccagctagaggcaaggacatcaagcactcgatcagttgtaccttagaagagttgtacaagggtagaactgcgaaattggcattgaacaagactatattgtgtaagacatgtgaaggtcgtggtggtaaagaaggtaagatcaagcagtgttcttcttgtcacggtcaaggtatgaagtttgtcacaagacaaatgggtcctatgatacaaagattccaaaccgtttgtgacgcttgtcaaggttctggtgacatctgtgacgctaaggaccgttgtaccgcgtgtaagggtaagaagactcaaactgaacgtaagatattacaagtccacattgatcctggtatgaaggatggccaaagaatcgtattcagcggtgaaggtgaccaagaaccaggtgtcactcctggtgatgtcgtgtttgttgttgacgaaaagcaacacgaaaagttcaccagaaaggctaacgacttgtactacgaagctgaagtggatttagccactgccttgactggtggtgaacttgccttcaagcacgtttctggcgactacatcaagatcccaatcaccccaggtgaagttattgccccaggtgttaccaaggtaattgaaaaccaaggtatgccaatctacagacacggtggcaacggtcatatgtttgttaaattcaccgttaagttcccaaagaacaactttgctactgaagcaaaattgaaggaattagaagctattttacctccaaaggctaaggttaccattccaaagggtactgaggttgatgaatgtgaattggtcgatgttgacccacgtaagcatcaatctgctggaagacgtgatgcttatgattctgatgacgaagaaggtggtgccggcccaggtgtccaatgtgcatctcaatag

SEQ ID NO: 117558 - protein, 406 aa, Debaryomyces hansenii CBS767
MVKETKFYDQLGVSPSAGDTELKKAYRKAALKYHPDKNPSPEAAEKFKELSHAYEILSDEQKREVYDSYGEEGLSGAGGMGGGMGAEDIFSQFFGGGFGGMGGGASRGPARGKDIKHSISCTLEELYKGRTAKLALNKTILCKTCEGRGGKEGKIKQCSSCHGQGMKFVTRQMGPMIQRFQTVCDACQGSGDICDAKDRCTACKGKKTQTERKILQVHIDPGMKDGQRIVFSGEGDQEPGVTPGDVVFVVDEKQHEKFTRKANDLYYEAEVDLATALTGGELAFKHVSGDYIKIPITPGEVIAPGVTKVIENQGMPIYRHGGNGHMFVKFTVKFPKNNFATEAKLKELEAILPPKAKVTIPKGTEVDECELVDVDPRKHQSAGRRDAYDSDDEEGGAGPGVQCASQ

SEQ ID NO: 117559 - DNA, 1254 bp, Yarrowia lipolytica CLIB122
  CDS (1)..(1254)
atggtcaaggaatcaaaactctacgacgttctcggcgtcagcgtaaccgccaccgaagtggaaatcaaaaaggcataccgagttggtgctctcaaataccaccccgataagaaccccggcaacgtcgaggccgaggccaagttcaaggaaatctccatggcctacgaggttctgtcaaacgaccagaagagagctgcatacgacaactttggagaggctggcctcggcggaggagccgacggaggaatgggcggcggatctgctgaggagctgttttcgcatttctttggcggcggcggtggcatgggcggcatgggcggcatgttcggcggcggccagccccagggcccccgacgatcccgtgacattgttcacgccgtgtccgtgaccctcgaggacctgttccgaggaaagacctccaagatggctctcaagaagaccgtgctctgtaacggctgtgacggtatcggaggcaaggccggctccgtcaacaagtgtgagacctgtaagggtcagggattcaagtttgtcacccgacaaatgggccccatgctgcagcgataccagaccaagtgtaacgactgtaacggcgagggcgagatcatcgaccccaaggatcgatgcaaggactgtaacggaagaaagaccaaggaggagcgaaaggtgctcgaggtcaacattgataagggtatggtcaacggacagaagatcaccttctctggtgagggtgaccagggtcctgatattattcctggtgacgttgtctttgtgctggatgagcagccccacgcccgatttgtccgacgaggcgacgatctgtactaccacgccaagattgatctcaacactgcccttaccggtggctctttcatgattgagcatcttgagaaggaggagtggatcaaggtggagatcatccccggcgagatcatttcgcatggcaccaccaaggtcgtggagggcaagggtatgccctcctaccgacaccaggttcacggcaacctgttcattcagtttgaggtcgagttccccgcatctggctctctcaacgaggagactctgcaacagctgtctgctcttctgcctgccaagcctgctcttcccagtgtgcccgagagtgtccatgttgacgatgttgttctggctgacgtggatcctctcaagcaccgaggagctatgggcggcgatgatgagatggacatggatgaggatggacctggaggagcccagggtgtccagtgtgcttctcagtaa

SEQ ID NO: 117560 - protein, 417 aa, Yarrowia lipolytica CLIB122
MVKESKLYDVLGVSVTATEVEIKKAYRVGALKYHPDKNPGNVEAEAKFKEISMAYEVLSNDQKRAAYDNFGEAGLGGGADGGMGGGSAEELFSHFFGGGGGMGGMGGMFGGGQPQGPRRSRDIVHAVSVTLEDLFRGKTSKMALKKTVLCNGCDGIGGKAGSVNKCETCKGQGFKFVTRQMGPMLQRYQTKCNDCNGEGEIIDPKDRCKDCNGRKTKEERKVLEVNIDKGMVNGQKITFSGEGDQGPDIIPGDVVFVLDEQPHARFVRRGDDLYYHAKIDLNTALTGGSFMIEHLEKEEWIKVEIIPGEIISHGTTKVVEGKGMPSYRHQVHGNLFIQFEVEFPASGSLNEETLQQLSALLPAKPALPSVPESVHVDDVVLADVDPLKHRGAMGGDDEMDMDEDGPGGAQGVQCASQ

SEQ ID NO: 117561 - DNA, 1395 bp, Aspergillus nidulans FGSC A4
  CDS (1)..(1395)
atggttaaagatacgaagttttacgacatcctcggggttgacccgtcggcctccgaggcccagctgagaagcgcttacaagaagggtgccctcaagtaccaccctgacaagaaccccaacaacccagaggccgctgaaacattcaaggaaatgtccaaggcgtacgaagttctctccgatcctcagaagcgtaacatctacgaccaacttggtgaagagggtcttgaaggcggtggcggtgccggtggaatgggcgcggaggatctcttcgcccagttcttcggcggcggcggtggtttcggcggcatgttcggcggtggtatgcgggatcagggccccaagaaggctcgcaccattcaccacgtccacaaggtcaacctggaagatatctaccgcggcaaagtatccaagttggctctccagaagtccgtcatctgtcctacttgcgacggtcgtggtggtaaggagggcgctgtcaagacatgtgctggctgtaacggttccggtatgaagacgatgatgcgccagatgggtcccatgattcagcgcttccagactgtctgtcccgactgcaatggtgaaggagagaatatccgtgacaaggaccgctgccgcaactgccatggtaagaagactgttgtcgagcgcaaggtccttcacgtccacgttgatcgtggtgtcaagaatggccacaagatcgagttccgcggtgaaggtgaccagcttcctggcgtcatgcctggtgatgttgttttcgagattgagcagaagccccacccccgattccagcgcaaggatgacgaccttttctaccatgccgaaattgacctccttactgcgcttgctggcggaacaatcaacattgagcaccttgacgaccggtggttgtctgtaacaatcgcccctggcgaggttatcacacctggtgtcatcaaggttatcaagggccagggtatgccgtcgtaccgccaccacgatcacggtaacctctacatccagttcgacgtcaagttccccgaaaaccacgaacttagaaacctcgaacttttggagcaggttctgcctccccgacaggagacaaacaggcctcctgcggacgctatggtggaagactttgatttggaggaggttgataacagcgagcgctcacaagcacgcgctcacggggcggccagcatggacgaggatgacgatgacgttcctcctggcgctgagcgggtgggatctattcgtgttgtgggatctagggacgcggccagcacccgcgctttgcggctgcagatgaggacagttgttcttggggtggttactgacattaccgacattatagactcgcatgaacttggtaaggaccctggcagccagcaacagggtccttgttccaagtcccagtaa

SEQ ID NO: 117562 - protein, 464 aa, Aspergillus nidulans FGSC A4
MVKDTKFYDILGVDPSASEAQLRSAYKKGALKYHPDKNPNNPEAAETFKEMSKAYEVLSDPQKRNIYDQLGEEGLEGGGGAGGMGAEDLFAQFFGGGGGFGGMFGGGMRDQGPKKARTIHHVHKVNLEDIYRGKVSKLALQKSVICPTCDGRGGKEGAVKTCAGCNGSGMKTMMRQMGPMIQRFQTVCPDCNGEGENIRDKDRCRNCHGKKTVVERKVLHVHVDRGVKNGHKIEFRGEGDQLPGVMPGDVVFEIEQKPHPRFQRKDDDLFYHAEIDLLTALAGGTINIEHLDDRWLSVTIAPGEVITPGVIKVIKGQGMPSYRHHDHGNLYIQFDVKFPENHELRNLELLEQVLPPRQETNRPPADAMVEDFDLEEVDNSERSQARAHGAASMDEDDDDVPPGAERVGSIRVVGSRDAASTRALRLQMRTVVLGVVTDITDIIDSHELGKDPGSQQQGPCSKSQ

SEQ ID NO: 117563 - DNA, 1017 bp, Candida albicans SC5314
  CDS (1)..(1017): transl_table=12
atggttaaagacacaaagttttacgatgccttgggggtatcaccaaatgcatctgatgctgaattgaaaaaagcttatagaaaagctgctttaaaatatcatccagataaaaatccttccccagaagcagctgaaaagtttaaagaactttctcatgcttatgaaattttgagtgatgaccaaaaaagagaaatatatgatcaatatggtgaagaagggttgagtggacaaggtgctggaggcttcggtatgaatgccgatgacatctttgcccaattctttggtggtggtttccatggaggtccacaacgtccatctagaggtaaagacatcaagcattccattgcttgttccttagaagagttatacaagggtaaaactgtcaagttggccttgaacaaaactgtcttgtgtggcgaatgtaagggccgtggaggagcagaaggtaaggttgcacaatgtcctgattgtcacggtaatggtatgaaatttgttactaagcaaatgggtccaatgattcaaagattccaaactgtatgtgacaagtgtcaaggtactggtgatttgattgatccaaaggatcgttgtaagaaatgtaacggtaaaaaaaccgagtcggaaagaaagattttggaagttcatgtgaaacctggtatgaaggatggagatcatattacatttgctggagaaggtgatcaaacacctggagtaacacctggtgatgttgtattcattatatctcagaaaccacacccagtgttccaaagaaaaggtaatgatttattgattgaacaagagattgaattggctacagcattggctggtggtgaaattgctttcaaacacatttcaggtgattgggttagaattgaaattccagctggtgaagttattgctccaggatctattaaaatggttgaaggatttggtatgccagtcagaactcacaaaggtaatttaataatccatttcaatgtcaaattcccagaaaataattttgctgatgaagaagcttga

SEQ ID NO: 117564 - protein, 338 aa, Candida albicans SC5314
MVKDTKFYDALGVSPNASDAELKKAYRKAALKYHPDKNPSPEAAEKFKELSHAYEILSDDQKREIYDQYGEEGLSGQGAGGFGMNADDIFAQFFGGGFHGGPQRPSRGKDIKHSIACSLEELYKGKTVKLALNKTVLCGECKGRGGAEGKVAQCPDCHGNGMKFVTKQMGPMIQRFQTVCDKCQGTGDLIDPKDRCKKCNGKKTESERKILEVHVKPGMKDGDHITFAGEGDQTPGVTPGDVVFIISQKPHPVFQRKGNDLLIEQEIELATALAGGEIAFKHISGDWVRIEIPAGEVIAPGSIKMVEGFGMPVRTHKGNLIIHFNVKFPENNFADEEA

SEQ ID NO: 117565 - DNA, 1182 bp, Candida albicans SC5314
  CDS (1)..(1182): transl_table=12
atggttaaagacacaaagttttacgatgccttgggggtatcaccaaatgcatctgatgctgaattgaaaaaagcttatagaaaagctgctttaaaatatcatccagataaaaatccttccccagaagcagctgaaaagtttaaagaactttctcatgcttatgaaattttgagtgatgaccaaaaaagagaaatatatgatcaatatggtgaagaagggttgagtggacaaggtgctggaggcttcggtatgaatgccgatgacatctttgcccaattctttggtggtggtttccatggaggtccacaacgtccatctagaggtaaagacatcaagcattccattgcttgttccttagaagagttatacaagggtaaaactgtcaagttggccttgaacaaaactgtcttgtgtggcgaatgtaagggccgtggaggagcagaaggtaaggttgcacaatgtcctgattgtcacggtaatggtatgaaatttgttactaagcaaatgggtccaatgattcaaagattccaaactgtatgtgacaagtgtcaaggtactggtgatttgattgatccaaaggatcgttgtaagaaatgtaacggtaaaaaaaccgagtcggaaagaaagattttggaagttcatgtgaaacctggtatgaaggatggagatcatattacatttgctggagaaggtgatcaaacacctggagtaacacctggtgatgttgtattcattatatctcagaaaccacacccagtgttccaaagaaaaggtaatgatttattgattgaacaagagattgaattggctacagcattggctggtggtgaaattgctttcaaacacatttcaggtgattgggttagaattgaaattccagctggtgaagttattgctccaggatctattaaaatggttgaaggatttggtatgccagtcagaactcacaaaggtaatttaataatccatttcaatgtcaaattcccagaaaataattttgctgatgaagaaagcttgaagaaattggctagtcttttaccaaaaccaaaagaagtcaagatcccagccgatgccgatgttgatgactgtaccatggtcccagctaaattggaacaaagtaatccatacgagtcagatgaagaagctcacggaggtccaggggtccaatgtgctagtcaatag

SEQ ID NO: 117566 - protein, 393 aa, Candida albicans SC5314
MVKDTKFYDALGVSPNASDAELKKAYRKAALKYHPDKNPSPEAAEKFKELSHAYEILSDDQKREIYDQYGEEGLSGQGAGGFGMNADDIFAQFFGGGFHGGPQRPSRGKDIKHSIACSLEELYKGKTVKLALNKTVLCGECKGRGGAEGKVAQCPDCHGNGMKFVTKQMGPMIQRFQTVCDKCQGTGDLIDPKDRCKKCNGKKTESERKILEVHVKPGMKDGDHITFAGEGDQTPGVTPGDVVFIISQKPHPVFQRKGNDLLIEQEIELATALAGGEIAFKHISGDWVRIEIPAGEVIAPGSIKMVEGFGMPVRTHKGNLIIHFNVKFPENNFADEESLKKLASLLPKPKEVKIPADADVDDCTMVPAKLEQSNPYESDEEAHGGPGVQCASQ

SEQ ID NO: 117567 - DNA, 1305 bp, Ustilago maydis 521
  CDS (1)..(1305)
atggtcgagtcaacacatctgtacgatatactcggcgtggcgccggacgcgtcgtccgcagatatcaaaaaggcctaccgcaaacagtcgcttgccaaccatccagacaagaacccggagatcgacccggcagtagccaacgaaaagtttgccgagatcaatcacgcctacgagacgctttccgatccagattcacgtgctgcatacgacagatatggcgatgatggtccaggtgggccaggtggtccaggaggcatgccaccagacatggacgacttcctagcgagcatgtttggcggcggtatgggaatgggcggcatgccgggcatgagtggtatgcctcgtggtcgacgaccccgtcggacaaagggcgaggatgcagtgattgagtacgctgttaccctggctgacctgtacaagggcaaaacagctcatttcaacctcaccaagaacgtcatctgcactcattgccagggctcaggtgccaagcccggccttgttgagaaggagtgcgtcaaatgctccggaaaaggctcagtacttcaacagcgcagtatgggcaacggcatgattgcgcaatcttacgtcgagtgcaccgactgtcacggcgagggcaaaaaggtgcgcgacaaggatcgttgcaaaaagtgcaaaggtgaaaagaccacaaaagcaaaagcaaagcttgatgtcgaaatcgaaaaaggaatggttgacggccagcagatcgtattcaaagaagcggcagaccaagaaccaggcgtcaaagctggcgatatcttgatcgagctcaagatgcagaaggataaagctttcgaggtaaaaggactcgatctcatgacaacggtgcgcctgactcttgtcgaagctttgcttggcttctcacggacggtgttgacacatttggacggcagacatcttaaggtattgcgctcaaagatcaccaggccaggagacgttgacgtgatcaagggcgagggtatgccccagtatcgtgatcgcaatcaaaccaagggagacctctacattcgatgggaggttgattttcccaccgacgcacagctcgcctccgacccggcgatccgacaagcattgcaatctgcgctgccgcctgccagaccggatctcgagacgacatcagagacgatcgaagaccagtgcgagcccgtcccagccaaagtggagcaatttggtagcaaccaagcccgcatcccagggcaagggcacatgaacgacgatggctgggaagatcacgacgagatgggtggtggacagggtcctggcatgcagtgtgctccgcaatag

SEQ ID NO: 117568 - protein, 434 aa, Ustilago maydis 521
MVESTHLYDILGVAPDASSADIKKAYRKQSLANHPDKNPEIDPAVANEKFAEINHAYETLSDPDSRAAYDRYGDDGPGGPGGPGGMPPDMDDFLASMFGGGMGMGGMPGMSGMPRGRRPRRTKGEDAVIEYAVTLADLYKGKTAHFNLTKNVICTHCQGSGAKPGLVEKECVKCSGKGSVLQQRSMGNGMIAQSYVECTDCHGEGKKVRDKDRCKKCKGEKTTKAKAKLDVEIEKGMVDGQQIVFKEAADQEPGVKAGDILIELKMQKDKAFEVKGLDLMTTVRLTLVEALLGFSRTVLTHLDGRHLKVLRSKITRPGDVDVIKGEGMPQYRDRNQTKGDLYIRWEVDFPTDAQLASDPAIRQALQSALPPARPDLETTSETIEDQCEPVPAKVEQFGSNQARIPGQGHMNDDGWEDHDEMGGGQGPGMQCAPQ

SEQ ID NO: 117569 - DNA, 1293 bp, Strongylocentrotus purpuratus; identical to SEQ ID NO: 63851
  CDS (1)..(1293)

SEQ ID NO: 117570 - protein, 430 aa, Strongylocentrotus purpuratus; identical to SEQ ID NO: 63852

SEQ ID NO: 117571 - DNA, 1206 bp, Strongylocentrotus purpuratus
  CDS (1)..(1206)
atggtaaaagaaactcaatactatgatgttcttggtgttaggagtaatgcgacagaggcagaattaaagaaagcatacaggaaacttgcactcaagtatcatccagacaagaaccctgatgaaccagaaaagttcaaggaaatctctctagcatatgagactttatcggatcaaaagaagaggaaaatatatgatgaaggaggagaacaagccgtcaaagaaggaggcacaggagggggcatgcacgaccccatggacttgtttgacatgttctttaagtttgggggtgggtcaagaggtcgggagaggagaggcaaggatgtgatccatcagctggcagtcactctagatgaactgtacaatggatccgtaaggaaactggctcttcaaaagcaggttgtgtgtgacaagtgtgaagggcgaggaggaaagaagggagcagtagagaagtgtgggacatgtcgtgggtcaggtatgcaggtccacgtacggcagctaggtccaggaatggtccagcagatccagtccatgtgctcctcatgtgagggacagggagagcgcatcagtgccaaggacaggtgcaaatcttgtcagggtcaaaaggtcatacgggaacgcaaaattctagaagtgcatatagataaaggtatgaaggatggtcagaagatcacattccgtggagaaggagaccaggagcctgggctggagcctggagacatcatcatcatcctggacgagaagccaaacgagatgttcaggcggcgaggtaacgacctcctcatcatggcctgtaagattgaactggtagaagcactctgtggattccagaagatcatcaatacccttgataagagggagattgttatcatgtcacacccaggtgagatcgtcaaaccaggtgacatcaagatggtcgttggcgagggaatgcctctgtacaaaaatccctttgagagagggcgcttgataatccaattccagatcaacttcccggagaacaatgccatccaagagaagaaccttgagaagctagaagccatcatgccagcccgtgaggattgcattgttacggatgatatggagatggtcacactctcagattacaccttagagcatgaatccagaggtcaccatggagggggaaatgcatatgatgaggacgatgaaaaccagatgcctcgcggaatgcagtgccagtcacattaa

SEQ ID NO: 117572 - protein, 401 aa, Strongylocentrotus purpuratus
MVKETQYYDVLGVRSNATEAELKKAYRKLALKYHPDKNPDEPEKFKEISLAYETLSDQKKRKIYDEGGEQAVKEGGTGGGMHDPMDLFDMFFKFGGGSRGRERRGKDVIHQLAVTLDELYNGSVRKLALQKQVVCDKCEGRGGKKGAVEKCGTCRGSGMQVHVRQLGPGMVQQIQSMCSSCEGQGERISAKDRCKSCQGQKVIRERKILEVHIDKGMKDGQKITFRGEGDQEPGLEPGDIIIILDEKPNEMFRRRGNDLLIMACKIELVEALCGFQKIINTLDKREIVIMSHPGEIVKPGDIKMVVGEGMPLYKNPFERGRLIIQFQINFPENNAIQEKNLEKLEAIMPAREDCIVTDDMEMVTLSDYTLEHESRGHHGGGNAYDEDDENQMPRGMQCQSH

SEQ ID NO: 117573 - DNA, 1221 bp, Tribolium castaneum
  CDS (1)..(1221)
atggcagacaacaagttgtacgaaacgttgggggtgagccgaaacgcatcagacagcgaaattaaaaagaattaccggaaactagcgaaagaattccacccggataagaatcctgaagctggcgacaagttcaaggagatctcgtacgcgtacgaggtgctttccgatccgaagaaacgacagatttacgacaagtatggcctcaaaggcatgcaagagggggcgcaggacggctttgctggcgacagcttgttctcgcacctgttcggcggcggtttgtttggcggtttcggcggctttccgcacaggagacgtcacaaaggagaggataccgtccatccgcttaaagtgtcgcttgaggacttgtacaacggaaaaacgtccaaattgcagttgagcaagaacgttatttgcgccgcgtgcaacggcaaaggcggcagaagcgaaaatttcgaacagtgtcccgggtgcaagggtcggggattcaaagtgacctaccaccagatcgcaccgggaatggcgcagcaggtgcaggccgagtgctcagactgtcatggtgatggggtcatgatcaaggagaaggatagatgcacgacgtgtaaaggaaaaaaggtttgtaacgagacgaaaatcctcgaggtccacatcgacaaaggaatgaaagacggtcagaaaatcttcttccgtggcgagggcgaccaacagcccgacatcgaacccggcgatgtcatcatcatacttaacgagaaatcccatgaaacgttccaaagaagcggcgacgatttgctcatgaatcgcaccattagtctgacggaagctctctgtggcttcagtttcgtgttgcgccagttggacgggcgcgatttgttaatcaaacacccaccaggggacattgtgaaaccaggcgatttgaaagcagtgatgggcgaaggtatgcccatgtacaaaaatcccttcgaaaagggaaatctctatatcaccttcgaaatcacattcccggagagtaatttcgcagacgagaagaccctcaaatcattagagagtatgctgccgccgcggcccgtctttcaaatgcctgaaggcgaaaacgtggaagaagttgacttgcatcatttcgattcggcgaatgacaagggggcgcatggaagcagaggggaagcgtatgcgagcgacgacgaggatcacatgcatggaccgggcatacagtgcgcacatcaatag

SEQ ID NO: 117574 - protein, 406 aa, Tribolium castaneum
MADNKLYETLGVSRNASDSEIKKNYRKLAKEFHPDKNPEAGDKFKEISYAYEVLSDPKKRQIYDKYGLKGMQEGAQDGFAGDSLFSHLFGGGLFGGFGGFPHRRRHKGEDTVHPLKVSLEDLYNGKTSKLQLSKNVICAACNGKGGRSENFEQCPGCKGRGFKVTYHQIAPGMAQQVQAECSDCHGDGVMIKEKDRCTTCKGKKVCNETKILEVHIDKGMKDGQKIFFRGEGDQQPDIEPGDVIIILNEKSHETFQRSGDDLLMNRTISLTEALCGFSFVLRQLDGRDLLIKHPPGDIVKPGDLKAVMGEGMPMYKNPFEKGNLYITFEITFPESNFADEKTLKSLESMLPPRPVFQMPEGENVEEVDLHHFDSANDKGAHGSRGEAYASDDEDHMHGPGIQCAHQ

SEQ ID NO: 117575 - DNA, 1212 bp, Tribolium castaneum
  CDS (1)..(1212)
atggtaaaagagacgaaattctacgacatcctgggcgttaagcccggctgcacccaggacgacctgaagaaagcctaccgaaaactcgcccttaaataccaccccgacaagaaccccaatgaaggggagaagttcaagcaaatctcgcaagcgtacgaggtgctgtccgacccggaaaagaagcgcatttacgaccaaggcggcgaacaggccctcaaagagggcggcgtctcgggcggcttctccagccctatggacttgttcgatatgttcttcggcggaggcggctttggtggcggcagaggccgacgtcgcgaacgtaaaggcaaagatgtcattcatcaacttaatgtttctctggaagagttgtacaaaggaaccgtccggaaattggctctacagaaaaacgtcatctgtgataagtgcgaaggcaggggtgggaagaagggggctgtggagacgtgtcccacgtgtcggggctccggcatgcaggtgcaaatccagcagttggggccaggcatgatccaacaaatccagagcatgtgttcggattgccgaggccaaggtcaacgcatcaatcccaaagaccgttgcaagcaatgccaaggcaagaaagtgactcgcgaacgcaaaattctcgaagtccacgtggacaagggcatggttgacggtcaaaaaatcgtttttaacggagaaggggaccaagaaccagaactggaacctggcgatattataattgtgcttgaggagaaagaacatcccgtttttcgaagatccggcttggatctcataatccgccttgagttgcagttagtagagtcgctttgcggattccagaaagtaatcaggactttggacgaccgcgatttggttatcacgtcgcttccgggcgaggtcacgaaacacggggatgttaagtgtattatgaacgagggaatgccgcagtataagaatccgttcgagaaaggacggcttatcgtacaatttttggtacagtttccggataagttgccacctgaggtgattccggcgctggagaatgcgctaccgcctcggcctgaaattatgatcccggatcaggcggaagaatgcattttgttgccgtttgatgtggataagcaggactcgaggaggaggcagaataggaatgtttatgacgaagatgatgagatgcatggtccgggacagcgggtccaatgtgcggctaactaa

SEQ ID NO: 117576 - protein, 403 aa, Tribolium castaneum
MVKETKFYDILGVKPGCTQDDLKKAYRKLALKYHPDKNPNEGEKFKQISQAYEVLSDPEKKRIYDQGGEQALKEGGVSGGFSSPMDLFDMFFGGGGFGGGRGRRRERKGKDVIHQLNVSLEELYKGTVRKLALQKNVICDKCEGRGGKKGAVETCPTCRGSGMQVQIQQLGPGMIQQIQSMCSDCRGQGQRINPKDRCKQCQGKKVTRERKILEVHVDKGMVDGQKIVFNGEGDQEPELEPGDIIIVLEEKEHPVFRRSGLDLIIRLELQLVESLCGFQKVIRTLDDRDLVITSLPGEVTKHGDVKCIMNEGMPQYKNPFEKGRLIVQFLVQFPDKLPPEVIPALENALPPRPEIMIPDQAEECILLPFDVDKQDSRRRQNRNVYDEDDEMHGPGQRVQCAAN

SEQ ID NO: 117577 - DNA, 1125 bp, Prochlorococcus marinus str. MIT 9515; identical to SEQ ID NO: 63855
  CDS (1)..(1125): transl_table=11

SEQ ID NO: 117578 - protein, 374 aa, Prochlorococcus marinus str. MIT 9515; identical to SEQ ID NO: 63856

SEQ ID NO: 117579 - DNA, 1131 bp, Prochlorococcus marinus str. NATL1A; identical to SEQ ID NO: 63857
  CDS (1)..(1131): transl_table=11

SEQ ID NO: 117580 - protein, 376 aa, Prochlorococcus marinus str. NATL1A; identical to SEQ ID NO: 63858

SEQ ID NO: 117581 - DNA, 1137 bp, Prochlorococcus marinus str. MIT 9303
  CDS (1)..(1137): transl_table=11
atggctgattattacgacctgctaggggtcagcaaagatgctgatggcgataccctgaagcgggcttatcgccgtttggcacgtcagtatcacccagatatcaataaggatcctggggcagaggatcgtttcaaggagatcggtcgtgcttatgaggtgcttagcgatcctcagactcgtggccgttatgaccaatttggcgaggctgggcttgggggtgcaggaggcatgcccgatgtgggagatatgggtggctttgccgatctctttgagaccttttttagtggttttggtggggctggtggatctggtggtggtcgtccacgacgacggggaccgcagcaaggagatgatcttcgctacgacttgaagattgattttgagcaagctgttttcggacaggaacgagaaatcaaaattccccatcttgaaacttgcgacacctgtaacggcactggagccaaggtgggtagtggaccaacgacctgttccacttgtggtggtgttggtcaggtgcgacgagcgaccagaacacctttcggtagcttcactcaggtggcggaatgtcccagttgtgaaggtactggacaggtgatttcagatccttgtggtgcatgtgctggacagggtgtacgtcaggttcgcaagaaattgcgcatcaatattcccgctggggttgataccggaactcgtctgagagttgccggtgagggaaatgctggtttgcggggtggaccttctggagacctttacgtatttttgacggtgaaatcccatccccaattgcgacgtgatgggattacggtgctttcagaagtcaacgtgagttatctccaagcaatccttggagacatcattgaggttgatacggttgatggcaataccagtcttgagattcctgctggaactcagcccaatgctgtactaacccttgaaaacaagggtattcctaagctaggcaacccagtagcaagaggtaatcagcgcatttctatcaatgtgaagttgccgcttcgtctttctgatgaggagaggggcttgcttgaagatctggctggccatcattccgctaaaggcaggcagcatcaccaccacaacagtggtttgtttgctcgtttgtttggtcagaaaggatga

SEQ ID NO: 117582 - protein, 378 aa, Prochlorococcus marinus str. MIT 9303
MADYYDLLGVSKDADGDTLKRAYRRLARQYHPDINKDPGAEDRFKEIGRAYEVLSDPQTRGRYDQFGEAGLGGAGGMPDVGDMGGFADLFETFFSGFGGAGGSGGGRPRRRGPQQGDDLRYDLKIDFEQAVFGQEREIKIPHLETCDTCNGTGAKVGSGPTTCSTCGGVGQVRRATRTPFGSFTQVAECPSCEGTGQVISDPCGACAGQGVRQVRKKLRINIPAGVDTGTRLRVAGEGNAGLRGGPSGDLYVFLTVKSHPQLRRDGITVLSEVNVSYLQAILGDIIEVDTVDGNTSLEIPAGTQPNAVLTLENKGIPKLGNPVARGNQRISINVKLPLRLSDEERGLLEDLAGHHSAKGRQHHHHNSGLFARLFGQKG

SEQ ID NO: 117583 - DNA, 1155 bp, Clostridium difficile 630; identical to SEQ ID NO: 63859
  CDS (1)..(1155): transl_table=11

SEQ ID NO: 117584 - protein, 384 aa, Clostridium difficile 630; identical to SEQ ID NO: 63860

SEQ ID NO: 117585 - DNA, 1125 bp, Prochlorococcus marinus str. MIT 9301
  CDS (1)..(1125): transl_table=11
atggctgatttttaccaaatacttggagtttcaagagatgctgatgcagatactctaaaaagggcttatagaaagttagcgagacaatatcatcctgatgttaataaagaacctggtgctgaagataaatttaaagaaattggtaaggcttatgaagcattagctgatcctgaaacaagagctagatacgatcagtttggagaggccggccttggaggtgcagccggaatgcctgatatgggcgatatgggtggctttgcagatttatttgaaactttttttaatggctttggtggacaaaatcctcagggtggaagaactcaaagaagaggccctcaacaaggagatgatctcaggtatgaccttaatgttgactttaaagatgcaatattcggccaacaaagagaaattaaaattcctcatcttgagacatgcgaagtctgtaggggaacgggagctaagccaggtaccggaccaaaaacttgttcaacatgtgggggaagtggacaagtaagaagagctacgagaacaccttttggtaattttacacaagttgctgaatgcccttcatgcaatggagctggtcagataattgcagatccatgtgtaagttgcggcggtaatggagtaaagcaagttagaaaaaaattaagaattaatattcctgcaggagttgatacaggtactaaattaagagtttccggagagggtaatgttggtttaaaagggggtccacctggagatctttatgtttttatcaaggttaagaatgattcaaaacttaaaagagatggtgtgactatttactcagaaatagatgtgagttatttacaggccattttaggtgacactgttaaagttactacagttgatggaaatgttaatttaaaaattccgtgtggcacccagccaaatacaactctttcacttgagaataaaggggtacctagacttggtaatccggttgctagaggaaatcatgaagtcttagtaaaagtaaaattgccaactcgtgtaactgacgaagaacgaaagcttttggagggtttagcttcgcaatattcagacaaaaatattaattccagtagtggactttttagtaaattatttggtaaagaatcttaa

SEQ ID NO: 117586 - protein, 374 aa, Prochlorococcus marinus str. MIT 9301
MADFYQILGVSRDADADTLKRAYRKLARQYHPDVNKEPGAEDKFKEIGKAYEALADPETRARYDQFGEAGLGGAAGMPDMGDMGGFADLFETFFNGFGGQNPQGGRTQRRGPQQGDDLRYDLNVDFKDAIFGQQREIKIPHLETCEVCRGTGAKPGTGPKTCSTCGGSGQVRRATRTPFGNFTQVAECPSCNGAGQIIADPCVSCGGNGVKQVRKKLRINIPAGVDTGTKLRVSGEGNVGLKGGPPGDLYVFIKVKNDSKLKRDGVTIYSEIDVSYLQAILGDTVKVTTVDGNVNLKIPCGTQPNTTLSLENKGVPRLGNPVARGNHEVLVKVKLPTRVTDEERKLLEGLASQYSDKNINSSSGLFSKLFGKES

SEQ ID NO: 117587 - DNA, 1191 bp, Streptococcus pyogenes MGAS10394; identical to SEQ ID NO: 63861
  CDS (1)..(1191): transl_table=11

SEQ ID NO: 117588 - protein, 396 aa, Streptococcus pyogenes MGAS10394; identical to SEQ ID NO: 63862

SEQ ID NO: 117589 - DNA, 1170 bp, Mannheimia succiniciproducens MBEL55E; identical to SEQ ID NO: 64035
  CDS (1)..(1170): transl_table=11

SEQ ID NO: 117590 - protein, 389 aa, Mannheimia succiniciproducens MBEL55E
MGERAHPTLVTKIMAKQDYYETLGVQKGADEKEIKRAYKRLAMKYHPDRTNGDKAAEEKFKEVNEAYEILMDKEKRAAYDQYGHAAFEQGGFGGGAGGFGGGFGGFGGFEDIFSEMFGGGASRQRVVRGEDLRYDIEITLEEAVRGTTKDIKINTLAACDHCDGSGAEKGSKVETCPTCHGHGRVRRQQGFFMTETTCPTCQGSGKKIEKPCKHCHGDGRVHKKKNLSVKIPAGVDTGNQLRLSGEGAAGENGAPAGDLYVVIHVKDHHIFERDGSNLYCEVPISFTMAALGGEIEVPTLDGRVKLKIPAETQTGKLFRMRGKGVTSTRAGYAGDLICKIIVETPVKLNEEQKELLRKFEESLEGQSKQRPKSSSFLDGVKKFFDNLGK

SEQ ID NO: 117591 - DNA, 1071 bp, Dehalococcoides ethenogenes 195
  CDS (1)..(1071): transl_table=11
atggcaaataaaagagattattacgaagtactgggtattgaacgcagcgcttctgacgaagatataaaaaaggccttccgcaagatggctatgaagcatcatcctgaccgtaaccacgaggatggcgctgccgaaaaattcaaagaaataaacgaagcctacgaagtcctttccaatcccgaaaaaagggcggcctatgaccggtttggtttcagcgccggatcagatgcctttggtcagggcggctttgaaaactttgatttcggcggtttgggcagtatttttgagacattttttggcggtgctacccagagtgccaagcgcggcccccgccgcgggccggatatgtcttatgatatacggataactcttgaagaagccgcaaccggggttgaaaaagaaattaccaccgaaaggcttgaatactgctctgagtgcagcggtacgggagctaaagccggcacttcacttgtaaaatgtaccaactgtaacggtaccgggcaggtttatcaggtgcaaaagagtgttttcgggcgttttaccagcgtaaccccctgtcccaaatgccggggtgaggggactatcatcggcgaaccctgtgccaagtgccggggtaccggtaaagaatatgtcaagcggactgttcaggtaaagatacctgccggggtggcagacggcaaccagatacgccttaacggctacggcggtgtaggtgataagggcgcttccgccggtgatgtgtatataaacgtaagcattgcctcacatgcggatttcaaacgtgacggtgatgatgttatttatgaacttgagataaattttgcccaggcggctttgggcactgaagtaaatgtgccggggcttagcacctctcacaagctgaaaattccgtcaggcagtcagaacggcaagtactttgtgctgaagggcaagggtattccccatctgaaccgctttggcagcggtgacgaaatggtgcacctgaacgttgttactcctgagaagctcagccgtaaacagaaacagctctttgaggagctggagaagtctttcgccgaggataaaaagtag

SEQ ID NO: 117592 - protein, 356 aa, Dehalococcoides ethenogenes 195
MANKRDYYEVLGIERSASDEDIKKAFRKMAMKHHPDRNHEDGAAEKFKEINEAYEVLSNPEKRAAYDRFGFSAGSDAFGQGGFENFDFGGLGSIFETFFGGATQSAKRGPRRGPDMSYDIRITLEEAATGVEKEITTERLEYCSECSGTGAKAGTSLVKCTNCNGTGQVYQVQKSVFGRFTSVTPCPKCRGEGTIIGEPCAKCRGTGKEYVKRTVQVKIPAGVADGNQIRLNGYGGVGDKGASAGDVYINVSIASHADFKRDGDDVIYELEINFAQAALGTEVNVPGLSTSHKLKIPSGSQNGKYFVLKGKGIPHLNRFGSGDEMVHLNVVTPEKLSRKQKQLFEELEKSFAEDKK

SEQ ID NO: 117593 - DNA, 1143 bp, Pseudomonas syringae pv. syringae B728a
  CDS (1)..(1143): transl_table=11
atggcaaagcgtgattattacgaagtgttgggagtggagcgaggctccagcgaggcggacctgaagaaggcttatcgccgtctggcgatgaagcatcaccctgaccgcaaccctgatgacaaagcatcggaagagctgttcaaagaggccaacgaagcctacgaagtgctttccgacgccagcaaacgcgcggcctacgatcagtatggccatgccggtgtcgacccgagcatgggtggcggcggtggttttggtggcggtgccggtggcgccaacttctccgatatcttcggcgatgtgttcagcgacttctttggcggcggccgtgccggtggcggcggtggtcgtggcggcgctcagcgtggcagcgacctgcgctatacgctggagctgaatctggaagaggcggttcgcggtactaacgtgaatatccgcgttccgacgctggtcaactgcaaaccatgcgacggcagcggcgccaagaaaggttcttcgccggtcacatgccctacgtgcggcggcattggtcaggtgcgcatgcagcaggggttcttctctgtgcagcaaacctgtccgcgctgccacggccacggcaagatcatctctgacccgtgcgattcctgccacggcgaaggccgcgtcgaagagtccaagacgctttccgtcaaagtgccgccaggtgtcgataccggtgaccgcattcgtctgtctggcgaaggcgaggcgggtacccagggtggcccgaccggcgacctgtatgtcgtgatcaatgtgcgcgagcacgcgatcttccagcgggacggcaagcacctgttctgcgaagtgcctatcagctttaccgatgcagcgctgggcggcgagcttgaggtgccgacgctcgacggtcgcgtcaaactgaaaatccccgaaggtacccagaccggcaagcagttccgcttgcgtggcaagggcgtcgctccagtgcgtggcggtggtgccggtgacttgatgtgccgtgttgccgtcgaaaccccggtcaacctgagcaagcgtcagcgcgagctgcttgaagagttccgcacctcgcttgaaaacgacgagtcccactctccgaaagccagtggctggtttgagggtgtgaagcgtttcttcggcgatctgtaa

SEQ ID NO: 117594 - protein, 380 aa, Pseudomonas syringae pv. syringae B728a
MAKRDYYEVLGVERGSSEADLKKAYRRLAMKHHPDRNPDDKASEELFKEANEAYEVLSDASKRAAYDQYGHAGVDPSMGGGGGFGGGAGGANFSDIFGDVFSDFFGGGRAGGGGGRGGAQRGSDLRYTLELNLEEAVRGTNVNIRVPTLVNCKPCDGSGAKKGSSPVTCPTCGGIGQVRMQQGFFSVQQTCPRCHGHGKIISDPCDSCHGEGRVEESKTLSVKVPPGVDTGDRIRLSGEGEAGTQGGPTGDLYVVINVREHAIFQRDGKHLFCEVPISFTDAALGGELEVPTLDGRVKLKIPEGTQTGKQFRLRGKGVAPVRGGGAGDLMCRVAVETPVNLSKRQRELLEEFRTSLENDESHSPKASGWFEGVKRFFGDL

SEQ ID NO: 117595 - DNA, 1125 bp, Psychrobacter arcticus 273-4; identical to SEQ ID NO: 63865
  CDS (1)..(1125): transl_table=11

SEQ ID NO: 117596 - protein, 374 aa, Psychrobacter arcticus 273-4; identical to SEQ ID NO: 63866

SEQ ID NO: 117597 - DNA, 1137 bp, Colwellia psychrerythraea 34H; identical to SEQ ID NO: 63867
  CDS (1)..(1137): transl_table=11

SEQ ID NO: 117598 - protein, 378 aa, Colwellia psychrerythraea 34H; identical to SEQ ID NO: 63868

SEQ ID NO: 117599 - DNA, 1137 bp, Dechloromonas aromatica RCB
  CDS (1)..(1137): transl_table=11
atgtcaaaacgcgatttttacgagattctcggcgtcaaccgcgatgcatccgacgacgagatcaaaaaggcctaccgcaagctggccatgaagcaccatccggaccgcaatccggacaatccaggcgccgaagaaaagttcaaggaagccaaggaagcctacgaaatcctgtcggacagccagaagcgcgcagcctatgatcagttcggccacgctggcgtggaacagggcggcatgggcggcggcggctttggcggtggtggcggtggatttgccgacgccttcggtggcatcttcgacgagattttcggtgggcgcgccggcggcagtggtggcggtcgctccaacatttaccgcggcgccgacctgcgctacaacttggaaatcacgctcgaacaggccgcccacggcacggaaacgaagatccgtattccgaccatggaggtctgcgagccctgcaacggctctggcgccaaggccggtacccagcccaagacctgcccgacttgcggcggttccggccaggttcgcctgcagcaaggctttttctcaatccagcagacttgccacaagtgtcacggtaccggccgtttcattgccgacccgtgcaagagttgcgacggtgctggccgcatcaagcagcacaagaccctggctgtcaagattccggccggtgttgacgagggcgatcggatccgcctgtccggtgaaggtgagcatggtgtcaacggcggacctccgggcgacctctacgtccagatccacctgaaaccccatgcggtcttcacccgcgaccacaacgacctgcattgcgaaatgccgatctcattcaccgctgcggcactgggcggggaaatcgaaatcccgacgctggacggcgccgcagcgatcaagattccagccgaaacgcagtcgggtcgcgtcttccgcctacgcggtaagggcatcaagggggttcgtagccatacccatggcgacctgatgtgccacgtcgtggtcgaaaccccggtcaacctgacggaacgtcagaaagagctgctgcgcgagctggaagagtcgagcaaagacaatagtggcaaacacaacccgcgctccaaatcctggatggacaaagtcaaggacttctttgcggaatga

SEQ ID NO: 117600 - protein, 378 aa, Dechloromonas aromatica RCB
MSKRDFYEILGVNRDASDDEIKKAYRKLAMKHHPDRNPDNPGAEEKFKEAKEAYEILSDSQKRAAYDQFGHAGVEQGGMGGGGFGGGGGGFADAFGGIFDEIFGGRAGGSGGGRSNIYRGADLRYNLEITLEQAAHGTETKIRIPTMEVCEPCNGSGAKAGTQPKTCPTCGGSGQVRLQQGFFSIQQTCHKCHGTGRFIADPCKSCDGAGRIKQHKTLAVKIPAGVDEGDRIRLSGEGEHGVNGGPPGDLYVQIHLKPHAVFTRDHNDLHCEMPISFTAAALGGEIEIPTLDGAAAIKIPAETQSGRVFRLRGKGIKGVRSHTHGDLMCHVVVETPVNLTERQKELLRELEESSKDNSGKHNPRSKSWMDKVKDFFAE

SEQ ID NO: 117601 - DNA, 1140 bp, Thermobifida fusca YX
  CDS (1)..(1140): transl_table=11
gtggccagagactattacgagatccttggtgttcgccgcgacgcgacccaggacgagatcaaaaaggcataccgccggctcgcacgtgaactgcatcccgacgtcaaccccgacccagagacccaggagcggttcaaggaagtcgcccaagcctacgaggtgctctccaacccggagaagcgccgcatgtacgacatgggcgtcgacccgttcgcgcgcggcggggcagcgggcggcggagccaccggcttcggagcgggcttcccgttcgacgacttgatgaacgcgttcttcggggggagcacgggaacccgcgcggcacgcgagcggatgcgccggggccggagcatcaaggtgcgggtcgagctcgacctcgaagagaccgcgttcggcgtcaccaaggacatcacgttccccaccgcggtcgtgtgcaacacctgccagggtgagggcacggcgcagggaacccaccccgagacctgcgacatgtgcggtggccgcggtgaagtctcccaggtcactcgctcgttcctcggccaagtcatgacgactcggccgtgcccgcagtgcgcgggccagggcacgatcatccgcaacccctgcccggactgcgccggggaaggccgggtccgggagcgcgtcacccgcaaagtgcagatccccgcgggtgtcgaggacgggacccagatccagctggcgggcgaaggcgaggtcggcccgaacggcggaccgcgcggcgacatcttcctggagatcgtggaacgcccgcacccgatcttcgaacggcgcggcgacgacctgcactgcacggtcaccgttccgatgaccgcggccgcgctgggggcgacgctgaccatcgacaccctcgacggcccggaggagatcgacctgcgccccggcaccaattccgggcaggtcatcaccctgcagtcgaagggctgccaccacctcaacgcgccgggccgcggcgacctgcacatccacgtcacggtggagacccccacccgactggacgaagagcaggaagcgctgctgcgcaagctcgcggaactccgcggcgaggaccggccgccgggcaagttcagcccggggcagggcaatttcttctcccgcatccgtgacgcgttcggcgcgcggtga

SEQ ID NO: 117602 - protein, 379 aa, Thermobifida fusca YX
MARDYYEILGVRRDATQDEIKKAYRRLARELHPDVNPDPETQERFKEVAQAYEVLSNPEKRRMYDMGVDPFARGGAAGGGATGFGAGFPFDDLMNAFFGGSTGTRAARERMRRGRSIKVRVELDLEETAFGVTKDITFPTAVVCNTCQGEGTAQGTHPETCDMCGGRGEVSQVTRSFLGQVMTTRPCPQCAGQGTIIRNPCPDCAGEGRVRERVTRKVQIPAGVEDGTQIQLAGEGEVGPNGGPRGDIFLEIVERPHPIFERRGDDLHCTVTVPMTAAALGATLTIDTLDGPEEIDLRPGTNSGQVITLQSKGCHHLNAPGRGDLHIHVTVETPTRLDEEQEALLRKLAELRGEDRPPGKFSPGQGNFFSRIRDAFGAR

SEQ ID NO: 117603 - DNA, 1140 bp, Ralstonia eutropha JMP134; identical to SEQ ID NO: 63869
  CDS (1)..(1140): transl_table=11

SEQ ID NO: 117604 - protein, 379 aa, Ralstonia eutropha JMP134; identical to SEQ ID NO: 63870

SEQ ID NO: 117605 - DNA, 1149 bp, Ehrlichia canis str. Jake; identical to SEQ ID NO: 63871
  CDS (1)..(1149): transl_table=11

SEQ ID NO: 117606 - protein, 382 aa, Ehrlichia canis str. Jake; identical to SEQ ID NO: 63872

SEQ ID NO: 117607 - DNA, 1167 bp, Methanosarcina barkeri str. Fusaro
  CDS (1)..(1167): transl_table=11
atggccacaacacgtgattattatgatattctcggattatccaaagatgcctcatccgaggatataaagaaaacctatcgaaaacttgcgctaaagtaccatcctgacaggaataaagaaccaggagctgaggaaaagttcaaggagatctctgaggcttatgccgttctttcagatgatgagaaacgcgctcagtacgaccgtttcggacatgccggaataaacgggcaatatagcgcagaagatatcttccgtggtgcggatttcggcggcttcggagatatattcgaaatgttttttggcgggggtggcagacgaggtcctatgggtccaaggagagggtccgatctccagtatgacctttatatcacctttgaagaggcagcctttggagtccgtaaagatatcgatatccctagaacggaaagatgttctaactgttccggaaccggagccaaacctggaacaagccctaagcgctgtcccacatgcggcggcacaggtcaaatccgcacaactcgctccggactgggtatgcagtttgtaagcaccacaacctgtaacacctgtcacggcaggggtcaggttattgagtctccctgcccggtatgcagcggtacaggtagagtccgaaatacaagaaaaatcacagtaaacgttcctgccggagccgattcaggcatgaacctgcggctcagcggagaaggagattcaggagaaccaggagctccatctggagatctctatgtcgtgcttcatgtgatggaacacccttactttaagagggtcgattacgatgtaatttccgagcttcctatctcttttgcccaggctgcactcggtacggatataatggtcgatacccttcacgggaaagtcaagatgaatattcctgcaggaacccagacccattccgtattcaggcttaaagataaaggaattcagcgccttcacgggagtagaaaaggcgatcagctcgtcagggttgtaatcaagactccgaaaaaacttactcacgaacaaaaagagcttctccgccagtttgaggccttgagcaacggcaaaaacccaaatgaagatgaaaaggacaggaacgagaaatccacagaaaaatcccgaaaaagcaaaggtttttttgagaaagtaaaggatgcctttgaaggttaa

SEQ ID NO: 117608 - protein, 388 aa, Methanosarcina barkeri str. Fusaro
MATTRDYYDILGLSKDASSEDIKKTYRKLALKYHPDRNKEPGAEEKFKEISEAYAVLSDDEKRAQYDRFGHAGINGQYSAEDIFRGADFGGFGDIFEMFFGGGGRRGPMGPRRGSDLQYDLYITFEEAAFGVRKDIDIPRTERCSNCSGTGAKPGTSPKRCPTCGGTGQIRTTRSGLGMQFVSTTTCNTCHGRGQVIESPCPVCSGTGRVRNTRKITVNVPAGADSGMNLRLSGEGDSGEPGAPSGDLYVVLHVMEHPYFKRVDYDVISELPISFAQAALGTDIMVDTLHGKVKMNIPAGTQTHSVFRLKDKGIQRLHGSRKGDQLVRVVIKTPKKLTHEQKELLRQFEALSNGKNPNEDEKDRNEKSTEKSRKSKGFFEKVKDAFEG

SEQ ID NO: 117609 - DNA, 1080 bp, Dehalococcoides sp. CBDB1
  CDS (1)..(1080): transl_table=11
atggttaataaaagagattattacgaagtattgggtcttgaacgcagtgcttctgacgaagatataaaaaaggccttccgcaagatggctatgaagcatcaccctgaccgtaatcacgaagagggtgcggcagacaagttcaaagaagtcaacgaagcctacgaggttctttccaaccctgaaaaacgggcggcctatgaccgtttcggtttcagcgccggggcggattccttcggacagggcggttttgaaaactttgattttggcggtttgggcagtatctttgaaaccttctttggcggtgctacccagggtgccaaacgcggtcctcgtcgcgggcctgacatgtcttatgatataaagataagccttgaagaagccgcaaccggtgttgaaaaagatattaccactgaaagacttgaatattgcaccgagtgcagcggcacaggtgccaaagccggcacttcgccggtaaaatgtaccagctgtaacggtaccggacaggtataccaggtgcaaaaaagcgttttcgggcgttttaccagtgtaactccctgtcccaaatgccgtggtgaggggactattattggcgaaccctgcaccaagtgccggggtacgggtaaagaatacgtcaagcggactgttcaggtaaaaatacctgccggtgtggcagacggaaaccaaatacgccttaacggctacggcggagtaggtgacaagggcgcttctgctggagatgtgtatataaacgtaggcattgccgagcatgcggatttcaaacgtgacggtgatgatgttatctacgaacttgagataaattttgcccaggcggctttgggtactgaagtaaatgtgccggggcttaataccgaacacaagctgaaaatcccgtcaggcagtcaaaacggcaagtactttgtgttgaaaggcaagggcattccccatttgaatcgctttggcagcggtgatgaaatggtacacttgaatgtagttacccctgagaaacttagccggaaacagaagcagctctttgaagagctggagaagtcttttgctgaggataaaaaacaggcaacttaa

SEQ ID NO: 117610 - protein, 359 aa, Dehalococcoides sp. CBDB1
MVNKRDYYEVLGLERSASDEDIKKAFRKMAMKHHPDRNHEEGAADKFKEVNEAYEVLSNPEKRAAYDRFGFSAGADSFGQGGFENFDFGGLGSIFETFFGGATQGAKRGPRRGPDMSYDIKISLEEAATGVEKDITTERLEYCTECSGTGAKAGTSPVKCTSCNGTGQVYQVQKSVFGRFTSVTPCPKCRGEGTIIGEPCTKCRGTGKEYVKRTVQVKIPAGVADGNQIRLNGYGGVGDKGASAGDVYINVGIAEHADFKRDGDDVIYELEINFAQAALGTEVNVPGLNTEHKLKIPSGSQNGKYFVLKGKGIPHLNRFGSGDEMVHLNVVTPEKLSRKQKQLFEELEKSFAEDKKQAT

SEQ ID NO: 117611 - DNA, 1119 bp, Thiobacillus denitrificans ATCC 25259; identical to SEQ ID NO: 63873
  CDS (1)..(1119): transl_table=11

SEQ ID NO: 117612 - protein, 372 aa, Thiobacillus denitrificans ATCC 25259; identical to SEQ ID NO: 63874

SEQ ID NO: 117613 - DNA, 1194 bp, Pseudomonas fluorescens PfO-1
  CDS (1)..(1194): transl_table=11
ttggggctcaacgagtttggcgaagctcaggaggggtttgccgaacgtcctcaagagtatgaagaacttatggctaagcgtgactattacgaagtgttgggtgttgagcgcggctcaagcgaagcagacctgaaaaaggcctatcgccgtctggcgatgaagcaccacccggaccgtaatcccggtgacaaggcgtcggaagatctgttcaaggaggccaacgaagcctacgaagtgctgtccgattccagcaagcgtgcagcgtacgatcagtacggtcatgccggcgtcgacccgagcatgggcggcgggggtgccggtttcggcggtcagaacttctccgacatcttcggtgatgtcttcagtgacttcttcggtggcggtcgcggcggttcccgtggcggcgcccagcgcggcagcgatttgcgttacaccctggagctgaacctggaagaagcggtacgcggtacgaccgtgaatatccgcgttccgacactggtcaattgcaaaccatgtgatggatcgggtgccaagaaaggctcgtcgccatcgacgtgcccgacgtgcggcggcatcggtcaggtacgcatgcagcaaggcttcttctcggtgcagcagacctgcccacgttgccatggtcagggcaagatcatttccgatccgtgcgactcatgccacggcgacggtcgcgtcgaagaatacaaaaccctttccgtcaaagtgccggccggtgtcgacaccggtgaccgcattcgtctgtccggtgaaggcgaggcgggcactcagggtggcccgaccggcgacctgtacgtggtgatcaatgtccgcgaacacgacatcttccagcgtgacggcaagcatctgttctgcgaagtgccgatcagcttcgtcgacgcggccctggggggcgagctggaaattccgaccctcgacggtcgcgtcaagctgaagattccggaagggactcagaccggcaagcagttccgcgtgcgcggcaaaggcgtggcgccagtgcgtggcggtggtgcgggtgacctgatgtgccgcgtggccgtcgagacgccggtcaatctgacccgtcgtcaacgtgaactgctggaagagttccgcagctccctggcggacgacaacagccactccccgaaaaccaccggttggttcgacggtgtgaaacgcttcttcggcgatctgtaa

SEQ ID NO: 117614 - protein, 397 aa, Pseudomonas fluorescens PfO-1
MGLNEFGEAQEGFAERPQEYEELMAKRDYYEVLGVERGSSEADLKKAYRRLAMKHHPDRNPGDKASEDLFKEANEAYEVLSDSSKRAAYDQYGHAGVDPSMGGGGAGFGGQNFSDIFGDVFSDFFGGGRGGSRGGAQRGSDLRYTLELNLEEAVRGTTVNIRVPTLVNCKPCDGSGAKKGSSPSTCPTCGGIGQVRMQQGFFSVQQTCPRCHGQGKIISDPCDSCHGDGRVEEYKTLSVKVPAGVDTGDRIRLSGEGEAGTQGGPTGDLYVVINVREHDIFQRDGKHLFCEVPISFVDAALGGELEIPTLDGRVKLKIPEGTQTGKQFRVRGKGVAPVRGGGAGDLMCRVAVETPVNLTRRQRELLEEFRSSLADDNSHSPKTTGWFDGVKRFFGDL

SEQ ID NO: 117615 - DNA, 1149 bp, Rhodobacter sphaeroides 2.4.1
  CDS (1)..(1149): transl_table=11
atggcaaagcgcgattattacgaggttctgggcgtatcccgcacggcctcggctgacgagctgaagaaggcctaccgaacgaaggcgaaggaactccaccccgaccggaacgcggacaaccctcaggccgaggcccagttcaaggaagtgaacgaggcctacgacgtccttcgcgacgccgacaagaaggccgcctacgaccgctacggccatgcggccttcgagggcggcatgggcggcggcgcccgcgccggcggcggctacggccagcagggggatttcgcctccgccttctccgacgtgttcgaggatctgttcggcgacttcatggggggccgcggcggcgccccgcggagccgcgcgcaacgcgggtcggacctgcgctacaatctgcgcgtgacgctcgacgaggcctatcgcggcgtccagaagacgatcaacgtcccggcctcggtggcctgcgacgcctgcaagggcaccggcgccgaaggcggggccgaggccgtcacctgcccgacctgctcgggcatgggcaaggtgcgggcgcagcagggcttcttcaccgtggagcgcacctgcccgacctgtaacggcatggggcagatcgtgaagaacccgtgcaaggtctgccacggcgcgggacgggtcgagaaggaacggtcgctctcggtcaatatccccgcgggggtcgagaccggcacgcggatccggctggccggggagggcgaggccgggatgcggggcggcccctccggcgacctctacatcttcatcgaggtgcgcgaacatgcgctgttccagcgcgacggggtgcatctcttctgccgcgtgccggtctcgatcgcggccgcggccctcggcggcgaggtcgaggtgcccaccatcgacggcgggtcgagccgcgtgaagatcccggccggtagccagaccggcaagcagatgcgcctgcgcggcaaggggatgcccgcgctccgcggcggcggggcgggcgacatgctgatcgagctggcggtcgagaccccggtcaacctgaccgcccgccagaaggagctcctgcgcgagttcgagaagctctccgaggacaacaaccccgagggcaagagcttcttctcgaaggtgaagggcttctgggacggcatgaccggctga

SEQ ID NO: 117616 - protein, 382 aa, Rhodobacter sphaeroides 2.4.1
MAKRDYYEVLGVSRTASADELKKAYRTKAKELHPDRNADNPQAEAQFKEVNEAYDVLRDADKKAAYDRYGHAAFEGGMGGGARAGGGYGQQGDFASAFSDVFEDLFGDFMGGRGGAPRSRAQRGSDLRYNLRVTLDEAYRGVQKTINVPASVACDACKGTGAEGGAEAVTCPTCSGMGKVRAQQGFFTVERTCPTCNGMGQIVKNPCKVCHGAGRVEKERSLSVNIPAGVETGTRIRLAGEGEAGMRGGPSGDLYIFIEVREHALFQRDGVHLFCRVPVSIAAAALGGEVEVPTIDGGSSRVKIPAGSQTGKQMRLRGKGMPALRGGGAGDMLIELAVETPVNLTARQKELLREFEKLSEDNNPEGKSFFSKVKGFWDGMTG

SEQ ID NO: 117617 - DNA, 1146 bp, Carboxydothermus hydrogenoformans Z-2901
  CDS (1)..(1146): transl_table=11
ttgaagcgggattattacgaaattttaggggtggcaagaaatgccacccctgaagaaataaagaaagcttatcgaaaacttgcgcgcaaatatcacccggacgtgaataaagacgacccaaacgctgccgaaaaatttaaggaaattaacgaagcttatgaagttttatccgatccggaaaaaagggcccgctatgaccaatttggccatgcgggagttgacgggaattttgccggccaaggaggttttggtggcggggccggcattaattttgaagatatttttagcggttttggcggttttggcgacttatttgacatggtttttgggagcggcagaaaagcccggcagggtccggtacccggtgacgatatagaggccgttttagagctaactttagaagaagcggtctttgggggagaaaaagaattaagagttaccagaaccgagacctgcggtcactgccacggtaacggggccgaaccgggaacaccaatcatcacctgtcccacctgtcagggacgggggcagatccaccaggaagttaagaccctctttggtcgcatggtaagaagtcaggtctgctctacctgccggggtgaagggaagataccgaaaaccccttgtcgggaatgcggtgggagtggcttggtgcggaagacccggtcgataacggtaaaaattcctcccggcattgaccatggccataggcttagaattgccggagggggtgaagcgggtcgctttggtgggcctccaggagacctttatgtttatattaaaattaaaccgcacaagctgtttaagcgggaagatatccatttaaaattagagaaggaaatttcctttgttcaggcggcattgggagcaaaagtagaaataccaaccatcgatgggggtacggaaattttagaaattcccgaaggaacccagacgggtaccgtatttaccattaaaggaaaaggtgtaccggtggtaaatggctccggacggggaaatctttacgtaacggtcaaagtagttacccccaccaaacttacggaacggcaaaagcagcttttacgggagtttgaggagatatccaagcaaaaagaggaaacctttaaagaaaaatttaataagtttaaaaacaaatttgcgttataa

SEQ ID NO: 117618 - protein, 381 aa, Carboxydothermus hydrogenoformans Z-2901
MKRDYYEILGVARNATPEEIKKAYRKLARKYHPDVNKDDPNAAEKFKEINEAYEVLSDPEKRARYDQFGHAGVDGNFAGQGGFGGGAGINFEDIFSGFGGFGDLFDMVFGSGRKARQGPVPGDDIEAVLELTLEEAVFGGEKELRVTRTETCGHCHGNGAEPGTPIITCPTCQGRGQIHQEVKTLFGRMVRSQVCSTCRGEGKIPKTPCRECGGSGLVRKTRSITVKIPPGIDHGHRLRIAGGGEAGRFGGPPGDLYVYIKIKPHKLFKREDIHLKLEKEISFVQAALGAKVEIPTIDGGTEILEIPEGTQTGTVFTIKGKGVPVVNGSGRGNLYVTVKVVTPTKLTERQKQLLREFEEISKQKEETFKEKFNKFKNKFAL

SEQ ID NO: 117619 - DNA, 1137 bp, Synechococcus sp. CC9605
  CDS (1)..(1137): transl_table=11
atggccgacttctacgacctgctcggcgtcagccgggatgtggatcccgacagcctcaagcgggcttatcggcgcatggcgcgtcagtaccaccccgatatcaacaaggatccgggcgccgaagaccgtttcaaggaaatcggtcgcgcctatgaggtgctcagtgatccccagaccagggcccgttacgaccagttcggtgaagccggcctcggcggtgcggccggtgctcccgatatgggagacatgggcggattcgctgacctgttcgagacgtttttccagggcttcggtggacccgggggtgctggagctggtcggccgcggcgtcagggccctcagcagggggatgaccttcgttacgacctgacaattgatttcgagcaggcagtgttcggtcaggagcaggagatcaagatcccgcatctggagacctgcgacacctgcggcggcagcggtgccaaagcgggcagtgcgcccaccacctgcggcacctgcggcggtgccgggcaggtgcgccgtgccacccggactccctttggcagcttcacccaggtcgccgagtgccccaactgtggaggcacgggccaggtgatttccgatccttgcgggtcctgtggtggccagggtgtcaaacaggtgcgcaagaagctgcggatcaacattcctgccggggtggacaccggaacacggcttcgtgtgaccggtgaaggcaacgccggaccccggggaggcccatccggtgacctctacgtcttcctcaccgttcgcaatcatccgcgcttgcagcgggatggcctgaacatcttctcggaggtcaaggtcagctacctccaggcgattcttggcgacaccatcgaggtggagacggtggatggcagcaaggagctggacatccccgccggcacccagcccggcacggtgctcaccctgccgaacctgggcattcccaagctcgggaatccggtggcacggggtgatcagcgcgtgacggtcaccgtggatctgccgaagcggatcagtgatctggagcgggagctcctcgagcagttggcaggtcaccattccgcccgcggcaagcaacaccaccaccacaacagtggtctgttcgctcgtttgttcggtcagaagggatga

SEQ ID NO: 117620 - protein, 378 aa, Synechococcus sp. CC9605
MADFYDLLGVSRDVDPDSLKRAYRRMARQYHPDINKDPGAEDRFKEIGRAYEVLSDPQTRARYDQFGEAGLGGAAGAPDMGDMGGFADLFETFFQGFGGPGGAGAGRPRRQGPQQGDDLRYDLTIDFEQAVFGQEQEIKIPHLETCDTCGGSGAKAGSAPTTCGTCGGAGQVRRATRTPFGSFTQVAECPNCGGTGQVISDPCGSCGGQGVKQVRKKLRINIPAGVDTGTRLRVTGEGNAGPRGGPSGDLYVFLTVRNHPRLQRDGLNIFSEVKVSYLQAILGDTIEVETVDGSKELDIPAGTQPGTVLTLPNLGIPKLGNPVARGDQRVTVTVDLPKRISDLERELLEQLAGHHSARGKQHHHHNSGLFARLFGQKG

SEQ ID NO: 117621 - DNA, 1119 bp, Geobacter metallireducens GS-15; identical to SEQ ID NO: 63877
  CDS (1)..(1119): transl_table=11

SEQ ID NO: 117622 - protein, 372 aa, Geobacter metallireducens GS-15; identical to SEQ ID NO: 63878

SEQ ID NO: 117623 - DNA, 1128 bp, Desulfovibrio desulfuricans G20
  CDS (1)..(1128): transl_table=11
atgagccagcgtgactattacgaggtgctcggggtttcgcgggatgccgcagacgatgaaataaaacgtgcctaccgcaaaaaggccatggaatttcatcctgacagaaatcctgacaaccccgaagcggaagctaaattcaaggaagccgcggaagcatacgacgtgctgcgtgacgcagaaaagcgcgcacggtacgaccgcttcggccatgccggtgtaaacggcaacggctatggcggaggcggcggcttttccagcacggaagatatcttcgctcatttcggagatatattcggagaccttttcgggttcgccggcatgggcggtgcgcgcggtccgcgtccgcaggccggttccgatctgcgttacaatctgaatatttctttcagacaggcggcacggggcgacgaagtcaccctgcgcattcctaaaaatgtgacctgccccgactgttcgggcagcggcgcggcaccgggaacacagcccgaaacctgcccccagtgcggcggttcgggacaggtggtgcgccagcagggctttttccagatggccatgccctgcagtgcctgccgcggcgaaggacgtatagtgcgcaacccgtgtccgcgctgccgcggtgccgggcaggtgcaggacatccgtgagctttccgtacgcattcccgccggagtggataccggcaaccgtctgcgtctgcgcggcgaaggcgaacccggcgtgcacggggggccccccggcgacctgtatgtggtcatacgggtggacgacgacaaaaccttccgccgtcagggacaggaccttgtggtgcgcaaagagatttcctttgtgcaggccattctgggcgacaaggtggaagtgcccacgctggatgatcccgtgaccgtggatattccgcgcggcacccagagcggcgaagtgttccgcatcgccggcaaggggctgcctcatctcggcagcagccagacaggtgcgctgctggttgaggtcactgtgcgcattccttccagcgtcaatgacgagcaggaaaagctgctgcgcgaatttgagcggctggaagagaacagacccctgcgcaaggtcaagaatatgttcaaaaaggccggcaaggccatgggaatggactga

SEQ ID NO: 117624 - protein, 375 aa, Desulfovibrio desulfuricans G20
MSQRDYYEVLGVSRDAADDEIKRAYRKKAMEFHPDRNPDNPEAEAKFKEAAEAYDVLRDAEKRARYDRFGHAGVNGNGYGGGGGFSSTEDIFAHFGDIFGDLFGFAGMGGARGPRPQAGSDLRYNLNISFRQAARGDEVTLRIPKNVTCPDCSGSGAAPGTQPETCPQCGGSGQVVRQQGFFQMAMPCSACRGEGRIVRNPCPRCRGAGQVQDIRELSVRIPAGVDTGNRLRLRGEGEPGVHGGPPGDLYVVIRVDDDKTFRRQGQDLVVRKEISFVQAILGDKVEVPTLDDPVTVDIPRGTQSGEVFRIAGKGLPHLGSSQTGALLVEVTVRIPSSVNDEQEKLLREFERLEENRPLRKVKNMFKKAGKAMGMD

SEQ ID NO: 117625 - DNA, 1125 bp, Prochlorococcus marinus str. MIT 9312
  CDS (1)..(1125): transl_table=11
atggctgatttttaccaaatacttggagtttctcgagatgctgatgcggataccttaaaaagggcttatagaaaattagcaagacaatatcatcctgatgttaataaagaacctggtgctgaagataaatttaaagaaattggcaaggcttatgaagcattagctgatcctgaaactagagctagatatgatcagtttggagaggctggccttggaggcgcagctggaatgcctgatatgggcgatatgggtggttttgcagatttatttgaaaccttttttaatggctttggagggcaaactcctcaaggaggaagaactcaaagaagaggtcctcaacaaggagatgatttaagatatgaccttaatgttgattttaaagatgcaatatttggccaacaaagagaaattacaattcctcatcttgagacctgtgaagtctgtaggggaacaggtgccaaaccaggaaccggaccaaaaacttgctcaacttgtggaggaagtggacaagttagaagagctacgagaacaccatttggtaatttcacacaagtagctgaatgtccttcatgtaatggagctgggcaaataatcgcagatccatgtacaagttgcggtggtaatggagtaaagcaagtcagaaaaaaattacgaattaatattcctgcaggagttgatactggtactaaattaagagtttccggagagggaaatgttggtttgaaaggaggccctcctggagatctttatgtttttatcaaggttaagaatgattcaaaattgaaaagagatggtgttactatttactcagaaatagctgtgagttatttacaggctattttaggagatacagttgaaatcactacagttgatggcaatgttaatttaaaaattcccagtggtacgcaaccaaatacaactctttcacttgagaataaaggggtaccgagacttggtaatccagttgccagaggaaatcatgaagtattagtaaaggtaaaattgccaactcgcataactgacgaagaacgagagcttttagaaggtttagcttctcaatattcagataaaaatatcaattcgagtagtggactatttagtaaattatttggtaaagaatcgtaa

SEQ ID NO: 117626 - protein, 374 aa, Prochlorococcus marinus str. MIT 9312
MADFYQILGVSRDADADTLKRAYRKLARQYHPDVNKEPGAEDKFKEIGKAYEALADPETRARYDQFGEAGLGGAAGMPDMGDMGGFADLFETFFNGFGGQTPQGGRTQRRGPQQGDDLRYDLNVDFKDAIFGQQREITIPHLETCEVCRGTGAKPGTGPKTCSTCGGSGQVRRATRTPFGNFTQVAECPSCNGAGQIIADPCTSCGGNGVKQVRKKLRINIPAGVDTGTKLRVSGEGNVGLKGGPPGDLYVFIKVKNDSKLKRDGVTIYSEIAVSYLQAILGDTVEITTVDGNVNLKIPSGTQPNTTLSLENKGVPRLGNPVARGNHEVLVKVKLPTRITDEERELLEGLASQYSDKNINSSSGLFSKLFGKES

SEQ ID NO: 117627 - DNA, 1149 bp, Moorella thermoacetica ATCC 39073
  CDS (1)..(1149): transl_table=11
atggctaagcgcgattactacgaggtcctgggggtttcccgggacgcctcggaggcggagatcaagaaggcttaccgccagctggcgcgcaaataccacccggatatgaaccccggggataaagaggccgaagaaaagtttaaagaagttcaggaagcctacgaagtcctcagtaacgccgaaaagcgggcccgttacgaccagttcggccacgccggtaccgaggctggcggtgggcccggattcggcggttttgactttggcggcgccggggccgattttggcttcggcgatatctttgacatgttctttggtggaggtttcggcggtgcggcccggcgtcagggcccccagcgaggcgatgacctgcgcctggacctggagatctcctttgaggaagccgccttcggcgtagagaaggaggtaggcatcccccgccaggagaaatgtccggagtgtggcggtagcggggcggcgcccggcacccacccgaagacctgtcccacctgccacgggactggacagattcgtatcgcccagcggacgcccctgggccagttccagaccattcgcacctgccaccagtgccacggccaggggacgatcattgagacgccctgtcccaggtgtcgcggccggggcgtagtccagcgcacccgcaagatcagggtcaaaattcctcccggcgtggataccggcgcccggttacgcatggccggcgagggcgagagcggcctgcgcggcggcccgcccggggatctctatatctatataaacgtccggccccataagctcttccggcgggacggctacgacgttttctgcgaagtaccggtttccatggtccaggccgccctgggtgacagtatcaaagtacccaccctggacggcaaagaagagctgcatatcccgcccggtacccagagcggtaccagtttccgcctgaagggcaagggcataccccgcctaaacggagtcggccggggcgaccagcacgtccgcatccacgtcgagaccccgaccaacctcaacgaaaagcagaaagaattattgcgggaatttgcccggctctacggcagcgaaccccgtggcgccagggaacaggacaaaggctttttcagaaaggtaaaggacgcctttatgggttag

SEQ ID NO: 117628 - protein, 382 aa, Moorella thermoacetica ATCC 39073
MAKRDYYEVLGVSRDASEAEIKKAYRQLARKYHPDMNPGDKEAEEKFKEVQEAYEVLSNAEKRARYDQFGHAGTEAGGGPGFGGFDFGGAGADFGFGDIFDMFFGGGFGGAARRQGPQRGDDLRLDLEISFEEAAFGVEKEVGIPRQEKCPECGGSGAAPGTHPKTCPTCHGTGQIRIAQRTPLGQFQTIRTCHQCHGQGTIIETPCPRCRGRGVVQRTRKIRVKIPPGVDTGARLRMAGEGESGLRGGPPGDLYIYINVRPHKLFRRDGYDVFCEVPVSMVQAALGDSIKVPTLDGKEELHIPPGTQSGTSFRLKGKGIPRLNGVGRGDQHVRIHVETPTNLNEKQKELLREFARLYGSEPRGAREQDKGFFRKVKDAFMG

SEQ ID NO: 117629 - DNA, 1131 bp, Burkholderia thailandensis E264
  CDS (1)..(1131): transl_table=11
atggcgaaacgggattactacgaggttctgggcgtcgcgaagaatgcgagcgacgacgaaatcaagaaggcatatcgcaagctcgcgatgaagtaccaccccgaccgcaatccggacagcaaggatgcggaagagcatttcaaggaagcgaaggaagcctatgaaatgctgtcggacagccagaagcgggcggcgtacgaccagtacggccatgcgggcgtcgatccgaacatgggggcggccggcgcgcaaggtttcggcggcttcgccgatgcgttcggcgacatcttcggcgacatcttcggccaggcggcggggggcggccgcgggcgcggcggcccgcaggtgtaccgcggcgcggacctgcgctacagcatggagatcacgctcgagcaggcggcgcacgggtacgacacgcagatccgcgtgccgagctgggcgtcatgcggtatctgccacggctcgggcgcgaagccgggcacgaagcccgaaacctgcccgacctgtcacggccagggcacggtgcggatgtcgcagggcttcttcagcattcagcagacctgcccgaagtgccacggcaccggcacctacatcccggagccgtgcgtgcactgccacggctcgggcaaggtgaaggaaaccaagacgctcgaagtgaagattccggcgggcatcgacgacggcatgcgcatccgctcggccggcaacggcgagccgggcatcaacggcgggccgtccggcgacctgtacgtcgagatccacatcaagccgcacccggtgttcgagcgcgacggcgacgatctgcactgccagatgccgatcccgttcacgacggcggcgctcggcggcgagatcgaagtgccgacgctcgccggacgcgcatcgttcacggtggcggaaggcacgcagtcgggcaagacgttccgtctgcgcggcaagggcatcaaggggctgcgttcgagcatcgcgggcgatctgtatgtgcatgtgcaggtcgagacgcccgtgaagctcaccgatcagcagcgcgatctgctcaagcagttcgagaagtcgctcgcggaaggcggcccgcgtcacagcccgcagagcaagagctggttcgatcgcgtgaagagcttcttcgagtga

SEQ ID NO: 117630 - protein, 376 aa, Burkholderia thailandensis E264
MAKRDYYEVLGVAKNASDDEIKKAYRKLAMKYHPDRNPDSKDAEEHFKEAKEAYEMLSDSQKRAAYDQYGHAGVDPNMGAAGAQGFGGFADAFGDIFGDIFGQAAGGGRGRGGPQVYRGADLRYSMEITLEQAAHGYDTQIRVPSWASCGICHGSGAKPGTKPETCPTCHGQGTVRMSQGFFSIQQTCPKCHGTGTYIPEPCVHCHGSGKVKETKTLEVKIPAGIDDGMRIRSAGNGEPGINGGPSGDLYVEIHIKPHPVFERDGDDLHCQMPIPFTTAALGGEIEVPTLAGRASFTVAEGTQSGKTFRLRGKGIKGLRSSIAGDLYVHVQVETPVKLTDQQRDLLKQFEKSLAEGGPRHSPQSKSWFDRVKSFFE

SEQ ID NO: 117631 - DNA, 1122 bp, Syntrophus aciditrophicus SB
  CDS (1)..(1122): transl_table=11
gtgcgtgactattacgagatattgggtgtcagcagaaaggcctcacccgaagagatcaaaaaggcctatcggcaactggccctgaaataccacccggaccgcaatcccggggacaaagaagcggaagcccgcttccgtgaagccgctgaagcctatgaagcgctgagcaacccggataaacgaagcatttacgaccagttcggccacgaaggtcttcggcgcagcggctatcagggcttcaccaggcctgaggatatcttccgggctttcggcgggatattcgacgaatttctgaatttctccttcgggaggagggggcagcccgaggaagaggccggcgaggatctcgtcgcctccgtaaccatcaccttggaagaagccgcccatggaaaagaggtcgggctggagctcccccggaccaagatctgtccgaactgcaaaggctcaggcgcaaagccgggtaccggctggatcacatgccccgtctgtcatggcagcggtacactctcccatggcggccacctgttccggttttccgtcacctgtccggagtgtaagggtcagggccagcgcctggaatccccttgtggcagctgtcacggcagtggaaaaattcaggcccccaccacgatttctctgaaaataccgccgggggtccggagcggttcccagctctttcttgccggcgcgggacagcccggccgacggggaggaccggccggcaatctctacgtaaaagttgcagttgaaggccatcccctgtttgagcgggacggcgacgatcttctctgccagctcccgatccgtatgacccaggcggccctgggcgcaaagatttccgttccgacgctctggggagacatcaatctgacgattcctccagggactcagtatggagatatcttcaaaattcccggcaaggggatgccgatccttcaaagcgccggccgcggggatctaattgtccggatccgcgtcatcatcccccggaaactcactctttttcaaaagcgcctcctcaggcaattcgaccggatatccggacatggaaaaaatccttctcccggttttttccagaaactgtacgggcggttccgcatatgccgcatatttgatccatga

SEQ ID NO: 117632 - protein, 373 aa, Syntrophus aciditrophicus SB
MRDYYEILGVSRKASPEEIKKAYRQLALKYHPDRNPGDKEAEARFREAAEAYEALSNPDKRSIYDQFGHEGLRRSGYQGFTRPEDIFRAFGGIFDEFLNFSFGRRGQPEEEAGEDLVASVTITLEEAAHGKEVGLELPRTKICPNCKGSGAKPGTGWITCPVCHGSGTLSHGGHLFRFSVTCPECKGQGQRLESPCGSCHGSGKIQAPTTISLKIPPGVRSGSQLFLAGAGQPGRRGGPAGNLYVKVAVEGHPLFERDGDDLLCQLPIRMTQAALGAKISVPTLWGDINLTIPPGTQYGDIFKIPGKGMPILQSAGRGDLIVRIRVIIPRKLTLFQKRLLRQFDRISGHGKNPSPGFFQKLYGRFRICRIFDP

SEQ ID NO: 117633 - DNA, 1071 bp, Syntrophus aciditrophicus SB
  CDS (1)..(1071): transl_table=11
ttgagcacaatggtaaaaagttgttattatgatgtcctgggaacaactcgggatgccacagaagaagaaattaaaaaaagctatcgcaaaatggccatgagataccacccggaccgcaatccgggggacaaagaggctgaagaaaaattcaaacaggcagccgaagcctatgaagtgctgagcgacagaaaaaagcgggaaatatacgatcgatatggacacgatggtctcagcaacaccggatttcagggattttccggatttgatgatattttttcaagttttggcgatatttttgaagacatcttcgggttcagcacatcccgttcccgaacagcgggacgggccggagctgaccttcgttatgatttgactttgccatttctggaagcagtctttggaaccgccaaggatctcaatataagcaaatcggctcaatgcttcgaatgtcacggttcaggagctgatcccggatcggatgtcaagacctgcagttattgcggcggacgtggacaggttgttcaatccagcggattcttcagcattcgaaccacgtgtcccgagtgccacggttatggcaaaattattgttaagcgctgcaagacctgccatggaacgggcagaacaaccattgagaaaaccgttcatgtcaagataccggccggcgtcgaaacgagttcccggctgcggcttcgcggagaaggcgaagatggagaattcggaggaccgaatggcgatctgtatgttttcctgactgtcgaccctcatgaattctttgagagaagaggaaacgacgtccactgcaggatcccgatttcttttgtgcaggctgcactgggagataaaatcgaggtgccgaccctgatgggaacagaaaagttgaaaattcccaggggaacgcaaaacgcaacacaattccgtctgaaaggtaaaggcatccctcacatcaggggatttggaagtggagaccagatcatcgaaatcacggtttccgtcccgactgatttaacgcggaaacaggaagagcttctgcttgaattcgcaagactttgcggtggacaggggaggtag

SEQ ID NO: 117634 - protein, 356 aa, Syntrophus aciditrophicus SB
MSTMVKSCYYDVLGTTRDATEEEIKKSYRKMAMRYHPDRNPGDKEAEEKFKQAAEAYEVLSDRKKREIYDRYGHDGLSNTGFQGFSGFDDIFSSFGDIFEDIFGFSTSRSRTAGRAGADLRYDLTLPFLEAVFGTAKDLNISKSAQCFECHGSGADPGSDVKTCSYCGGRGQVVQSSGFFSIRTTCPECHGYGKIIVKRCKTCHGTGRTTIEKTVHVKIPAGVETSSRLRLRGEGEDGEFGGPNGDLYVFLTVDPHEFFERRGNDVHCRIPISFVQAALGDKIEVPTLMGTEKLKIPRGTQNATQFRLKGKGIPHIRGFGSGDQIIEITVSVPTDLTRKQEELLLEFARLCGGQGR

SEQ ID NO: 117635 - DNA, 1134 bp, Syntrophus aciditrophicus SB
  CDS (1)..(1134): transl_table=11
atggaaacatgctggataagatcaataaaatcgtcgcgggaggaaacgttcaaaagtctgatgatcacaaggcgtgactattataagatcctgggcgtagagaaaagcgcctcgactgaggaaataaaaaagagctatcgacagctcgccatgcagcaccaccctgatcggaatccgggcgacaaggaggctgaggagcgattcaaggaggcagccgaggcctacgaggtcctaagcgatcctgagaaaaggggcatctacgaccggtacggccattcggggttaaacggggccggctaccgggggttcacggatttcgaagacatctttgccagtttcggagacatcttcggggacttcttcggcggccgtgcggggcgaacccgcgcccgatcaagcgtcagggcgggggcggacctgcggtatgacctgcgcgttcccttcctggatgccgcgcttggcacaacgaccgaaatcagaattgaaaagtccattcgctgccctacctgcggcggttcccgttgcgcaccgggaacttcgccgcagctctgcgatctttgcggggggcgcggtcaggtgacccagtccaagggcttcttcagcatccgttcgacctgtccccagtgtcacggtatgggcagcgtaatcgcgagtctctgtcggaaatgttccggtcggggaaaagtccgatcgagcaagaccgtccagctcaagataccggcgggcgtggaaacgggttccaaactcagagtaaggggggaaggagaggaaggagtatccggtggccccagcggcgatctctacgtcttcatcacagtggagccgcacgatctgtttgaaagaaacgggaacgacatccactgctgcgttctcatcaccttcgttcaggccgccttgggaggcgctgtggaggtgcctaccctgcgaggtagggagtctttgaagatccctccgggaacacagtcgggaagccgctttcgcctccgaggcaagggaattgcgagcctgcagggagacggttacggcgatcaggtgatcgaaaccgtggtgactgtgccgacgaacctgacgaggcgacaagaggaactgctaaaggaatttgagaggttggaaaacgaaaaaagggggtcttga

SEQ ID NO: 117636 - protein, 377 aa, Syntrophus aciditrophicus SB
METCWIRSIKSSREETFKSLMITRRDYYKILGVEKSASTEEIKKSYRQLAMQHHPDRNPGDKEAEERFKEAAEAYEVLSDPEKRGIYDRYGHSGLNGAGYRGFTDFEDIFASFGDIFGDFFGGRAGRTRARSSVRAGADLRYDLRVPFLDAALGTTTEIRIEKSIRCPTCGGSRCAPGTSPQLCDLCGGRGQVTQSKGFFSIRSTCPQCHGMGSVIASLCRKCSGRGKVRSSKTVQLKIPAGVETGSKLRVRGEGEEGVSGGPSGDLYVFITVEPHDLFERNGNDIHCCVLITFVQAALGGAVEVPTLRGRESLKIPPGTQSGSRFRLRGKGIASLQGDGYGDQVIETVVTVPTNLTRRQEELLKEFERLENEKRGS

SEQ ID NO: 117637 - DNA, 1140 bp, Frankia sp. CcI3
  CDS (1)..(1140): transl_table=11
atggcagtggattattacgccgttctgggcgtacgccgggaagcgtcgaacgacgagatcaagcgggcctaccgcaaactggcccgtgagctgcatccggatgtcaatccagatccggatgcacagcagcgcttccggggcgtcacggccgcgtacgaggtgctctccgacccggagaagcgccagatcgtcgacctgggcggcgatccgctcgcgcccggtggcagcggcggtggcggttcgccgttcggcgccggtttcggcggcctcggtgacatcatggacgccttcttcggcggcgggtcgagccgtgggccccggtcccgggtccggcgcggcaacgacgcgctgctgcgcatcgagctcgacctgtccgagaccgcgttcggcgccacgcgcgagatcaccgtggacacggcggcggtgtgctcgacgtgtaccggtgccggtgcggctcccggcacgcacccgtcgacctgcggcacctgcggcgggcggggcgaggtccagcaggtcacccgttccttcctcggccagatggtgacctcccggccctgtccgcggtgttcgggtaccggcaccgtgatcgagcatccctgccgggactgcggcggcgacggcagggtgcgcaagcgccggacgctcactgtgaagatcccctccggggtcgaggacggcatgcgcatccggctgtcgggcgagggcgaggtcgggcccggcggtgggccgcccggtgacctttacgtcgaggtctccgagaagcagcacccggttttcacccgggagggcgacgatctgcactgtgagctgccgctgccgatgacctcggcggcgctcggcacctccgccacgctggagaccctcgacggcaccgagaccatcgccgtgaagcccggcacccagcccggtgaggtcatcaagctcgccggccgcggggttccgcatctgcgggccgccgggcgcggtcatctgcacatccacatcaacgtcgagactccgacgaagctggacggcgagcaggagcggctgctacgagagctggcgaagctgcgcgacgaggaggcaccggccgtcgtgggcggatccgccggcggcgcggcggggctattccggcggcggggcacgcgccgcggccgttag

SEQ ID NO: 117638 - protein, 379 aa, Frankia sp. CcI3
MAVDYYAVLGVRREASNDEIKRAYRKLARELHPDVNPDPDAQQRFRGVTAAYEVLSDPEKRQIVDLGGDPLAPGGSGGGGSPFGAGFGGLGDIMDAFFGGGSSRGPRSRVRRGNDALLRIELDLSETAFGATREITVDTAAVCSTCTGAGAAPGTHPSTCGTCGGRGEVQQVTRSFLGQMVTSRPCPRCSGTGTVIEHPCRDCGGDGRVRKRRTLTVKIPSGVEDGMRIRLSGEGEVGPGGGPPGDLYVEVSEKQHPVFTREGDDLHCELPLPMTSAALGTSATLETLDGTETIAVKPGTQPGEVIKLAGRGVPHLRAAGRGHLHIHINVETPTKLDGEQERLLRELAKLRDEEAPAVVGGSAGGAAGLFRRRGTRRGR

SEQ ID NO: 117639 - DNA, 1149 bp, Anaplasma phagocytophilum HZ; identical to SEQ ID NO: 63879
  CDS (1)..(1149): transl_table=11

SEQ ID NO: 117640 - protein, 382 aa, Anaplasma phagocytophilum HZ; identical to SEQ ID NO: 63880

SEQ ID NO: 117641 - DNA, 1143 bp, Ehrlichia chaffeensis str. Arkansas
  CDS (1)..(1143): transl_table=11
atgagtaagagtgactattatgatctattaggtgtaagtaaaagtgcaacaccagaagaaataaaaaaagcttatagaaaaatggcactaaagtaccatcctgataaaaatcctggcaataaagaagcagaagaaaagtttaaagaattatcagaagcttatgatgttctcatagatcaagataagagagcagcatatgacaaatatggacacaatgcttttgatagctctggaagaggaggatttgattttaatagtggtttttctggtgatttttctgacatatttaatgatctttttggtggaggatttagaggaggaagaggatcatccagaagacatgatagcggagctgtaggatcagatttaagatttgatatagaaataacactagaggattcatttaacggtaagaaagtacctataagttatgttacttacgtaaaatgttcaagttgtagcggttctggaagtgaaggatcagcaaaatccgtacagtgtagtacatgtcatggtgtaggtaatgttagaacacaacaagggttttttacaatagaaagaacatgtcatgtatgtaatggagaaggagaaataatacaaaataaatgtaaaaaatgttctggaagtggtcgtgtaagagatgaagtaaacttacttgttacaattccaaaaggaatagaaagtggtaataaaattaggttaaatggaaaaggagaagcaggatataggggtgcaagaagtggagatttgtatgtttattctaatatacaaaaacataaattctttacacgcaatggatctgacctttattgcaatgtacccataaaaatgacacttgctgcactaggaggacatatagaaatgccatctatagatggaacatggacaaaagtgaaagtcccagaaggatcacaaaacggagataaattaagacttaaagaaaaaggaatgccaattataaattcatcaaaaagaggagatatgtacatacagataactgtagaaactcctgtgaagttaactaaaaagcaaaaagaattattacaaaagtttgatgatgaacctaacgtagattgtaatcctcagtcgactggcttttttcagaaagtaaaaagtttttggaaagatatcaggtcaaactga

SEQ ID NO: 117642 - protein, 380 aa, Ehrlichia chaffeensis str. Arkansas
MSKSDYYDLLGVSKSATPEEIKKAYRKMALKYHPDKNPGNKEAEEKFKELSEAYDVLIDQDKRAAYDKYGHNAFDSSGRGGFDFNSGFSGDFSDIFNDLFGGGFRGGRGSSRRHDSGAVGSDLRFDIEITLEDSFNGKKVPISYVTYVKCSSCSGSGSEGSAKSVQCSTCHGVGNVRTQQGFFTIERTCHVCNGEGEIIQNKCKKCSGSGRVRDEVNLLVTIPKGIESGNKIRLNGKGEAGYRGARSGDLYVYSNIQKHKFFTRNGSDLYCNVPIKMTLAALGGHIEMPSIDGTWTKVKVPEGSQNGDKLRLKEKGMPIINSSKRGDMYIQITVETPVKLTKKQKELLQKFDDEPNVDCNPQSTGFFQKVKSFWKDIRSN

SEQ ID NO: 117643 - DNA, 1134 bp, Desulfitobacterium hafniense Y51; identical to SEQ ID NO: 63881
  CDS (1)..(1134): transl_table=11

SEQ ID NO: 117644 - protein, 377 aa, Desulfitobacterium hafniense Y51; identical to SEQ ID NO: 63882

SEQ ID NO: 117645 - DNA, 1125 bp, Saccharophagus degradans 2-40
  CDS (1)..(1125): transl_table=11
atgtctaaacgcgattactacgaagtgctgggcgtctctaaagatgtgagtccgcaagagttaaagaaagcttaccgcaaggtggctatgaagtatcacccggatcgcaactcggatgatcccaactctgaagataaattcaaagaggcaagtgaagcctacgaagtgctttctgatgcgcaaaaacgtgcagcttatgatcaatatggtcatgcaggcgtagacggtaatgcaggcatgggcggcggcgctggtgcagggaatttctcagatatatttggcgatgtattcggcgatatattcggtggcggcggtggccgtcgtcgcggtgggccatcgcgcggctccgatttgcgttacaccttagatttaagcttagaagatgccgtaaagggtacaacggttaaaatccgcgtgcccactttggttagttgtaagccctgtggtggctcgggtgccaaacccggtactagcccgcaaacatgtactacctgtggtggtcatgggcaggtgcgtatgcaacaaggcttcttctcggtacaacaaacatgccctaactgtcgcggtcagggcaaaatgattaccgacccgtgtaaagagtgtcacggtcacggtcgcgttgaagaaactaagaccctttctgttaaggtgccacccggtgtggataccggcgatagaatacgtttggcaggtgaaggcgaagcgggtgccgatggcggcccagcaggtgatttatatgtacaggtagacgtgcaagatcacgcattcttccagcgcgaagggcgcaacttgtattgtgaagtgcccattagccttttcgatgcctgtttaggtggtgagctagaagtgcccacgctagacggtcgcgttaaacttaaaattccggcagaaactcaaaccggcaagttattccgtttacgcggtaaaggggtaacacctgtacgcggcggcgcagcaggggatttgatgtgccgagtaattatagaaacaccggttaacctcactaaaaagcaaaaagagttactggaagagcttaaagccagcatgaaaggtgaaaaaaattcgcccaagcaagagagttggtttgaaggtatgaaaaacttttttggtgatttgaaaatgtaa

SEQ ID NO: 117646 - protein, 374 aa, Saccharophagus degradans 2-40
MSKRDYYEVLGVSKDVSPQELKKAYRKVAMKYHPDRNSDDPNSEDKFKEASEAYEVLSDAQKRAAYDQYGHAGVDGNAGMGGGAGAGNFSDIFGDVFGDIFGGGGGRRRGGPSRGSDLRYTLDLSLEDAVKGTTVKIRVPTLVSCKPCGGSGAKPGTSPQTCTTCGGHGQVRMQQGFFSVQQTCPNCRGQGKMITDPCKECHGHGRVEETKTLSVKVPPGVDTGDRIRLAGEGEAGADGGPAGDLYVQVDVQDHAFFQREGRNLYCEVPISLFDACLGGELEVPTLDGRVKLKIPAETQTGKLFRLRGKGVTPVRGGAAGDLMCRVIIETPVNLTKKQKELLEELKASMKGEKNSPKQESWFEGMKNFFGDLKM

SEQ ID NO: 117647 - DNA, 1143 bp, Burkholderia xenovorans LB400
  CDS (1)..(1143): transl_table=11
atggcgaaacgggattactacgaggttctgggcgtcgcaaagaacgcgagcgacgacgaaatcaagaaggcttatcgcaagctggcgatgaagcaccaccctgaccgcaatccgggcaacaaggatgcggaagggcatttcaaggaggtgaaggaagcctatgaaatgctctcggactcgcaaaagcgtgccgcgtacgatcagtacggccacgcgggtgtcgatccgaacatgggcggtgccggcgcacaaggttttggtggttttgccgatgcattcggcgatattttcggcgacatcttcggccaggcggccggtggcgccgcacgcggcggtggcggccgcgcgggcccgcaggtgtatcgcggcgccgatctgcgctacagcatggaaatcacgctggaacaggccgcgcacggctacgacacgcagattcgcgtgccgagctgggtgtcgtgcgaggtctgccacggttcgggcgccaagcccggcaccaagccggaaacctgcccgacctgtagcggttcgggttcggtgcggatgtcgcagggtttcttcagcatccagcaaacctgcccgaagtgccacggcaccggcacctacattcccgacccgtgcggccattgccacggtgccggcaaggtgaaggaaaccaagacgctggaagtgaagatcccggcaggtatcgacgacggcatgcggatccgttcggccggcaacggcgagccgggtatcaacggcgggccgtcgggcgatctgtacgtcgagattcacatcaagcagcattcggtgttcgagcgcgacggcgacgatctgcactgccagatgccgattccgttcaccactgcggcactgggcggcgagatcgaagtgccgacactcgcgggccgcgccagctttaccgtgccggaaggtacacaatcgggcaagacgttccgtctgcgtggcaagggcatcaaggggctgcgttcgagtattgccggcgatctgtacgtgcatgtgcaggtcgaaacgccggtcaagctcaccgagccgcagcgcgatctgctcaagcagttcgaaaaggcgctcgtcgagggcggctcgcggcatagtccgcaaagcaaaagctggttcgaccgggtgaagagcttcttcgattaa

SEQ ID NO: 117648 - protein, 380 aa, Burkholderia xenovorans LB400
MAKRDYYEVLGVAKNASDDEIKKAYRKLAMKHHPDRNPGNKDAEGHFKEVKEAYEMLSDSQKRAAYDQYGHAGVDPNMGGAGAQGFGGFADAFGDIFGDIFGQAAGGAARGGGGRAGPQVYRGADLRYSMEITLEQAAHGYDTQIRVPSWVSCEVCHGSGAKPGTKPETCPTCSGSGSVRMSQGFFSIQQTCPKCHGTGTYIPDPCGHCHGAGKVKETKTLEVKIPAGIDDGMRIRSAGNGEPGINGGPSGDLYVEIHIKQHSVFERDGDDLHCQMPIPFTTAALGGEIEVPTLAGRASFTVPEGTQSGKTFRLRGKGIKGLRSSIAGDLYVHVQVETPVKLTEPQRDLLKQFEKALVEGGSRHSPQSKSWFDRVKSFFD

SEQ ID NO: 117649 - DNA, 1191 bp, Methanococcoides burtonii DSM 6242
  CDS (1)..(1191): transl_table=11
atgtcgaccacgcgagattattatgaaatacttggtgtatcgaaagatgcatctgatactgagttgaaaaaagcttaccgcaaacttgcgatgaaatttcatcctgacaagaacaaagaagcggatgctgaagagaagttcaaggagatctccgaagcgtatgctgtcctttcagatgctgagaaaaaggcgcagtatgatcgttttggacatgcgggtatcgatggtcgatacagtactgaagacatttttagaaatgctgattttggcgattttggtgaccttggtgatattttcggcagtatttttggtggcggtggcggcttcggcggttttggtggcggaggacgccgcaggcaggggcctacaagaggctcggacctgaggtatgaccttggcgtaacgctggaacaggctgctttcggagaaaaagtgcatataaatgtcccacgtgcagagaattgtgaaacctgtgggggaaccggtgcaaaagaaggcacaagtcctaaaacatgtgctacatgtcgtggcagtggccaggtaacccatgcaagaagaacaccgcttggcaacttcatgaccacaaccacttgtgatgcttgtcatggaaagggtcaggtaattgaatctccctgtcctgtctgtagaggttcaggcaagcaaaagaaagtgcgcaaaatgggtgtctcgattccaaagggcgctgatacaggtcttcgactgaagatgtctggagaaggcgaagctggtagccctggtgcaccatccggtgatctctatattgtcatccatgtcaaacaacacgatgaattcgagcgtattggcgatgatattgtttatgggataccaatatcattctcacaggcagcgttgggcgctgagataaaagtaccgacccttcatgggaaagtgaagatgaagatcaagccaggcactcagacccattccatattacgcttaaagggtaagggtatgcctcgccttcacggacatggtcaaggcgaccaacttgtgaaagtgatcgttgaaacgcctacggaccttactggtaaacagaaagaactacttgatgaattcgataggctcagcactggtaattctaaaggttctaagggcaagggtttcttcgataaggtaaaggacacatttgaaagtgctatctctaccatatctcctggtactgttgaataa

SEQ ID NO: 117650 - protein, 396 aa, Methanococcoides burtonii DSM 6242
MSTTRDYYEILGVSKDASDTELKKAYRKLAMKFHPDKNKEADAEEKFKEISEAYAVLSDAEKKAQYDRFGHAGIDGRYSTEDIFRNADFGDFGDLGDIFGSIFGGGGGFGGFGGGGRRRQGPTRGSDLRYDLGVTLEQAAFGEKVHINVPRAENCETCGGTGAKEGTSPKTCATCRGSGQVTHARRTPLGNFMTTTTCDACHGKGQVIESPCPVCRGSGKQKKVRKMGVSIPKGADTGLRLKMSGEGEAGSPGAPSGDLYIVIHVKQHDEFERIGDDIVYGIPISFSQAALGAEIKVPTLHGKVKMKIKPGTQTHSILRLKGKGMPRLHGHGQGDQLVKVIVETPTDLTGKQKELLDEFDRLSTGNSKGSKGKGFFDKVKDTFESAISTISPGTVE

SEQ ID NO: 117651 - DNA, 1140 bp, Ralstonia metallidurans CH34
  CDS (1)..(1140): transl_table=11
atggcaaaacgtgactactacgaagtgctcggggtaggcaagaacgcgagcgacgacgagatcaagaaggcttatcgcaagctcgcgatgaagcaccatccggaccgcaatccggataacaaggaagccgaggagaaattcaaggaggtcaaggaggcctacgagatgctctccgaccccgagaagaaggcggcttacgatcaatacggccacgctggcgtggacccgaacatggccggtggattcggcggcggcgggtttggcggcggtggcttcgcggaagcgttcggcgatatcttcggcgacatcttcggccaggcagccggcggcggacgtcgtggcggcggcccgcaggcctaccgtggcgccgacctgcgctacagcatggagatctcgctggagcaggccgcgcatggccacgaggcgcagatccgcgtgccgcactgggacgattgcgaacactgccacggcaatggcgccgagccgggttcgtcggtcgaaacctgcccgacctgtaatggcgtgggccaggtgcgtgtgtcgcagggcttcttcacgatgcagcagacctgcccgaagtgccacggcagcggcaagttcatcccgaagccgtgcaccaagtgccacggtcagggcaagctcaagtcgcagaagacgctcgaggtcaagattccggccggtatcgatgaagggatgcgtatccgttcgtcgggcaacggcgagccgggcatcaacggtggcccgccgggcgatctctacgtcgaggtgcatatcaagcagcacccggtgttcgagcgcgacggcgacgacctgcactgccagatgccgatctcgttcgctacggcggcgctgggcggcgatatcgaagtgccgacgctgggcggccgggccagtttcccggtgccggaaggcacccaggccggcaagacgttccgcctgcgcggcaagggcatcaagggtgtgcgctcgggatatccgggcgacctctatgtgcatgtgaacgtggagacgccggtcaagctgaccgaggcccagaaggacatactgcgtcagttcgaccgctcggtgcacgagggcggttcgcgtcacagcccgcaggagcagtcctggctcgacaaggtgaagagcttctttagctga

SEQ ID NO: 117652 - protein, 379 aa, Ralstonia metallidurans CH34
MAKRDYYEVLGVGKNASDDEIKKAYRKLAMKHHPDRNPDNKEAEEKFKEVKEAYEMLSDPEKKAAYDQYGHAGVDPNMAGGFGGGGFGGGGFAEAFGDIFGDIFGQAAGGGRRGGGPQAYRGADLRYSMEISLEQAAHGHEAQIRVPHWDDCEHCHGNGAEPGSSVETCPTCNGVGQVRVSQGFFTMQQTCPKCHGSGKFIPKPCTKCHGQGKLKSQKTLEVKIPAGIDEGMRIRSSGNGEPGINGGPPGDLYVEVHIKQHPVFERDGDDLHCQMPISFATAALGGDIEVPTLGGRASFPVPEGTQAGKTFRLRGKGIKGVRSGYPGDLYVHVNVETPVKLTEAQKDILRQFDRSVHEGGSRHSPQEQSWLDKVKSFFS

SEQ ID NO: 117653 - DNA, 1206 bp, Acidobacteria bacterium Ellin345
  CDS (1)..(1206): transl_table=11
atggcaacacagaccaaagattattacggcgcgttaggggttaagaagaatgcttcggcggaggagatccgcaaggcgttccgcaaacttgcgcgcaaatatcacccggacgtgaaccccggggacaagaaggccgaagacaagttcaaggaaatctccgaggcgaacgaagtcctgagcgatccaaagaagcggaagatttacgaccagctcgggttctattcggacaacattgatccggctgcggccgaggcgtatgcgcgtaacggcgcgacgggcgcgggtggatttggcggttacgatccgcgggccgcgcagggcgggcaggacattccgttcgacttcagtggatttgatttttcgcaggaagcgggcgaaccgtccggcggcggcggcttccgcgatatcttctcttccctatttggcggagggcgcggtggacacgaggagcgtccgcggccgcaggcaggaaccgaccttgagtaccaggtgaatgtgcccttctgggatgcgatccgcgggacgacggtgaagctgaacatccagcggcgcgaagtttgttcgaactgccatggcgaaggcgaaatcggcgggacgcatacgtgtccgcaatgccatggcaagggcaagatcgagacgggcggcgggccgatgaagttcaacgtcacgtgtccgacgtgccacggcaccggcaaggcgcgaacccagtgcccggtgtgccatggcgaaggcgcgatcacgcgcaacgagccgctggaattcaagatcaaggccggtacgcgcgatggtcagcgcattcgtcttgcgggcagagggaatgccggcacgatgggtggcgcaagcggcgatctgtacatcattgtgaaggccggggagcatccggtattcaggcgcgagggcgatgacgtctacgtgacggtgccggtgtcggcggtggaagcggcgctaggaacgaagatcgaagtgccgacgattgatggacgcgcactgctgaagattccgccgggaacgaacagcggacagaagctgcggctgcgcgaaaaaggcgttccgaacgctgccgacggaacgaagcgcggcgatgagattgtcgaggtgaagctcatcgtgccgaaggtgagcgatgagcgctcgaaggagattctgcgcgagttgcagaagctgaatccggaggatccgcgggaagagttgtggagacaggtgtaa

SEQ ID NO: 117654 - protein, 401 aa, Acidobacteria bacterium Ellin345
MATQTKDYYGALGVKKNASAEEIRKAFRKLARKYHPDVNPGDKKAEDKFKEISEANEVLSDPKKRKIYDQLGFYSDNIDPAAAEAYARNGATGAGGFGGYDPRAAQGGQDIPFDFSGFDFSQEAGEPSGGGGFRDIFSSLFGGGRGGHEERPRPQAGTDLEYQVNVPFWDAIRGTTVKLNIQRREVCSNCHGEGEIGGTHTCPQCHGKGKIETGGGPMKFNVTCPTCHGTGKARTQCPVCHGEGAITRNEPLEFKIKAGTRDGQRIRLAGRGNAGTMGGASGDLYIIVKAGEHPVFRREGDDVYVTVPVSAVEAALGTKIEVPTIDGRALLKIPPGTNSGQKLRLREKGVPNAADGTKRGDEIVEVKLIVPKVSDERSKEILRELQKLNPEDPREELWRQV

SEQ ID NO: 117655 - DNA, 1137 bp, Acidobacteria bacterium Ellin345
  CDS (1)..(1137): transl_table=11
ttgacgaggatggcatctacggctaccaacgcgaaacgcgactactacgaggttctccaggtcactcgcaccgccactgaccaggagatcaagagctcttatcgtaagctcgctctccagtttcaccccgaccgcaatcccgacaacaaggacgcggaagagaagttcaaggagtgcagcgaagcctacggcgtgctctccgactccgagaagcgcgctgcgtacgatcgcttcggacacgcgggcctcggcggcaatggtggctccggcggcttcgatccgaacatggtggacttcagcgagatcttcaccgacatgttcggtatgggcgatctcttcggccgcggccgtggacgctcacgcgcccagcgcggcgccgatctccgcgaagacatcaccctagaattcgagcaagcggtcttcggcatcgagaccgagtctcgcgtccgtcgccacgaaacctgcgaaacttgtcacggtagcggcgccgctcccggcaaagctcccgtcagctgccgcaagtgcggtggccgcggacaggagcgcttccagcaaggcttcttcagtgtctcgcgcacttgtggcacctgcggcggtctcggccaggtcatcaccgatccctgtgccggctgtcgcggacaaggcgccgtcgttcgcgagcgcaccatcgccgtcaaggtccccgccggcgtcgaagacggtactcgcatccgctacaacggacaaggcgaagccggaactcacggcggccccgcgggcgatctctacattgtcctgcacgtgaaagagcacaagttcttcgagcgcgagggcaaagacctcttctgcaccgtccccgtctcgttcgcgcaagccgcgctcggtaccgacatcatgatccccaccctcgagggcgagcacaagctccacatccccgaaggcacgcaaaccggcacgcaaatcaagctgcgcggcaagggcgtccccgtcctcaacgggcacggcaaaggcgatatcttcgtcgagatcaaagtccaaacccccagtaagctcaacaagcgccaacgcgaactactgcaagagctggaagccggcgccagcgtagagaacagcccagaaaaatcgctgatgagcaaaatgaaagacatgttctcgtag

SEQ ID NO: 117656 - protein, 378 aa, Acidobacteria bacterium Ellin345
MTRMASTATNAKRDYYEVLQVTRTATDQEIKSSYRKLALQFHPDRNPDNKDAEEKFKECSEAYGVLSDSEKRAAYDRFGHAGLGGNGGSGGFDPNMVDFSEIFTDMFGMGDLFGRGRGRSRAQRGADLREDITLEFEQAVFGIETESRVRRHETCETCHGSGAAPGKAPVSCRKCGGRGQERFQQGFFSVSRTCGTCGGLGQVITDPCAGCRGQGAVVRERTIAVKVPAGVEDGTRIRYNGQGEAGTHGGPAGDLYIVLHVKEHKFFEREGKDLFCTVPVSFAQAALGTDIMIPTLEGEHKLHIPEGTQTGTQIKLRGKGVPVLNGHGKGDIFVEIKVQTPSKLNKRQRELLQELEAGASVENSPEKSLMSKMKDMFS

SEQ ID NO: 117657 - DNA, 1158 bp, Silicibacter sp. TM1040
  CDS (1)..(1158): transl_table=11
atgtcaaaacgtgactattacgaggtgctcggtgtctctaagggggccagcgccgacgaaatcaaaaagggctttcgcaagaaggccaaagagctgcacccggatcgcaatgcggacaacccggacgcagaagcccagttcaaagaagccaatgaggcctatgacgttctgaaagatccggaacgcaaggcagcctatgatcgctatggtcatgccgcctttgaaaacggcatgggtggcggaggcggtggacgcgcaggcggtcaccctggaggggacttctcctctgccttttcggatgtctttgacgacctctttggcgacttcatgggcggaggaggcgggcgcgcgggcgcgcgccagcgcgcaactcgcggcgcggacctgcgctacaacctgcgcctgtcgcttgaggaagcctttgccggccttcacaagaccatcaacgtgcccacctccgtaagttgcacctcctgtgagggtacaggtgccgagggcggcgcagagccaacaacctgcccgacctgttcggggatggggaaggtccgcgcgcagcagggcttctttacggtggaacggacctgcccgacctgttcgggtctgggccagatgatcaaaaacccctgcaagacctgtaacggccatggccgcgtggaaaaagatcgctcgctctcggtgaacattcctgcaggtgttgaaaccggcacccgcatccgtctcgctggcgaaggcgaggcaggcctgcgtggtggacctccgggcgatctctacatctttatcgaggtcgcacgccacgaactctttgagcgcgaaggcaacaaccttcactgccgggttcctgtctccatggccaaggcggcgctgggcggcgccatcgaggtgcccaccatcgatggtggtcgcgggcgtgtccagatccccgaaggcagccagtcgggccgccagatgcgcctacgaggcaaaggcatgcctgcgctgcgtggcggtgggaccggtgacatgttcatcgaacttgcggtggagacacctgtcaacctgacgccgcgccagaaggagatcctgaaggagtttgacgagatttcagaggaaaacaccaaccctgaaacgcgcagctttttctcctcggtcaagagcttctgggacggaatgaaagggtga

SEQ ID NO: 117658 - protein, 385 aa, Silicibacter sp. TM1040
MSKRDYYEVLGVSKGASADEIKKGFRKKAKELHPDRNADNPDAEAQFKEANEAYDVLKDPERKAAYDRYGHAAFENGMGGGGGGRAGGHPGGDFSSAFSDVFDDLFGDFMGGGGGRAGARQRATRGADLRYNLRLSLEEAFAGLHKTINVPTSVSCTSCEGTGAEGGAEPTTCPTCSGMGKVRAQQGFFTVERTCPTCSGLGQMIKNPCKTCNGHGRVEKDRSLSVNIPAGVETGTRIRLAGEGEAGLRGGPPGDLYIFIEVARHELFEREGNNLHCRVPVSMAKAALGGAIEVPTIDGGRGRVQIPEGSQSGRQMRLRGKGMPALRGGGTGDMFIELAVETPVNLTPRQKEILKEFDEISEENTNPETRSFFSSVKSFWDGMKG

SEQ ID NO: 117659 - DNA, 1179 bp, Mycobacterium sp. MCS
  CDS (1)..(1179): transl_table=11
atggcccaacgcgagtgggtcgagaaggacttctacaaggagctcggcgtctcctctgacgccagcgcggacgagatcaagaaggcctaccggaagttggcccgcgatctccaccccgacacgaacccggacccgtccgccgccgagcggttcaaggcggtgtccgaggcgcacagcgtgctgtcggacgcggcgaagcgcaaggagtacgacgaaacccgccggctgttcgccggcggcggcttcgggcgtggccggttcaacggcggcggtggaggattcggcggtttcggcggcgccgacggtggggtcgagttcaacctcaacgacctcttcgacgccgccgggcagaccggcggcgccaacatcggcgacctgttcggtggtctgttcgggcggggtgcctcgccgcgacccagccggccccggcgcggtaacgacctcgagaccgagaccgagctgtcgttcctggaggccaccaagggtgtggcgatgccgctgcggctgaccagcccggcaccgtgtacgaattgccatggcagcggcgcacgtccgggcaccagcccgaaggtgtgcccgaactgcaacggcgccggggtggtcaaccgcaaccagggcgcgttcgggttctccgaaccctgcaccgagtgcaagggcagcggctcgatcatcgagcacccctgcggcgagtgcaaaggcaccggcgtcaccaccaggacccgcaccatcaacgtgcggatccccccgggcgtggaggacggtcagcggatccggttggcaggtcagggcgaggcgggtctgcgcggtgcgccctcgggcgacctgtacgtgaccgtccatgtgcgtccggacaaggtgttcggccgcgacggtgacgacctcaccgtctccgtgccggtcagcttccacgagttggcgctcggcacaacgctttccgtcccgacgctggagggcaaggtcggtgtgcgggtgcccaagggcacctccgacggccgcatcctgcgggtgcgtgggcgcggtgtgcccaagcgtggcggcgggcacggcgacctgctggtcaccgtcaaggtcgcggttccgccgaacctcgagggtgaagccgccgaggcgctggaggcctacgccaaggccgagcgcgcgagcggattcgacccgcgggccggctgggcaggagcctga

SEQ ID NO: 117660 - protein, 392 aa, Mycobacterium sp. MCS
MAQREWVEKDFYKELGVSSDASADEIKKAYRKLARDLHPDTNPDPSAAERFKAVSEAHSVLSDAAKRKEYDETRRLFAGGGFGRGRFNGGGGGFGGFGGADGGVEFNLNDLFDAAGQTGGANIGDLFGGLFGRGASPRPSRPRRGNDLETETELSFLEATKGVAMPLRLTSPAPCTNCHGSGARPGTSPKVCPNCNGAGVVNRNQGAFGFSEPCTECKGSGSIIEHPCGECKGTGVTTRTRTINVRIPPGVEDGQRIRLAGQGEAGLRGAPSGDLYVTVHVRPDKVFGRDGDDLTVSVPVSFHELALGTTLSVPTLEGKVGVRVPKGTSDGRILRVRGRGVPKRGGGHGDLLVTVKVAVPPNLEGEAAEALEAYAKAERASGFDPRAGWAGA

SEQ ID NO: 117661 - DNA, 1155 bp, Mycobacterium sp. MCS
  CDS (1)..(1155): transl_table=11
gtggcacgcgattattacggcctgctcggagtgagcaagggcgccagcgatcaggagatcaagcgcgcctatcgcaagcttgcccgcgagctgcaccccgacgtcaaccccgacgaggaggcgcaggcgcggttcaaggagatcagcgccgcctatgaggtgctgtccgatcccgagaagcggcggatcgtcgacctcggtggtgacccgctcgagagtgcgggcgcctcgggcgggaatggattcggcgctggtttcggtgggctgggcgatgtgttcgaggcgttcttcggcggtggcggcggctcccgcggacccatcggacgggtccggccgggctcggactccctgctgcggatgcggttggacctggccgaatgcgcgaccggcgtgaccaagcaggtcaccgtcgacaccgccgtgctgtgcgacctgtgccacggtaagggcacccacggcacctccacccccgcgacgtgcgacacctgcggtggccgcggtgagatccagaccgtgcagcgatcgctgctgggccaggtcatgacgacgcggccgtgcccggtgtgcggcggagtcggcgaagtgatccccgatccgtgccaccgctgcggcggcgacggccgcgtccgcgcccggcgtgagatcagcgtcaagatcccggccggggtcggcgacggcatgcgcgtgcggctggccgcccagggtgaggtcggacccggcgggggaccggcgggcgacctgtacgtcgaggtgcacgagaagccgcacgacgtgtacgtccgcgacggcgacgacctgcactgcacggtgtcggtgccgatggtcgacgccgcgctgggcaccaccgtcagcgtcgacgacatcctcgggggtccgctcgaactcaccatcgccgccggtacccagccgggcgcggtgtcgacgctgcgcggccacggcatgccgcacctgcggtcgggtgtccggggcgacctgcacgcccacatcgacgtggtggtgccggccaaactggaccacaccgacatcgagctgctgcgccagctcaaggagcatcgcagccgcgacgtcgccgaggtccgcaccagcagttcaccggccgcgtcgaacgccggcggactgttcagccggctgcgcgagacgttcaccggccgctag

SEQ ID NO: 117662 - protein, 384 aa, Mycobacterium sp. MCS
MARDYYGLLGVSKGASDQEIKRAYRKLARELHPDVNPDEEAQARFKEISAAYEVLSDPEKRRIVDLGGDPLESAGASGGNGFGAGFGGLGDVFEAFFGGGGGSRGPIGRVRPGSDSLLRMRLDLAECATGVTKQVTVDTAVLCDLCHGKGTHGTSTPATCDTCGGRGEIQTVQRSLLGQVMTTRPCPVCGGVGEVIPDPCHRCGGDGRVRARREISVKIPAGVGDGMRVRLAAQGEVGPGGGPAGDLYVEVHEKPHDVYVRDGDDLHCTVSVPMVDAALGTTVSVDDILGGPLELTIAAGTQPGAVSTLRGHGMPHLRSGVRGDLHAHIDVVVPAKLDHTDIELLRQLKEHRSRDVAEVRTSSSPAASNAGGLFSRLRETFTGR

SEQ ID NO: 117663 - DNA, 1125 bp, Mesorhizobium sp. BNC1
  CDS (1)..(1125): transl_table=11
atgaaggctgatttttacgagacgctctgcgtgtcgagaaacgccgatgaaaaggaactgaagagcgctttccgcaagctcgccatgcagtatcatcccgatcgcaatccgggggatatggaggcggaaaagaagttcaaggaaatcaacgaggcgtacgaaaccctgcgcgatccgcaaaagcgcgcggcctatgaccgtttcggtcatgcagccttcgagcaaggtatgggcgcacggggcggcttcaatggcggcgggttcgcagatattttcgaggatattttcggagatatcatgggtggcgcgcggcagcgccgttccggcgggcgcgagcgcggcgctgatctccgctataatatggaaatcacgcttgaggagtcttttaccggcaagaccgctcagatccgtgttcctaccgcggtcacatgcgatgaatgcgccggttccggcgcaaggcccggttcttctcccgtgcagtgcccgatgtgccacggcgccggccgtgtgcgtgcgtcgaccggcggcttcttctcaatcgagcgcacctgcccgcaatgccagggccgcgggcagatcatcgacgatccatgccgcaagtgctccggtcaggggcgcctgacggaagagcgttcgctgtcggtcaatattccggcaggtatcgaggacggcacgcgcatccggcttgccggcgagggcgaggcgggactgcgcggtggaccgcccggtgacctttatattttcctctctatcaagccgcacgaattctttcagcgcgatggggcggacctctattgcaaggtccccatctccatgacgacggccgcgctcggcggctcttttgaggtgacgacgctcgacggtacgcagacacgcgtgaaagtgcccgaaggaacgcaaagcggccgccagttccgtttgcgcggcaagggcatgccagtgctccgccaaccccaggtcggcgatctttacatccaggtcgccgttgaaacgccacagaatctcaccagaagacaaagagagctgcttgaggagttcgaaaaaatttcctccggcgagaacagtccgcaatcgacgggctttttcgcgcgcatgaaggacttcttcgaaaccttcggcgaatga

SEQ ID NO: 117664 - protein, 374 aa, Mesorhizobium sp. BNC1
MKADFYETLCVSRNADEKELKSAFRKLAMQYHPDRNPGDMEAEKKFKEINEAYETLRDPQKRAAYDRFGHAAFEQGMGARGGFNGGGFADIFEDIFGDIMGGARQRRSGGRERGADLRYNMEITLEESFTGKTAQIRVPTAVTCDECAGSGARPGSSPVQCPMCHGAGRVRASTGGFFSIERTCPQCQGRGQIIDDPCRKCSGQGRLTEERSLSVNIPAGIEDGTRIRLAGEGEAGLRGGPPGDLYIFLSIKPHEFFQRDGADLYCKVPISMTTAALGGSFEVTTLDGTQTRVKVPEGTQSGRQFRLRGKGMPVLRQPQVGDLYIQVAVETPQNLTRRQRELLEEFEKISSGENSPQSTGFFARMKDFFETFGE

SEQ ID NO: 117665 - DNA, 1140 bp, Cytophaga hutchinsonii ATCC 33406; identical to SEQ ID NO: 63885
  CDS (1)..(1140): transl_table=11

SEQ ID NO: 117666 - protein, 379 aa, Cytophaga hutchinsonii ATCC 33406; identical to SEQ ID NO: 63886

SEQ ID NO: 117667 - DNA, 1149 bp, Rhodococcus sp. RHA1
  CDS (1)..(1149): transl_table=11
gtggcacgggattactacgcaacgctcggcgtcgatcagaaggcgaccgatcaggagctcaagcgcgcgtaccgcaagcttgcgagggaactgcatcccgacgtgaaccccgacgaggcggcgcaggcccggttccgggacatctcgacggcctacgaggtgctgtccgatccggagaagcgtcgcatcgtcgacctcggcggcgaccctctctcctcgggtggtggcggcggtgccggcttcggcggcggtttcggtggcggcctcggcgacgtgttcgaagcgttcttcggcggcggaggcggcgcgggtcgcgggccacgcggccgcgtccagccgggcgccgattcactcctgcgcaccaggctgacgctggcggagtgcgcgaccggcgtgagcaagcaggtcaccgtcgagacggcgatcctgtgcgacagctgcaccggtgcgggcaccaacggcgattccaagccggtgcgctgtgagacctgtggcggcgccggcgaggtccagtcggtgcagcgttcgttcctcggccaggtcatgacgtcgcggccgtgccccacctgccgcggcgccggcgagacgatccccgacccctgccacaagtgtggcggcgacggccgggtgcgcgcccgccgcgacatcacggtgaaggtgcccgcaggcgtcgcgggcggaatgcggatccggctcgccgcgcagggtgaggtcggccccggtggcggacccgcaggcgacctgtacgtcgaggtggtcgagcaggcgcacgaggtgttcgtgcgcgacggcgaagacctgcactgcacgatccgggttccgatgatcgacgccgccctcggcacgaccgtgacgatcgacacgatcatcgacgggcccaaggagatcaccatcgaaccggggacccagccgggatcggtgacggtcctgcgcgggcacggcatgccgaagctgcgttccggtatccgcggcgacgtgcacgcccacctcgaggtcgtggttccgtcgcgcctggaccacaaggagacgaagcttctccgcgaactcaaggatctgcgcgaccgcgacgtcgccgaggtcgtctccacccagtcgcagcacagcggcggattgttctcacgcctgcgtgaagcgttcagcggtcgctga

SEQ ID NO: 117668 - protein, 382 aa, Rhodococcus sp. RHA1
MARDYYATLGVDQKATDQELKRAYRKLARELHPDVNPDEAAQARFRDISTAYEVLSDPEKRRIVDLGGDPLSSGGGGGAGFGGGFGGGLGDVFEAFFGGGGGAGRGPRGRVQPGADSLLRTRLTLAECATGVSKQVTVETAILCDSCTGAGTNGDSKPVRCETCGGAGEVQSVQRSFLGQVMTSRPCPTCRGAGETIPDPCHKCGGDGRVRARRDITVKVPAGVAGGMRIRLAAQGEVGPGGGPAGDLYVEVVEQAHEVFVRDGEDLHCTIRVPMIDAALGTTVTIDTIIDGPKEITIEPGTQPGSVTVLRGHGMPKLRSGIRGDVHAHLEVVVPSRLDHKETKLLRELKDLRDRDVAEVVSTQSQHSGGLFSRLREAFSGR

SEQ ID NO: 117669 - DNA, 1185 bp, Rhodococcus sp. RHA1; identical to SEQ ID NO: 63887
  CDS (1)..(1185): transl_table=11

SEQ ID NO: 117670 - protein, 394 aa, Rhodococcus sp. RHA1; identical to SEQ ID NO: 63888

SEQ ID NO: 117671 - DNA, 1122 bp, Haemophilus somnus 129PT
  CDS (1)..(1122): transl_table=11
atggcaaaacgagattattatgaaatattaggtgttcaaaaaggagcggatgataaagaaatcaaacgtgcttacaaacgccttgcgatgaaatatcacccagatcgaactaaaggtgataaagaaagcgaagaaaaattcaaagaaattaatgaagcatacgaagttttggctgataaagagaaaagggcaatgtatgaccaatatggtcatgccgcttttgaacaaggtggtggtgccggcggtttcggcggctttagcggagctgactttggtgatattttcggcgatatgttcggcgatatttttggtggcggacgttctcgtcaacgtgttgttcgtggtgaggatttacgctacgatattgaaataagtttggaagaagcggtaaaaggctgtaaaaaagatattcaaattaacactcttgttcactgtggaacttgtcatggctcaggtgcggaagcgggttcaaaaattgaatcttgtccaacctgtcatggtgcaggtcgtgttcgtcgccaacaaagtttctttgttacagaacaaacttgtccacactgtcacggtaccggcaaaaaaatagagaaaccttgtcatacctgtcacggtgaaggtagagttcataaaacccaaaatcttaccgttaccattccaatgggcgtagatacaggtaatcaattacgtttagcaggtaaaggagcagcgggtgaaaatggtgcacctgccggtgatttatatgtggttattcatgtaaaaaaacaccatatttttgaacgtgatggtaacaatctttattgtgaagtccctatcagctttactatggctgcattaggtggcgaagtagaaattccaactttagacggtcgtcttaaagttaaaattcctgctgaaacacaaaccggtaaactgcttcgtctaagaggaaaaggcattacctctcgcggctatgctggcgatttaatctgcgagatcgttattgaaacaccaattaaactaaacgaagaacaaaaagagttactaagaaaattggaagaaagtttagaaggtaaaacgctccaacgccctaaatcctcaggttttttagatggtgtaaaaaaattctttgataatttaggaaaataa

SEQ ID NO: 117672 - protein, 373 aa, Haemophilus somnus 129PT
MAKRDYYEILGVQKGADDKEIKRAYKRLAMKYHPDRTKGDKESEEKFKEINEAYEVLADKEKRAMYDQYGHAAFEQGGGAGGFGGFSGADFGDIFGDMFGDIFGGGRSRQRVVRGEDLRYDIEISLEEAVKGCKKDIQINTLVHCGTCHGSGAEAGSKIESCPTCHGAGRVRRQQSFFVTEQTCPHCHGTGKKIEKPCHTCHGEGRVHKTQNLTVTIPMGVDTGNQLRLAGKGAAGENGAPAGDLYVVIHVKKHHIFERDGNNLYCEVPISFTMAALGGEVEIPTLDGRLKVKIPAETQTGKLLRLRGKGITSRGYAGDLICEIVIETPIKLNEEQKELLRKLEESLEGKTLQRPKSSGFLDGVKKFFDNLGK

SEQ ID NO: 117673 - DNA, 1125 bp, Trichodesmium erythraeum IMS101; identical to SEQ ID NO: 63889
  CDS (1)..(1125): transl_table=11

SEQ ID NO: 117674 - protein, 374 aa, Trichodesmium erythraeum IMS101; identical to SEQ ID NO: 63890

SEQ ID NO: 117675 - DNA, 1152 bp, Alkalilimnicola ehrlichei MLHE-1
  CDS (1)..(1152): transl_table=11
atgtccaaaagcgattactacgaagccctgggcgttgcccgcaacgcctcggattcagagatcaaaaaggcctaccgccgcatggccatgaagtatcacccggaccgcaatccgggtgacaaggaggcggaggcccgcttcaaggaggccaaagaggcctacgagattttgtccgacccgcagaagcgggccgcctacgaccagttcggtcacgccggtgtggacccctccgccggcatggggggcgccggggggccgggtggcccgggcgggccggatttcgccgatatcttctccgacgtcttcggcgacatcttcgggggcggcggtcgccgtggcggcgggggccggcgcgtcttccgtggcgcggacctgcgctacaacctggagctgtcgctggaggacgcggtgcgcggcaccgaggtgcagatccgggtgcccacccaggaggtctgtgacgcctgtgacggcaagggcaccaaggagggcagccagcccgagacctgccccacctgtaagggccacggtgatgtccgtatccagcagggcttcttctccgtgcagcagacctgcccgcgctgtggcggcagtggttcggttatcaccgacccgtgccgtaagtgtggcgggcgcgggcgagtgcagtcgcagaaaacgctctccgtacgggtgccggccggggtggataccggcgaccggatccgcctgtccggcgagggcgagcccggtgagaatggcggtccgcccggcgatctgtacgtgcagatcatggtgcgtgagcacgagttcttccagcgcgacggggccaatctgcgctgcgaggtgcccatcagtatcaccaaggccgccctcggcggtgaggtggaggtgccgaccctggacgggcgcgtcaacctgcgcatccccgccggcgcccagtcgggcaaggtcttccgggtgcgcggcaagggggtgaagccggtgcgcggcggtccgcagggcgacttgctctgccgggtgcacgtggagaccccggtcaacctcaccaaaaagcagaaggagctgctggaggagtttggccgcaccatggatgacaccggcgacaagcacaccccgcggaccagctcctggctggacaaggcgcgcaaattcttcgaggactggaagctctga

SEQ ID NO: 117676 - protein, 383 aa, Alkalilimnicola ehrlichei MLHE-1
MSKSDYYEALGVARNASDSEIKKAYRRMAMKYHPDRNPGDKEAEARFKEAKEAYEILSDPQKRAAYDQFGHAGVDPSAGMGGAGGPGGPGGPDFADIFSDVFGDIFGGGGRRGGGGRRVFRGADLRYNLELSLEDAVRGTEVQIRVPTQEVCDACDGKGTKEGSQPETCPTCKGHGDVRIQQGFFSVQQTCPRCGGSGSVITDPCRKCGGRGRVQSQKTLSVRVPAGVDTGDRIRLSGEGEPGENGGPPGDLYVQIMVREHEFFQRDGANLRCEVPISITKAALGGEVEVPTLDGRVNLRIPAGAQSGKVFRVRGKGVKPVRGGPQGDLLCRVHVETPVNLTKKQKELLEEFGRTMDDTGDKHTPRTSSWLDKARKFFEDWKL

SEQ ID NO: 117677 - DNA, 1161 bp, Hyphomonas neptunium ATCC 15444
  CDS (1)..(1161): transl_table=11
atgagtaagcgcgactattatgaagtgctcggggtcgaacgcggcgtcgatgagaaggcgcttaaatcggcgtatcgcaagctcgcgatgaagtatcaccccgaccagaatgccggcgacacagccgccgaagacaagttcaaggaagtgggcgaagcctacgccattctctccgatccgcagaaacgcgccgcttatgaccggtatggccatggcgccttcgagaatggcggcatgggcggcggcagcccgttcggcggccagggcggtaaccccgaagacattttccaggatctgttcagccaggtgttcggtgccggcgggtttgccggcgggcgccgccgcagcggcccgcagcgcggggctgacctgcgctacgatctcgaaatcacgctggaagaagccttttacggcaaggatgaaaccatccatgtgccccaggccgttgcgtgccgcccctgcgaaggcacgggcgcagcaccgggcaccaagccggaaacctgcgaaacctgtggcggccatggccgcgtgcgcgcccagcagggctttttcaccatggaacgcacatgccatatctgtcagggccgcggccagatcatccggaagccgtgcaagacctgcggcgggcatggccaggtgaaggaagaacgcaagctgcaggtgaagatccctgccggcgtcgagagcgggatgcgcatccgcctttccggcgaaggcgaaccgggcacatcgggcgggccgaagggcgacctctatatcttcgttgaagtggtcgagcatgacatcttcgagcgcgacggacccaacctctattgccgcgcgccggtgccgatgacgaccgcggcgctgggcggagaaattgacattccgaccatcgatggcggacgggcccgcgttgccattcccgagggcgcgcagaccggccgcaagttgcgcctgcgcagcaagggcatgccgagcgtgcgcgccaatggccagaccggcgacctctatgtcgagatgttcgtggaaaccccgcagaacctgactgcccggcagaaagacctgctgcgccagttctgcgactgctcgggcgctgactgccatccggaaagcgaaggcttcctcggcaagatcaaacgcttctggggcggcgaaggcgatgagaaacgcccggtctga

SEQ ID NO: 117678 - protein, 386 aa, Hyphomonas neptunium ATCC 15444
MSKRDYYEVLGVERGVDEKALKSAYRKLAMKYHPDQNAGDTAAEDKFKEVGEAYAILSDPQKRAAYDRYGHGAFENGGMGGGSPFGGQGGNPEDIFQDLFSQVFGAGGFAGGRRRSGPQRGADLRYDLEITLEEAFYGKDETIHVPQAVACRPCEGTGAAPGTKPETCETCGGHGRVRAQQGFFTMERTCHICQGRGQIIRKPCKTCGGHGQVKEERKLQVKIPAGVESGMRIRLSGEGEPGTSGGPKGDLYIFVEVVEHDIFERDGPNLYCRAPVPMTTAALGGEIDIPTIDGGRARVAIPEGAQTGRKLRLRSKGMPSVRANGQTGDLYVEMFVETPQNLTARQKDLLRQFCDCSGADCHPESEGFLGKIKRFWGGEGDEKRPV

SEQ ID NO: 117679 - DNA, 1128 bp, Rhizobium leguminosarum bv. viciae 3841; identical to SEQ ID NO: 63891
  CDS (1)..(1128): transl_table=11

SEQ ID NO: 117680 - protein, 375 aa, Rhizobium leguminosarum bv. viciae 3841; identical to SEQ ID NO: 63892

SEQ ID NO: 117681 - DNA, 1125 bp, Pediococcus pentosaceus ATCC 25745; identical to SEQ ID NO: 63893
  CDS (1)..(1125): transl_table=11

SEQ ID NO: 117682 - protein, 374 aa, Pediococcus pentosaceus ATCC 25745; identical to SEQ ID NO: 63894

SEQ ID NO: 117683 - DNA, 1134 bp, Solibacter usitatus Ellin6076
  CDS (1)..(1134): transl_table=11
gtgtcaaagagagattattacgaagtactcggtgtcggaaaacaagcagccgattcggaactaaaggccgcttaccgcgaactcgccaagcgctttcaccccgatcggaatcccgacgatccgcacgccgaagagaagttcaaggagtgcagcgaggcatatagcgtcctcagcgatgcgcaaaagcgcgccgcttacgatcgctttggacacgccggagtccaaggcgcgggcggcggcccggccggcttcaaccccgagcagttcgccgatttcggcgacatcctgggcgatttcttcggctttggcgacctgttcggccagggcggaggcgcgggcggcaggcgccgtacccgtgcgcagcgcggcgaagatgtccgctacgatctggaaatcaccttcgaagatgccatgttcggcatgggcgccgacatccaggttccgcggatggagcgctgcgaacgctgcaagggcggcggcagcgagccgggcagcggacccaccacctgccccacctgccacggacggggcgagattctctaccagcagagcttcctctccatccggcgcacctgcagcacttgcaacggctccggccagatcatccggaatccctgcggcgagtgccacggccacggctacaaacaggtgcagcgcaagctcaaggtcaacatcccggccggcgtggacgatggcaaccgcctgcggcttgcgggcgaaggccagcccggtgtcaatggcggccctcccggcgatctctacgtcttcctcaaggtgaaggagcatccgttcttcgaacgccacgaggccgacctgcactgcactatcccgatcaacatggcccaggccgcgctcggctgcgaaatcgagattcctacgctggagcagccctccaagctcaagatacccgagggaacccagaatggcgcgcaattcaaactgcgtcacaagggagtggccgtgctcaacagcagcagccgcggcgatctctacgtccacattgccgtgaagacgcccacgcgcatttcccgcgagcagcgcaagatgctggagcagctccgcgacacgctgccggtggacaatcgtccggcggaaaaaggtctcttcgagaaggtcaaagactacttcatgtag

SEQ ID NO: 117684 - protein, 377 aa, Solibacter usitatus Ellin6076
MSKRDYYEVLGVGKQAADSELKAAYRELAKRFHPDRNPDDPHAEEKFKECSEAYSVLSDAQKRAAYDRFGHAGVQGAGGGPAGFNPEQFADFGDILGDFFGFGDLFGQGGGAGGRRRTRAQRGEDVRYDLEITFEDAMFGMGADIQVPRMERCERCKGGGSEPGSGPTTCPTCHGRGEILYQQSFLSIRRTCSTCNGSGQIIRNPCGECHGHGYKQVQRKLKVNIPAGVDDGNRLRLAGEGQPGVNGGPPGDLYVFLKVKEHPFFERHEADLHCTIPINMAQAALGCEIEIPTLEQPSKLKIPEGTQNGAQFKLRHKGVAVLNSSSRGDLYVHIAVKTPTRISREQRKMLEQLRDTLPVDNRPAEKGLFEKVKDYFM

SEQ ID NO: 117685 - DNA, 1191 bp, Solibacter usitatus Ellin6076
  CDS (1)..(1191): transl_table=11
atggcgactcctaagcatgagtactacgaaacgctgggcgtaccccgcaaagccgacgcggaggagattcgcaaggcctatcgcaaactcgcgcgcaaatatcatcccgatctgaaccctggcgataagtcctccgaagagcgcttcaagaacgtccaggaagcttacgatatcctgagcgatcccaagaaacgccagatgtacgaccagttcggtttctactccgaaaatggtggttatcccggcgccggacccggaggtcagcccggcggcggtcctcagggcgcgcacttcgacggcttcgatttttccgactacatgtccggtcagggcggcgccgcggggggccgtcgcacgcaaggcacctcctcccagggcggcggcggatttcgggatattttctcgcagttcttcggcggcggagcggctgccgaacaggccgagcccgagcgcggcgccgatctcgaatacgtcatgaatatcgatttctggcaggccattaagggcaccacggcgcgcgtgaacatcacccgctatgacgtgtgcaccacctgcaacggcaccggatccacgggctctggagaagtcacctgcccgcaatgcaagggcgtgggacaagtcacgcaaatggccggcgctatgaagttcaatctcacctgtccgcgctgcggcggggccgggaagctgcgcaacgcctgtccgacctgcggcggcgacggacgtgttccgaagaccgagaccgtcgagatccgcatcccgccgggcgcgcgcgacggctcgcgactgcgcgtcgccggcaaaggcaacgccggcaccatgggcgctgcgccgggagatctctacatcaccaccaaagtggaaccgcatcagttcttccaccgtgagggcgacaacatcgaaatcaaagcgcccatcgcgatctgggaggcttcgctcggcgccaaaatcgaagtccccacgatcgacggccgcacgctgctgaagatcccgcagggcaccgtgaatggccagaagttccgcctgcgcgagaagggtgttttgaattcgcgcaccaaccagcgcggcgatcagatcgtggaggtccagttgactacgcccgatcctcgcgacgaaaagacgcggcagctgctgcgcgatctggctgaactgcatcccgaagatccgcgggcggaaatgtggagtaaagtctga

SEQ ID NO: 117686 - protein, 396 aa, Solibacter usitatus Ellin6076
MATPKHEYYETLGVPRKADAEEIRKAYRKLARKYHPDLNPGDKSSEERFKNVQEAYDILSDPKKRQMYDQFGFYSENGGYPGAGPGGQPGGGPQGAHFDGFDFSDYMSGQGGAAGGRRTQGTSSQGGGGFRDIFSQFFGGGAAAEQAEPERGADLEYVMNIDFWQAIKGTTARVNITRYDVCTTCNGTGSTGSGEVTCPQCKGVGQVTQMAGAMKFNLTCPRCGGAGKLRNACPTCGGDGRVPKTETVEIRIPPGARDGSRLRVAGKGNAGTMGAAPGDLYITTKVEPHQFFHREGDNIEIKAPIAIWEASLGAKIEVPTIDGRTLLKIPQGTVNGQKFRLREKGVLNSRTNQRGDQIVEVQLTTPDPRDEKTRQLLRDLAELHPEDPRAEMWSKV

SEQ ID NO: 117687 - DNA, 1137 bp, Magnetococcus sp. MC-1; identical to SEQ ID NO: 63895
  CDS (1)..(1137): transl_table=11

SEQ ID NO: 117688 - protein, 378 aa, Magnetococcus sp. MC-1; identical to SEQ ID NO: 63896

SEQ ID NO: 117689 - DNA, 1134 bp, Shewanella sp. ANA-3
  CDS (1)..(1134): transl_table=11
atgtcaaagcgagattattacgaagtattaggcgttggtcgtgacgccagcgaacgtgaaattaaaaaagcctacaagcgtttggcgatgaagtttcaccccgatcgcaaccctggcgacaaagctgccgaggcgagctttaaagaagttaaagaagcctacgaaatccttaccgatgccaacaaaaaagcggcctatgaccaatttggtcatgcgggtgtggatccgaatcgcggcggcggtggtggctacggcggcgcgggagatttcggcgatattttcggtgatgtctttggcgatattttcggcggtggacgccgtggcggtcaacgccaagcggcccgcggctcagatttacgttacaacctagagttatcactggaagaagccgtcaaaggcctcaccaaagaactgcgtattccaaccttagccagctgtgatgtgtgtgacggcagcggggcgaaaaaaggctcttcggcgaccacctgtggcacctgtcatggtcaaggccaagtgcaaatgcgccaaggtttcttcaccgtacaacagccatgtccaacctgtcatggtcgcggcaagatcattaaagatccttgctctaagtgccatggtgatggccgtgtcgagaagaccaaaacgctgtcagttaagatcccagcgggtgtcgacactggcgaccgtatccgcttagcgggtgaaggtgaagcgggcgagtttggtgcgccaccgggcgatttatacgttcaggtcacagtacgtgaacatgctattttcgtgcgtgatggcaacaacctctactgcgaagtgccaatttcattcagcaaagcggcgctcggcggcgagattgaagtgccaacactggacggcaaagtcagcctgaagatcccagccgaaacgcaaacgggccgtatgttccgtctacgtggtaaaggggttaaatcggttcgcagtcatgccgtgggcgacttgctctgcaaagtcgtgatggaaacgcctgtcaacctaaacgagcgtcagaaggaattactgcgtgagtttgaggcaacattaactggcgaatcaaagaagcacagcccaaaggctgaaggctttttcgatggcgtgaagaagtttttccaagacctgaatagctaa

SEQ ID NO: 117690 - protein, 377 aa, Shewanella sp. ANA-3
MSKRDYYEVLGVGRDASEREIKKAYKRLAMKFHPDRNPGDKAAEASFKEVKEAYEILTDANKKAAYDQFGHAGVDPNRGGGGGYGGAGDFGDIFGDVFGDIFGGGRRGGQRQAARGSDLRYNLELSLEEAVKGLTKELRIPTLASCDVCDGSGAKKGSSATTCGTCHGQGQVQMRQGFFTVQQPCPTCHGRGKIIKDPCSKCHGDGRVEKTKTLSVKIPAGVDTGDRIRLAGEGEAGEFGAPPGDLYVQVTVREHAIFVRDGNNLYCEVPISFSKAALGGEIEVPTLDGKVSLKIPAETQTGRMFRLRGKGVKSVRSHAVGDLLCKVVMETPVNLNERQKELLREFEATLTGESKKHSPKAEGFFDGVKKFFQDLNS

SEQ ID NO: 117691 - DNA, 1146 bp, Mycobacterium avium 104
  CDS (1)..(1146): transl_table=11
gtggcacgcgactattacgggctgctcggcgtgagccgaggcgccagcgatgcggagatcaaacgcgcgtaccgcaagctggcgcgcgaactgcatcccgacgtcaaccccgacgaggctgcgcaggcaaaattcaaggagatcagcgtcgcctacgaggtgctcagcgacccggagaaacggcggatcgtcgacctgggcggtgatccgctggagggggcggccgcggcgggcggcggcttcggagggttcggcggcctcggcgatgtgttcgaggcctttttcgggggcggcttcggcggcggcaccacctcccgcggcccgatcgggcgggtccggccgggctcggattcgctgctgcggatgcggctcgacctcgaggagtgcgccaccggggtgaccaagcaggtcaccgtcgacaccgccgtgctgtgcgaccgctgccacggcaagggcaccaacggcgactccgccccggtgccatgcgacacctgcggcggccgcggcgaggtgcagacggtgcagcgctcgctgctcggccaggtgatgacgtcccggccgtgcccgacctgccgcggcgtcggcgtcgtcatccccgacccgtgccaccagtgcatgggcgacggccgggtgcgggcccgccgcgagatcagcgtcaagatccccgccggggtgggtgacggcatgcgggtgcggctggccgcccagggcgaggtgggtcccggcggtggcccggccggtgacctctacgtcgaggtgcacgaacagccccacgacgtcttcgtccgcgagggcgacgacctgcactgcacggtgtcggtgccgatggtcgacgcggcgctgggcgccaccgtcaccgtcgacgccatcctggacggcgtcagcgaaatcaccattccgcccggcacccaaccgggttcggtcatcacgctgcgcggccacggcatgccgcacctgcggtcgggcacccgcggcgatctgcacgtgcacgtcgaggtggtggtgcccagccggctggacgcccgcgacaccgagctgctgcgcgaattcaaggcccgccgcggccgcgaggtcccggaggtccgctccacccacgccggcggcggattgttcagccggctgcgcgaaaccttcaccgggcgctag

SEQ ID NO: 117692 - protein, 381 aa, Mycobacterium avium 104
MARDYYGLLGVSRGASDAEIKRAYRKLARELHPDVNPDEAAQAKFKEISVAYEVLSDPEKRRIVDLGGDPLEGAAAAGGGFGGFGGLGDVFEAFFGGGFGGGTTSRGPIGRVRPGSDSLLRMRLDLEECATGVTKQVTVDTAVLCDRCHGKGTNGDSAPVPCDTCGGRGEVQTVQRSLLGQVMTSRPCPTCRGVGVVIPDPCHQCMGDGRVRARREISVKIPAGVGDGMRVRLAAQGEVGPGGGPAGDLYVEVHEQPHDVFVREGDDLHCTVSVPMVDAALGATVTVDAILDGVSEITIPPGTQPGSVITLRGHGMPHLRSGTRGDLHVHVEVVVPSRLDARDTELLREFKARRGREVPEVRSTHAGGGLFSRLRETFTGR

SEQ ID NO: 117693 - DNA, 1173 bp, Mycobacterium smegmatis str. MC2 155
  CDS (1)..(1173): transl_table=11
atggcccaacgcgagtgggtcgagaaggatttctacaaagaactcggcgtctcctctgacgccagcgccgacgagatcaagaaggcctatcggaaactggccgccgagctgcaccctgaccggaactccgatcctggagccgcggagcggttcaaggcggtgtccgaggcgaacagtgttctgtcggaccccgctaagcgcaaggagtatgacgagacccggcggttgttcgcaggtggtttcggtcgcaggttcaaccagggcggcggcggattcggaggcggtttcggttccgacggagtcgaattcaacctcggcgacctgttcgacgctgccgggcagaccggtggcgcgaacatcggcgacctcttcggtggactgttcggccgcggcccccagcagcggccgagccgtccgcgtcgcggcaacgacctggagaccgagaccgaactgtcgttcctggaggccaccaagggcgtggccatgccgctgcggctgaccagcccggcgccgtgcaccaactgccacggcagcggtgcacggccgggcaccagcccgaaggtgtgcccgagctgcaacggctccggtgtgatcagccgcaaccagggcgctttcggtttctccgaaccctgcaccgagtgtcgtggtagcggctcgatcatcgagcatccctgccaggaatgccggggcaccggcgtcaccaccaggacccgcaccatcaacgtgcggattccccccggtgtcgaggacggtcagcgcatccggctggccgggcagggcgaggcgggcctgcgcggcgcgccgtccggtgacctctacgtcaccgtgcacgtgcgtcccgacaaggtgttcgggcgcgacggcgacgacctgaccgtcacggttcccgtgagtttccacgaactggcgctcgggacaacgctttcggtccccacactcgacggcaaggtcggagttcgggtgcccaagggcacctcggacggccggatcctccgcgtccgcggacgcggtgtgcccaagcggtcgggtggccacggggatctactggtcaccgtgaaggtcgcggtgccaccgaacctggaaggtgaagcggcagaagcgctggaggcttacgcgaaagctgagcgtgccagcggattcgatccgcgtgctggatgggcggggaatgtatga

SEQ ID NO: 117694 - protein, 390 aa, Mycobacterium smegmatis str. MC2 155
MAQREWVEKDFYKELGVSSDASADEIKKAYRKLAAELHPDRNSDPGAAERFKAVSEANSVLSDPAKRKEYDETRRLFAGGFGRRFNQGGGGFGGGFGSDGVEFNLGDLFDAAGQTGGANIGDLFGGLFGRGPQQRPSRPRRGNDLETETELSFLEATKGVAMPLRLTSPAPCTNCHGSGARPGTSPKVCPSCNGSGVISRNQGAFGFSEPCTECRGSGSIIEHPCQECRGTGVTTRTRTINVRIPPGVEDGQRIRLAGQGEAGLRGAPSGDLYVTVHVRPDKVFGRDGDDLTVTVPVSFHELALGTTLSVPTLDGKVGVRVPKGTSDGRILRVRGRGVPKRSGGHGDLLVTVKVAVPPNLEGEAAEALEAYAKAERASGFDPRAGWAGNV

SEQ ID NO: 117695 - DNA, 1146 bp, Mycobacterium smegmatis str. MC2 155
  CDS (1)..(1146): transl_table=11
gtggcacgtgattactacggcctgctcggagtgagcaagggtgcgagcgattcggagatcaaacgcgcctaccggcgtttggcacgtgagctgcaccccgacgtcaaccccgacgaggaggcccagcacaggttcaccgagatccaacaggcatacgaggtcctgtccgatccggagaagcgccggatcgtcgacatgggcggcgacccgatggagtcggtcggcggagcgcccaacggcttcggcgggttcggcggtctcggtgacgtgttcgaggcgttcttcggtggcggcaccacgtcgcgcggcccgatcggccgcgtccggccgggctcggactcactgctgcggatgcgcctggacctcgaagagtgcgccaccggcgtgaccaaggaggtcaccgtcgagacggccgtgctgtgcgatctgtgccacggcaagggcaccaacggcaactcgtcgcctgccacctgcgacacgtgcggcggccgcggtgagatccagaccgtgcaacggtcgctgctcggccaggtgatgacgtcgcggccgtgtccggtctgcggcggcgtcggcgaggtgatccccgatccgtgtcaccgctgcggcggcgacggccgcgtgcgcgcccgccgcgacatcagcgtcaagatcccagcgggcgtgggcgacggcatgcgggttcggctcgccgcccagggcgaggtcggacccggcggcggccccgcgggcgacctgtacgtcgaggtgcacgagaagcctcacgacgtgttcgtgcgcgacggtgacgatctgcactgcacgatctcggtgcccatggtcgacgcggcgctgggctgcacggtcaccgtcgacgcgatcctcgacgggccgaccgaactgaccatcccgccgggcacccagcccggttccgtgacgacgctgcgcgggcacggcatgccgcatctgcgttcgggtgttcgtggtgacctgcacgcccacatcgacgtcgtggtgcccacacgcctggagaactccgacatcgagttgctgcgcaagttcaaggagaaccgcacgcgcgacaccgcctcggtgcgcacggcacagggctccgccggttccggcggtggcctgttcagccgcctgcgcgagacgttcaccggtcgctga

SEQ ID NO: 117696 - protein, 381 aa, Mycobacterium smegmatis str. MC2 155
MARDYYGLLGVSKGASDSEIKRAYRRLARELHPDVNPDEEAQHRFTEIQQAYEVLSDPEKRRIVDMGGDPMESVGGAPNGFGGFGGLGDVFEAFFGGGTTSRGPIGRVRPGSDSLLRMRLDLEECATGVTKEVTVETAVLCDLCHGKGTNGNSSPATCDTCGGRGEIQTVQRSLLGQVMTSRPCPVCGGVGEVIPDPCHRCGGDGRVRARRDISVKIPAGVGDGMRVRLAAQGEVGPGGGPAGDLYVEVHEKPHDVFVRDGDDLHCTISVPMVDAALGCTVTVDAILDGPTELTIPPGTQPGSVTTLRGHGMPHLRSGVRGDLHAHIDVVVPTRLENSDIELLRKFKENRTRDTASVRTAQGSAGSGGGLFSRLRETFTGR

SEQ ID NO: 117697 - DNA, 1176 bp, Nocardioides sp. JS614
  CDS (1)..(1176): transl_table=11
ttgagccaggacctgtacgagctgctcggtgtcggccgcgacgcggacgccgacgccatcaagaaggcctaccggcgcctggcccgccagtaccaccccgacgtcaaccccgaccccgaggcgcaggagcgcttcaaggagatctcgctcgcctacgaggtgctctccgacccgcagaagcgcgcccactacgaccgcggcggcgacccgttcggcggcggcgccggcggcttcggtcagggcgcgggcttctcgttcaccgacatcatggacgccttcttcgggggcggtggcgccgccggcgcgggccgcgggccgcggccccgcgagcgccgcggccaggacgcgctgatccgcctggaggtcgagctcgccgaggcggccttcggcgtgacccgcgagatcaaggtcgacaccgccgtgcggtgcagcacctgccacggcgagggtacggcggcgggcacccacccgatcccgtgcgagacctgccacggtgccggcgaggtggcgcacgtgcagcgctccttcctcggcgagatccgcaccctgcggccgtgcccggcgtgccgcgggttcggcacgatcatccccgagccctgccgcgagtgctccggcgacggccgggtccgctcccgccgtacgctcaccgtcaagatccccgccggcgtcgacaacggcacccgggtgcagctgtccggcgagggcgaggtcggcccgggcggcggtccggccggcgacctgtacgtcgagatccacaccgcgccgcacgagaccttcacccgccatggcaacgacctgcactgcaccgtcacgctgccgatgaccgcggcggcgctcggcaccacgctcaccctgcccacgctggaggccgacgtggtcacgggcgaccccgacgagtccgaggtggagacgtcgttcgacctcgacgtccggccgggcacccagtccggcaccgagcaggtgctgcgcggccgcggcgtcccgggcctgcgcggtgggcgcggcgacctcgtcgtcaccgtggtcgtcgagacgccgactcggctcgacccccgccaggaggagctgctgatcgagctggccgcgatccgcggcgaggaggcgccgaccggccaggtgcgccccggcgccaagtcggtgttcggccggctccgcgacgcgttcaacgcgcactga

SEQ ID NO: 117698 - protein, 391 aa, Nocardioides sp. JS614
MSQDLYELLGVGRDADADAIKKAYRRLARQYHPDVNPDPEAQERFKEISLAYEVLSDPQKRAHYDRGGDPFGGGAGGFGQGAGFSFTDIMDAFFGGGGAAGAGRGPRPRERRGQDALIRLEVELAEAAFGVTREIKVDTAVRCSTCHGEGTAAGTHPIPCETCHGAGEVAHVQRSFLGEIRTLRPCPACRGFGTIIPEPCRECSGDGRVRSRRTLTVKIPAGVDNGTRVQLSGEGEVGPGGGPAGDLYVEIHTAPHETFTRHGNDLHCTVTLPMTAAALGTTLTLPTLEADVVTGDPDESEVETSFDLDVRPGTQSGTEQVLRGRGVPGLRGGRGDLVVTVVVETPTRLDPRQEELLIELAAIRGEEAPTGQVRPGAKSVFGRLRDAFNAH

SEQ ID NO: 117699 - DNA, 1191 bp, Nocardioides sp. JS614
  CDS (1)..(1191): transl_table=11
gtgagcaccactgacggcttccgggccgactgggcccagaaggacttctacgccgagctgggcgtgacgaagaacgcctcggccgaggagatcaagaaggcctaccgcaagctggcgcgcgccaaccaccccgactccaaccccggcgactctgcggacagcaaggccaagcacgacaagttcaaggcggtcgccgaggcctacgacgtcatcggcgaccccgagaagcgcaagaagtacgacgagatgcgcgagctctacggctcgggcgcgttccgtggcggcttcgggggtggcggccagggcggagggttcaacctcgacgacctgctgcgcgaccgggcgtccggtggcggaggcggcttcggtgacatgttcggcgacctcttcgggggcggcttcggccggggccggcagcaccagcggccgcgggcgcagaagggccaggacgtcgagaccacggcgacgatcagcttcaccgacgccatcgacggcgtcacgatctcgctgcggctcacctcggacgcgccgtgcccggactgccacggcaccggcggcaagcccggcaccaagccgcacgtgtgccccgaatgcgacggcgccggcttcgtggtgtcctccgccggcggggcgttctcgatcaacgagacctgcccccgctgcggcggccgccagctcgtgtacgacgaggcctgcccgacctgccacggctccggtcgcggcacctcggcgcgctccatccaggcgcggatcccggccggggtgcgcgacggccagcggatccgcctgcgcggcaagggcggcgccggcgagaacggcggcccggccggcgacctgttcgtcaccgtcaaggtctccccgcaccggctgttcggccgcaagggtgacaacctcaccctcgacgtgccggtctccttcgacgagctcgccctcggcgcggatctgaagatcccgaccctcggcggcgccccggtgaccctcaaggtccccgccggcacccccaacggccggaccttccgggtgcgcggccggggtgctcccaagtctgacggcagccggggcgacctgctcgccactgtcgaggtccaggtgccggccgtgctcgacaccgccgcccgggaggcggtccaggcctaccgcgacgcgagcgccggcaagccgctgcgctccaagctgttcgaggaggcgtga

SEQ ID NO: 117700 - protein, 396 aa, Nocardioides sp. JS614
MSTTDGFRADWAQKDFYAELGVTKNASAEEIKKAYRKLARANHPDSNPGDSADSKAKHDKFKAVAEAYDVIGDPEKRKKYDEMRELYGSGAFRGGFGGGGQGGGFNLDDLLRDRASGGGGGFGDMFGDLFGGGFGRGRQHQRPRAQKGQDVETTATISFTDAIDGVTISLRLTSDAPCPDCHGTGGKPGTKPHVCPECDGAGFVVSSAGGAFSINETCPRCGGRQLVYDEACPTCHGSGRGTSARSIQARIPAGVRDGQRIRLRGKGGAGENGGPAGDLFVTVKVSPHRLFGRKGDNLTLDVPVSFDELALGADLKIPTLGGAPVTLKVPAGTPNGRTFRVRGRGAPKSDGSRGDLLATVEVQVPAVLDTAAREAVQAYRDASAGKPLRSKLFEEA

SEQ ID NO: 117701 - DNA, 1128 bp, Azoarcus sp. BH72; identical to SEQ ID NO: 63897
  CDS (1)..(1128): transl_table=11

SEQ ID NO: 117702 - protein, 375 aa, Azoarcus sp. BH72; identical to SEQ ID NO: 63898

SEQ ID NO: 117703 - DNA, 1149 bp, Magnetospirillum magnetotacticum MS-1
  CDS (1)..(1149): transl_table=11
atgagcaagcaggactattacgatcttctgggggtcgaaaagggcgcctcgcccgacgacatcaagaaggcctaccgcaaacaggccatgcagttccatccggaccgcaatcctggcaatgccgaggccgagcagaagttcaaggaaatcaacgaagcctacgacgtcctcaaggacgagcagaagcgcgccgcctatgaccgcttcggccacgccgccttcgaacagggcggccccggcggcgggggcggcggcggtttcggcggctttggcggcggcggcttctccgacatcttcgacgagatgttcggcgagttcatgggcggcggacgccggggccagtcaacgggccgcggcgccgatctgcgctacaacatggatatcagcctggaagacgccttcgcgggcaagaccaccacggtcaaggtgccctcgtcggcgccttgcgaggattgcaagggcaccggcggcaaggacggcgccgccccggtcacctgctcggcctgccacggccacggcaagatccgccagcagcagggcttcttcaccatcgaacgcacctgccccacctgccagggcatgggcaagatcatcaaggacccatgccggtcttgcggcggatcgggccgcacccgcaaggaaaagaccctccaggtcaatatccccgccggtgtcgaggacggaacccgtatccgcctggcgggggagggcgaggccggaatgcgcggcgcgccaccgggcgacctctatatcttcctgtccatcgccgcgcaccgcatcttccagcgcgacggcgccaatatcttctgccgcgtgcccatccccatgaccacggcggtcctcggcggcaccatcgaggtccccaccatcgacggctccaaggccaaggtcaccatccccgaaggcacccagaccggaaaccagttccgcctgcggagcaaaggcatgagcgttctgcgttcccccgcccgcggcgacatgttcatccaggccgtggtcgaaacccccgtcaacctcaccaagcgccaaaaagaactcctccacgagttcaacgaagccggcgaaggcgaaaaagccaagaattccccggaaagccaaggcttcttcgccaaggtcaaggaactctgggaagacttgaaggaaggctga

SEQ ID NO: 117704 - protein, 382 aa, Magnetospirillum magnetotacticum MS-1
MSKQDYYDLLGVEKGASPDDIKKAYRKQAMQFHPDRNPGNAEAEQKFKEINEAYDVLKDEQKRAAYDRFGHAAFEQGGPGGGGGGGFGGFGGGGFSDIFDEMFGEFMGGGRRGQSTGRGADLRYNMDISLEDAFAGKTTTVKVPSSAPCEDCKGTGGKDGAAPVTCSACHGHGKIRQQQGFFTIERTCPTCQGMGKIIKDPCRSCGGSGRTRKEKTLQVNIPAGVEDGTRIRLAGEGEAGMRGAPPGDLYIFLSIAAHRIFQRDGANIFCRVPIPMTTAVLGGTIEVPTIDGSKAKVTIPEGTQTGNQFRLRSKGMSVLRSPARGDMFIQAVVETPVNLTKRQKELLHEFNEAGEGEKAKNSPESQGFFAKVKELWEDLKEG

SEQ ID NO: 117705 - DNA, 1128 bp, Nostoc punctiforme PCC 73102
  CDS (1)..(1128): transl_table=11
atggcccgcgactattatgaaatcctgggtgtctctcgtgacaccgacaaagaagaactcaagcaagcttatcgccgtttagcccggaagtatcacccagatgtgaacaaagagccgggggcggaggatcgctttaaagaaattaaccgcgcttatgaggtactctcggaaccagaaacccgcgctcgttacgatcgctttgggccagagggtgtgtcaggtgctggcgctggcttccaagatgtcggcgatatgggtggttttgccgatatttttgaaagcatttttagtggctttgctggcggtatgggtagtcccacgcaacaaagacggcgcagtgggcctgcgaggggcgatgatctgcgactagacttgaagttagactttcgagaagcggtatttggtggcgaaaaagaaattcgtatttcacatttagaaaattgtgaagtctgtagcggttctggtgctaaacctggaacccgcccccggacttgttcgacttgtagcggatcgggtcaagtccgtcgtgtcactagaacaccctttggcagtttcactcaagtctcgacttgtcccacctgtaatggaacagggatggtaattgaagacaagtgtgatgcctgtgatgggaagggcgcaaatcaagttaccaagaaactcaaaattaccattccagctggggtggataatggcactcgcttgcggatttctagtgaaggagatgctggtcaacgtggtggtccttctggggatttgtacgtttacttgttcgtaaatgaggacgaagaattccaacgagatggcattaatattctctcggaaatcaaaattagctacctgcaagcgattttaggttgtcggttagaggtagatacggtagatggccctgtagaactaattattccagccggaactcagccaaataccgtgatgaagctggaaaatcgcggcgtaccccgtttgggtaatcccgtcagtcgtggggatcacatgctgaacgtattaattgatattcccaacaaagtcaccccagaggagagggaactgttggagaagctggctaaaattaagggagatcggactggaaaaggcggtctagaaggatttttgggaaatttatttaagtaa

SEQ ID NO: 117706 - protein, 375 aa, Nostoc punctiforme PCC 73102
MARDYYEILGVSRDTDKEELKQAYRRLARKYHPDVNKEPGAEDRFKEINRAYEVLSEPETRARYDRFGPEGVSGAGAGFQDVGDMGGFADIFESIFSGFAGGMGSPTQQRRRSGPARGDDLRLDLKLDFREAVFGGEKEIRISHLENCEVCSGSGAKPGTRPRTCSTCSGSGQVRRVTRTPFGSFTQVSTCPTCNGTGMVIEDKCDACDGKGANQVTKKLKITIPAGVDNGTRLRISSEGDAGQRGGPSGDLYVYLFVNEDEEFQRDGINILSEIKISYLQAILGCRLEVDTVDGPVELIIPAGTQPNTVMKLENRGVPRLGNPVSRGDHMLNVLIDIPNKVTPEERELLEKLAKIKGDRTGKGGLEGFLGNLFK

SEQ ID NO: 117707 - DNA, 1143 bp, Actinobacillus pleuropneumoniae serovar 1 str. 4074
  CDS (1)..(1143): transl_table=11
atggcaaaaaaagattactacgaagtccttggcttacagaaaggggcaagtgagaacgatattaaacgtgcttataaacgtttagcatctaaacaccacccggataaaaaccaaggcagtaaagacgcagaagaaaaatttaaagaaatcaacgaagcctatgaagtgttaggtgatgctgaaaaacgtgccgcatacgatcaatacggtcacgccgcttttgaacaaggaggtggtgccggcggatttggaggtggcttcggcggaggcggtttcggcggctttgaagacatctttagcgaaatgttcggtggcggttttggcggcggtggtcgccgtaaccatgtcgtacgtggcgatgacttgcgttacgacattgaaatctcgctggaagaagcggttaaaggctgtaaaaaagatattcgtatctcaacacttgccgaatgtgatacctgccacggttccggtgcggagaaaggttcgaaagtggaaacctgttcgcactgtcacggttcgggcagaatccgccgtcagcaaggtttctttgtgacggaagcggtttgtccgagctgtcacggaagcggtaagaaaattgaaaaaccttgcaaatcttgccacggtgacggacgtgttcagaaagcgaaaaacttatcggtaaccattccggcaggtgtggacaccggtaaccaactacgcttatccggcgaaggtgcggcaggcgagaacggtgcgccggcaggtgatttatacgtagtgattcacgttcgtgaacacgatatttttgagcgtgacggttcaaatctttactgcgaagtgccgatcagctttacgatggcggcattaggcggtgagattgaagtaccaacgcttgacggtaaattaaaactgaaaattccggcggaaacccaaaccggcaaattattccgagtgagaggtaaaggtgtggcaagcccacgcggcggttatgcaggcgatttaatttgcaaagtagtagtggaaacaccggttgcgctaaatgacgagcaaaaagacttattacgtaagctggaagaaagtttagccggtaaaagtaaacatcgtccgcaacaagaaagttttttagatagcgtgaaaaacttcttctcaaatttgggtaaacactaa

SEQ ID NO: 117708 - protein, 380 aa, Actinobacillus pleuropneumoniae serovar 1 str. 4074
MAKKDYYEVLGLQKGASENDIKRAYKRLASKHHPDKNQGSKDAEEKFKEINEAYEVLGDAEKRAAYDQYGHAAFEQGGGAGGFGGGFGGGGFGGFEDIFSEMFGGGFGGGGRRNHVVRGDDLRYDIEISLEEAVKGCKKDIRISTLAECDTCHGSGAEKGSKVETCSHCHGSGRIRRQQGFFVTEAVCPSCHGSGKKIEKPCKSCHGDGRVQKAKNLSVTIPAGVDTGNQLRLSGEGAAGENGAPAGDLYVVIHVREHDIFERDGSNLYCEVPISFTMAALGGEIEVPTLDGKLKLKIPAETQTGKLFRVRGKGVASPRGGYAGDLICKVVVETPVALNDEQKDLLRKLEESLAGKSKHRPQQESFLDSVKNFFSNLGKH

SEQ ID NO: 117709 - DNA, 1182 bp, Fusobacterium nucleatum subsp. vincentii ATCC 49256
  CDS (1)..(1182): transl_table=11
atggcaaaaagagactattatgaagtccttggtatagataaaaatgcaagtgaagatgatataaagaaggcatttaaaaaggcagcaatgaagtatcacccagatagatttgcaaatgcaagtgatgctgaaaagaaagatgcagaagaaaaatttaaggaaataaacgaggcttatcaagtcctttctgatgctcaaaagaaacaacaatatgaccaatttggacatgcagcatttgaacaaggtggagcaggttttggtggaggcttcaatgcaggaggctttgactttggagatatttttggagatatctttggtggtggaggtagctttggaggttttgaaggatttagtggatttggtggttcttcaagaagaagctatgtagagcctggaaatgatttaagatataatcttgaaataactttggaagaagcagcaaaaggtgttgaaaaaactattaaatataagagaactggaaaatgtgaatactgtcatggaacaggtggagaagatgataagatgaaaacttgtcctacttgtaatggacaaggaactatcaagactcaacaaagaactatattaggagtaatgcaatctcaatcagtttgtcctgactgtcatggaacaggaaaagtacctgaaaagaaatgtaaacattgtcgtggaacaggaacagcaaaagaaactgttgaaaagaaaattaatgtcccagctggtatagatgatggacaaaaattaaaatatgcaggtctaggtgaagcgagtcaaagcggtggacctaatggtgatttatatatagttattagaataaaacctcatgatatttttataagacaaggggacaatttatattgtgaagtacctatttcatactcaacagctgttttaggtggtgaagtagaagttccaactttaaatggaaagaagactgtaaaagtaccagaaggaacagaaagtggaaaactacttaaagttagtggagaaggaataaaatctcttagaggttatggaaagggagatataattgttaaacttacaatagaaactccaaagaaacttacagataaacagaaagaattattacaaaaatttgaagaaagtttaaatgataaaaattatgaacaaaaatctagctttatgaaaaaagtaaaaaaattctttaaagatataattgactga

SEQ ID NO: 117710 - protein, 393 aa, Fusobacterium nucleatum subsp. vincentii ATCC 49256
MAKRDYYEVLGIDKNASEDDIKKAFKKAAMKYHPDRFANASDAEKKDAEEKFKEINEAYQVLSDAQKKQQYDQFGHAAFEQGGAGFGGGFNAGGFDFGDIFGDIFGGGGSFGGFEGFSGFGGSSRRSYVEPGNDLRYNLEITLEEAAKGVEKTIKYKRTGKCEYCHGTGGEDDKMKTCPTCNGQGTIKTQQRTILGVMQSQSVCPDCHGTGKVPEKKCKHCRGTGTAKETVEKKINVPAGIDDGQKLKYAGLGEASQSGGPNGDLYIVIRIKPHDIFIRQGDNLYCEVPISYSTAVLGGEVEVPTLNGKKTVKVPEGTESGKLLKVSGEGIKSLRGYGKGDIIVKLTIETPKKLTDKQKELLQKFEESLNDKNYEQKSSFMKKVKKFFKDIID

SEQ ID NO: 117711 - DNA, 1122 bp, Rickettsia rickettsii
  CDS (1)..(1122): transl_table=11
atgtcacaaaattattaccaaatactaggggttagtaaaacagctagccaagctgaccttaaaaaagcctacctcaagctagccaagcaatatcaccctgatactactgatgctaaagatgctgaaaagaaatttaaagcaatcaatgccgcttatgatgttctaaaagatgagcaaaaaagagctgcttatgaccgtttgggacacgatgcttttcaaaatcaacaatcacgagggggaggaggaaatcatggcggttttcaccctgatattaacgacatattcggtgacttctttagcgactttatgggaggcagcagaagatcatcacgcccaacttcagctaaagttagaggctcagatttaaaatataatctgacaattaacctagaggaagcatttcacggtatagaaaaaaatattaacttttctagcgcagtaaaatgcaatacttgtcacggtagcggttctgaaaaaggtgaaaccgtaactacttgcgatgcttgcagcggtgttggagcgactagaatgcagcaaggattctttacgatcgaacaagcttgtcataaatgccaaggtaacggacacattataaaaaatccttgcaagaaatgtcatggcatgggacgttaccataaacaacgaaatttatcggtaaacattcctgccggtgttgaaaacggtactagaataagacataccggagaaggggaagcaggtattagaggcggtaatagcggtgatttatacgttgatataacaataaaaccacatgatatttataaagtagacggagcaaatctacattgtaaactacctattagttttgtgaatgctgctcttggaggagagatagaagtaccggtaattgaaggcggaaaagtaagcttaacaattcctgcaggcacacaaaacggtgatcaattaaggctacgcagcaaaggtatgtctaaaatgagatcaactattaggggtgatatgcttacgcatattcatgtcgaagtacctaaaaatttatctaaaagacaacgtgaattactagaagaattcaaaaaagaatccataaatgaaaaagaaaatgacggcagcttttttaataaaatgaaaagtctgtggtcgtaa

SEQ ID NO: 117712 - protein, 373 aa, Rickettsia rickettsii
MSQNYYQILGVSKTASQADLKKAYLKLAKQYHPDTTDAKDAEKKFKAINAAYDVLKDEQKRAAYDRLGHDAFQNQQSRGGGGNHGGFHPDINDIFGDFFSDFMGGSRRSSRPTSAKVRGSDLKYNLTINLEEAFHGIEKNINFSSAVKCNTCHGSGSEKGETVTTCDACSGVGATRMQQGFFTIEQACHKCQGNGHIIKNPCKKCHGMGRYHKQRNLSVNIPAGVENGTRIRHTGEGEAGIRGGNSGDLYVDITIKPHDIYKVDGANLHCKLPISFVNAALGGEIEVPVIEGGKVSLTIPAGTQNGDQLRLRSKGMSKMRSTIRGDMLTHIHVEVPKNLSKRQRELLEEFKKESINEKENDGSFFNKMKSLWS

SEQ ID NO: 117713 - DNA, 1149 bp, Haemophilus influenzae R2846; identical to SEQ ID NO: 63899
  CDS (1)..(1149): transl_table=11

SEQ ID NO: 117714 - protein, 382 aa, Haemophilus influenzae R2846; identical to SEQ ID NO: 63900

SEQ ID NO: 117715 - DNA, 1149 bp, Haemophilus influenzae R2866
  CDS (1)..(1149): transl_table=11
atggcaaaaaaagattactacgaagtccttggcctacaaaaaggggcgagtgaggacgacatcaaacgtgcgtataaacgtttagcgtctaaacatcaccccgataaaaaccaaggcagtaaagaagcagaagaaaaattcaaagaaattaatgaagcttatgaagtattaggcgacgatcaaaaacgcacagcctacgatcaatatggccacgcagcctttgaacaaggtggtggcgcaggtggcttcggtggcggctttggcggtgctgattttggtgatatgttcggtgatatttttggcgatattttcggcggtggtggacgtggtcgtcagcgcgttgttcgtggcgaagacttacgttatgacttagaaattagcctagaagaagccgtaaaaggaacaaccaaagatattcaaatcaatactcttgcacattgtgatagctgtggtggctctggggctgaaaaaggttctaaagtggaaacttgtccgcattgccacggttctggtcgaattcgtcgtcagcaaggtttctttgtatctgaaagtatctgtccaacttgtcatggtagtggtaagaaaattgaaaaaccttgtcgcagctgtcatggagaaggacgagttcataagaaagaaaatctttcagtaaaaattcctgcaggcgtagatacgggcaaccagcttcgcttagctggaaaaggtgcagcaggtgaaaatggcgcaccagcgggagatttatatgttgtgattcacgtgagagaacatcatatttttgaacgtgatggctctaatctttactgtgaagtaccaatcagctttgcaactgcggcattaggtggggaaattgaagtgccaactttagatggcagagtgaaacttaaaatcccagctgaaacgcaaacgggaaaattattccgtatgcgaggcaaaggtgtcgcttctacacgtagtggttatgcgggtgatttaatttgccgtatcgtggtagaaacgccagttaatttaaccagcgaacaaaaagaattactccacaaacttgaggaaagtttacaaggtaaagatttaagtaaacatgcaccaaaatcttcaggatttttagacggtgtgaaaaaattctttgataatttgggtaaatctgacaaataa

SEQ ID NO: 117716 - protein, 382 aa, Haemophilus influenzae R2866
MAKKDYYEVLGLQKGASEDDIKRAYKRLASKHHPDKNQGSKEAEEKFKEINEAYEVLGDDQKRTAYDQYGHAAFEQGGGAGGFGGGFGGADFGDMFGDIFGDIFGGGGRGRQRVVRGEDLRYDLEISLEEAVKGTTKDIQINTLAHCDSCGGSGAEKGSKVETCPHCHGSGRIRRQQGFFVSESICPTCHGSGKKIEKPCRSCHGEGRVHKKENLSVKIPAGVDTGNQLRLAGKGAAGENGAPAGDLYVVIHVREHHIFERDGSNLYCEVPISFATAALGGEIEVPTLDGRVKLKIPAETQTGKLFRMRGKGVASTRSGYAGDLICRIVVETPVNLTSEQKELLHKLEESLQGKDLSKHAPKSSGFLDGVKKFFDNLGKSDK

SEQ ID NO: 117717 - DNA, 1116 bp, Bacillus anthracis str. A2012; identical to SEQ ID NO: 63901
  CDS (1)..(1116): transl_table=11
  misc_feature (58)..(58): r is g or a
  misc_feature (307)..(307): k is g or t
  misc_feature (330)..(330): w is a or t
  misc_feature (331)..(331): w is a or t

SEQ ID NO: 117718 - protein, 371 aa, Bacillus anthracis str. A2012; identical to SEQ ID NO: 63902
  misc_feature (20)..(20): The Xaa at location 20 stands for Glu, or Lys.
  misc_feature (103)..(103): The Xaa at location 103 stands for Cys, or Gly.
  misc_feature (111)..(111): The Xaa at location 111 stands for Asn, or Tyr.

SEQ ID NO: 117719 - DNA, 1131 bp, Crocosphaera watsonii WH 8501
  CDS (1)..(1131): transl_table=11
atgccaggtgactactacgatattcttggggttgaccgtaacgccaataaagaagacttaaaaaaagcttatcgccgtctcgcgcgacaatatcaccctgatgttaacaaagaagcaggggcagaagaacgattcaaagaaattaaccgggcctacgaagtattatccgaaccagaaacccgtagtcgctatgatcagtttggagaagcaggggtcagtggttccggaggcttcaactacggcgatatgggagatatgggcggttttgccgatatttttgagaccatttttagtggttttgggggcggtatgggaaccggcggaacccgtcgtcgtaccggtccgaccaaaggggatgacttacgcctcgatcttaaattagatttccgtgaagctgtttttggcggagaaaaagaaattcgtattccccacctagaaacctgtcaggtttgtaaaggagatggggcaaaaccaggaactggagcaaaaacttgtcccacttgtaacggacaaggccaggttcgtcgtgccactcgtaccccctttggcagttttgctcaagtaacaacctgtcccacttgtaacggtcaaggacagataatagaagagaaatgcgaagtctgtaatggtgccggacgcagacaagtgacagaaaaagttaaaatcaccattcccggaggggttgatgatggaacccgtctgagagtttctcgcaaaggggatgcaggtttacggggaggaacaccaggggatctttacgtttacctctatgtggaagcagataaggtgtttactcgggacaaaatgaacatcctttcggagatcaccattagctatctccaagccattttaggatgtactgttgccgtggatacagtggatggggaacaagagttaagcattccggctggaacccaacctaatactatcctgactctagaaaatttaggggttcctaaactgggtaatgatgctatccgtggggaccatctgattacggtaaaagttgacattcccacccgtatcaacgcagaggaacgggatctcctggaaaaattagcccatattaagggtcaaagtcacggtaagggtggtttagaaggatttttagggagtttatttcacaagtga

SEQ ID NO: 117720 - protein, 376 aa, Crocosphaera watsonii WH 8501
MPGDYYDILGVDRNANKEDLKKAYRRLARQYHPDVNKEAGAEERFKEINRAYEVLSEPETRSRYDQFGEAGVSGSGGFNYGDMGDMGGFADIFETIFSGFGGGMGTGGTRRRTGPTKGDDLRLDLKLDFREAVFGGEKEIRIPHLETCQVCKGDGAKPGTGAKTCPTCNGQGQVRRATRTPFGSFAQVTTCPTCNGQGQIIEEKCEVCNGAGRRQVTEKVKITIPGGVDDGTRLRVSRKGDAGLRGGTPGDLYVYLYVEADKVFTRDKMNILSEITISYLQAILGCTVAVDTVDGEQELSIPAGTQPNTILTLENLGVPKLGNDAIRGDHLITVKVDIPTRINAEERDLLEKLAHIKGQSHGKGGLEGFLGSLFHK

SEQ ID NO: 117721 - DNA, 1113 bp, Exiguobacterium sibiricum 255-15
  CDS (1)..(1113): transl_table=11
atgcacgtggaaaaacgcgattattatgaagtgttaggcgtcgcgcgcgatgcctcagcagcagagattaaacgagcttaccgaaaactagcccggacgtatcatccggatgtcaataaagaggcggatgccgatcaaaagttcaaagagttatcggaagcctatgaagttttgtcagacgacaatcaacgtgcccgttacgaccagttcggtcaccaggatccatcgcaaggcggtggtggatttggcggagcagaaggtttcggcgatatctttgatatgttcttcggcggcggacgccgtcaagatccgaatgccccgcgtaaagggcaggatttacaatatgtcgaagaaatcgacttcatggaagctttctcaggtgtcgagaaagtcattacgattccagtcgaagaagattgcggaacatgtcacggttcaggtgctaaaccgggaacacatccggaaacatgtaaacgttgtggcggatcaggacacatcaacgtcgagcaaaacacgatgttcggacgtgtcgtcaatcaaacgacatgttcgacatgccacggtcgtggacaaatcgtcaaagaaccgtgtgaaacatgccgcggagcaggtcgtgtccgtaaaaacaaagatgttcgtgtcaagattccagccgggattgacaacggtcaacagattcgtctggcaggtaaaggggaagccggcgtcaacggcggaccattcggagatctgtacgtcgtcgtccgtgtccgcgaacatgaattgtttgaacgggtcgacgatcatatcgtgatggatatgccgcttacgttcgcccaagcgacgcttggcgatgaaattgaagtgccgacggttcatgggaaagtcagcttaaagattccggccggaacacaaaccggttcacgattccgtctgcgcggcaaagggatgccgaacgtccgttcaggccatcacggggatcaatatgtcaacgtcgtcatcatcacaccaaaaaatctgacagaccgtcaaaaagaactactccgtgagttcaatgagatcagtgatgaaaaaggtgtcgaagaacaacacgaaggcgtattcagccggattaaaacattctttacagggtga

SEQ ID NO: 117722 - protein, 370 aa, Exiguobacterium sibiricum 255-15
MHVEKRDYYEVLGVARDASAAEIKRAYRKLARTYHPDVNKEADADQKFKELSEAYEVLSDDNQRARYDQFGHQDPSQGGGGFGGAEGFGDIFDMFFGGGRRQDPNAPRKGQDLQYVEEIDFMEAFSGVEKVITIPVEEDCGTCHGSGAKPGTHPETCKRCGGSGHINVEQNTMFGRVVNQTTCSTCHGRGQIVKEPCETCRGAGRVRKNKDVRVKIPAGIDNGQQIRLAGKGEAGVNGGPFGDLYVVVRVREHELFERVDDHIVMDMPLTFAQATLGDEIEVPTVHGKVSLKIPAGTQTGSRFRLRGKGMPNVRSGHHGDQYVNVVIITPKNLTDRQKELLREFNEISDEKGVEEQHEGVFSRIKTFFTG

SEQ ID NO: 117723 - DNA, 1188 bp, Prosthecochloris aestuarii DSM 271; identical to SEQ ID NO: 63903
  CDS (1)..(1188): transl_table=11

SEQ ID NO: 117724 - protein, 395 aa, Prosthecochloris aestuarii DSM 271; identical to SEQ ID NO: 63904

SEQ ID NO: 117725 - DNA, 1095 bp, Xylella fastidiosa Ann-1
  CDS (1)..(1095): transl_table=11
atgagtaaacgtgattactaccaagtgttgggtgtgcctcgcactgccagcgaagatgatctgaaaaaagcgtatcgtcgctgtgcgatgaaataccacccagatcgtaatcctggtgatgcagctgcggaggcggcctttaaggaatgcaaggaagcttatgaggttcttgccgacacgaaaaaacgaaagttatacgatacgcatggtcatgccgctttcgaacatggcgtggggagcggaaatgcccccgacatgaacgatatcttcggtaacatttttggtggcgcgcgcgcttcgcggcgtggtgccgatgtcggttacatggttgagctggatttggaagaagctgttgctggtgttgagcgacagatccagatacccactttggttgaatgtacccactgccatgggagtggatcagaagacggtcacgtcgagacgtgcggtacgtgccgcggtagcggtcaagtgaggattcaacgcggcatctttgccatgcagcagacttgcccgcattgcggcggacgaggcgtgattattcgaaatccgtgtaaggtctgcaatggtgctgggcgtgttgaggatcataagacgctgtcagtgaagatccctgctggtgtagacaatggtgatcgtattcgcctcagcggtgagggcgagcagggtccggatggggtgcccccaggggatctatatgtggaagtgcgtgtgcgtgagcatccgatcttccagcgtgatggtgatgatttgcactgtgaagtgccggtgcgtatttcacaggctgcgcttggcgacattgtgcgtgtagctacgcttgatggggaggcagaaattcgtattcctgcggagacccagtctggtaaactgttccgcttgcgtggcaagggggtacgctcggtgcgtagtcgtactgaaggcgatttgtactgtcgtattgtggttgagactcctgtgaacttgactgctgagcagcgtaatctgttagagcaatttgaaatgactttcgctggtgaggatgcgcgtaagcattcccctaaatcggctacttttcttgatggtgtaaaaagcttctgggaccggatgacgtcttaa

SEQ ID NO: 117726 - protein, 364 aa, Xylella fastidiosa Ann-1
MSKRDYYQVLGVPRTASEDDLKKAYRRCAMKYHPDRNPGDAAAEAAFKECKEAYEVLADTKKRKLYDTHGHAAFEHGVGSGNAPDMNDIFGNIFGGARASRRGADVGYMVELDLEEAVAGVERQIQIPTLVECTHCHGSGSEDGHVETCGTCRGSGQVRIQRGIFAMQQTCPHCGGRGVIIRNPCKVCNGAGRVEDHKTLSVKIPAGVDNGDRIRLSGEGEQGPDGVPPGDLYVEVRVREHPIFQRDGDDLHCEVPVRISQAALGDIVRVATLDGEAEIRIPAETQSGKLFRLRGKGVRSVRSRTEGDLYCRIVVETPVNLTAEQRNLLEQFEMTFAGEDARKHSPKSATFLDGVKSFWDRMTS

SEQ ID NO: 117727 - DNA, 1137 bp, Streptococcus suis 89/1591; identical to SEQ ID NO: 63905
  CDS (1)..(1137): transl_table=11

SEQ ID NO: 117728 - protein, 378 aa, Streptococcus suis 89/1591; identical to SEQ ID NO: 63906

SEQ ID NO: 117729 - DNA, 1131 bp, Croceibacter atlanticus HTCC2559
  CDS (1)..(1131): transl_table=11
atgaaagaagattattacgacatattaggaattagcaaaggtgctagtgatgcagaaattaaaaaagcataccgtaagaaggccataaaatatcatccagataaaaatcctggtaatgaagaggcagaggcaatgtttaaaaaagctgcagaagcttatgaagttttaagagatcctcaaaagagagcacgttacgatcaatatggtcaccaagctttcgatggttctggcggctttggcggtggcggtatgaatatggacgatatctttagccaatttggtgatatctttggcggcgcatttggcggcggcggtggcggtttctctggttttggaggcggctttggtggcggcggacaacgccgtgtaaaaggaagcaacctaaggattagagtaaaacttacacttgaggaaattgcaaatggtgtagagaaaaaaataaaagtaaaacgaaagaaacaagcagaaggtacaacgtttaaaacctgtacaacctgtaatggttctggacaagtaacaagagtaaccaatacaattttaggtagaatgcaaactgcagctacttgtaacgtttgtaatggtgcagggcaaattgttgagtctaaaggctctggagcagatgctcaaggtatgacaactgttgaggaaactgtaagcattaaaataccagcaggtgttgtagatggaatgcagcttaaagttactggaaaaggtaacgaagcgccaggaaatggtattgcaggagacttattggtagctattgaagaaaaagagcatcctaacttacaacgtgaaggagacaatcttcactacgatctttatattagcttctctgaagctgctttaggagcatcaaaagaaatagacactgtaacgggtaaagtaagaattaagatagatgaaggtacccaaagtggtaagatattaagattgagaggaaaaggtattcctagtattaataactatggaaaaggagaccttttagtacacgtaaatgtgtggactcctaagacattaaacaaagaacagaaagagttttttgaaagaatgcagaatgatgaaaactttataccaaatccagaaggtggcgataagtcgttttttgagaaagtaaaagatatgttttcataa

SEQ ID NO: 117730 - protein, 376 aa, Croceibacter atlanticus HTCC2559
MKEDYYDILGISKGASDAEIKKAYRKKAIKYHPDKNPGNEEAEAMFKKAAEAYEVLRDPQKRARYDQYGHQAFDGSGGFGGGGMNMDDIFSQFGDIFGGAFGGGGGGFSGFGGGFGGGGQRRVKGSNLRIRVKLTLEEIANGVEKKIKVKRKKQAEGTTFKTCTTCNGSGQVTRVTNTILGRMQTAATCNVCNGAGQIVESKGSGADAQGMTTVEETVSIKIPAGVVDGMQLKVTGKGNEAPGNGIAGDLLVAIEEKEHPNLQREGDNLHYDLYISFSEAALGASKEIDTVTGKVRIKIDEGTQSGKILRLRGKGIPSINNYGKGDLLVHVNVWTPKTLNKEQKEFFERMQNDENFIPNPEGGDKSFFEKVKDMFS

SEQ ID NO: 117731 - DNA, 1158 bp, Sulfitobacter sp. EE-36
  CDS (1)..(1158): transl_table=11
atggccaaacgtgattactacgagacgctcggcgtcgctaaaggtgcctctgccgacgagatcaaaaagggctaccgcaccaaagccaaggaattgcaccccgatcgcaatgccgacaaccccaatgccgaagcccagttcaaagaagcgaacgaagcttacgaagtcctgaaagaccccgaaaagaaagctgcctatgaccgttatggtcatgcggcgtttgaagggggtatgggcggtggcggtggccatcgtggcggcggctttggcggcggcggtcagggcgacttctcttcggcgttctctgacgtgtttgacgacctgttcggcgacttcatgggtggccagcggggcggaggcggacgccgtgccgcacgcggtgccgatctgcgctataacctcgggattacgctcgaagacgcgtatcggggcatgcagaagtcgatcaacgtgcccacctctgtggcctgcgattcctgtaacggttccgggtcagaaggcggcgcagagccgaccacctgccccacctgttccggtatgggcaaggtccgtgctcagcagggctttttcacggtcgaacgcacctgtccgacctgttcgggcatgggtcagatcgtcaagaacccctgtaaatcctgccgcggtgccgggcgtgttgaaaaagaccgtgcactgtcggtgaacatccctgcgggcgttgaaaccggcacacgtatccgtctggccggcgaaggcgaagcaggcatgcgcggcgggccgtcgggtgatctgtacatctttatcgaggtgcaggaccacaagctgttcgaacgcgacgggccaaacctgttctgccgcgttcccgtttcgatgagcaccgccgcccttgggggcagcatcgaggtgccaacgatcgacggtggccgtggccgcgtgcaaatccctgcgggcagccagtccggtcgccagatgcgtctgcgcggcaagggtatgcccccgctgcgtgggggtggtacgggcgatatgatcatcgaactggcggtcgagacgccggtgaacctgaccagccgccaaaaggaattgttgcaggagttcgaaaaggaatcctccaacaacaatcctgaaagcagcagcttcttttcgtcggtgaaatccttctgggattcgatgaaagggtaa

SEQ ID NO: 117732 - protein, 385 aa, Sulfitobacter sp. EE-36
MAKRDYYETLGVAKGASADEIKKGYRTKAKELHPDRNADNPNAEAQFKEANEAYEVLKDPEKKAAYDRYGHAAFEGGMGGGGGHRGGGFGGGGQGDFSSAFSDVFDDLFGDFMGGQRGGGGRRAARGADLRYNLGITLEDAYRGMQKSINVPTSVACDSCNGSGSEGGAEPTTCPTCSGMGKVRAQQGFFTVERTCPTCSGMGQIVKNPCKSCRGAGRVEKDRALSVNIPAGVETGTRIRLAGEGEAGMRGGPSGDLYIFIEVQDHKLFERDGPNLFCRVPVSMSTAALGGSIEVPTIDGGRGRVQIPAGSQSGRQMRLRGKGMPPLRGGGTGDMIIELAVETPVNLTSRQKELLQEFEKESSNNNPESSSFFSSVKSFWDSMKG

SEQ ID NO: 117733 - DNA, 1143 bp, Erythrobacter sp. NAP1
  CDS (1)..(1143): transl_table=11
atggctacccaaacagattattactccctgctcgaagtatcgcgagacgccgacggctcgacgatcaagtccgcctaccgcaagctcgcgatgaaatggcacccggaccgcaatccgggcaatgcagaggctgaagcaaagttcaaggcctgcaacgaggcctatgaatgcctcaaggaccctcagaagcgcgcggcctatgaccgcttcggccatgaagccttcacgcaaggcatgaatggcggtggcggccccggcggtgggcacgggcctgatggttttgccgatatcggcgacattttcgaaacgatcttcggcagcgcctttggcggcggtggaatgggcgcacagcgtcaacgccagcgccgcggcgcagacctgcgttacgacatgcaagtcacgctcgacgaggccttccacggcaagtcgacagagatcgagatcgaagtttcgcaaagctgtgacacttgcgacggttcaggcgcggctcccggaacgagcgagcgcacctgcaacctttgccatggtcagggttcagtacgcgcaaagcagggcctgttcgtcgttgaacggccatgcccaacctgcggcgggcgcggccaggtcatcgaagatccgtgcggcgattgccgcggcgaaggtcgcgtcgacaaggcgcaggcgcttcaggtcgatatcccgccgggcgtcgacaccggcacccgcatccgcctttccggcaagggagaggcaggccagcgcggtgcgcctccgggtgatctgtacatcttcgtgcatgtgaaagagcacccgctgttcgagcgcgaagggacgacgctcgcgacgcgtgtaccgatcagcttcaccacggcggccctcggcggcagcgtcgacattcccgacctcgacggttcgaccaacacggtcgacatcccggtcggcattcagtcgggcaaacagctgcgcgttcgcggtgccggtatgccggtgctgcaagggcgaggtcgcggcgatcttgtggtcgaggtgaaggtcgaaactccgaccaagctgagccgcaagcagcgcgagatcctcgagcaattccgggatacggaaaccggcgaggaatgtcctgaaagccgtagtttcttctcgaagatcaaggaagcgttcggcggctga

SEQ ID NO: 117734 - protein, 380 aa, Erythrobacter sp. NAP1
MATQTDYYSLLEVSRDADGSTIKSAYRKLAMKWHPDRNPGNAEAEAKFKACNEAYECLKDPQKRAAYDRFGHEAFTQGMNGGGGPGGGHGPDGFADIGDIFETIFGSAFGGGGMGAQRQRQRRGADLRYDMQVTLDEAFHGKSTEIEIEVSQSCDTCDGSGAAPGTSERTCNLCHGQGSVRAKQGLFVVERPCPTCGGRGQVIEDPCGDCRGEGRVDKAQALQVDIPPGVDTGTRIRLSGKGEAGQRGAPPGDLYIFVHVKEHPLFEREGTTLATRVPISFTTAALGGSVDIPDLDGSTNTVDIPVGIQSGKQLRVRGAGMPVLQGRGRGDLVVEVKVETPTKLSRKQREILEQFRDTETGEECPESRSFFSKIKEAFGG

SEQ ID NO: 117735 - DNA, 1128 bp, Synechococcus sp. RS9917
  CDS (1)..(1128): transl_table=11
atggccgattactacgagatgctcggcgtcggtagagacgccgatgccgacacgctgaagcgggcctatcggcgtctcgctcgccagtatcacccggatgtgaacaaggatcccggcgcggaggatcgcttcaaggagatcgggcgggcctacgaagtgctcagcgatccccagagccgtgcccgctacgaccagttcggggaagcggggctcggtggcgctgccggcatgcccgatatgggcgacatgggcggcttcgccgacctgttcgagaccttcttcagtgggttcggcggtgctggcagcggtggtcggcagcggcggcgtgggccccagcagggcgacgatctgcgctacgacctcaccattgacttcgaacaggctgtcttcgggcaggagcgggagatccggattccccacctcgaaacctgcaccacctgcaacggcagcggcgccaaaaccggcagtggacccaccacctgcaccacctgtggcggcgtgggtcaggtgcgtcgcgccacccgcacccccttcggcagtttcacccaggtggcggaatgtcccagctgcaatggcagcggtcaggtgatcgccgatccctgcaccgcctgtggtggtcagggggtgcagcaggtgcgcaagaagctgcgcatcaacattcctgctggagtggatacgggcacccgcctgagggtcgccggtgagggcaacgctggcctgcggggtggtcccgccggtgatctgtatgtgtttctcacggtcaaaccccaccccagccttcgccgggatggcctcaccgtgctctctgaggtgaaggtcagttatctgcaggcgattctcggcgacacgatcgaagtggaaaccgtggatgggcccgccgatctcgagattccggcagggacccaacccaatgctgtgctcaccctcgagaacaagggaattcccaaactgggcaacccggtggcccgcggcaatcaacgcatcagcgtcacggtgcagctgcccacccgactcaatgacgatgaacggcgtctgcttgaggatctggccggtcaccactcggcccgcggtgagcaacaccatcaccacaagagtggcctgttcgcccgcttgttcgggcaacgctga

SEQ ID NO: 117736 - protein, 375 aa, Synechococcus sp. RS9917
MADYYEMLGVGRDADADTLKRAYRRLARQYHPDVNKDPGAEDRFKEIGRAYEVLSDPQSRARYDQFGEAGLGGAAGMPDMGDMGGFADLFETFFSGFGGAGSGGRQRRRGPQQGDDLRYDLTIDFEQAVFGQEREIRIPHLETCTTCNGSGAKTGSGPTTCTTCGGVGQVRRATRTPFGSFTQVAECPSCNGSGQVIADPCTACGGQGVQQVRKKLRINIPAGVDTGTRLRVAGEGNAGLRGGPAGDLYVFLTVKPHPSLRRDGLTVLSEVKVSYLQAILGDTIEVETVDGPADLEIPAGTQPNAVLTLENKGIPKLGNPVARGNQRISVTVQLPTRLNDDERRLLEDLAGHHSARGEQHHHHKSGLFARLFGQR

SEQ ID NO: 117737 - DNA, 1122 bp, Synechococcus sp. WH 5701
  CDS (1)..(1122): transl_table=11
atggccgagtactacgacctgctgggggtgtcccgcgacgcagacgccgacaccctcaagcgggcctaccgacgtctcgcccgccagtaccaccccgacatcaacaaggagcccggcgcggaggaccgcttcaaggagatcggccgggcctacgaggtgctcagtgatccccagacccgggcccgctacgaccagttcggtgaagcgggtgtctccggtgccggagcccccgacatgggcgacatgggagggttcgccgatctcttcgagacgttcttcagtggtttcggcggtgccgccgctggcggcggagccggaggtggcccccgccgtcgtggtccccgccagggggacgacctccgcctcgatctcagcatcagcttcaacgaggcggtcttcggccaggagaaggaggtacagatccgtcacctggaaacctgtgccacctgccagggcagcggcgccaagagcggcagcggccctaccacctgcggcacctgcgctggtcagggtcaggtgcgccgggccacccgcacccccttcggcagcttcacccaggtcgccccctgccccacctgtgagggaagcggccaggtgatcgctgacccctgcggcgcctgtggcggccagggggtccagcaggtgcgcaagaagctgcggatcacgatccccgccggtgtcgactccggcacccgcctgcgcgtggctggcgagggcaatgccggccaacgcggcggtcccgctggtgacctctacgtgtacctgttcgttcaggcccacgacaagctgcgtcgcgacgggatccacatccattccgatgtgacggtgaactacctccaggcgatcctcggcgacacgatcgaggtggacacggtggatggggcagccaccctggagattcctgcgggcacccaacccggcaccaccctcaccctcacgggcaagggcattccgaagctgggcaacccggtggcccggggcaaccacctcttcaacgtgaaggtgcaggtgcccaccaagctcagcagccacgaacgggagctgctcgaggagctggccggtcaccattccaccaaggatcacccccacaagagcggcctgttcggcgggctgttcggttag

SEQ ID NO: 117738 - protein, 373 aa, Synechococcus sp. WH 5701
MAEYYDLLGVSRDADADTLKRAYRRLARQYHPDINKEPGAEDRFKEIGRAYEVLSDPQTRARYDQFGEAGVSGAGAPDMGDMGGFADLFETFFSGFGGAAAGGGAGGGPRRRGPRQGDDLRLDLSISFNEAVFGQEKEVQIRHLETCATCQGSGAKSGSGPTTCGTCAGQGQVRRATRTPFGSFTQVAPCPTCEGSGQVIADPCGACGGQGVQQVRKKLRITIPAGVDSGTRLRVAGEGNAGQRGGPAGDLYVYLFVQAHDKLRRDGIHIHSDVTVNYLQAILGDTIEVDTVDGAATLEIPAGTQPGTTLTLTGKGIPKLGNPVARGNHLFNVKVQVPTKLSSHERELLEELAGHHSTKDHPHKSGLFGGLFG

SEQ ID NO: 117739 - DNA, 1131 bp, Synechococcus sp. WH 7805
  CDS (1)..(1131): transl_table=11
atggccgattattacgagcttctcggtgtcagcagggatgccgatgctgacactctcaagcgtgcctaccgccgtctggctcgccaataccacccggatatcaacaaggagcccggagccgaagaccgtttcaaggagatcggccgcgcctatgaggtgctcagcgatcctcaaacccggggtcgttacgaccagttcggagaggcggggctcggtggtgccgccggcatgcccgacatgggcgacatgggtggtttcgcagaccttttcgaaaccttcttcagcggcttcggaggtgcggcaggtggaggacgtcagcagcgtcgccgcggcccccagcagggtgatgatctccgctacgacctcacgatcgatttcgagcaggcggtgttcggccaggaacgagagattcgtgttccccatctcgaaacctgcaccacctgtggtggtagtggggccaagagcggcagtggcccaaccacctgttccacctgcggaggtgtcggccaggtgcgccgggccacccgtaccccctttggaagtttcactcaggtggctgaatgcccaacctgcaacggcagcggacaggtgatcgccgatccctgtaatgcctgtggaggacaaggtgtcgtgcaggtacgcaaaaaactgcgaatcaatattcctgctggagtcgatacgggaacgcgactgcgcgttgccggtgagggcaatgctgggctccgcggtggtccctccggggatctttatgtgttcctcaccgtgaagaaccatcccacgctccgtcgcgacggactcaccgtgctgtcggaggtgaaggtgagttatctgcaggcgatcctcggcgacaccatcgaagtggagacggtggatggccccaccagcctggagattcccgccggtacccagcccaatgccgtgatcacccttgagaacaagggcattcccaagttgggcaaccctgtggctcggggaaatcagcgggtcgccgttacggtgaaactacccacccgactcaataacgaggagcgtgggctgcttgaggagcttgcgggtcatcactccgcgaggggggaacagcatcaccatcacaagagcggactgtttgcgcgtctctttggtcagcgctga

SEQ ID NO: 117740 - protein, 376 aa, Synechococcus sp. WH 7805
MADYYELLGVSRDADADTLKRAYRRLARQYHPDINKEPGAEDRFKEIGRAYEVLSDPQTRGRYDQFGEAGLGGAAGMPDMGDMGGFADLFETFFSGFGGAAGGGRQQRRRGPQQGDDLRYDLTIDFEQAVFGQEREIRVPHLETCTTCGGSGAKSGSGPTTCSTCGGVGQVRRATRTPFGSFTQVAECPTCNGSGQVIADPCNACGGQGVVQVRKKLRINIPAGVDTGTRLRVAGEGNAGLRGGPSGDLYVFLTVKNHPTLRRDGLTVLSEVKVSYLQAILGDTIEVETVDGPTSLEIPAGTQPNAVITLENKGIPKLGNPVARGNQRVAVTVKLPTRLNNEERGLLEELAGHHSARGEQHHHHKSGLFARLFGQR

SEQ ID NO: 117741 - DNA, 1131 bp, Pseudoalteromonas tunicata D2
  CDS (1)..(1131): transl_table=11
atgtcaaaacgcgattattacgaagtacttggtgttgagcgcgatgccagcgaacgtgacatcaaaaaagcctataaacgtttagcgatgaaataccatcctgatcgcaccgcaggtgataaagatcttgaagctaaattcaaagaagtaaaagaagcgtatgagattttaaccgatagccaaaaacgcaaaacctatgaccaatatggtcacgctgcatttgaacaaggtggcggacatggtggttttggtggtggccaaggtgatttcggcgatatttttggtgatgtattcggtgatattttcggtggcggtggtcgtcgtcaatctcgtcagcaacgtggtgccgatttacgttacaacatggatttaagcttagaagaagcggttcgtggcaaaagtgttgaaataaaagtaccgacttgggtttcatgtgatccatgtgatggtagtggtgcaaaagcaggctctaaaccaactacgtgtggtacatgtcatggctcgggtcaggtgcaaatgcgccaaggattttttgctgttcagcaaacatgtccaacctgtagtggtcgtggccaaatcatttcagacccatgtaataagtgtcatggtcaaggccgagttgagaaaactaaaaccttgtctgtgaaaattccagctggcgttgatacgggtgatcgcattcgtttatcaggcgagggtgaagccggactcaatggtgcaccagcaggtgatttatatgttcaggtttctgttcgtgaacacgctatttttgtgcgtgatggtaataacttgtactgtgaagtgccaattagttttaccacagcagcattaggtggggatgttgaagtgccgacacttgatggtcgtgccaagttaaaaatcccgtcagagtgccaaactgataaaatgttccgcttacgtgcaaaaggtgttaaatctgtacgaagtggtgcaattggtgacttaatttgtaaagttgtgattgaaacgcctgtgaatttgaatgaacgtcaaaaagaattattacgtgaactcgaagaaagcatgggaagcaataccagtaaaaatagacctaaagaacaaggtttttttgatggtgtgaaaaagttttttgatgacttaactaagtaa

SEQ ID NO: 117742 - protein, 376 aa, Pseudoalteromonas tunicata D2
MSKRDYYEVLGVERDASERDIKKAYKRLAMKYHPDRTAGDKDLEAKFKEVKEAYEILTDSQKRKTYDQYGHAAFEQGGGHGGFGGGQGDFGDIFGDVFGDIFGGGGRRQSRQQRGADLRYNMDLSLEEAVRGKSVEIKVPTWVSCDPCDGSGAKAGSKPTTCGTCHGSGQVQMRQGFFAVQQTCPTCSGRGQIISDPCNKCHGQGRVEKTKTLSVKIPAGVDTGDRIRLSGEGEAGLNGAPAGDLYVQVSVREHAIFVRDGNNLYCEVPISFTTAALGGDVEVPTLDGRAKLKIPSECQTDKMFRLRAKGVKSVRSGAIGDLICKVVIETPVNLNERQKELLRELEESMGSNTSKNRPKEQGFFDGVKKFFDDLTK

SEQ ID NO: 117743 - DNA, 1134 bp, Oceanospirillum sp. MED92
  CDS (1)..(1134): transl_table=11
atgtcgaaacgagattattacgaagtattaggtgtttcccgagattcatctgatcgcgatatcaagaaagctttccgccgtatggcgatgaaatatcatccggaccgtaacccggacgataaggaagcagaagaaagcttcaaagaagttaacgaagcctacgaagtcctgtctgatgcgcagaaaaaagccgcttatgaccagtatggtcatgccggtgtcgatccaaatatgcgtggcggccacggtggtggttttgagggtaacttctcggatattttcggtgatgtcttcggcgatatcttcggtggcggcggtggtcgtggaggtcgcagctctgtgcagcgtggtgccgaccttcgttacaacatggagatgacactggaagaagcggttcgtggtgttgaaaaagagatccgtgtcccaacacttgtcggttgtgaaacctgtgatggctctggtgctaaaccaggtacctcagcaaagatctgtggtacttgtggtggccaggggcaggttcgtatgcagcagggattcttctctgtacagcagacctgcccaacctgtcatggcgaaggcaaggtgatctctgacccgtgtaatgactgtcatggtcatggccgtatagagaaaaccaaaacccttaacgttaagattccggcgggtgttgatacgggtgatcgtatccgtttggccggtgaaggcgaagcaggtactcatggtggtcctgcgggcgatctgtatgttcaggtgcatgttaaggatcacccgatctttgaacgtgacggtaagcacctgtactgtgaagtcccgatcagctttgttgatgcagcattgggtggtgaacttgaagttccaacactggatggtcgcgttaagctgaaagtgccttctgaaactcagaccggtaagatgttccgtctgcgtggtaagggtatctcacctgtacgtggtggctcgacgggtgatctgctggttaaggttgtggtggaaacgccggttaacctgagcagccgacagaaagagctgttacgtgagttccaggatgagatggagcagggtacgcataagcacagcccgaaaaagcacggcttcttcgattcagtgaagaagttttttgaagatatgacctaa

SEQ ID NO: 117744 - protein, 377 aa, Oceanospirillum sp. MED92
MSKRDYYEVLGVSRDSSDRDIKKAFRRMAMKYHPDRNPDDKEAEESFKEVNEAYEVLSDAQKKAAYDQYGHAGVDPNMRGGHGGGFEGNFSDIFGDVFGDIFGGGGGRGGRSSVQRGADLRYNMEMTLEEAVRGVEKEIRVPTLVGCETCDGSGAKPGTSAKICGTCGGQGQVRMQQGFFSVQQTCPTCHGEGKVISDPCNDCHGHGRIEKTKTLNVKIPAGVDTGDRIRLAGEGEAGTHGGPAGDLYVQVHVKDHPIFERDGKHLYCEVPISFVDAALGGELEVPTLDGRVKLKVPSETQTGKMFRLRGKGISPVRGGSTGDLLVKVVVETPVNLSSRQKELLREFQDEMEQGTHKHSPKKHGFFDSVKKFFEDMT

SEQ ID NO: 117745 - DNA, 1131 bp, Flavobacteria bacterium BBFL7
  CDS (1)..(1131): transl_table=11
atgacagatttttatgacatattaggcatctcaaaaggtgccacagctgcagaaattaaaaaagcttaccgtaaaaaagcaattgagtttcacccagataaaaatccaggtgacgctacagctgaggagaattttaagaaagctgcagaggcttatgaaaccttaagtgatccacagaagaaggcacgttatgaccagttaggtcatcaagcttatacgtctggtggagctggtggtttcggcggcggcggtttcggcggtatggatatggatgacatattcagtcagttcggagacattttcggcggtggtggattttctggtttcggcggtggcggcggctttggcggcggcggacgtcgtagagttaaaggtaaggacttgcgtataagagtttctttaacactagaagaggcagcagtaggagttgagaaaaaagtaaaggtgaagcgtaaaaagcaagcgcctggagttacttataaaacatgtactacttgtggtggatcgggacaggttactcgtattcagaataccatattaggtcgtatgcaaactagtgcgccttgtaatgtgtgtggtggtgctggacagaccatggataaaaaacctgctggagcagatgcacaaggtctcatcatagatgaagagactgtatctattaaaatacctgctggtgtggaaacggacatgaggttgaaggtcagtggaaaaggaaacgaagcgcctggaaatggagtttctggtgatctattagtagatatagaagttaaggaacatgctgaactacagcgagaaggtaataatcttcattatgatttatatgtaagtgtgccagaagctgtgctagggactactaaagaaatacaaactgtaacaggtaaagtgcgtataccaattgaagctggaattcaaagtggtaaaattctgaggttgagaggtaaaggtatgcctagtgtaaacgggtatgctacaggtgatttattagtacatgtaaatgtgtggacaccacgtaatttatctagagatcaaaaagagttttttgaatccatgatggcagactctcattttgaaccagcacctgaaaaaggagataagtctttttttgagaaagtaaaggacatgttttcttaa

SEQ ID NO: 117746 - protein, 376 aa, Flavobacteria bacterium BBFL7
MTDFYDILGISKGATAAEIKKAYRKKAIEFHPDKNPGDATAEENFKKAAEAYETLSDPQKKARYDQLGHQAYTSGGAGGFGGGGFGGMDMDDIFSQFGDIFGGGGFSGFGGGGGFGGGGRRRVKGKDLRIRVSLTLEEAAVGVEKKVKVKRKKQAPGVTYKTCTTCGGSGQVTRIQNTILGRMQTSAPCNVCGGAGQTMDKKPAGADAQGLIIDEETVSIKIPAGVETDMRLKVSGKGNEAPGNGVSGDLLVDIEVKEHAELQREGNNLHYDLYVSVPEAVLGTTKEIQTVTGKVRIPIEAGIQSGKILRLRGKGMPSVNGYATGDLLVHVNVWTPRNLSRDQKEFFESMMADSHFEPAPEKGDKSFFEKVKDMFS

SEQ ID NO: 117747 - DNA, 1122 bp, marine gamma proteobacterium HTCC2207
  CDS (1)..(1122): transl_table=11
atggctaaacgcgattactacgatgtattgggtgtggacaaaggtgcttctgccgctgaaattaagaaggcatttcgtcgcgtagcgatgaagtttcacccggaccgcaaccctgagggcgcggatgccgaagataagtttaaagaagctcaagaagcctatgagattcttggcgacgatgacaaaaaagcagcctatgatcgctttggtcacgctggtgtcgatggcaacagcggcggcggtcagcgcggtggcggcggtggttttggcgatgtctttggtgatgtttttggcgatatttttggtggcggcggtggtcgcggcggcccagcgcggggttcggatctgcgctatgacctgcagttagatcttgaagacgctgtgcgcggtaaaactgtgcagattgatgtgcccactatgaccacctgtgatccctgtgatggttcaggtgcccgcagaggctcttctccagtgacctgtacaacctgtaatggtgctggtcaggttcgtatgtctcagggtttcttctcagtacagcaagcctgtccccagtgtcgcggtcgcggtcagatgatttctgatccctgtggcagctgtcatgggcaaggtgtaattgaagagcaaaagactctgtcagtaaagatcccagcaggtgttgataccggcgatcgtatccgtctcggtggcaagggtgaagccggtccccaaggtgggcctccaggtgatctctatgtacagatggtggtgcgtgatcacccgatatttgttcgcgatgacgctaacctgcactgtgaagtgccaattagttttgctcaggctgccctgggcggtgaacttgaagtccccactttatcaggcaaggttaagcttaaaattcctgctgaaacccagagtagcaagctatttcgtctgcgcggcaagggcgtagccccagttcgcggtggtggtgtaggtgatctgctgtgcagagtggtactggaaacgccagtcaatctaagttctgagcagcgcgagctattgaaaaagtttgaagaaagtctggcaggcaagagcaagcactcgccgcgcagcagtaactggtttgatggggtgaaaaaattcttcgataatttgaccagttaa

SEQ ID NO: 117748 - protein, 373 aa, marine gamma proteobacterium HTCC2207
MAKRDYYDVLGVDKGASAAEIKKAFRRVAMKFHPDRNPEGADAEDKFKEAQEAYEILGDDDKKAAYDRFGHAGVDGNSGGGQRGGGGGFGDVFGDVFGDIFGGGGGRGGPARGSDLRYDLQLDLEDAVRGKTVQIDVPTMTTCDPCDGSGARRGSSPVTCTTCNGAGQVRMSQGFFSVQQACPQCRGRGQMISDPCGSCHGQGVIEEQKTLSVKIPAGVDTGDRIRLGGKGEAGPQGGPPGDLYVQMVVRDHPIFVRDDANLHCEVPISFAQAALGGELEVPTLSGKVKLKIPAETQSSKLFRLRGKGVAPVRGGGVGDLLCRVVLETPVNLSSEQRELLKKFEESLAGKSKHSPRSSNWFDGVKKFFDNLTS

SEQ ID NO: 117749 - DNA, 1119 bp, delta proteobacterium MLMS-1; identical to SEQ ID NO: 63909
  CDS (1)..(1119): transl_table=11

SEQ ID NO: 117750 - protein, 372 aa, delta proteobacterium MLMS-1; identical to SEQ ID NO: 63910

SEQ ID NO: 117751 - DNA, 1146 bp, Rickettsiella grylli
  CDS (1)..(1146): transl_table=11
atggcaaaaaaaactgattattatgaaacactgggtgtatcccgtcatgcaaccgacagtgaactaaaaaaagcttaccgtaaattagctatgaaataccatcctgataagcatcatgctgctgaaacccaacaagcaaaagaagcggaggaaaaatttaaagcgatcagtgaagcctatgacgttttatccgattctaaaaagcgtgctgcctatgatcaatttggccatgcgggtgtagagtccacaggaacgagtgggaatgcacagggctttaattttaatgatgtttttggtgatattggtgatgtcttcggtaacatttttggtaatcgtggcggtccccaacaaagccagcgtgcacaacgaggtgctgatttacgctatacactcgaattagatttagaatctgccattcacgggactaccgtacaaatccgtatcccacgtcttgtgacctgcaaaagctgccagggttcaggtgcccgtaaagggacgaagcctattgtttgtaaaacgtgtgggggtcaaggacaagttcgcatacaacaaggttttttaacaatccaacaaacgtgccctgagtgccatggcgaagggcgtatcatcacaacgccttgcccagattgccgtggccaaggccatgttcaagaaacgaaaacattagcggtgaaaattcctgcaggaatagacgaaggaaatcggattcgtttagcaggtgaaggtgaagcaggtcatcgtggtgcccccgcaggtgatctttatgtacaaattcatcttaaaccacatcctttattcaaacgagaaggaaataatttatattgcgatgttcctattcatttaaccttagcattgttaggtggcgatatacaaattcccacattaaccggtatcgtcaatttacatataccccctgaaacacaaagtgggaaagtattacgcttacgtgggaaaggcgttccaggtcgcccgggaggaacgggtgatttactctgtcgtgtgagtgtagaaacgccggttcatttaacgaaggcacaaaaggaattagttatagcgcttgagaatgcgttaaaaaatgggaatcattatccaaaagcaaaaatatggtttgaacatgtaaagaagtttttcagtaagcaatactga

SEQ ID NO: 117752 - protein, 381 aa, Rickettsiella grylli
MAKKTDYYETLGVSRHATDSELKKAYRKLAMKYHPDKHHAAETQQAKEAEEKFKAISEAYDVLSDSKKRAAYDQFGHAGVESTGTSGNAQGFNFNDVFGDIGDVFGNIFGNRGGPQQSQRAQRGADLRYTLELDLESAIHGTTVQIRIPRLVTCKSCQGSGARKGTKPIVCKTCGGQGQVRIQQGFLTIQQTCPECHGEGRIITTPCPDCRGQGHVQETKTLAVKIPAGIDEGNRIRLAGEGEAGHRGAPAGDLYVQIHLKPHPLFKREGNNLYCDVPIHLTLALLGGDIQIPTLTGIVNLHIPPETQSGKVLRLRGKGVPGRPGGTGDLLCRVSVETPVHLTKAQKELVIALENALKNGNHYPKAKIWFEHVKKFFSKQY

SEQ ID NO: 117753 - DNA, 1113 bp, Oceanobacter sp. RED65
  CDS (1)..(1113): transl_table=11
atgtctaaacgagattattacgaagttttaggggttgaccgccaagcggatgccaaagaaatcaagcgagcataccgcaagctggccatgaagtatcacccggatcgtaatccggatgacgctgatgctgatgcgaaatttaaagaagcctctgaagcgtatgaaattctaggcgatcaagaaaaacgcgccgcatatgatcaatttggtcacgctggtgttgatgggtcagccggtgcaggagcgggtggttttggcggcggcaacttcagtgatattttcggagatgtgtttggtgacattttcggtggcggcggtgggcgtcgtggtgggccacaacgcggcaacgacctgaagtacaacctagaactaagtctagaagaggcggttaaaggcactgaaaaaaccattaaagtgccaacactcgtcgactgtgaagtctgtgatggttctggcgccaaggcaggtagtaaaccgactgtatgtggtacctgtaatggtcaaggccaagtacgcatgcagcaaggtttctttgcggtgcagcaaacttgcccgacgtgccaaggtcaaggaacgattattaaagacccttgcgacagctgtcatggtcaaggtgttaaagaagagactaagacactgaatgttaaaattccaccaggtgtcgataacggtgatcgtattcgtcttaatggcgaaggtgaagccggtgcaatgggtggcccagcgggcgacctttatgttgaagctcacatcaaacctcattcaatattcgaacgggatggtcgcaatctctattgcgatgtgccaatcagtattgcagatgctgcccttggtggtgagattgaagtaccgacgcttgatggacgcgtgaatttaaaaattccggcagaaacacaaagcggtaaattgttccgtttacgtggtaaaggtgtgcttcctgttcgtggtggcccgcaaggtgatttgctatgccgagtcatggttgaaacaccggtgaacttgaatgataagcagaaagaaattctgcgggagtttcaagcctcactaaagggggagaaacactcgcctcgtaaaaaaacatggttcgataatgtaaaggcattcttcgaatag

SEQ ID NO: 117754 - protein, 370 aa, Oceanobacter sp. RED65
MSKRDYYEVLGVDRQADAKEIKRAYRKLAMKYHPDRNPDDADADAKFKEASEAYEILGDQEKRAAYDQFGHAGVDGSAGAGAGGFGGGNFSDIFGDVFGDIFGGGGGRRGGPQRGNDLKYNLELSLEEAVKGTEKTIKVPTLVDCEVCDGSGAKAGSKPTVCGTCNGQGQVRMQQGFFAVQQTCPTCQGQGTIIKDPCDSCHGQGVKEETKTLNVKIPPGVDNGDRIRLNGEGEAGAMGGPAGDLYVEAHIKPHSIFERDGRNLYCDVPISIADAALGGEIEVPTLDGRVNLKIPAETQSGKLFRLRGKGVLPVRGGPQGDLLCRVMVETPVNLNDKQKEILREFQASLKGEKHSPRKKTWFDNVKAFFE

SEQ ID NO: 117755 - DNA, 1134 bp, Synechococcus sp. RS9916
  CDS (1)..(1134): transl_table=11
atggccgatttttacgacctgctcggcgtcagtcgtgacgccgacgccgacacgttgaagcgtgcctatcggcgcctcgctcgccagtaccacccggatatcaacaaggagcctggcgccgaggaccgtttcaaggagatcggtcgggcttacgaagttctgagcgacccccagtccaaggcccgctacgaccagtttggtgaggcgggtctcggcggtgccgccggcatgcccgatatgggcgacatgggcggctttgccgacctgtttgagaccttcttcagtggatttggtggtgctggtggcggtgctgcaggacgccagcgccggaatggtccgcagcagggtgatgacctgcgctacgacctcaccatcgatttcgaccaggccgtgttcggccaggaacgcgaaatccgcattccgcatctcgagacctgcaccacctgcaacggcagcggtgccaaatcgggcagcggccccaccacctgttccacctgcggaggggttggtcaggtgcgacgggcgacccgcacccccttcggcaacttcacccaggtggccgaatgtccgacctgcaatggcactggtcaggtgattgctgatccctgcaatgcctgtggagggcagggcgtgactcaggtgcgtaaaaagctgcgcatcaatattcctgctggagtcgattccggcacgcgcttgcgtgtggccggcgaaggcaatgctggcttgaggggcggccctgcaggcgacctgtatgtgttcctgacggtcaaaccccatccccatctgcgccgggatggactcacggtgctgtctgacgtcaaggtcagctatctccaggcgattctgggcgacaccattgaggtggaaacggtggatggccccaccagtctggagattccccccggcacccagccgaatgcggtgctcaccctggagaacaagggcattcccaagcttggtaatccggtggcccgtggcaaccagcgggtgaccgttgcggtgcagttgccgacgcgtctcaacgatgacgagcgcaccctgctggagcagctcgctggccatcactcggcgcgtggggtgcagcatcaccaccacaagagtggtttgtttgcacgcctctttggtcagggttga

SEQ ID NO: 117756 - protein, 377 aa, Synechococcus sp. RS9916
MADFYDLLGVSRDADADTLKRAYRRLARQYHPDINKEPGAEDRFKEIGRAYEVLSDPQSKARYDQFGEAGLGGAAGMPDMGDMGGFADLFETFFSGFGGAGGGAAGRQRRNGPQQGDDLRYDLTIDFDQAVFGQEREIRIPHLETCTTCNGSGAKSGSGPTTCSTCGGVGQVRRATRTPFGNFTQVAECPTCNGTGQVIADPCNACGGQGVTQVRKKLRINIPAGVDSGTRLRVAGEGNAGLRGGPAGDLYVFLTVKPHPHLRRDGLTVLSDVKVSYLQAILGDTIEVETVDGPTSLEIPPGTQPNAVLTLENKGIPKLGNPVARGNQRVTVAVQLPTRLNDDERTLLEQLAGHHSARGVQHHHHKSGLFARLFGQG

SEQ ID NO: 117757 - DNA, 1149 bp, Vibrio sp. Ex25
  CDS (1)..(1149): transl_table=11
atgtcaaaacgtgatttttacgaagtattaggcgtaagccgtgatgcctcagagcgcgatatcaaaaaggcgtacaagcgtctagcgatgaaattccacccagaccgaaaccagggtgatgagtctgcggcggacaagtttaaagaagtaaaagaagcgtacgaagttctgaccgaccctcaaaagaaagcggcgtacgaccagtacggtcatgctgcttttgaacaaggcggcggtggtttcggtggcggcggctttggtggcggcggtgctgatttcggcgacatctttggcgatgtattcggcgacatctttggtggtggtcgtcgtggcggtggcggtcaccgtgctcaacgtggtgcggacttacgttacaacatggaactgacgctagaagaggcggttcgtggtgtaacgaaagagatcgaagtaccaacactagtacactgtgatacctgtgatggtagtggcgcgaagaaaggctcatctgctgaaacatgtggtacctgtcatggtcatggtcaagtacagatgcgccaaggcttcttcgcagtgcaacaaacctgtccaacctgtcacggtaaaggcaagatcattaaagacccttgtaatgagtgtcatggtcaaggccgtaagcagaaaaccaaaacacttaacgttaagatccctgcaggtgttgatactggcgaccgtattcgtctatctggcgaaggtgaagcgggagaaatgggagctccagcgggtgacttgtatgtacaagtgcacgtgaaagagcaccatatcttcgaacgtgatggtaacaacctatactgtgaagtgcctgtaagctttgcgatggcggctctaggtggtgaagtagaagtaccaactctagatggtcgcgtaagcctaaaagtgccttcagaaacgcaaacaggtcgtatgttccgcatgcgtggtaaaggtgtgaaaggcgtccgcggtggcggtatcggtgacttgattgttaagttggttgttgaaacaccagtaaacctaagctcacgccaaaaagagctgcttaaagagtttgaagagtcttgtggtggtgaagcggcgacaaagcacaagcctaaatcagaaggctttttcaacggtgtgaaaaagttctttgatgatttaaccagctag

SEQ ID NO: 117758 - protein, 382 aa, Vibrio sp. Ex25
MSKRDFYEVLGVSRDASERDIKKAYKRLAMKFHPDRNQGDESAADKFKEVKEAYEVLTDPQKKAAYDQYGHAAFEQGGGGFGGGGFGGGGADFGDIFGDVFGDIFGGGRRGGGGHRAQRGADLRYNMELTLEEAVRGVTKEIEVPTLVHCDTCDGSGAKKGSSAETCGTCHGHGQVQMRQGFFAVQQTCPTCHGKGKIIKDPCNECHGQGRKQKTKTLNVKIPAGVDTGDRIRLSGEGEAGEMGAPAGDLYVQVHVKEHHIFERDGNNLYCEVPVSFAMAALGGEVEVPTLDGRVSLKVPSETQTGRMFRMRGKGVKGVRGGGIGDLIVKLVVETPVNLSSRQKELLKEFEESCGGEAATKHKPKSEGFFNGVKKFFDDLTS

SEQ ID NO: 117759 - DNA, 1140 bp, Alteromonadales bacterium TW-7
  CDS (1)..(1140): transl_table=11
atgtcaaaacgcgattattacgaagtcctcggcgtaagcaaagatgcgagtgagcgagacataaaaaaagcgtataaacgcttagcgatgaaatatcatccagatcgtaccgcaggcgataaagagcttgagaccaagttcaaagaagtaaaagaagcatacgaaattctaactgacgatcaaaaacgccagatgtacgaccaatacggtcatgcggcctttgaacaaggcggtggcggtggtcatggcggctttggtggcggccatggcgattttggtgacgtatttggcgatgtgtttggtgacatttttggtggcggcggtggccgacgtcaatctcgccagcaacgcggttctgatttacgttacaacatggatttaacgcttgaagaagcggttcgtggtaaagaagttgaaattaaagtaccaacatgggtaagttgtgacccttgtgatggaagcggtgcaaaagcgggttctaaacctaaaacatgtactacctgtcatggtgcaggccaggtgcaaatgcgccaaggcttctttgctgttcagcaaacatgtcctacgtgtcaggggcaaggtcaaattatttcagacccttgtaacagctgtcatggtcaaggccgtgtagaaaaaactaaaacgttgtcggtgaaaataccagcgggtgttgatacaggcgatcgtattcgtttatcgggtgagggtgaagcaggagttcatggcgcaccagcgggtgacttatatgtacaagtgtctgtaagagaacacgacatatttgtacgtgaaggtaacaatttgtattgtgaagtacctattagctttactacatcaggcttaggcggtgaaattcaagtacctacactggatggtcgtgcaaaacttaaaataccgtcagagacgcaaaccggcaaaatgttccgtatgcgtggcaaaggcgttaagtctgtacgaagtggcgcacaaggtgatttaatttgtaaggtagttattgaaacacctgtcaatcttaacgagcgccaacgtgaactacttaaagagttagaagaaagcatgggcacagatagctcaaaaaaccgtcctaaagagcaaggcttttttgatggtgttaaaaagttttttgatgacttaacaaagtaa

SEQ ID NO: 117760 - protein, 379 aa, Alteromonadales bacterium TW-7
MSKRDYYEVLGVSKDASERDIKKAYKRLAMKYHPDRTAGDKELETKFKEVKEAYEILTDDQKRQMYDQYGHAAFEQGGGGGHGGFGGGHGDFGDVFGDVFGDIFGGGGGRRQSRQQRGSDLRYNMDLTLEEAVRGKEVEIKVPTWVSCDPCDGSGAKAGSKPKTCTTCHGAGQVQMRQGFFAVQQTCPTCQGQGQIISDPCNSCHGQGRVEKTKTLSVKIPAGVDTGDRIRLSGEGEAGVHGAPAGDLYVQVSVREHDIFVREGNNLYCEVPISFTTSGLGGEIQVPTLDGRAKLKIPSETQTGKMFRMRGKGVKSVRSGAQGDLICKVVIETPVNLNERQRELLKELEESMGTDSSKNRPKEQGFFDGVKKFFDDLTK

SEQ ID NO: 117761 - DNA, 1137 bp, marine gamma proteobacterium HTCC2143
  CDS (1)..(1137): transl_table=11
atgtccaaacgcgactattacgaaatcctcggtgttgccagagactccgcgggaaaagacattaaaaaagcttatcgccgagtagcgatgaagtttcatcccgatcgtaatcctgatgataaggattcagaagagaaattcaaagaggcctctgaagcctacgaagttctttccgattctcaaaaacgtgcggcctacgatcagtatggtcatgatgcggtaaatggtaacgctggtgctggtggatttggcggtggcaatggcaatttcggtgacatatttggtgatgtcttcggcgatatatttggtggcggcggtggaggtggcggtcgtagccggggtcctgctcgtggcagtgatcttcgttataatttggatgttgatctcgaggccgctgtaaaaggaacggaagtaaaaatccgtatccctacattggtcagctgtgaaccctgtagtggtagcggtgcaaaaaaaggcagcgctccagttacctgtactacctgcggcggtatcggccaggtgagaatgcaacagggtttcttttcggtgcagcaagcctgccccaattgtcgaggcaagggtaagatgatctctgacccctgtaacagttgccacggtcaaggactcaaagaagaaacgaaaacactgtctgtgaaggttccgccgggtgttgataccggtgatcgcatacgcttaagtggtgaaggtgaggcggggccagatggtggtccttccggtgatctatttgtacaaattaatgtccgttctcatagtatttttgaacgggatggaaaaaatctctattgcgaggttcctattagtattaccgacgcgtcgctgggtggcgagctggaagtgccgaccttggatggccgagtaaaattaaagatacctgaagaaacacaaaccggtaaactgtttcgcttgagaggaaagggtgttgcacctgttaggggcggatccaccggcgatttattgtgccgtgtggtgcttgaaactccggtcaatttgaccaaaagccagaaagacctattacagcagttgcaggagtcgtttgaaaaagagggcaatcagtcaccgaaaaaatcatcttggtttgccggtgtaaaaagcttttttgacgatatgaaagtatag

SEQ ID NO: 117762 - protein, 378 aa, marine gamma proteobacterium HTCC2143
MSKRDYYEILGVARDSAGKDIKKAYRRVAMKFHPDRNPDDKDSEEKFKEASEAYEVLSDSQKRAAYDQYGHDAVNGNAGAGGFGGGNGNFGDIFGDVFGDIFGGGGGGGGRSRGPARGSDLRYNLDVDLEAAVKGTEVKIRIPTLVSCEPCSGSGAKKGSAPVTCTTCGGIGQVRMQQGFFSVQQACPNCRGKGKMISDPCNSCHGQGLKEETKTLSVKVPPGVDTGDRIRLSGEGEAGPDGGPSGDLFVQINVRSHSIFERDGKNLYCEVPISITDASLGGELEVPTLDGRVKLKIPEETQTGKLFRLRGKGVAPVRGGSTGDLLCRVVLETPVNLTKSQKDLLQQLQESFEKEGNQSPKKSSWFAGVKSFFDDMKV

SEQ ID NO: 117763 - DNA, 1131 bp, marine gamma proteobacterium HTCC2080
  CDS (1)..(1131): transl_table=11
atgtccaagcgtgactattacgaggttctcggggttgatcggtctacggcagacccggatatcaagaaggcatatcgccgtatcgccatgaagtttcatcctgatcggaatcccgatgacaaggatgcggatgccaaattcaaggaggcgaccgaggcctacgacgttttgatgaacgctgataagcgcgcagcttacgatcagtttggtcacgcgggtctggagcaaggcgctggcggcggcggttttcagggcggctccaattttagcgatatttttggcgacgtcttcggggatatttttggcggcggtggcggcggtggacgacaaggtccgcaacggggttctgatttacgttacaccatggaggtaagcctcgaagaggctgttcgtggggcaacgcgagaaatcaaagtacccacgctacagcactgcaacacctgtgacggcagcggcgcaaagccaggtaccaagccggttacctgtggtagctgcggtggtgccgggcaggttcgcatgcagcagggcttttttcaggtgcagcaaacctgtcccaaatgtcgtgggcaaggaaagaccatctctgatccttgtcgtgattgtcgtggtcaggggctattggaaaagaccaagacgttgtcggttaaggtgccgcctggcgttgataccggcgaccgcatccgattgagtggggaaggcgaggcagggccgtcaggtgggcccagcggtgacttattcgtgcagattgccgtgcgacaacataacctttttgagcgagatggacgcaatttatattgcgaggtacccattaattttgtcgatgccgctttgggtggagagttagaggttccaacccttgatggcaaggtgaagttgaaaatcccctccgagacgcagaccggaaaaatgtttcgattgcggggcaagggcgtgctgcctgtgcgcggtggtcccattggggacttaatgtgtcgagccgttgttgagaccccaattaatctcagtgcccagcagaagcaattactgcaagagtttcgatccactctcgatgaggggggcaatcgccaatcaccccgtcagtcgagttggtttgaaggggtaagatcgttttttgacggaatgactaagtga

SEQ ID NO: 117764 - protein, 376 aa, marine gamma proteobacterium HTCC2080
MSKRDYYEVLGVDRSTADPDIKKAYRRIAMKFHPDRNPDDKDADAKFKEATEAYDVLMNADKRAAYDQFGHAGLEQGAGGGGFQGGSNFSDIFGDVFGDIFGGGGGGGRQGPQRGSDLRYTMEVSLEEAVRGATREIKVPTLQHCNTCDGSGAKPGTKPVTCGSCGGAGQVRMQQGFFQVQQTCPKCRGQGKTISDPCRDCRGQGLLEKTKTLSVKVPPGVDTGDRIRLSGEGEAGPSGGPSGDLFVQIAVRQHNLFERDGRNLYCEVPINFVDAALGGELEVPTLDGKVKLKIPSETQTGKMFRLRGKGVLPVRGGPIGDLMCRAVVETPINLSAQQKQLLQEFRSTLDEGGNRQSPRQSSWFEGVRSFFDGMTK

SEQ ID NO: 117765 - DNA, 1023 bp, Medicago truncatula
  CDS (1)..(1023)
atgggggtagactactacaagattttgaaggttgacaagaatgccacagaagaagagttgaagaaagcttacagaaaacttgccatgaaatggcaccctgataagaatccctcaaataaaaaagacgctgaagccaaattcaaagagatatccgaagcttatgaggttctaagtgatccacaaaagaaagcaatttatgatcaatatggagaagaaggacttaaagggcaagtaccaccacctcaagatgctacattcttccaaagtggagatgggccaacaacgtttaggttcaatccaagaaatgcaaacgatatctttgcagagtttttcgggttttcaagtccgtttggaggaatgggagctggtgggaatggaatgagaggtggagcaaggtcctttggtggaatgtttggtggtgatgatcatatgttttcttcatttgatgaaggtaggcctatgcgtcagcagggtcctcgcaaggcagctgctattgaaaatagattgccttgtagtcttgaggaactctataaagggactaccaaaaagatgaagatttcaagggaaattgcagatgcaagtgggaaaactatgccagtggaggaaatcttaacaattgaagtgaaaccaggttggaaaaaggggacaaaaatcacattccctgagaaaggaaatgagcaaccaaatgtgataccagcagatcttatatttgttattgatgagaaaccacatggcgtatttacaagagatggcaatgatttggttgcaacacagaagatatcacttgcagaagctttaacaggttacactgttcgtctcacaacactagatggcagggttctgaatgttcctattaacaatgtgattcatcctagctatgaagaggttattccaaaggaaggtatgcctattccaaaagatccttcaaagaagggtaatcttaggatcaaattcaatatcaagtttccagcaaggttgacttctgagcagaaaattggaatcaagaaacttctggcaccgtag

SEQ ID NO: 117766 - protein, 340 aa, Medicago truncatula
MGVDYYKILKVDKNATEEELKKAYRKLAMKWHPDKNPSNKKDAEAKFKEISEAYEVLSDPQKKAIYDQYGEEGLKGQVPPPQDATFFQSGDGPTTFRFNPRNANDIFAEFFGFSSPFGGMGAGGNGMRGGARSFGGMFGGDDHMFSSFDEGRPMRQQGPRKAAAIENRLPCSLEELYKGTTKKMKISREIADASGKTMPVEEILTIEVKPGWKKGTKITFPEKGNEQPNVIPADLIFVIDEKPHGVFTRDGNDLVATQKISLAEALTGYTVRLTTLDGRVLNVPINNVIHPSYEEVIPKEGMPIPKDPSKKGNLRIKFNIKFPARLTSEQKIGIKKLLAP

SEQ ID NO: 117767 - DNA, 1242 bp, Aspergillus niger
  CDS (1)..(1242)
atggtcaaggaaactaagttctacgacatcctgggggttcccccgacggcctctgaggcccaactcaagactgcctacaagaagggtgccctgaagtaccaccctgacaagaacacaaacaaccccgaagccgctgagaagttcaaggaattgtctgccgcttacgagaccctctccgatccccagaagcgtagcctctacgaccagctcggtgaggagggtcttgagcatggcggtgctggcggtggcatgggcgccgaggacctctttgctcagttcttcggcggcggcggtggtttcggtggcatgttcggtggtggcatgcgtgaccagggccccaagaaggctcgtaccatccaccacgttcacaaggtcaacctcgaggatatctaccgcggtaaggtctcgaagctggctctgcagaagtcagtcatttgcccgggttgtgatggtcgcggtggtaaggagggtgctgtcaagtcgtgtaccggctgcaatggttccggtatgaagaccatgatgcgccagatgggtcccatgatccagcgcttccagacggtttgccccgactgcaatggtgagggcgagatcatccgtgagaaggaccgctgcaagcgctgtaacggcaagaagaccaccgtggagcgcaaggttctccacgtccacgttgaccgtggtgtgaagaacggccacaagattgaattccgcggcgagggtgaccagatgcctggtgttctgcccggcgacgttgttttcgagattgagcagaagccccacccccgcttccagcgcaaggacgacgacctcttctaccaggccgagatcgacctgctcactgctcttggcggtggtaccatcaacattgagcaccttgatgaccggtggttgaccgtgaccgtcgctccgggcgaggtcatcactcctggtgctatcaaggttatcaagggtcagggtatgccttcctaccgccaccacgacttcggcaacctctacatccaattcgatgtcaagttccccgagaaggatcagctcaagaacctcgagttgctcgagcaggtcctgcctcctcgtatggagcagtcccagcccccgcaggacgccatgatcgaggactttgagctggaggacattgatggcagcgagtcgtctcaggctcgcgcacacggtgccgccagcgccatggacgaggatgacgaggatgttcctcctggcgctgagcgtgtgcagtgcgcatcgcagtaa

SEQ ID NO: 117768 - protein, 413 aa, Aspergillus niger
MVKETKFYDILGVPPTASEAQLKTAYKKGALKYHPDKNTNNPEAAEKFKELSAAYETLSDPQKRSLYDQLGEEGLEHGGAGGGMGAEDLFAQFFGGGGGFGGMFGGGMRDQGPKKARTIHHVHKVNLEDIYRGKVSKLALQKSVICPGCDGRGGKEGAVKSCTGCNGSGMKTMMRQMGPMIQRFQTVCPDCNGEGEIIREKDRCKRCNGKKTTVERKVLHVHVDRGVKNGHKIEFRGEGDQMPGVLPGDVVFEIEQKPHPRFQRKDDDLFYQAEIDLLTALGGGTINIEHLDDRWLTVTVAPGEVITPGAIKVIKGQGMPSYRHHDFGNLYIQFDVKFPEKDQLKNLELLEQVLPPRMEQSQPPQDAMIEDFELEDIDGSESSQARAHGAASAMDEDDEDVPPGAERVQCASQ

SEQ ID NO: 117769 - DNA, 1386 bp, Aspergillus niger
  CDS (1)..(1386)
atgttgtcgaaagcggacgttgacctctacgaggtcttgggcattgacaagagtgccggcaaagatgatatccggaaggcatatcgcaaggccgctctagcaaatcaccccgacaaagtccccgaagccgaaagacaagatgcagaggtccgattcaaggccgtgcaggaagcctacgacatcctctacgacgaagagaagcgtgagatctacgatacccatggaatgggcgctttcaacggctccggtgaaccgggtatgggcgcgggccctgatttggatgatattcttgcgcagatgttcggtggtatgggaggtatgggcggcatgggcggaatgcccggtggtccgcatgcgcgtaagccgcgcaagagcccggatgaggagcagaagtatgaggttcgcctggaggatctgtacaagggcaagacggtcaagtttgccagcacgaagaatgtgatttgctctctgtgtcagggcaagggtggtaaggagagggcgacggccaggaagtgctccacttgcgatggtgaaggttacaagcagattttgcgcccgatgggtcagttcctgtctccggctatggttccctgccctacctgtaacggagcgggtgactactttgtcgacaaggataagtgcaagaagtgcaagggcaagaagaccaccgaggctaagaagttgctggagatctacatccctcgcggggcgagggaaggagacaagatcatcctcgagggcgaggccgaccaggtgccgggtcaggaacctggagatatcgttttccacatcgtggaagaggagcacgagactttccgaagggctgctgccgatctgacggcaacaatcgatgttacgctggccgaggctctgacgggcttctcccgggtggtagtcaagcaccttgacggtcgcggaatcgaaattcagcaccccaagaccccaggtgaggttctgtatccgggccaggtcctgaaggtgcctggtgagggtatgcccatcaagcgcagcgatgcccgtggtgacctgtacctggtcgtcaacatcaagttccccgacgggaaatggaagcccagccctgctgttctggagcaactcaaggaactgttgcccaagccggaaccccctattcaggctgacaccgtggacgaggtagagttcgaccccaagggcaatctggatgactttggggcgcatgaccccgaggggggttctgcatgggaggatgatgatgaggacaatagaccttgtgcagagagctccctagtccgagccatgtatcaagtagaagcgattgataatctgtgggtacccgtggggaaggcaaaagcgatgtgcgatgatttactaactaccggtagaatgagtagcatagagtctgactag

SEQ ID NO: 117770 - protein, 461 aa, Aspergillus niger
MLSKADVDLYEVLGIDKSAGKDDIRKAYRKAALANHPDKVPEAERQDAEVRFKAVQEAYDILYDEEKREIYDTHGMGAFNGSGEPGMGAGPDLDDILAQMFGGMGGMGGMGGMPGGPHARKPRKSPDEEQKYEVRLEDLYKGKTVKFASTKNVICSLCQGKGGKERATARKCSTCDGEGYKQILRPMGQFLSPAMVPCPTCNGAGDYFVDKDKCKKCKGKKTTEAKKLLEIYIPRGAREGDKIILEGEADQVPGQEPGDIVFHIVEEEHETFRRAAADLTATIDVTLAEALTGFSRVVVKHLDGRGIEIQHPKTPGEVLYPGQVLKVPGEGMPIKRSDARGDLYLVVNIKFPDGKWKPSPAVLEQLKELLPKPEPPIQADTVDEVEFDPKGNLDDFGAHDPEGGSAWEDDDEDNRPCAESSLVRAMYQVEAIDNLWVPVGKAKAMCDDLLTTGRMSSIESD

SEQ ID NO: 117771 - DNA, 1272 bp, Medicago sativa; identical to SEQ ID NO: 63913
  CDS (1)..(1272)

SEQ ID NO: 117772 - protein, 423 aa, Medicago sativa; identical to SEQ ID NO: 63914

SEQ ID NO: 117773 - DNA, 1260 bp, Zea mays
  CDS (1)..(1260)
atgttcgggcgcgcgccgaagaagagcgacaacaccaagtactacgagatcctcggggtgcccaagtcggcgtcccaggacgatctcaagaaggcctaccgcaaggctgctatcaagaaccaccccgacaagggcggtgaccccgagaagttcaaggagctcgcacaagcctatgaggttttgagtgatccagagaaacgtgagatttatgatcagtatggtgaagatgcccttaaggaaggaatgggcggtggaggatcccatgttgatccatttgacatcttctcatcattttttggaccctcttttggaggaggtggtggaagcagcaggggaagaaggcaaaggaggggagaagatgtagttcacccacttaaagtttctctggaagatctttacaatggcacctcaaagaagctctctctttcgcgcaatgtcatctgctccaagtgcaagggcaagggctcgaagtctggtgcctcaatgaggtgccctggttgccagggctcaggcatgaaagtcactattcgtcagctgggcccttccatgatacagcagatgcagcagccttgcaatgagtgcaaggggactggagagagcatcaatgagaaggaccgctgtccagggtgcaagggtgagaaggtcattcaagagaagaaggttcttgaggttcatgttgagaaggggatgcaacacaaccagaagatcaccttccctggtgaagctgatgaagcgcctgatactgtcactggagacattgtattcgtcctccagcagaaggatcactccaaattcaaaagaaagggtgaagatctcttctatgagcacaccttgtctctgaccgaagcactatgtgggttccaatttgttcttacacatctggacaacaggcagcttctcatcaaatcagaccctggtgaagttgttaaacctgaccaattcaaggcgattaatgatgaggggatgccaatttaccagaggcctttcatgaaggggaagctgtacatccatttcacggtggagttccctgactcgttggcaccagagcagtgcaaggctctcgagacagtacttccaccaaggccttcatccaagctgacagacatggagatagatgaatgcgaggagacgactatgcatgatgtgaacaacatcgaggaagagatgcgcaggaagcaagctcacgctgcccaggaggcgtacgaggaggacgacgagatgccgggcggagcccagagagtgcagtgcgcgcaacagtaa

SEQ ID NO: 117774 - protein, 419 aa, Zea mays; identical to SEQ ID NO: 64118

SEQ ID NO: 117775 - DNA, 1257 bp, Allium porrum; identical to SEQ ID NO: 63921
  CDS (1)..(1257)

SEQ ID NO: 117776 - protein, 418 aa, Allium porrum; identical to SEQ ID NO: 63922

SEQ ID NO: 117777 - DNA, 1516 bp, Ricinus communis
  CDS (87)..(1343)
ctctttctccctctcgccgtctcgcttctttgtttctgtggctctcctgtgacctaatctaacaaccctgataaaaagaagcaaggatgtttggaagagcaccaaagaaaagcgacaacacaaagtactatgagattctgggagtctctaagaacgcatcacaagatgatctaaagaaagcttatagaaaagcagccatcaagaaccatcctgataagggtggcgatcctgaaaagtttaaagagttggcacaagcttatgaggttttaagtgatccagaaaagcgtgagatatatgatcagtatggcgaggatgccctcaaggaaggaatgggtggtggtggtggtggcggccatgatccattcgatattttccaatctttctttggtggcagtccattcggtggtggcggcagcagcagaggccgaaggcagaggaggggtgaggatgtgattcatcctctcaaggtttctttggaagatctctacaatggcacctccaaaaaactctctctttctcgcaatgttatctgctcgaagtgcaaaggtaaagggtctaaatccggtgcatcaatgaaatgttctggttgccaaggttctggaatgaaggtttcaataagacatcttggaccctctatgatccagcaaatgcagcatccctgcaatgagtgcaagggtactggtgagaccattaatgacaaggaccgctgccctcaatgcaagggtgaaaaggttgttcaagagaagaaagtgctggaagttattgttgagaagggtatgcaaaatgggcagaagattacatttcctggagaagctgatgaagctcctgatactatcactggggacattgtttttgtcctacagcaaaaggagcaccctaagttcaagcgaaagggagatgacctagttgttgagcacacactttctctcacagaggcactctgtggcttccagtttatattgacccatttagatggaaggcagctcctcataaaatcccaacctggggaagtagtgaaaccagatcaattcaaggccattaatgatgaaggaatgccaatgtatcaaaggccattcatgagggggaaattgtacattcatttctctgttgatttcccagactctctgcccccagatcagtgcaaagccttggagactgtgcttccctcaaggacttcagtccagctgtctgacatggagctggatgaatgtgaagagaccactttacatgatgtgaactttgaagaggagatgaggcggaaacagcagcaggcccaggaagcatatgatgaggacgaagatatgcatggtggtgcccaaagggtgcaatgcgctcaacaataaataaatcaactaataagagggagtaacgatggtgttgatcaatgagattttatctgaaccagagctgagattgattaatgtgggtttgacagatagtgtgagaataagatgatattctctaacattcattgccttctgctataggattctgtcttgagatttcacttgtgtcc

SEQ ID NO: 117778 - protein, 418 aa, Ricinus communis; identical to SEQ ID NO: 63924

SEQ ID NO: 117779 - DNA, 1263 bp, Triticum aestivum; identical to SEQ ID NO: 63925
  CDS (1)..(1263)

SEQ ID NO: 117780 - protein, 420 aa, Triticum aestivum; identical to SEQ ID NO: 63926

SEQ ID NO: 117781 - DNA, 1020 bp, Liriomyza sativae
  CDS (1)..(1020)
atgtcgaaagatttttataaagttcttggaattgcacgtacagccaacgacgatgaaattaaaaaagcatatcggaaattggcattgaaatatcatccagacaaaaatcatacaccacaggccgaagaacgtttcaaagagattgcagaggcgtatgatgtgctatcagataaaaagaagcgcgaaatttacgatcaatacggtgaggatggtctcaagaatggtgcaagcggcgccagtggcagcccaggtggtcaaaactacttccatggcgatgcgcgtgccacatttgcgcaattctttggctctgcaaatccatttggcatcttctttggcaacaatgatccatcaggcatgttcgagcacacagtatttatgggtggaaatgatgatgattattatcagcaattgggcggtggcgccttccgttcacagtcattcaacaatgtgcagccctcacgcaagcgtcaaagtcaagatccacccattgagcatgatctgtatgtaacaccggaggagatcgataagggctgtgtgcgtaaaatgaaaatctcacgcacgtccttggcacaaggtggcaaccaatataaacaggagaaagtattgaatataaatgtgaagcccggatggaaggccggaacaaaaatcaccttccccaaagagggtgaccaatcgccaggaaaaatacccgccgatatagtatttattatacgtgacaagccacatttaatattcaaacgggatggcagtgatctcaaatacacagccaaagtctcacttaaacaagcattatgcggtactaccataagcgtgccaacattacagggtgatcgtgtacaaataaatacatttggtgaagttatcaaacccacaactgtgaaacgcataactggacgtggcctgccatatccgcgtgatccaaatttacgtggtgatttacatgttcattttgaaatcaaattcccagacacattgaattcttcctgcaaggagttgctcaatgaaattttaccatcataa

SEQ ID NO: 117782 - protein, 339 aa, Liriomyza sativae
MSKDFYKVLGIARTANDDEIKKAYRKLALKYHPDKNHTPQAEERFKEIAEAYDVLSDKKKREIYDQYGEDGLKNGASGASGSPGGQNYFHGDARATFAQFFGSANPFGIFFGNNDPSGMFEHTVFMGGNDDDYYQQLGGGAFRSQSFNNVQPSRKRQSQDPPIEHDLYVTPEEIDKGCVRKMKISRTSLAQGGNQYKQEKVLNINVKPGWKAGTKITFPKEGDQSPGKIPADIVFIIRDKPHLIFKRDGSDLKYTAKVSLKQALCGTTISVPTLQGDRVQINTFGEVIKPTTVKRITGRGLPYPRDPNLRGDLHVHFEIKFPDTLNSSCKELLNEILPS

SEQ ID NO: 117783 - DNA, 1023 bp, Liriomyza huidobrensis
  CDS (1)..(1023)
atggcaaaagatttttataaagtacttggcatctcacgtggagccagcgatgatgaaataaagaaagcatatcgcaaattggctttaaaatatcatccagacaaaaataatacaccacaggctgaagaacgcttcaaagaaatagcagaagcctatgaagtgctatcggataaaaagaagcgtgaaatttatgatcaattcggggaggatggtctgaaaaacggtggcaccggcacaagtggcagtccaggtggtgataactactatcatggtgatccaagagccacatttgaacaattctttggctctgctaatccatttggcatattctttggcaacaatgatccatctggcatgttcgaacatacagtatttatgggtggcaatgaagaagattattatcaacaattaggcggtggtgcttttcgttcacaatccttcaacaatgtgcaacccccctcacgtaaacgccaaattcaagatccacctattgaacatgatctgtatgttactctcgaggagattgataagggatgtgtgcgtaaaatgaaaatctcacgcatgtccttggctcaaggtggcaatcaatttaagcaggagaaagttttgaatatcaatgtaaaaccaggttggaaggcaggcactaaaatcaccttccccagagagggtgaccaatcgacaggcaaaattcccgccgatattgttttcataatacgtgacaagccacatccaatattcaaacgggatggcagtgatctcaaatatacatcacaaatctcattgaaacaagcattatgcggcactacaatcagtgtgcccacattgcaaggtgatcgagtgcaaataaatacttttggtgaaataataaagcccactactgtcaaacacattagtggacgtggtctgccatatccgcgtgaaccaaatcgtcgtggtgatttgcatgtgaattttgaaattaaattcccagacacattgaattcatcctgtaaggaattacttaatgaaatattacctgcgtaa

SEQ ID NO: 117784 - protein, 340 aa, Liriomyza huidobrensis
MAKDFYKVLGISRGASDDEIKKAYRKLALKYHPDKNNTPQAEERFKEIAEAYEVLSDKKKREIYDQFGEDGLKNGGTGTSGSPGGDNYYHGDPRATFEQFFGSANPFGIFFGNNDPSGMFEHTVFMGGNEEDYYQQLGGGAFRSQSFNNVQPPSRKRQIQDPPIEHDLYVTLEEIDKGCVRKMKISRMSLAQGGNQFKQEKVLNINVKPGWKAGTKITFPREGDQSTGKIPADIVFIIRDKPHPIFKRDGSDLKYTSQISLKQALCGTTISVPTLQGDRVQINTFGEIIKPTTVKHISGRGLPYPREPNRRGDLHVNFEIKFPDTLNSSCKELLNEILPA

SEQ ID NO: 117785 - DNA, 1251 bp, Medicago truncatula
  CDS (1)..(1251)
atgtttggaagagcaccgaagaaaagtgatagtacgaggtactatgaaatcttaggtgtatctaagacagcttctcaggatgatttgaagaaagcttataaaaaagctgctattaagaatcatcctgataagggtggtgatcccgagaagttcaaagagctagcgcaagcttatgaggttctgagcgatcctgagaagcgtgagatatatgacacgtatggtgaggatgctcttaaggaaggaatgggtggtggaggtggtggtggccatgacccatttgacatcttctcgtctttctttggtggtggaggtggtggtagtagccgaggacggaggcagagacgtggagaagatgtggttcatcctctcaaggtctctttggaggacctttaccttgggacatctaagaagctttctctctcgagaaatgtcttgtgctcaaaatgcagtggcaaaggttctaaatctggggcttccatgaaatgtgctggttgtcaaggaactggtatgaaggtttctattagacaccttggtccatcaatgattcagcaaatgcagcatccttgcaatgaatgtaagggtaccggtgaaactatcaatgataaagaccgctgtccgcagtgcaagggagaaaaggttgtgcaagagaagaaagtacttgaagttcatgtcgagaaaggaatgcagaacagtcagaagattacattccctggtgaagctgatgaagcaccagacacagttactggggatatcgtatttgtgcttcagcagaaagaacatcccaagttcaaaagaaagagtgaagacctttttgtagagcacacactgtctcttaccgaggctttgtgtggtttccaatttgtgcttactcacttggatggtcgccaacttcttatcaaatcaaaccccggagaagttgtcaagcctgattcatacaaggctattaacgacgagggaatgccgatgtaccagaggccatttatgaagggcaagctttacattcacttcaccgtggaattccccgacaccctaagtcttgatcaggtgaaaggtttggaggctgttcttccagctaaaccttcatcacagttgacagacatggagatcgacgagtgtgaggaaactacacttcatgatgtcaatatggaagaggagaataggaggaaacaacagcaacaacaacaggaagcatatgatgaggatgatgatatgcctggtggggcacagagagtacaatgcgcccagcagtag

SEQ ID NO: 117786 - protein, 416 aa, Medicago truncatula
MFGRAPKKSDSTRYYEILGVSKTASQDDLKKAYKKAAIKNHPDKGGDPEKFKELAQAYEVLSDPEKREIYDTYGEDALKEGMGGGGGGGHDPFDIFSSFFGGGGGGSSRGRRQRRGEDVVHPLKVSLEDLYLGTSKKLSLSRNVLCSKCSGKGSKSGASMKCAGCQGTGMKVSIRHLGPSMIQQMQHPCNECKGTGETINDKDRCPQCKGEKVVQEKKVLEVHVEKGMQNSQKITFPGEADEAPDTVTGDIVFVLQQKEHPKFKRKSEDLFVEHTLSLTEALCGFQFVLTHLDGRQLLIKSNPGEVVKPDSYKAINDEGMPMYQRPFMKGKLYIHFTVEFPDTLSLDQVKGLEAVLPAKPSSQLTDMEIDECEETTLHDVNMEEENRRKQQQQQQEAYDEDDDMPGGAQRVQCAQQ

SEQ ID NO: 117787 - DNA, 1209 bp, Acyrthosiphon pisum
  CDS (1)..(1209)
atggttaaagaaacaacgtattatgatattttaggcgttaaacctaattgtgggaacgatgagcttaaaaaagcatatagaaaattagctctaaagtaccatcctgacaagaacccaaatgagggtgaaaagttcaaacaaatttctcaagcatatgaagtattaaccacaccagaaaaacgtcgtttatatgaccaaggcggcgaacaagcccttaaagagggtggagtgggtaactccttctcttcaccgatggatctatttgacatgttctttggccaatttggtggaggtggtggtcgtggtcgtggtggccgtcatggacctcaaaaaggcaaagatgttgttcatcaattaagtgtttctcttgaggatctttacaatggctgtgtacgaaaattagcattagaaaaaaatgttatttgtgacaaatgtgaaggtagaggtggtaaaaaaggagcagtagagcaatgtccaggatgtcaaggcagtggaattcaagtgcaaattcatcagttgggacctggtatgatacaacaagtacagtctatgtgcagtgaatgtcgtggacagggtgaacgcatcaatcccaaagatagatgtaggaattgtaatggaaaaaaggttactcgtgaaaggaagattttggaagtaaatgtagacaagggcatggttgatggacaaaaaataacatttaatggagaaggtgatcaagaacctggacttgaacctggtgatataattattgtattggatgaaaaagaacatcgtttatataagagaagcggaagtgatttgattcttcgcttagaaattgaattagttgaagcattgtgtggatttcagaaagtcgtaaagactttagatgaacgttctttggttattactgctgtagccggtgaagttttgaaacacggtgatgtcaaatgtgtagttggtgagggtatgccacagtataagaacccatttgaaaaaggtcgtatgattattcagttcctggttaatttccctgaaagtttatcacctgcaaaggtgcctctgcttgaatcgtgccttcctccaagaccggttgaaactattccggagaattctgaagaagtatcgcttgtagagatggatccagaatatgactctaggagacaatctagacgtgaggcttacaatgatgaagatggacccacccgaaatgttcaatgtgcttcacactaa

SEQ ID NO: 117788 - protein, 402 aa, Acyrthosiphon pisum
MVKETTYYDILGVKPNCGNDELKKAYRKLALKYHPDKNPNEGEKFKQISQAYEVLTTPEKRRLYDQGGEQALKEGGVGNSFSSPMDLFDMFFGQFGGGGGRGRGGRHGPQKGKDVVHQLSVSLEDLYNGCVRKLALEKNVICDKCEGRGGKKGAVEQCPGCQGSGIQVQIHQLGPGMIQQVQSMCSECRGQGERINPKDRCRNCNGKKVTRERKILEVNVDKGMVDGQKITFNGEGDQEPGLEPGDIIIVLDEKEHRLYKRSGSDLILRLEIELVEALCGFQKVVKTLDERSLVITAVAGEVLKHGDVKCVVGEGMPQYKNPFEKGRMIIQFLVNFPESLSPAKVPLLESCLPPRPVETIPENSEEVSLVEMDPEYDSRRQSRREAYNDEDGPTRNVQCASH

SEQ ID NO: 117789 - DNA, 1320 bp, Aspergillus oryzae
  CDS (1)..(1320)
atggacgacgggcaagaagccggggatggggacgcctcatggtcacgaaagagggcccaattatgcagaattatccagggcaagagcgatgaggtcctcggaatcgccagtagcgcaagcaaagatgagatccgcaaggcttatcgcaagtctgcgctcgcaaatcaccccgacaaagtccccgaggccgaacgtgaagaagccgagatcagattcaaggccgtccaggaagcttacgatatcctctacgatgaagacaagcggcatctatatgacacacatggaatgagcgccttcaacgggtctggcgagcccggtatgggcgcaggtcccgatctagatgatatcctggcgcagatgttcggcggcatgggtggcatgggtggtatgcccggaggaccgcgcgcgaataaaccacggaggagcccgaacgaggagcaaaagtatgaggttaagttggaagatttgtacaagggcaagactgtcaagtttgcgagtacgaagaatgtgatttgcagtttgtgtcagggcaagggaggcaaggagaaggcgcaggctaagaagtgtgctacttgcggtggacaaggtgtcaagcaggtcttgaatcagatgggacagttcattaccacgtccaccgtgccttgctcaacctgcaatggagagggtgaattctttagccccaaggacaagtgcaagaagtgtaaaggaaagaaaactacggaggagaggaagatcctggagatctacattcctcggggggcaagggaaggggataagatcattcttgagggagaagccgatcaagtaccaggacaagaacctggtgatatcgtattccacatcgtggaagaagatcatgccgttttcagaagggctgggtcggatttgaccgctaccattgatgttacagtggccgaagccttgaccggcttttctcgagttgtggtcaagcacctcgacggccgaggcattgaactgcaacaccccaagaagccgggcgatgttctgtccccagggcaggtccttaaggttcctggagaaggtatgcccatgaagcgcggcgacgaacgcggtgatttgtacctggtcgtcaacatcaagttccccgaccagagctggaaacctaaccctgaggtcctggagaaactcaaggagttgcttcccaagcccgacgccccaattcaggccgacactgtagacgaagtcgactatgatcctaagggtgatcttgatgaattcggtgctaaggacgctcatggcggctctgcatgggaggatgatgacgatgagggtgaaccggctcagtgcgcggcccagtag

SEQ ID NO: 117790 - protein, 439 aa, Aspergillus oryzae
MDDGQEAGDGDASWSRKRAQLCRIIQGKSDEVLGIASSASKDEIRKAYRKSALANHPDKVPEAEREEAEIRFKAVQEAYDILYDEDKRHLYDTHGMSAFNGSGEPGMGAGPDLDDILAQMFGGMGGMGGMPGGPRANKPRRSPNEEQKYEVKLEDLYKGKTVKFASTKNVICSLCQGKGGKEKAQAKKCATCGGQGVKQVLNQMGQFITTSTVPCSTCNGEGEFFSPKDKCKKCKGKKTTEERKILEIYIPRGAREGDKIILEGEADQVPGQEPGDIVFHIVEEDHAVFRRAGSDLTATIDVTVAEALTGFSRVVVKHLDGRGIELQHPKKPGDVLSPGQVLKVPGEGMPMKRGDERGDLYLVVNIKFPDQSWKPNPEVLEKLKELLPKPDAPIQADTVDEVDYDPKGDLDEFGAKDAHGGSAWEDDDDEGEPAQCAAQ

SEQ ID NO: 117791 - DNA, 1242 bp, Aspergillus oryzae
  CDS (1)..(1242)
atggtcaaggaaaccaagttttacgacgttctcggggttgcccccacagccacagaggctcaactgaagaccgcctataagaagggtgccctcaaatatcaccctgacaagaacgcaaacaaccccgatgctgctgaaaagttcaaggagctctcccgtgcctatgaaattctctccgactcccagaagcgttctatttacgaccagctcggtgaggagggtctcgaaaatggtggaggcgccggtggaatgggtgctgaggatctctttgcccagttcttcggtggcggcggtggctttggaggtatgtttggtggtggcatgcgggagcagggccccaagaaggcccgcaccatccatcacgttcacaaggtcaacctggaggacatctaccgtggaaaggtttcgaagttggccctgcagaagtctgtcatttgccctggctgtgatggccgtggtggtaaggaaggtgccgtcaagtcgtgtggcggctgcaatggtaccggtatgaagactatgatgcgccagatgggacctatgatccagcggttccagactgtttgcccagactgcagtggtgagggtgagaccattcgggagcgcgatcgctgcaagcgctgcaacggtaagaagaccgttgttgagcgcaaggtcctccacgtccatgtcgacaagggtgtcaggaacggccacaagatcgagttccgtggggagggtgaccagatgcctggcgtcctacccggagatgtggtcttcgagattgaacagaagcctcacccccggttccagcgtaaggaagatgacctcttctatcacgctgaaatcgatcttctcacagctcttgctggcggtaccatcaacattgagcacctcgatgaccgctggttgactgtgaacatcgcacctggcgaggttgttactcctggcgctatcaaggtgatcaagggccagggtatgccgtcattccgccaccatgacttcggcaacctctatattcagtttgacgtcaagttccccgagaaggatcagctcaacaacctcaaccttttggaacaggttctgcccccccggatggagcagcctcaaccacctaccgattctatggtggaggacttcgagctggaggacattgactctagcgagtactcccaggcacgcgcccatggtgctgccggttccatggatgaggatgatgacgacgttcctcctggtgctgagagagtgcagtgcgcctctcagtaa

SEQ ID NO: 117792 - protein, 413 aa, Aspergillus oryzae
MVKETKFYDVLGVAPTATEAQLKTAYKKGALKYHPDKNANNPDAAEKFKELSRAYEILSDSQKRSIYDQLGEEGLENGGGAGGMGAEDLFAQFFGGGGGFGGMFGGGMREQGPKKARTIHHVHKVNLEDIYRGKVSKLALQKSVICPGCDGRGGKEGAVKSCGGCNGTGMKTMMRQMGPMIQRFQTVCPDCSGEGETIRERDRCKRCNGKKTVVERKVLHVHVDKGVRNGHKIEFRGEGDQMPGVLPGDVVFEIEQKPHPRFQRKEDDLFYHAEIDLLTALAGGTINIEHLDDRWLTVNIAPGEVVTPGAIKVIKGQGMPSFRHHDFGNLYIQFDVKFPEKDQLNNLNLLEQVLPPRMEQPQPPTDSMVEDFELEDIDSSEYSQARAHGAAGSMDEDDDDVPPGAERVQCASQ

SEQ ID NO: 117793 - DNA, 1332 bp, Solanum tuberosum
  CDS (1)..(1332)
atgtttgggagggcaccgaagaagagcgacaacacaaagtactatgagatcttaggtgtccctaagactgctgcaccggaagatctcaagaaagcttaccgtaaagctgctattaagaatcatcctgataagggaggtgatcctgaaaagtttaaagagcttgcacaagcttatgaggttctgagtgatcccgagaagcgtgagatatatgatcagtatggagaagatgctctcaaggaaggaatgggcggtggaggtggtggacacgacccatttgacattttctcatctttctttggtggcagcccatttggtggaggtggtggaagcagcagaggaagaagacaaagaagaggagaggatgttgtacaccctctcaaagtttctctggaggatctgtacaatggaacatcaaagaagctgtcactatctcgcaatgtattgtgctcgaagtgcaaggggaaaggatctaaatcaggtgcttcaatgaagtgttctggctgtcaagggtctgggatgaaagtcactattagacaacttggcccatccatgatccagcagatgcagcacccttgcaacgagtgtaagggtactggtgagatgatcaatgataaagataggtgtgggcagtgtaaaggtgagaaggttgtgcaggagaagaaggtgttggaagttgttgtcgagaagggtatgcagaacggacagaagataacattcccgggcgaagctgatgaagcacctgataccgtcactggggacatagtttttgtcttgcaacagaaggaacatcccaagtttaagcgaaagggagatgatctctttgtagagcacaccttgagcttaaccgaggccctgtgtggtttccagttcatcttgactcacctagataataggcagctgatcatcaagccccaacccggagaagttgtcaagcctgatcaatttaaagccataaatgatgaaggaatgcctatgtaccaaaggccatttatgagaggaaaactatacattcactttactgtagaattccccgacacattatcccccgagcaatgcaagaaccttgaagcagtattgccaccaaaaccgaaaacacaaatgactgatatggaattggacgagtgcgaggagaccaccttacatgatgttcacatcgaagaggagatgcggaggaagcagcaacaggcccaagaggcatatgacgaagatgatgaagacatgcatggaggtgcacagagaagttcaatgtgcacaacagtaatttggcatcacggaagttgcactaaagaattaacgtcacgattcaactcttgttttcacgtatttgtatga

SEQ ID NO: 117794 - protein, 443 aa, Solanum tuberosum; identical to SEQ ID NO: 63932

SEQ ID NO: 117795 - DNA, 1134 bp, Lactobacillus sanfranciscensis; identical to SEQ ID NO: 63933
  CDS (1)..(1134): transl_table=11

SEQ ID NO: 117796 - protein, 377 aa, Lactobacillus sanfranciscensis; identical to SEQ ID NO: 63934

SEQ ID NO: 117797 - DNA, 1125 bp, Pseudomonas putida
  CDS (1)..(1125): transl_table=11
atggcaaagcgtgattattatgaggtcctgggtgtcgagcgtggcgccaacgaaggtgatctcaaaaaggcctatcgccgcttggcgatgaagtaccaccccgaccgcaacccgggcgacaaggagtcggaagagcagttcaaggaggccaacgaggcctacgaagtgctgtccgatgccagcaagcgtgcggcctatgaccagtatggtcacgccggcgtcgaccctagcatgggtggcggtggtgccggcttcggtggtgccaacttctccgacatcttcggcgatgtgttcagtgatttcttcggtggcggccgtggcggctcgcgcggtggcgcccagcgtggcagcgacctgcgttacaccctggagctgaacctggaagaagcggtgcgtggcaccacggtcagtatccgcgttcctaccctgttcaactgcaacccttgtgatggttgcggcgctaacaagggctccaccccgtcgacctgcccgacctgcggcggtatcggccaggtgcgcatgcagcaaggcttcttctcggtgcagcagacctgcccgcgctgccatggccagggcaagatcatcaccgacccttgcggcgcgtgccacggcgaaggccgtgtcgaggaatacaagacgctgtcggtcaaggtgccggccggtgtcgataccggtgaccgcattcgcctgtcgggcgagggcgaggccggtacccatggtggcccgactggcgacctgtacgtggtgatcaacgtgcgtgagcacgagatcttccagcgcgatggcaagcacctgtactgcgaagtgccgatcagctacaccgacgctgccctgggtggcgagctggaagtgccgaccctcgatggccgggtgaagctgaagatcccggaaggcacccagaccggcaagcagttccgtctgcgcggcaaaggtgtggcaccggttcgcggtggtggggcaggtgacctgctgtgccgtgtggccgtagaaaccccggtcaatctcagtcgtcgccagcgcgagctgctcgaagagctgcgtgattcgctggaaggcgacagctcccattcgcccaaggccaatggctggttcgatggcgtgaagcgcttcttcggcgatctctga

SEQ ID NO: 117798 - protein, 374 aa, Pseudomonas putida
MAKRDYYEVLGVERGANEGDLKKAYRRLAMKYHPDRNPGDKESEEQFKEANEAYEVLSDASKRAAYDQYGHAGVDPSMGGGGAGFGGANFSDIFGDVFSDFFGGGRGGSRGGAQRGSDLRYTLELNLEEAVRGTTVSIRVPTLFNCNPCDGCGANKGSTPSTCPTCGGIGQVRMQQGFFSVQQTCPRCHGQGKIITDPCGACHGEGRVEEYKTLSVKVPAGVDTGDRIRLSGEGEAGTHGGPTGDLYVVINVREHEIFQRDGKHLYCEVPISYTDAALGGELEVPTLDGRVKLKIPEGTQTGKQFRLRGKGVAPVRGGGAGDLLCRVAVETPVNLSRRQRELLEELRDSLEGDSSHSPKANGWFDGVKRFFGDL

SEQ ID NO: 117799 - DNA, 1329 bp, Arabidopsis thaliana
  CDS (1)..(1329)
atggctataatacaacttggaagtacatgtgttgctcaatggagtattcgtcctcaatttgcagtcagagcttattatcccagcagaatcgaatcaactcgccatcaaaattccagtagccaagtaaattgtttgggagcttcaaagtcgagtatgttctcacatgggtcattgcccttcttgtccatgacgggaatgtccagaaatatgcatcctcctcgcagaggatctcgcttcactgttagagctgatgcagattactattcggtactcggagtttcgaaaaatgcaaccaaagctgagattaaaagcgcttatcggaagctggctaggaattaccatccggatgtgaacaaggatcctggcgcagaagagaaattcaaagaaataagtaacgcatatgaggttttatcagatgatgaaaagaaatctctttacgataggtatggtgaggccggacttaaaggcgctgctggatttggcaatggggattttagtaatccgttcgatctattcgactcattattcgaaggcttcggtggtgggatgggtagaggttcaagaagcagagctgtggatggtcaagacgagtattacacgctaatcttaaacttcaaagaagcggttttcggaatggagaaagaaatagagatatcccggctcgagagctgtgggacatgtgaaggttcaggtgcaaaacctggaaccaaaccgaccaaatgcaccacgtgtggcggacaaggccaagtggtttcagcagctagaactcctctgggcgtgttccaacaagtcatgacttgctcgtcctgtaatggcactggagagatctcgacgccgtgtggtacttgctctggagacggacgcgtgaggaagacaaaacggataagtctcaaagtaccagccggggttgattcaggtagccggttgagagtgagaggagaaggcaatgccgggaagagaggcggatcaccgggcgatctgtttgttgttatagaagttatcccagacccgattttgaaacgagacgatacaaatattctctacacttgcaagatatcgtatatcgatgcgattttagggacgacactgaaagtaccaacagtggatgggacagtagatttgaaagttccagctgggacacaacctagcacgacgcttgtgatggcgaaaaaaggagttccggtattgaacaagagtaatatgagaggagatcagttggtgagagtacaagtggagatacctaagagattgagcaaagaggagaaaaaacttattgaagagcttgctgatatgagcaagaacaggactgctaatagcaccagtagatga

SEQ ID NO: 117800 - protein, 442 aa, Arabidopsis thaliana
MAIIQLGSTCVAQWSIRPQFAVRAYYPSRIESTRHQNSSSQVNCLGASKSSMFSHGSLPFLSMTGMSRNMHPPRRGSRFTVRADADYYSVLGVSKNATKAEIKSAYRKLARNYHPDVNKDPGAEEKFKEISNAYEVLSDDEKKSLYDRYGEAGLKGAAGFGNGDFSNPFDLFDSLFEGFGGGMGRGSRSRAVDGQDEYYTLILNFKEAVFGMEKEIEISRLESCGTCEGSGAKPGTKPTKCTTCGGQGQVVSAARTPLGVFQQVMTCSSCNGTGEISTPCGTCSGDGRVRKTKRISLKVPAGVDSGSRLRVRGEGNAGKRGGSPGDLFVVIEVIPDPILKRDDTNILYTCKISYIDAILGTTLKVPTVDGTVDLKVPAGTQPSTTLVMAKKGVPVLNKSNMRGDQLVRVQVEIPKRLSKEEKKLIEELADMSKNRTANSTSR

SEQ ID NO: 117801 - DNA, 1059 bp, Drosophila mauritiana
  CDS (1)..(1059)
atgggcaaagacttctacaagattctgggcatcgaccgcaaggccagcgacgatgagatcaagaaggcctaccgcaaactggcactcaaataccatcccgacaagaacaagagcccgcaggcggaggagcgcttcaaggagatcgccgaggcgtacgaggtgctgtcggacaaaaagaagcgcgacatcttcgacaagtacggtgaggatggactgaagggcggacagccgggaccagatggcggcggtcagccgggagcgtacacttaccagttccacggcgatccgagggccacctttgcccagttctttggatcgtcggatccgtttggcgtcttctttaccggcggcgataacatgtttgctggtcagggtcagggcggcaataccaacgagatcttcatgaacattggcggcgacgatatgtttgcctctttccctggcaatcctatggctggagccttccgttcgcagtcattcaatgcacaggcacccagtcgcaagcgccaacaacagcaggatccgcccatcgagcatgatctgtacgtgtcgctggaggaagtggacaagggatgcataaagaagatgaaaatctcacgcatggccaccggaagcaatggaccgttcaaggaggagaaggtgctgagaatcacagtgaagccgggctggaaggccggcaccaagattaccttcccccaagagggtgattcggcgccaaacaagacgccagccgacatcgtcttcatcatacgcgacaaaccgcatgcgctgttcaaacgcgagggcatcgatctaaagtacacagcccagatcagtctgaagcaggccttgtgcggagcactggtcagtgtgcccacgctgcagggcagcaggatacaggtgaacccgaaccacgagatcatcaagcccaccacaacgcgccggatcaacggactgggtctgcccgtgcccaaggagccatcgaggcgcggcgatctgatcgtgtccttcgacatcaagtttcccgacgcactgtcacccagcctgcagaatcagctgtccgagctgctgcccaactag

SEQ ID NO: 117802 - protein, 352 aa, Drosophila mauritiana
MGKDFYKILGIDRKASDDEIKKAYRKLALKYHPDKNKSPQAEERFKEIAEAYEVLSDKKKRDIFDKYGEDGLKGGQPGPDGGGQPGAYTYQFHGDPRATFAQFFGSSDPFGVFFTGGDNMFAGQGQGGNTNEIFMNIGGDDMFASFPGNPMAGAFRSQSFNAQAPSRKRQQQQDPPIEHDLYVSLEEVDKGCIKKMKISRMATGSNGPFKEEKVLRITVKPGWKAGTKITFPQEGDSAPNKTPADIVFIIRDKPHALFKREGIDLKYTAQISLKQALCGALVSVPTLQGSRIQVNPNHEIIKPTTTRRINGLGLPVPKEPSRRGDLIVSFDIKFPDALSPSLQNQLSELLPN

SEQ ID NO: 117803 - DNA, 1056 bp, Drosophila yakuba
  CDS (1)..(1056)
atgggcaaagacttctacaagattctgggcatcgaccgcaaggccagcgacgatgagatcaagaaggcctaccgcaagctagccctcaaataccatcccgacaagaacaagagcccgcaggcggaggagcgcttcaaggagatcgccgaggcgtacgaggtgctatcggacaaaaagaagcgcgacatcttcgacaagtacggtgaggatggattgaagggtggacagccgggaccagatggcagcggccagccgggagcatacagctaccagttccatggcgatccgagggccacttttgcgcagttctttggatcgtcggatccgtttggcgtcttcttcggcggcagtgataacatgtttgccggcgttcagggcggcaataccaacgaggtcttcatgaacattggcggcgacgatatgtttggcggtttccccggcaatcctatggctggtgccttccgttcgcaatcattcaatgcccaggcacccagtcgcaagcgccagcagcaacaggatccacccatcgagcatgatctgtacgtgtcgctggaggaagtggacaagggatgcaccaagaagatgaagatctcacgcatggccagcggaaacagtgggccgtacaaggaggagaaggtgctgagcattacagtgaaaccgggctggaaggccggtaccaagattaccttcccccaggagggcgattcggcgccaaacaagattgcagctgacatcgtcttcatcatacgcgacaaaccgcattcgctgttcaaacgcgagggcatcgatctgaagtacacagcccaggtcagtctgaagcaggccttatgtggggcactggttagtgtgcccacgctgcagggcagtaggatacaggtgaatccaaaccatgagatcatcaagccaaccacaacgcgtaggatcagcggactaggtctgcccgtgcccaaggagccctcaagacgtggcgatctgatcgtgtccttcgacatcaagttccccgacacactaacgcctagcttgcagaatcagctggccgagctgctgcccaactag

SEQ ID NO: 117804 - protein, 351 aa, Drosophila yakuba
MGKDFYKILGIDRKASDDEIKKAYRKLALKYHPDKNKSPQAEERFKEIAEAYEVLSDKKKRDIFDKYGEDGLKGGQPGPDGSGQPGAYSYQFHGDPRATFAQFFGSSDPFGVFFGGSDNMFAGVQGGNTNEVFMNIGGDDMFGGFPGNPMAGAFRSQSFNAQAPSRKRQQQQDPPIEHDLYVSLEEVDKGCTKKMKISRMASGNSGPYKEEKVLSITVKPGWKAGTKITFPQEGDSAPNKIAADIVFIIRDKPHSLFKREGIDLKYTAQVSLKQALCGALVSVPTLQGSRIQVNPNHEIIKPTTTRRISGLGLPVPKEPSRRGDLIVSFDIKFPDTLTPSLQNQLAELLPN

SEQ ID NO: 117805 - DNA, 1056 bp, Drosophila teissieri
  CDS (1)..(1056)
atgggcaaagacttctacaagattctgggcatcgaccgcaaggccagcgacgatgagatcaagaaggcctaccgcaaactagccctcaaataccatcccgacaagaacaagagcccgcaggcggaggagcgcttcaaggagatcgccgaggcgtacgaggtgctatcggacaaaaagaagcgcgacatcttcgacaagttcggtgaggatggactgaagggtggacagccgggaacagatggcagcgggcagccgggagcatacacctatcagttccacggcgatccgagggccacttttgcgcagttctttggatcgtcggatccgtttggcgtcttctttggcggcagtgataacatgtttgccggcggtcagggcggcaataccaacgagatcttcatgaacattggcggcgacgatatgtttggcggtttccccggcaatcctatggctggagccttccgatcgcagtcattcaatgcccaggcacccagtcgcaagcgccagcagcaacaggatccgcccatcgagcatgatctgtacgtgtcgctggaggaagtggacaagggatgcaccaagaagatgaaaatctcacgcatggccagcggaaacagtgggccgtacaaggaggagaaggtgctgagcatcacagtgaaaccgggctggaaggccggtaccaagattaccttcccccaggagggcgattcggcgccaaacaagataccagctgacatcgtcttcatcatacgcgacaaaccgcattcgctgttcaaacgcgagggcatcgatctgaagtacacagcccaggtcagtctgaagcaggccttatgtggcgcactggttagtgtgcccacgctgcagggcagtaggatacaggtgaacccgaaccatgagatcatcaagcccaccaccacgcgtagaatcagcggactaggtctgcccgtgcccaaggagccctcgagacgcggcgatctgatcgtgtcctttgacatcaagttccccgacacactagcgcccagtctgcagaatcagctggccgagctgctgcccaactag

SEQ ID NO: 117806 - protein, 351 aa, Drosophila teissieri
MGKDFYKILGIDRKASDDEIKKAYRKLALKYHPDKNKSPQAEERFKEIAEAYEVLSDKKKRDIFDKFGEDGLKGGQPGTDGSGQPGAYTYQFHGDPRATFAQFFGSSDPFGVFFGGSDNMFAGGQGGNTNEIFMNIGGDDMFGGFPGNPMAGAFRSQSFNAQAPSRKRQQQQDPPIEHDLYVSLEEVDKGCTKKMKISRMASGNSGPYKEEKVLSITVKPGWKAGTKITFPQEGDSAPNKIPADIVFIIRDKPHSLFKREGIDLKYTAQVSLKQALCGALVSVPTLQGSRIQVNPNHEIIKPTTTRRISGLGLPVPKEPSRRGDLIVSFDIKFPDTLAPSLQNQLAELLPN

SEQ ID NO: 117807 - DNA, 1053 bp, Drosophila orena
  CDS (1)..(1053)
atgggcaaagacttctacaagattctgggcatcgaccgcaaggccagcgacgatgagatcaagaaggcctaccgcaagctagccctgaaataccatcccgacaagaacaagagcccgcaggcggaggagcgcttcaaggagatcgccgaggcgtacgaggtgctatcggacaaaaagaagcgcgacatcttcgacaagtacggtgaggatggactgaagggcggacagccgggaccagatggcggcggccagccgggagcgtacacctatcagttccacggcgatccgagggccacatttgcccagttctttggatcgtcggatccgtttggcgtcttcttctccagcaatgataacatgttttgcggcggtcagggcggcaattccaccgatatatttatgaacattggcaacgatcagtttgccggtttcccgggcaatcctgcggctggagccttccggtcgcagtcattcaatgcccaagcacccagtcgcaagcgccagcagcaacaggatccgcccatcgagcatgatctgtacgtgtcgctggaggaagtggacaagggatgcaccaagaagatgaaaatctcacgcatggccaccggaaaaactggcccatacaaggaggagaaggtgctgagcatcacagtgaaaccgggctggaaggccggtaccaagattaccttccccaaggagggcgatgcggcgcccaacaagataccagctgacatcatcttcatcatacgcgacaaaccgcattcgctgttcaaacgcgagggcatcgatctgaagtacacagcccaggtcagtctgaagcaggccttatgcggagcactggttagtgtgcccacgctgcagggcagtaggatacaggtgaacgcaaaccacgagatcatcaagcccaccacaacgcgtaggatcggcggactaggtctgcccgtgcccaaggagccctcgaggcgcggcgatctgatcgtgtccttcgacatcaagttccccgacacactggcgaccagtctgcagaatcagctggccgagctgctgcccaactag

SEQ ID NO: 117808 - protein, 350 aa, Drosophila orena
MGKDFYKILGIDRKASDDEIKKAYRKLALKYHPDKNKSPQAEERFKEIAEAYEVLSDKKKRDIFDKYGEDGLKGGQPGPDGGGQPGAYTYQFHGDPRATFAQFFGSSDPFGVFFSSNDNMFCGGQGGNSTDIFMNIGNDQFAGFPGNPAAGAFRSQSFNAQAPSRKRQQQQDPPIEHDLYVSLEEVDKGCTKKMKISRMATGKTGPYKEEKVLSITVKPGWKAGTKITFPKEGDAAPNKIPADIIFIIRDKPHSLFKREGIDLKYTAQVSLKQALCGALVSVPTLQGSRIQVNANHEIIKPTTTRRIGGLGLPVPKEPSRRGDLIVSFDIKFPDTLATSLQNQLAELLPN

SEQ ID NO: 117809 - DNA, 1065 bp, Drosophila mimetica
  CDS (1)..(1065)
atgggcaaagacttctacaagattctgggcatcgaccgcaaggccagcgacgatgagatcaagaaggcctaccgcaaactggcactcaaataccatcccgacaagaacaagagcccgcaggcggaggagcgcttcaaggagatcgccgaggcgtacgaggtgttgtccgacaaaaagaagcgcgacatcttcgacaagtacggtgaggatggactgaagggcggacagccgggaccagatggcggcggtcagccgggagcgtacacttaccagttccacggcgatccgagggccacctttgcccagttctttggatcgtcggatccgtttggcgtcttctttaccggcggcgataacatgtttgctggtcagggtcagggcggcaataccaacgagatcttcatgaacatcggcggcgaggatatgttcggaggcggcggcttcgcagctaatcccctggccggcgccttccgctcgcagtccttcaatgcccaggcgcccagtcgcaagcgccagcagcaacaggatccgcccatcgagcacgacctgtacgtcaccctggaggaggtggacaaggggtgcaccaagaagatgaagatctcacgcatggccactgggaacgcgggaccgtacaaggaggagaaggtgctgagcatcaccgtgaagccgggctggaaggctggcaccaaaatcaccttcccccaggagggcgatgcggcgcccaacaagataccggcggacatcatcttcatcatacgcgaccgtccgcatgcgcagttcaagcgtgagggcatcgatctgaagtacacggcccaggtcagtctgaagcaggccttatgcggagcaccggtcagtgtgcccacgctgcagggtgatcggattccggttaacaccgccaacgagatcatcaagcccaccaccacgcgcaggatcagtggacggggtctgcccgtgcccaaggaaccttcgcggcgtggcgatctcatcgtatccttcgacatcaagttccccgacacactgccgcccagcgtgcggaatcagctggccgagctgctgcccaactag

SEQ ID NO: 117810 - protein, 354 aa, Drosophila mimetica
MGKDFYKILGIDRKASDDEIKKAYRKLALKYHPDKNKSPQAEERFKEIAEAYEVLSDKKKRDIFDKYGEDGLKGGQPGPDGGGQPGAYTYQFHGDPRATFAQFFGSSDPFGVFFTGGDNMFAGQGQGGNTNEIFMNIGGEDMFGGGGFAANPLAGAFRSQSFNAQAPSRKRQQQQDPPIEHDLYVTLEEVDKGCTKKMKISRMATGNAGPYKEEKVLSITVKPGWKAGTKITFPQEGDAAPNKIPADIIFIIRDRPHAQFKREGIDLKYTAQVSLKQALCGAPVSVPTLQGDRIPVNTANEIIKPTTTRRISGRGLPVPKEPSRRGDLIVSFDIKFPDTLPPSVRNQLAELLPN

SEQ ID NO: 117811 - DNA, 1329 bp, Arabidopsis thaliana
  CDS (1)..(1329)
atggctataatacaacttggaagtacatgtgttgctcaatggagtattcgtcctcaatttgcagtcagagcttattatcccagcagaatcgaatcaactcgccatcaaaattccagtagccaagtaaattgtttgggagcttcaaagtcgagtatgttctcacatgggtcattgcccttcttgtccatgacgggaatgtccagaaatatgcatcctcctcgcagaggatctcgcttcactgttagagctgatgcagattactattcggtactcggagtttcgaaaaatgcaaccaaagctgagattaaaagcgcttatcggaagctggctaggaattaccatccggatgtgaacaaggatcctggcgcagaagagaaattcaaagaaataagtaacgcatatgaggttttatcagatgatgaaaagaaatctctttacgataggtatggtgaggccggacttaaaggcgctgctggatttggcaatggggattttagtaatccgttcgatctattcgactcattattcgaaggcttcggtggtgggatgggtagaggttcaagaagcagagctgtggatggtcaagacgagtattacacgctaatcttaaacttcaaagaagcggttttcggaatggagaaagaaatagagatatcccggctcgagagctgtgggacatgtgaaggttcaggtgcaaaacctggaaccaaaccgaccaaatgcaccacgtgtggcggacaaggccaagtggtttcagcagctagaactcctctgggcgtgttccaacaagtcatgacttgctcgtcctgtaatggcactggagagatctcgacgccgtgtggtacttgctctggagacggacgcgtgaggaagacaaaacggataagtctcaaagtaccagccggggttgattcaggtatccggttgagagtgagaggagaaggcaatgccgggaagagaggcggatcaccaggcgatctgtttgttgttatagaagttatcccagacccgattttgaaacgagacgatacaaatgttctctacacttgcaagatatcgtatatcgatgcgattttagggacgacactgaaagtaccaacagtggatgggacagtagatttgaaagttccagctgggacacaacctagcacgacgcttgtgatggccaaaaaaggagttccggtattgaacaagagtaatatgagaggagatcagttggtgagagtacaagtggagatacctaagagattgagcaaagaggagaaaaaacttattgaagagcttgctgatatgagcaagaacaagactgctaatagcaccagtagatga

SEQ ID NO: 117812 - protein, 442 aa, Arabidopsis thaliana; identical to SEQ ID NO: 63940

SEQ ID NO: 117813 - DNA, 1170 bp, Drosophila melanogaster
  CDS (1)..(1170)
atggacaacctaaatttatacgacgttcttagagtggctccggatgcaactgatgaggaaataaaaaagaactaccgaaaattggcaaaagagttccatccagacaagaatcccgatgcgggcgacaagtttaaagaaatatccttcgcctacgaagtgctgtccgatcccgagaagcggcgcatctacgaccgatatggattgaagggcctgcaagagggcgccgagggattctctgatgcctccgaattcttcgcccagtggttccccttcgatcgagtctcgtccgaaggtcggggcaggcgcaatggcaaagtcgtggtaaaagtggagctgaccctggaggagatctacgtcggcggcatgaagaagaaggtggagtacaatcgccagaagctgtgctccaagtgtaacggcgatggcggtcccaaggaagcgcacgagagctgcgagacctgcggcggagctggacgagcggccgcatttaccttcatgggtctcagccccttcgatacgacctgtccgacttgcgatggcaggggcttcaccataagggacgacaagaagtgcagtccctgccagggcagtggtttcgtagagcagaagatgaagcgggacctggttgtggagcgaggagcaccgcacatgctaaaagttcccttcgcaaatgagggccaccaaatgcgaggcggcgaatttggggatctgattgtagtcatctcccagatggaacatccaatctttcagcgccgccatgccaatctgtacatgcgagacctggagatcaacatcacggaggccttgtgcggctactcgcattgtttcaagcacttggatggacgaaacgtctgtctgcgcacgtaccctggtgaagtgttgcagcacaaccagatcaagatggtgcgaggcagcggtatgcctgtttttaacaaggccaccgacagtggagatctctacatgaagtttaaggttaagtttccggacaacgactttgccacggcaccgcagttggccatgctggaggacttactccctcccagacagccgatagtgatcccaaagaacgccgaggaagtgcaaatgacggactataagccgcagccacgacagaaggaagacgaggacggacagtcgtctcactttgagggcgtacagtgccagacggcttag

SEQ ID NO: 117814 - protein, 389 aa, Drosophila melanogaster
MDNLNLYDVLRVAPDATDEEIKKNYRKLAKEFHPDKNPDAGDKFKEISFAYEVLSDPEKRRIYDRYGLKGLQEGAEGFSDASEFFAQWFPFDRVSSEGRGRRNGKVVVKVELTLEEIYVGGMKKKVEYNRQKLCSKCNGDGGPKEAHESCETCGGAGRAAAFTFMGLSPFDTTCPTCDGRGFTIRDDKKCSPCQGSGFVEQKMKRDLVVERGAPHMLKVPFANEGHQMRGGEFGDLIVVISQMEHPIFQRRHANLYMRDLEINITEALCGYSHCFKHLDGRNVCLRTYPGEVLQHNQIKMVRGSGMPVFNKATDSGDLYMKFKVKFPDNDFATAPQLAMLEDLLPPRQPIVIPKNAEEVQMTDYKPQPRQKEDEDGQSSHFEGVQCQTA

SEQ ID NO: 117815 - DNA, 1311 bp, Oryza sativa
  CDS (1)..(1311)
atggcgctgctacagtttggaggtaccttggctcccaaacttggggaaaaacctcagctgttgcccaggtcacctgcacttacaagagttatttatgctgatccaagatttctggtgtcgaaaagtggtagtggaggcaggcttaaacaccttgtatcacctactgctagtttacaatcacggacatcttctcgactatttaaccatgcaccatcaccgagatttcgccatcgaaggagttcaaggttcattgtcagagctgatgctgatttctattccacacttggtgtttcaagaaatgctagtaaatctgaaatcaagagtgcctatcggaagcttgctaggagctaccatcctgatgtgaacaaagatcctggtgctgaacaaaagttcaaggatattagcaatgcttatgaggttttgtctgatgatgagaagcgatcaatctatgataaatatggagaagctggtttgaagggtgctggaatgggagcaggagattactcaaacccattcgatctctttgaatcattactcgaaggctttggtggaatggggggaatgggaggccgtgctgctcggaacagaccaatgcagggtgatgatgaggcctacaatctggtactcaatttcaaggaagcggtgtttggtgtagagaaagaaattgagatcaccagactggaaggctgtaatacatgtgatggaactggtgccaagcctggaacgaaaccaaccacatgcaaaacatgtggaggacagggacaagtggtctcctcaacaagaacgccacttggaatattccagcaggtctccacctgcaatacttgcggaggcactggtgaattctctaccccgtgcaacacttgtgggggtgatggccgagtgcggaaaacaaaaaggatcagtctaaaggttcctgctggtgttgattctggaagcagattgagggtccggtctgaggggaatgctgggcggagaggaggccctcctggagatctttatgtgtttattgatgttctctctgatcctgttcttaagcgagatgggacaaacattctatacacatgcaaagtttcatatattgacgcaattcttgggacaaccgtcaaggttcccactgttgatgggatggttgacctgaagatcccctccggtacccagccaggcacaacgttagtgatgtccaagaaaggtgtcccgctcctcgggaagtcaaatgctcgtggagaccagctagtgcgtgtgcaggtcgagattccaaagcgtctgagcagcgacgagaggaagctgattgaagaacttgcaaactaa

SEQ ID NO: 117816 - protein, 436 aa, Oryza sativa; identical to SEQ ID NO: 63944

SEQ ID NO: 117817 - DNA, 1257 bp, Daucus carota; identical to SEQ ID NO: 63947
  CDS (1)..(1257)

SEQ ID NO: 117818 - protein, 418 aa, Daucus carota; identical to SEQ ID NO: 63948

SEQ ID NO: 117819 - DNA, 1029 bp, Solanum lycopersicum
  CDS (1)..(1029)
atgggggtggattactacaaagtattgggtgttgataagaacgctacagatgatgatttgaagaaagcttatagaaaacttgccatgaaatggcatccggataagaacccacaaaacaaaaaagaagctgaagctaagttcaaacagatctctgaagcgtatgatgtgcttagcgactcccagaaaaaagctgtgtatgaccagtatggtgaagaagggctcaagggcggggtaccaccacctggagctggtggtcctggtgccggttcaacctacttttctactggggatggccctacttcattcagattcaacagtagaaatgctgatgacatatttgctgaattttttggcttttctactccatatggacctggagggggtaggggctcaaggtttggtaatatgttcactgatgatatattcgcagcatccttcggtgaaggaggaggaggtggtggtgttccaatgcattcatcagtcccaaggaaagaggctccggtacaacagaacttgccttgtaatcttgaggatctctacaagggtaccaccaaaaagatgaaaatttctagagaaattgccgattcgagtggcaagagaattgtgcaagagattctgacaatcgaaattaaacctgggtggaagaaaggtacaaagatcaccttccaagaaaaagggaatgagcagccaggtgttataccagctgatctggtcttcataatagatgagaaacctcataaggttttctcgcgtgatggaaatgacttgattgtcacacaaaagattcctttggctgaagctttaaccggtactactgtccaactcactactctggatggaaggaacttaacaattccaatcaacaacgtgattcaaccaaattatgaacatatcgccccaggtgaaggcatgccccttccaaaagatccgtcaaagaaagggaatttgaggatcaagtttgacatcaagttccctgcccgtcccactgtggcccagaaatctggtatcaaaaagctgttggggtcttga

SEQ ID NO: 117820 - protein, 342 aa, Solanum lycopersicum
MGVDYYKVLGVDKNATDDDLKKAYRKLAMKWHPDKNPQNKKEAEAKFKQISEAYDVLSDSQKKAVYDQYGEEGLKGGVPPPGAGGPGAGSTYFSTGDGPTSFRFNSRNADDIFAEFFGFSTPYGPGGGRGSRFGNMFTDDIFAASFGEGGGGGGVPMHSSVPRKEAPVQQNLPCNLEDLYKGTTKKMKISREIADSSGKRIVQEILTIEIKPGWKKGTKITFQEKGNEQPGVIPADLVFIIDEKPHKVFSRDGNDLIVTQKIPLAEALTGTTVQLTTLDGRNLTIPINNVIQPNYEHIAPGEGMPLPKDPSKKGNLRIKFDIKFPARPTVAQKSGIKKLLGS

SEQ ID NO: 117821 - DNA, 1386 bp, Arabidopsis thaliana; identical to SEQ ID NO: 63949
  CDS (1)..(1386)

SEQ ID NO: 117822 - protein, 461 aa, Arabidopsis thaliana; identical to SEQ ID NO: 63950

SEQ ID NO: 117823 - DNA, 1257 bp, Nicotiana tabacum; identical to SEQ ID NO: 63951
  CDS (1)..(1257)

SEQ ID NO: 117824 - protein, 418 aa, Nicotiana tabacum; identical to SEQ ID NO: 63952

SEQ ID NO: 117825 - DNA, 1317 bp, Arabidopsis thaliana; identical to SEQ ID NO: 63953
  CDS (1)..(1317)

SEQ ID NO: 117826 - protein, 438 aa, Arabidopsis thaliana; identical to SEQ ID NO: 63954

SEQ ID NO: 117827 - DNA, 1698 bp, Euphorbia esula
  CDS (82)..(1338)
ggtttctgtggctctctctaagctgaatctctcaatcgctgatctttgattgattgattaggtcatctgagagaagaagagatgtttggaagagcaccgaagaaaagcgataactcaaagtattatgagattctcggagtctcaaagagcgcttcgcaggatgatctaaagaaggcttatagaaaagctgccatcaagaaccatcctgacaagggtggtgatccagaaaagttcaaggagttggcccaggcttatgaagttttaagtgacccagaaaagcgtgatatatatgatcagtatggtgaggatgcccttaaggaaggaatgggcggtggtggcggtggccatgatccatttgacatattccaatccttctttggtggcagtccatttggtggcggtggtagtagcagaggccggaggcagaggaggggtgaggatgtgactcatcctctcaaagtttccttggaagatctctacaatggcacctccaagaagctatctttatcccgaaatgtaatctgctcaaagtgcaaaggtaaaggctccaagtcaggtgcatcaatgaaatgttcaggttgccaaggatctggaatgaaggtttccattagacaccttggtccctctatgatccagcaaatgcagcatccttgcaatgaatgtaagggtactggggagaccattaatgacaaggatcgggtgcccccagtgcaagggcgaaaagggttattcaagagaagaaaagtcttggaagtccatgttgagaagggtatgcaaaatggacagaagatcacattccccggagaagctgatgaagctcctgatactgttacaggagatatagtttttatccttcagcaaagggagcatcctaagtttaaaagaaggggagatgatctagttgtggagcacaccttgtctctaactgaggctctctgtggtttccagttcatattgacccatttagatggaaggcaactcctcataaagtcccagcctggggaagttgtgaagcctgatcaattcaaggctataaatgatgaggggatgccaatgtaccagaggccatttatgaggggtaagttgtacattcacttcaatgttgaattcccggattctcttccaccggatcaatccaaagccctagaggctgtgcttccatcgagaacttccgtacaattgtcggacatggaggtggatgaatgcgaagaaaccactttgcatgatgtcaattttgaggaagagatgaggagaaagcaacagcagagtgcagaggcttatgatgaagatgaagatatgccaggtggtgcccagagagtgcaatgcgcccagcagtaagccgaggaagcaaaacctgagtgagtaattagtgccaatattaagatagttgttatgtgagaataatagggattctcaatcatttgttggcattggtttaaaggattttagagactgctggttcgacttcgggaatattatctcgggagcattcgctcgggaacaaaccagaaaaactgtcctttttttaattttctttatttaataatattttttatttttgcgttgtttatggtgtaattttggatcagttagcgtgccataatatagtaattgttttgcgtgatactcttcttatggtattaaattggtaatactctttgtatggtattaaattggtaaaaaaaaaaaaaaaaaaaa

SEQ ID NO: 117828 - protein, 418 aa, Euphorbia esula; identical to SEQ ID NO: 63956

SEQ ID NO: 117829 - DNA, 1260 bp, Solanum lycopersicum; identical to SEQ ID NO: 63957
  CDS (1)..(1260)

SEQ ID NO: 117830 - protein, 419 aa, Solanum lycopersicum; identical to SEQ ID NO: 63958

SEQ ID NO: 117831 - DNA, 1191 bp, Arabidopsis thaliana
  CDS (1)..(1191)
atgtttgcacagggctctttacccttcttgtcattgacgggagtatctcctaatacacattctcgtagaggagctcgcttcactgttagagctgatactgatttctattctgtccttggagtctcgaaaaatgcaaccaaagctgagattaaaagcgcttatcggaagctcgctaggagttatcatccagatgtgaacaaggatgctggggcagaagataaatttaaagaaataagtaatgcatatgagatcttatcagatgatgagaaaagatctctatacgacagatatggcgaggcaggagttaaaggcgctggaatgggaggcatgggggattatagtaatccgtttgatctatttgagtcattattcgaaggaatgggtgggatgggaggaatgggcggtggaatgggtagtagaggttcaaggagcagagctatcgatggtgaagatgagtattactcactaatcttgaatttcaaagaagcggttttcggtattgagaaagaaattgagatatctcggttagagagctgtgggacttgcaatggttctggagctaaagcgggaaccaaaccaaccaaatgcaaaacatgtggcgggcaaggacaggtggtagcatcaacgaggacaccactcggtgtattccaacaagtgatgacttgctctccgtgtaacggaactggggagatatcaaaaccgtgtggtgcatgctcaggagatggacgtgtgagaaggacaaagcggattagtcttaaagttcctgcgggtgtggattctggaagtaggttaagagtgaggggagaagggaatgcaggaaagagaggtggatcaccgggagatctctttgcggttattgaggttattccagatccggttttgaagcgtgatgatacaaatatactttatacgtgtaagatatcgtatgtagatgccatattggggacgactttgaaggtaccaacagtggatggagaggtggatttgaaagtaccggcagggacacaaccaagcacgacattggtgatggctaaaaaaggagttccggttttgaataagagcaagatgagaggtgatcagttagtgagagtgcaagttgagattcctaagagattgagtaaagaagagaagatgcttgttgaggagctggctgatatgagcaagaacaaggtagctaatagcaggagataa

SEQ ID NO: 117832 - protein, 396 aa, Arabidopsis thaliana; identical to SEQ ID NO: 63960

SEQ ID NO: 117833 - DNA, 1029 bp, Nicotiana tabacum
  CDS (1)..(1029)
atgggggttgattattacaaagtattgggtgtagataagaacgctacagatgatgatttgaagaaagcttatagaaaacttgctatgaaatggcatcctgataagaaccctaataacaaaaaagccgctgaagctaagttcaaacagatctctgaagcctatgatgtgcttagcgactcccagaaaagagctgtgtatgaccagtatggtgaagacgggctgaagggtggggtgccaccgccaggagcaggtgggccgggtggtggttcccccttcttctctactggggaaggcccccagtcattcagatttaatactagaagtgcggatgacatatttgctgaatttttcggcttttcaagtccatttggaggtgctggaggaaggggaccaaggtttggtggtatgtttggcgatgatatgtttgcatcctttggtgaaggaggaggcggtggtggtgcttcaatgtatcaatcagctccaaggaaagaggctccgatacagcagaacttgccttgtaatcttgaggatctttacaagggtaccaccaagaagatgaaaatttctagagaagttgctgatgcgagtggcaagagaatgcaggtggaggagattctaacaatcaatattaaacctggctggaaaaaaggtacaaagattaccttccaagagaaagggaacgagcagcctggcgttataccagctgatcttgtcttcataatagatgagaaacctcatagagttttctcacgcgacggaaacgacttaattgttacacaaaagatatctttggttgaagccttgactggtactacagtccaactcactactctagatggaaggaatttaaccattcccgtcaacagtgttattcaaccaaattatgagcatgttgtcccaggcgaaggtatgccgcttccaaaagatccgacaaagaaaggaaatctgagaatcaaatttgacatcaagttccctgttcgtctgactacgacccagaaagctgggatcaaggagctattgggttcttga

SEQ ID NO: 117834 - protein, 342 aa, Nicotiana tabacum
MGVDYYKVLGVDKNATDDDLKKAYRKLAMKWHPDKNPNNKKAAEAKFKQISEAYDVLSDSQKRAVYDQYGEDGLKGGVPPPGAGGPGGGSPFFSTGEGPQSFRFNTRSADDIFAEFFGFSSPFGGAGGRGPRFGGMFGDDMFASFGEGGGGGGASMYQSAPRKEAPIQQNLPCNLEDLYKGTTKKMKISREVADASGKRMQVEEILTINIKPGWKKGTKITFQEKGNEQPGVIPADLVFIIDEKPHRVFSRDGNDLIVTQKISLVEALTGTTVQLTTLDGRNLTIPVNSVIQPNYEHVVPGEGMPLPKDPTKKGNLRIKFDIKFPVRLTTTQKAGIKELLGS

SEQ ID NO: 117835 - DNA, 1254 bp, Glycine max; identical to SEQ ID NO: 63963
  CDS (1)..(1254)

SEQ ID NO: 117836 - protein, 417 aa, Glycine max; identical to SEQ ID NO: 63964

SEQ ID NO: 117837 - DNA, 1248 bp, Hevea brasiliensis; identical to SEQ ID NO: 63965
  CDS (1)..(1248)

SEQ ID NO: 117838 - protein, 415 aa, Hevea brasiliensis; identical to SEQ ID NO: 63966

SEQ ID NO: 117839 - DNA, 1188 bp, Mycobacterium bovis
  CDS (1)..(1188): transl_table=11
atggcccaaagggaatgggtcgaaaaagacttctaccaggagctgggcgtctcctctgatgccagtcctgaagagatcaaacgtgcctatcggaagttggcgcgcgacctgcatccggacgcgaacccgggcaacccggccgccggcgaacggttcaaggcggtttcggaggcgcataacgtgctgtcggatccggccaagcgcaaggagtacgacgaaacccgccgcctgttcgccggcggcgggttcggcggccgtcggttcgacagcggctttgggggcgggttcggcggcttcggggtcggtggagacggcgccgagttcaacctcaacgacttgttcgacgccgccagccgaaccggcggtaccaccatcggtgacttgttcggtggcttgttcggacgcggtggcagcgcccgtcccagccgcccgcgacgcggcaacgacctggagaccgagaccgagttggatttcgtggaggccgccaagggcgtggcgatgccgctgcgattaaccagcccggcgccgtgcaccaactgccatggcagcggggcccggccaggcaccagcccaaaggtgtgtcccacttgcaacgggtcgggcgtgatcaaccgcaatcagggcgcgttcggcttctccgagccgtgcaccgactgccgaggtagcggctcgatcatcgagcacccctgcgaggagtgcaaaggcaccggcgtgaccacccgcacccgaaccatcaacgtgcggatcccgcccggtgtcgaggatgggcagcgcatccggctagccggtcagggcgaggccgggttgcgcggcgctccctcgggggatctctacgtgacggtgcatgtgcggcccgacaagatcttcggccgcgacggcgacgacctcaccgtcaccgttccggtcagcttcaccgaattggctttgggctcgacgctgtcggtgcctaccctggacggcacggtcggggtccgggtgcccaaaggcaccgctgacggccgcattctgcgtgtgcgcggacgcggtgtgcccaagcgcagtgggggtagcggcgacctacttgtcaccgtgaaggtggccgtgccgcccaatttggcaggcgccgctcaggaagctctggaagcctatgcggcggcggagcggtccagtggtttcaacccgcgggccggatgggcaggtaatcgctga

SEQ ID NO: 117840 - protein, 395 aa, Mycobacterium bovis
MAQREWVEKDFYQELGVSSDASPEEIKRAYRKLARDLHPDANPGNPAAGERFKAVSEAHNVLSDPAKRKEYDETRRLFAGGGFGGRRFDSGFGGGFGGFGVGGDGAEFNLNDLFDAASRTGGTTIGDLFGGLFGRGGSARPSRPRRGNDLETETELDFVEAAKGVAMPLRLTSPAPCTNCHGSGARPGTSPKVCPTCNGSGVINRNQGAFGFSEPCTDCRGSGSIIEHPCEECKGTGVTTRTRTINVRIPPGVEDGQRIRLAGQGEAGLRGAPSGDLYVTVHVRPDKIFGRDGDDLTVTVPVSFTELALGSTLSVPTLDGTVGVRVPKGTADGRILRVRGRGVPKRSGGSGDLLVTVKVAVPPNLAGAAQEALEAYAAAERSSGFNPRAGWAGNR

SEQ ID NO: 117841 - DNA, 1167 bp, Mycobacterium leprae
  CDS (1)..(1167): transl_table=11
atggcccagcgtgaatgggtcgaaaaggacttctacaaggagctaggcgtttcctctgacgccagtcccgaagagattaagcgtgcctatcggaagttggcacgctacctgcatcctgacgcgaatcccgacaactccgctggtgaacggtttaaggtggtgtctgaggcgcacaatgtgttgtcggatccggtcaagcgcaaagagtacgatgaaactcgccggctgtttgccggcggctggttaggcggtcgtcggttcgacagtagttttggtgactttggaatgggcggcgacggtgctgagttcaacctcaacgatttgttcgatgctgccagtcgaaccgggggcaccaacatcggtgacttgttcggtggcttgtttggacgcggcgccagtgtccgccccagtaggccgcgacgcggcaacgacctggagaccgaggcagatttggattttgtcgaagcggccaaaggtgtagcgatgccgctgcggctgaccagcccagcgccgtgcaccaattgccatggcagcggggcacgtccgggaatcagtccgaaagtgtgttccacttgcaacggttccggcgtgatcaaccgcaatcagggtgcctttggtttctctgagccttgtaccgaatgtcggggtagcgggtcgatcatcgagcacccttgcgaagagtgcaaaggcaccggggttaccacccggacccgaaccatcaatgtgcggatcccgtccggtgtcgaagatggacaacggattcggctggcagggcagggcgaggcggggttgcgtggcgctccgtcgggtgatctgtatgtgacggtccatgtgcggcctgacaagatctttggtcgaaatggcgacgacctcaccgtgaccattccggttagcttcactgaattagctttgggctcaaccctttcagtgcccacgctggacggaacagtcggtgtccgggtgccaaaaggtacctcagatggccgtatcctgcgggtacgagggcgtggtgtacccaaacgcagtggtggccatggcgacttgcttgtcacagtcaaggtggcagttccgctgaacttggaaggtgccgcgcaaaaggcactggaggcctatgcggccgccgagcggtcaagtggtttcaaccctcgggcgggatggggcaggtaa

SEQ ID NO: 117842 - protein, 388 aa, Mycobacterium leprae
MAQREWVEKDFYKELGVSSDASPEEIKRAYRKLARYLHPDANPDNSAGERFKVVSEAHNVLSDPVKRKEYDETRRLFAGGWLGGRRFDSSFGDFGMGGDGAEFNLNDLFDAASRTGGTNIGDLFGGLFGRGASVRPSRPRRGNDLETEADLDFVEAAKGVAMPLRLTSPAPCTNCHGSGARPGISPKVCSTCNGSGVINRNQGAFGFSEPCTECRGSGSIIEHPCEECKGTGVTTRTRTINVRIPSGVEDGQRIRLAGQGEAGLRGAPSGDLYVTVHVRPDKIFGRNGDDLTVTIPVSFTELALGSTLSVPTLDGTVGVRVPKGTSDGRILRVRGRGVPKRSGGHGDLLVTVKVAVPLNLEGAAQKALEAYAAAERSSGFNPRAGWGR

SEQ ID NO: 117843 - DNA, 1146 bp, Mycobacterium paratuberculosis
  CDS (1)..(1146): transl_table=11
gtggcacgcgactattacgggctgctcggcgtgagccgaggcgccagcgatgcggagatcaaacgcgcgtaccgcaagctggcgcgcgaactgcatcccgacgtcaaccccgacgaggccgcgcaggcgaaattcaaggagatcagcgtcgcctacgaggtgctcagcgacccggagaaacggcggatcgtcgacctgggcggtgatccgctggagggggcggccgcggcgggcggcggcttcggagggttcggcggcctcggcgatgtgttcgaggcctttttcgggggcggcttcggcggcggcaccacctcccgcggcccgatcgggcgggtccggccgggctcggattcgctgctgcggatgcggctcgacctcgaggagtgcgccaccggggtgaccaagcaggtcaccgtcgacaccgccgtgctgtgcgaccgctgccacggcaagggcaccaacggcgactccgccccggtgccatgcgacacctgcggcggccgcggcgaggtgcagacggtgcagcgctcgttgctcggccaggtgatgacgtcccggccgtgcccgacctgccgcggcgtcggcgtcgtcatccccgacccgtgccaccagtgcatgggcgacggccgggtgcgggcccgccgcgagatcagcgtcaagatccccgccggggtgggtgacggcatgcgggtgcggctggccgcccagggcgaggtgggtcccggcggcggcccggccggtgacctctacgtcgaggtgcacgaacagccgcatgatgtcttcgtccgcgagggcgacgacctgcactgcacggtgtcggtgccgatggtcgacgcggcgctgggcgccaccgtcaccgtcgacgccatcctggacggcgtcagcgaaatcaccattccgcccggcacccaaccgggttcggtcatcacgctgcgcggccacggcatgccgcacctgcggtcgggcacccgcggcgatctgcacgtgcacgtcgaggtggtggtgcccagccggctggacgcccgcgataccgagctgctgcgcgaattcaagggccgccgtggccgcgacgtccccgaggtccgctccacccacgccggcggcggattgttcagccggctgcgcgagaccttcaccgggcgctag

SEQ ID NO: 117844 - protein, 381 aa, Mycobacterium paratuberculosis
MARDYYGLLGVSRGASDAEIKRAYRKLARELHPDVNPDEAAQAKFKEISVAYEVLSDPEKRRIVDLGGDPLEGAAAAGGGFGGFGGLGDVFEAFFGGGFGGGTTSRGPIGRVRPGSDSLLRMRLDLEECATGVTKQVTVDTAVLCDRCHGKGTNGDSAPVPCDTCGGRGEVQTVQRSLLGQVMTSRPCPTCRGVGVVIPDPCHQCMGDGRVRARREISVKIPAGVGDGMRVRLAAQGEVGPGGGPAGDLYVEVHEQPHDVFVREGDDLHCTVSVPMVDAALGATVTVDAILDGVSEITIPPGTQPGSVITLRGHGMPHLRSGTRGDLHVHVEVVVPSRLDARDTELLREFKGRRGRDVPEVRSTHAGGGLFSRLRETFTGR

SEQ ID NO: 117845 - DNA, 1191 bp, Streptomyces avermitilis; identical to SEQ ID NO: 63969
  CDS (1)..(1191): transl_table=11

SEQ ID NO: 117846 - protein, 396 aa, Streptomyces avermitilis; identical to SEQ ID NO: 63970

SEQ ID NO: 117847 - DNA, 1200 bp, Streptomyces coelicolor
  CDS (1)..(1200): transl_table=11
atgagcacgaaggacttcatcgagaaggactactacaaggttctcggcgtccccaaggacgccaccgaggccgagatcaagaaggcgtaccggaagctcgcccgcgagaaccacccggacgccaacaagggaaacgtcaaggcggaggagcgcttcaaggagatctccgaggccaacgacatcctcggtgaccccaagaagcgcaaggagtacgacgaggcccgcgccctcttcggcaacggcggattccgcccggggccgggcgcgggcggcggcggcaccttcaacttcgacctgggcgacctcttcggaggcggcgcccagggcgggggaggccagggcggcgccggcggcttcggcggcggcctcggggacgtcttcggcggcctgttcaaccgcaccggcggcggaccgggcaccggcacgcgcacgcagccgcggcgcgggcaggacatcgagtccgaggtcaccctgagcttcaccgaggccatcgagggcgcgaccgtgccgctccggatgtcctcgcaggcgccctgcaaggcctgttcgggcaccggcgacaagaacggcacgccgcgcgtgtgcccgacctgcgtcggcaccggccaggtcgcccggggctcgggcggcggcttctccctcaccgacccgtgcccggactgcaagggccgcggcctgatcgccgaggacccctgcgaggtctgcaagggctccggacgcgccaagtcctcgcggacgatgcaggtccgtatccccgccggggtctcggacggacagcgcatccggctgcgcggcaagggcacgccgggcgagcggggcggtccggcgggcgacctgtacgtggtcgtgcacgtcaaggagcaccccgtcttcggccgccggggcgacaacctcaccgtcaccgtcccggtcacctacgccgaggcggccctcggcggcgaggtccgcgtcccgaccctgggcggtccgtccgtcacgctgaagctgccggcgggcacgcccaacggccgcaccatgcgggcccggggcaagggcgcggtccgcaaggacggcacccgcggcgaccttctggtcaccgtggaggtgagtgttccgaaggatctgacggggaaggctcgtgacgcgcttcaggcgtatcgcgaggcgaccgcggacgaggatccgcgggcggagttgttccaggccgcgaagggagcttga

SEQ ID NO: 117848 - protein, 399 aa, Streptomyces coelicolor
MSTKDFIEKDYYKVLGVPKDATEAEIKKAYRKLARENHPDANKGNVKAEERFKEISEANDILGDPKKRKEYDEARALFGNGGFRPGPGAGGGGTFNFDLGDLFGGGAQGGGGQGGAGGFGGGLGDVFGGLFNRTGGGPGTGTRTQPRRGQDIESEVTLSFTEAIEGATVPLRMSSQAPCKACSGTGDKNGTPRVCPTCVGTGQVARGSGGGFSLTDPCPDCKGRGLIAEDPCEVCKGSGRAKSSRTMQVRIPAGVSDGQRIRLRGKGTPGERGGPAGDLYVVVHVKEHPVFGRRGDNLTVTVPVTYAEAALGGEVRVPTLGGPSVTLKLPAGTPNGRTMRARGKGAVRKDGTRGDLLVTVEVSVPKDLTGKARDALQAYREATADEDPRAELFQAAKGA

SEQ ID NO: 117849 - DNA, 1131 bp, Aquifex aeolicus
  CDS (1)..(1131): transl_table=11
atggcttcatctactaaaaaggattactacgaaattcttggagtaccgagaaacgcttcgcaggaagaaataaagaaggcttacaggaggcttgtcaggaagtatcacccggatatatgcaagaaacccgagtgtgaggaaaagttcaaggagataaacgaggcttaccaagtactctccgatcccgaaaagagaaaactctacgacatgtacggacacgcagcctttgaaggtgcaggagcacagcagagggtagaaaccactgaaataccgccaatagaggaaatactcagggaattctttgactttgatataggaagtatatttgaaagggctacgggaagaaggagggcaaggagaaggaggagcgtaaaaggggaagacatagttgtccccgttgagattacgttagaagaagcctttaagggaactacagttcccatagaggttgaaagggaagtcccctgttccgcttgcggcgggacgggatacgacgagtcaaagtcaagaacgtgccccacatgcggtggtagaggagaaaccgttcaaggaaactggttcttccaggtaagacaaacctgtcccacatgcggtggagaaggagtgatttacgaaaactgccacgcctgcacgggcaggggatacggactcgttaaggaaacgataaaggtaaagataccgccgggagtgagggatggttcaaaactcgtagtggaaggaaagggacacgcgggaagatacggaggacctcccggggacctctacatcatagtaaaggtaaaaccccacaagatttttgaaagaaagggagacgacctgtacgttgacgtaaacataacctaccccgaggctgttctcggaacagaagtggaagttcccactttagacggtgaaaaggtaaaggtaaagataccacccggaactaaagagggagaactcataaaggttcctggaaaaggtatgcccagactgaaaggttcgggcaggggagacctttacgtcagggttcacatagacgttcccaagattggtgttcttagtaagcttcttggggacggtaaaaaggtggaagagctcttaaaacaacttcaggaagttcttccaaagcctgaaagaattgtagagaggtga

SEQ ID NO: 117850 - protein, 376 aa, Aquifex aeolicus
MASSTKKDYYEILGVPRNASQEEIKKAYRRLVRKYHPDICKKPECEEKFKEINEAYQVLSDPEKRKLYDMYGHAAFEGAGAQQRVETTEIPPIEEILREFFDFDIGSIFERATGRRRARRRRSVKGEDIVVPVEITLEEAFKGTTVPIEVEREVPCSACGGTGYDESKSRTCPTCGGRGETVQGNWFFQVRQTCPTCGGEGVIYENCHACTGRGYGLVKETIKVKIPPGVRDGSKLVVEGKGHAGRYGGPPGDLYIIVKVKPHKIFERKGDDLYVDVNITYPEAVLGTEVEVPTLDGEKVKVKIPPGTKEGELIKVPGKGMPRLKGSGRGDLYVRVHIDVPKIGVLSKLLGDGKKVEELLKQLQEVLPKPERIVER

SEQ ID NO: 117851 - DNA, 1260 bp, Arabidopsis thaliana; identical to SEQ ID NO: 63971
  CDS (1)..(1260)

SEQ ID NO: 117852 - protein, 419 aa, Arabidopsis thaliana; identical to SEQ ID NO: 63972

SEQ ID NO: 117853 - DNA, 1173 bp, Corynebacterium diphtheriae; identical to SEQ ID NO: 63975
  CDS (1)..(1173): transl_table=11

SEQ ID NO: 117854 - protein, 390 aa, Corynebacterium diphtheriae; identical to SEQ ID NO: 63976

SEQ ID NO: 117855 - DNA, 1188 bp, Corynebacterium efficiens
  CDS (1)..(1188): transl_table=11
gtgaacaatgcagaatgggcaaataaagactattacgcggacctgggtgtctccaagaacgccagtgccgaggacatcaagaaggcctatcgcaaactcgcccgcgagaaccacccggacaagaaccccggggacaaggttgcagaggaccgcttcaagaaggccgccgaggcctatgatgtggtcggcgatgagaccaaacgcagggaatacgacgacctgaagaaactgctcgcatccggtgggatccgcggtggattcggaagcgggggtgccgacttccccggcgggtttcgctcgacgcagggcttcgatgcgtccgacctcttcggaggagccggaccgggtggaggattttctgcggacggcggtctgggcgatatcttcggtggcattttcaaccgcggcagtagtcctcgccagtcagctcggccgacgcggggggcggatgtagaaaccgacatcaccctcgaattccgggaggccgccaagggcaccaccatcccggtggagctgaccggtgaggcaccctgcaacacctgccacggttccgggtccgcctcgggccagccctccaaatgcgggcagtgtaacggctccggcttcacctcggagaacaagggcgccttcggtttctccgcgccctgcaccaactgtggcggcaccggtgaggtcatcaccgatccgtgtgtcgactgccgtgggcggggtaccgtgcgccgcaccaggtccatcaccgtccgcatcccggccggagtcgaagacggccagaaggtccgtctcgcaggtcagggggaggcaggccccaacggcaaacccgccggtgacctctttgtccgtgtccacgtcaaggaggatcccgtgttcgagcgtgagggcaacaacatccacgtcacagtgccggtgagcttctcggagctggcactgggtggggcgatctccgtgcccaccctggacaaaccggtcaagctcaaactcgcgccgggcaccccggacggacgcaccctgcgtgtgcggggccgtggtgtggagacccgcaccgccaagggtgatctgatggtcaccgtgcaggtcaccgtcccacccaccctcagtgatgaagcagccgaggcgctgcgcacctatgcggaggcagagaagaagtcaggtttcgacccccgtgccaactgggcggggaataaccgctag

SEQ ID NO: 117856 - protein, 395 aa, Corynebacterium efficiens
MNNAEWANKDYYADLGVSKNASAEDIKKAYRKLARENHPDKNPGDKVAEDRFKKAAEAYDVVGDETKRREYDDLKKLLASGGIRGGFGSGGADFPGGFRSTQGFDASDLFGGAGPGGGFSADGGLGDIFGGIFNRGSSPRQSARPTRGADVETDITLEFREAAKGTTIPVELTGEAPCNTCHGSGSASGQPSKCGQCNGSGFTSENKGAFGFSAPCTNCGGTGEVITDPCVDCRGRGTVRRTRSITVRIPAGVEDGQKVRLAGQGEAGPNGKPAGDLFVRVHVKEDPVFEREGNNIHVTVPVSFSELALGGAISVPTLDKPVKLKLAPGTPDGRTLRVRGRGVETRTAKGDLMVTVQVTVPPTLSDEAAEALRTYAEAEKKSGFDPRANWAGNNR

SEQ ID NO: 117857 - DNA, 1179 bp, Mycobacterium paratuberculosis
  CDS (1)..(1179): transl_table=11
atggcccagcgtgaatgggtcgaaaaagacttctacaaggagctgggcgtctcctctgacgccagtcccgaagagatcaaacgcgcctaccgcaagctggcgcgcgatctacacccggatgccaatcccgacaatcccgccgccggcgaacgattcaaggcggtgtccgaggcgcacaacgtgttgtcggacccggccaagcgcaaggaatacgacgaaacccgaaggcttttcgccggaggcggtttcggcgggcgccggttcgacaccggtgggttcggcggcttcaacgtcggcggggacggggcggagttcaacctcaacgatttgttcgacgccgccggccgcagcggcggcaccaacatcggcgacctgttcggcggcctgttcgggcgcgcttcgggcggccggcccagccggccgcgccgcggcaacgacctcgaaaccgagacccagctggatttcgtcgaggctgccaagggcgtggcgatgccgctgcggctgaccagcccggcgccgtgcaccaactgccacggcagtggcgcacgcccgggcaccagccccaaggtgtgccccacctgtaacggctccggcgtaatcagccgcaaccagggcgctttcggcttctccgagccctgcaccgattgccggggcagcggctcgatcatcgagcacccctgcgacgagtgcaagggcaccggggtcaccacccgcacccgcaccatcaacgtgcggatcccgcccggcgtcgaggacgggcagcgcatccggttgcccggtcagggcgaggccgggttgcgcggcgcgccgtcgggcgacctgtacgtgacggtacatgtgcggccgcacaaggtgttcggccgcgacggcgacgacctgaccgtgaccgttcccgtcagtttcaccgaattggctttgggctcaaccatatcggtgcccacactggacggcaaggtcggggttcgggtgcccaagggcaccgccgacggccgcatcctgcgggtgcgcggacgcggggtgcccaagcgcagcggcggccacggcgacctgctggtgacggtaaaggtcgcggtgccaccgaatttggacggcgccgctcaggaggcgctggaggcctacgcggccgccgagcgcgccagcggcttcgacccacgggcgggatgggcaggtaaccgctga

SEQ ID NO: 117858 - protein, 392 aa, Mycobacterium paratuberculosis
MAQREWVEKDFYKELGVSSDASPEEIKRAYRKLARDLHPDANPDNPAAGERFKAVSEAHNVLSDPAKRKEYDETRRLFAGGGFGGRRFDTGGFGGFNVGGDGAEFNLNDLFDAAGRSGGTNIGDLFGGLFGRASGGRPSRPRRGNDLETETQLDFVEAAKGVAMPLRLTSPAPCTNCHGSGARPGTSPKVCPTCNGSGVISRNQGAFGFSEPCTDCRGSGSIIEHPCDECKGTGVTTRTRTINVRIPPGVEDGQRIRLPGQGEAGLRGAPSGDLYVTVHVRPHKVFGRDGDDLTVTVPVSFTELALGSTISVPTLDGKVGVRVPKGTADGRILRVRGRGVPKRSGGHGDLLVTVKVAVPPNLDGAAQEALEAYAAAERASGFDPRAGWAGNR

SEQ ID NO: 117859 - DNA, 1158 bp, Nocardia farcinica; identical to SEQ ID NO: 63977
  CDS (1)..(1158): transl_table=11

SEQ ID NO: 117860 - protein, 385 aa, Nocardia farcinica; identical to SEQ ID NO: 63978

SEQ ID NO: 117861 - DNA, 1143 bp, Propionibacterium acnes
  CDS (1)..(1143): transl_table=11
atgagtaccaaggactgggctgagaaggattactacaagatcctcggtgtctccaaggacgcgaagcccgaagaaattaagaaggcgttccgcaagatcgcccgggacaaccatcccgactcccaccctggtgataaagccgctgaggctcgtttcaaggaggcctcggaggccaacgacgtgctgtcgaacgccaagaagcgcaaggagtacgaccaggctcgtagcctgttcggatcagcaggtggattccggttcccgcgtggtggagcgcagaccagcgtcaacgtggaggattttctacgtactgcctccaacggggacgggttcggtgacctgttcggcaatctctttggggctagcgggggacgtcgcacagcgtcccggtcgccacgtcggggagctgacgttgagggggagacgacgatttccttcgacgatgccgtgtctgggaccaccgtcactatggacatggtctctcaggcaccctgccaggcatgtcgggggactggagctcgggctggtaccgttccgcgagtgtgctcgacctgtcaagggtcgggtatgcatgctagctcggctggtggggtgttcgagatgaccgagccctgcccggattgtcacggtcgaggcatgatcgttgaggacccctgtcaggtctgccacggatcgggtcgggctaaatccaccaagtctatgcagacccgcatccctgccggggtggaggatggtcagcgcattcgcattaagggcaaggggtctcctggcgagaatggcgggaaagcgggtgacctttacgtcaaggtgacggtgcgtccacacgagatctttggtcgtgacggccacaacctcaccgtcaccgtgccagtgacctttccagaggccactctgggcgccgaggtggaggtgccgactctagcgggaacgaccgttcgactgcgtattccggctgggacaccgaatggccgtaccttccgggtgcgggggcgtggagtgccgcgttccgacggcagcaggggggatctactcgccaccgttgagattgctgtcccggagagtcttgacgacgacgcccggcatgtcgtggagagacttcgtgactccctcccccaggccactccgcgaccatgggaggtgaagtga

SEQ ID NO: 117862 - protein, 380 aa, Propionibacterium acnes
MSTKDWAEKDYYKILGVSKDAKPEEIKKAFRKIARDNHPDSHPGDKAAEARFKEASEANDVLSNAKKRKEYDQARSLFGSAGGFRFPRGGAQTSVNVEDFLRTASNGDGFGDLFGNLFGASGGRRTASRSPRRGADVEGETTISFDDAVSGTTVTMDMVSQAPCQACRGTGARAGTVPRVCSTCQGSGMHASSAGGVFEMTEPCPDCHGRGMIVEDPCQVCHGSGRAKSTKSMQTRIPAGVEDGQRIRIKGKGSPGENGGKAGDLYVKVTVRPHEIFGRDGHNLTVTVPVTFPEATLGAEVEVPTLAGTTVRLRIPAGTPNGRTFRVRGRGVPRSDGSRGDLLATVEIAVPESLDDDARHVVERLRDSLPQATPRPWEVK

SEQ ID NO: 117863 - DNA, 1137 bp, Streptomyces avermitilis
  CDS (1)..(1137): transl_table=11
gtggccacggactactacgccgtactcggcgtgcgccgcgacgcgtctcaggacgagatcaagaaggcattccggcggctcgctcgcgagctgcacccggatgtcaatcccgatccgaagacgcaggagcgcttcaaggagatcaacgccgcctacgaggtgttgtcggacccgcagaagaagcaggtctacgacctcggcggtgacccgctctcgcagagcggcggcggaggcgcgggcggcttcggcgccggtggcttcggcaacttctccgacatcatggacgcgttcttcggcacggcgtcgcagcgcggaccgcgctcgcgcacccgccggggccaggacgccatgatccgggtggagatcgagctcgacgaggcggccttcggcacgacgaaggacatccaggtcgagacggccgtcgtctgtacgacgtgcagcggcgagggtgccgccccggggacgagcgcgcagacctgtgacatgtgccgcggccgcggtgaggtctcgcaggtgacgcggtccttcctgggccaggtcatgacgtcccgcccctgcccccagtgccagggcttcggcacggtcgttccgacgccgtgcccggagtgcgcgggcgacggccgggtgcgttcccgccggaccctgaccgtgaagatcccggccggtgtcgacaacggcacacggatccagctcgcgggcgagggcgaggtcggccccggcggcggtccggccggtgatctgtacgtcgagatccacgagctgccgcaccagaccttccagcggcgcggcgacgacctgcactgcacggtcacgatcccgatgacggcggcggccctcggcacgaaggtcccgctggagacgctggacggcatggaggaggtcgacatccgcccgggcacgcagtccggtcagtcgatcccgctgcacggccggggcatcacgcatctgcggggcggcggccggggcgatctgatcgtccacgtcgaggtcaccacgccgacgaagatggaccccgagcaggagcgcctgctgcgtgaactggccaagctgcgtggcgaggagcggcccacggggcagttccagccggggcagcagggactgttctcgcggctgaaggacgcgttcaacggccgctga

SEQ ID NO: 117864 - protein, 378 aa, Streptomyces avermitilis
MATDYYAVLGVRRDASQDEIKKAFRRLARELHPDVNPDPKTQERFKEINAAYEVLSDPQKKQVYDLGGDPLSQSGGGGAGGFGAGGFGNFSDIMDAFFGTASQRGPRSRTRRGQDAMIRVEIELDEAAFGTTKDIQVETAVVCTTCSGEGAAPGTSAQTCDMCRGRGEVSQVTRSFLGQVMTSRPCPQCQGFGTVVPTPCPECAGDGRVRSRRTLTVKIPAGVDNGTRIQLAGEGEVGPGGGPAGDLYVEIHELPHQTFQRRGDDLHCTVTIPMTAAALGTKVPLETLDGMEEVDIRPGTQSGQSIPLHGRGITHLRGGGRGDLIVHVEVTTPTKMDPEQERLLRELAKLRGEERPTGQFQPGQQGLFSRLKDAFNGR

SEQ ID NO: 117865 - DNA, 1137 bp, Streptomyces coelicolor
  CDS (1)..(1137): transl_table=11
gtggccacggactactacgccgtactcggcgtgcgccgcgacgcctcccaggacgagatcaagaaggcgttccggaggctcgcgcgcgagctgcatccggacgtcaaccccgatccgaagacccaggagcggttcaaggagatcaacgccgcctacgaggtgttgtcggacccgcagaagaagcaggtctacgacctcggcggcgaccccctctcgcaggccgccggcggtggcgcgggcggcttcggcgcgggtggcttcgggaacttctcggacatcatggacgcgttcttcggcacggcgtcgcagcgcgggccgcgctcgcgcacccgccgcggccaggacgcgatgatccgcatcgaggtcgagctggacgaggccgccttcggtacgaccaaggacatccaggtcgacaccgcggtcgtctgcaacacctgcaacggcgagggcgcggcgccgggcacgtcggcccagacgtgtgacatgtgccgcggtcgaggcgaggtctcgcaggtcacccggtccttcctgggccaggtcatgacctcgcgcccctgcccgcagtgccagggcttcggcaccgtggtcccgaccccgtgccccgagtgcgcgggcgacggccgggtccgctcccggcgcaccctgaccgtgaagatcccggccggtgtcgacaacggcacccggatccagctcgcgggcgagggcgaggtcggccccggcggcggccccgccggcgacctgtacgtcgagatccacgagctgccccactccaccttccagcggcgcggcgacgacctgcactgcacggtcaccatcccgatgacggcggcggccctcggcaccaaggtgccgctggagaccctcgacggcatggaggaggtcgacatccgcccgggcacccagtccggccagtcgatcccgaagcacggccggggcgtcacccacctgcgcggcggcggtcgcggcgacctcatcgtgcacgtcgaggtcaccaccccgggcaagctcgaccccgaacaggaacgcctcctgcgcgagctggccaagctccgcggcgaggaacgcccgacggggcagttccagccggggcagcaagggctgttctcgcggctgaaggacgccttcaacgggcgctga

SEQ ID NO: 117866 - protein, 378 aa, Streptomyces coelicolor
MATDYYAVLGVRRDASQDEIKKAFRRLARELHPDVNPDPKTQERFKEINAAYEVLSDPQKKQVYDLGGDPLSQAAGGGAGGFGAGGFGNFSDIMDAFFGTASQRGPRSRTRRGQDAMIRIEVELDEAAFGTTKDIQVDTAVVCNTCNGEGAAPGTSAQTCDMCRGRGEVSQVTRSFLGQVMTSRPCPQCQGFGTVVPTPCPECAGDGRVRSRRTLTVKIPAGVDNGTRIQLAGEGEVGPGGGPAGDLYVEIHELPHSTFQRRGDDLHCTVTIPMTAAALGTKVPLETLDGMEEVDIRPGTQSGQSIPKHGRGVTHLRGGGRGDLIVHVEVTTPGKLDPEQERLLRELAKLRGEERPTGQFQPGQQGLFSRLKDAFNGR

SEQ ID NO: 117867 - DNA, 1263 bp, Arabidopsis thaliana; identical to SEQ ID NO: 63979
  CDS (1)..(1263)

SEQ ID NO: 117868 - protein, 420 aa, Arabidopsis thaliana; identical to SEQ ID NO: 63980

SEQ ID NO: 117869 - DNA, 1140 bp, Acetobacter aceti
  CDS (1)..(1140): transl_table=11
atggccactcagctcgattactacgcaattcttgaagtttcccgaacagccacggccgatgaactcaagaaatcctatcgcaagctggccatgaagtatcatcccgatcggaaccccggggatgatgcagcagaagccaagttcaaggaaatcaaccaagcctacgatatcctgaaggacgaacaaaagcgcgctgcgtatgaccagtacggccatgccgcgtttgaaggcggtggccctggccccggcgggtttgactttagcggtggctttggtggcggtggtctgggcgatattttcgaacagatgtttggtgacatgatgggtggccgccgcggtggccgtgctcgcaccggcaacgatatccagactcatgttgaaattacgctggaagaagctttcagcggcgtaaagaaggatgtgcgggtgataacgcttggcgtgcgaacctgtcacggcaccggctctgatgatggcgcatcgggcgttgaagtctgcccaagctgtcacggtgcaggcaaggtgcgggcgcacgagggcttctttgttgtggaacgcccatgcccaacctgtcatggcgcaggcaaggtggtgaaaaacccctgcaagttttgccacggcgaaggcacagtggaaaaggaacgcacggttgaagtgcagattcctgccggtgtggaagatggcacccgcatccgtctttctggtgaaggagaggccgggggcaacggtgtgccgccgggtgatctgtatatccatgtttccgttacggaacatggtattttccagcgcgatggtgccaacatttattgccgcgtgccgtttcgcatggcgcaggctgctttgggcacagaaattgaagtgcctgttattgatggctcccgcaccaaggtgaaaattccggctggcacgcaaaccggtgcaacattttcgctgcgcggcaaaggcttctcggttctgcgctctaccgctcgtggcgatatgtacattcaggttacggtggaaacgccgcaaaacctcagcaagcgccagcgtgaactgttggaagaatttgaaaaagaagccggtgaggatgtgaagcagagccccgaacatacgggcttcttccgccgtgttcgggacttttttgaagggaaggaataa

SEQ ID NO: 117870 - protein, 379 aa, Acetobacter aceti
MATQLDYYAILEVSRTATADELKKSYRKLAMKYHPDRNPGDDAAEAKFKEINQAYDILKDEQKRAAYDQYGHAAFEGGGPGPGGFDFSGGFGGGGLGDIFEQMFGDMMGGRRGGRARTGNDIQTHVEITLEEAFSGVKKDVRVITLGVRTCHGTGSDDGASGVEVCPSCHGAGKVRAHEGFFVVERPCPTCHGAGKVVKNPCKFCHGEGTVEKERTVEVQIPAGVEDGTRIRLSGEGEAGGNGVPPGDLYIHVSVTEHGIFQRDGANIYCRVPFRMAQAALGTEIEVPVIDGSRTKVKIPAGTQTGATFSLRGKGFSVLRSTARGDMYIQVTVETPQNLSKRQRELLEEFEKEAGEDVKQSPEHTGFFRRVRDFFEGKE

SEQ ID NO: 117871 - DNA, 1128 bp, Actinobacillus actinomycetemcomitans; identical to SEQ ID NO: 63985
  CDS (1)..(1128): transl_table=11

SEQ ID NO: 117872 - protein, 375 aa, Actinobacillus actinomycetemcomitans; identical to SEQ ID NO: 63986

SEQ ID NO: 117873 - DNA, 1134 bp, Agrobacterium tumefaciens; identical to SEQ ID NO: 63987
  CDS (1)..(1134): transl_table=11

SEQ ID NO: 117874 - protein, 377 aa, Agrobacterium tumefaciens; identical to SEQ ID NO: 63988

SEQ ID NO: 117875 - DNA, 1140 bp, Agrobacterium tumefaciens
  CDS (1)..(1140): transl_table=11
atggcgaaagcagacttttacgaaacacttggcgtcagcaagactgcggacgaaaaagagctgaaaagcgccttccgcaaactcgcgatgaaataccatccggacaaaaaccctgatgatgccgattccgaacggaaattcaaagaaatcaacgaagcctatgaaacgctgaaggacccgcagaagcgcgcggcctatgaccgtttcggccacgccgcgtttgaaaacggtggcatgggcggcggtggcggtggctttggcggcggcggttttgccaatggcggcttctccgatatcttcgaggacatcttcggcgagatgatgggcggcggacgcgcacgccgctcttcgggcgggcgtgaacgcggtgccgaccttcgctacaacatggaaatcacgctggaagaggccttcaccggcaagacagcgcagatcagggttccgacctcgatcacctgcgacgtctgttccggctcgggcgcaaaacccggcacgcagcccaagacctgcgccacctgtcagggttccggccgcgtgcgcgccgcgcagggtttcttctcggtggagcgcacctgcccgacctgccatggtcgcggacagacgatttccgatccctgcggcaagtgccacggtcagggccgtgtgacggaagagcgttcgctctccgtcaacattccctcgggcattgaggatggcacccgcattcgcctgcagggcgaaggcgaagccggcatgcgcggtggcccggcgggcgatctttacatcttcctgtccgtgcgtccgcatgagttcttccagcgtgacggtgctgatctttattgcaccgtgccgatctccatgacgacggcggcactcggtggcaccttcgatgtcacgacgctcgacggcacgaagtcgcgcgtcacggttccggaaggtacccagccgggcaagcagttccgcctgaagggcaagggcatgccggtgctgcgttcggcgcagacgggcgacctttatatccagattcagatcgagacgccgcagaagctcagcaagcgtcaacgtgagcttttgcaggagttcgagcagctctcctccaaggagaacaatccggaatcgaccggcttctttgcccggatgaagaaattctttgacggctga

SEQ ID NO: 117876 - protein, 379 aa, Agrobacterium tumefaciens
MAKADFYETLGVSKTADEKELKSAFRKLAMKYHPDKNPDDADSERKFKEINEAYETLKDPQKRAAYDRFGHAAFENGGMGGGGGGFGGGGFANGGFSDIFEDIFGEMMGGGRARRSSGGRERGADLRYNMEITLEEAFTGKTAQIRVPTSITCDVCSGSGAKPGTQPKTCATCQGSGRVRAAQGFFSVERTCPTCHGRGQTISDPCGKCHGQGRVTEERSLSVNIPSGIEDGTRIRLQGEGEAGMRGGPAGDLYIFLSVRPHEFFQRDGADLYCTVPISMTTAALGGTFDVTTLDGTKSRVTVPEGTQPGKQFRLKGKGMPVLRSAQTGDLYIQIQIETPQKLSKRQRELLQEFEQLSSKENNPESTGFFARMKKFFDG

SEQ ID NO: 117877 - DNA, 1140 bp, Anaplasma marginale
  CDS (1)..(1140): transl_table=11
atgagtggcaacgactactatgagatcttagaagtaagtagaaacgccagtgcagaggaaattaaaaagtcataccgtaagatggtttttaagtaccatccagataagaaccctggggataaaaaagcagaagaaaaatttaaaaagataagcgaagcttatgaggtattaagcaatccggaaaaacgtgccgcttatgaccgctatggtcacagcacattcaccagtggaggggctagtggttttgattttaccagtggtttttcaactgacttttctgatattttccaggatttcttcggtggaggttttggtaaatcacaaagagcctctagtagggaacatttacgcggttccgaccttagatatgatgtcgaagtctcccttgaggacgcttttaaaggtattaaagtcccgattagttatgtaacaaacgtgaagtgttcttcatgctccggtataggaagcgagggagcggttaattcagtaaaatgtggaaattgtaatggtgctggtagtgttagaaccaggaagggcttcctaacaattgaagaagtgtgtaacgtatgtaacggtgaaggagaagttattaagaataagtgccgtaggtgtggaggaagcgggagggtaaggaacgaggtaagcctcctagtaactgtgcctaagggtatagaaacagggaataaggtaagagttaatggtaagggggaagcaggttttcggggagctcaggagggagatctttatgtatatatcagggttaaggaacataaattcttcactagaagatcttctgacttgcattgtagtgttccaataaaaatgactatagcggccctaggcggggagatagaaatgccctctattgatggttcttggacaaagttaaaaataccggaaggaacccagagcggagaccaaataaggatgaggggcaagggaatgccggaggtaaactcaaaagatagaaggggagatatgtatgtgcatgttactgtagaaaccccagttaaattaacaaaacagcaggtagacttactaaagaagtttgaagaagaatctagcgcaaattgcagcccgaagtaccaagggtttttccaaaaaatcaaggatatatggagagatataagttccgggtag

SEQ ID NO: 117878 - protein, 379 aa, Anaplasma marginale
MSGNDYYEILEVSRNASAEEIKKSYRKMVFKYHPDKNPGDKKAEEKFKKISEAYEVLSNPEKRAAYDRYGHSTFTSGGASGFDFTSGFSTDFSDIFQDFFGGGFGKSQRASSREHLRGSDLRYDVEVSLEDAFKGIKVPISYVTNVKCSSCSGIGSEGAVNSVKCGNCNGAGSVRTRKGFLTIEEVCNVCNGEGEVIKNKCRRCGGSGRVRNEVSLLVTVPKGIETGNKVRVNGKGEAGFRGAQEGDLYVYIRVKEHKFFTRRSSDLHCSVPIKMTIAALGGEIEMPSIDGSWTKLKIPEGTQSGDQIRMRGKGMPEVNSKDRRGDMYVHVTVETPVKLTKQQVDLLKKFEEESSANCSPKYQGFFQKIKDIWRDISSG

SEQ ID NO: 117879 - DNA, 1131 bp, Anabaena sp
  CDS (1)..(1131): transl_table=11
atggcccgcgactattatgagattctaggcgttgctcgtgacgctgacaaagaagaaatcaaacaagcctaccgccgtctagcccggaaatatcaccctgatgtgaataaagaaccgggagccgaagagcgttttaaggaaattaaccgtgcttatgaagtactttctgagccggaaacccgcgcacgttacgatcgcttcggtccggaaggtgtttcaggtgctggtgtcggcttccaagatatgagcgatatgggtggtttcgccgatatctttgaaagtattttcagtggttttgctggtggcggtatgggtggcccaacgcagcaaagaagacgcggcgggccagcgcggggtgatgatttacggctagacctaaagttagactttcgagaagcggtattcggtggggaaaaggaaattcgcatttcccatttagaaacctgtgaaacctgtagtggttcaggagcaaaaccaggaactcgtccccgcacttgttcgacttgtagcggttccggtcaagtccgccgcgtcaccagaaccccatttggtagctttactcaagtctctacttgtcctacctgtaatggtacaggcatggtaattgaagacaaatgtgatacttgtgatggtaaggggacaaatcaagttaccaaaaaactaaaaattaccattcccgcaggtgtggacaatggtacgcgcttacgtatcaaagacgaaggtgatgcgggtcaacgtggtggacctccaggggatttatatgtatacctattcgtcaatgaagacgaagaatttcaacgggatggcattaatgttatctcggaaattaaagttagctacttgcaagcaattttaggttgccggctagaagtaaacacagtagatgggcctgtggagttgattattcctgcgggtactcaaccgaatacggtgatgaaactagaaaatcgtggtgtacctcgcttggggaatcctgttagtcggggcgatcatctgttaacagtattaattgatatccccactaaagtaatccctgaggagagagaattgctagagaagctggctaaaattaagggagaccgtaccggtaaaggtggtctggaaggatttttgggaaatttgtttaagtaa

SEQ ID NO: 117880 - protein, 376 aa, Anabaena sp
MARDYYEILGVARDADKEEIKQAYRRLARKYHPDVNKEPGAEERFKEINRAYEVLSEPETRARYDRFGPEGVSGAGVGFQDMSDMGGFADIFESIFSGFAGGGMGGPTQQRRRGGPARGDDLRLDLKLDFREAVFGGEKEIRISHLETCETCSGSGAKPGTRPRTCSTCSGSGQVRRVTRTPFGSFTQVSTCPTCNGTGMVIEDKCDTCDGKGTNQVTKKLKITIPAGVDNGTRLRIKDEGDAGQRGGPPGDLYVYLFVNEDEEFQRDGINVISEIKVSYLQAILGCRLEVNTVDGPVELIIPAGTQPNTVMKLENRGVPRLGNPVSRGDHLLTVLIDIPTKVIPEERELLEKLAKIKGDRTGKGGLEGFLGNLFK

SEQ ID NO: 117881 - DNA, 1116 bp, Bacillus cereus
  CDS (1)..(1116): transl_table=11
atgagtaaacgagattattatgaggtccttggacttagcaagggtgcttcaaaagatgaaataaaaaaagcgtatcgtcgtttggctaaaaaataccatccagacgtaagtaaagaagaaaatgcaattgaaaagtttaaagaagtgcaagaagcatacgaagtattaagcgacgatcaaaagcgtgcgcaatatgatcaatttggtcatgctggtgctaatcaaggcttcggtggctttggcggcggaggagacttcggcggtggcttcggttttgaagatatctttagttcattctttggcggcggtggcggcagacgtcgtgatccaaacgctccgcgtcaaggtgctgacttacaatatcaagttactttagattttgaagaagctatttttggtaaagagttaaatgttgagattccagtagaagatccatgtgatacttgtaaaggtagcggggcaaaaccaggaacttcaaaagaaacatgtaaacattgctcaggatcagggcaagtaagtgtagaacaaaatacaccatttggtcgtatcgtaaaccgtcaagcttgtggtcattgttcaggaactgggcaaatcattaaagaaaaatgtacgacatgccacggttctggtaaagtacgtaaacgtaaaaaaatcaacgttaaaattccagcaggtatcgataatggtcaacaaatccgtgtatctggaaaaggtgaagcgggcgtaaatggcggcccagcaggagatttatatgttgttgttcatgtaagaaatcatgaattctttgagcgcgaaggagatcacattatttgtgaaatgccattaacatttgcgcaaatggcacttggtgatgaagtagaagttcctactgttcatggtaaagtgaagctgaaaattccagcaggaacacaaacaggaacagaattccgcctaaaaggaaagggtgctccgaacgtacgtggatacggtcaaggagatcaatatgtagtcgtgcgtgttgttgtaccgacgaaattaacttcacagcaaaaagatttattgcgtgaatttgcaggacaagaagagcaggatgatagtttattcggaaagcttaaacgtgctttcaaaggggaataa

SEQ ID NO: 117882 - protein, 371 aa, Bacillus cereus
MSKRDYYEVLGLSKGASKDEIKKAYRRLAKKYHPDVSKEENAIEKFKEVQEAYEVLSDDQKRAQYDQFGHAGANQGFGGFGGGGDFGGGFGFEDIFSSFFGGGGGRRRDPNAPRQGADLQYQVTLDFEEAIFGKELNVEIPVEDPCDTCKGSGAKPGTSKETCKHCSGSGQVSVEQNTPFGRIVNRQACGHCSGTGQIIKEKCTTCHGSGKVRKRKKINVKIPAGIDNGQQIRVSGKGEAGVNGGPAGDLYVVVHVRNHEFFEREGDHIICEMPLTFAQMALGDEVEVPTVHGKVKLKIPAGTQTGTEFRLKGKGAPNVRGYGQGDQYVVVRVVVPTKLTSQQKDLLREFAGQEEQDDSLFGKLKRAFKGE

SEQ ID NO: 117883 - DNA, 1116 bp, Bacillus cereus
  CDS (1)..(1116): transl_table=11
atgagtaaacgagactattatgaggtccttggacttagcaagggtgcttcaaaagatgaaataaaaaaagcgtatcgtcgtttggctaaaaaataccatccagacgtaagtaaagaagaaaatgcaattgaaaagtttaaagaagtacaagaagcatatgaagtattaagcgacgatcaaaagcgtgcgcaatatgatcaatttggtcatgctggtgcaaatcaaggtttcggtggctttggcggcggaggagacttcggcggtggcttcggttttgaagatatctttagttcattctttggcggcggtggcggcagacgtcgtgatccaaacgctccgcgtcaaggtgctgacttacaatatcaagtcactttagattttgaagaagcgatttttggtaaagagttaaatgtcgagattccagtagaagatccatgtgatacttgtaaaggtagcggagcaaaaccaggaacttcaaaagaaacatgtaaacattgttcagggtcaggtcaagtaagtgtagaacaaaatacaccgtttggtcgtatcgtaaaccgtcaagcttgtagtcattgttcaggaaccggtcaaatgattaaagaaaaatgtacgacatgtcacggttctggtaaagtacgtaaacgtaaaaaaatcaacgttaaaatcccagcaggtattgataatggtcaacaaatccgtgtatctggaaaaggtgaagcgggcgtaaatggcggaccagcaggagatttatatgttgttgttcatgtaagaagtcatgaattctttgaacgtgaaggagatcacattatttgcgaaatgccattaacgtttgcgcaaatggcacttggtgctgaagtagaagttcctactgttcatggtaaagtgaagctgaaaattccagcaggaacacaaactggaacagaattccgattaaaaggaaaaggtgctccgaatgtacgtggatatggtcaaggagatcaatatgtagtcgttcgtgttgttgtaccgacgaaattaacttcacatcaaaaagatttattacgtgaatttgcagggcaagaagagcaggatgatagtttattcggaaagcttaaacgtgctttcaaaggggaataa

SEQ ID NO: 117884 - protein, 371 aa, Bacillus cereus
MSKRDYYEVLGLSKGASKDEIKKAYRRLAKKYHPDVSKEENAIEKFKEVQEAYEVLSDDQKRAQYDQFGHAGANQGFGGFGGGGDFGGGFGFEDIFSSFFGGGGGRRRDPNAPRQGADLQYQVTLDFEEAIFGKELNVEIPVEDPCDTCKGSGAKPGTSKETCKHCSGSGQVSVEQNTPFGRIVNRQACSHCSGTGQMIKEKCTTCHGSGKVRKRKKINVKIPAGIDNGQQIRVSGKGEAGVNGGPAGDLYVVVHVRSHEFFEREGDHIICEMPLTFAQMALGAEVEVPTVHGKVKLKIPAGTQTGTEFRLKGKGAPNVRGYGQGDQYVVVRVVVPTKLTSHQKDLLREFAGQEEQDDSLFGKLKRAFKGE

SEQ ID NO: 117885 - DNA, 1185 bp, Bacteroides fragilis
  CDS (1)..(1185): transl_table=11
atggcagaaaaaagagattattacgaagtgctggaagtcacgaaagagtcaacagtcgaagaaataaagaaagcataccggaaaaaagccatccaatatcatccggacaaaaatccgggtgacaaggaagcggaagaaaagtttaaagaagcagccgaagcctacgacgtactgagcaacccggataaacgtgcccgctacgaccagtttggtcatgcaggaatgagcggagcagccggaaacggtggaccgttcggcggatttagcggcggaatgtctatggacgacattttctctatgttcggtgatatttttggcggccatagcggcggcggattcggtggtggtttcggaggctttggcggatttggaggcggaggttctcaacagagaaaattccgtggctcggacctcagagtgaaagtaaagctgaatttgaaagaaatctctacaggagttgaaaagaaatttaagctgaaaaaatatgtgccttgttcgcattgccatggaaccggggcggaaggaaacagcggttctgagacttgcccgacctgcaaaggaagcggatcggtcatccgcaaccaacagacgatcttgggaactatgcagacgcgtaccacatgtccgacttgtaatggtgaaggtaagatcattaaagacaagtgtaaggtttgtggaggagaaggcatcgaatatggcgaagaagtagtaaccgtaaagattcctgccggagtagcagaaggtatgcaactctctatggggggtaaaggaaatgccggaaagcacaacggtataccgggtgatctgctgattctggtagaagaagaaccacatccggaactgatccgtgatgaaaatgacctggtgtacaacctattgctaagcttccccacagcagctatcggaggtgcggtagaaataccgaccattgacggcaaagtaaaagtgaaaatagaagcaggtacacaaccgggtaaagtgctccgcctgcgtggcaaaggtctgccaagcgtaaacggctacggtacaggagatttattggtcaacgttagtgtatatgtgcccgaaacgttgagcaaagaggaaaaaagcactctggagaaactggaggaatcaaagaactttaaaccgagtacttcaatcaaagaaaagatattcaagaagttcagaagcctctttgactaa

SEQ ID NO: 117886 - protein, 394 aa, Bacteroides fragilis
MAEKRDYYEVLEVTKESTVEEIKKAYRKKAIQYHPDKNPGDKEAEEKFKEAAEAYDVLSNPDKRARYDQFGHAGMSGAAGNGGPFGGFSGGMSMDDIFSMFGDIFGGHSGGGFGGGFGGFGGFGGGGSQQRKFRGSDLRVKVKLNLKEISTGVEKKFKLKKYVPCSHCHGTGAEGNSGSETCPTCKGSGSVIRNQQTILGTMQTRTTCPTCNGEGKIIKDKCKVCGGEGIEYGEEVVTVKIPAGVAEGMQLSMGGKGNAGKHNGIPGDLLILVEEEPHPELIRDENDLVYNLLLSFPTAAIGGAVEIPTIDGKVKVKIEAGTQPGKVLRLRGKGLPSVNGYGTGDLLVNVSVYVPETLSKEEKSTLEKLEESKNFKPSTSIKEKIFKKFRSLFD

SEQ ID NO: 117887 - DNA, 1185 bp, Bacteroides fragilis; identical to SEQ ID NO: 63989
  CDS (1)..(1185): transl_table=11

SEQ ID NO: 117888 - protein, 394 aa, Bacteroides fragilis; identical to SEQ ID NO: 63990

SEQ ID NO: 117889 - DNA, 1128 bp, Bacillus licheniformis
  CDS (1)..(1128): transl_table=11
atgagtaagcgtgattactatgaggtgcttggggtaggtaagagcgcttctaaagatgagattaaaaaagcttaccgcaagctttctaaaaaatatcacccggacatcaacaaagaagccggagcggctgaaaaattcaaagaagtcaaagaagcctatgaaacactttctgatgaccaaaaacgggcccattacgaccagttcggccacaccgacccaaatcaaggattcggaggcggaggtttcggcggaggcgacttcggcggctttgggtttgacgatattttctcaagcattttcggaggcggcgcaaggcggagagacccgaatgccccgaggcagggtgccgatctgcagtatacgatgacactgtcatttgaagaggcagccttcggaaaagagacgacgatcgaaattccgcgtgaagaaacgtgcgaaacatgcagcggctccggcgcaaaaccgggaacaaagccggaaacatgttcacactgcggcggatcaggccagctgaacatggagcagtcaacaccgttcggaaaagttgtcaacagaagagtatgtcattactgtaatggaacgggtaagcaaatcaagcacaaatgttcaacttgcggcggcacaggaaaagtgaaaaaacgcaagaaaatcaatgtcaccatcccggcgggtgtggacgacggccagcagcttcgagtagccggacagggcgaaccggggatcaacggcggtccgtcaggtgacttattcgtcgttttccgcgtccaagagcacgaatttttcgagcgcgatggagacgatatttactgcgaaatgccgctgacatttgcacaggctgcccttggagatgaaatcgaagtgcctactcttcacggaaaagtaaaattaaaagtgccggcgggcacccagacgggcaccaagttccgcttaaaaggaaaaggcgttgccaacgtgcgcgggtacggacaaggcgatcagcacatcgttgtccgcgtcgtgacaccgacgaatttaacagaaaaccagaaaaatattctccgcgaatttgcagaagtgagcggaaatatgccggatgaacaggaaatgagttttttcgataaagtaaagcgcgcctttaaaggcgattaa

SEQ ID NO: 117890 - protein, 375 aa, Bacillus licheniformis
MSKRDYYEVLGVGKSASKDEIKKAYRKLSKKYHPDINKEAGAAEKFKEVKEAYETLSDDQKRAHYDQFGHTDPNQGFGGGGFGGGDFGGFGFDDIFSSIFGGGARRRDPNAPRQGADLQYTMTLSFEEAAFGKETTIEIPREETCETCSGSGAKPGTKPETCSHCGGSGQLNMEQSTPFGKVVNRRVCHYCNGTGKQIKHKCSTCGGTGKVKKRKKINVTIPAGVDDGQQLRVAGQGEPGINGGPSGDLFVVFRVQEHEFFERDGDDIYCEMPLTFAQAALGDEIEVPTLHGKVKLKVPAGTQTGTKFRLKGKGVANVRGYGQGDQHIVVRVVTPTNLTENQKNILREFAEVSGNMPDEQEMSFFDKVKRAFKGD

SEQ ID NO: 117891 - DNA, 1107 bp, Bacillus sphaericus
  CDS (1)..(1107): transl_table=11
atggagaaacgcgattattacgaggtgcttggcctaacaaaagatgaaatcaaaaaagcataccgtaaattatcaaagcaatatcaccctgaccttaataaagagccgggtgcagatgaaaaattcaaagaaatcgctgaagcatatgaagtattaagtgatgatcagaaaaaagcacgctacgaccaatttggtcatgaggacccaaatgctggctttggtggtggctttggaggcggcggctttggcggcttcgaggatattttcagttcattctttggcggaggtggacgtcgtcaggacccaaatgcgccacgcaaaggtgacgacctgcaatatcgcatgaatattaaatttgaagaagctatttttgggaaagaaacagaaattgaaattcctaaagatgaaacttgcgagacttgtcatggctcaggagcaaagcctggtacgcaacctgaaacatgttcgacatgtaatggcgctggccaaatcaaccaagcagtggatacaccatttggtcgtatgatgaaccgtcgttcttgtacaacttgtcatggtacagggaagatcattaaagaaaaatgttcaacttgtcgtggagaaggaaaagttcaaaaacgcaaaaaaattaaagtgtcaattccagctggtgtcgatgatggtcaacaaattcgtgtatctggtcaaggtgagccaggtataaacggtggaccagcaggggatttatatattatgttccgtgttcaaggtcataatgatttcgaacgtgatggggatgatatttatttcgagttgaaattgacattcccgcaagctgcacttggagatgaaattgaagtaccaactgttcacggtaaagtaaaactacgcattccagccggaacacagtcaggagctcaattccgattaaaagacaaaggtgtaaaaaatgttcatggctatggcatgggcaaccagtatgttaccgtgaaggtgatgacaccagagaagttaacggaaaaacaaaagcaattattacgagaatttgcagaaattagtggcgatatccctgaagagcaaggaagttcactattcgataaaattaagaaaaaattccaaggtgaataa

SEQ ID NO: 117892 - protein, 368 aa, Bacillus sphaericus
MEKRDYYEVLGLTKDEIKKAYRKLSKQYHPDLNKEPGADEKFKEIAEAYEVLSDDQKKARYDQFGHEDPNAGFGGGFGGGGFGGFEDIFSSFFGGGGRRQDPNAPRKGDDLQYRMNIKFEEAIFGKETEIEIPKDETCETCHGSGAKPGTQPETCSTCNGAGQINQAVDTPFGRMMNRRSCTTCHGTGKIIKEKCSTCRGEGKVQKRKKIKVSIPAGVDDGQQIRVSGQGEPGINGGPAGDLYIMFRVQGHNDFERDGDDIYFELKLTFPQAALGDEIEVPTVHGKVKLRIPAGTQSGAQFRLKDKGVKNVHGYGMGNQYVTVKVMTPEKLTEKQKQLLREFAEISGDIPEEQGSSLFDKIKKKFQGE

SEQ ID NO: 117893 - DNA, 1119 bp, Bacillus clausii
  CDS (1)..(1119): transl_table=11
gtgagcaaacgagattactatgaagtgcttggcgtagaccggaatgcatcagtagaagaagtaaaaaaagcatatcgaaaactagcacgaaaatatcaccctgatgtcaacaaggaagaggacgctgaggcgaaatttaaggaagtaaaagaagcctatgatacattgagcgatccacaaaagaaagcccgttatgaccagtttggccatgctgatccaaaccaaggatttggaggagccggcgcaagtggcgattttggtggttttagcgacatttttgatatgttttttggcggtggaggtgggcgccgcaatccaaatgccccgcgccaaggggatgaccttcaatatacgatgacattggagtttaaagaagcggtatttggcaaggaaaccgaaattgaaatcccccgtgaggaaacatgcggtacgtgccatggatcaggggccaaaccaggtacaaagccagatacttgttcccattgcggtgggtcaggtcaactgaatgttgaacaaaacacgccatttggccgcgttgttaatcgccgtgtttgtaactattgtgaaggaactgggaaaatcattaagcaaaaatgtgctacatgcagcggcaaaggcaaagtgcggaaacgcaaaaaaatcaatatccaagtgccagcagggattgataatgggcaacaactccgcgtagctggacaaggtgaagctggggcaaacgggggtcctccaggcgacctttacgttgtcttccaagtgaagccacatgaattttttgaacgtgatggagaagacatttattgtgaagtaccgctcacttttccacaagttgccctaggggatgaaattgaagtgccaactttgacagggaaagttaaattaaaaattccagcaggcacgcaaacaggcactagtttccgcctgagaggaaaaggagtgccgaatgtgcatgggcgcggccaaggcgatcagcatgtgcaagttcgtgtcgtaacgccgaaaaatttaactgaaaatgaaaaagaattgatgcgtgaatttgccggtatgagcggcggaaggccagaggagcaaaatgacggattttttgacaaactgcgccgtgctttcaaaggcgattga

SEQ ID NO: 117894 - protein, 372 aa, Bacillus clausii
MSKRDYYEVLGVDRNASVEEVKKAYRKLARKYHPDVNKEEDAEAKFKEVKEAYDTLSDPQKKARYDQFGHADPNQGFGGAGASGDFGGFSDIFDMFFGGGGGRRNPNAPRQGDDLQYTMTLEFKEAVFGKETEIEIPREETCGTCHGSGAKPGTKPDTCSHCGGSGQLNVEQNTPFGRVVNRRVCNYCEGTGKIIKQKCATCSGKGKVRKRKKINIQVPAGIDNGQQLRVAGQGEAGANGGPPGDLYVVFQVKPHEFFERDGEDIYCEVPLTFPQVALGDEIEVPTLTGKVKLKIPAGTQTGTSFRLRGKGVPNVHGRGQGDQHVQVRVVTPKNLTENEKELMREFAGMSGGRPEEQNDGFFDKLRRAFKGD

SEQ ID NO: 117895 - DNA, 1119 bp, Bacillus subtilis
  CDS (1)..(1119): transl_table=11
atgagtaagcgtgattactatgaagtgctgggagtaagtaagagcgcttcaaaggatgaaattaaaaaagcttatcggaagctgtcaaaaaaatatcatcctgatattaacaaagaagccggatcagatgaaaaatttaaagaggtaaaagaagcatacgaaacgctgtcagatgaccaaaaacgtgcgcattacgatcaatttggtcacactgaccctaaccaaggcttcggcggcggaggttttggcggcggcgatttcggcggttttggtttcgatgatattttctcaagtatattcggcggaggcacaagacgaagagatccaaaactccgcgccaggggtgctgatttacagtatacgatgaccctgtcgtttgaggatgcggctttcggtaaagaaacaaccatcgaaattccccgcgaggaaacgtgcgaaacatgtaaaggctcaggtgcgaaacctggaacaaatccagaaacatgctcccactgcggaggctccggccagttaaacgtggagcaaaatacaccgtttggaaaagtcgttaacagacgggtctgccaccactgtgaaggtacaggcaaaatcattaaaaacaaatgtgcggactgcggcggcaaaggaaaaatcaaaaaacgcaagaaaatcaatgtgacaattccagccggtgtagatgacgggcagcagcttcgtctctcgggacagggtgaaccaggaataaacggcggcctgccggatttatttgtcgtgttccatgtacgcgcacacgagttcttcgagcgtgacggcgatgatatttactgtgaaatgccgttaacgtttgctcaggctgctcttggagatgaggtagaagtgccgacgctgcatggaaaagtgaaaattccggccggtacacaaacaggaacgaaattcagattaagaggcaaaggcgttcaaaatgtcagaggctatggacagggtgaccagcatatcgtcgtccgcgtcgttacgccgacaaatctgactgataaacaaaaagacattatccgcgaatttgccgaagtcagcggaaacctgcctgacgaacaggaaatgagtttctttgacaaggtaaaacgcgcgtttaaaggcgattaa

SEQ ID NO: 117896 - protein, 372 aa, Bacillus subtilis
MSKRDYYEVLGVSKSASKDEIKKAYRKLSKKYHPDINKEAGSDEKFKEVKEAYETLSDDQKRAHYDQFGHTDPNQGFGGGGFGGGDFGGFGFDDIFSSIFGGGTRRRDPKLRARGADLQYTMTLSFEDAAFGKETTIEIPREETCETCKGSGAKPGTNPETCSHCGGSGQLNVEQNTPFGKVVNRRVCHHCEGTGKIIKNKCADCGGKGKIKKRKKINVTIPAGVDDGQQLRLSGQGEPGINGGLPDLFVVFHVRAHEFFERDGDDIYCEMPLTFAQAALGDEVEVPTLHGKVKIPAGTQTGTKFRLRGKGVQNVRGYGQGDQHIVVRVVTPTNLTDKQKDIIREFAEVSGNLPDEQEMSFFDKVKRAFKGD

SEQ ID NO: 117897 - DNA, 1191 bp, Bacteroides thetaiotaomicron; identical to SEQ ID NO: 63991
  CDS (1)..(1191): transl_table=11

SEQ ID NO: 117898 - protein, 396 aa, Bacteroides thetaiotaomicron; identical to SEQ ID NO: 63992

SEQ ID NO: 117899 - DNA, 1143 bp, Bacillus thermoglucosidasius; identical to SEQ ID NO: 63993
  CDS (1)..(1143): transl_table=11

SEQ ID NO: 117900 - protein, 380 aa, Bacillus thermoglucosidasius; identical to SEQ ID NO: 63994

SEQ ID NO: 117901 - DNA, 1146 bp, Bartonella henselae
  CDS (1)..(1146): transl_table=11
atgaaggtcgattattatgaaattcttggcgtgactcgcgaatgtgatgataaaaaactgaagtctgcttttcgtaagctggcgatgcaatatcatcctgatcgcaatgcaggggataaagaggcagaacggaaattcaaagaaattggcgaagcttatgaagttcttaaagatcctcaaaagcgggcagcttacgaccgcttcggtcatgcggcttttgaaaataacaataacgggggaggaagtccctttagcggtttttctgctggtggatttgctgacatttttgaagatttttttggcgaaattatggggggtgggcaccgtaaacgcagtgatggccgtgagcgtggcgcagatttaagttataatatggaagtgaccttggaagaggcattttcaggaaaaaccgcgcaaattaatattcctagctctgttgtgtgcgatgcttgtgaaggatcaggtgcaaaaaagggctctaaaccacaaacttgtgggacttgtcatggggctggtcgtgtacgtgctgcacaaggtttcttttccattgagagaacatgtcctgtatgtcatggacgtggcgaaactattaaagatccatgtccaaaatgccagggaacgagacgggtagaaaaaaatcgttcattgagtgtaaatatcccagctggtatagaagatagtacgcgtattcgtctgtctggtgagggagatgctggtattcgtggtggtcctagcggtgatctttatatttttctttctgttaaaccgcatgaattttttcaacgagagggggcagatcttcattgtcgagttcctatttcaatggtgacagctgctttgggaggagaatttgaagtttccgaccttgatggtatcaaagcacgtgttaagattccagaagggacacaaaatggacgtcaattccgcctgaaaggcaaaggaatgcctatgttacgccgtcaacaagtgagaggtgatctttatattcatatcactattgaaacaccgcagaaattgacgcaagagcaacgtgaattgttacaaaaatttgaaaagctttcaaatcacgaaaattcaccacaatcacatggttttttttcacggatgaaagagttttttgagaatatttctggtaaaaatgagtga

SEQ ID NO: 117902 - protein, 381 aa, Bartonella henselae
MKVDYYEILGVTRECDDKKLKSAFRKLAMQYHPDRNAGDKEAERKFKEIGEAYEVLKDPQKRAAYDRFGHAAFENNNNGGGSPFSGFSAGGFADIFEDFFGEIMGGGHRKRSDGRERGADLSYNMEVTLEEAFSGKTAQINIPSSVVCDACEGSGAKKGSKPQTCGTCHGAGRVRAAQGFFSIERTCPVCHGRGETIKDPCPKCQGTRRVEKNRSLSVNIPAGIEDSTRIRLSGEGDAGIRGGPSGDLYIFLSVKPHEFFQREGADLHCRVPISMVTAALGGEFEVSDLDGIKARVKIPEGTQNGRQFRLKGKGMPMLRRQQVRGDLYIHITIETPQKLTQEQRELLQKFEKLSNHENSPQSHGFFSRMKEFFENISGKNE

SEQ ID NO: 117903 - DNA, 1143 bp, Bartonella quintana
  CDS (1)..(1143): transl_table=11
atgaaggtcgattattatgaaattcttggcgtgactcgcgaatgtgatgataaaaagctgaaatctgcttttcgtaagctggcaatgcaatatcatcctgatcgcaatgcgggggataaagaggcagaacggagattcaaagaaattggcgaagcttatgaagttctcaaagatcctcaaaagcgagctgcttacgaccgatttggtcacgcggcttttgaaaataacaatcaaggaggaggaaatccctttggtggttttgctgctggtggattttctgacatttttgaagatttttttggcgagattatggggggtgggcaccgtaagcgcagtgatggtcgtgagcgtggcgcagatttgagttataatatggaagtgaccttagaagaggcattttcaggaaaaactgcacaaattaatattcccagttctattgtttgtgattcttgtgaagggtcaggtgcgaaaaaaggttctaagccacaaatttgtgggacttgtcatggggctggccgcgtccgtgctgcacaaggtttcttttccattgaaagaacatgtcatgcatgtaatgggcgtggtgaggtcattacggatccatgtccaaaatgccagggaacgagacgggtagaaaaaaatcgttcgttaagcgtaaacatcccagctggtatcgaagatggtacgcgtattcgtctttctggtgagggagacgctggcattcgtggtggtcctaacggtgatctttatatttttctttccgttaaaccgcatgaattttttcagcgagagggggcagatcttcattgtcgtattcctctttcaatggttacagctgctttaggaggggaatttgaagtttccgaccttgatggtatcaaagcacgtgttaagattccagaagggacacaaaatggacgtcagtttcgccttaaaggcaaaggaatgcctatgttacgtcgtcagcaggtgagaggtgatctttatattcatatcactattgaaacaccgcagaaattgacgcaagagcaacgtgaattattacaaaaatttgaaaagctttcaaatcatgagaattcaccgcaatcacatggttttttctcacgtatgaaagagttttttgaaaatatttccggtcaaaactag

SEQ ID NO: 117904 - protein, 380 aa, Bartonella quintana
MKVDYYEILGVTRECDDKKLKSAFRKLAMQYHPDRNAGDKEAERRFKEIGEAYEVLKDPQKRAAYDRFGHAAFENNNQGGGNPFGGFAAGGFSDIFEDFFGEIMGGGHRKRSDGRERGADLSYNMEVTLEEAFSGKTAQINIPSSIVCDSCEGSGAKKGSKPQICGTCHGAGRVRAAQGFFSIERTCHACNGRGEVITDPCPKCQGTRRVEKNRSLSVNIPAGIEDGTRIRLSGEGDAGIRGGPNGDLYIFLSVKPHEFFQREGADLHCRIPLSMVTAALGGEFEVSDLDGIKARVKIPEGTQNGRQFRLKGKGMPMLRRQQVRGDLYIHITIETPQKLTQEQRELLQKFEKLSNHENSPQSHGFFSRMKEFFENISGQN

SEQ ID NO: 117905 - DNA, 1116 bp, Bdellovibrio bacteriovorus
  CDS (1)..(1116): transl_table=11
atggctggcaaaagagattactacgaaattctgggcgtcgaaaaaggcgctgatcaggacaccatcaaaaaagcttatcgcaaactggcgatgcagttccatccggacaaaaaccccggcaacaaagaggccgaggaaaagttcaaggaagccgcaggggcttatgaagttctgagcgacgcacaaaaacgcgcgcagtacgatcgctttggccatgacgctttcacccgtggtggtggcggtggtggcttcacggatgcagaagacatcttctcgcacttcggggacatctttggcgacttctttggtggcggcatgggcggccagcaaagacagcgcagaaaccgcaatgaaccgcgccgcggctccgatttgcgctatgtgaccgagatcacgttgaaagacgttatcaccggcattgaaaaagaaatcgaatttgataccgacaaaaactgtgacgagtgcaaaggcaccggtgcagaaaaaggctcgcaagtcagcacttgcggcacgtgcggaggctcaggccaggtcgtgcgccagcagggcttcttcgcgatggcttcgacatgcccaacctgtcatggccagggcacagtgatcaaaaatccgtgcaagccgtgcaaaggcaaaggccgtgtggctgaacaccgcaagatccgtctgaacatcccggcaggggtggacacgggcacacgtctgcgtgtggcgacggagggtgagggtggatatatgggtggtcctccgggcgacctgtatgttgaaatccgcgtgaaacaacacaacaacttcgaacgtcgcaacgaagatcttttcgccgagctgtcactgccttacgtgcagatgcttctgggcgcagaaatcgaagtgccgaccgtcacaggcaaagccaagctggaagttcctaaaggcactcaccacggagacaacgtgaagcttgttggtgagggtttgccttctcttagaggcaaccgccgcggtgatatctacttcactgtgaacgtgcagttcccagagaaattacataaagacgaagagaagcttttgcgagaaattgctaaggcacgcggtctgaatgtgacctcggaaggtggcttcttcggcaagaagaaatag

SEQ ID NO: 117906 - protein, 371 aa, Bdellovibrio bacteriovorus
MAGKRDYYEILGVEKGADQDTIKKAYRKLAMQFHPDKNPGNKEAEEKFKEAAGAYEVLSDAQKRAQYDRFGHDAFTRGGGGGGFTDAEDIFSHFGDIFGDFFGGGMGGQQRQRRNRNEPRRGSDLRYVTEITLKDVITGIEKEIEFDTDKNCDECKGTGAEKGSQVSTCGTCGGSGQVVRQQGFFAMASTCPTCHGQGTVIKNPCKPCKGKGRVAEHRKIRLNIPAGVDTGTRLRVATEGEGGYMGGPPGDLYVEIRVKQHNNFERRNEDLFAELSLPYVQMLLGAEIEVPTVTGKAKLEVPKGTHHGDNVKLVGEGLPSLRGNRRGDIYFTVNVQFPEKLHKDEEKLLREIAKARGLNVTSEGGFFGKKK

SEQ ID NO: 117907 - DNA, 1134 bp, Blochmannia floridanus
  CDS (1)..(1134): transl_table=11
atggttaaatcagactattatgaaattttaggcgtatcaaagaatgcagatgagcgtgaaattaaaaaatcttataaacgcttggctatgaaatttcatcctgatcggaatcccggagatgtttctgcggaatctaaatttaaggaaattaaagaagcatatgaagttttaagtaatccagaaaaacgttctgcttatgatcagtatggtcatgcgatatttgaacaaaatagcggaggtatgggtggatcaaatactggaggatcagattttagtgatatttttggtgatgtatttggagatatttttggaggtagtagaagaagtagatcaagaaggggttctgatttacgatatgatatagagttatctttagaggaggctgttaaaggggtagttagagaaatttgtgttccaactttggttacgtgtttgcagtgtcgaggatctggagcaaaatcgagtgcatcaattgtgtcatgtgttacgtgtcatggacatggtcaaatacagatgcgccagggttttttttctgttcagcaatcttgtccatcatgtaacggtcatggaaagattattaaggaaatttgtaataaatgtaggggtagtggtcgtatagaacgaactaaaacgttgtctgttaaaattccagctggagtaagtacaggtgatcgtattaggttatcaggagaaggtgaatctggtaaaaatggagctcctgcaggtgatttatatgtgcaagtacaaattaagaagcatcctattttcgatagggaagagaaaaatttatattgcgaggttcctattagtttttctatggcagctttaggtggggaaattgaagttcctactttggatggtagagtaaaattaaaaatccctcccgaaactcagacaggaaaattgtttcgaatgaggggaaaaggagtgaagtctgttagaggtatagggggtcatggggatctgttatgtagagtggttgtagaaactccggttagattaagtgataggcaaaaacagttacttcaggatttatcagatagttttggtggtccttatggtcataaaaatagtcccaaatctaaaacgttttttgatggagttaagaaattttttgatgatttaactcgataa

SEQ ID NO: 117908 - protein, 377 aa, Blochmannia floridanus
MVKSDYYEILGVSKNADEREIKKSYKRLAMKFHPDRNPGDVSAESKFKEIKEAYEVLSNPEKRSAYDQYGHAIFEQNSGGMGGSNTGGSDFSDIFGDVFGDIFGGSRRSRSRRGSDLRYDIELSLEEAVKGVVREICVPTLVTCLQCRGSGAKSSASIVSCVTCHGHGQIQMRQGFFSVQQSCPSCNGHGKIIKEICNKCRGSGRIERTKTLSVKIPAGVSTGDRIRLSGEGESGKNGAPAGDLYVQVQIKKHPIFDREEKNLYCEVPISFSMAALGGEIEVPTLDGRVKLKIPPETQTGKLFRMRGKGVKSVRGIGGHGDLLCRVVVETPVRLSDRQKQLLQDLSDSFGGPYGHKNSPKSKTFFDGVKKFFDDLTR

SEQ ID NO: 117909 - DNA, 1122 bp, Bordetella bronchiseptica
  CDS (1)..(1122): transl_table=11
atggcaaaacgcgattactacgaagtactgggtgtggcgaagaatgccagcgacgaagacctgaagaaggcctatcgcaagctggccatgaagtaccacccggaccgcaacccggacagcaaggaagccgaggaaaagttcaaggaagccaaggaggcctacgaggtcctgggtgacgagcagaagcgcgccgcctacgaccgctatggccatgccggggtcgacccgaacgccgccggcatgggcggcggcatgggcggcggcttcgccgatgctttcggcgatatctttggcgagatcttcggcgcgggtcggcgcgggggcggcgggccgcaggtgtatcgcggcgccgacctgaagtacgcgctggaaatcacgctggagcaggccgccagcggttttgacaccgagatccgcgttcccagctgggaaaactgcgatacctgccacggcagcggcgccaaggccggcacctcgcccaagacttgccggacttgcggcggttcgggcgcggtgcgcatgcagcagggctttttcagcgtccagcagacctgcccgacctgccacggcaccggcaaggaaatcaccgacccctgcccgtcgtgcgacggcgtgggccgtacgcgtcgcaacaagacgctgcaggtcaagatcccggccggcatcgacgacggcatgcgcatccgctccagcggcaacggcgagcccggcatcaacggcggcccgccgggcgacctgtatgtcgagatccatatcaagcagcacaagatcttccagcgcgatggcgacgatctgcactgcgagctgaccatcccgttcaccacggcggcgctgggcggcgagctgcaggtgccgaccctgggcggcaaggccgagatctcgattccggaaggcacgcagtcgggcaagaccttccgcctgcgcgccaagggcatccgcggggtgcgcggcagttatccgggcgacctctattgccacgtggtggtcgagacgccggtgcgcctgagcgacgagcagaaggccatcctgcgccagttcgaggcttcgctcaacgacggcggcgaccgccattcgccgcagagcaagtcctggaccgaccgcgtcaaggagttcttcagctga

SEQ ID NO: 117910 - protein, 373 aa, Bordetella bronchiseptica
MAKRDYYEVLGVAKNASDEDLKKAYRKLAMKYHPDRNPDSKEAEEKFKEAKEAYEVLGDEQKRAAYDRYGHAGVDPNAAGMGGGMGGGFADAFGDIFGEIFGAGRRGGGGPQVYRGADLKYALEITLEQAASGFDTEIRVPSWENCDTCHGSGAKAGTSPKTCRTCGGSGAVRMQQGFFSVQQTCPTCHGTGKEITDPCPSCDGVGRTRRNKTLQVKIPAGIDDGMRIRSSGNGEPGINGGPPGDLYVEIHIKQHKIFQRDGDDLHCELTIPFTTAALGGELQVPTLGGKAEISIPEGTQSGKTFRLRAKGIRGVRGSYPGDLYCHVVVETPVRLSDEQKAILRQFEASLNDGGDRHSPQSKSWTDRVKEFFS

SEQ ID NO: 117911 - DNA, 1134 bp, Bordetella parapertussis
  CDS (1)..(1134): transl_table=11
atggcaaaacgcgattactacgaagtactgggtgtggcgaagaatgccagcgacgaagacctgaagaaggcctatcgcaagctggccatgaagtaccacccggaccgcaacccggacagcaaggaagccgaggaaaaattcaaggaagccaaggaggcctacgaggtcctgggtgacgagcagaagcgcgccgcctacgaccgctatggccatgccggggtcgacccgaacgccgccggcatgggcggcggcatgggcggcggcatgggcggcggcttcgccgatgctttcggcgatatctttggcgagatcttcggcgcgggtcggcgcgggggcggcgggccgcaggtgtatcgcggcgccgacctgaagtacgcgctggaaatcacgctggagcaggccgccagtggctttgacaccgagatccgcgttcccagctgggaaaactgcgatacctgccacggcagcggcgccaaggccggcacctcgcccaagacttgccggacttgcggcggttcgggcgcggtgcgcatgcagcagggctttttcagcgtccagcagacctgcccgacctgccacggcaccggcaaggaaatcaccgacccctgcccgtcgtgcgacggcgtgggccgtacgcgtcgcaacaagacgctgcaggtcaagatcccggccggcatcgacgacggcatgcgcatccgctccagcggcaacggcgagcccggcatcaacggcggcccgccgggcgacctgtatgtcgagatccatatcaagcagcacaagatcttccagcgcgatggcgacgatctgcactgcgagctgaccatcccgttcaccacggcggcgctgggcggcgagctgcaggtgccgaccctgggcggcaaggccgagatctcgattccggaaggcacgcagtcgggcaagaccttccgcctgcgcgccaagggcatccgcggggtgcgcggcagctatccgggcgacctctactgccacgtggtggtcgagacgccggtgcgcctgagcgacgagcagaaggccatcctgcgccagttcgaggcttcgctcaacgacggcggcgaccgccattcgccgcagagcaaatcctggaccgaccgcgtcaaggagttcttcagctga

SEQ ID NO: 117912 - protein, 377 aa, Bordetella parapertussis
MAKRDYYEVLGVAKNASDEDLKKAYRKLAMKYHPDRNPDSKEAEEKFKEAKEAYEVLGDEQKRAAYDRYGHAGVDPNAAGMGGGMGGGMGGGFADAFGDIFGEIFGAGRRGGGGPQVYRGADLKYALEITLEQAASGFDTEIRVPSWENCDTCHGSGAKAGTSPKTCRTCGGSGAVRMQQGFFSVQQTCPTCHGTGKEITDPCPSCDGVGRTRRNKTLQVKIPAGIDDGMRIRSSGNGEPGINGGPPGDLYVEIHIKQHKIFQRDGDDLHCELTIPFTTAALGGELQVPTLGGKAEISIPEGTQSGKTFRLRAKGIRGVRGSYPGDLYCHVVVETPVRLSDEQKAILRQFEASLNDGGDRHSPQSKSWTDRVKEFFS

SEQ ID NO: 117913 - DNA, 1128 bp, Brevibacillus choshinensis
  CDS (1)..(1128): transl_table=11
atgaaacgcgactactatgaggtgctgggggtcggcaagggcgcggacgctgatgaaatcaaaaaagcgtaccgcaagctggcgcgtcagtaccatccggatgtaaataaagccgcagatgcggaagagaagttcaaggaagtgaaggaagcgtacgatgtcctgtctgagccgcaaaaacgagctcagtacgaccgtttcggacatcaggatcctaaccaaggctttggcggcggtggttttgacgcctctggaatgggcggcttcggcgatatttttgatatgtttttcggcggtggcgggcgacgtgcgaatccgaacgcgccgcgcaaaggctctgacctgcagtttggtctcagcattgaatttacagaaacagtcttcgggaaagagaccgatgtggaaatccccaaggaagcggagtgcgacacttgccatggctccggggcaaaaccgggtacgggtgtcgagacttgtaaaacttgcagcggcacaggacagcaggaagtggctgcaaacacgccatttggccgcatcgtcaaccgacgcgtttgtacgacttgcgaaggaaaagggaaagtcttcaaagaaaaatgctcgtcctgccgcggtagcggtcgcgtcaaagtgcgccgcaagattcatctcaacattccagcgggagtggatgacggtgcgcagctgcgcgtgacaggtgaaggggaaccgggtgtaaacggcgggcctcccggcgatttgtacgtcgtattgcgcgtcaaaagtcacgagtttttcgaacgcgaaggaaatgatatctactgtgaagttcctctcacctatgcccaagccgcgcttggtgacgagatcgaagtgccgacagtggacggtcgtgtgaagctgaagatcccatccggaacgcagactgagacgttcttcaggcttcgggggaaaggtgtcccgcacctgcgaggcaatggacgcggcgatcagcacgtgaaagtgcgcgtgattactccgaccaagctgagcgataagcaaaaagagcttttgcgagagctggccgaactgtcgggtgaaaagccgggacagcatggcggcgaagatgaaggcttttttgaaaaaatgaaacgggcattccgcggcgaataa

SEQ ID NO: 117914 - protein, 375 aa, Brevibacillus choshinensis
MKRDYYEVLGVGKGADADEIKKAYRKLARQYHPDVNKAADAEEKFKEVKEAYDVLSEPQKRAQYDRFGHQDPNQGFGGGGFDASGMGGFGDIFDMFFGGGGRRANPNAPRKGSDLQFGLSIEFTETVFGKETDVEIPKEAECDTCHGSGAKPGTGVETCKTCSGTGQQEVAANTPFGRIVNRRVCTTCEGKGKVFKEKCSSCRGSGRVKVRRKIHLNIPAGVDDGAQLRVTGEGEPGVNGGPPGDLYVVLRVKSHEFFEREGNDIYCEVPLTYAQAALGDEIEVPTVDGRVKLKIPSGTQTETFFRLRGKGVPHLRGNGRGDQHVKVRVITPTKLSDKQKELLRELAELSGEKPGQHGGEDEGFFEKMKRAFRGE

SEQ ID NO: 117915 - DNA, 1134 bp, Brucella melitensis
  CDS (1)..(1134): transl_table=11
atgaagatcgactattacgaagcactgggtgtcaccagaaccgcagatgacaaaacgctgaaggcagcgtttcgcaagctcgccatgcagtatcatccggaccgtaacccggatgatcccgaagccgaacgcaagttcaaggaaatcggcgaggcttacgaaaccctgaaagacccgcaaaagcgcgccgcttatgatcgcttcggccatgcagcctttgaaaatggcggtatgggcggtggtttcggcaatggctttggcggtgcgggcggttttgccgatattttcgaggatattttcggcgagatgatgggcggcggtcgccgccgcagcaatggtggccgcgagcgcggcgccgatctgcgctacaatatggaagtgacgctggaggaagcctatgcgggcaagaccgcgcaaatccgcgtgccgacctccattacctgcgatgaatgctccggctccggcgccaagcccggttcgcagcccaccacctgtaccatgtgctccggctccggccgtgtgcgtgccgcgcagggtttcttctcggtggaacgtacctgcccaggctgtaacggtcgcggccagatcatcaaggatccgtgcgagaagtgccatgggcagggccgggtgacgcaggagcgttcgctttcggtcaatattcccgcaggtatcgaggacggaacccgtatccgtctggctggtgaaggcgaggcgggcctgcgcggcggaccggcgggtgatctctatatcttcctgtcggtgaagccgcacgaattcttccagcgtgatggcgcggacctttattgcaaggtgccgatctcaatgaccacggcggctctgggcggccagttcgaggtttcgacacttgatggtacccagacccgcgtgaaggtgccggagggcacgcagaacggcaagcagttccgcctgaaaggcaaggggatgccggtgctgcgccagtctgttaccggcgatctctatatacagatcgacatcgaaacgccgcagaatctctccaagcgccagcgcgagcttcttgaggagtttgaaaagctttcctcgcaggagaacagcccgaaatcggcgggcttcttctcccggatgaaggagttttttgaaggaatcggcgaatag

SEQ ID NO: 117916 - protein, 377 aa, Brucella melitensis; identical to SEQ ID NO: 63998

SEQ ID NO: 117917 - DNA, 1128 bp, Brucella ovis
  CDS (1)..(1128): transl_table=11
atgaagatcgactattacgaagcactgggtgtcaccagaaccgcagatgacaaaacgctgaaggcagcgtttcgcaagctcgccatgcagtatcatccggaccgtaacccggatgatcccgaagccgaacgcaagttcaaggaaatcggcgaggcttacgaaaccctgaaagacccgcaaaagcgcgccgcttatgatcgcttcggccatgcagcctttgaaaatggcggtatgggcggtggtttcggcaatggctttgccggtgcgggcggttttgccgatattttcgaggatattttcggcgagatgatgggcggtcgccgccgcagaaatggtgccgagcgcggcgccgatctgcgctacaatatggaagtgacgctggaggaagcctatgcgggcaagaccgcgcaaatccgcgtgccgacctccattacctgcgatgaatgctccggctccggcgccaagcccggttcgcagcccaccacctgtaccatgtgctccggctccggccgttgtcgtgccgcgcagggtttcttctcggtggaacgtacctgcccaggctgtaacggacgcggccagatcatcaaggatccgtgcaaaaagtgccatgggcagggccgggttgaccgaggacgttcgctttcggtcaatattcccgcagtatcgaggacggaaccccgtatccgtctggctggtgaaggcgaggcgggcctgcgcggcggaccggcgggtgatctctatatccttctgtcggtgaagccgcacgaattcttccagcgtgatggcgcggacctttattgcaaggtgccgatctcaatgaccacggcggctctgggcggccagttcgaggtttcgacacttgatggtacccagacccgcgtgaaggtgccggaaggcacgcagaacggcaagcagttccgcctgaaaggcaaggggatgccgggtctgcgccagtctgttaccggcgatctctatatacagatcgacatcgaaacgccgcagaatctctccaagcgccagcgcgagcttcttgaggagtttgaaaagctttcctggcaggagaacagcccgaaatcggcgggcctcttctcccggatgaaggagttttttgaaggaatcggcgaatag

SEQ ID NO: 117918 - protein, 375 aa, Brucella ovis
MKIDYYEALGVTRTADDKTLKAAFRKLAMQYHPDRNPDDPEAERKFKEIGEAYETLKDPQKRAAYDRFGHAAFENGGMGGGFGNGFAGAGGFADIFEDIFGEMMGGRRRRNGAERGADLRYNMEVTLEEAYAGKTAQIRVPTSITCDECSGSGAKPGSQPTTCTMCSGSGRCRAAQGFFSVERTCPGCNGRGQIIKDPCKKCHGQGRVDRGRSLSVNIPAVSRTEPRIRLAGEGEAGLRGGPAGDLYILLSVKPHEFFQRDGADLYCKVPISMTTAALGGQFEVSTLDGTQTRVKVPEGTQNGKQFRLKGKGMPGLRQSVTGDLYIQIDIETPQNLSKRQRELLEEFEKLSWQENSPKSAGLFSRMKEFFEGIGE

SEQ ID NO: 117919 - DNA, 1137 bp, Buchnera aphidicola subsp; identical to SEQ ID NO: 63999
  CDS (1)..(1137): transl_table=11

SEQ ID NO: 117920 - protein, 378 aa, Buchnera aphidicola subsp; identical to SEQ ID NO: 64000

SEQ ID NO: 117921 - DNA, 1122 bp, Campylobacter jejuni
  CDS (1)..(1122): transl_table=11
gtggaaataagttattatgaaattcttgaaatcacgcaaaatgctgataaagaaaccataaaaaaagcctatagaaaaatggctttaaaatatcatcctgatagaaaccaaggtgataaagaagcagaagataaattcaagcttgttaatgaagcctatgaagttttaagcaatgatgaaaagcgagctatttatgatagatacggaaaagatgctttaaaaggcggtggatttggttctagtagctcaggttttggtggttttgaggatttaggagatatattttctagtttttttggagaaggctttggctcatcgcgtcgtagaaaaagttcaaatgatgagaaaatcccttcagattttatcgttaatttaaaattaagttttaaagaagcggtttttggttgtaagaaaaatatagactttacttataaatgctcttgtaaaacttgtaatggaacaggggctaaagatggaaagcttcaaacttgtccaaagtgtcaaggtagaggacaggttggggtttctcaaggttttatcacttttgcacaaacttgccctgattgtcaaggaattggagaaaaagctagtgaaaaatgtagtgattgtaaaggtttgggttataatgaaagcaaaaatagtgtcgagcttaatatcccagaaggtgtagatacaggtatgaagcttcgtgtcaatgctaaaggtaatatcttaaaaaatggtactagaggggatatgtatgttaagatcatcgccgctgaagatgatacttttatcagagatgatgatgatatatatatagaatttccagtgttttttactcaagctatcttaggagagagtataaaagtacccaccatacgcggtgaagcgaccttaaatttaccaaagggtgctaaagatggacaaagatttgttcttgaaaaagaaggggtaaaagatgttcatagttctcgcataggaaatcaaatcgttcaaatttctatcaaatttccaacttctttaaacgatgaacaaaaagaacttttagaaaaactaagtgaaagttttggtatcaaagatggtatgcatcaagagcaaaaaggactttttgaaaaaatcgctaattggtttaagtcttaa

SEQ ID NO: 117922 - protein, 373 aa, Campylobacter jejuni
MEISYYEILEITQNADKETIKKAYRKMALKYHPDRNQGDKEAEDKFKLVNEAYEVLSNDEKRAIYDRYGKDALKGGGFGSSSSGFGGFEDLGDIFSSFFGEGFGSSRRRKSSNDEKIPSDFIVNLKLSFKEAVFGCKKNIDFTYKCSCKTCNGTGAKDGKLQTCPKCQGRGQVGVSQGFITFAQTCPDCQGIGEKASEKCSDCKGLGYNESKNSVELNIPEGVDTGMKLRVNAKGNILKNGTRGDMYVKIIAAEDDTFIRDDDDIYIEFPVFFTQAILGESIKVPTIRGEATLNLPKGAKDGQRFVLEKEGVKDVHSSRIGNQIVQISIKFPTSLNDEQKELLEKLSESFGIKDGMHQEQKGLFEKIANWFKS

SEQ ID NO: 117923 - DNA, 1158 bp, Caulobacter crescentus
  CDS (1)..(1158): transl_table=11
atgcgcgactattacgaaattctcggcgtgacccggaccatcgatgaagctggtctgaagtccgcgttccgcaagctggcgatggaacaccaccctgaccgcaatggcggctgcgagaacgcggccgggcggttcaaggaaatcaacgaggcctattcggtcctctccgatccccagaagcgcgcggcctatgaccgcttcggccatgccggcgtcaacgggccgcaaggcggtccgggcgggttcggcggccagggcttcgacgccagcgacatcttcaacgacgtctttggcgatgtgttcggcgagatgttcggcggcggtcgtcgccagtccaacgccccccagcgcggccaggacctgcgttatgacctggagatcaccctcgagcaggcctatgcgggcgccgaggtcgagatcaccgttcccgccgccatgacctgcgaggtctgcgaagggtccggcgccaagccgggcaccagcccctctgtctgcggcacctgcggtggcgcgggccgtgtccgagcgacccagggcttcttcgccgtcgagcgcggttgcccgcgctgcggcggatccggccgtctggttctggacccgtgctccaactgccatggccatggccaggtgcgtcgcgagcgcatcctgtcggtccgcatcccggcgggcgtcgacgacggcgcccggatccgcctggccggcgaaggcgacgccggcgcgcgcggcggtccgcgtggggatctctacatcttcctgtcagtgaccccgcacgagctgttcgagcgtgatggtctggaccttctctgcaccgtgccggtgccaatgaccacggcggccctgggcggcgagatcgacgcgccttgcctcttgggtggcgagagctgcgacggcgagtgcaaggtcaaggtccatgtgcccgaaggcgctcagaccggtaagaccgtccgcctcaagggcaagggtatgccgtccctgcgcagccgccagcgcggcgacctggtggtcgaactgttcgtcgagaccccgacccatctgtccgcgcgccagaaggaactgatgcgcgaactggcgggcctgtgcggcgaaaagcagaaccccaagtccgccaacttcgtcggcaaggcgaagaggttctgggaagaggtcacggggagctag

SEQ ID NO: 117924 - protein, 385 aa, Caulobacter crescentus
MRDYYEILGVTRTIDEAGLKSAFRKLAMEHHPDRNGGCENAAGRFKEINEAYSVLSDPQKRAAYDRFGHAGVNGPQGGPGGFGGQGFDASDIFNDVFGDVFGEMFGGGRRQSNAPQRGQDLRYDLEITLEQAYAGAEVEITVPAAMTCEVCEGSGAKPGTSPSVCGTCGGAGRVRATQGFFAVERGCPRCGGSGRLVLDPCSNCHGHGQVRRERILSVRIPAGVDDGARIRLAGEGDAGARGGPRGDLYIFLSVTPHELFERDGLDLLCTVPVPMTTAALGGEIDAPCLLGGESCDGECKVKVHVPEGAQTGKTVRLKGKGMPSLRSRQRGDLVVELFVETPTHLSARQKELMRELAGLCGEKQNPKSANFVGKAKRFWEEVTGS

SEQ ID NO: 117925 - DNA, 1176 bp, Chlamydophila abortus
  CDS (1)..(1176): transl_table=11
atggattactatgatgttttaggtgtttctaaaactgcttctcctgaggagattaaaaaatcttatcgtaagttggctgttaagtatcatcctgacaaaaatccaggggatgctgaagctgagaaacgttttaaagaagtttcagaagcttatgaagttttaagtgaccctcaaaaacgagagtcctatgaccgttacggtaaagatgggccttttgccggagccggtggtttcggtggtgcaggcatgagcaatatggaagatgccttgcgcacttttatgggggcttttggtggagagcttggtggtagcggaagctttttcgaaggtctctttggtggcctaggtgaagctttcggtatgcggggcgacccagcaggagctcgtcagggagctagtaagaaggttcacatcactttaacatttgaagaagccgctcgcggtgtaaaaaaggaactgcttgtttctggatacaagacctgtgaaacttgttccggtagcggtgcctcgagtaagcaaggaatcaagtgttgtgaccgttgtaaaggttctgggcaggttgttcagagtcgcggtttcttttctatggcctcgacatgtcccgaatgtggtggggaaggccgtatgattaccgacccttgctcaagttgtcgaggacaaggaagaatcaaggataaacgcagtgttcatgtacaaatccctgcgggtgtagattcgggaatgcgtttaaagatggaaggctatggagatgctggacaaaatggtgctcctgccggggatctttatgttttcatcgacgtagaagcacatcctgttttcgagagacgaggggatgatttaattttagaattgcccattggctttgttgacgctgctttaggaatgaagaaagaagtgcccactttattaaaagagggggcttgtcgcctcacagtgcctgaagggattcaaagcggaacaattcttaagattaaaaatcaaggattccctaacgtccacggtagaggacgtggagacttgctggtacgagtttctgtagaaactccacaaaatctttcagaagaacagaaggaattacttcgcaagttcgcagctacggaaaaagcagaaaatttccctaagaaacgcagtttcttggataaaattaagggttttttttctgacctcaccgtatag

SEQ ID NO: 117926 - protein, 391 aa, Chlamydophila abortus
MDYYDVLGVSKTASPEEIKKSYRKLAVKYHPDKNPGDAEAEKRFKEVSEAYEVLSDPQKRESYDRYGKDGPFAGAGGFGGAGMSNMEDALRTFMGAFGGELGGSGSFFEGLFGGLGEAFGMRGDPAGARQGASKKVHITLTFEEAARGVKKELLVSGYKTCETCSGSGASSKQGIKCCDRCKGSGQVVQSRGFFSMASTCPECGGEGRMITDPCSSCRGQGRIKDKRSVHVQIPAGVDSGMRLKMEGYGDAGQNGAPAGDLYVFIDVEAHPVFERRGDDLILELPIGFVDAALGMKKEVPTLLKEGACRLTVPEGIQSGTILKIKNQGFPNVHGRGRGDLLVRVSVETPQNLSEEQKELLRKFAATEKAENFPKKRSFLDKIKGFFSDLTV

SEQ ID NO: 117927 - DNA, 1179 bp, Chlamydophila caviae
  CDS (1)..(1179): transl_table=11
atggattactatgatgttttaggtgtttctaaaactgcctctcctgaggagattaaaaaatcttatcgcaagttggctgttaagtatcaccctgacaagaatccaggggatgctgaggcagagaaacgttttaaagaagtttcagaagcttacgaggttttgagcgatcctcaaaagcgcgaatcttatgaccgctatggtaagaatggacctttcgccggagccggtggtttcggtggtatgggcggcatgggcaacatggaagacgctctgcgtacttttatgggagcttttggcggagaatttggcggtggcggaagctttttcgaaggcctgtttggtggtcttggagaagcttttggaatgcgtggagaccctgcgggagcccgtcagggagcgagtaagaaagttcatatcaccttaacattcgaagaagctgctcgtggtgtagaaaaggaactccttgtttctggatataaaacttgtgaaacttgtttaggcagcggtgctgctagtgagcaaggaatcaagtgttgtgatcggtgcaaaggttctggacaaatcgttcagagtcgtggattcttttctatggcgtcaacttgtcctgagtgtggcggagaggggcgtgtcattactgacccttgttctaattgccggggacagggaagaattaaagataaacgaaacgtccatgtacaaattcctgccggagtcgattcaggaatgcgtctaaagatggaaggttatggagatgccggacaaaacggtgctccttccggagacctttatgtatttattgatgtagaagcgcatcctgtttttgagcgccgcggggacgacttgattttagagttgcctattggttttgtggatgcagctttaggaatgaagaaagaaattcctacactcttaaaggaaggtatgtgccgtcttactgttcctgaaggaatccaaagtggcacgattcttaaggttaagaatcaagggtttcccaatgttcatggtagagggcgcggagatttgctagttcgagtttctgtagagactccacaaaatctatcagaagaacagaaggaattacttcgtaagttcgcaactacggaaaaagcagaaaatttccccaagaaacgtggttttttggataaaataaagggttttttttccgacttcgccgtatag

SEQ ID NO: 117928 - protein, 392 aa, Chlamydophila caviae
MDYYDVLGVSKTASPEEIKKSYRKLAVKYHPDKNPGDAEAEKRFKEVSEAYEVLSDPQKRESYDRYGKNGPFAGAGGFGGMGGMGNMEDALRTFMGAFGGEFGGGGSFFEGLFGGLGEAFGMRGDPAGARQGASKKVHITLTFEEAARGVEKELLVSGYKTCETCLGSGAASEQGIKCCDRCKGSGQIVQSRGFFSMASTCPECGGEGRVITDPCSNCRGQGRIKDKRNVHVQIPAGVDSGMRLKMEGYGDAGQNGAPSGDLYVFIDVEAHPVFERRGDDLILELPIGFVDAALGMKKEIPTLLKEGMCRLTVPEGIQSGTILKVKNQGFPNVHGRGRGDLLVRVSVETPQNLSEEQKELLRKFATTEKAENFPKKRGFLDKIKGFFSDFAV

SEQ ID NO: 117929 - DNA, 1179 bp, Chlamydia muridarum
  CDS (1)..(1179): transl_table=11
atggattactacactatactgggtgtagctaagactgctactcctgaagaaataaaaaaagcatatcgtaagctcgcggtgaagtaccatccggataagaatcctggggatgctgaagcggagcgacgttttaaagaagtttctgaagcttacgaagtattaggcgatgcacagaagcgggagtcttacgatcgttatggtaaagacgggccatttgctggggctggtggatttggtggcgctggcatgggcaacatggaagatgctttacgaacgtttatgggagcctttggaggagactttggcggtaatggaggcgggttctttgaggggttgtttggaggccttggagaagctttcgggatgcgagggggatctgaaggtgctcggcagggagctagtaaaaaagtacatattactttgtcctttgaagaagcagcaaaaggcgttgaaaaagagcttcttgtttctggttataaatcttgcgatgcttgttctggtagtggagcgaaaacctctaaaggcgtgaaggtttgcgatcgatgcaaaggttcaggtcaagtagtccaaagccggggcttcttctctatggcttctacctgcccagattgtagtggggaaggtagagttattacagatccttgttccgaatgtagaggccaaggccgcattaaggacaaacgtagcgttcatgtcaatattccttctggggtagactctggaatgagacttaagatggaaggctatggagacgcggggcaaaatggagctcctgccggggatctctatatctttattgacgtagaaccacatccagtttttgaacgtcacggagatgatctagttttagagcttcccattggatttgttgatgctgctttaggaattaagaaggaaatccctactttattaaaagagggaacctgtcgtttaaatattcccgagggtattcagagtggaacagtccttaaagttagaggacagggattccctaatgtacatgggaaagctagaggggatctcttggtaagaatatcagtggagactcctcagcatttgtctaatgagcaaaaagagttgttgaggaagttttctgagacggaaaaagccgaaaatttccctaaaaaacgtagtttcttagacaaaattaaaggttttttttctgactttgctgtatag

SEQ ID NO: 117930 - protein, 392 aa, Chlamydia muridarum
MDYYTILGVAKTATPEEIKKAYRKLAVKYHPDKNPGDAEAERRFKEVSEAYEVLGDAQKRESYDRYGKDGPFAGAGGFGGAGMGNMEDALRTFMGAFGGDFGGNGGGFFEGLFGGLGEAFGMRGGSEGARQGASKKVHITLSFEEAAKGVEKELLVSGYKSCDACSGSGAKTSKGVKVCDRCKGSGQVVQSRGFFSMASTCPDCSGEGRVITDPCSECRGQGRIKDKRSVHVNIPSGVDSGMRLKMEGYGDAGQNGAPAGDLYIFIDVEPHPVFERHGDDLVLELPIGFVDAALGIKKEIPTLLKEGTCRLNIPEGIQSGTVLKVRGQGFPNVHGKARGDLLVRISVETPQHLSNEQKELLRKFSETEKAENFPKKRSFLDKIKGFFSDFAV

SEQ ID NO: 117931 - DNA, 1179 bp, Chlamydia pneumoniae; identical to SEQ ID NO: 64001
  CDS (1)..(1179): transl_table=11

SEQ ID NO: 117932 - protein, 392 aa, Chlamydia pneumoniae; identical to SEQ ID NO: 64002

SEQ ID NO: 117933 - DNA, 1212 bp, Chlorobium tepidum
  CDS (1)..(1212): transl_table=11
atgaagagagattactatgaaatccttggcgtcgcccgttcggcggacaaggatgaaataaagaaggcttaccgcaagctggccctgaaatatcacccggacaagaatcctgacaacaaggaggctgaggagaagttcaaagaggtcaacgaggcgtacgaagtcctgagcaacgacgacaagcgccgtcgctacgaccagttcggccatgcgggcgtcggctcatcagcggcatcgggcagtggccccggtggtgcgggatatggcgatatcaatgatattttcagtgctttcaacgatatgttcagtggcggcggaggccgtgcacgcactggcggatcgccattcagcggtttcgaagatgtcttcagcggcggcttttcgggtagtggcagcgggcgtcggcgctcggctggcatccagggcaccgatctcaagattcgcctcaagctgacgctcgaagagatcgccaaaggggttgagaagacgatcaagatcaaaaagctggtgacctgtcgggagtgcaacggcactggctcgaagagcggcaagaccgagatctgcccgacctgccacggaagcggtgaagttcgccaggccaccaaaacgatgttcgggcagttcatgaacatctctgtctgcccgacttgcggcggcgaagggcgggtggtcaaggatcgctgcccttcctgctatggtgaaggcatcaagcagggtgaagcgaccgtcaagatcaccgtgcctgcgggtgtgcaggatggcaactacctgacgcttcaggggcagggcaacgcgggaccgaggggcggagcgcccggcgacctgatcgtggtgatcgaggagaagccgcatgagttgttcaagcgcaacggcgacgatatcatctacgatctttcggttggtttccctgatctggttatgggtaccaagatcgaagtgccaacgctcgatggtcacgtcaaactgaccattcctgcaggtacccagccgaacacgatgctgcgcattggcggcaagggtatcggccacttgcgaggtggcggtagtggcgacctgtacgtcagggtgaatgtttttgtgccgaaggaggtcagcggcaaggatcgcgacttgttgaaggagctgaagaaatcgacggtcatctgcccgaaccatggcgatgaaaaccatgaaaagagcattttcgaaaaggcaaaagatattttcagctga

SEQ ID NO: 117934 - protein, 403 aa, Chlorobium tepidum
MKRDYYEILGVARSADKDEIKKAYRKLALKYHPDKNPDNKEAEEKFKEVNEAYEVLSNDDKRRRYDQFGHAGVGSSAASGSGPGGAGYGDINDIFSAFNDMFSGGGGRARTGGSPFSGFEDVFSGGFSGSGSGRRRSAGIQGTDLKIRLKLTLEEIAKGVEKTIKIKKLVTCRECNGTGSKSGKTEICPTCHGSGEVRQATKTMFGQFMNISVCPTCGGEGRVVKDRCPSCYGEGIKQGEATVKITVPAGVQDGNYLTLQGQGNAGPRGGAPGDLIVVIEEKPHELFKRNGDDIIYDLSVGFPDLVMGTKIEVPTLDGHVKLTIPAGTQPNTMLRIGGKGIGHLRGGGSGDLYVRVNVFVPKEVSGKDRDLLKELKKSTVICPNHGDENHEKSIFEKAKDIFS

SEQ ID NO: 117935 - DNA, 1179 bp, Chlamydia trachomatis
  CDS (1)..(1179): transl_table=11
atggattactacacgatattgggtgtagcgaagactgctactcctgaagaaataaagaaagcttaccgtaagctcgctgtaaagtaccatccagataagaatcctggggatgctgaagcggagcgacgctttaaagaagtttctgaagcctatgaagtattaggtgatgcgcagaagcgggagtcatatgatcgttacggcaaagacggtccatttgctggtgctggaggattcggtggcgctggcatggggaatatggaagacgctttgcgaacatttatgggagcttttggcggcgatttcggtggtaatggaggcggtttctttgaagggctttttggaggacttggagaagctttcggaatgcgtggaggctcagaaagttctcgacaaggagctagtaagaaggtgcatattacgctgtccttcgaggaggcggcaaaaggtgttgaaaaagaacttcttgtttcaggctataaatcttgtgatgcttgttctggtagtggagccaatactgctaaaggtgtaaaagtttgtgatcgatgcaagggctctggtcaggtagtgcaaagccgaggctttttctccatggcttctacttgccctgattgtagtggtgaaggtcgggttatcacagatccttgttcagtttgtcgtgggcagggacgtatcaaggataaacgtagcgtccatgttaatatcccagctggagtcgattctgggatgagattaaagatggaaggctatggagatgctggccaaaatggagcgcctgcaggggatctgtatgtttttattgatgtagagcctcatcctgttttcgagcgccatggggatgatttagttttagagcttcctattggatttgttgatgcggctttagggatcaagaaggaaatccctacactcttaaaagaaggtacttgccgtttgagtatcccagaagggattcagagcggaacagttcttaaagttagagggcagggattccctaatgtgcatgggaaatccagaggagatcttttagtaagagtatctgtggagactccccagcacctatctaatgaacaaaaagatttattgagacagtttgctgctacggagaaggctgaaaatttccctaagaaacggagtttcttagacaaaatcaaaggttttttttctgactttgctgtatag

SEQ ID NO: 117936 - protein, 392 aa, Chlamydia trachomatis
MDYYTILGVAKTATPEEIKKAYRKLAVKYHPDKNPGDAEAERRFKEVSEAYEVLGDAQKRESYDRYGKDGPFAGAGGFGGAGMGNMEDALRTFMGAFGGDFGGNGGGFFEGLFGGLGEAFGMRGGSESSRQGASKKVHITLSFEEAAKGVEKELLVSGYKSCDACSGSGANTAKGVKVCDRCKGSGQVVQSRGFFSMASTCPDCSGEGRVITDPCSVCRGQGRIKDKRSVHVNIPAGVDSGMRLKMEGYGDAGQNGAPAGDLYVFIDVEPHPVFERHGDDLVLELPIGFVDAALGIKKEIPTLLKEGTCRLSIPEGIQSGTVLKVRGQGFPNVHGKSRGDLLVRVSVETPQHLSNEQKDLLRQFAATEKAENFPKKRSFLDKIKGFFSDFAV

SEQ ID NO: 117937 - DNA, 1128 bp, Chromobacterium violaceum
  CDS (1)..(1128): transl_table=11
atgtcaaaaagagactactacgatgtgctcggcgtcaatcgcgacgcttccgacgacgacatcaagaaggcttaccgcaagctggcgatgaagtaccatccggaccgcaatccggacagcaaggaggccgaggacaagttcaaggaggtgaaggaagcctacgagatcctgtccgatagccagaagcgcggcgcctacgaccagttcggccacgcgggcgtggatccgcaggccggcatgggcggcggcggccagggcttcggcggcttcggcgatttcgccgacatcttcagcgacatcttcggcggcggccggggcggcagcggcggcgggcgttccaacgtctaccgcggcgccgacctgcgctacaacatggaaatcacgctggaagaggcggcgcgcggttgcgagaagcagatccgcatcccatcgcacgaatcctgctccacctgcaatggaaccggcgccaagccgggcacccagcccaagacctgcgccacttgcggcggccacggccaggtgcggatgagccagggctttttctcgatccagcagacctgcccgacctgccacggcacgggcaagcagatcaccgatccgtgcggcagctgccacggcgccggccagaagaagaccaccaagacgctgaacgtgaagattccggccggcgtcgacgagggcgaccgcatccgcctgggcggcgagggcgagccgggccagaacggcgggccggccggcgatctgtacgtggtcacccatatcaagcagcacgcggtgttccagcgcgacggcatggacctgcactgcgagatgccgatctccttctccaccgcggcgctgggcggagaagtggaaatcccgaccctggacggcatggccaaggtgaagatttcgccggaaacccagagcggacgggtctaccgcctgcgcggcaagggcgtgaaggcggtgcgcggcgccgagtacggcgatctgcactgccacgtggtggtggaaaccccggtcaagctgaccgagcgccagaaagagctgctgcgcgagttcgaggcgatcagccagggcgatgtggccacccacaatccgcgttccaagtccttcatggacaagctgcgcgatttcttcgaataa

SEQ ID NO: 117938 - protein, 375 aa, Chromobacterium violaceum
MSKRDYYDVLGVNRDASDDDIKKAYRKLAMKYHPDRNPDSKEAEDKFKEVKEAYEILSDSQKRGAYDQFGHAGVDPQAGMGGGGQGFGGFGDFADIFSDIFGGGRGGSGGGRSNVYRGADLRYNMEITLEEAARGCEKQIRIPSHESCSTCNGTGAKPGTQPKTCATCGGHGQVRMSQGFFSIQQTCPTCHGTGKQITDPCGSCHGAGQKKTTKTLNVKIPAGVDEGDRIRLGGEGEPGQNGGPAGDLYVVTHIKQHAVFQRDGMDLHCEMPISFSTAALGGEVEIPTLDGMAKVKISPETQSGRVYRLRGKGVKAVRGAEYGDLHCHVVVETPVKLTERQKELLREFEAISQGDVATHNPRSKSFMDKLRDFFE

SEQ ID NO: 117939 - DNA, 1125 bp, Clostridium acetobutylicum; identical to SEQ ID NO: 64003
  CDS (1)..(1125): transl_table=11

SEQ ID NO: 117940 - protein, 374 aa, Clostridium acetobutylicum; identical to SEQ ID NO: 64004

SEQ ID NO: 117941 - DNA, 1128 bp, Clostridium tetani
  CDS (1)..(1128): transl_table=11
atgcccaaaaaggacttttatgaggttttaggcgttgaaaagggagcaaacgatgcggaaataaagaaagcatttagaaaattagctttaaaatatcatccagataaaaatgctggaaataaagaagcagaagaaagattcaaggaaataaatgaagcttatcaagtattgtcagatccacaaaagagagctcaatatgatcaatttggaactgcagactttaatggtgggggagctggtttttcaggatttgaagactttgatttaggagatatatttgaatcctttttcggaggtggatttggaggttttggtggaagttctagaagaagaaatggaccacaaaaaggaccagatgttcaatattctataaatctaacctttaatgaagctgtttttggagtagagaaggaagtaagtataactaaaagtgaaacttgtgaaacctgtactggaacaggagcaaaaccgggaactaactcaaaaacttgtcctaaatgtaatggatcaggacaaattaaagttcaaagaaatactgcactaggtagttttgtaagtgtaaatacttgtgatatgtgcggaggtaaaggaactataatatctgatccatgtagtgattgtaaaggaaaaggtacagttagaaaacaaaaaaagataaaggtaaatataccagcaggtgtagacacaggcaatgtaatacctataagaggacaaggtgaagctggagtaaatggaggtccacctggagatttatatatatctgtaagagtaatgccagacccgttctttaaaagaagaggagatgacatatatatagatcagcatataagttttgcaaaggctagcttaggaacagaattaaaagttaaaactatagatggagaagttaaatacgatataccatcaggaactcaaccaggaactgtatttagattaaaaggaaaaggagtgccacatgttaatggaagaggtcgaggagatcaatatgtaaacataatagtggatattcctaagtctttaaatcaaaaacaaaaagaagcactattcgcctatatggaagcaagtggagaaatacaatcttcagaaaaagaaggtttttttgataaaataaagaaaaactttaaataa

SEQ ID NO: 117942 - protein, 375 aa, Clostridium tetani
MPKKDFYEVLGVEKGANDAEIKKAFRKLALKYHPDKNAGNKEAEERFKEINEAYQVLSDPQKRAQYDQFGTADFNGGGAGFSGFEDFDLGDIFESFFGGGFGGFGGSSRRRNGPQKGPDVQYSINLTFNEAVFGVEKEVSITKSETCETCTGTGAKPGTNSKTCPKCNGSGQIKVQRNTALGSFVSVNTCDMCGGKGTIISDPCSDCKGKGTVRKQKKIKVNIPAGVDTGNVIPIRGQGEAGVNGGPPGDLYISVRVMPDPFFKRRGDDIYIDQHISFAKASLGTELKVKTIDGEVKYDIPSGTQPGTVFRLKGKGVPHVNGRGRGDQYVNIIVDIPKSLNQKQKEALFAYMEASGEIQSSEKEGFFDKIKKNFK

SEQ ID NO: 117943 - DNA, 1140 bp, Colwellia maris
  CDS (1)..(1140): transl_table=11
atgtcaaaacgtgattattatgaaacattagaggttagccaagacgcctctgagaaagaaattaaaaaagcctataaaaaattagcaatgaagtatcacccagatcgtacacaaggtgataagtctaaagaggaaacgtttaaagaagttaaagaggcttatgaaatcctcaatgacgaccaaaaacgtgctgcttacgaccaatatggtcatgctgcttttgaacagggtggtcacggtggtggcggtggcggccatggcggcggatttggtcaagacttcggcgatatcttcggtgatatttttggcggcggcggtggcggcggtcgtggacgtcagcgtcagcaacgtggttcagatttacgttataacgtagagctatcacttgaagatgccgttaaaggcaaaagtttagaaattaaagtacctacctatgtaagttgtgagccttgtgatggctcaggtgctaaaaaaggcacttcggctaaaacctgtagtacttgtcatggtcatggccaagtgcaaatgcgccaaggcttatttgccgtacaacaaacttgtcctacttgtagtggtaaaggtaaagtaattgccgataagtgtacatcatgtcgtggtcaaggccgtgttgaaaaaactaaaacgttgtcagttaaaattcctgcgggcgttgatacaggcgatagaattcgtttatcaggtgaaggtgaagcaggcgagcatggtgcaccagcaggtgatttatatgtacaagtaaatgtacgagatcacgacatttttgtgcgtgatgaaaaccatttatattgtgaagtacctattagttttgttaccgcttctttaggtggtgaaattgaagtaccaacacttggcggtaaagttaagctaaaagtgcctaaagaaacacaaacaggtaaaatgttccgcttacgtggtaaaggcgttaaatctgtgcgtagtacttctaccggtgatttaatgtgtaaagtagttattgaaacaccggttaatttatctggtgatcaagctgacctgttacgtcaactagaagaaaaaatggcaagtagcagcaagaaacatagccctaaagaaactggtttttttgatggtgttaaaaagttttttgacgatctgaaaagctag

SEQ ID NO: 117944 - protein, 379 aa, Colwellia maris
MSKRDYYETLEVSQDASEKEIKKAYKKLAMKYHPDRTQGDKSKEETFKEVKEAYEILNDDQKRAAYDQYGHAAFEQGGHGGGGGGHGGGFGQDFGDIFGDIFGGGGGGGRGRQRQQRGSDLRYNVELSLEDAVKGKSLEIKVPTYVSCEPCDGSGAKKGTSAKTCSTCHGHGQVQMRQGLFAVQQTCPTCSGKGKVIADKCTSCRGQGRVEKTKTLSVKIPAGVDTGDRIRLSGEGEAGEHGAPAGDLYVQVNVRDHDIFVRDENHLYCEVPISFVTASLGGEIEVPTLGGKVKLKVPKETQTGKMFRLRGKGVKSVRSTSTGDLMCKVVIETPVNLSGDQADLLRQLEEKMASSSKKHSPKETGFFDGVKKFFDDLKS

SEQ ID NO: 117945 - DNA, 1125 bp, Coxiella burnetii; identical to SEQ ID NO: 64005
  CDS (1)..(1125): transl_table=11

SEQ ID NO: 117946 - protein, 374 aa, Coxiella burnetii; identical to SEQ ID NO: 64006

SEQ ID NO: 117947 - DNA, 1131 bp, Desulfovibrio vulgaris
  CDS (1)..(1131): transl_table=11
atgagccagagagattactacgaagttctcggtgtcgcgcgcgacgcgtcagaggacgacatcaagcgcgcctaccggaagctggccctccagtaccaccccgaccgcaaccccgacgaccccgaggccgaacagaagttcaaagaggccgccgaggcgtacgacgtgttgcgtgacggtgagaaacgcgcccgttacgaccgcttcggtcatgcgggtgtgggcaacggcggcggcttcggtcagggcttctcgtccaacgaagacatcttcgcccacttcagcgacatcttcggcgacctgttcggcttcgccggggccgctggcgggcgttcgcgcggcccccggcctcaggccggttcagacctgcgctacaacctgaccatctcgttcaggcaggccgccaagggcgacgaagtcaccctgcggttgcccaagagcgtcccttgcgacgagtgcggcggcagcggtgcggcacccggcacccggcccgagacctgccgtcactgcggcggcgcgggccagattcgccagagtcagggtttcttccagattgccatgccctgccccgtatgccgtggcgagggcaccgtcatcacctctccctgccccaagtgcaaaggttccgggcagacgcagcaggtcaaggaactttcggttcgcatccccgccggagtggacacgggcaaccgcctgcgtctgcgtggcgaaggcgaaccgggcatccatggcgggcctgcaggcgacctgtatgtcgtcatcagcgtcgaggacgacaagaccttccgccgtcaggggcaggaccttgtcgtcacccgcgagatttccttcgtacaggcgtcgctgggcgaccgcatagacgtgcccacgctcgacgatgacatcaccctcgacattcccgccggcacccagagtggcgaggtcttccgccttgtcgacaaggggctgccctacctcgggcacggccacaccggcgacctgcttgtcgagatccgcgtcgtgacccccacacggctcaccaagaagcaggaggaactcctgcgcgagttcgccctgctcgacgaggagaagccgctggagaaggtcaagaagatggcccgcaagataggcaaggccatgggcatggactga

SEQ ID NO: 117948 - protein, 376 aa, Desulfovibrio vulgaris
MSQRDYYEVLGVARDASEDDIKRAYRKLALQYHPDRNPDDPEAEQKFKEAAEAYDVLRDGEKRARYDRFGHAGVGNGGGFGQGFSSNEDIFAHFSDIFGDLFGFAGAAGGRSRGPRPQAGSDLRYNLTISFRQAAKGDEVTLRLPKSVPCDECGGSGAAPGTRPETCRHCGGAGQIRQSQGFFQIAMPCPVCRGEGTVITSPCPKCKGSGQTQQVKELSVRIPAGVDTGNRLRLRGEGEPGIHGGPAGDLYVVISVEDDKTFRRQGQDLVVTREISFVQASLGDRIDVPTLDDDITLDIPAGTQSGEVFRLVDKGLPYLGHGHTGDLLVEIRVVTPTRLTKKQEELLREFALLDEEKPLEKVKKMARKIGKAMGMD

SEQ ID NO: 117949 - DNA, 1131 bp, Escherichia coli O157
  CDS (1)..(1131): transl_table=11
atggctaagcaagattattacgagattttaggcgtttccaaaacagcggaagagcgtgaaatcaaaaaggcctacaaacgcctggccatgaaataccacccggaccgtaaccagggtgacaaagaggccgaggcgaaatttaaagagatcaaggaagcttatgaagttctgaccgactcgcaaaaacgtgcggcatacgatcagtatggtcatgctgcgtttgagcaaggtggcatgggcggcggcggttttggcggcggcgcagacttcagcgatatttttggtgacgttttcggcgatatttttggcggcggacgtggtcgtcaacgtgcggcgcgcggtgctgatttacgctataacatggagctcaccctcgaagaagctgtacgtggcgtgaccaaagagatccgcattccgactctggaagagtgtgacgtttgccacggtagcggtgcaaaaccaggtacacagccgcagacctgtccgacctgtcatggttctggtcaggtgcagatgcgccagggtttctttgccgtgcagcagacctgtccacactgtcagggccgcggtacgctgatcaaagatccgtgcaacaaatgtcatggtcatggtcgtgttgagcgcagcaaaacgctgtccgttaaaatcccggcaggggtggacactggagaccgcatccgtcttgcgggcgaaggtgaagcgggtgaacacggcgcaccggcaggcgatctgtacgttcaggttcaggttaaacagcacccgattttcgagcgtgaaggcaacaacctgtattgcgaagtcccgatcaacttcgctatggcggcgctgggtggtgaaatcgaagtaccgacccttgatggtcgcgtcaaactgaaagtgcctggcgaaacccagaccggtaagctattccgtatgcgcggtaaaggcgtcaagtctgtccgcggtggcgcacagggtgatttgctgtgccgcgttgtcgtcgaaacaccggtaggcctgaacgagaagcagaaacagctgctgcaagagctgcaagaaagcttcggtggcccaaccggcgagcacaacagcccgcgctcaaagagcttctttgatggtgtgaagaagttttttgacgacctgacccgctaa

SEQ ID NO: 117950 - protein, 376 aa, Escherichia coli O157
MAKQDYYEILGVSKTAEEREIKKAYKRLAMKYHPDRNQGDKEAEAKFKEIKEAYEVLTDSQKRAAYDQYGHAAFEQGGMGGGGFGGGADFSDIFGDVFGDIFGGGRGRQRAARGADLRYNMELTLEEAVRGVTKEIRIPTLEECDVCHGSGAKPGTQPQTCPTCHGSGQVQMRQGFFAVQQTCPHCQGRGTLIKDPCNKCHGHGRVERSKTLSVKIPAGVDTGDRIRLAGEGEAGEHGAPAGDLYVQVQVKQHPIFEREGNNLYCEVPINFAMAALGGEIEVPTLDGRVKLKVPGETQTGKLFRMRGKGVKSVRGGAQGDLLCRVVVETPVGLNEKQKQLLQELQESFGGPTGEHNSPRSKSFFDGVKKFFDDLTR

SEQ ID NO: 117951 - DNA, 1149 bp, Ehrlichia ruminantium
  CDS (1)..(1149): transl_table=11
atgagcaaaagtgactattacgatctattaggtttaagtaaaaatgcaacacctgaagaaataaaaaaagcatacagaaaaatggcacttaagtatcatcctgataaaaatccaggtgataaagctgcagaagaaaaatttaaagaattatcagaagcttatgatgtactgatagataaggataaaagagcagcatatgatagatatggacacagtgcatttagtgatggaagtggaagaggaggatttgattttaatagtggattttctacagatttttctgatatatttaatgatctttttggaggaggatttaggggaggaagaagttcatctaaaagacaagatggtggtactgtaggatcagatctaagacttgatatagaaataacattggaggattcttttaacggtacaaaagttcctataaattacgttacacatgttaagtgttctagctgcagtggatcaggaagtgaaggatctgtaaaatctgtgcaatgtaatacatgtcatggtgctggtaacattaggacacaacagggtttctttacaatagaaaggacttgtcatgtatgtaacggagaaggagagataattaagaataagtgtaagaaatgtagtggaagtggtcgcgtaagagatgaagttaatttattagttacagttccaaagggaatagagagtggcgacaaaattagattaaatggcaagggagaagcaggatatagaggagcacaaagtggtgacttgtatgtataccctaacataaaaaaacacaagtttttcacacgtaatggagcagatctttattgtaatgttccaataaagatgattcttgctacgttaggaggacatatagaaatgccttctatagatggaacatggacaaaagttaaggttcctgaaggatcacaaaatggggataaattgagactaaaagaaaaaggaatgccagttattaattcctcaagaagaggagatatgtatatccaaataacggtagaaactcctataaacttaacaaaacaacaaaaagaacttcttaaaaagtttgatgaggaacccaatactgtggaatgtaacccgcaatctacaggtttttttcaaaaagtaaagagtttctggaatgatattagatcaagctag

SEQ ID NO: 117952 - protein, 382 aa, Ehrlichia ruminantium
MSKSDYYDLLGLSKNATPEEIKKAYRKMALKYHPDKNPGDKAAEEKFKELSEAYDVLIDKDKRAAYDRYGHSAFSDGSGRGGFDFNSGFSTDFSDIFNDLFGGGFRGGRSSSKRQDGGTVGSDLRLDIEITLEDSFNGTKVPINYVTHVKCSSCSGSGSEGSVKSVQCNTCHGAGNIRTQQGFFTIERTCHVCNGEGEIIKNKCKKCSGSGRVRDEVNLLVTVPKGIESGDKIRLNGKGEAGYRGAQSGDLYVYPNIKKHKFFTRNGADLYCNVPIKMILATLGGHIEMPSIDGTWTKVKVPEGSQNGDKLRLKEKGMPVINSSRRGDMYIQITVETPINLTKQQKELLKKFDEEPNTVECNPQSTGFFQKVKSFWNDIRSS

SEQ ID NO: 117953 - DNA, 1113 bp, Erysipelothrix rhusiopathiae; identical to SEQ ID NO: 64011
  CDS (1)..(1113): transl_table=11

SEQ ID NO: 117954 - protein, 370 aa, Erysipelothrix rhusiopathiae; identical to SEQ ID NO: 64012

SEQ ID NO: 117955 - DNA, 1125 bp, Francisella tularensis subsp; identical to SEQ ID NO: 64013
  CDS (1)..(1125): transl_table=11

SEQ ID NO: 117956 - protein, 374 aa, Francisella tularensis subsp; identical to SEQ ID NO: 64014

SEQ ID NO: 117957 - DNA, 1116 bp, Francisella tularensis; identical to SEQ ID NO: 64015
  CDS (1)..(1116): transl_table=11

SEQ ID NO: 117958 - protein, 371 aa, Francisella tularensis; identical to SEQ ID NO: 64016

SEQ ID NO: 117959 - DNA, 1149 bp, Geobacillus kaustophilus
  CDS (1)..(1149): transl_table=11
atggcgaagcgcgattattacgagattctcggcgtcagcaaaaacgcgacgaaagacgagatcaaaaaagcgtatcgaaagctttcgaagcagtatcatccagatgtgaacaaagccccggacgccgcggagaagtttaaggaaattaaagaggcgtacgaagtgttaagcgatgatgaaaagcgggcccgctacgaccgctttggccatgccgacccgaacgaaacgtttggcggcggcggattccaaggcggagggtttgatttcggcggctttagcggctttggcggttttgaagatatttttgaaacgtttttcggcgccggtccgcgcaggcgggcgagcggtccgcgcaaaggcgcggatgtcgagtatatgatgacgcttacgtttgaagaagcggcgttcggaaaagaaacggaaattgaaattccgcgggaagagacgtgcgacacgtgccagggcagcggagcgaaaccgggcacaagcccgacgtcttgtccgcattgccacggcagcgggcaagtgacaagcgaacaagcgacgccatttggccgcatcgtcaaccgccggacatgccccgtctgcggtggcacgggccggtacattccggagaaatgcccaacgtgcggcggcacgggacgcgtcaaacggcgaaaaaaaattcacgtcaaaattccagccggcgtcgacgacggccagcagctgcgcgtcgccggccaaggggagccaggggtcaatggcgggcccccgggcgatttgtacatcatcttccgagtcgaaccacatgagtttttcaaacgcgacggcgacgatatttattgcgaagtgccgttgtcgttcgcccaggccgcgctcggcgatgagatcgaagtgccgacgctccatggccatgtgaagctgaaaatcccggccggcacgcaaacgggcacgcgcttccgcttgaagggaaaaggggtgccgaacgtacggggctacggccaaggcgatcagcacgtcattgtccgcgttgtgacgccgacgaagctgaccgaaaagcaaaagcagctgctgcgcgagtttgaacggctcggcggagacacgatgcacgacgggccgcacggccgtttttttgagaaagtcaaaaaggcgtttaaaggagaagcgtaa

SEQ ID NO: 117960 - protein, 382 aa, Geobacillus kaustophilus
MAKRDYYEILGVSKNATKDEIKKAYRKLSKQYHPDVNKAPDAAEKFKEIKEAYEVLSDDEKRARYDRFGHADPNETFGGGGFQGGGFDFGGFSGFGGFEDIFETFFGAGPRRRASGPRKGADVEYMMTLTFEEAAFGKETEIEIPREETCDTCQGSGAKPGTSPTSCPHCHGSGQVTSEQATPFGRIVNRRTCPVCGGTGRYIPEKCPTCGGTGRVKRRKKIHVKIPAGVDDGQQLRVAGQGEPGVNGGPPGDLYIIFRVEPHEFFKRDGDDIYCEVPLSFAQAALGDEIEVPTLHGHVKLKIPAGTQTGTRFRLKGKGVPNVRGYGQGDQHVIVRVVTPTKLTEKQKQLLREFERLGGDTMHDGPHGRFFEKVKKAFKGEA

SEQ ID NO: 117961 - DNA, 1122 bp, Geobacter sulfurreducens
  CDS (1)..(1122): transl_table=11
ttggcggcagacaaacgcgactactatgaggttctgggcgtccacaagaatgcctcggatacggaaataaagaaggcctttcgcaaacttgccatccagtaccatccggacaagaatcccgatgacaaggaagcggaggagaagttcaaggagattaccgaggcctatgaggttctttcggatcctcagaagcgggcccagtacgatcagttcggccatgccggggtcggggcggggggcttttcgggcggcggcttcggcggttttggcgccggcaccccctttggcgatattttcggtgatatcttcggcgacatcttcggcggccgccctcgcggcagtcgcggccgccgcggcgacgacctgcagtacaacatggagctttccttcgaggaggctgcgttcggcgcggagaaagaaattcaggtcccctacggcaagcgctgcggcgattgcggaggcagtggcgccaagccggggaccgagccgaaggtctgccctacctgccgcggcgccggccaggtgcgtttccagcagggattcttcagtgtcagcaagacctgcaaccactgcaacggtgaaggacgcgtggtggagaacccctgtacttcatgtcgcggcagcggcatgatccgggacaccaagaccctgtcggtcaaggtcccggccggggtcgaaaccgggacgaggctcaagctctccggtgaaggggggcagggaataaagggcggtggcaacggcgatctctatgtggctattgcagtcagggagcatcccatttttacccgcgaggataacgacgttctctgcgagatccccgtcagtttcgtgcaggcagccctcggatgcgagatcgaagtaccgactctcgacggcaaggtttccatgaagattcccgaggggacccagtcgggacgcatcttcaggctgcgtggcaagggggttccccagctccagggctacgggcgcggggaccagcttgtcatcatcaaggtggagacaccgtcaaatctcaataagcgccagcgggaacttctggaggagttcgcccgcatcagcggcgaggacgtccatcccatgaaaaagagctttttcgataaagtgatggactttatcagctga

SEQ ID NO: 117962 - protein, 373 aa, Geobacter sulfurreducens
MAADKRDYYEVLGVHKNASDTEIKKAFRKLAIQYHPDKNPDDKEAEEKFKEITEAYEVLSDPQKRAQYDQFGHAGVGAGGFSGGGFGGFGAGTPFGDIFGDIFGDIFGGRPRGSRGRRGDDLQYNMELSFEEAAFGAEKEIQVPYGKRCGDCGGSGAKPGTEPKVCPTCRGAGQVRFQQGFFSVSKTCNHCNGEGRVVENPCTSCRGSGMIRDTKTLSVKVPAGVETGTRLKLSGEGGQGIKGGGNGDLYVAIAVREHPIFTREDNDVLCEIPVSFVQAALGCEIEVPTLDGKVSMKIPEGTQSGRIFRLRGKGVPQLQGYGRGDQLVIIKVETPSNLNKRQRELLEEFARISGEDVHPMKKSFFDKVMDFIS

SEQ ID NO: 117963 - DNA, 1152 bp, Gloeobacter violaceus
  CDS (1)..(1152): transl_table=11
atggccagagatttatacgaaaccctcaacgtcagccgcgacgcctccaaagaggacatcaagcgggcctaccgcaagctggcccgccagtaccacccggatgtcaacaaagacgccggggcagaggacacgttcaaagagctctcgcgcgcctacgaagtgctctccgacgacgatcagcgggcgcgctacgaccgcttcggagaggccggtctcaacggcggcgtgggcggcggcccgggggattttgcaggggcggcgggcttcggcgacatcagcgatattttcgagagtttctttggcggcttcgccggggcgggtaccggcggccggcgcgccacccggccgggcggacccacccgcggcgacgatctgcgctacgacatggtgctcgaatttcaggaggccatcttcggcggcgaaaaagagatcaccatcaaccacctgatcacctgcgagacctgccgcggctccggctccaaacccggctccggtcctatgacttgccgcaactgcggcggccagggccagatccgccaggcgcggcggaccccctttgggctgtttacccaggtggcggcctgccccaactgccagggcaccggcgaggtgatcgaaagcccctgcccaacctgcagcgggcgcgggcgcaaccagaagcagaccaccatcaagatcaccatccccgccggggtggacgccggatcgcgcctgcgggtgcagggcgagggcgacgccgggatgcgcggtggcccgccgggggacctgttcatctacgtgagcgtgcgcaaccacccggtcttccgtcgcgaagggcaagacatctattcgatcgccgaaatttcttatctgcaagcgattttgggctcgcagatgtcggtggagaccgtcgacggtccgcagacggtggtggtgccccccggtacgcagcccgagacggtactcaccctcgacggcaaaggcgtgccgcgcatcggcaatcccacccgccgcggcaaccactacctgcagctcaaggtggtcattcccaccaaactgggcgccgaggagcgcgaactgctcaccaagctcgccaaggcccgcggcgaaaaagtctccaaaaaagaggggctcgaaggcctgatcgacagcatcggcaacctatttcactaa

SEQ ID NO: 117964 - protein, 383 aa, Gloeobacter violaceus
MARDLYETLNVSRDASKEDIKRAYRKLARQYHPDVNKDAGAEDTFKELSRAYEVLSDDDQRARYDRFGEAGLNGGVGGGPGDFAGAAGFGDISDIFESFFGGFAGAGTGGRRATRPGGPTRGDDLRYDMVLEFQEAIFGGEKEITINHLITCETCRGSGSKPGSGPMTCRNCGGQGQIRQARRTPFGLFTQVAACPNCQGTGEVIESPCPTCSGRGRNQKQTTIKITIPAGVDAGSRLRVQGEGDAGMRGGPPGDLFIYVSVRNHPVFRREGQDIYSIAEISYLQAILGSQMSVETVDGPQTVVVPPGTQPETVLTLDGKGVPRIGNPTRRGNHYLQLKVVIPTKLGAEERELLTKLAKARGEKVSKKEGLEGLIDSIGNLFH

SEQ ID NO: 117965 - DNA, 1134 bp, Haemophilus ducreyi; identical to SEQ ID NO: 64017
  CDS (1)..(1134): transl_table=11

SEQ ID NO: 117966 - protein, 377 aa, Haemophilus ducreyi; identical to SEQ ID NO: 64018

SEQ ID NO: 117967 - DNA, 1155 bp, Haloarcula marismortui
  CDS (1)..(1155): transl_table=11
atgagtcaggatttctacgagatactgggtgtctctcgagacgcctccgaagacgagattcaggaggcctatcgggagaaagcccgggaataccacccggacgtgagcgacgaccccgacgccgaagagaagttcaagcaggccaagaaggccaaagaggtcctcaccgacgaggagaagcgccagatgtacgaccagatgggtcacgagcgcttcgaacaggccgagaagcgcggcggcgctggtggtggcggcggccgcggtgggatgggtggagacccgttcggtggcggcgctggcggcttcgatatgcaggatatcttcgaccagttcttcgggggcggcggccgcggcggacgcggtggcagccgacggcggcaggggcaggacctccagacgcgactggaaatcgacctcgaagaggcctacaacggcgcgacgaagcaactgaacgtcacccggccggaagcctgcgacgactgtgacggggccgggcatccgccgggagccgactcggagacctgtccggagtgtaacggccagggccagacgacgcaggtccagcagacaccgatggggcgggtgcagcagcggacgacctgccgccggtgtgacggcgaggggacgctgtacgacgaaacgtgttcgacctgccggggcaacggcgttgtccagaacgatgcgagcctcgaagtcgagattccgtccggcatcgccgacgggcagacactccggatggagcgcgagggcgcgcccggggaaaacggcggcccgaacggcgacctgctcatcgaggtacaggtccgcgaccacccggacttcgagcgcgacggcgacagcttgcaacaccagcaggccatctcgttcccgcaagcagtgttcggtgacaccatcaccgtcccgacgctggacggcgaggtggaagtcgacgtgccaagcggcacccagagcggcgaagtgttccgactggagggcaaggggatgccgcggctccgccgccgcggccacggcgacctctacgtgcaggtacaggtcgtcacacccgacagcctcaacgccgaacagaaggaggccctcgaacagttcgcggaggccggcggcgaagaggtcgatgtcgatgaaggcttcttcgagaaactgaagaactcgctgtag

SEQ ID NO: 117968 - protein, 384 aa, Haloarcula marismortui
MSQDFYEILGVSRDASEDEIQEAYREKAREYHPDVSDDPDAEEKFKQAKKAKEVLTDEEKRQMYDQMGHERFEQAEKRGGAGGGGGRGGMGGDPFGGGAGGFDMQDIFDQFFGGGGRGGRGGSRRRQGQDLQTRLEIDLEEAYNGATKQLNVTRPEACDDCDGAGHPPGADSETCPECNGQGQTTQVQQTPMGRVQQRTTCRRCDGEGTLYDETCSTCRGNGVVQNDASLEVEIPSGIADGQTLRMEREGAPGENGGPNGDLLIEVQVRDHPDFERDGDSLQHQQAISFPQAVFGDTITVPTLDGEVEVDVPSGTQSGEVFRLEGKGMPRLRRRGHGDLYVQVQVVTPDSLNAEQKEALEQFAEAGGEEVDVDEGFFEKLKNSL

SEQ ID NO: 117969 - DNA, 1155 bp, Halobacterium mediterranei; identical to SEQ ID NO: 64019
  CDS (1)..(1155): transl_table=11

SEQ ID NO: 117970 - protein, 384 aa, Halobacterium mediterranei; identical to SEQ ID NO: 64020

SEQ ID NO: 117971 - DNA, 1176 bp, Halobacterium salinarium
  CDS (1)..(1176): transl_table=11
atgagtgaggacttctacgacgtcctgggtgtgagccgggacgcgaccgaggacgagatcatgcaggcgtaccgggaccaggtttcggagtaccatcccgacgtcagcgacgacccggacgccgaggagaagttcaagaagattcagaaagccaaggacgtcctcaccgacgaggagacacgccagcagtacgaccagctcggccacgagcgcttcgaggaggccgagaagcgcggcgcaaccgggaacggtggcggcggcgctggcgggatgggcggtgcgggtggcccgttcggtggcggcatgggtggtggtgccggcggtggtatgggcgacatcttcgagcagttcttcggcggcgctggcggtggcggcggtcgcgggcggtccggcccggagcagggccgcgacctccggacggacctcacggtcacgctgtcggaagcctaccggggggtgtccaagcaggtgaccgtgcggcggcccgagagctgtgcggactgtgggggaagcggctacccggaggacgccgacgtgcgcacgtgcccgcagtgtgacgggcagggcgtcgtgacgcaggtgcgccagacgccgctgggccgcgtccagcagcgccaggagtgttcgcgctgtggcggcgagggggagttgcactcggagacgtgttcgacctgtggcgggcagggccagacccgagagcgcgcgacgctcacggtggacatcccggagggcatccggaccgggcagacgctgcgcatggacggcgagggcgcgccgggcgaaccgggcgcgcccaacggtgacctgctcgtcgacgtcaccgtcgaggagcatcccgacttcgagcgcgacggcgacgacctccatcaccgccacgccgtctcgttcccccaggcggtgttcggcgcggagatcgaggtaccgacgctcgacggcgctgcgacgttcgatctggacgccggcacgcaaagcggggagacgttccggctcaagggcaaggggatgccgcggctgcgccgccgcggcaacggggacctctacgtcaccgttcaggtggtcacgccggagtccctcagcgacgagcaacgcgacgccctcgaacagttcgcggaggcgggcggcgaggagatcgacgtcgagcaggggttcttcgagaagctcaaaaactccttttag

SEQ ID NO: 117972 - protein, 391 aa, Halobacterium salinarium
MSEDFYDVLGVSRDATEDEIMQAYRDQVSEYHPDVSDDPDAEEKFKKIQKAKDVLTDEETRQQYDQLGHERFEEAEKRGATGNGGGGAGGMGGAGGPFGGGMGGGAGGGMGDIFEQFFGGAGGGGGRGRSGPEQGRDLRTDLTVTLSEAYRGVSKQVTVRRPESCADCGGSGYPEDADVRTCPQCDGQGVVTQVRQTPLGRVQQRQECSRCGGEGELHSETCSTCGGQGQTRERATLTVDIPEGIRTGQTLRMDGEGAPGEPGAPNGDLLVDVTVEEHPDFERDGDDLHHRHAVSFPQAVFGAEIEVPTLDGAATFDLDAGTQSGETFRLKGKGMPRLRRRGNGDLYVTVQVVTPESLSDEQRDALEQFAEAGGEEIDVEQGFFEKLKNSF

SEQ ID NO: 117973 - DNA, 1158 bp, Helicobacter hepaticus
  CDS (1)..(1158): transl_table=11
ttggagacatttgattattatgaaatccttgaaattacgcgcacaagtgataaggagacaatcaaaaaagcttatcgtaaaatggcacttaaatatcaccctgatagaaaccctgatgataaagatgcagaagagcagtttaaacgcgtgaatgaagcctatgaggtgctaagcgatgattctaagcgccaaatttatgataaatatggcaaggaaggcttgcaaaattcaggttttagtggttttagcggtcgcgattttagtgatatttttggggatttgggttcaatttttgaatctgcattcggtgccaactttggattctcaactcaaaaacgaggcgggggtaaatataatttagatgagattgtgggattagagttaagctttacagaagccgtatttgggtgcaaaaaagaaattcataatagttttaaaattgcgtgtagtgattgtaaaggcacaggtgctaaaggtggcaaactcaatacttgcaaggattgtggtggtaagggacaggtatatatgcgacaaggatttatgacttttgcgcaaacttgtcctacttgcaagggtgaggggcaaagtgcaagcgagaaatgctccaaatgtaagggtagcgggtttgagataagtgaggagagctttgaagtgagtatccctgaaggcattgatgatgggaatagaatccgcattggtgggcgaggaaatgctgataagaatggtagcaggggagatttatatattgccgtgagtgttgcagaagatgaaaattttgtgcgtgatggagagaatgtttatattgaagtgccggtattttttacttcaatcgtgcttggcacaacgcttaagattccatctttgcgtggagaattagagcttaaaatcccgccaaatacacgggataaagagcaatttgtttttgataatgaggggataaaagatgtcaatagcgcatacagagggaagtttgtcgcacagattaaaatcacttatcctccaaagcttaatgccgagcaaagagcgcttactgaaaagcttcaagaaagctttggcattgagagcgagccttataagaatgtttttgaagagtgctttacaaaagtcaagcaatggttacataagcatagtaaaaatgacaaagacactacaaaatag

SEQ ID NO: 117974 - protein, 385 aa, Helicobacter hepaticus
METFDYYEILEITRTSDKETIKKAYRKMALKYHPDRNPDDKDAEEQFKRVNEAYEVLSDDSKRQIYDKYGKEGLQNSGFSGFSGRDFSDIFGDLGSIFESAFGANFGFSTQKRGGGKYNLDEIVGLELSFTEAVFGCKKEIHNSFKIACSDCKGTGAKGGKLNTCKDCGGKGQVYMRQGFMTFAQTCPTCKGEGQSASEKCSKCKGSGFEISEESFEVSIPEGIDDGNRIRIGGRGNADKNGSRGDLYIAVSVAEDENFVRDGENVYIEVPVFFTSIVLGTTLKIPSLRGELELKIPPNTRDKEQFVFDNEGIKDVNSAYRGKFVAQIKITYPPKLNAEQRALTEKLQESFGIESEPYKNVFEECFTKVKQWLHKHSKNDKDTTK

SEQ ID NO: 117975 - DNA, 1110 bp, Helicobacter pylori J99
  CDS (1)..(1110): transl_table=11
gtggaattgagttattatgaaattttagaagtggaaaaacacagcaaccaagagaccattaaaaagtcttacagaaagttagctttaaaataccacccggaccgaaacgccggcgataaagaagccgaagaaaaattcaagctcatcaatgaagcttatggggtgctaggcgatgaaaagaagcgggccttatacgacaggtatggcaaaaaaggcttaaaccaagccggcacgagccaaagcgatttttctgatttttttgaagatttaggctcgttttttgaggacgcttttggctttggcgctagagggagtaaaaggcaaaaaagctctatcgcgccggattatttgcaaatgattgaattgagtttcaaagaagcggtttttggctgtaaaaaaaccattaaagcccaataccagagcgtctgtgaaagttgcgatggcacgggcgctaaagataaagccctagagaattgcaaacaatgcaacgggcaagggcaagtgtttatgcgtcaaggttttatgagttttgcgcaaacttgcggggcgtgtcaaggcaagggtaaaatcattaaaaccccatgccaagcgtgtaagggtaaaacctacattcttaaagatgaagaaattgatgcgataatccctgagggcattgatgatcaaaaccgcatggtgcttaaaaataagggcaatgaatacgagaaggggaaaagaggggatttgtatttagaagcgcgagtcaaagaagatgagcatttcaagcgcgaaggctgtgatctattcattaaagcgccggtgtttttcaccactatcgctttagggcatacgattaaagtgccatctttaagaggagacgaattggaattaaaaatccctagaaacgccaaagacaggcaagcttttgcgtttagaaacgagggcgtgaaacaccctgaaagctcttatagggggagtttgatcgtggagttgcaagtgatttatcctaaaagtttgaataaagagcagcaagggttattggaaaaattgcatgcgagttttggctatgaaggcgaaccgcataaaagcgttttagaaacttgcgtttctaaaattaaagactggtttaaataa

SEQ ID NO: 117976 - protein, 369 aa, Helicobacter pylori J99
MELSYYEILEVEKHSNQETIKKSYRKLALKYHPDRNAGDKEAEEKFKLINEAYGVLGDEKKRALYDRYGKKGLNQAGTSQSDFSDFFEDLGSFFEDAFGFGARGSKRQKSSIAPDYLQMIELSFKEAVFGCKKTIKAQYQSVCESCDGTGAKDKALENCKQCNGQGQVFMRQGFMSFAQTCGACQGKGKIIKTPCQACKGKTYILKDEEIDAIIPEGIDDQNRMVLKNKGNEYEKGKRGDLYLEARVKEDEHFKREGCDLFIKAPVFFTTIALGHTIKVPSLRGDELELKIPRNAKDRQAFAFRNEGVKHPESSYRGSLIVELQVIYPKSLNKEQQGLLEKLHASFGYEGEPHKSVLETCVSKIKDWFK

SEQ ID NO: 117977 - DNA, 1110 bp, Helicobacter pylori
  CDS (1)..(1110): transl_table=11
gtggaattgagttattatgaaattttagaagtggaaaaacacagcaaccaagagaccattaaaaagtcttacagaaagctggctttaaaataccacccagacagaaacgccggcgataaagaagccgaagaaaaattcaagctcatcaatgaagcctatggggtgttaagcgatgaaaagaagcgggccttatacgacaggtatggtaaaaaaggcttaaaccaagccggcgcaagccaaggcgatttttctgatttttttgaagatttaggctcgttttttgaagacgcttttgggtttggcgctagggggagtaaaaggcaaaaaagctctatcgcaccggattatttgcaaacccttgaattgagtttcaaagaagcggtttttggctgtaaaaaaaccattaaagtccaataccagagcgtttgtgaaagttgcgatggcacgggcgctaaagacaaagccctagagacttgcaagcaatgcaatgggcaggggcaggtgtttatgcgtcaaggttttatgagttttgcgcaaacttgtggggcgtgtcaaggcaagggcaagatcgttaaaaccccatgccaagcgtgcaagggtaaaacctatatccttaaagatgaagaaattgatgcgataatccctgagggcattgatgatcaaaaccgcatggtgcttaaaaataaaggcaatgaatacgagaagggaaaaagaggggatttgtatttagaagcgcaagtcaaagaagatgagcatttcaagcgcgaaggctgcgatttattcattaaagcgccggtgtttttcaccactatcgctttagggcatacgattaaagtgccgtctttaaaaggggacgaactggaattaaaaatccctagaaacgccagagacaagcagacttttgcgtttagaaacgagggcgtgaaacaccctgaaagctcttatagagggagtttgatcgtggaattgcaagtgatttaccctaaaagtttgaataaagagcagcaagaattgttggaaaaattgcatgcgagttttggctatgagggcgagccgcataaaagcgttttagaaacctgtatttctaaaattaaagactggttcaaataa

SEQ ID NO: 117978 - protein, 369 aa, Helicobacter pylori
MELSYYEILEVEKHSNQETIKKSYRKLALKYHPDRNAGDKEAEEKFKLINEAYGVLSDEKKRALYDRYGKKGLNQAGASQGDFSDFFEDLGSFFEDAFGFGARGSKRQKSSIAPDYLQTLELSFKEAVFGCKKTIKVQYQSVCESCDGTGAKDKALETCKQCNGQGQVFMRQGFMSFAQTCGACQGKGKIVKTPCQACKGKTYILKDEEIDAIIPEGIDDQNRMVLKNKGNEYEKGKRGDLYLEAQVKEDEHFKREGCDLFIKAPVFFTTIALGHTIKVPSLKGDELELKIPRNARDKQTFAFRNEGVKHPESSYRGSLIVELQVIYPKSLNKEQQELLEKLHASFGYEGEPHKSVLETCISKIKDWFK

SEQ ID NO: 117979 - DNA, 1071 bp, Hydrogenobacter thermophilus
  CDS (1)..(1071): transl_table=11
atgcccattaaagactactatcagatattgggtgtgagcaaagatgcaacagctgaggagataaagaaggcttacagaaggcttgccaaagagtaccatcccgatataagtgctgacgaaaatgcttctgagaagttcaaggagataaatgaggcttaccacattctttccgacgaagaaagaagaaaggagtatgacaggatattaaaaagcggagatgaaaaaagctacagggactttatggaatacatacaggactttttggaaagcatatggcagggtatgaggagatcgcccaagcccaaaaagggtggtgatgtaaggcttaagctggagcttacccttgaagaggctgcctttggatgtgagaaagatatagaatacgaaaggtggatagactgtcccacctgcgagggtaaaggttatgtagggaagatggaaaaggttacttgtcatgcctgtgagggcactggaaggagggtaagcggtatatttagctttcccagaccttgctcagtgtgtaagggaagaggatttatcataaagaatcagtgccctgcttgttcgggaaggggaagagtggcaatgcatagtcttctgagggtgaatgtccccccaggcaccgatgagggtgatgttctcaaagtaccaggcaaaggacacacaggtgagagaggtggtgaagctggagatctctacctgagggtaagtttaaaacctcaccccatctttaagaaggtgggaaaggacctttacatggaagcatttatatccttccccttagccgtcttaggtggtacgactaagataaaaacactggaaggtagttatcaagaagtttttttacagccaggtacagagtgcggttctacaaagaggctacaaggtctgggatacccaatcgcggggggaagaggagaccttattattaccttcaggatagaggttcctaaaaatgtaaattccaacataagagcgcttattgaaaaactcgccaaagagctgggcgaggagggcatagagtatcaaagtggtgtaatcaccaagatattaagccttctcaagctttag

SEQ ID NO: 117980 - protein, 356 aa, Hydrogenobacter thermophilus
MPIKDYYQILGVSKDATAEEIKKAYRRLAKEYHPDISADENASEKFKEINEAYHILSDEERRKEYDRILKSGDEKSYRDFMEYIQDFLESIWQGMRRSPKPKKGGDVRLKLELTLEEAAFGCEKDIEYERWIDCPTCEGKGYVGKMEKVTCHACEGTGRRVSGIFSFPRPCSVCKGRGFIIKNQCPACSGRGRVAMHSLLRVNVPPGTDEGDVLKVPGKGHTGERGGEAGDLYLRVSLKPHPIFKKVGKDLYMEAFISFPLAVLGGTTKIKTLEGSYQEVFLQPGTECGSTKRLQGLGYPIAGGRGDLIITFRIEVPKNVNSNIRALIEKLAKELGEEGIEYQSGVITKILSLLKL

SEQ ID NO: 117981 - DNA, 1155 bp, Idiomarina loihiensis; identical to SEQ ID NO: 64021
  CDS (1)..(1155): transl_table=11

SEQ ID NO: 117982 - protein, 384 aa, Idiomarina loihiensis; identical to SEQ ID NO: 64022

SEQ ID NO: 117983 - DNA, 1155 bp, Lactobacillus acidophilus
  CDS (1)..(1155): transl_table=11
atggcacaagaagattactacaaagtacttggcgtagatcgtgacgccagtgatcaagaaattagtaaagcatatcgtaagttagcgaaaaaatatcacccagacttgaatcatgaacctggtgcagaagaaaaatacaagcaagtaaacgaagcttatgaagttttacacgataagcaaaagcgtgcacagtatgatcaatttggctctgctggtgtcaatggtcaaggtggctttggtggtgcaggtcaaggattcgggggagctgggtttgatacctctggttttggcgactttggtgacatttttggtgatatctttggtcaaggtgctcgtcagcaaagggtagatccaacgcaaccacaacgtggtcaagatttggattatacattgactattgactttatggatgcaattaatggtaaaaagacgcaagttagctatactcgtgatgaaacttgtgaaacctgtggcggtaatggttgtgaaaaaggtactcatcctattacatgtgataaatgtcatggtactggtgtaatgactgttacccaacaatcaatgctaggtatgattcgtcgccaaaccacttgtgacaagtgtaatggacgtggtgtaattattgaacatccatgtaagacttgcggtggtaaaggtaccgttgaacgcaagaataccattgaagttgatattccagcgggtattgacaatggtcaacaacttcgttatcaaggtcaaggtgaagctggacgtaatggtggcccatacggtgatttgtatattagctatcgcattaagccttctaaggactttgaacgtcgtggccaaaatatttatacagaagtaccaatttcatttgctcaagctactttaggtgatgagattactgttaaaacagttcacggggatgcaaaattaactattccagcaggtacgcaacctaacaagaaatttactcttcgtggtcaaggtgtaccttatcttcgcggcaatggtaatggtgatcaaattactacagttaatattgttattccaaaacatattaatgataagcagaaagaagacttaactaactttgttcatgatggtggcggaaatattaccccacaagaaaaaggatttttcgaaagacttaaagacaaacttagtggtgaatag

SEQ ID NO: 117984 - protein, 384 aa, Lactobacillus acidophilus
MAQEDYYKVLGVDRDASDQEISKAYRKLAKKYHPDLNHEPGAEEKYKQVNEAYEVLHDKQKRAQYDQFGSAGVNGQGGFGGAGQGFGGAGFDTSGFGDFGDIFGDIFGQGARQQRVDPTQPQRGQDLDYTLTIDFMDAINGKKTQVSYTRDETCETCGGNGCEKGTHPITCDKCHGTGVMTVTQQSMLGMIRRQTTCDKCNGRGVIIEHPCKTCGGKGTVERKNTIEVDIPAGIDNGQQLRYQGQGEAGRNGGPYGDLYISYRIKPSKDFERRGQNIYTEVPISFAQATLGDEITVKTVHGDAKLTIPAGTQPNKKFTLRGQGVPYLRGNGNGDQITTVNIVIPKHINDKQKEDLTNFVHDGGGNITPQEKGFFERLKDKLSGE

SEQ ID NO: 117985 - DNA, 1167 bp, Lactobacillus johnsonii; identical to SEQ ID NO: 64023
  CDS (1)..(1167): transl_table=11

SEQ ID NO: 117986 - protein, 388 aa, Lactobacillus johnsonii; identical to SEQ ID NO: 64024

SEQ ID NO: 117987 - DNA, 1143 bp, Lactobacillus plantarum; identical to SEQ ID NO: 64027
  CDS (1)..(1143): transl_table=11

SEQ ID NO: 117988 - protein, 380 aa, Lactobacillus plantarum; identical to SEQ ID NO: 64028

SEQ ID NO: 117989 - DNA, 1152 bp, Lactobacillus sakei; identical to SEQ ID NO: 64029
  CDS (1)..(1152): transl_table=11

SEQ ID NO: 117990 - protein, 383 aa, Lactobacillus sakei; identical to SEQ ID NO: 64030

SEQ ID NO: 117991 - DNA, 1149 bp, Methanosarcina acetivorans; identical to SEQ ID NO: 64039
  CDS (1)..(1149): transl_table=11

SEQ ID NO: 117992 - protein, 382 aa, Methanosarcina acetivorans; identical to SEQ ID NO: 64040

SEQ ID NO: 117993 - DNA, 1134 bp, Methylococcus capsulatus
  CDS (1)..(1134): transl_table=11
atggcaaaagaagactattacgaaacgctcggggttcctcgcaacgccagcgacagcgacatcaagaaggcgttccgccgcctcgcgatgaaataccaccccgaccggaacaaggacaatcccgaggccgaggagcgtttcaagagcgtgaaggaggcctacgatgtcctctcagaccccaagaagcggtcggcctatgatcagttcggccatgccggcatcgatccttcgatgggcggaggcggcggcttcggattcacgggtgacagtttcagcgatattttcggcgatgtctttggggatatcttcggtggaggtggacgccgtcgaggccgggggcaacgggggagtgatctgcgctataacctcgagcttacgctggaggaggccgtagccgggaccgaagcgaagatcaaggtgccgacgtgggtcacctgcaccgagtgtggtggttccggtgccaagaaaggcagcgctcccgtgacctgcccgacctgccacggccagggtgcggtgcgcatgcagcagggcttcttctcggttcagcagacttgtccgacctgtcgcggcaccggccagcacatttccgacccttgccgggtctgttacggccagggccgcgtgcaggagaccaagaccttgtcggtcaaaattccgcccggtgtggataccggcgaccgtatccggctttccggcgagggtgaagcgggggagggcggcgggccgccgggcgatctctacgtacacatcggcgtcaagcagcatcccatcttcacgcgggacggcgccgatctgtactgcgaagtgccgatcggtttccctaccgcctgtctgggcggcgaactggaagtgccgacgctggacggcaaggtggtgctcaagattccggccgagacccagaccgggcggctgtttcgggtccgtgggaagggtgtcaagccggtccggggcggcgtggccggtgacctgctgtgccgggtgagagtcgagacgccggtgcacctgaacaaggagcagatcgacctgattcggcagctcgacgaatccttgcggggcggtggcagccatcacagtccccaggcacatggttggttggacggggtcaaacagttcttcgatcgcctgggactttga

SEQ ID NO: 117994 - protein, 377 aa, Methylococcus capsulatus
MAKEDYYETLGVPRNASDSDIKKAFRRLAMKYHPDRNKDNPEAEERFKSVKEAYDVLSDPKKRSAYDQFGHAGIDPSMGGGGGFGFTGDSFSDIFGDVFGDIFGGGGRRRGRGQRGSDLRYNLELTLEEAVAGTEAKIKVPTWVTCTECGGSGAKKGSAPVTCPTCHGQGAVRMQQGFFSVQQTCPTCRGTGQHISDPCRVCYGQGRVQETKTLSVKIPPGVDTGDRIRLSGEGEAGEGGGPPGDLYVHIGVKQHPIFTRDGADLYCEVPIGFPTACLGGELEVPTLDGKVVLKIPAETQTGRLFRVRGKGVKPVRGGVAGDLLCRVRVETPVHLNKEQIDLIRQLDESLRGGGSHHSPQAHGWLDGVKQFFDRLGL

SEQ ID NO: 117995 - DNA, 1170 bp, Methanosarcina mazei
  CDS (1)..(1170): transl_table=11
atggctaccaaacgtgattattacgaaattctcggattatccaaagactcttcagtcgaagatataaagaaaacataccggaagcttgccctgcagtaccaccctgacaggaacaaagaacccggggctgaggagaaattcaaggaaatatctgaggcttacgccgttctttcagatgcagaaaaaagggctcagtacgaccgcttcggacatgcagggatagataaccagtacagtgcagaggacatcttccggggtgcggacttcggcgggttcggagacatttttgagatgtttttcggaggcggcagaaggggaggtcctatgggccccaggagaggttccgatcttcagtacgacctctatgtaacctttgaagaagctgcttttggagtgcgcaaggacatagatattccaaggacagaaaggtgttctacctgctcaggcacaggagcaaagccgggcacaagcccgaagcgctgccctaactgcggcggcacggggcaggtccgtacaacccgctcaaccctgggaatgcagtttgtaagcaccacgacgtgcagcgcctgtcacggcaggggtcaggtagttgaatctccatgccccacatgtagcggcgcgggcagggtcaggagcaggagaaagatgtcagtcaacgtacctgcaggagcagactctggtatgaccctcaggctcagcggggaaggagatgcaggagaaccgggagcgccttccggagacctttatattatcgtgcatgtgatggaacacaaatatttcaagcgggtcgattacgatgttatctccgaacttccaatatccttcacccaggctgcactcggagcagacattatggttgataccctttacggcaaggtcaaaatgaatattccatcagggacccagacacattccgtattcaggctcaaagataaaggcatacagcgcctgcaaggccacggcaagggtgaccagctcgtaagggtaataatcaggactccaacaaaactcactcaggaacaaaaagaccttcttcatcagttcgaatacctgagcaatgggaagaagcccgaagcagaggaaaggagcagatctgataagcagaaaagcgaaaaacccaggaaaagcaagggacttttcgaaaaggtaaaagatgcctttgaaagttga

SEQ ID NO: 117996 - protein, 389 aa, Methanosarcina mazei
MATKRDYYEILGLSKDSSVEDIKKTYRKLALQYHPDRNKEPGAEEKFKEISEAYAVLSDAEKRAQYDRFGHAGIDNQYSAEDIFRGADFGGFGDIFEMFFGGGRRGGPMGPRRGSDLQYDLYVTFEEAAFGVRKDIDIPRTERCSTCSGTGAKPGTSPKRCPNCGGTGQVRTTRSTLGMQFVSTTTCSACHGRGQVVESPCPTCSGAGRVRSRRKMSVNVPAGADSGMTLRLSGEGDAGEPGAPSGDLYIIVHVMEHKYFKRVDYDVISELPISFTQAALGADIMVDTLYGKVKMNIPSGTQTHSVFRLKDKGIQRLQGHGKGDQLVRVIIRTPTKLTQEQKDLLHQFEYLSNGKKPEAEERSRSDKQKSEKPRKSKGLFEKVKDAFES

SEQ ID NO: 117997 - DNA, 1164 bp, Methanosarcina thermophila
  CDS (1)..(1164): transl_table=11
atggccacaacgcgtgattattacgaaattcttgggttgtctagagatgctacacccgaggatataaagaaatcctatcgaaaacttgcattaaagtatcatcctgacaggaataaggaacctggggctgaggaaaagttcaaagagatctcagaagcttatgctgtgctttcagatcctgagaaacgggctcagtacgaccgtttcggacatgccggaataaatggacagtacaccgcagaagatatcttccggggtgcggatttcagcggcttcggggatattttcgaaatgtttttcggcggaagcagaaggggtcccaggggaccgaggagaggatcagatctccagtatgacctttatataaccttcgaagaagcagcatttggagtccgtaaagatattgatgtcccgaggactgaaagatgctctaactgttccggaaccggggctagacccggcacaagcccaaaacgctgcccaacatgcggcggtacaggtcaaatccgcaccacacgcacaggattgggcatgcagtttgtaagcactaccacctgttctacctgtcgcggcaagggtcaagttattgaatctccgtgcccggtctgcagtggcacaggtagggttagaaatacgagaaaaataacagtaaacgtacctgcaggagctgattcaggcatgagcctgaggcttagtggagaaggtgatgcgggagaccccggagctccgcctggagatctctatgtagtgcttcatgttatggagcataaaatctttaagagagtagactacgatgtaatctccgaggttccaatctcgtttgctcaggctgcgctcgggactgatattatggtagataccctctacggcaaggtcaagatgaatattcctgcagggactccgacccattccgtgttcaagattaaagaaaagggtatccagcacctgcatggcaacaggagaggtgaccagctcgtaagggttgtaataaaaaccccaacaaatctcagccacgaacagaaaagaaacttcttcgccagtttgaaagcattgagcagtggtaaaaacccgggaggcgaaaaaggcaggtacgataaatttacagaaaaatccaaaaaaagcaaaggattttttgagaaagtaaaggatgcttttgagagttaa

SEQ ID NO: 117998 - protein, 387 aa, Methanosarcina thermophila
MATTRDYYEILGLSRDATPEDIKKSYRKLALKYHPDRNKEPGAEEKFKEISEAYAVLSDPEKRAQYDRFGHAGINGQYTAEDIFRGADFSGFGDIFEMFFGGSRRGPRGPRRGSDLQYDLYITFEEAAFGVRKDIDVPRTERCSNCSGTGARPGTSPKRCPTCGGTGQIRTTRTGLGMQFVSTTTCSTCRGKGQVIESPCPVCSGTGRVRNTRKITVNVPAGADSGMSLRLSGEGDAGDPGAPPGDLYVVLHVMEHKIFKRVDYDVISEVPISFAQAALGTDIMVDTLYGKVKMNIPAGTPTHSVFKIKEKGIQHLHGNRRGDQLVRVVIKTPTNLSHEQKRNFFASLKALSSGKNPGGEKGRYDKFTEKSKKSKGFFEKVKDAFES

SEQ ID NO: 117999 - DNA, 1131 bp, Methanobacterium thermoautotrophicum
  CDS (1)..(1131): transl_table=11
atggctaaacgtgactactatgagatcctcggtgtagataggggtgcggataagaaggagataaagaaggcctacaggaggctcgccagaaagtatcaccctgacgtcagtgatgaccctgatgcagctgaaaagttcaaggaaataagcgaagcctacgcagtcctctctgatgatgagaagagggcgaggtacgaccgcttcggccatgctggtatggatggcttcagtcaggaggatatattcaacaacataaactttgaggacatcttcagcggcctgggatttgacattggaaacatatttgacatgttcggatttggtgggggaagaaggcacgggccacagaggggcgctgatataagctacaccctggatataagccttgaagatgcctacaatggtcttgaaaccgatataagggttccacatacaaagaagtgtccggtgtgccatggcagcagggctgagccaggcaccggtacaaggacctgccagacctgcggtggcagcggacaggtgcggcaggtgaggaacaccatcctggggcagatgatgaacataacaacgtgccccgactgtcagggcgagggtacagtagtcgagaaaccctgcagtaactgtaacggtaaaggcgttgtcaggaagaccagcaccatccatgtgaaggtccctgcaggtgttgagacaggatcccggctcagggtccccggtgagggggagatgggtcttcgtggtggagaaccaggggatctctacgtggttatcaaggtcaagccccacagcattttcaggagggagggcgccaacctgtacaccgagaagcccataagcttcgtccaggcagccctgggtgacaccgtcgaggttccgacccttgacaggccagtgaaactgaggatacccgcagggacccagagcggtacaaccttccgtgttaagggtcacgggatgccccatctcaagtggaacggctacgggaacctctacgtaaaggtcaaggttgtgacaccaagaaagctgagccccaggcagaaggaactcctcagggaatttgcaagtatcagtggggatgagatccacgaggataagggcttcttcgataaggtgaaggatgccataatccactga

SEQ ID NO: 118000 - protein, 376 aa, Methanobacterium thermoautotrophicum
MAKRDYYEILGVDRGADKKEIKKAYRRLARKYHPDVSDDPDAAEKFKEISEAYAVLSDDEKRARYDRFGHAGMDGFSQEDIFNNINFEDIFSGLGFDIGNIFDMFGFGGGRRHGPQRGADISYTLDISLEDAYNGLETDIRVPHTKKCPVCHGSRAEPGTGTRTCQTCGGSGQVRQVRNTILGQMMNITTCPDCQGEGTVVEKPCSNCNGKGVVRKTSTIHVKVPAGVETGSRLRVPGEGEMGLRGGEPGDLYVVIKVKPHSIFRREGANLYTEKPISFVQAALGDTVEVPTLDRPVKLRIPAGTQSGTTFRVKGHGMPHLKWNGYGNLYVKVKVVTPRKLSPRQKELLREFASISGDEIHEDKGFFDKVKDAIIH

SEQ ID NO: 118001 - DNA, 1167 bp, Mycoplasma penetrans; identical to SEQ ID NO: 64041
  CDS (1)..(1167): transl_table=4

SEQ ID NO: 118002 - protein, 388 aa, Mycoplasma penetrans; identical to SEQ ID NO: 64042

SEQ ID NO: 118003 - DNA, 1173 bp, Mycoplasma pneumoniae
  CDS (1)..(1173): transl_table=4
atggccgctggtaaacgtgattattatgaagtgttaggcgtttccagatccgccaccgcacaagacatcaaacgagctttccgcaagcttgctatgcagtaccaccccgaccgccataagggtgagggtgagactgtccaaaaacaaaacgaagagaagtttaaagaggtcaatgaggcgtacgaggtcttaagtgacaccgagaagcgtggtatgtacgaccgctttggccatgaagggttaaatgcctctggcttccatgaaactgggtttaatccctttgacatctttaacagtgtctttggtgagggcttttcgtttgacatggacgggggttcaccgtttgactttatctttagtaggggcaaaaagtcgcggcaaaaccgggttgttttgccctatgatttagagattgcggtgggggtagacattagcttctttgagatgactaatggttgtactcggacgattgaatataccaaacgggtgacctgtagtgcctgtgatggttttggggctgaagggggagaaaccgggatggttagctgtaacagttgtgaaggcaatggttttattttgaagaatcaacgctccatctttggtacagtccagtcccagatgttgtgtcagagctgtggtggtcagggtaaacaggccaaacacaagtgtaagacttgtaagggaagtaagtacaagaaggtaccaactaccaaggaaattcagattcccgctggcatttaccatggtgatgcgttagtcgatgaccatggtggtaatgaattcgggggtcacgttggcaagttagtggtccatgtgggggtactaccgagtaagatctttaaacgggttgaccataatgtagtagccaatgttttagtcgatccgatgattgctatcaccggagggaaaattgaactccctaccttagaaggcattaaggaattcaacttacgtgctggtactaagagtggcgagcaaatagtaatccctggtggtgggattaaatttacgaagaacttccgcaagaaggccggggatctcattattattatcagttatgcccgtccaagtgaatacagtgcgccagagttgcgcaagctcaaggaatttattaaacctaatcaagaggtaaaacaatatttaaacgcacttaagaatgaatacaagtcctaa

SEQ ID NO: 118004 - protein, 390 aa, Mycoplasma pneumoniae
MAAGKRDYYEVLGVSRSATAQDIKRAFRKLAMQYHPDRHKGEGETVQKQNEEKFKEVNEAYEVLSDTEKRGMYDRFGHEGLNASGFHETGFNPFDIFNSVFGEGFSFDMDGGSPFDFIFSRGKKSRQNRVVLPYDLEIAVGVDISFFEMTNGCTRTIEYTKRVTCSACDGFGAEGGETGMVSCNSCEGNGFILKNQRSIFGTVQSQMLCQSCGGQGKQAKHKCKTCKGSKYKKVPTTKEIQIPAGIYHGDALVDDHGGNEFGGHVGKLVVHVGVLPSKIFKRVDHNVVANVLVDPMIAITGGKIELPTLEGIKEFNLRAGTKSGEQIVIPGGGIKFTKNFRKKAGDLIIIISYARPSEYSAPELRKLKEFIKPNQEVKQYLNALKNEYKS

SEQ ID NO: 118005 - DNA, 1176 bp, Myxococcus xanthus
  CDS (1)..(1176): transl_table=11
atggcggacgactactatcagaccctcggcgtcgatcggtcggcttcagcggaggacgtcaagaaggcgtaccgcaagctggcgcgcaagtaccacccggacgtcaacccgggcaacaaggccgccgaggagaagttcaagcaggtgagcgcggcgttcgaggtgctgtcagacacccggaagcgcaagctctacgacgagttcggcccggacgccgagaagattggcttcgacgaaaagaaggcggaggcctatcgggcctacaaagcctcggccgggagcgccggtgccgggggcattccctatggcgccgagggcttcgacctgggtgacctcttcggcgacctgttcggaggccgtggcggtggcgcggcgggcggcgccccggggggcttcgacattggcgagatgtttgggcgtcggggtcgcaacgccgggcctgagcgtggagaggacctgacggtccgcgtccagctcaccctggctgaagccgtctccggaaccgagcgccccctggccttcaaccgtccgggccggtgctccacgtgcagtggccgaggcacatcaggaccggtgtccacctgcaacgtttgcaacggtacgggccgagcccggcgttccgggagcctgttcggtggcgcgggcgcgtgccccaactgccacggcacgggcaaggccgcgccaccctgcccccagtgcgggggcgcgggtgtgaaggaggagctggcccggctgacggtgaagattcccgcgggcgtgcacaccggctcaaaggtgcggctctccggccagggcgcggcggggacacgcggcggccccccaggagacctctatatcgagaccgaggtggccgaacatcccctcgtgcgtcgcgaaggcgacgacctgcacctcgatctgcccgtgacggtctccgaggccctgctgggcgccgacgtgcgcgtccccacgttccagggggaagtcaccgtgaaggtgctcccccactcccaatccggccgccgcatgcggctgaaggggcgcggcgttccctcgctcaagggcggagcacagggcgacctgtacctccacctccaggtgaaggtccccgaggaaacaaccgccgaggctcgggccgccgccgaggcgctcgcccgggcctaccagggcgacgtccgccgcgagctgacgctctag

SEQ ID NO: 118006 - protein, 391 aa, Myxococcus xanthus
MADDYYQTLGVDRSASAEDVKKAYRKLARKYHPDVNPGNKAAEEKFKQVSAAFEVLSDTRKRKLYDEFGPDAEKIGFDEKKAEAYRAYKASAGSAGAGGIPYGAEGFDLGDLFGDLFGGRGGGAAGGAPGGFDIGEMFGRRGRNAGPERGEDLTVRVQLTLAEAVSGTERPLAFNRPGRCSTCSGRGTSGPVSTCNVCNGTGRARRSGSLFGGAGACPNCHGTGKAAPPCPQCGGAGVKEELARLTVKIPAGVHTGSKVRLSGQGAAGTRGGPPGDLYIETEVAEHPLVRREGDDLHLDLPVTVSEALLGADVRVPTFQGEVTVKVLPHSQSGRRMRLKGRGVPSLKGGAQGDLYLHLQVKVPEETTAEARAAAEALARAYQGDVRRELTL

SEQ ID NO: 118007 - DNA, 1122 bp, Neisseria gonorrhoeae
  CDS (1)..(1122): transl_table=11
atgagtaatcaagatttttatgcgacgctgggtgtggcaagagcagctaccgatgatgagattaaaaaagcctaccgtaaattggcgatgaaataccatcccgaccgcaatcctgacaataaagaggcggaagagaagtttaaagaagtacaaaaggcgtatgaaactttgtccgacaaggaaaagcgtgccatgtacgaccagtatggtcatgcggcgtttgaaggcggcggacaggggggcttcggagggtttggcggatttggcggtgcgcagggttttgactttggggatattttcagccaaatgtttggaggtggttcggggcgcgcccagcctgattatcagggtgaggacgtgcaggtcggtatcgaaatcacgcttgaagaagccgcaaaaggtgtgaagaaacgcatcaatattccgacttatgaagcgtgtgatgtctgcaacggcagcggcgcgaaaccgggggcatccccggaaacctgcccgacttgcaaaggttcgggtacggtgcacatccagcaggcgattttccgtatgcagcagacttgtccgacctgccgcggtgcgggcaaacatattaaagaaccttgcgtcaaatgccgtggcgtggggcggaataaggcggtcaagacggtggaagtcaatattcccgccggtatcgatgacgggcagcgtatccgtttgagcggtgaaggcgggccgggtatgcacggcgcgcctgccggcgacctgtatgtaaccgtccgcattcgggcgcataagattttccaacgcgatggtttggatttgcattgcgaactgccgattagttttgccatggctgctttgggcggggagttagaagtgccgaccttggacggcaaagtcaagctcaccgtccccaaagaaacccaaaccggcaggaggatgcgcgtgaaaggtaagggtgtcaaatctttacgcagcagcgcgaccggcgatttgtactgccatattgttgtcgaaacgcctgtcaatttgaccgaccgtcaaaaagagcttttggaagaatttgagcggatttctacgggcttggaaaaccaaacgccgcgcaagaaatcgtttttagacaagctgcgcgatttgtttgattga

SEQ ID NO: 118008 - protein, 373 aa, Neisseria gonorrhoeae
MSNQDFYATLGVARAATDDEIKKAYRKLAMKYHPDRNPDNKEAEEKFKEVQKAYETLSDKEKRAMYDQYGHAAFEGGGQGGFGGFGGFGGAQGFDFGDIFSQMFGGGSGRAQPDYQGEDVQVGIEITLEEAAKGVKKRINIPTYEACDVCNGSGAKPGASPETCPTCKGSGTVHIQQAIFRMQQTCPTCRGAGKHIKEPCVKCRGVGRNKAVKTVEVNIPAGIDDGQRIRLSGEGGPGMHGAPAGDLYVTVRIRAHKIFQRDGLDLHCELPISFAMAALGGELEVPTLDGKVKLTVPKETQTGRRMRVKGKGVKSLRSSATGDLYCHIVVETPVNLTDRQKELLEEFERISTGLENQTPRKKSFLDKLRDLFD

SEQ ID NO: 118009 - DNA, 1122 bp, Neisseria meningitidis serogroup A
  CDS (1)..(1122): transl_table=11
atgagtaatcaagatttttatgcgacgctgggtgtggcaagaacagctaccgatgatgagattaaaaaagcctaccggaaattggcaatgaaataccatcccgaccgcaatcctgacaataaagaggcggaagagaagtttaaagaagtacaaaaggcgtatgaaactttgtccgacaaggaaaagcgcgctatgtacgaccagtatggtcatgcggcgtttgaaggcggcggacaggggggcttcggagggtttggcggatttggcggtgcgcagggttttgactttggggatattttcagccaaatgtttggaggcggttcggggcgcgcccagcctgattatcagggtgaggacgttcaagtcggtatcgaaatcacgcttgaagaagccgcaaaaggtgtgaagaaacgcatcaatattccgacttatgaagcgtgtgatgtctgtaacggcagtggcgcgaaaccggggacatccccggaaacctgcccgacttgcaaaggttcgggtacggtgcacatccagcaggcgattttccgtatgcagcagacttgtccgacctgccacggtgcgggcaaacacattaaagaaccttgcgtcaaatgccgtggcgcggggcggaataaggcggtcaagacggtggaagtcaatattcccgccggtatcgatgacgggcagcgtatccgtttgagcggcgaaggcgggccgggtatgcacggtgcgcctgccggcgacttgtatgtaaccgtccgcattcgggcgcataagattttccaacgcgacggtctggacttgcattgcgaactgccgatcagttttgccacggctgctttgggcggggagttggaagtgccgaccttggacggaaaggtcaagctcaccgtccccaaagaaacccaaaccggcaggaggatgcgcgtgaagggtaagggtgtcaaatctttacgcagcagcgcgaccggcgatttgtactgccatattgttgtcgaaacgcctgtcaatttgaccgaccgtcaaaaagagcttttggaagaatttgagcggatttctaccggcttggaaaaccaaacaccgcgcaagaaatcgtttttagacaagctgcgcgatttgtttgattga

SEQ ID NO: 118010 - protein, 373 aa, Neisseria meningitidis serogroup A; identical to SEQ ID NO: 64044

SEQ ID NO: 118011 - DNA, 1128 bp, Oceanobacillus iheyensis; identical to SEQ ID NO: 64045
  CDS (1)..(1128): transl_table=11

SEQ ID NO: 118012 - protein, 375 aa, Oceanobacillus iheyensis; identical to SEQ ID NO: 64046

SEQ ID NO: 118013 - DNA, 1161 bp, Protochlamydia amoebophila
  CDS (1)..(1161): transl_table=11
atggctgactattacgaaattctagaagttgcacgtggtgcgactcccgaagaaatcaaaaaagcataccgaaaaaaggctgttcagtatcatcctgacaaaaatcccggtgatgcagatgctgaaaaacgatttaaagaaatatcggaagcttacgaagttttaagcgacgaaaaaaaacgacaagtttacgatcgttacggcaaagaagctttgcaaggagctgctggtggtggacaaggtttttcatccatggacgaagctctgcgaacctttatgggtgcgtttggaatgggtggaggcggagaaagtattttcgacttttttggcggtggaaatggagctgaatttggaggtcgagaaggaggtagaggggctcgtcaaggagctagcaaacgcgttaacattaacgtctcctttgaagaagcggtcaagggtgtcgataaagagcttgtgatttctaactacgcaaattgtaatgtttgcaatggtaaaggctcctcctcatcacaaggaattaaaacctgtagtgaatgtaaaggcagaggtcaagtttttgaacaaagaggtttctttagcatgacaatggcttgtccaaaatgtcatggagaaggaaaagttattaccgacccttgtaaaaattgcaaaggacaaggtgctgttaaagaaaaacaacacattaaagttcatattccggctggtgtagatagcggaatgcgtttaaaaatgagcgggtatggtgatgtaggacaacatggtggtcctgcaggagacttatatgtgttcatcaatgtagaaccacatgagattttcgagcgagaagggaacgatattttattagatttacccattagttttgctgaagctgcccttggttgtaaaaaagaagtgccgtctttgaccaatcgagcgtgccgtattaccattccggaaggaacgcaaaatggaaagattttccgagtaaagggtgaaggatttcccaatgtacacggacatggaaaaggagatttactagtacgtatatttgtcgaaacacccacccgtttaagcgagcgtcaaaaagagcttttacaagaattcagtgaacttgaaggacccaacaatcttcctaaaagaaaaggctttctagataaaattaaagaatttttttcaccgaactga

SEQ ID NO: 118014 - protein, 386 aa, Protochlamydia amoebophila
MADYYEILEVARGATPEEIKKAYRKKAVQYHPDKNPGDADAEKRFKEISEAYEVLSDEKKRQVYDRYGKEALQGAAGGGQGFSSMDEALRTFMGAFGMGGGGESIFDFFGGGNGAEFGGREGGRGARQGASKRVNINVSFEEAVKGVDKELVISNYANCNVCNGKGSSSSQGIKTCSECKGRGQVFEQRGFFSMTMACPKCHGEGKVITDPCKNCKGQGAVKEKQHIKVHIPAGVDSGMRLKMSGYGDVGQHGGPAGDLYVFINVEPHEIFEREGNDILLDLPISFAEAALGCKKEVPSLTNRACRITIPEGTQNGKIFRVKGEGFPNVHGHGKGDLLVRIFVETPTRLSERQKELLQEFSELEGPNNLPKRKGFLDKIKEFFSPN

SEQ ID NO: 118015 - DNA, 1140 bp, Pasteurella haemolytica
  CDS (1)..(1140): transl_table=11
atggcaaagaaagattattacgaagtccttggactgtctaaaggggcaagcgagaaagacatcaaacgagcatataaacgtttggcggcaaagcatcacccggataaaaaccaaggcagtaaagagtcggaagagaaatttaaagagattaccgaagcctatgacgtgctgaccgacagcgagaaaaaagcgatgtacgaccaatacggtcacgccgcctttgaacaaggcggtgccggtgcaggcggattcggtggctttggcggcggtggtttcggtggttttgaagacatcttcagcgaaatgtttggcggtggctttggtggcggtggacgtcgccaacgtgtggtacgtggcgatgatttacgttacgacatcgagatcacccttgaagaagctgtgaaaggctgtaaaaaagatattcgcattcacaccttagctgaatgtgatacttgtcatggtacaggggcggaagcagggagcaaagtggaaacctgttcgcattgtcacggctccggcagaattcgccgtcagcaaggtttctttgtgactgacgcagtttgtccaagttgtcacggtacaggtaaacgcattgaaaaaccctgccgttcttgccacggcgatggacgtgttcacaaagcgaaaaacctctctgttaccattccggcaggtgtggataccggtaatcaacttcgcttatcgagagagggagctgcaggcgaaaatggcgctccggcaggcgatttatatgtggtgattcccgtaaaagaacacgatatttttgagcgtgacggttcgaatttatactgtgaagtgccgattatctttacccttgcagctttaggcggtgaaattgaaatgccaactttagacggccaattaaaactcaaattccggcagaaactccaaccggtaaactattccgtgttacgaggcaaaggggtaacaagccctcgtggtggctacgcaggggatttaatctgcaaagtggtggtcgaaacgcctgtgaatttaaccgaagaacagaaagcactattacgacaatttgaagagagtttagaaggacaaggtaaacatcgtccgaaacacgaaggtttctttgatggtgtgaagaaattctttgataacttaggcaaataa

SEQ ID NO: 118016 - protein, 379 aa, Pasteurella haemolytica
MAKKDYYEVLGLSKGASEKDIKRAYKRLAAKHHPDKNQGSKESEEKFKEITEAYDVLTDSEKKAMYDQYGHAAFEQGGAGAGGFGGFGGGGFGGFEDIFSEMFGGGFGGGGRRQRVVRGDDLRYDIEITLEEAVKGCKKDIRIHTLAECDTCHGTGAEAGSKVETCSHCHGSGRIRRQQGFFVTDAVCPSCHGTGKRIEKPCRSCHGDGRVHKAKNLSVTIPAGVDTGNQLRLSREGAAGENGAPAGDLYVVIPVKEHDIFERDGSNLYCEVPIIFTLAALGGEIEMPTLDGQLKLKFRQKLQPVNYSVLRGKGVTSPRGGYAGDLICKVVVETPVNLTEEQKALLRQFEESLEGQGKHRPKHEGFFDGVKKFFDNLGK

SEQ ID NO: 118017 - DNA, 1119 bp, Pasteurella multocida
  CDS (1)..(1119): transl_table=11
atggcaaaaaaagattattacgacgttcttggtgttgaacgtggtgcggatgaaaaagaaattaaacgtgcttataaaaaattggcgatgaaatatcatccagaccgcacccaaggcaacaaagagctggaagaaaaatttaaagaaatccaagaagcctacgaagtcttaagcgacaaacaaaaacgggcgaactatgatcaatacggtcatgctgcctttgaacaaggtggcttcggtggcggtggctttagtggtgctgatttcggggatatttttggtgatatgttcggggatatttttggtggtggtcgtgctcgccaacgcgtcgtgcgtggtgatgacttgcgctacgatcttgaaatcagcttagaagaagcggtacgtggcacgacgaaagatattcaaatcaatactcttgcccattgtgacagctgtgatggttcgggtgctgagaaaggctcaaaagtagaaacttgctcaacttgtcatggcgcaggacgtgtacgtcgtcagcaaggtttctttgtgactgaacaagtctgtcctagctgtcatggttcgggcaaaaagattgagaaaccgtgtaaatcctgtcatggtgatggacgtgttcacaagaagaaaaacctttcggtgaaaattccagcgggtgtcgatacaggtaatcaattacgcttatcaggcgaaggagcggcaggtgaaaatggcgcaccaaatggtgatctatatgtcgttatccatgtacgagatcatcatattttcgaacgtgatggtagcaatctgtattgtgaagtacctattagtttcacaatggcagctttaggtggtgaaattgaagtgccaactttagatggtcgtgtcaaactcaaaatccctgcagaaacacaaacaggcaaactattccgtatgcgtggtaaaggtgttacttctgcacgtagtgcttacgcaggcgatctcatctgtaaaattattgttgagacacctgttaaactcaatgaggaacaaaaagcattattacgtcaattagaagaaagtttagaaggttctagtaacaaaccgaaatcctctagtttctttgatggcgttaagaaattctttgataacttaggcaaataa

SEQ ID NO: 118018 - protein, 372 aa, Pasteurella multocida
MAKKDYYDVLGVERGADEKEIKRAYKKLAMKYHPDRTQGNKELEEKFKEIQEAYEVLSDKQKRANYDQYGHAAFEQGGFGGGGFSGADFGDIFGDMFGDIFGGGRARQRVVRGDDLRYDLEISLEEAVRGTTKDIQINTLAHCDSCDGSGAEKGSKVETCSTCHGAGRVRRQQGFFVTEQVCPSCHGSGKKIEKPCKSCHGDGRVHKKKNLSVKIPAGVDTGNQLRLSGEGAAGENGAPNGDLYVVIHVRDHHIFERDGSNLYCEVPISFTMAALGGEIEVPTLDGRVKLKIPAETQTGKLFRMRGKGVTSARSAYAGDLICKIIVETPVKLNEEQKALLRQLEESLEGSSNKPKSSSFFDGVKKFFDNLGK

SEQ ID NO: 118019 - DNA, 1143 bp, Photobacterium profundum
  CDS (1)..(1143): transl_table=11
atgtcaaaacgcgatttttatgaagttctaggtgttggtcgagatgccggagaacgtgacattaaaaaggcttataaacgccttgcaatgaaatttcaccctgatcgcaatcaggaagcagatgcgactgaaaaatttaaagaagtcaaaactgcgtatgaaattctaaccgaccctcagaagaaagcggcatacgatcagtacggccatgcagcctttgaacaaggtagcggtggtggcggctacggtggtggcggcggcgctgatttcggtgacattttcggtgatgtatttggcgatatcttcggtggtgctggtggtggtcgacgtcaacagcagcgtgctcaacgcggttccgatcttcgctacaacatggaactgacattagaagaagctgttcgtggctgttctaaagaaatccgtgtaccaacattggttggttgtgattcgtgtgacggttctggtgccaagaggggttcatcagcaacaacgtgtggcacttgtcatggtcaaggccaagtacaaatgcgtcaaggtttctttgctgtacagcaagcttgtccacattgtcacggtcgcggcaagatcatcaaagacccatgtaattcatgtcatggtcaaggccgagttgaaaaaacgaaaacattgtctgttaagatcccagcgggtgttgacactggtgatcgtattcgcctttctggtgaaggtgaagccggcgagtttggtgcaccagcaggtgatttgtatgtacaggtgcatgttgcagagcattcaatttttgaacgtgatggcaacaacctgtattgcgaagtacctgttagctttacgatggccgccgttggtggtgaagtcgaagtacccactttgaatggtcgcgtaaatctaaaagtaccatcagaaacacaaaccggacgtatgttccgtatgcgtggtaaaggcgttaagtctgtgcgcggcggtgctgttggcgatttgatttgtaagctcgttgttgaaacacccgttaatttaagttctcatcaaaaagagttacttaaagagctagaagaaagctttggtggaaaagcagcaggtaaacataagccaaagtctgaaggtttcttcaatggtgtgaagaaattttttgatgatttaactggctaa

SEQ ID NO: 118020 - protein, 380 aa, Photobacterium profundum
MSKRDFYEVLGVGRDAGERDIKKAYKRLAMKFHPDRNQEADATEKFKEVKTAYEILTDPQKKAAYDQYGHAAFEQGSGGGGYGGGGGADFGDIFGDVFGDIFGGAGGGRRQQQRAQRGSDLRYNMELTLEEAVRGCSKEIRVPTLVGCDSCDGSGAKRGSSATTCGTCHGQGQVQMRQGFFAVQQACPHCHGRGKIIKDPCNSCHGQGRVEKTKTLSVKIPAGVDTGDRIRLSGEGEAGEFGAPAGDLYVQVHVAEHSIFERDGNNLYCEVPVSFTMAAVGGEVEVPTLNGRVNLKVPSETQTGRMFRMRGKGVKSVRGGAVGDLICKLVVETPVNLSSHQKELLKELEESFGGKAAGKHKPKSEGFFNGVKKFFDDLTG

SEQ ID NO: 118021 - DNA, 1074 bp, Picrophilus torridus; identical to SEQ ID NO: 64047
  CDS (1)..(1074): transl_table=11

SEQ ID NO: 118022 - protein, 357 aa, Picrophilus torridus; identical to SEQ ID NO: 64048

SEQ ID NO: 118023 - DNA, 1152 bp, Porphyromonas gingivalis; identical to SEQ ID NO: 64049
  CDS (1)..(1152): transl_table=11

SEQ ID NO: 118024 - protein, 383 aa, Porphyromonas gingivalis; identical to SEQ ID NO: 64050

SEQ ID NO: 118025 - DNA, 1137 bp, Prochlorococcus marinus
  CDS (1)..(1137): transl_table=11
atggcagatttttatgacacattgggcgttaatagaaatgctgatgctgacagcttaaaacgagcatataggcgtttagctcgtcaatatcaccccgatattaataaagaagcaggcgctgaagaacgttttaaagaaatagggcgtgcctatgaagtcttaggtgacccagagaagcgtgctcgttacgatcaatttggagaggctggtttaggcggaagtgcaggaatgcccgatatgggagatatgggaggttttgcagatatttttgaaaccttctttagtggttttggaggtcctggatcatctggggctagaacgcaacgtagaggtccccagcaaggtgacgacttgcgatacgatttaaccattgattttaatcaagctgtatttggtcaagagagagaaataaagattcctcatctagaaacttgtgatgtttgtagaggaaccggtgcgaaacctggaactggtccaacaacatgttctacgtgtggaggggctgggcaagttcgccgagcaactagaacaccttttggcagttttacgcaggtatctgattgtcctacttgtagcggttctggccaggtcatttcagattcttgtcaaagttgtggtggtcaaggtgttaaacaagttagaaaaaaacttcgtatcaatattcccgcaggagttgatacaggaactcgtctgagggtctcaggagaaggtaatgctggaccccgaggcggcccttctggtgatttatatgtttttttgaaagtaaaaagtcacgctcgcttaaaaagagatggtttaaatattcattcagaagttaatgtgagttatctacaagcaattcttggagatactattgaagttgatactgttgatggacctacaactcttcaaattccttcagggactcaaccaagtgctgttttaattttagataataaaggtattccaaaattaggtaatcctgttgcaagagggaatcattgtatttctgtaaacattaaaattccatctcgattaacagatgatgaaaaaatattattggaaaaattagccatttattattcagctaaaggaccgcaaaaccatcatcataatagtggcttatttagtagattatttaaaagtaatgctagttga

SEQ ID NO: 118026 - protein, 378 aa, Prochlorococcus marinus
MADFYDTLGVNRNADADSLKRAYRRLARQYHPDINKEAGAEERFKEIGRAYEVLGDPEKRARYDQFGEAGLGGSAGMPDMGDMGGFADIFETFFSGFGGPGSSGARTQRRGPQQGDDLRYDLTIDFNQAVFGQEREIKIPHLETCDVCRGTGAKPGTGPTTCSTCGGAGQVRRATRTPFGSFTQVSDCPTCSGSGQVISDSCQSCGGQGVKQVRKKLRINIPAGVDTGTRLRVSGEGNAGPRGGPSGDLYVFLKVKSHARLKRDGLNIHSEVNVSYLQAILGDTIEVDTVDGPTTLQIPSGTQPSAVLILDNKGIPKLGNPVARGNHCISVNIKIPSRLTDDEKILLEKLAIYYSAKGPQNHHHNSGLFSRLFKSNAS

SEQ ID NO: 118027 - DNA, 1137 bp, Prochlorococcus marinus
  CDS (1)..(1137): transl_table=11
atggctgattattacgacctgctaggggtcagcaaagatgctgatggcgataccctgaagcgggcttatcgccgtcttgcacgtcagtatcacccagatatcaataaggatcctggtgcagaggatcgtttcaaggagatcggtcgtgcctatgaggtgcttagcgatcctcagactcgtggccgttatgaccaatttggcgaggctgggcttgggggtgcagcgggcatgcccgatgtgggagatatgggtggcttcgctgatctctttgagaccttttttagtggttttggaggggctggtggatctggtggcgctcgtccacgacgacggggaccgcagcaaggagatgatcttcgctacgacttgaagattgactttgagcaagctgttttcggccaagaacgagaaatcaaaattccccatcttgaaacttgcgacacctgtaacggcactggagccaaggtgggtagtggaccaacgacctgttccacttgtggtggtgttggtcaggttcgacgagcgaccagaacacctttcgggagcttcactcaggtggcggaatgtcccagttgtgaaggtactggacaggtgattgcagacccttgtcctgcatgtgctggacagggtgttcgtcaggttcgcaagaaattgcgcatcaatattcccgctggggttgatacaggaactcgtctgagagttgccggtgagggaaatgctggtttgcggggtggaccttctggagacctttacgtatttttgacggtgaaatcccatccccaattgcgacgtgatgggatcacggtgctttcagaagtcaacgtgagttatctccaggcaatccttggagacatcattgaggttgatacggttgatggcaataccagtcttgagattcctgctggaactcagcccaatgctgtactcacccttgaaaacaagggtattcctaagctaggaaacccagtagcaagagggaatcagcgtatttctatcaatgtgaagttgcccattcgtctttctgatgaggagcggggcttgcttgaagaacttgctggccatcattctgctaaaggcaggcagcatcaccatcacaacagtggtttgtttgctcgtttgtttggccagaaaggatga

SEQ ID NO: 118028 - protein, 378 aa, Prochlorococcus marinus
MADYYDLLGVSKDADGDTLKRAYRRLARQYHPDINKDPGAEDRFKEIGRAYEVLSDPQTRGRYDQFGEAGLGGAAGMPDVGDMGGFADLFETFFSGFGGAGGSGGARPRRRGPQQGDDLRYDLKIDFEQAVFGQEREIKIPHLETCDTCNGTGAKVGSGPTTCSTCGGVGQVRRATRTPFGSFTQVAECPSCEGTGQVIADPCPACAGQGVRQVRKKLRINIPAGVDTGTRLRVAGEGNAGLRGGPSGDLYVFLTVKSHPQLRRDGITVLSEVNVSYLQAILGDIIEVDTVDGNTSLEIPAGTQPNAVLTLENKGIPKLGNPVARGNQRISINVKLPIRLSDEERGLLEELAGHHSAKGRQHHHHNSGLFARLFGQKG

SEQ ID NO: 118029 - DNA, 1134 bp, Pseudomonas aeruginosa
  CDS (1)..(1134): transl_table=11
atggcgaaacgagacttttacgaggttctgggggttgagcgtggcgccagcgaggcggacctgaagaaggcctaccgtcgcctggcgatgaaataccacccggaccgcaatcctggcgacaaggaagccgaggacaagttcaaggaggccaacgaggcctacgaggtcctctccgatgccagcaagcgggcggcctacgaccagtacggccatgccggcgtcgatccgaacatgggtgggggcgctggcgccggtttcggcggggcgagcttctccgacatcttcggcgatgtgttcagcgatttcttcggtggcggcggcgcccgcggtggctcgcgcggcggcgcgcagcgcggcgcggacctgcgctacaccctggatctcgacctggaagaggcggtacgcggcaccaccgtcaccatccgcgtgccgaccctggtcggttgcaagacttgcaacggcagcggcgccaagcccggcaccacacctgtcacctgcaccacttgcggcggtatcggccaggtgcgcatgcagcagggcttcttctcggtccagcagacctgcccgcgctgccacggcaccggcaagatgatttccgatccctgtggctcctgccatggccaggggcgcgtggaagagcagaagaccctgtcggtgaaggtgccggccggcgtcgacaccggcgaccgcatccgcctcaccggcgaaggcgaggccggcagcatgggtggtccggcgggcgacctgtacgtggtggtcaatgtgcgcgagcacccgatcttccagcgtgacggcaagcatctgtactgcgaagtgccgatcagtttcgccgacgctgcgctgggcggcgagctggaagtgccgaccctggatggccgggtcaagctgaagattccggaaagcacccagaccggcaagctgttccgcctgcgcggcaagggcgtggccccggtgcgcggcggcggcgccggcgacctgatgtgcaaggtggtggtggaaaccccggtgaacctggacaagcgccagcgcgagctgctcgaggagttccgcaagtcgttgcagagcgacacctcgcattcgcccaaggccagtggctggttcgagggcatgaagcgtttcttcgacgacctataa

SEQ ID NO: 118030 - protein, 377 aa, Pseudomonas aeruginosa
MAKRDFYEVLGVERGASEADLKKAYRRLAMKYHPDRNPGDKEAEDKFKEANEAYEVLSDASKRAAYDQYGHAGVDPNMGGGAGAGFGGASFSDIFGDVFSDFFGGGGARGGSRGGAQRGADLRYTLDLDLEEAVRGTTVTIRVPTLVGCKTCNGSGAKPGTTPVTCTTCGGIGQVRMQQGFFSVQQTCPRCHGTGKMISDPCGSCHGQGRVEEQKTLSVKVPAGVDTGDRIRLTGEGEAGSMGGPAGDLYVVVNVREHPIFQRDGKHLYCEVPISFADAALGGELEVPTLDGRVKLKIPESTQTGKLFRLRGKGVAPVRGGGAGDLMCKVVVETPVNLDKRQRELLEEFRKSLQSDTSHSPKASGWFEGMKRFFDDL

SEQ ID NO: 118031 - DNA, 1128 bp, Pseudomonas putida; identical to SEQ ID NO: 64053
  CDS (1)..(1128): transl_table=11

SEQ ID NO: 118032 - protein, 375 aa, Pseudomonas putida; identical to SEQ ID NO: 64054

SEQ ID NO: 118033 - DNA, 1131 bp, Pseudomonas stutzeri
  CDS (1)..(1131): transl_table=11
atggccaaacgcgatttttacgaggtgctgggcgttgagcgcggtgccagcgaggcggagctgaaaaaggcttaccgccgcctcgccatgaagcatcaccccgaccgcaatccgggtgacaaggcggcggaggaagccttcaaggaggccaatgaggcctacgaggtgctttccgacccgagcaagcgggctgcctacgatcagtacgggcacgccggcgtcgatccgcagatgggcgccggggcaggtggagccggttacggcggcgccaacttctccgacatcttcggcgatgtattcagcgatttcttcagtggcggtcgtggcggctcccgcggtggcgctcagcgcggcagcgacctgcgttacacgctggagctggatctggaagaagccgtgcgcggtaccacggtgaccatccgcgtgccgaccctggtcgagtgcaagacctgcgatggctccggggcaaagaaaggcaccagcccggtgacctgtaccacctgcggcggcatcggtcaggtgcgcatgcagcagggcttcttctcggtacagcagacctgtccgcgctgccatggcagcggcaagatgatttccgacccatgtggcagctgccacggccagggccgcgtcgaagagcagaagacgctctcggtcaaggtgccgccaggcgtggataccggcgaccgcatccgcctctccggcgagggcgaggcgggtactcagggcgggccggcgggcgacctctacgtggtggtcaacgtgcgcgagcacgcaatcttccagcgtgacggcaagcacctgtactgcgaagtgccgatcagcttcgccgatgcggcgctgggcggtgagctcgaggtgccgacgctggatggccgggtcaagctgaaaatcccggaaggcacccagaccggcaagcagttccgtctgcgtggcaagggtgtagcaccggtgcgtggtggtgcggcgggcgacctgatgtgtcgcgtcgtggtcgaaacgccggtcaacctgagcaagcgccagcgcgagatgctcgaggagttccgcggcacgctacagggcgacacctcccattcacccaaggccagcggctggttcgagggtgtgaaacgctttttcggtgatgtttga

SEQ ID NO: 118034 - protein, 376 aa, Pseudomonas stutzeri
MAKRDFYEVLGVERGASEAELKKAYRRLAMKHHPDRNPGDKAAEEAFKEANEAYEVLSDPSKRAAYDQYGHAGVDPQMGAGAGGAGYGGANFSDIFGDVFSDFFSGGRGGSRGGAQRGSDLRYTLELDLEEAVRGTTVTIRVPTLVECKTCDGSGAKKGTSPVTCTTCGGIGQVRMQQGFFSVQQTCPRCHGSGKMISDPCGSCHGQGRVEEQKTLSVKVPPGVDTGDRIRLSGEGEAGTQGGPAGDLYVVVNVREHAIFQRDGKHLYCEVPISFADAALGGELEVPTLDGRVKLKIPEGTQTGKQFRLRGKGVAPVRGGAAGDLMCRVVVETPVNLSKRQREMLEEFRGTLQGDTSHSPKASGWFEGVKRFFGDV

SEQ ID NO: 118035 - DNA, 1143 bp, Ralstonia solanacearum
  CDS (1)..(1143): transl_table=11
atggcaaaacgtgattactacgaagtgctcggggtgggcaagaacgcgagcgacgacgagatcaagaaggcgtatcgcaagcttgcgatgaagtaccacccggaccgcaatccggacagcaaggaagcggaagagaaattcaaggaggccaaggaagcctacgagatgctctccgacgcggacaagaaggcggcctacgaccagtacggccatgccggcgtcgaccccaacatggccggcggcttcggcgcgggggcgcaaggcttcggcggcttcgcggaagccttcggcgacatcttcggcgatatcttcgggcaggcccagcagggcggccgccgcggcgcgggcccgcagatgtatcgcggcgccgacctgcgctacagcatggagatcacgctggagcaggccgcgcacggctacgacacgcagatccgcgtgccgcactgggacgaatgcgaccactgccacggcaagggcgccgagcccggctccagcgtggagacctgcccgacctgccacggcgccggccaggtgcgcgtgtcgcagggcttcttcacgatgcagcagacctgcccgaagtgccacggcaacggcaagtacatccccaagccttgcagcaagtgccatggccagggcaaggtgaagagccagaagacgctggaagtgaagattccggcgggcatcgacgagggcatgcgcatccgctcctcgggcaacggcgagccgggcatcaacggcggcccgccgggcgacctgtatgtggaaatccacatcaaggcgcactccgtgttcgagcgcgacggcgacgacctgcactgccagatgccgatctccttcgctgtcgcggccatgggcggcgatatcgaggtgccgacgctgggcggccgcgtgaccttcaacgtgcccgagggcacgcaggccggcaagaccttccgtctgcgcggcaagggcatcaagggcgtgcgctcgggctatgccggcgatctgtacgtgcatgtggtgatcgaaacgccggtgcggctgaccgagcaccagagggagctgctgcgccagttcgacaagtccgtccatgaaggcggctcgcggcacagtccgcaggagcagtcgtggctggacaaggtgaagaacttcttctccagctga

SEQ ID NO: 118036 - protein, 380 aa, Ralstonia solanacearum
MAKRDYYEVLGVGKNASDDEIKKAYRKLAMKYHPDRNPDSKEAEEKFKEAKEAYEMLSDADKKAAYDQYGHAGVDPNMAGGFGAGAQGFGGFAEAFGDIFGDIFGQAQQGGRRGAGPQMYRGADLRYSMEITLEQAAHGYDTQIRVPHWDECDHCHGKGAEPGSSVETCPTCHGAGQVRVSQGFFTMQQTCPKCHGNGKYIPKPCSKCHGQGKVKSQKTLEVKIPAGIDEGMRIRSSGNGEPGINGGPPGDLYVEIHIKAHSVFERDGDDLHCQMPISFAVAAMGGDIEVPTLGGRVTFNVPEGTQAGKTFRLRGKGIKGVRSGYAGDLYVHVVIETPVRLTEHQRELLRQFDKSVHEGGSRHSPQEQSWLDKVKNFFSS

SEQ ID NO: 118037 - DNA, 1131 bp, Rhizobium loti
  CDS (1)..(1131): transl_table=11
atgaaagctgatttctacgaaacgctgggcgtgcaaaagggcgccgacgagaaggagctcaagagcgctttccgcaagctcgccatgcagttccatcctgaccgcaatcccggcgatcattcctgcgagcacaagttcaaggaaatcaacgaagcctacgagacgctgaaggacccgcaaaagcgcgcggcctacgaccgtttcggccacgccgccttcgaacagggcggcatgaatggcggcgcgcaaggctttggtgccggcggcttcgccgacatcttcgaggatattttcggcgacatgatgggcgggcgccagcgccgctcgtcaggcggccgcgagcgcggcgccgacctgcgctacaacatggaaatctcgctggaagaggcctttgccggcaagaccgcgcaaatccgcgttccggcctcgatatcgtgcaccgaatgctccggcagcggcgccaaacccggcacccagccggtgacatgctcgatgtgccacggccacggcaaggtgcgggcgacgcaaggcttcttctcgatcgagcgcacctgcccgcaatgccagggccgcggccagacgatcaaggatccatgcccgaaatgcgccggccagggccgcgtcaccgaggaacgctcgctgtcggtcaacattccggccggcatcgaggacggcacccgcatccgccttgccaatgagggcgaggccggcctgcgcggcgggccttcgggcgacctctatattttcctggcggtgaagccgcatgaattcttccagcgcgatggtgccgacctctattgcaaggtgccgatctcgatgacgacggcggcccttggcggttccttcgaggtgacgacgctggacggcacccagaccaaggtgaaagtgcccgaaggcacgcagaacggccgccagttccgcctcaagggcaagggcatgccggtgctgcgccagcccaatgtcggcgacctctatatccagaccgctgtcgagacgccgcagaacctgtcgcgccgccagcgcgagttgctggaggagttcgaacagctctcctcgcaggacaattcgccccaatcgagcgggtttttcgcccgcatgaaggattttttcgagtctttcggcgagcgttga

SEQ ID NO: 118038 - protein, 376 aa, Rhizobium loti
MKADFYETLGVQKGADEKELKSAFRKLAMQFHPDRNPGDHSCEHKFKEINEAYETLKDPQKRAAYDRFGHAAFEQGGMNGGAQGFGAGGFADIFEDIFGDMMGGRQRRSSGGRERGADLRYNMEISLEEAFAGKTAQIRVPASISCTECSGSGAKPGTQPVTCSMCHGHGKVRATQGFFSIERTCPQCQGRGQTIKDPCPKCAGQGRVTEERSLSVNIPAGIEDGTRIRLANEGEAGLRGGPSGDLYIFLAVKPHEFFQRDGADLYCKVPISMTTAALGGSFEVTTLDGTQTKVKVPEGTQNGRQFRLKGKGMPVLRQPNVGDLYIQTAVETPQNLSRRQRELLEEFEQLSSQDNSPQSSGFFARMKDFFESFGER

SEQ ID NO: 118039 - DNA, 1140 bp, Rhizobium meliloti
  CDS (1)..(1140): transl_table=11
atgaaacgtgatctttacgaaacgcttggcgttcaaaaaaacgcggacgaaaaggagctgaagagcgcctttcgcaaactcgcgatgaaatatcacccggacaggaatcccggcgaccaggagtcggaaaagtccttcaaggaaatcaacgaagcctatgagacgctgaaggatccgcagaaacgcgcggcctatgaccgctacggccatgcggccttcgagcagggcggcatgggcgcaggcttcggcaacggcttcgccggcggcggagcgcacggcttctccgatattttcgaggacatcttcggcgagatgatgggtggccgtcagcgccgctcgtcaggcggacgcgagcgcggcgcggacctgcgctataacatggagatttcgctcgaggaggcctattccggcaagacggcgcagatccgcgtgccgacgtccatcacctgcgacgtctgcaccggcacgggcgccaagcccggtaccagcccgaagacctgcggcacctgtcagggcaccggccgcgtccgcgcggcccagggcttcttctcgatcgagcggacctgcccgacctgcggcggccgcggccagacgatcgccgacccctgcaccaaatgccacggccagggccgcgtcgtggaggagcggacgctctcggtcaacattccggccggtatcgaggacggcacgcgcatccggctttccggcgagggtgaggccggccttcgcggcggcccggcgggcgacctctacatcttcctctcagtgaagccgcacgaattctatcagcgcgacggcgctgatctctattgcgccgtgccgatctctatgacgacggcggcgctcggcggcaagttcgacgtcaccaccctcgacggcaccaaatcgcgcgtcaccgtgccggaaggcacgcaggccggcaagcagttccgcctcaagggcaagggcatgccggtgctgcgctccagccagaccggcgatctctatatccagattcaaatcgagacgccgcagaagctcaccaagcgccaacgcgagttgctgcaggaatttgagcagatctcgtccaaggagaacaatcccgaatcgacgggcttcttctcccggatgaaggatttcttcgacacgttgagcgagtga

SEQ ID NO: 118040 - protein, 379 aa, Rhizobium meliloti
MKRDLYETLGVQKNADEKELKSAFRKLAMKYHPDRNPGDQESEKSFKEINEAYETLKDPQKRAAYDRYGHAAFEQGGMGAGFGNGFAGGGAHGFSDIFEDIFGEMMGGRQRRSSGGRERGADLRYNMEISLEEAYSGKTAQIRVPTSITCDVCTGTGAKPGTSPKTCGTCQGTGRVRAAQGFFSIERTCPTCGGRGQTIADPCTKCHGQGRVVEERTLSVNIPAGIEDGTRIRLSGEGEAGLRGGPAGDLYIFLSVKPHEFYQRDGADLYCAVPISMTTAALGGKFDVTTLDGTKSRVTVPEGTQAGKQFRLKGKGMPVLRSSQTGDLYIQIQIETPQKLTKRQRELLQEFEQISSKENNPESTGFFSRMKDFFDTLSE

SEQ ID NO: 118041 - DNA, 1176 bp, Rhodopirellula baltica
  CDS (1)..(1176): transl_table=11
atggccaccaaaacctgctactacgaagtgctgaaggtcgaacgaacggccacgaagcagcaggtcgatcgcgcgtatcgcaaacttgctatcaagtatcaccccgatagcaatcgagacgacggatccgcgacggcgaaattcaaagaagcaaccgaagcctacgaagtcctcagcgatgcgaacaaacgagctcgctatgaccaatacggtcatgccggggtcgaaggcgccacacaacaatacggcgacgtcgaagacatcttcgaagctttcggcgatctgttcggcggcggctttggtgacttctttggcggaggctcccgtcgtggcggcggacgacgtcgcgttcgacgcggtgccgatgttcgatgcgacgtcacactgacgctggaagaagccgcccgcggatgccacaaagacatcgtgttccgtcgccgcgtttcgtgcgatacctgtgacggcagcggtgccgccgcgggcagcgaaccggtcacctgcaccatgtgcggcggacaaggacaagtcatccagtcagcgggcatcttgcgtgtccaaacgacttgcccaacctgcaaaggtgccggcaaacaaatcggcgaaccgtgtggtaaatgccgcggcactggaacgcaaaacgaaaaagccgagatgaacgtcgagatccctgccggggtcgacgacggcatgcgagtccgcttgcagggcgaaggcgaacccagccccgatggcggccccaatggcgactgctactgcttcatctccgtcaaagaacacaacctgttcaaacgcgaaggccagcatctgattttgcagatgcccatttcgtacgcccaagccgcgctcggggcaacaatcaacgtgccgactcttgatgggccgcacgaattaaccgttcccgccggcacacaaaccggtcacgtcttcaccgttcgcgggcaaggcatcgttgatcctcgcagtggacgcaccggcgacttgctggttcagattttcatcgaagtccccaaaaagctcagcgacaaacaacaaaaactgcttcgcgaactggccgaactcgatcacgattcggtgcttcccgaacgcacctcgtttctcgacaaacttcgtcacttttttgaccccgaaccggaagaagccggcaccggctcgaccgacacggagaaagactcatga

SEQ ID NO: 118042 - protein, 391 aa, Rhodopirellula baltica
MATKTCYYEVLKVERTATKQQVDRAYRKLAIKYHPDSNRDDGSATAKFKEATEAYEVLSDANKRARYDQYGHAGVEGATQQYGDVEDIFEAFGDLFGGGFGDFFGGGSRRGGGRRRVRRGADVRCDVTLTLEEAARGCHKDIVFRRRVSCDTCDGSGAAAGSEPVTCTMCGGQGQVIQSAGILRVQTTCPTCKGAGKQIGEPCGKCRGTGTQNEKAEMNVEIPAGVDDGMRVRLQGEGEPSPDGGPNGDCYCFISVKEHNLFKREGQHLILQMPISYAQAALGATINVPTLDGPHELTVPAGTQTGHVFTVRGQGIVDPRSGRTGDLLVQIFIEVPKKLSDKQQKLLRELAELDHDSVLPERTSFLDKLRHFFDPEPEEAGTGSTDTEKDS

SEQ ID NO: 118043 - DNA, 1140 bp, Rhodopseudomonas palustris
  CDS (1)..(1140): transl_table=11
atgtccactaccaagcgttgctactacgaaaccctcgaagtcgagcgcaacgccgacgattcgacgctgaaaagcgcgttccgcaagctcgcgatgaaatggcacccggaccgcaatccgggcgatccgcagtgcgagatcaagttcaaagagatcaacgaagcctacgaagtcctcaaagacggcgataagcgcgccgcctacgaccgctacggccatgccgcgttcgagcaaggcggcttcggtggcggggccgggtttggcgcgggcttcgcctcgtcgttctccgacatcttcgaagacctgttcggcatggcggcgcagcgcggccgcggcaccggtcgggagcgcggcgccgacctgcgctacaatatggaaatcaccctggaggacgccttcaagggcaagaccgcgcagatcgaaatcccggtctcggtcacctgcgaagcctgctccggcaccggcgccaaggctggcaccaagccgaagacctgttcgacctgcggcggcgccggccgcgtccgccaggcccaaggcttcttcacgctggagcgcacctgcccgagctgccaaggccgcgggcagaccatcgaagacccctgcccgtcctgcactggctccggccgcgtcaccaaggagcggacgctgtcggtcaacattccgcagggcgtcgaagacggcacccggatccggctggctggcgaaggcgaagcaggcctgcgcggcggtccacccggtgacctctacattttcttgtcgctggccaaccacgctatcttccaacgcgacggcgccgacctgcactgccgcgtgccgatctcgatggtgaccgcggcgcttggtggcgaattcgaagtgccgaccatcgatcgcggtaagaccaaggtcaaagtaccgtcgggcacccagaccggccgccgattccgcatcgccggcaagggcatgccagtgctgcgttcgcggcaggtcggcgacatgtacgtgcaggtggtcgtcgaaacgccacagaatctgaccaagaagcagcaggagctgctggcagagttcgaaaaattgtcgtcgggtgaaactcagcccgaggccgtgggtttcttctccaaggtcaaagaattctttggctctcgcgcaagcgctccctga

SEQ ID NO: 118044 - protein, 379 aa, Rhodopseudomonas palustris
MSTTKRCYYETLEVERNADDSTLKSAFRKLAMKWHPDRNPGDPQCEIKFKEINEAYEVLKDGDKRAAYDRYGHAAFEQGGFGGGAGFGAGFASSFSDIFEDLFGMAAQRGRGTGRERGADLRYNMEITLEDAFKGKTAQIEIPVSVTCEACSGTGAKAGTKPKTCSTCGGAGRVRQAQGFFTLERTCPSCQGRGQTIEDPCPSCTGSGRVTKERTLSVNIPQGVEDGTRIRLAGEGEAGLRGGPPGDLYIFLSLANHAIFQRDGADLHCRVPISMVTAALGGEFEVPTIDRGKTKVKVPSGTQTGRRFRIAGKGMPVLRSRQVGDMYVQVVVETPQNLTKKQQELLAEFEKLSSGETQPEAVGFFSKVKEFFGSRASAP

SEQ ID NO: 118045 - DNA, 1113 bp, Rickettsia prowazekii
  CDS (1)..(1113): transl_table=11
atgtcacaggactattaccaagtattaggagttagtaaaacagctagccaagctgacattaaaaaagcttacctaaagctagctaagcaatatcaccctgataccactaatgctaatgatgccgaaaagaaatttaaagaaattaatgctgcttatgatgttttaaaagacgaacaaaaaagagccgcttatgatcgtttcgggcatgatgcttttcaaagccaacaagcgcgaggaggtggaaataatggcagttttcatccggatattaatgatatatttggagatttctttagtgactttatgggcagcggtagaagaaagcaaacatcaagcaagattagaggatcggatttaaaatatgatttaacaattaagctagaggaagcatttcacggtatagaaaaaaatattagcttctctagcgaagtaaaatgcgatacctgtcacggcactggttctgagaaaggtgaaacaatcacaacttgcgatgcttgcggtggtgttggagcaactagaattcaacaaggattcttcacacttgaacaaacttgccataaatgccaaggtaatggacaaattataaaaaatccatgtaaaaaatgtcatggcatgggacgttatcataaacaacgtaatttatcaattaatattcctgctggtgttgagaacggtactagaataagacatacaggagaaggagaagcaggtattagaggaggtaataacggtgatttatatgttgatatcgcaataaaaccacatgatatttataaagtagatggcgcaaatctacattgtaaattacctattagttttgtgcatgctgctcttggaggcgaaatagaagtaccggtaattgaaggtggaaaagtaaaattaacaatcccagcaggtactcaaaacggtgatcaattaaggttgcgcagtaaaggtatgtctaaagtcagatctacgattcgaggtgatatgcttacacatattcatgttgaagtacctaaaaatttatctaaaaaacaacgtgaattactagaagaatttaaaaaagaatccataaacgaaaaagaaaatgatagtagcttttttaataaaatgaaaagtatgtggtcatga

SEQ ID NO: 118046 - protein, 370 aa, Rickettsia prowazekii
MSQDYYQVLGVSKTASQADIKKAYLKLAKQYHPDTTNANDAEKKFKEINAAYDVLKDEQKRAAYDRFGHDAFQSQQARGGGNNGSFHPDINDIFGDFFSDFMGSGRRKQTSSKIRGSDLKYDLTIKLEEAFHGIEKNISFSSEVKCDTCHGTGSEKGETITTCDACGGVGATRIQQGFFTLEQTCHKCQGNGQIIKNPCKKCHGMGRYHKQRNLSINIPAGVENGTRIRHTGEGEAGIRGGNNGDLYVDIAIKPHDIYKVDGANLHCKLPISFVHAALGGEIEVPVIEGGKVKLTIPAGTQNGDQLRLRSKGMSKVRSTIRGDMLTHIHVEVPKNLSKKQRELLEEFKKESINEKENDSSFFNKMKSMWS

SEQ ID NO: 118047 - DNA, 1113 bp, Rickettsia typhi
  CDS (1)..(1113): transl_table=11
atgtcacaagactattaccaagtattaggagtcagtaaaacagctagccaagctgacattaaaaaagcttatctaaagctagctaagcaatatcatcctgatactactaatgctcacgatgccgaaaagaagtttaaagaaattaatgctgcttatgatgttttaaaagacgaacaaaaaagagctgcttatgatcgtttcgggcatgatgctttccaaaaccaacaagcacgaggaggtggaaataatagcgggtttcaccatgatattaatgatatatttggagatttctttagtgactttatgggaagtggcagaagaaagcaaacatcaagcaagattagaggatcggatttaaaatacgatttaacaattaagctagaagaggcatttcacggtatagaaaaaaatattagtttctctagcgaagtaaaatgcgatgcatgtcacggcactggttctgaaaaaggcgaaactgtaacaacttgtgattcttgcggtggtgttggagttactagaattcagcaaggattcttcacacttgaacaaacttgtcataaatgtcaaggtaatggacaaattataaaaaatccttgtaaaaagtgtcatggcatggggcgttatcataaacaacgtaatttatcaattaatattcctgctggtgttgaaaatggtactagaataagacattcaggagaaggagaagcaggtattagaggaggtaataacggtgatttatatgttgatatcgcaataaaaccacatgatatttataaaatagatggagcaaatctacattgtaaattacctattagttttgttcatgctgctcttggaggggaaatagaagtaccagtaattgaaggtggaaaagtaaaattaacaatcccagcaggtactcaaaacggggatcaattaaggttacgcagtaaaggtatgtctaaaataagatctactattcgaggtgatatgcttacgcatattcatgttgaagtacctaaaaatttatctaaaagacaacgtgaattactagaagaattcaaaaaagaatctataaatgaaaaagaaaatgatagtagcttttttaataaaatgaaaagtatgtggtcatga

SEQ ID NO: 118048 - protein, 370 aa, Rickettsia typhi
MSQDYYQVLGVSKTASQADIKKAYLKLAKQYHPDTTNAHDAEKKFKEINAAYDVLKDEQKRAAYDRFGHDAFQNQQARGGGNNSGFHHDINDIFGDFFSDFMGSGRRKQTSSKIRGSDLKYDLTIKLEEAFHGIEKNISFSSEVKCDACHGTGSEKGETVTTCDSCGGVGVTRIQQGFFTLEQTCHKCQGNGQIIKNPCKKCHGMGRYHKQRNLSINIPAGVENGTRIRHSGEGEAGIRGGNNGDLYVDIAIKPHDIYKIDGANLHCKLPISFVHAALGGEIEVPVIEGGKVKLTIPAGTQNGDQLRLRSKGMSKIRSTIRGDMLTHIHVEVPKNLSKRQRELLEEFKKESINEKENDSSFFNKMKSMWS

SEQ ID NO: 118049 - DNA, 1140 bp, Salmonella choleraesuis
  CDS (1)..(1140): transl_table=11
atggcgaaaagagattactacgagattttaggcgtttccaaaacagcggaagagcgtgaaatcaaaaaggcgtataagcgcctggccatgaaatatcatccggaccgcaatcagggtgataaagaggccgaagctaagtttaaagagattaaagaagcctacgaagtgctgaccgatgcgcaaaaacgcgcagcctacgatcagtatggtcacgccgcgtttgaacaaggcggtatgggcggcggatttggcggcggctttaatggcggcgctgatttcagtgatatctttggtgacgtttttggcgatatctttggcggcgggcgtggtcgccaacgtgcggcgcgtggggctgatttgcgttataacatggatctcaccctggaagaagcggtgcgtggcgtgaccaaagagatccgtattccgacgctggaggagtgcgacgtttgccacggcagcggcgcgaaagctggtacgcaaccgcaaacctgtccgacctgtcatggttctggtcaggtacagatgcgccagggattctttgctgtacagcagacctgcccacactgtcagggccgcggtacgctgatcaaagatccgtgccataaatgtcacggtcatgggcgtgttgaaaagagtaaaactctgtccgttaaaatcccggcgggcgtggataccggcgatcgtattcgtctggcaggcgagggcgaagcgggcgagcatggcgcaccggcaggcgacttgtacgttcaggtccaggtgaaacaacaccctattttcgagcgtgaaggcaataatctttattgcgaagtgccgatcaactttgcgatggcggcgctcggcggtgaaattgaagtgccgacgttagatggtcgcgtgatgctgaaagtaccgagcgaaacacaaacgggcaagctgttccgtatgcgcggcaaaggcgtgaagtccgtacgcggtggcgcgcagggcgatttgctgtgccgtgtggtagttgaaacgccggtcggtctgagcgaaaaacagaagcaattgctaaaagatcttcaggaaagttttggcggcccgacgggagagaaaaacagcccgcgttcaaaaagcttctttgacggcgtgaaaaaattctttgacgatttgactcgctaa

SEQ ID NO: 118050 - protein, 379 aa, Salmonella choleraesuis
MAKRDYYEILGVSKTAEEREIKKAYKRLAMKYHPDRNQGDKEAEAKFKEIKEAYEVLTDAQKRAAYDQYGHAAFEQGGMGGGFGGGFNGGADFSDIFGDVFGDIFGGGRGRQRAARGADLRYNMDLTLEEAVRGVTKEIRIPTLEECDVCHGSGAKAGTQPQTCPTCHGSGQVQMRQGFFAVQQTCPHCQGRGTLIKDPCHKCHGHGRVEKSKTLSVKIPAGVDTGDRIRLAGEGEAGEHGAPAGDLYVQVQVKQHPIFEREGNNLYCEVPINFAMAALGGEIEVPTLDGRVMLKVPSETQTGKLFRMRGKGVKSVRGGAQGDLLCRVVVETPVGLSEKQKQLLKDLQESFGGPTGEKNSPRSKSFFDGVKKFFDDLTR

SEQ ID NO: 118051 - DNA, 1137 bp, Shewanella oneidensis
  CDS (1)..(1137): transl_table=11
atgtcaaagcgagattattacgaagtattaggcgttggccgtgacgccagcgagcgtgaaattaaaaaagcctacaagcgtttggcgatgaagtttcaccccgatcgcaaccctggtgataaagctgccgaagcgagcttcaaagaagttaaagaagcctacgaaatcctaaccgatgccaacaaaaaagcggcctatgaccagtttggtcatgcgggtgtggatcccaatcgcggcggcggtggtggctatggcggcgcgggagatttcggtgatattttcggtgatgtctttggcgatattttcggcggtggacgccgtggcggcggtcaacgccaagcggcccgcggctcagatttacgttacaacctagagttatcactggaagaagccgttaaaggcctcaccaaagaactgcgtatcccaaccttagccagctgtgatgtatgtgacggcagcggtgcgaaaaaaggcacctcggcgaccacctgtacaacctgtcatggtcaaggccaagtgcaaatgcgccaaggtttctttaccgtgcaacagccttgtccaacctgtcatggtcgcggcaagatcattaaagatccttgcgctaagtgccatggtgatggtcgtgtcgagaagacgaagacgctgtcagttaagatcccagctggtgtcgacactggtgaccgtatccgtttagcaggtgaaggtgaagcgggcgagtttggcgcgccagcgggcgatttatatgttcaggtcagtgtacgtgaacatgccatctttgttcgcgatggcaacaacctctactgcgaagtgccgatttcattcagtaaagcggcgctcggcggcgagattgaagtcccaacactggatggcaaagtcagcctgaagatccctgccgaaactcaaacgggccgtatgttccgtctgcgtggtaaaggggttaaatcggttcgcagccatgccgttggcgacttgctctgcaaagtcgtgatggaaacgccagtcaacctaaacgagcgtcagaaagaactactgcgtgagtttgaggcgaccttaaccggcgaatcaaagaagcacagcccaaaggctgaaggcttttttgatggcgtgaagaagttcttccaagacctaaatagctaa

SEQ ID NO: 118052 - protein, 378 aa, Shewanella oneidensis
MSKRDYYEVLGVGRDASEREIKKAYKRLAMKFHPDRNPGDKAAEASFKEVKEAYEILTDANKKAAYDQFGHAGVDPNRGGGGGYGGAGDFGDIFGDVFGDIFGGGRRGGGQRQAARGSDLRYNLELSLEEAVKGLTKELRIPTLASCDVCDGSGAKKGTSATTCTTCHGQGQVQMRQGFFTVQQPCPTCHGRGKIIKDPCAKCHGDGRVEKTKTLSVKIPAGVDTGDRIRLAGEGEAGEFGAPAGDLYVQVSVREHAIFVRDGNNLYCEVPISFSKAALGGEIEVPTLDGKVSLKIPAETQTGRMFRLRGKGVKSVRSHAVGDLLCKVVMETPVNLNERQKELLREFEATLTGESKKHSPKAEGFFDGVKKFFQDLNS

SEQ ID NO: 118053 - DNA, 1122 bp, Staphylococcus epidermidis
  CDS (1)..(1122): transl_table=11
atggccaaaagagactattatgaagtcttaggcgtaaacaaaagcgcttctaaagacgaaattaaaaaagcttatcgtaaattatcaaaaaaataccatccagatataaataaagaagaaggcgcagacgaaaaattcaaagaaatctccgaagcatatgaagttttaagtgatgaaaacaaacgtgtaaattatgatcaatttggtcatgacggaccacaaggcggatttggaagtcaaggctttggtggcagtgactttggtggatttgaagatattttcagctcattctttggtggcggttcacgtcaaagagatcctaatgcacctcgcaaaggtgatgaccttcaatacacaatgacaataacatttgaagaggctgtattcgggacaaaaaaagaaatatcaataaaaaaagatgtaacatgtcatacatgtaacggtgatggggctaaacctggtacaagtaaaaaaacttgtagctattgtaatggcgctggtcgtgtttctgttgaacaaaatactattttgggtagagtgagaactgaacaagtttgtcctaaatgtgaaggtagtggacaagaatttgaagaaccatgtccaacatgtaaaggaaaaggtactgaaaataaaacagttaaactagaagtaactgttcctgaaggtgtagataacgaacaacaagttcgtttagctggagaaggttcacctggtgttaacggaggaccacatggtgacctatatgtggtgttcagagttaaaccatccaatacatttgaacgtgatggagacgatatctactataatctagatattagcttttcacaggctgcactaggtgatgaaattaagatacctacattaaaaagtaatgttgttttaaccattccggcaggtacacaaacgggtaaacaattccgacttaaagataaaggtgtaaagaatgttcatggttatggctacggggacttatttgtcaacataaaagtggttacaccaacaaaattaaatgaccgtcaaaaagaattattaaaagaatttgctgaaattaatggtgaaaatataaatgaacagtcctctaatttcaaagatagagcgaaaagattctttaaaggagaatag

SEQ ID NO: 118054 - protein, 373 aa, Staphylococcus epidermidis
MAKRDYYEVLGVNKSASKDEIKKAYRKLSKKYHPDINKEEGADEKFKEISEAYEVLSDENKRVNYDQFGHDGPQGGFGSQGFGGSDFGGFEDIFSSFFGGGSRQRDPNAPRKGDDLQYTMTITFEEAVFGTKKEISIKKDVTCHTCNGDGAKPGTSKKTCSYCNGAGRVSVEQNTILGRVRTEQVCPKCEGSGQEFEEPCPTCKGKGTENKTVKLEVTVPEGVDNEQQVRLAGEGSPGVNGGPHGDLYVVFRVKPSNTFERDGDDIYYNLDISFSQAALGDEIKIPTLKSNVVLTIPAGTQTGKQFRLKDKGVKNVHGYGYGDLFVNIKVVTPTKLNDRQKELLKEFAEINGENINEQSSNFKDRAKRFFKGE

SEQ ID NO: 118055 - DNA, 1140 bp, Streptococcus agalactiae serotype III; identical to SEQ ID NO: 64059
  CDS (1)..(1140): transl_table=11

SEQ ID NO: 118056 - protein, 379 aa, Streptococcus agalactiae serotype III; identical to SEQ ID NO: 64060

SEQ ID NO: 118057 - DNA, 1134 bp, Streptococcus mutans; identical to SEQ ID NO: 64061
  CDS (1)..(1134): transl_table=11

SEQ ID NO: 118058 - protein, 377 aa, Streptococcus mutans; identical to SEQ ID NO: 64062

SEQ ID NO: 118059 - DNA, 1137 bp, Streptococcus pyogenes
  CDS (1)..(1137): transl_table=11
atgaacaatacagaatattacgatcgtctgggggtttctaaggacgcttctcaggacgatatcaaaaaagcttatcgaaaaatgtctaagaaatatcatccagatatcaataaagaagctggagcggagcaaaaatataaggatgttcaagaagcttacgaaaccttaagcgattcacaaaagcgtgctgcttatgatcaatacggcgctgcaggtgctcaaggcggctttggtggcggagcaggcggctttggtggttttgacggaggcggctttggtggttttgaagatatcttctcaagcttctttggtggcggtggaagccgaaacccaaatgcccctcgtcaaggtgacgatttgcaatatcgtgttaatttatcttttgaagaggctgtatttggtgttgaaaaagaagttagctataatcgcgaagcaacctgcggcacttgtttaggctcaggtgcaaaacctggtaccgctccagtaacttgtcgtaagtgccatggttcaggtgtaatgacaattgacacccaaacaccacttggtatgatgcgtcgacaagtcacctgcgatatttgtcatggtagtggtaaggaaattaaagaaccctgtcaaacctgtcacggtactggtcatgaaaagcaagctcataaagtgtctgttaagattccagctggtgtagagactggtcagcaaatccgtttacaaggtcaaggagaagctggctttaatggcggaccttatggtgatttatttgttattttgaatgtcttaccaagtaagcaatttgaacgcaatggttccactatttactacagcttagatatttcttttactcaagcagccttaggagatactgttgaaattccaacggttcatggcgatgttgagctggctatccctgctgggacacaaacaggtaaaaccttccgccttaaaggcaaaggagcaccaaaactccgtggtggaggtcaaggggatcaacatgttaccgttaatattgtgaccccaaccaaactcaatgacgctcaaagggaagccttgcaagcatttgcagaagcgagtggtgaaaaaatgttacatccaaagaaaaaaggtttttttgataaagtgaaagatgccttagaggatatttaa

SEQ ID NO: 118060 - protein, 378 aa, Streptococcus pyogenes
MNNTEYYDRLGVSKDASQDDIKKAYRKMSKKYHPDINKEAGAEQKYKDVQEAYETLSDSQKRAAYDQYGAAGAQGGFGGGAGGFGGFDGGGFGGFEDIFSSFFGGGGSRNPNAPRQGDDLQYRVNLSFEEAVFGVEKEVSYNREATCGTCLGSGAKPGTAPVTCRKCHGSGVMTIDTQTPLGMMRRQVTCDICHGSGKEIKEPCQTCHGTGHEKQAHKVSVKIPAGVETGQQIRLQGQGEAGFNGGPYGDLFVILNVLPSKQFERNGSTIYYSLDISFTQAALGDTVEIPTVHGDVELAIPAGTQTGKTFRLKGKGAPKLRGGGQGDQHVTVNIVTPTKLNDAQREALQAFAEASGEKMLHPKKKGFFDKVKDALEDI

SEQ ID NO: 118061 - DNA, 1119 bp, Streptococcus pneumoniae
  CDS (1)..(1119): transl_table=11
atgaacaatactgaattttatgatcgtctgggggtatccaaaaacgcttcggcagacgaaatcaaaaaggcttatcgtaagctttccaaaaaatatcacccagatatcaacaaggagcctggtgctgaggacaagtacaaggaagttcaagaagcctatgagactttgagtgacgaccaaaaacgtgctgcctatgaccagtatggtgctgcaggcgccaatggtggtttcggtggtttcaatggggcaggtggcttcggtggttttgaggatattttctcaagtttcttcggcggaggcggttcttcgcgcaatccaaacgctcctcgccaaggagatgatctccagtatcgtgtcaatttgacctttgaagaagctatcttcggaactgagaaggaagttaagtatcatcgtgaagctggctgtcgtacatgtaatggctctggtgctaagccagggacaagtccagtcacttgtggacgctgtcatggcgctggtgtcattaacgtcgatacgcagactcctcttggtatgatgcgtcgccaagtaacctgtgatgtctgtcacggtcgaggaaaagaaatcaaatatccatgtacaacctgtcatggaacaggtcatgagaaacaagctcatagcgtacatgtgaaaatccctgctggtgtggaaacaggtcaacaaattcgcctcgctggtcaaggtgaagcaggctttaacggtggaccttatggtgacttgtatgtagtagtttctgtggaagctagcgacaagtttgaacgtgaaggaacgactatcttctacaatctcaacctcaactttgtccaagcggctcttggtgatacagtagatattccaactgttcacggtgatgttgaattggttattccagagggaactcagactggtaagaaattccgcctacgtagtaagggggcaccgagccttcgtggcggtgcagttggtgaccaatacgttactgttaatgtcgtaacaccgacaggcttgaacgaccgccaaaaagtagccttgaaagaattcgcggctgctggtgacttgaaagtaaatccaaagaaaaaaggcttctttgaccatattaaagatgcctttgatggagaataa

SEQ ID NO: 118062 - protein, 372 aa, Streptococcus pneumoniae
MNNTEFYDRLGVSKNASADEIKKAYRKLSKKYHPDINKEPGAEDKYKEVQEAYETLSDDQKRAAYDQYGAAGANGGFGGFNGAGGFGGFEDIFSSFFGGGGSSRNPNAPRQGDDLQYRVNLTFEEAIFGTEKEVKYHREAGCRTCNGSGAKPGTSPVTCGRCHGAGVINVDTQTPLGMMRRQVTCDVCHGRGKEIKYPCTTCHGTGHEKQAHSVHVKIPAGVETGQQIRLAGQGEAGFNGGPYGDLYVVVSVEASDKFEREGTTIFYNLNLNFVQAALGDTVDIPTVHGDVELVIPEGTQTGKKFRLRSKGAPSLRGGAVGDQYVTVNVVTPTGLNDRQKVALKEFAAAGDLKVNPKKKGFFDHIKDAFDGE

SEQ ID NO: 118063 - DNA, 1131 bp, Synechococcus sp
  CDS (1)..(1131): transl_table=11
atggctgctgactactaccaactgcttggcgttgctcgcgacgcagacaaggacgaaattaaacgtgcttatcggcgtttggctcgcaagtaccatccagatgtgaacaaggagccaggcgctgaagacaagttcaaagaaatcaaccgcgcctacgaggtgctgtcggagcctgaaacccgcgctcgctacgaccaatttggggaagcgggtgtctctggtgccggagccgctggtttccaagattttggcgacatgggtggattcgctgacatctttgaaaccttcttcagcgggtttggaggcatgggcgggcaacaagcctccgctcgccggcgcggacccactcggggtgaagacctacggctggatttgaaactggatttccgagatgccatctttggtggcgagaaagaaattcgggtcacccatgaagaaacttgcggcacctgtcaggggagtggggctaaggccggaacccggccgcaaacttgtacgacctgtggtggtgcaggccaagtccgacgagcaacccggacgcccttcggcagctttacccaagtttcagtctgtcccacctgcgagggcagcgggcagatgatcgttgataagtgcgatgactgtggcggagcagggcgtctacggcggccgaagaaactgaagatcaatattccagctggggtggatagcggtacgcggctgcgagtagccaatgaaggcgatgcggggctgcgcggtgggccgccgggcgacctttacgtctatttgttcgtcagtgaggacacccagttccggcgggaaggcatcaatctcttctccaccgtgaccatcagctacctgcaagccattttgggctgcagcctagaagttgcgactgtagacggccccaccgagctgatcattccgcccggaacacaacccaatgccgtactgacggtggagggcaagggcgtgccacgactggggaatccggtcgctcggggcaatcttttggtcacaattaaggtggaaattcccaccaaaattagcgctgaagaacgcgaactgttggaaaaagtggtgcaaattcgcggcgatcgcgctggaaaaggagggattgaaggcttcttcaaaggagtctttggcggatga

SEQ ID NO: 118064 - protein, 376 aa, Synechococcus sp
MAADYYQLLGVARDADKDEIKRAYRRLARKYHPDVNKEPGAEDKFKEINRAYEVLSEPETRARYDQFGEAGVSGAGAAGFQDFGDMGGFADIFETFFSGFGGMGGQQASARRRGPTRGEDLRLDLKLDFRDAIFGGEKEIRVTHEETCGTCQGSGAKAGTRPQTCTTCGGAGQVRRATRTPFGSFTQVSVCPTCEGSGQMIVDKCDDCGGAGRLRRPKKLKINIPAGVDSGTRLRVANEGDAGLRGGPPGDLYVYLFVSEDTQFRREGINLFSTVTISYLQAILGCSLEVATVDGPTELIIPPGTQPNAVLTVEGKGVPRLGNPVARGNLLVTIKVEIPTKISAEERELLEKVVQIRGDRAGKGGIEGFFKGVFGG

SEQ ID NO: 118065 - DNA, 1134 bp, Synechococcus sp
  CDS (1)..(1134): transl_table=11
atggcggactactacgacctgctgggggtcggacgtgatgctgatgccgatacgttgaagcgtgcctatcgcagcaaggcacgcaaataccacccggacatcaataaggagcctggggcggaagaccgcttcaaggagatcggtcgtgcctacgaggtgctgagcgaccctcagacccgtgcccgttacgaccaattcggtgaagctggtctcgggggtgcggccggtgcttcggatatgggggacatgggcggcttcgccgacctgttcgaaaccttcttccagggcttcggaggtcccggaggggccgccgccggtcgctccggacgtcgcggtccccagcagggcgatgaccttcgctacgacctcacgattgattttgagcaggcggtcttcggtcaggaacaggagatcaagatcccccacctcgaaacctgtgatacctgcggtggcagcggagccaaggcgggcagcggtcccaccacttgcggcacctgcggaggagccggtcaggtgcggcgggcgacccggactcccttcggaagcttcacgcaggtggcggaatgccccaattgcggcggaaccgggcaggtgatcgctgatccctgcaacgcctgcggtggacagggcgtgcgtcaggtgcgcaagaaactgcgcatcaacattcccgccggagtggacaccggaacccggcttcgggtttccggagaaggcaatgctggtcagcgtggggggccgtccggcgatctttacgtcttcctcacggtcaagtctcatccacggctgcgcagagacggtctcaacatcctgtcgaccgtgaacgtcagttatctgcaggcgatcctgggggacacgattgaagtggaaaccgttgatggcgacacagttctggagattcccccgggcactcaacccggtaccgttctgaccctggccaacaagggcatacccaagttggggaacccggtggcccgtggggatcaaagggtgcaagtgatggtgcagcttcccacgcgtctgtcggatcccgaacgaacgctgctggaggagttggcggggcatcattcggcccgaggcaagcagcatcaccaccacaacagtgggttgtttgcccgactgttcgggcagaagtga

SEQ ID NO: 118066 - protein, 377 aa, Synechococcus sp
MADYYDLLGVGRDADADTLKRAYRSKARKYHPDINKEPGAEDRFKEIGRAYEVLSDPQTRARYDQFGEAGLGGAAGASDMGDMGGFADLFETFFQGFGGPGGAAAGRSGRRGPQQGDDLRYDLTIDFEQAVFGQEQEIKIPHLETCDTCGGSGAKAGSGPTTCGTCGGAGQVRRATRTPFGSFTQVAECPNCGGTGQVIADPCNACGGQGVRQVRKKLRINIPAGVDTGTRLRVSGEGNAGQRGGPSGDLYVFLTVKSHPRLRRDGLNILSTVNVSYLQAILGDTIEVETVDGDTVLEIPPGTQPGTVLTLANKGIPKLGNPVARGDQRVQVMVQLPTRLSDPERTLLEELAGHHSARGKQHHHHNSGLFARLFGQK

SEQ ID NO: 118067 - DNA, 1161 bp, Tetragenococcus halophilus
  CDS (1)..(1161): transl_table=11
atggcaacaaaacgagattattatgaagtcctaggtgtagacaaaggggcttcagatgatgaaatcaaaaaggcatatcgtaagctttccaaaaaatatcatccagacgtcaaccaagaagctgatgcagaagagaagtttaagaaatttcagaagcctatgaacacactaagcgacccacaaaaacgtgcagcttatgatcaatatggtcatgcaggtgcagacgccaatttcggcggcggtggtgctggtggatttggcggcttcggtggaggcttctcagacgctggtggtttcggtggctttgaagatatttttgaatctttcttcggtggtggccgttctgcagatccaaatgcgccacgacaaggtgatgatttacaatattcaatcaatctgacttttgaagaagcggtatttggaaaagatacagaagtttcgtataaacgtaatgaagtttgtcatacttgcggtggaaatggagccaaaccaggtacgcaaccagaaacttgtcacaaatgtaagggatctgggacgatcaatgctgaacgtcaaacgccacttggtcgagtaatgacaagacaaacttgcgatgtttgtcacggaactggtaaagaaatcaaagaagtttgcgaaacatgtcatggtacaggacatgaaaagaaaacacatagtgttaatgtttctgttccagctggtgtagaagatggacaacaaatgaggctagctaaccaaggggaagctggcactaacggtggaccttatggcgatctatatgttgtcttgtattgtagtcacgaaacgtgtaatatttttgaccgtgatggatcggaaatttattacgaattgccaatcaactttgtacaagcagctttaggtgatgaagtcgatgtaccaactgttcatggaaatgtaaaattgaagattccagctggtacacaaacaagtacgaaattccgtctgcgcggtaaaggcgcacctcgtttaagaggaaatagtacgggagatcaacaagtaacggtgaagattatcactccgaagaacttgaatgaagaacaaagagaagcattgcggaattttgctgaattaacgggacaaagtacagaagaacaacaatcagaaggttttttcgacaagatgaaagatgcttttaaaaaataa

SEQ ID NO: 118068 - protein, 386 aa, Tetragenococcus halophilus
MATKRDYYEVLGVDKGASDDEIKKAYRKLSKKYHPDVNQEADAEEKFKKFQKPMNTLSDPQKRAAYDQYGHAGADANFGGGGAGGFGGFGGGFSDAGGFGGFEDIFESFFGGGRSADPNAPRQGDDLQYSINLTFEEAVFGKDTEVSYKRNEVCHTCGGNGAKPGTQPETCHKCKGSGTINAERQTPLGRVMTRQTCDVCHGTGKEIKEVCETCHGTGHEKKTHSVNVSVPAGVEDGQQMRLANQGEAGTNGGPYGDLYVVLYCSHETCNIFDRDGSEIYYELPINFVQAALGDEVDVPTVHGNVKLKIPAGTQTSTKFRLRGKGAPRLRGNSTGDQQVTVKIITPKNLNEEQREALRNFAELTGQSTEEQQSEGFFDKMKDAFKK

SEQ ID NO: 118069 - DNA, 1110 bp, Thermotoga maritima
  CDS (1)..(1110): transl_table=11
atgaaaaaagaaaagaaggattactacgaaattctcggtgttcccagagacgccacacaggaagaaataaaaagggcttacaagagactcgtaaaagagtggcatccggatcgtcatccggaaaacaggaaggaagccgaacagcgttttaaggaaattcaggaggcctacgaagtcctcagcgacccacagaagagggctatgtacgatcgtttcggatacgtgggagaacaacccacgtatcaggaaacagaatctggtggcttcttcgacgatatattcagagactttgaaaacatcttcaacagagatatattcgacgttttctttggcgaaagaccacaccaggaagaaagaagagaatacgcccgaagaggcgaagatataaggtacgaaatagaagtaactctctccgatttgatcaacggagcggagatacccgtggaatacgaaaggtacgaaacctgtccgaggtgtggcggaactggcgtagaacccaacgctggatacatggattgtccaagttgtggtggaacgggaaggatcagagaagaacgaagatcgttctttggttacttcgtcagcgagagaacctgtgagaggtgtggcggcacagggaagattccacgggaatactgccacgagtgtggtggaagcggcagagttctcagaaaggtcagaagaacggtgaaaatcccaccaaatgtggaagatggtactcatcttagaatcactggcggtggaaatgcgggatattacggtggaccttacggtgatctgataattatcgtccgtgtgaaaccagatcccagattcaagaaatccggttcagatctcgtgtatgatgtcacaatagactaccttcaggctatcttgggaacaaccgttgaagttcctcttccagaaggcggtacgacgatgttgaagattcctccgggaactcagccggaaaccgtcttcaggttgaagggaaaaggccttccaaacaggtatggaaggcgcggagatctcatcgtgaacgtgcacgttgagataccaaagagtctctccagagaggaaagaaaagtcctcgaagaactggcgaaaaaacgcggagtcacgatcggttag

SEQ ID NO: 118070 - protein, 369 aa, Thermotoga maritima
MKKEKKDYYEILGVPRDATQEEIKRAYKRLVKEWHPDRHPENRKEAEQRFKEIQEAYEVLSDPQKRAMYDRFGYVGEQPTYQETESGGFFDDIFRDFENIFNRDIFDVFFGERPHQEERREYARRGEDIRYEIEVTLSDLINGAEIPVEYERYETCPRCGGTGVEPNAGYMDCPSCGGTGRIREERRSFFGYFVSERTCERCGGTGKIPREYCHECGGSGRVLRKVRRTVKIPPNVEDGTHLRITGGGNAGYYGGPYGDLIIIVRVKPDPRFKKSGSDLVYDVTIDYLQAILGTTVEVPLPEGGTTMLKIPPGTQPETVFRLKGKGLPNRYGRRGDLIVNVHVEIPKSLSREERKVLEELAKKRGVTIG

SEQ ID NO: 118071 - DNA, 1098 bp, Thermoplasma volcanium
  CDS (1)..(1098): transl_table=11
atggcaaaggattattacaaaatacttggcgtagataggaatgcctctgaggaagatattaaaaaggcattccgtgagcttgcaaagaaatggcatcctgatctacatccagataacaaggcagaagctgaagaaaaattcaaggaaatcagcgaagcttacgaagtcctttcggaccctgagaagaggcgcatttatgaccaaacagggtctgttgattttggcggcggaggcagcaacttcaactgggataactttactcatttcagcgacataaatgacatattcaatgaaatcttcggcggtaactttggatccgatttcttctcagggtttggcaatagacagtctacgaggaacatcgacctcgacatgtatacgaaccttgacatttcactggaagaagcatattacggaacagagaaaaggataaaattccggagaaatgctatttgcccagattgcaagggaactggtgctaaaaacgggaaactaataacttgtccaacctgccatggcacaggtcagcagagagtagttagaggccagggcttttttagaatggtaactgttacgacttgcaacacatgtggtggtaagggtagaatacctgaggaaaaatgcccaagatgcaacgggacgggtacgatagtcgtagacgaggatataactgttaaaataccaaggggtgcaacagataatctgaggttaagggtctctggaaaaggtcagtcctatgatggccgaaccggggatctctacgttatcctaaggataaaacaagacaagaatctacagagaattaacgacgacctattgctcgaccaaaagatcaactttggtcaggcggcgctaggtgcagacatacctatacaaatattcaatgaaaaatataacctaaagattcctgaggggacccaaccaggagatgtgattaaaataaagggcgctggaatgccacacttaaatgggcatggttcaggtgatcttctagttagaattaatgtcgaagtaccaaaaaggctaacggcaaagcagagagaactcataagggaacttttcgatataaaggagaaccacaaatcctggttccattaa

SEQ ID NO: 118072 - protein, 365 aa, Thermoplasma volcanium
MAKDYYKILGVDRNASEEDIKKAFRELAKKWHPDLHPDNKAEAEEKFKEISEAYEVLSDPEKRRIYDQTGSVDFGGGGSNFNWDNFTHFSDINDIFNEIFGGNFGSDFFSGFGNRQSTRNIDLDMYTNLDISLEEAYYGTEKRIKFRRNAICPDCKGTGAKNGKLITCPTCHGTGQQRVVRGQGFFRMVTVTTCNTCGGKGRIPEEKCPRCNGTGTIVVDEDITVKIPRGATDNLRLRVSGKGQSYDGRTGDLYVILRIKQDKNLQRINDDLLLDQKINFGQAALGADIPIQIFNEKYNLKIPEGTQPGDVIKIKGAGMPHLNGHGSGDLLVRINVEVPKRLTAKQRELIRELFDIKENHKSWFH

SEQ ID NO: 118073 - DNA, 1128 bp, Ureaplasma parvum
  CDS (1)..(1128): transl_table=4
atggcaaaacgtgattattatgaaattttaggtgttagtaaatcagcaactcctgaagagattaaagcggcatttcgtaaattagcaaaagaacaccatcctgatcgtaataaatctgctgatgatactctttttaaagaaattaatgaagcatatgaggttttatctgattctaaaaaacgtgcacaatacgaccaatttggccatgatggtccacaaggttttagcagtgctagtgggttttctgggtttagtggaggatttggtggtgttgattttgatattaatgacatttttggcagtttttttaataatgcttctagttcacataattcatcaaaccaatatgaaacatatgatattcacttacgtttacatttagattttatggaagctgttaatggtatttctaaaaatattaattatgatcgtaaaattacgtgtcataaatgtcaaggaacaggtgcaaaagatcctaaagatgtcaaaatttgcactaaatgtcacggtagaggaactagcattgaaaatgttcattccttatttggaacaattcaacaagaagttgaatgtcatgagtgtgaaggaacaggtaaagttgctagtagcaaatgtgaacaatgttatggtaaaaaagttatcaatgaacgtgttaatttaactgttgaaatcccagcaggtacacgagaaggtgaaaaattattagtaagcaaaaaaggtaatattgtcaataatcaagaatttgatctttatttacacattagtgttaaaccatcaaagtattttgcattagatggtttagatatttattcagaaacttacattgatcccatcaaagcaattgttggaggaataattgaagtagtaacaattaatggtattaaaaccattgaaattccttcaaatactcctgaaggtaaaaaatttagaattagtggatcaggaatcgttaataaaaaatcaaatatttttggtaaaaagaatggagatttttatactacaattcgttatgcaaagccagttgaattatccaaagatgaaattgcttatttaaaaaatatttctactcgtacaaaccaaaatgttgagtattataaaaataaagtattaaaggagattagtaaataa

SEQ ID NO: 118074 - protein, 375 aa, Ureaplasma parvum
MAKRDYYEILGVSKSATPEEIKAAFRKLAKEHHPDRNKSADDTLFKEINEAYEVLSDSKKRAQYDQFGHDGPQGFSSASGFSGFSGGFGGVDFDINDIFGSFFNNASSSHNSSNQYETYDIHLRLHLDFMEAVNGISKNINYDRKITCHKCQGTGAKDPKDVKICTKCHGRGTSIENVHSLFGTIQQEVECHECEGTGKVASSKCEQCYGKKVINERVNLTVEIPAGTREGEKLLVSKKGNIVNNQEFDLYLHISVKPSKYFALDGLDIYSETYIDPIKAIVGGIIEVVTINGIKTIEIPSNTPEGKKFRISGSGIVNKKSNIFGKKNGDFYTTIRYAKPVELSKDEIAYLKNISTRTNQNVEYYKNKVLKEISK

SEQ ID NO: 118075 - DNA, 1146 bp, Vibrio cholerae
  CDS (1)..(1146): transl_table=11
atgtcaaaacgtgatttttacgaagtattaggcgtaggccgtgacgcctccgagcgtgatattaaaaaggcatacaaacgccttgcgatgaaataccacccggaccgcaactcgggagatgctggtgcggcggaaaagtttaaagaagtcaaagaagcgtatgaaattctgaccgatgcgcagaagaaagccgcttatgaccaatacggccatgcggcatttgagcaaggcgcgggtggttttggtggcggcggcttcggcggtggcggtgctgattttggcgatattttcggtgacgtgtttggtgacattttcggtggtggtcgtcgtggcggcggtccaagagcacagcgtggctccgatctacgttacaacatggaactgagccttgaagaagcggttcgcggctgctcgaaagagattgaagtaccgacattagtacactgtgacgcttgcgatggctcaggtgcgaaaaaaggcacctcagcacaaacttgtggtacctgtcacggccatggccaagttcagatgcgtcagggcttctttgcggtgcagcaaacctgtccaacctgtcatggtaaaggcaagatcatcaaagacccttgcaacgtctgtcatggccaaggtcgtaagcaaaagaccaagacactcaatgtcaaaatcccagcgggtgtggataccggcgatcgcattcgtctttccggtgaaggtgaagcgggagaaatgggcgcgccagcaggggatttgtacgtacaggtgcatgtcaaagagcaccacattttcgagcgtgatggcaacaacttgtactgtgaagtgccagtgagtttcgcgatggcggctctgggcggtgaagttgaagtgccgacactcgatggtcgcgtgagcttgaaagtgcctgcggaaacccaaacgggtcgcatgttccgcatgcgcggtaaaggcgtgaagggtgttcgctctgcagcattaggcgatctgattgttaaacttgtggtcgaaaccccagtcaatttgagtgctcgtcagaaagagctgctgaaagagtttgaagagtcttgtggcggcgaagcggcgacgaaacacaagccgaaagccgaaggcttctttaatggtgtgaagaagttttttgatgacttaaccagttaa

SEQ ID NO: 118076 - protein, 381 aa, Vibrio cholerae
MSKRDFYEVLGVGRDASERDIKKAYKRLAMKYHPDRNSGDAGAAEKFKEVKEAYEILTDAQKKAAYDQYGHAAFEQGAGGFGGGGFGGGGADFGDIFGDVFGDIFGGGRRGGGPRAQRGSDLRYNMELSLEEAVRGCSKEIEVPTLVHCDACDGSGAKKGTSAQTCGTCHGHGQVQMRQGFFAVQQTCPTCHGKGKIIKDPCNVCHGQGRKQKTKTLNVKIPAGVDTGDRIRLSGEGEAGEMGAPAGDLYVQVHVKEHHIFERDGNNLYCEVPVSFAMAALGGEVEVPTLDGRVSLKVPAETQTGRMFRMRGKGVKGVRSAALGDLIVKLVVETPVNLSARQKELLKEFEESCGGEAATKHKPKAEGFFNGVKKFFDDLTS

SEQ ID NO: 118077 - DNA, 1158 bp, Vibrio harveyi; identical to SEQ ID NO: 64065
  CDS (1)..(1158): transl_table=11

SEQ ID NO: 118078 - protein, 385 aa, Vibrio harveyi; identical to SEQ ID NO: 64066

SEQ ID NO: 118079 - DNA, 1146 bp, Vibrio parahaemolyticus; identical to SEQ ID NO: 64067
  CDS (1)..(1146): transl_table=11

SEQ ID NO: 118080 - protein, 381 aa, Vibrio parahaemolyticus; identical to SEQ ID NO: 64068

SEQ ID NO: 118081 - DNA, 1125 bp, Wigglesworthia glossinidia brevipalpis
  CDS (1)..(1125): transl_table=11
atggcgaaatcagattattatgatattttaggaatttctaaaaatgcaagtgatcgcgaaataaaaactgcatataaaagattagcagttaaatttcatccagatagaaacccaggaaatttagaagcagaatcaaaatttaaagaaatcaaagaagcatatgaagttttgttggatcccaaaaaaagagcagcgtataatcaatacggacacacggcctttgatcaaggaagttctaatacagaatttacatcaaatgctgattttagtgatatttttggagatgtttttggagatatttttggaaataatagaagaaaaagaagcaaccgtggatcagatttacaatataatataaatttatccctagaagaggctgttaaaggaatttcaaaagaaataacaataccaaaattagaaagatgcaatatatgttctggaaaaggaatgcagcctggaactagtgctcaaaattgctctacttgcaatggtcaaggtcaaatacaaatgaggcaaggatttttttcagttcaacaaacttgcccatcttgtagaggtaaatgtaaaattattagatttccatgtaggaattgttctggacaaggtagagtagaaagatcaaagaacatttctatcagaatacctgcaggagtagataatggtgataaaattagattatcaggagaaggggaagctggtaaattaggaggttcttctggagatctatacgtaaaaatatctgtaaaagaacaccctatatttaagagagaagaacacaatttatattgtgaagttcctataaattttgcaatggcagcattaggaggagatattgaagtacctgctttagacggaagggtaaaattgagaattccagcagaaacacaaactggaaggttatttagaatgagagggaaaggagtaaaatcgatacgtagcgggcatcaaggagatttattatgtagagtagttgtagaaactcctgttagattaagcgaaaagcaaaaatctttattaaaagaattaggaataagttttgttggacgcactggtatgtataatagccctagatctaaaagtttttttgatggcgtaaagaaattttttgatggattaactaattaa

SEQ ID NO: 118082 - protein, 374 aa, Wigglesworthia glossinidia brevipalpis
MAKSDYYDILGISKNASDREIKTAYKRLAVKFHPDRNPGNLEAESKFKEIKEAYEVLLDPKKRAAYNQYGHTAFDQGSSNTEFTSNADFSDIFGDVFGDIFGNNRRKRSNRGSDLQYNINLSLEEAVKGISKEITIPKLERCNICSGKGMQPGTSAQNCSTCNGQGQIQMRQGFFSVQQTCPSCRGKCKIIRFPCRNCSGQGRVERSKNISIRIPAGVDNGDKIRLSGEGEAGKLGGSSGDLYVKISVKEHPIFKREEHNLYCEVPINFAMAALGGDIEVPALDGRVKLRIPAETQTGRLFRMRGKGVKSIRSGHQGDLLCRVVVETPVRLSEKQKSLLKELGISFVGRTGMYNSPRSKSFFDGVKKFFDGLTN

SEQ ID NO: 118083 - DNA, 1119 bp, Wolbachia pipientis wMel; identical to SEQ ID NO: 64069
  CDS (1)..(1119): transl_table=11

SEQ ID NO: 118084 - protein, 372 aa, Wolbachia pipientis wMel; identical to SEQ ID NO: 64070

SEQ ID NO: 118085 - DNA, 1131 bp, Xanthomonas oryzae pv
  CDS (1)..(1131): transl_table=11
atgagcaaacgcgattactacgaagtgctgggcgttgcccgtggcgccagcgacgaggagctgaagaaggcgtaccggcgctgtgccatgaagcaccacccggaccgcaatcctggcgatgcggctgccgaagcggcgttcaaggaatgcaaggaagcctacgaggtgctgtccgacggcaataagcggcgcgcctacgacgcgcatggccatgcggccttcgagcacggcatgggcggtggtggcggtgggccgggtagcccggacatgggagatatcttcggcgatatcttcggcaatatttttggcggtggcgccgccggtccgcgcgctgcgcgacgtggcgccgacgtcggttacgtactggaactggatctggaagaagccgtcgccgggatcgagcgacgcatcgagatcccgaccctgatcgaatgcgtgtcctgccacggcagcggctcggaagacggcaaggtccagacctgcggtacctgccatgggcgtggtcaggtgcgtatccagcgcggcatcttcgccatgcagcagagctgcccgcattgcgacgggcgcggcacgttgatccagaatccgtgcaagacctgccacggcgccggtcgcgtggaagaaaacaaggtgctatcgatcaaggtgccggcgggtgtggataccggcgaccggattcgtcttgcaggggaaggcgaggctggcccggccggcaccccgccgggcgatctgtatgtggaagtgcgggtgcgcgagcatgcgatcttccagcgtgatggggacgatctgcattgcgaagtgccgatccgcatttcccaggcggccttgggcgacaccgtgcgggtggcaacgctgggcggcgaagcggaaatccgtatcccggccgagacccagactggcaagctgttccgcctgcgtggcaagggcgtgcgttcggtgcgcagccgcagcgaaggcgatctgtattgccgtgtggtggtggaaacgccggtcaatctcaccgccgatcagcgcgagctgctgcagcagttcgaggccacgttcaccggcgaagatgcccgcaagcattcccccaagtcggctacgttcatcgatggggtcaagggcttttgggatcggatgacgtcctga

SEQ ID NO: 118086 - protein, 376 aa, Xanthomonas oryzae pv
MSKRDYYEVLGVARGASDEELKKAYRRCAMKHHPDRNPGDAAAEAAFKECKEAYEVLSDGNKRRAYDAHGHAAFEHGMGGGGGGPGSPDMGDIFGDIFGNIFGGGAAGPRAARRGADVGYVLELDLEEAVAGIERRIEIPTLIECVSCHGSGSEDGKVQTCGTCHGRGQVRIQRGIFAMQQSCPHCDGRGTLIQNPCKTCHGAGRVEENKVLSIKVPAGVDTGDRIRLAGEGEAGPAGTPPGDLYVEVRVREHAIFQRDGDDLHCEVPIRISQAALGDTVRVATLGGEAEIRIPAETQTGKLFRLRGKGVRSVRSRSEGDLYCRVVVETPVNLTADQRELLQQFEATFTGEDARKHSPKSATFIDGVKGFWDRMTS

SEQ ID NO: 118087 - DNA, 1107 bp, Xylella fastidiosa
  CDS (1)..(1107): transl_table=11
atgagtaaacgtgattactaccaagtgttgggtgtgcctcgcactgccagcgaagatgatctgaaaaaagcgtatcgtcgctgtgcgatgaaataccacccagatcgtaatcctggtgatgcagctgcggaggcggcctttaaggaatgcaaggaagcttatgaggttcttgccgacacgaaaaaacgaaagttatacgatacgcatggtcatgccgctttcgaacatggcgtggggggcggaaatgcccccgacatgaacgatatcttcggtgatatcttcggtaacatttttggtggtgcgcgcgcttcgcggcgtggcgccgatgtcggttacatggttgagctggatttggaggaagctgttgctggtgttgagcgacagatccagatacccactttggttgaatgtacccactgccatgggagtggatcagaagacggtcacgtcgagacgtgcggtacgtgccgcggtagcggtcaagtgaggattcaacgcggcatctttgccatgcagcagacttgcccgcattgcggcggacgaggcgttattattcgaaatccgtgtaaggtctgcaatggtgctgggcgtgttgaggatcataagacgctgtcagtgaagatccctgctggtgtggacaatggtgatcgtattcgcctcagtggtgagggcgagcagggtccggagggggtgcccccaggggatctatatgtggaagtgcgtgtgcgtgagcatccgatcttccagcgtgatggtgatgatttgcactgtgaagtgccggtgcgtatttcacaggctgcgcttggcgacattgtgcgtgtggctacgcttgatggggaagcagaaattcgtattcctgcggagacccagtctggtaaactgttccgcttgcgtggcaagggggtacgctcggtgcgtagtcgtactgaaggcgatttgtactgtcgtattgtggttgagactcctgtgaacttgactgctgagcagcgtaagctgttagagcaatttgaaatgactttcgctggtgaggatgcgcgtaagcattcccctaaatcggctacttttcttgatggtgtaaaaagcttctgggaccggatgacgtcttaa

SEQ ID NO: 118088 - protein, 368 aa, Xylella fastidiosa
MSKRDYYQVLGVPRTASEDDLKKAYRRCAMKYHPDRNPGDAAAEAAFKECKEAYEVLADTKKRKLYDTHGHAAFEHGVGGGNAPDMNDIFGDIFGNIFGGARASRRGADVGYMVELDLEEAVAGVERQIQIPTLVECTHCHGSGSEDGHVETCGTCRGSGQVRIQRGIFAMQQTCPHCGGRGVIIRNPCKVCNGAGRVEDHKTLSVKIPAGVDNGDRIRLSGEGEQGPEGVPPGDLYVEVRVREHPIFQRDGDDLHCEVPVRISQAALGDIVRVATLDGEAEIRIPAETQSGKLFRLRGKGVRSVRSRTEGDLYCRIVVETPVNLTAEQRKLLEQFEMTFAGEDARKHSPKSATFLDGVKSFWDRMTS

SEQ ID NO: 118089 - DNA, 1107 bp, Xylella fastidiosa
  CDS (1)..(1107): transl_table=11
atgagtaaacgtgattactaccaagtgttgggtgtgcctcgcactgccagcgaagatgatctgaaaaaagcgtatcgtcgctgtgcgatgaaataccacccagatcgtaatcctggtgatgcagctgcggaggcggcctttaaggaatgcaaggaagcttatgaggttcttgccgacacgaaaaaacgaaagttatacgatacgcatggtcatgccgctttcgaacatggcgtggggagcggaaatacccccgacatgaacgatatcttcggtgatatcttcggtaacatttttggtggcgcgcgcgcttcgcggcgtggtgccgatgtcggttacatggttgagctggatttggaagaagctgttgctggtgttgagcgacagatccagatacccactttggttgaatgtactcactgccatgggagtggatcagaagacggtcacgttgagacgtgcggtacgtgccgcggtagcggtcaagttaggattcaacgcggcatctttgccatgcagcagacttgcccgcattgcggcggacgaggcgtgattattcgaaatccgtgtaaggtctgcaatggtgctgggcgtgttgaggatcataagacgctgtcagtgaagatccctgctggtgtagacaatggtgatcgtattcgcctcagcggtgagggcgagcagggtccggatggggtgcccccaggggatctatatgtggaagtgcgtgtgcgtgagcatccgatcttccagcgtgatggtgatgatttgcactgtgaagtgccggtgcgtatttcacaggctgcgcttggcgacattgtgcgtgtagctacgcttgatggggaggcagaaattcgtattcctgcggagacccagtctggtaaactgttccgcttgcgtggcaagggggtacgctcggtgcgtagtcgtactgaaggcgatttgtactgtcgtattgtggttgagactcctgtgaacttgactgctgagcagcgtaagctgttagagcaatttgaaatgactttcgctggtgaggatgcgcgtaagcattcccctaaatcggctacttttcttgatggtgtaaaaagcttctgggaccggatgacgtcttaa

SEQ ID NO: 118090 - protein, 368 aa, Xylella fastidiosa
MSKRDYYQVLGVPRTASEDDLKKAYRRCAMKYHPDRNPGDAAAEAAFKECKEAYEVLADTKKRKLYDTHGHAAFEHGVGSGNTPDMNDIFGDIFGNIFGGARASRRGADVGYMVELDLEEAVAGVERQIQIPTLVECTHCHGSGSEDGHVETCGTCRGSGQVRIQRGIFAMQQTCPHCGGRGVIIRNPCKVCNGAGRVEDHKTLSVKIPAGVDNGDRIRLSGEGEQGPDGVPPGDLYVEVRVREHPIFQRDGDDLHCEVPVRISQAALGDIVRVATLDGEAEIRIPAETQSGKLFRLRGKGVRSVRSRTEGDLYCRIVVETPVNLTAEQRKLLEQFEMTFAGEDARKHSPKSATFLDGVKSFWDRMTS

SEQ ID NO: 118091 - DNA, 1140 bp, Yersinia pestis
  CDS (1)..(1140): transl_table=11
atggcgaagagagattattacgaggttttaggcgtcagcagggacgccgaagagcgtgaaatcaaaaaagcctataaacgcctggcaatgaaattccatccggatcgtcaatcggaggataaaaacgccgaagagaagtttaaagaagccaaagaagcctatgaaattctgaccgacgcacaaaagcgtgcggcatatgatcaatacggccatgcagcctttgaacaaggtggaatgggaggcggcggtttcggtggcggcggcggtggtgctgatttttccgatatcttcggtgatgtttttggtgacatttttggtggtggccggcgtcagcagcgtgcatcccgtggttcagatctacgttacaacatggatctgacactggaagaagctgtgcgtggtgtaaccaaagagatccgaatcccaacgctggatgaatgtgatgtttgccacggtagcggtgctaaaccggggagttcaccagtcacttgcccaacttgccatggggcaggtcaggtacagatgcgccaggggttctttaccgtacaacaggcatgtcctcattgtcatggacgtggtcaaatcattaaagacccatgcaacaagtgtcatggacatggtcgtgttgagaaatcgaaaacgctgtcggtcaaaattccggcgggtgttgataccggtgatcgcattcgcttaagtggtgaaggcgaggcgggtgagcatggtgcaccgtcaggtgatttgtacgttcaggtacaagtcaaggcgcatccaatcttcgagcgcgaaggcaacaatctgtattgtgaggttcctattaactttgcaatggcggcattgggcggcgaaatcgaagtccctacattggatgggcgggttaagttaaaaatccctgctgaaacccaaacaggtaaaatgttccgcatgcgtggcaaaggcgttaagtctgttcgtggtggtagccaaggcgatttgttatgccgtgttgtggttgaaacgccggttagcctgagcgaaaaacaaaaacaactgctgcgtgagctggaagagagctttgtcggtgctgctggtgaaaaaaatagcccgcgagctaaaagtttcttagatggcgttaaaaaattctttgacgacctgacacgctaa

SEQ ID NO: 118092 - protein, 379 aa, Yersinia pestis
MAKRDYYEVLGVSRDAEEREIKKAYKRLAMKFHPDRQSEDKNAEEKFKEAKEAYEILTDAQKRAAYDQYGHAAFEQGGMGGGGFGGGGGGADFSDIFGDVFGDIFGGGRRQQRASRGSDLRYNMDLTLEEAVRGVTKEIRIPTLDECDVCHGSGAKPGSSPVTCPTCHGAGQVQMRQGFFTVQQACPHCHGRGQIIKDPCNKCHGHGRVEKSKTLSVKIPAGVDTGDRIRLSGEGEAGEHGAPSGDLYVQVQVKAHPIFEREGNNLYCEVPINFAMAALGGEIEVPTLDGRVKLKIPAETQTGKMFRMRGKGVKSVRGGSQGDLLCRVVVETPVSLSEKQKQLLRELEESFVGAAGEKNSPRAKSFLDGVKKFFDDLTR

SEQ ID NO: 118093 - DNA, 1128 bp, Zymomonas mobilis
  CDS (1)..(1128): transl_table=11
gtgtctgagttagattattatagtttgttagaagtcgagcgcactgccgacgataaaaccattaaaacctcttatcgtcgcttggcgatgcgctatcatcccgatagaaatccgggtgatagtgacgcggaagaacgctttaaggcgatttccgaagcctatgattgcttgaaagatccccaaaaaagagcggcctatgaccgttatggcaaagatgcctttcaaggcggcggcggttttggtggctttggcggcggtgctcaagatttcggcggtttttccgatatctttgaatccgtttttggcgagtttatgggaggccgcggtcaggcgcgctcttctgttcagcgcggtgccgatctgcgctatgaccttaagatcagtttagaagaagcctttaagggcaagacagtcgatatcgaaattgatgttgcctctgtctgtgatgcttgtcatggatctggtgctaaggcaggttctggacgtaaaacctgcgacacttgccatggctcaggccggattcgagtacagcaaggtttctttgttgttgagcagagctgtccggtttgtcagggtaaaggcgaagttatcagtgatccatgccccgaatgtcatggggaagggcgctgtgaaaagcataagaccctttccgtcaatattccggcaggtgttgatgatggcacgcgcatccgtttatcgggtgaaggcgaggctggtgtacatggtggcccagcgggcgatctgtacattttcattcacgtaacgccgcatcaggttttccaacgcgaaagttacaacctgtttgcccatgtgccgatttcctttaccaaggcggccttgggtggaagtatccatgttccaagcctcgatggcgagcaatatgagatttctatccctgcgggtattcagtctggtaaacaactgaaacggcgcggtgcaggtatgcccgtcttaaatggccgaggccgtggtgatttgattattcagatcgacgtcgaaacgccgacccgtctgacggcaaagcaacgcgaattattagaacaattccgtgagactgaaaccggcgaagaatgcccgaaatcatccggcttcttttccaagctgaaaacaattttaacaggcgaataa

SEQ ID NO: 118094 - protein, 375 aa, Zymomonas mobilis
MSELDYYSLLEVERTADDKTIKTSYRRLAMRYHPDRNPGDSDAEERFKAISEAYDCLKDPQKRAAYDRYGKDAFQGGGGFGGFGGGAQDFGGFSDIFESVFGEFMGGRGQARSSVQRGADLRYDLKISLEEAFKGKTVDIEIDVASVCDACHGSGAKAGSGRKTCDTCHGSGRIRVQQGFFVVEQSCPVCQGKGEVISDPCPECHGEGRCEKHKTLSVNIPAGVDDGTRIRLSGEGEAGVHGGPAGDLYIFIHVTPHQVFQRESYNLFAHVPISFTKAALGGSIHVPSLDGEQYEISIPAGIQSGKQLKRRGAGMPVLNGRGRGDLIIQIDVETPTRLTAKQRELLEQFRETETGEECPKSSGFFSKLKTILTGE

SEQ ID NO: 118095 - DNA, 1257 bp, Allium porrum
  CDS (1)..(1257)
atgttcggtagagccccgaagaaaagcgataatactaagtattatgaggtcctcggagtttcgaaaaacgcaacgccagaagatttgaagaaggcgtacagaaaggccgcgattaaaaatcatcctgacaaaggtggtgaccctgaaaagtttaaagaaattggccaagcttatgaagttttaaatgaccctgagaaacgcgagatatatgaccaatatggcgaggaaggcctcaaagagggaatgggtggaggtggaggtgttcacgacccttttgacattttccaatcattctttggtggtggtggttttggaggtggtggtagcagccgaggtcgtagacaaaggagaggtgaagatgtagtccatcctctcaaagtatctcttgaagacctttacaatggaacttcaaagaagctttctctctccagaaacgttctctgcacaaaatgcaagggcaaaggatctaaatctggtgcttcaatgaattgtgcatcttgtcaaggatcaggcatgaaagtctccattcgccagcttgggcctggaatgattcagcaaatgcaacatccttgcaatgaatgcaaaggtactggggaaatgatcagcgacaaagacagatgtccacagtgtaaaggtgaaaaggttgtacaacaaaagaaggttcttgaagtgcatgttgagaaagggatgcagaatggacagaaaattacctttcctggtgaagctgatgaagcgcctgatacagttacaggggacattgtatttgtactgcaacaaaaagaacaccccaaattcaagaggaagggagatgatttattttatgagcattcgctctctctcactgaagctctctgcggttttcagtttgtgttgacacacttggataataggcaactcctaatcaagtcaaatcctggagaggttattaagccagatcaattcaaaggcataaacgacgaaggaatgccgatgtaccagaggccattcatgagaggaaagctttacattcacttctcagtcgacttcccagactcactgacgcccgatcagtgcaaggctttagaaagcgtgcttccgtccaggaacgcatccagactcacggacatggaaatcgacgaatgtgaagaaaccacgatgcatgacgtgaacatagaggaggagatgaggaggaagcagcaccagcaagctcaggaggcctacgatgaggatgatgaaggccatggtggggctcagagggtgcaatgtgcccagcagtga

SEQ ID NO: 118096 - protein, 418 aa, Allium porrum; identical to SEQ ID NO: 64072

SEQ ID NO: 118097 - DNA, 1254 bp, Atriplex nummularia; identical to SEQ ID NO: 64073
  CDS (1)..(1254)

SEQ ID NO: 118098 - protein, 417 aa, Atriplex nummularia; identical to SEQ ID NO: 64074

SEQ ID NO: 118099 - DNA, 1242 bp, Cucumis sativus; identical to SEQ ID NO: 64075
  CDS (1)..(1242)

SEQ ID NO: 118100 - protein, 413 aa, Cucumis sativus; identical to SEQ ID NO: 64076

SEQ ID NO: 118101 - DNA, 1266 bp, Oryza sativa; identical to SEQ ID NO: 64079
  CDS (1)..(1266)

SEQ ID NO: 118102 - protein, 421 aa, Oryza sativa; identical to SEQ ID NO: 64080

SEQ ID NO: 118103 - DNA, 1263 bp, Oryza sativa; identical to SEQ ID NO: 63809
  CDS (1)..(1263)

SEQ ID NO: 118104 - protein, 420 aa, Oryza sativa; identical to SEQ ID NO: 63810

SEQ ID NO: 118105 - DNA, 1464 bp, Oryza sativa; identical to SEQ ID NO: 63811
  CDS (1)..(1464)

SEQ ID NO: 118106 - protein, 487 aa, Oryza sativa; identical to SEQ ID NO: 63812

SEQ ID NO: 118107 - DNA, 1254 bp, Oryza sativa
  CDS (1)..(1254)
atgttcgggcgcgcgccgaagaagagcgacaacaccaagtactacgagatcctgggggtccccaagaccgcctcccaggacgacctcaagaaggcgtaccgcaaggccgccatcaagaaccaccccgacaagggcggcgaccccgagaagttcaaggagcttgcacaagcttatgaggtattgagtgacccggagaaacgtgaaatctatgaccaatatggtgaagatgccctcaaggaaggaatgggtggaggcggatcccatgttgatccatttgacatcttttcatcattctttggaccttcttttggtggtggtggcagcagcaggggcagaaggcaaaggaggggagaggatgtgatccatccgcttaaggtttctctagaagatctttacaatggtacttcaaagaagctctctctttcccgcaatgtcctctgcgccaagtgcaagggcaagggttccaagtctggtgcttccatgaggtgcccaggttgccaggggtctggcatgaaaatcaccatccgccagctggggccttccatgatacagcagatgcagcagccttgcaatgagtgtaaggggactggagagagcattaatgagaaggatcgctgcccaggctgcaagggcgagaaggttattcaggagaagaaggttctggaggttcacgttgagaaggggatgcaacacaatcagaagatcactttccctggtgaagctgatgaggcgcctgataccgttacgggagacattgtattcgtcctccagcagaaggaccactccaagttcaaaaggaagggcgatgatctcttttatgagcacaccttatctctgactgaagcactttgtggtttccaatttgtcctgacacatctggacaacagacagctgctcattaagtcaaaccccggtgaagttgttaagcctgaccaattcaaggcaataaacgatgagggaatgccaatgtaccagaggcctttcatgaaggggaagctctacattcatttcacggtggagttccctgattccctggcgcctgaacaatgcaaggctctcgaggctgtgcttccaccgaagcctgcatcccagctgacagaaatggagatagatgaatgcgaggagaccacgatgcacgatgtcaacaacattgaggaagagatgcgcaggaaagcccaagctgctcaggaggcgtatgatgaggacgatgagatgcctggaggtgcccagagagttcagtgcgcgcaacagtaa

SEQ ID NO: 118108 - protein, 417 aa, Oryza sativa
MFGRAPKKSDNTKYYEILGVPKTASQDDLKKAYRKAAIKNHPDKGGDPEKFKELAQAYEVLSDPEKREIYDQYGEDALKEGMGGGGSHVDPFDIFSSFFGPSFGGGGSSRGRRQRRGEDVIHPLKVSLEDLYNGTSKKLSLSRNVLCAKCKGKGSKSGASMRCPGCQGSGMKITIRQLGPSMIQQMQQPCNECKGTGESINEKDRCPGCKGEKVIQEKKVLEVHVEKGMQHNQKITFPGEADEAPDTVTGDIVFVLQQKDHSKFKRKGDDLFYEHTLSLTEALCGFQFVLTHLDNRQLLIKSNPGEVVKPDQFKAINDEGMPMYQRPFMKGKLYIHFTVEFPDSLAPEQCKALEAVLPPKPASQLTEMEIDECEETTMHDVNNIEEEMRRKAQAAQEAYDEDDEMPGGAQRVQCAQQ

SEQ ID NO: 118109 - DNA, 1251 bp, Oryza sativa
  CDS (1)..(1251)
atgttcgggcgcgcgccgaagaagagcgacaacaccaagtactacgagatcctgggggtccccaagaccgcctcccaggacgacctcaagaaggcgtaccgcaaggccgccatcaagaaccaccccgacaagggcggcgaccccgagaagttcaaggagcttgcacaagcttatgaggtattgagtgacccggagaaacgtgaaatctatgaccaatatggtgaagatgccctcaaggaaggaatgggtggaggcggatcccatgttgatccatttgacatcttttcatcattctttggaccttcttttggtggtggcagcagcaggggcagaaggcaaaggaggggagaggatgtgatccatccgcttaaggtttctctagaagatctttacaatggtacttcaaagaagctctctctttcccgcaatgtcctctgcgccaagtgcaagggcaagggttccaagtctggtgcttccatgaggtgcccaggttgccaggggtctggcatgaaaatcaccatccgccagctggggccttccatgatacagcagatgcagcagccttgcaatgagtgtaaggggactggagagagcattaatgagaaggatcgctgcccaggctgcaagggcgagaaggttattcaggagaagaaggttctggaggttcacgttgagaaggggatgcaacacaatcagaagatcactttccctggtgaagctgatgaggcgcctgataccgttacgggagacattgtattcgtcctccagcagaaggaccactccaagttcaaaaggaagggcgatgatctcttttatgagcacaccttatctctgactgaagcactttgtggtttccaatttgtcctgacacatctggacaacagacagctgctcattaagtcaaaccccggtgaagttgttaagcctgaccaattcaaggcaataaacgatgagggaatgccaatgtaccagaggcctttcatgaaggggaagctctacattcatttcacggtggagttccctgattccctggcgcctgaacaatgcaaggctctcgaggctgtgcttccaccgaagcctgcatcccagctgacagaaatggagatagatgaatgcgaggagaccacgatgcacgatgtcaacaacattgaggaagagatgcgcaggaaagcccaagctgctcaggaggcgtatgatgaggacgatgagatgcctggaggtgcccagagagttcagtgcgcgcaacagtaa

SEQ ID NO: 118110 - protein, 416 aa, Oryza sativa
MFGRAPKKSDNTKYYEILGVPKTASQDDLKKAYRKAAIKNHPDKGGDPEKFKELAQAYEVLSDPEKREIYDQYGEDALKEGMGGGGSHVDPFDIFSSFFGPSFGGGSSRGRRQRRGEDVIHPLKVSLEDLYNGTSKKLSLSRNVLCAKCKGKGSKSGASMRCPGCQGSGMKITIRQLGPSMIQQMQQPCNECKGTGESINEKDRCPGCKGEKVIQEKKVLEVHVEKGMQHNQKITFPGEADEAPDTVTGDIVFVLQQKDHSKFKRKGDDLFYEHTLSLTEALCGFQFVLTHLDNRQLLIKSNPGEVVKPDQFKAINDEGMPMYQRPFMKGKLYIHFTVEFPDSLAPEQCKALEAVLPPKPASQLTEMEIDECEETTMHDVNNIEEEMRRKAQAAQEAYDEDDEMPGGAQRVQCAQQ

SEQ ID NO: 118111 - DNA, 1344 bp, Oryza sativa
  CDS (1)..(1344)
atggcgttgctacagtttggaggtaccttggcccccaaacttggggaaaaacctcagctgttgcccaggtcacctgcacttacaagagttatttatgctgatccaagatttctggtgtcgaaaagtggtagtggaggcaggcttaaacaccttgtatcacctactgctagtttacaatcacggacatcttctcgactatttaaccatgcaccatcaccgagatttcgccatcgaaggagttcaaggttcattgtcagagctgatgctgatttctattccacacttggtgtttcaagaaatgctagtaaatctgaaatcaagagtgcctataggaagcttgctaggagctaccatcctgatgtgaacaaagatcctggtgctgaacaaaagttcaaggatattagcaatgcttatgaggttttgtctgatgatgagaagcgatcaatctatgataaatatggagaagctggtttgaagggtgctggaatgggaacaggagattactcaaacccattcgatctctttgaatcattattcgaaggctttggtggaatggggggaatgggaggccgtgctgctcggaacagaccaatgcagggtgatgatgaggcctacaatctggtactcaatttcaaggaagcggtgtttggtgtagagaaagaaattgagatcaccagactggaaggctgtaatacatgtgatggaactggtgccaagcctggaacgaaaccaaccacatgcaaaacatgtggaggacagggacaagtggtctcctcaacaagaacgccacttggaatattccagcaggtctccacctgcaatacttgcggaggcactggtgaattctctaccccgtgcaacacttgtgggggtgatggccgagtgcggaagacaaaaaggatcagtctaaaggttcctgctggtgttgattctggaagcagattgagggtccggtctgaggggaatgctgggcggagaggaggccctcctggagatctttatgtgtttattgatgttctctctgatcctgttcttaagcgagatgggacaaacattctatacacatgcaaagtttcatatattgacgcaattcttgggacaaccgtcaaggttcccactgttgatgggatggttgacctgaagatcccctccggtacccagccaggcacaacgttagtgatgtccaagaaaggtgtcccactcctcgggaagtcaaatgctcgtggagaccagctagtgcgtgtgcaggtcgagattccaaagcgtctgagcagcgacgagaggaagctgattgaagaacttgcaaacctaaacaaggctcaaacagcaaacagcaggagataa

SEQ ID NO: 118112 - protein, 447 aa, Oryza sativa
MALLQFGGTLAPKLGEKPQLLPRSPALTRVIYADPRFLVSKSGSGGRLKHLVSPTASLQSRTSSRLFNHAPSPRFRHRRSSRFIVRADADFYSTLGVSRNASKSEIKSAYRKLARSYHPDVNKDPGAEQKFKDISNAYEVLSDDEKRSIYDKYGEAGLKGAGMGTGDYSNPFDLFESLFEGFGGMGGMGGRAARNRPMQGDDEAYNLVLNFKEAVFGVEKEIEITRLEGCNTCDGTGAKPGTKPTTCKTCGGQGQVVSSTRTPLGIFQQVSTCNTCGGTGEFSTPCNTCGGDGRVRKTKRISLKVPAGVDSGSRLRVRSEGNAGRRGGPPGDLYVFIDVLSDPVLKRDGTNILYTCKVSYIDAILGTTVKVPTVDGMVDLKIPSGTQPGTTLVMSKKGVPLLGKSNARGDQLVRVQVEIPKRLSSDERKLIEELANLNKAQTANSRR

SEQ ID NO: 118113 - DNA, 1089 bp, Oryza sativa
  CDS (1)..(1089)
atggggatggattactacaagatcctgggcgtcgacaaggccgccagcgacgacgacctcaagaaggcgtaccgcaagctcgccatgaagtggcaccctgacaagaaccccaacaacaagaaggaggcggagaacaagttcaagcagatctccgaggcgtacgaggtgctgagcgacccgcagaagcgagcggtgtacgaccagtacggcgaggaggggctcaaggggcaggtcccgccgccgggcgccggcggggccggcccgggaggcgcgacgttcttctccaccggcggcgacgggcccaacgtgttccggttcaacccgcgcaacgcggaggacatcttcgcggagttcttcggctcgtccagcccgttcggcggcatgggcggtggcatgggcggcggcatggggggagggcccgggatgcggacaggcggcacgcggttctcgtcgtcgatcttcggggacgacatcttcggctcggcgttcggcggcggcgccgacgggcaccacgggatgcacggcggtggcgccgggagggcgttgaaggcgccggcgatcgagaggaagctgccgtgcagcctggaggagctctacaaaggcaccaccaagaagatgaagatttccagggaaatcgctgacgccagtgggaagacaattccagtggaggagatcctgaccatcgatgtgaagcctgggtggaagaagggcaccaagatcaccttcccggagaaaggaaacgagcagccgaacgtgatcccggccgacctcgtcttcatcatcgacgagaagccgcacccggtgttcacccgtgacggcaacgacctcgtcgtgacgcagaagataccgctcgccgaggccctgaccggccacaccgtccacctgactacgctcgacggccgcagcctgacgatcccgatcacctccgtcatcaacccgggctacgaggaggtcgtccgcggcgagggcatgcccatccccaaggacccctccaagaagggcaatctcagggtcaagttcgacatcaagttcccggcgaggctcaccgccgaccagaagtccggcgtcaagcggctgctggggcagtag

SEQ ID NO: 118114 - protein, 362 aa, Oryza sativa
MGMDYYKILGVDKAASDDDLKKAYRKLAMKWHPDKNPNNKKEAENKFKQISEAYEVLSDPQKRAVYDQYGEEGLKGQVPPPGAGGAGPGGATFFSTGGDGPNVFRFNPRNAEDIFAEFFGSSSPFGGMGGGMGGGMGGGPGMRTGGTRFSSSIFGDDIFGSAFGGGADGHHGMHGGGAGRALKAPAIERKLPCSLEELYKGTTKKMKISREIADASGKTIPVEEILTIDVKPGWKKGTKITFPEKGNEQPNVIPADLVFIIDEKPHPVFTRDGNDLVVTQKIPLAEALTGHTVHLTTLDGRSLTIPITSVINPGYEEVVRGEGMPIPKDPSKKGNLRVKFDIKFPARLTADQKSGVKRLLGQ

SEQ ID NO: 118115 - DNA, 1086 bp, Oryza sativa
  CDS (1)..(1086)
atggggatggattactacaagatcctgggcgtcgacaaggccgccagcgacgacgacctcaagaaggcgtaccgcaagctcgccatgaagtggcaccctgacaagaaccccaacaacaagaaggaggcggagaacaagttcaagcagatctccgaggcgtacgaggtgctgagcgacccgcagaagcgagcggtgtacgaccagtacggcgaggaggggctcaaggggcaggtcccgccgccgggcgccggcggggccggcccgggaggcgcgacgttcttctccaccggcggcgacgggcccaacgtgttccggttcaacccgcgcaacgcggaggacatcttcgcggagttcttcggctcgtccagcccgttcggcggcatgggcggtggcatgggcggcggcatggggggagggcccgggatgcggacaggcggcacgcggttctcgtcgtcgatcttcggggacgacatcttcggctcggcgttcggcggcggcgccgacgggcaccacgggatgcacggcggtggcgccgggagggcgttgaaggcgccggcgatcgagaggaagctgccgtgcagcctggaggagctctacaaaggcaccaccaagaagatgaagatttccagggaaatcgctgacgccagtgggaagacaattccagtggaggagatcctgaccatcgatgtgaagcctgggtggaagaagggcaccaagatcaccttcccggagaaaggaaacgagcagccgaacgtgatcccggccgacctcgtcttcatcatcgacgagaagccgcacccggtgttcacccgtgacggcaacgacctcgtcgtgacgcagaagataccgctcgccgaggccctgaccggccacaccgtccacctgactacgctcgacggccgcagcctgacgatcccgatcacctccgtcatcaacccgggctacgaggaggtcgtccgcggcgagggcatgcccatccccaaggacccctccaagaagggcaatctcagggtcaagttcgacatcaagttcccggcgaggctcaccgccgaccagaagtccggcccgcgacgaatttctcgttga

SEQ ID NO: 118116 - protein, 361 aa, Oryza sativa
MGMDYYKILGVDKAASDDDLKKAYRKLAMKWHPDKNPNNKKEAENKFKQISEAYEVLSDPQKRAVYDQYGEEGLKGQVPPPGAGGAGPGGATFFSTGGDGPNVFRFNPRNAEDIFAEFFGSSSPFGGMGGGMGGGMGGGPGMRTGGTRFSSSIFGDDIFGSAFGGGADGHHGMHGGGAGRALKAPAIERKLPCSLEELYKGTTKKMKISREIADASGKTIPVEEILTIDVKPGWKKGTKITFPEKGNEQPNVIPADLVFIIDEKPHPVFTRDGNDLVVTQKIPLAEALTGHTVHLTTLDGRSLTIPITSVINPGYEEVVRGEGMPIPKDPSKKGNLRVKFDIKFPARLTADQKSGPRRISR

SEQ ID NO: 118117 - DNA, 1329 bp, Oryza sativa; identical to SEQ ID NO: 63815
  CDS (1)..(1329)

SEQ ID NO: 118118 - protein, 442 aa, Oryza sativa; identical to SEQ ID NO: 63816

SEQ ID NO: 118119 - DNA, 1035 bp, Oryza sativa
  CDS (1)..(1035)
atggactactacgagatcctccatgtcgaccggagcgccaccgacgacgacatccgccgcgcctaccgccgcctcgccatgcggtggcaccccgacaagaaccacaccggcaagaaggacgccgaggccaagttcaaagacatcaccgaagcctacaacgtgctcagcgacgccgggaagagggcgctgtacgaccagtacggggaggaggggctcagggccggtggcgcgccgccgcagcccggcggcggcggcggcggcgctgacgacatcttcgccgagttcttcgggagcacgccgttcacgtactgcaacacgggcgccggcaccacggcgcgcgccaagcagcaggcggcctgggacgccggtggcggcggcgcgtactttggaagaggcgggttcgcccgtgaccacggcggcggtggcgcggcggcgtcgccccagccgccgccggtggagagcaagctggcgtgcaccctggaggagctctacgtcggcgtcaccaagaacatgaagatctcccgcaacgtcgtcgatgctagcgggagaatgaaaacggagtcggagattctgtcgatcgaggtgaagccggggtggaagaaggggaccaagatcacgttcccggggaaggggaaccagcagtggagccagctccccgccgacctggtgttcgtcgtcgacgagaagccgcacgacgtgtaccgccgcgacggcaacgacctggtggcggaggcccgggtcacgctggccgacgcgctgggcggcacggtggtcgtcctcgccacgctcgacggccgcgagctgctggtggaggtgagcggcggcggtgtcgccgccggcgacgaggacgacgacgacgaggaccccgtggtgtaccccgggtacgagctggtggtgccgtcggagggcatgccaatcgcccgcgagcccggccgccacggcagcctgaggatccggttcgacgtcgcgttcccggagcggctgacgcggaggcagcgcgcgcagatcaagcgcatcctcgacgccgccggctag

SEQ ID NO: 118120 - protein, 344 aa, Oryza sativa
MDYYEILHVDRSATDDDIRRAYRRLAMRWHPDKNHTGKKDAEAKFKDITEAYNVLSDAGKRALYDQYGEEGLRAGGAPPQPGGGGGGADDIFAEFFGSTPFTYCNTGAGTTARAKQQAAWDAGGGGAYFGRGGFARDHGGGGAAASPQPPPVESKLACTLEELYVGVTKNMKISRNVVDASGRMKTESEILSIEVKPGWKKGTKITFPGKGNQQWSQLPADLVFVVDEKPHDVYRRDGNDLVAEARVTLADALGGTVVVLATLDGRELLVEVSGGGVAAGDEDDDDEDPVVYPGYELVVPSEGMPIAREPGRHGSLRIRFDVAFPERLTRRQRAQIKRILDAAG

SEQ ID NO: 118121 - DNA, 1017 bp, Brassica napus
  CDS (1)..(1017)
atgggagtggattactacaacgtcctccaagtcgatcgcaacgcctccgaagatgatctcaagaaagcttacagaaaactcgccatgaaatggcatcccgacaagaaccccaacaacaaaaaggacgccgaggccaagttcaagcagatctccgaagcttacgaggttcttagcgatccccagaagaaagctgtatacgatcagtacggcgaggaaggcttgaaagggaacgtcccacctccagatgctggtggagccacttacttcgctaccggagacggtccaacgtccttccggttcaacccgagaagcgcagacgatatattcgccgagttctttggcttctccaggccatttggtggtggcggtggcggtggtacaagattctctagcagcatgtttggtgataacatttttgcctcttttggtgaagcaggaggaggaggaggagcgatgcatcacggtggtggagccaggaaggctgctcctatcgaaaacaggctgccttgtagccttgaagatctctacaaaggaaccaccaagaagatgaagatctctagggagattgctgacgtcagcggcaagacgatgccggtggaagagattttaacgattgatgtgaagccagggtggaagaaaggcaccagaatcacattccctgagaaaggaaacgagcagcccggcgtgactccagctgatttagtcttcatcatcgacgagaagcctcacccggttttcactcgggagggtaatgacctcattgtcacacagaggatctcactcgctgaggccctgacaggctacaccgtgaacctgacgacactcgatggtcggagactgacaatcccagtcaccaacgtgatccacccagagtacgaggaagtggttccaaaggaaggaatgcccttacagaaagatcagacaaagagaggaaacttgaggatcaagttcaacatcaagttcccaacgaggttaacctcagagcagaaggcaggagtaaagaagcttctcggataa

SEQ ID NO: 118122 - protein, 338 aa, Brassica napus
MGVDYYNVLQVDRNASEDDLKKAYRKLAMKWHPDKNPNNKKDAEAKFKQISEAYEVLSDPQKKAVYDQYGEEGLKGNVPPPDAGGATYFATGDGPTSFRFNPRSADDIFAEFFGFSRPFGGGGGGGTRFSSSMFGDNIFASFGEAGGGGGAMHHGGGARKAAPIENRLPCSLEDLYKGTTKKMKISREIADVSGKTMPVEEILTIDVKPGWKKGTRITFPEKGNEQPGVTPADLVFIIDEKPHPVFTREGNDLIVTQRISLAEALTGYTVNLTTLDGRRLTIPVTNVIHPEYEEVVPKEGMPLQKDQTKRGNLRIKFNIKFPTRLTSEQKAGVKKLLG

SEQ ID NO: 118123 - DNA, 1041 bp, Brassica napus
  CDS (1)..(1041)
atggcgattcggcggtcgaagctatgcatcgcattgttcgcgctctcttacgccatctgcgtcttcgccgggaagagctactacgatgtgttgcaagtgccgaaaggtgcgtctgatgaacagattaagagagcttacaggaaactcgccttgaagtatcatcccgataagaatcaaggcaacgaagaagccactcgcaaattcgccgagatcaacaacgcttatgaagtgctctcggatgaggagaagagggaggtgtataacagatatggtgaagaagggctcaaacagcatgctgctaatggtggacgtggaggtggaggaggcatgaatatgcaggacatctttagccaattttttggtggtggtggctcgatggaggaagaagagaaggttgtcaagggtgatgacgtgattgtggaacttgaggccactctagaagatttatacatgggaggctctatgaaggtatggagggaaaagaatgtaataaaaccagctcctggaaagagaaattgcaactgcagggatgaggtttatcacaggcaaattggtcctggaatgttccaacagatgacagagcaggtctgtgataaatgcccaaatgttaagttcgaacgcgaaggatactttgtcacagttgatatcgagaaagggatgaaagacggagaagaagtgtctttctacgaagatggtgaacccattctcgacggtgaccctggtgaccttaagttccgaatcaaaacagcaccacatgcccggttcaggagagatggcaacgatctacacatgaacgtcaacattacactggttgaggcgctagttggttttgagaaatcattcaaacacttggatgagcacgaagttgacatcagttccaagggaattacaaaacccaaggaagtgaagaagtttaaaggagaagggatgccactacactatagcacaaagaaaggcagcctatttgtcacatttgaggtcttgtttccttcttctctcaccgaggatcagaagaagaagattaaagaagtcttggcttaa

SEQ ID NO: 118124 - protein, 346 aa, Brassica napus
MAIRRSKLCIALFALSYAICVFAGKSYYDVLQVPKGASDEQIKRAYRKLALKYHPDKNQGNEEATRKFAEINNAYEVLSDEEKREVYNRYGEEGLKQHAANGGRGGGGGMNMQDIFSQFFGGGGSMEEEEKVVKGDDVIVELEATLEDLYMGGSMKVWREKNVIKPAPGKRNCNCRDEVYHRQIGPGMFQQMTEQVCDKCPNVKFEREGYFVTVDIEKGMKDGEEVSFYEDGEPILDGDPGDLKFRIKTAPHARFRRDGNDLHMNVNITLVEALVGFEKSFKHLDEHEVDISSKGITKPKEVKKFKGEGMPLHYSTKKGSLFVTFEVLFPSSLTEDQKKKIKEVLA

SEQ ID NO: 118125 - DNA, 1014 bp, Brassica napus
  CDS (1)..(1014)
atgggggttgattactacaacgtactgaacgtgcccccaagcgcgagcgaagatgatctgaagaaatcctacagaagactagcgatgaaatggcatcccgacaagaacccttcgagcaagaaagaagctgaagctaaattcaaacagatctccgaagcttacgatgtcctgagcgatcctcaaaggcgtcagatctacgatcaatacggcgaggacgggctcaagtcttccgacttaccaacgccggctacgcagcggagctactcctccagcaacaacaacaacgagtttcggtattatccgcgagacgctgaagatattttcaacgagtttttcggcgcgtcgggggatgcattcggcggaggagggaggtgggagagtggcaacggaggaggaagcaggttcagaagcgcggaggcgggaagtcagacgagtaggaaagcgacggcgaataggaaagctcctgcgatcgagagcaagctggcttgtactctcgaggagttgtataaaggtgggaggaggaagatgcgaatctcacgcgttgtccctgatggtctcgggaagccaaagacagtggaagagattttgaagatagacattacaccaggatggaagaaaggaacaaagatcacattcccagagaaaggaaaccatgaaccaggagtcactcctgctgatctcatcttcgtcatcgatgagaaaccgcactcggtctacaaaagagatggaaacgatctgattgtagacaagaaagtctcgcttttggaagctctaacaggtatcactatcagcctgacaacgctagacgggaggaatctgactataccggttttggatatcgttaaaccgggtcaggagattgtgatccctaacgaaggaatgcctatctctaaagaagtttccaagaggggagatcttaggataaacttcgatatctgtttcccttcgaggctaacattggaacagaagacagatcttaagagagttcttggtggagctgcagttgacaactag

SEQ ID NO: 118126 - protein, 337 aa, Brassica napus
MGVDYYNVLNVPPSASEDDLKKSYRRLAMKWHPDKNPSSKKEAEAKFKQISEAYDVLSDPQRRQIYDQYGEDGLKSSDLPTPATQRSYSSSNNNNEFRYYPRDAEDIFNEFFGASGDAFGGGGRWESGNGGGSRFRSAEAGSQTSRKATANRKAPAIESKLACTLEELYKGGRRKMRISRVVPDGLGKPKTVEEILKIDITPGWKKGTKITFPEKGNHEPGVTPADLIFVIDEKPHSVYKRDGNDLIVDKKVSLLEALTGITISLTTLDGRNLTIPVLDIVKPGQEIVIPNEGMPISKEVSKRGDLRINFDICFPSRLTLEQKTDLKRVLGGAAVDN

SEQ ID NO: 118127 - DNA, 1053 bp, Brassica napus
  CDS (1)..(1053)
atgggtgtggattactacaaagttctacaggttgatagaagcgccagcgacgatgaccttaagaaagcctacaggaaactcgctatgaagtggcatcccgacaagaaccctaccaacaaaaaagaggccgaggctaagttcaagcagatctctgaagcctacgatgttcttagcgatcctcagaagagagctgtattcgatcaatacggcgaggaagggttaaaagggaacgtgccacctcccaacgctgctggtggatcttcctacttctcatcaggagatgggccttcgtctttcaggttcaacccgagaagcgcggatgatatattcgctgagtttttcggtttctctactccctttggtggcagcccgtttggtggaggaggaggccttggccgcagcggagcagggcagaggttcgccagccgcatctttggtgatgatatgtatggcagctcgttcggtgaaggaggacaccctcctcatcatcatcatcatcacggtgcagctaggaaagtggctcctatcgagaacaagcttccttgtagccttgaagatctctacaaaggaaccaccaagaagatgaagatctccagggagattgcagatgtcagcggaagaacaacgcaaacagaagagattctaacgatcggagtgaaaccaggatggaagaaaggcacgaagatcacattccccgagaaaggcaacgagcatcccggggtgattccagctgatctcgtcttcatcatcgacgagaagccacatccggtgttcacacgtgacggcaacgacttgattgtcacacagaagatctcgctagccgaagccttaacaggctacaccgtcaacataacgacccttgatggtcggacacttacaatccccatcacaaacgtgatccatccagagtacgaagaagtggtgcctaaagaaggaatgccacttcagaaagatcagacaaagaaagggaacttgaggatcaagttcaacatcaagtttccagctaggttaaccgcggaacagaagactggtttcaagaagcttcttggttga

SEQ ID NO: 118128 - protein, 350 aa, Brassica napus
MGVDYYKVLQVDRSASDDDLKKAYRKLAMKWHPDKNPTNKKEAEAKFKQISEAYDVLSDPQKRAVFDQYGEEGLKGNVPPPNAAGGSSYFSSGDGPSSFRFNPRSADDIFAEFFGFSTPFGGSPFGGGGGLGRSGAGQRFASRIFGDDMYGSSFGEGGHPPHHHHHHGAARKVAPIENKLPCSLEDLYKGTTKKMKISREIADVSGRTTQTEEILTIGVKPGWKKGTKITFPEKGNEHPGVIPADLVFIIDEKPHPVFTRDGNDLIVTQKISLAEALTGYTVNITTLDGRTLTIPITNVIHPEYEEVVPKEGMPLQKDQTKKGNLRIKFNIKFPARLTAEQKTGFKKLLG

SEQ ID NO: 118129 - DNA, 1506 bp, Brassica napus; identical to SEQ ID NO: 64083
  CDS (1)..(1506)

SEQ ID NO: 118130 - protein, 501 aa, Brassica napus; identical to SEQ ID NO: 64084

SEQ ID NO: 118131 - DNA, 1023 bp, Glycine max
  CDS (1)..(1023)
atgggcgtggactactacaagattcttcaggtagatagaagtgccaaagatgaggatctcaagaaagcatatcgaaggctagccatgaagtggcaccctgataagaaccctaacaacaagaaagaggctgaagctaaattcaagcaaatctccgaagcttatgatgttttgagtgatccacagaagcgaggaatttatgatcagtatggtgaggaggggttgaatggggtgccgccaggcgcaggtggttttcctggtggtggcgacggtgggccgacgtcattccggttcaaccccagaagtgcagatgatatattttccgagtttttcgggttttcgagaccctttggtggtggaatgggggacatgggtggccgagctggtggctctggattttccaggggtggcccgtttggtgaagatatctttgctcaatttaggagtgcagctggggagagctgtggccatatgcaaaggaaaggtgcagccattgagagacaattgccttgtagcttggaggatttgtataaagggactaccaagaaaatgaagatttcaagggatgttagtgatgccagtgggagaccctccacagtagaggaaatacttacaattgagatcaagccaggttggaagaaaggaacaaaaataacttttcctgaaaagggaaatgagcagagaggagttatcccttcggaccttgtctttattattgatgagaagcctcatagtctctttaaaagggatggcaatgatcttgttgtcacccagaagatatcgcttgtagaagccttgacaggttacacagtgcagctgacaacccttgatgggcggaatcttacattccccattaactccactattagtccaacatatgaagaagttgtcaaaggagagggtatgcccattccaaaagaaccttccaagaagggaaacttaagaatcaagttcaatatcaagtttccctccaggcttacatccgaacagaaaagtggcatcaagcgattattgacatctccttaa

SEQ ID NO: 118132 - protein, 340 aa, Glycine max
MGVDYYKILQVDRSAKDEDLKKAYRRLAMKWHPDKNPNNKKEAEAKFKQISEAYDVLSDPQKRGIYDQYGEEGLNGVPPGAGGFPGGGDGGPTSFRFNPRSADDIFSEFFGFSRPFGGGMGDMGGRAGGSGFSRGGPFGEDIFAQFRSAAGESCGHMQRKGAAIERQLPCSLEDLYKGTTKKMKISRDVSDASGRPSTVEEILTIEIKPGWKKGTKITFPEKGNEQRGVIPSDLVFIIDEKPHSLFKRDGNDLVVTQKISLVEALTGYTVQLTTLDGRNLTFPINSTISPTYEEVVKGEGMPIPKEPSKKGNLRIKFNIKFPSRLTSEQKSGIKRLLTSP

SEQ ID NO: 118133 - DNA, 1032 bp, Glycine max
  CDS (1)..(1032)
atggcgcctcgtggagccacgctgttgttccttctatgcgctctctgctattctctcatcgccattgctggaaagagctattacgatatacttcaactttctaagggtgcgtcggacgaacagataaagagagcgtataggaagctagcattgaagtaccatcctgataagaacccgggcaatgaagaggctaataagaaatttgcggagattagcaatgcgtatgaagtgttgtctgatagcgagaagaggaatatttacgataggtatggtgaagagggtttgaagcagcatgctgctagtggaggcagaggtggtggaatgaacttccaagatatttttagcactttctttggtgggggaccaatggaggaagaagagaaaattgtaaaaggagatgacttggttgttgatttggatgcaacacttgaagatttgtacatgggaggtaccttgaaggtttggagggaaaagaatgtactaaagcctgctcctgggaaaagacgctgtaactgtagaaatgaggtttatcacaagcaaattgggcctgggatgtttcaacagatgacagagcaggtctgtgagcaatgtcctaacgtcaaatacgtaagggaggggtatttcatcactgttgatattgagaaaggcatgcaagatgggcaggaggtgctattctatgaggatggagagcccataattgatggggaatctggagatttaaggtttcgtatccgaactgcacctcatgacgtcttcagaagagaaggcaatgacttgcactctactgtcactataactcttgttcaagcccttgttggttttgagaagaccattaaacacctagatgagcatctggtggacataagcacaaaggaaatcacaaagccaaagcaggtgaggaagttcaaaggggagggtatgccattgcatatgagcaacaaaaaaggagatctttacgtcacttttgaggttctatttcccacgtctctaagggaggagcagaaaacaaagataaaagcaattcttggttag

SEQ ID NO: 118134 - protein, 343 aa, Glycine max
MAPRGATLLFLLCALCYSLIAIAGKSYYDILQLSKGASDEQIKRAYRKLALKYHPDKNPGNEEANKKFAEISNAYEVLSDSEKRNIYDRYGEEGLKQHAASGGRGGGMNFQDIFSTFFGGGPMEEEEKIVKGDDLVVDLDATLEDLYMGGTLKVWREKNVLKPAPGKRRCNCRNEVYHKQIGPGMFQQMTEQVCEQCPNVKYVREGYFITVDIEKGMQDGQEVLFYEDGEPIIDGESGDLRFRIRTAPHDVFRREGNDLHSTVTITLVQALVGFEKTIKHLDEHLVDISTKEITKPKQVRKFKGEGMPLHMSNKKGDLYVTFEVLFPTSLREEQKTKIKAILG

SEQ ID NO: 118135 - DNA, 966 bp, Brassica napus
  CDS (1)..(966)
atgggtttggattattacaacatattgaaagtgaacagaaatgcaacggaggatgatctgaagaaatcttacagaagattggctatgaagtggcatcctgacaaaaaccccaacaccaaactggaagctgaagccaaattcaaacagatctccgaggcttatgatcttctgagcgatccccagaagcgagctatatatgatcaatacggagaagaaggactaaccgatatgccccctccagggagcactggaaacaacggaagagccaacggttttaaccctagaaatgcagaagacatatttgctgagttctttggaagcagcccctttgatttcggatcagctggaagatccatgaggtttcaatccgacggaggaggaatgtttggaggaagaacgtacagcgatggcactgtgcctaagaaacctccacctgttgagagcaaactgccttgtacccttgaagagctctactctggatcaactaggaaaatgaagatctctagatcccttattgacaccaacgggagacaagggcaagagacagaggttctgacgattgatgtgaaaccgggatggaagaaagggaccaagatcaagtttcccgacaaaggaaacgagacagtgaatcagttacctgctgatttggtgtttgtgatcgacgagaagcctcacgatttgttcaagagagatgggaatgatctcatcacaagtacaagagtgacgcttgctgaagctattggtggaacaactgtgagcatcaacacgctagatgggcgtaatgtacccgttggtgtcactgacatcatcagtcctgaccatgagcatgtggttactggagaagggatgcctgtagctaaagaacctagaaacaaaggtgacctaaaaataaaattcgatgttcagttcccgacaagattgactacggaccagaagtccgcactcaagcgcgtcttagcaggttga

SEQ ID NO: 118136 - protein, 321 aa, Brassica napus
MGLDYYNILKVNRNATEDDLKKSYRRLAMKWHPDKNPNTKLEAEAKFKQISEAYDLLSDPQKRAIYDQYGEEGLTDMPPPGSTGNNGRANGFNPRNAEDIFAEFFGSSPFDFGSAGRSMRFQSDGGGMFGGRTYSDGTVPKKPPPVESKLPCTLEELYSGSTRKMKISRSLIDTNGRQGQETEVLTIDVKPGWKKGTKIKFPDKGNETVNQLPADLVFVIDEKPHDLFKRDGNDLITSTRVTLAEAIGGTTVSINTLDGRNVPVGVTDIISPDHEHVVTGEGMPVAKEPRNKGDLKIKFDVQFPTRLTTDQKSALKRVLAG

SEQ ID NO: 118137 - DNA, 1518 bp, Brassica napus; identical to SEQ ID NO: 64085
  CDS (1)..(1518)

SEQ ID NO: 118138 - protein, 505 aa, Brassica napus; identical to SEQ ID NO: 64086

SEQ ID NO: 118139 - DNA, 1017 bp, Zea mays
  CDS (1)..(1017)
atggattactacaacatcctcaaggtgaatcgcaatgcgaccttggaggacctcaagaagtcgtaccggcggctcgcgaggacgtggcaccctgacaagaatctgactggaggggcggaggctgaggccaagttcaagcagataaccgaggcctatgaggtactaagtgatccagagaagcgtgcaatttatgatcagtatggtgaggagggcttaaaggggatgcctccacctggttcccagagccggtcctccacaactgctggcccaagtggtccgagtaatttccattacaatcctagtgacccagatgatttctttgctgagttcatggcaagcaacaagacttactcctttgaccatgaccggaggcgattccagccaaggtcacattggacttcagccaggaacagtagaagtgaagctccttctggttcacagaaagagaatggtgccagtacaagcaatatagaaaagccaccacctgtggagaaaacattactttgtactcttgaagagttgtataatggaacaaaaaggaaaatgaagatcactaggaatgttgcaaagccagatggaagaatagaagttgaaacagaggtcttggcagttgaagtgttacctggctggaaaaagggaaccaagattacattccccaacaaaggcgataagctacatggccagttagcacaagacctgacctttgtcctcgattcgaagccccatgatgtgtacaatcttgaagggaacaaccttcttgtaaagcaggtgatccctctggtagatgccctcgctggggcagagataaacctcacaacccttgatggtcggaatctgcctgtgagggtggaggaagtggtgcgccctggatacgaagttgtgctggagaacgaagggtggccgatcaggaaggaacctgggaagaagggaaagctggtaatcaagtttgatgtgaccttcccgatgaggttatcgccgtcacagcgggcagccatcaggcgaatcatgggcagctaa

SEQ ID NO: 118140 - protein, 338 aa, Zea mays
MDYYNILKVNRNATLEDLKKSYRRLARTWHPDKNLTGGAEAEAKFKQITEAYEVLSDPEKRAIYDQYGEEGLKGMPPPGSQSRSSTTAGPSGPSNFHYNPSDPDDFFAEFMASNKTYSFDHDRRRFQPRSHWTSARNSRSEAPSGSQKENGASTSNIEKPPPVEKTLLCTLEELYNGTKRKMKITRNVAKPDGRIEVETEVLAVEVLPGWKKGTKITFPNKGDKLHGQLAQDLTFVLDSKPHDVYNLEGNNLLVKQVIPLVDALAGAEINLTTLDGRNLPVRVEEVVRPGYEVVLENEGWPIRKEPGKKGKLVIKFDVTFPMRLSPSQRAAIRRIMGS

SEQ ID NO: 118141 - DNA, 1047 bp, Zea mays
  CDS (1)..(1047)
atggggacggactactacaatgtgctcaaggtgaaccggaacgccacggaggaggacctcaagaagtcgtaccgccggctggccatgaggtggcaccccgacaagaaccctggcgacgtcaagaaggaagccgaggccaaattcaagaagatctccgaggcctacgaggttctgagtgatccgcagaagagggcggcgtacgatcagtacggcgaggaaggcctgaaggcctccgcagacggcggtggtggtggtggtggttccacgtccacgaacggggccgccaaccaacgcttcaaccctcgcaacgccgaagacgtgttcgccgagttctttggcagcaacaagccgttcgagaacatggggcgagccaagtcaatgaggttccagacagaaggcgctggcaccttcggtgggttcggtgggaacgagagcaagttcagaccatacaacaacgattcggccggcaccggctccagtcaggctcggaagccgccgcccgtggagaccaaactgccctgcacgctcgaagagctgtacgcaggctcagcacgcaagatgaagatctccaggaacgttgtgaagccgaatgggcaactagggaccgaatcggagattctaacgatcgatataaagcccggctggaagaaggggaccaagatcacgttcccggacaagggcaacgagcagccgaaccaactccccgccgacctcgtcttcgtcatcgacgagaaaccccatgacctgtacacgagagagggcaacgacctcctggtccaccggaagatcgatctggtggacgcgttggcaggaacgacggtcagcctgaagacgctcgacgggcgtgacctggtgattaggctcacggacgtggtgacacctgggtacgagcttgtggtcgccaaggaggggatgcctatcgtcaaggagaacgggaggagaggcaacctgaggatcaagttcgacgtcggtttccctaagaggttgtcgtcggagcagcggcacaccattcggaaggttcttggaggccagcctcagcagcagtga

SEQ ID NO: 118142 - protein, 348 aa, Zea mays
MGTDYYNVLKVNRNATEEDLKKSYRRLAMRWHPDKNPGDVKKEAEAKFKKISEAYEVLSDPQKRAAYDQYGEEGLKASADGGGGGGGSTSTNGAANQRFNPRNAEDVFAEFFGSNKPFENMGRAKSMRFQTEGAGTFGGFGGNESKFRPYNNDSAGTGSSQARKPPPVETKLPCTLEELYAGSARKMKISRNVVKPNGQLGTESEILTIDIKPGWKKGTKITFPDKGNEQPNQLPADLVFVIDEKPHDLYTREGNDLLVHRKIDLVDALAGTTVSLKTLDGRDLVIRLTDVVTPGYELVVAKEGMPIVKENGRRGNLRIKFDVGFPKRLSSEQRHTIRKVLGGQPQQQ

SEQ ID NO: 118143 - DNA, 1266 bp, Linum usitatissimum; identical to SEQ ID NO: 64087
  CDS (1)..(1266)

SEQ ID NO: 118144 - protein, 421 aa, Linum usitatissimum; identical to SEQ ID NO: 64088

SEQ ID NO: 118145 - DNA, 1011 bp, Zea mays
  CDS (1)..(1011)
atgggggccgattactacaaggtcctcggcgtcgaccgcggcgccggcgacgacgacctcaagaaggcctaccggaagctcgccatgcgatggcaccccgacaagaacactaccaacaagaaggaggcagaaaccaagttcaaggatatctctgttgcatatgaggtccttagcgatcccaagaaacgtgcaatctatgatcagctaggagaagaagggctcaaggggcagccgcccccaggagcaggaggttctggcgcattccccttcttccctggcggggctcattccaccgctccccattttaatcacaggagtgcggatgatatatttaaggagttctttggatcccctggcatgggtggcatgagagcggaaccaggattccagaggtcaatgtttggcaacgatatcttctcttcacgctttggcgctgagggttccaccagtatgcagcagccaccacgcaaggcagctgcaattgagaacccacttccagtcagccttgcagatctgtacaagggtgtcacgaaaaagatgaaaatctcaagagaggctatagatgccagcgggagaatctcaaacgcagaggatattctgacaatagaagtaaggcctggttggaagaagggaacaaagattacatttcccgacaaggggaatgaagctccaaacatgaaagctgctgatattgttttcatcctcgatgagaagccccatgatgttttcactcgggatgggaatgatcttgtggtgactgagaaaatctcgctggtggaagcgctgattggatatactgcacgtgtcactacgcttgatgggcggagcctatcattgcccatcaactcgataatccatccgagctacgaagaggtagttcctagagagggcatgccaatacccaaggacccctctaagaagggaaatctgcggattaagttcaacataatgttcccttctaggctgacgtctgatcagaaggctggtctcaaaaggatattgggttcttag

SEQ ID NO: 118146 - protein, 336 aa, Zea mays
MGADYYKVLGVDRGAGDDDLKKAYRKLAMRWHPDKNTTNKKEAETKFKDISVAYEVLSDPKKRAIYDQLGEEGLKGQPPPGAGGSGAFPFFPGGAHSTAPHFNHRSADDIFKEFFGSPGMGGMRAEPGFQRSMFGNDIFSSRFGAEGSTSMQQPPRKAAAIENPLPVSLADLYKGVTKKMKISREAIDASGRISNAEDILTIEVRPGWKKGTKITFPDKGNEAPNMKAADIVFILDEKPHDVFTRDGNDLVVTEKISLVEALIGYTARVTTLDGRSLSLPINSIIHPSYEEVVPREGMPIPKDPSKKGNLRIKFNIMFPSRLTSDQKAGLKRILGS

SEQ ID NO: 118147 - DNA, 1272 bp, Brassica napus; identical to SEQ ID NO: 64089
  CDS (1)..(1272)

SEQ ID NO: 118148 - protein, 423 aa, Brassica napus; identical to SEQ ID NO: 64090

SEQ ID NO: 118149 - DNA, 1266 bp, Brassica napus; identical to SEQ ID NO: 64091
  CDS (1)..(1266)

SEQ ID NO: 118150 - protein, 421 aa, Brassica napus; identical to SEQ ID NO: 64092

SEQ ID NO: 118151 - DNA, 1017 bp, Brassica napus
  CDS (1)..(1017)
atgggagtggattactacaacgtcctccaagtcgatcgcaacgcctccgaaaatgatctcaagaaagcttacagaaaactcgccatgaaatggcatcccgacaagaaccccaacaacaaaaaggacgccgaggccaagttcaagcagatctccgaagcttacgaggttcttagcgatccccagaagaaagctgtatacgatcagtacggcgaggaaggcttgaaagggaacgtgccacctccagatgctggtggagccacttacttcgctaccggagacggtccaacgtccttccggttcaacccgagaaacgcagacgatatattcgccgagttctttggcttctccagaccatttggtggtggcggtggcggtggtacaagattctctagcagcatgtttggtgataacatttttgcctctttcggtgaagcaggaggaggaggaggagcgatgcatcacggtggtggagccaggaaggcggctcctatcgaaaacaggctgccttgtagccttgaagatctctacaaaggaaccaccaagaagatgaagatctctagggagattgctgacgtcagcggcaagacgatgccggtggaagagattttaacgattgatgtgaagccagggtggaagaaaggcaccagaatcacattccctgagaaaggaaacgagcagcccggcgtgactccagctgatttagtcttcatcatcgacgagaagcctcacccggttttcactcgggagggtaatgacctcattgtcacacagaggatctcactcgctgaggccctgacaggctacaccgtgaacctgacgacactcgatggtcggagactgacaatcccagtcaccaacgtgatccacccagagtacgaggaagtggttccaaaggaaggaatgcccttacagaaagatcagacaaagagaggaaacttgaggatcaagttcaacatcaagttcccaacgaggttaacctcagagcagaaggcaggagtaaagaagcttctcggataa

SEQ ID NO: 118152 - protein, 338 aa, Brassica napus
MGVDYYNVLQVDRNASENDLKKAYRKLAMKWHPDKNPNNKKDAEAKFKQISEAYEVLSDPQKKAVYDQYGEEGLKGNVPPPDAGGATYFATGDGPTSFRFNPRNADDIFAEFFGFSRPFGGGGGGGTRFSSSMFGDNIFASFGEAGGGGGAMHHGGGARKAAPIENRLPCSLEDLYKGTTKKMKISREIADVSGKTMPVEEILTIDVKPGWKKGTRITFPEKGNEQPGVTPADLVFIIDEKPHPVFTREGNDLIVTQRISLAEALTGYTVNLTTLDGRRLTIPVTNVIHPEYEEVVPKEGMPLQKDQTKRGNLRIKFNIKFPTRLTSEQKAGVKKLLG

SEQ ID NO: 118153 - DNA, 1011 bp, Brassica napus
  CDS (1)..(1011)
atgggagtggattactacaacgtcctccaagtcgatcgcaacgcctccgaagatgatctcaagaaagcttacagaaaactcgccatgaaatggcatcccgacaagaaccccaacaacaaaaaggacgccgaggccaagttcaagcagatctccgaagcttacgaggttcttagcgatccccagaagaaagctgtatacgatcagtacggcgaggaaggcttgaaagggaacgtcccacctccagatgctggtggagccacttacttcgctaccggagacggtccaacgtccttccggttcaacccgagaagcgcagacgatatattcgctgagttctttggcttctccaggccatttggtggtggcggtggcggtggtacaagattctctagcagcatgtttggtgataacatttttgcctctttcggtgaaggaggaggaggagctatgcatcatggtggtggagccaggaaggctgctcctatcgaaaacaggctgccttgtagccttgaagatctctacaaaggaaccaccaagaagatgaagatctctagggagattgctgacgtcagcggcaagacgatgccggtggaagagattttaacgattgatgtgaagccagggtggaagaaaggcaccagaatcacattccctgagaaaggaaacgagcagcccggagtgactccagctgatttagtcttcatcatcgacgagaagcctcacccggttttcactcgggagggtaatgacctcattgtcacacagaggatctcactcgctgaggccctgacaggctacaccgtgaacctgacgacactcgatggtcggagactgacaatcccagtcaccaacgtgatccacccagagtacgaggaagtggttccaaaggaaggaatgcccttgcagaaagatcagacaaagagaggaaacttgaggatcaagttcaacatcaagttcccaacgaggttaacctcagagcagaaggcaggagtaaagaaccctctcggataa

SEQ ID NO: 118154 - protein, 336 aa, Brassica napus
MGVDYYNVLQVDRNASEDDLKKAYRKLAMKWHPDKNPNNKKDAEAKFKQISEAYEVLSDPQKKAVYDQYGEEGLKGNVPPPDAGGATYFATGDGPTSFRFNPRSADDIFAEFFGFSRPFGGGGGGGTRFSSSMFGDNIFASFGEGGGGAMHHGGGARKAAPIENRLPCSLEDLYKGTTKKMKISREIADVSGKTMPVEEILTIDVKPGWKKGTRITFPEKGNEQPGVTPADLVFIIDEKPHPVFTREGNDLIVTQRISLAEALTGYTVNLTTLDGRRLTIPVTNVIHPEYEEVVPKEGMPLQKDQTKRGNLRIKFNIKFPTRLTSEQKAGVKNPLG

SEQ ID NO: 118155 - DNA, 1314 bp, Glycine max; identical to SEQ ID NO: 64093
  CDS (1)..(1314)

SEQ ID NO: 118156 - protein, 437 aa, Glycine max; identical to SEQ ID NO: 64094

SEQ ID NO: 118157 - DNA, 1332 bp, Glycine max; identical to SEQ ID NO: 64095
  CDS (1)..(1332)

SEQ ID NO: 118158 - protein, 443 aa, Glycine max; identical to SEQ ID NO: 64096

SEQ ID NO: 118159 - DNA, 1260 bp, Zea mays; identical to SEQ ID NO: 64097
  CDS (1)..(1260)

SEQ ID NO: 118160 - protein, 419 aa, Zea mays; identical to SEQ ID NO: 64098

SEQ ID NO: 118161 - DNA, 1254 bp, Zea mays; identical to SEQ ID NO: 64099
  CDS (1)..(1254)

SEQ ID NO: 118162 - protein, 417 aa, Zea mays; identical to SEQ ID NO: 64100

SEQ ID NO: 118163 - DNA, 1011 bp, Zea mays
  CDS (1)..(1011)
atgggggccgattactacaaggtcctcggcgtcgaccgcggcgccggcgacgacgacctcaagaaggcctatcggaagctcgccatgcgatggcaccccgacaagaactccaccaataagaaggaggcagaaaccaagttcaaggatatctctgttgcatatgaggtccttagcgatcccaagaaacgtgcaatctatgatcagctaggagaagaagggctcaaggggcagccgcccccaggagcaggaggttctggcgcattccccttcttccctggcggggctcattccaccgctccccattttaatcacaggagtgcggatgatatatttaaggagttctttggatcccctggcatgggtggcatgagagcggaaccaggattccagaggtcaatgtttggcaacgatatcttctcttcacgctttggcgctgagggttccaccagtatgcagcagccaccacgcaaggcagctgcaattgagaacccacttccagtcagccttgcagatctgtacaagggtgtcacgaaaaagatgaaaatctcaagagaggctatagatgccagcgggagaatctcaaacgcagaggatattctgacaatagaagtaaggcctggttggaagaagggaacaaagattacatttcccgacaaggggaatgaagctccaaacatgaaagctgctgatattgttttcatcctcgatgagaagccccatgatgttttcactcgggagggaaatgatcttgtcgtgactgagaagatctcactggtggaagcactgactggctataccgcacgtgtcactacgcttgacgggcggagcctatcattgcacatcaactcaataatccatccaaagtacgaagaggtgatgcctggagagggcatgccaatgcccaaggacccctctaagaagggaaatctgcggattaagttcaacataatgttcccctctaggctgacttctgatcagaaggccgggatcaagaggctattgggttcttag

SEQ ID NO: 118164 - protein, 336 aa, Zea mays
MGADYYKVLGVDRGAGDDDLKKAYRKLAMRWHPDKNSTNKKEAETKFKDISVAYEVLSDPKKRAIYDQLGEEGLKGQPPPGAGGSGAFPFFPGGAHSTAPHFNHRSADDIFKEFFGSPGMGGMRAEPGFQRSMFGNDIFSSRFGAEGSTSMQQPPRKAAAIENPLPVSLADLYKGVTKKMKISREAIDASGRISNAEDILTIEVRPGWKKGTKITFPDKGNEAPNMKAADIVFILDEKPHDVFTREGNDLVVTEKISLVEALTGYTARVTTLDGRSLSLHINSIIHPKYEEVMPGEGMPMPKDPSKKGNLRIKFNIMFPSRLTSDQKAGIKRLLGS

SEQ ID NO: 118165 - DNA, 1290 bp, Zea mays; identical to SEQ ID NO: 64101
  CDS (1)..(1290)

SEQ ID NO: 118166 - protein, 429 aa, Zea mays; identical to SEQ ID NO: 64102

SEQ ID NO: 118167 - DNA, 1269 bp, Zea mays; identical to SEQ ID NO: 64103
  CDS (1)..(1269)

SEQ ID NO: 118168 - protein, 422 aa, Zea mays; identical to SEQ ID NO: 64104

SEQ ID NO: 118169 - DNA, 1050 bp, Glycine max
  CDS (1)..(1050)
atgggtgtggattactacaagatcttgcaggttgataggagcgccaaagacgacgacttgaagaaggcttataggaaacttgctatgaaatggcaccctgataagaaccccaacaacaagaaagaagctgaagctaagtttaagcaaatttccgaagcatacgaggtacttagtgatcctcaaaagaaagcaatctatgatcaatatggagaagagggtctgaagggtcaagttcctcctcctgatgctggtggtgctggaactggaactactttcttctccacaggagatatcccgggttcgtttcggttcaatccgaggaatgccgatgacatttttgcagagttctttggtttctcaagcccatttggtggaatgggtgggagaggtggtggcggcagtggtggtggcatgagatcaaggttccctggtgggatgtttggtgatgatatgtttgcatcttttggggaagggggaggagtacatatgagtcaaggtgcacctcggaaagctcctcccattgagagcaaattgccctgcactcttgaggagatatataaagggactacaaagaagatgaagatctctagagaaattgcagatgctagtggaaaaaccatgccagtagaggaaatcttgaccattaatgtcaagcctggctggaagaaaggaacaaagatcacattccctgaaaagggaaatgaacagccaaacgtgatgcctgcagaccttgttttcatcattgacgaaaaaccgcatggcgtcttcgctcgcgacggaaatgaccttgttgtcacccagaagatttctcttgcagaggcattaactggttatacagtgcacctcactaccctagatggtagaaacttaaccataccaatcaacaatgttattcatcccacttatgaagaggttgtcccaagagaaggaatgccacttccaaaagatccatcaaagaaggggaatttgaggataaagtttaacatcaagttcccaactaggctcactgaagagcaaaaagcaggaatcagaaaactcttaaatgcctaa

SEQ ID NO: 118170 - protein, 349 aa, Glycine max
MGVDYYKILQVDRSAKDDDLKKAYRKLAMKWHPDKNPNNKKEAEAKFKQISEAYEVLSDPQKKAIYDQYGEEGLKGQVPPPDAGGAGTGTTFFSTGDIPGSFRFNPRNADDIFAEFFGFSSPFGGMGGRGGGGSGGGMRSRFPGGMFGDDMFASFGEGGGVHMSQGAPRKAPPIESKLPCTLEEIYKGTTKKMKISREIADASGKTMPVEEILTINVKPGWKKGTKITFPEKGNEQPNVMPADLVFIIDEKPHGVFARDGNDLVVTQKISLAEALTGYTVHLTTLDGRNLTIPINNVIHPTYEEVVPREGMPLPKDPSKKGNLRIKFNIKFPTRLTEEQKAGIRKLLNA

SEQ ID NO: 118171 - DNA, 1263 bp, Glycine max; identical to SEQ ID NO: 64105
  CDS (1)..(1263)

SEQ ID NO: 118172 - protein, 420 aa, Glycine max; identical to SEQ ID NO: 64106

SEQ ID NO: 118173 - DNA, 1050 bp, Glycine max
  CDS (1)..(1050)
atgggtgtggattactacaagatcttgcaagttgataggagcgccaaagacgacgacttgaagaaggcttataggaaacttgctatgaaatggcaccctgataagaaccccaacaacaagaaagaagctgaagctaagtttaagcaaatttccgaagcatacgaggtacttagtgatcctcaaaagaaagcaatctatgatcaatatggagaagagggtctgaagggtcaagttcctcctcctgatgctggtggtgctggaactggaactactttcttctccacaggagatatcccgggttcgtttcggttcaatccgaggaatgccgatgacatttttgcagagttctttggtttctcaagcccatttggtggaatgggtgggagaggtggtggcggcagtggtggtggcatgagatcaaggttccctggtgggatgtttggtgatgatatgtttgcatcttttggggaagggggaggagtacatatgagtcaaggtgcacctcggaaagctcctcccattgagagcaaattgccctgcactcttgaggagatatataaagggactacaaagaagatgaagatctctagagaaattgcagatgctagtggaaaaaccatgccagtagaggaaatcttgaccattaatgtcaagcctggctggaagaaaggaacaaagatcacattccctgaaaagggaaatgaacagccaaacgtgacacctgcagaccttgttttcattattgatgagaaaccgcacagcgtcttcgcccgcgatggaaatgaccttgttgtcacccagaagatttctcttgcagaggcattaactggttatacagtgcacctcactaccctagatggtagaaacttaaccataccaatcaacaatgttattcatcccacttatgaagaggttgtcccaagagaaggaatgccacttccaaaagatccatcaaagaaggggaatttgaggataaagtttaacatcaagttcccaactaggctcactgaagagcaaaaagcaggaatcagaaaactcttaaatgcctaa

SEQ ID NO: 118174 - protein, 349 aa, Glycine max
MGVDYYKILQVDRSAKDDDLKKAYRKLAMKWHPDKNPNNKKEAEAKFKQISEAYEVLSDPQKKAIYDQYGEEGLKGQVPPPDAGGAGTGTTFFSTGDIPGSFRFNPRNADDIFAEFFGFSSPFGGMGGRGGGGSGGGMRSRFPGGMFGDDMFASFGEGGGVHMSQGAPRKAPPIESKLPCTLEEIYKGTTKKMKISREIADASGKTMPVEEILTINVKPGWKKGTKITFPEKGNEQPNVTPADLVFIIDEKPHSVFARDGNDLVVTQKISLAEALTGYTVHLTTLDGRNLTIPINNVIHPTYEEVVPREGMPLPKDPSKKGNLRIKFNIKFPTRLTEEQKAGIRKLLNA

SEQ ID NO: 118175 - DNA, 1263 bp, Glycine max; identical to SEQ ID NO: 64107
  CDS (1)..(1263)

SEQ ID NO: 118176 - protein, 420 aa, Glycine max; identical to SEQ ID NO: 64108

SEQ ID NO: 118177 - DNA, 1233 bp, Glycine max; identical to SEQ ID NO: 64109
  CDS (1)..(1233)

SEQ ID NO: 118178 - protein, 410 aa, Glycine max; identical to SEQ ID NO: 64110

SEQ ID NO: 118179 - DNA, 1053 bp, Glycine max
  CDS (1)..(1053)
atgggtgtggattactacaagatcttgcaagttgataggagcgccaaagacgatgacttgaagaaggcttataggaaacttgctatgaaatggcaccctgataagaaccccaacaacaagaaagaagctgaagctaagtttaagcaaatttccgaagcatatgaggtacttagtgatcctcaaaagaaagctatctatgatcaatatggggaagagggtctgaagggtcaagttcctcctcctgatgctggtggtgctggaactggaactactttcttctccacaggagatatcccgggttcgtttcggttcaatccgaggaatgccgatgacatttttgcagagttctttggtttctcaagcccatttggtggaatgggtgggagaggtggtggcggcagtggtggtggcatgagatcaaggttccctggtgggatgtttggtgatgatatgtttgcatcttttggggaagggggaggagtacatatgagtcaaggtgcacctcggaaagctcctcccattgagagtaaattgccctgcactcttgaggagatatataaagggactacaaagaagatgaagatctctagagaaattgcagatgctagtggaaaaaccatgccagtagaggaaatcttgaccattaatgtcaagcctggctggaagaaaggaacaaagatcacattccctgaaaagggaaatgaacagccaaacgtgacacctgcagaccttgttttcattattgatgagaaaccgcacagcgtcttcgcccgcgatggaaatgaccttgttgtcacccagaagatttctcttgcagaggcattaactggttatacagtgcacctcactaccctagatggtagaaacttaaccataccaatcaacaatgttattcatcccacttatgaagaggttgtcccaagagaaggaatgccacttccaaaagatccatcaaagaaggggaacttgaggataaagtttaacatcaagttcccaactaggctcactgaagagcaaaaagcaggaatcagaaaactcttcaacaatgcctaa

SEQ ID NO: 118180 - protein, 350 aa, Glycine max
MGVDYYKILQVDRSAKDDDLKKAYRKLAMKWHPDKNPNNKKEAEAKFKQISEAYEVLSDPQKKAIYDQYGEEGLKGQVPPPDAGGAGTGTTFFSTGDIPGSFRFNPRNADDIFAEFFGFSSPFGGMGGRGGGGSGGGMRSRFPGGMFGDDMFASFGEGGGVHMSQGAPRKAPPIESKLPCTLEEIYKGTTKKMKISREIADASGKTMPVEEILTINVKPGWKKGTKITFPEKGNEQPNVTPADLVFIIDEKPHSVFARDGNDLVVTQKISLAEALTGYTVHLTTLDGRNLTIPINNVIHPTYEEVVPREGMPLPKDPSKKGNLRIKFNIKFPTRLTEEQKAGIRKLFNNA

SEQ ID NO: 118181 - DNA, 1464 bp, Zea mays; identical to SEQ ID NO: 64111
  CDS (1)..(1464)

SEQ ID NO: 118182 - protein, 487 aa, Zea mays; identical to SEQ ID NO: 64112

SEQ ID NO: 118183 - DNA, 1260 bp, Zea mays; identical to SEQ ID NO: 64113
  CDS (1)..(1260)

SEQ ID NO: 118184 - protein, 419 aa, Zea mays; identical to SEQ ID NO: 64114

SEQ ID NO: 118185 - DNA, 1269 bp, Zea mays; identical to SEQ ID NO: 64115
  CDS (1)..(1269)

SEQ ID NO: 118186 - protein, 422 aa, Zea mays; identical to SEQ ID NO: 64116

SEQ ID NO: 118187 - DNA, 1290 bp, Zea mays; identical to SEQ ID NO: 64119
  CDS (1)..(1290)

SEQ ID NO: 118188 - protein, 429 aa, Zea mays; identical to SEQ ID NO: 64120

SEQ ID NO: 118189 - DNA, 1257 bp, Zea mays; identical to SEQ ID NO: 64121
  CDS (1)..(1257)

SEQ ID NO: 118190 - protein, 418 aa, Zea mays; identical to SEQ ID NO: 64122

SEQ ID NO: 118191 - DNA, 1290 bp, Zea mays; identical to SEQ ID NO: 64123
  CDS (1)..(1290)

SEQ ID NO: 118192 - protein, 429 aa, Zea mays; identical to SEQ ID NO: 64124

SEQ ID NO: 118193 - DNA, 1290 bp, Zea mays; identical to SEQ ID NO: 64125
  CDS (1)..(1290)

SEQ ID NO: 118194 - protein, 429 aa, Zea mays; identical to SEQ ID NO: 64126

SEQ ID NO: 118195 - DNA, 1257 bp, Zea mays; identical to SEQ ID NO: 64127
  CDS (1)..(1257)

SEQ ID NO: 118196 - protein, 418 aa, Zea mays; identical to SEQ ID NO: 64128

SEQ ID NO: 118197 - DNA, 1281 bp, Zea mays; identical to SEQ ID NO: 64129
  CDS (1)..(1281)

SEQ ID NO: 118198 - protein, 426 aa, Zea mays; identical to SEQ ID NO: 64130

SEQ ID NO: 118199 - DNA, 1347 bp, Zea mays; identical to SEQ ID NO: 64131
  CDS (1)..(1347)

SEQ ID NO: 118200 - protein, 448 aa, Zea mays; identical to SEQ ID NO: 64132

SEQ ID NO: 118201 - DNA, 1347 bp, Zea mays; identical to SEQ ID NO: 64133
  CDS (1)..(1347)

SEQ ID NO: 118202 - protein, 448 aa, Zea mays; identical to SEQ ID NO: 64134

SEQ ID NO: 118203 - DNA, 1467 bp, Zea mays; identical to SEQ ID NO: 64135
  CDS (1)..(1467)

SEQ ID NO: 118204 - protein, 488 aa, Zea mays; identical to SEQ ID NO: 64136

SEQ ID NO: 118205 - DNA, 1290 bp, Zea mays; identical to SEQ ID NO: 64137
  CDS (1)..(1290)

SEQ ID NO: 118206 - protein, 429 aa, Zea mays; identical to SEQ ID NO: 64138

SEQ ID NO: 118207 - DNA, 27 bp, Artificial sequence
  primer
atggttaaagaaactaagttttacgat

SEQ ID NO: 118208 - DNA, 25 bp, Artificial sequence
  primer
tcattgagatgcacattgaacacct

SEQ ID NO: 118209 - protein, 416 aa, Artificial sequence
  consensus sequence
  Variant (4)..(5): Xaa in position 4 to 5 is any amino acid
  Variant (6)..(6): Xaa in position 6 is any or no amino acid
  Variant (8)..(10): Xaa in position 8 to 10 is any amino acid
  Variant (11)..(12): Xaa in position 11 to 12 is any or no amino acid
  Variant (14)..(14): Xaa in position 14 is any amino acid
  Variant (18)..(19): Xaa in position 18 to 19 is any amino acid
  Variant (21)..(23): Xaa in position 21 to 23 is any amino acid
  Variant (27)..(33): Xaa in position 27 to 33 is any amino acid
  Variant (34)..(42): Xaa in position 34 to 42 is any or no amino acid
  Variant (45)..(48): Xaa in position 45 to 48 is any amino acid
  Variant (51)..(52): Xaa in position 51 to 52 is any amino acid
  Variant (54)..(54): Xaa in position 54 is any amino acid
  Variant (56)..(57): Xaa in position 56 to 57 is any amino acid
  Variant (60)..(61): Xaa in position 60 to 61 is any amino acid
  Variant (64)..(65): Xaa in position 64 to 65 is any amino acid
  Variant (67)..(75): Xaa in position 67 to 75 is any amino acid
  Variant (76)..(116): Xaa in position 76 to 116 is any or no amino acid
  Variant (118)..(124): Xaa in position 118 to 124 is any amino acid
  Variant (125)..(162): Xaa in position 125 to 162 is any or no amino acid
  Variant (164)..(164): Xaa in position 164 is any amino acid
  Variant (166)..(179): Xaa in position 166 to 179 is any amino acid
  Variant (180)..(195): Xaa in position 180 to 195 is any or no amino acid
  Variant (197)..(197): Xaa in position 197 is any amino acid
  Variant (198)..(215): Xaa in position 198 to 215 is any or no amino acid
  Variant (217)..(236): Xaa in position 217 to 236 is any amino acid
  Variant (237)..(246): Xaa in position 237 to 246 is any or no amino acid
  Variant (248)..(250): Xaa in position 248 to 250 is any amino acid
  Variant (251)..(255): Xaa in position 251 to 255 is any or no amino acid
  Variant (257)..(258): Xaa in position 257 to 258 is any amino acid
  Variant (260)..(260): Xaa in position 260 is any amino acid
  Variant (262)..(270): Xaa in position 262 to 270 is any amino acid
  Variant (271)..(278): Xaa in position 271 to 278 is any or no amino acid
  Variant (280)..(282): Xaa in position 280 to 282 is any amino acid
  Variant (284)..(291): Xaa in position 284 to 291 is any amino acid
  Variant (293)..(309): Xaa in position 293 to 309 is any amino acid
  Variant (310)..(317): Xaa in position 310 to 317 is any or no amino acid
  Variant (319)..(319): Xaa in position 319 is any amino acid
  Variant (321)..(321): Xaa in position 321 is any amino acid
  Variant (323)..(335): Xaa in position 323 to 335 is any amino acid
  Variant (336)..(345): Xaa in position 336 to 345 is any or no amino acid
  Variant (347)..(348): Xaa in position 347 to 348 is any amino acid
  Variant (350)..(358): Xaa in position 350 to 358 is any amino acid
  Variant (359)..(359): Xaa in position 359 is any or no amino acid
  Variant (361)..(379): Xaa in position 361 to 379 is any amino acid
  Variant (380)..(397): Xaa in position 380 to 397 is any or no amino acid
  Variant (399)..(405): Xaa in position 399 to 405 is any amino acid
  Variant (406)..(415): Xaa in position 406 to 415 is any or no amino acid
LGVXXXAXXXXXKXAYRXXAXXXHPDXXXXXXXXXXXXXXXXFKXXXXAYXXLXDXXKRXXYDXXGXXXXXXXXXXXXXXXXXXXXXXXXXXXXXXXXXXXXXXXXXXXXXXXXXXFXXXXXXXXXXXXXXXXXXXXXXXXXXXXXXXXXXXXXXXXXXXXXGXDXXXXXXXXXXXXXXXXXXXXXXXXXXXXXXCXXXXXXXXXXXXXXXXXXXCXXXXXXXXXXXXXXXXXXXXXXXXXXXXXXGXXXXXXXXCXXCXGXXXXXXXXXXXXXXXXXGXXXGXXXXXXXXGXXXXXXXXXXXXXXXXXXXXXXXXXFXRXGXXXXXXXXXXXXXXXXXXXXXXXAXXGXXXXXXXXXXGXXXXXXXXXXXXXXXXXXXXXXXXXXXXXXXXXXXXXGXXXXXXXXXXXXXXXXXG

SEQ ID NO: 118210 - protein, 14 aa, Artificial sequence
  protein pattern
  Variant (2)..(2): Xaa in position 2 is any amino acid
  Variant (4)..(4): Xaa in position 4 is Phe or Tyr
  Variant (5)..(7): Xaa in position 5 to 7 is any amino acid
  Variant (9)..(11): Xaa in position 9 to 11 is any amino acid
KXAXXXXAXXXHPD

SEQ ID NO: 118211 - protein, 28 aa, Artificial sequence
  protein pattern
  Variant (2)..(2): Xaa in position 2 is any amino acid
  Variant (3)..(4): Xaa in position 3 to 4 is any or no amino acid
  Variant (7)..(10): Xaa in position 7 to 10 is any amino acid
  Variant (13)..(13): Xaa in position 13 is Ala, Asp, Glu, Gly, Asn, Gln or Ser
  Variant (14)..(14): Xaa in position 14 is any amino acid
  Variant (16)..(16): Xaa in position 16 is any amino acid
  Variant (17)..(17): Xaa in position 17 is Asp, Glu, Asn, Ser or Thr
  Variant (18)..(20): Xaa in position 18 to 20 is any amino acid
  Variant (21)..(21): Xaa in position 21 is Lys or Arg
  Variant (22)..(23): Xaa in position 22 to 23 is any amino acid
  Variant (24)..(24): Xaa in position 24 is Phe or Tyr
  Variant (26)..(27): Xaa in position 26 to 27 is any amino acid
EXXXFKXXXXAYXXLXXXXXXXXXDXXG

SEQ ID NO: 118212 - DNA, 189 bp, Saccharomyces cerevisiae
  CDS (1)..(189)
atgtctgcctggaggaaagctggtatatcatatgctgcatatttgaatgtggccgctcaggctatccgttcttcattgaaaactgaattacaaaccgctagtgttcttaacagatcgcaaacagatgctttttatacccaatataaaaatggcactgcagcttctgaacccactccaataacaaaatag

SEQ ID NO: 118213 - protein, 62 aa, Saccharomyces cerevisiae
MSAWRKAGISYAAYLNVAAQAIRSSLKTELQTASVLNRSQTDAFYTQYKNGTAASEPTPITK

SEQ ID NO: 118214 - DNA, 186 bp, Drosophila melanogaster
  CDS (1)..(186)
atgactgcctggagagctgccggaattacctacatccaatactccaacatcgccgctcgcattttgcgcgagtccttgaagacgggactgcgtgcggatgccgccaagcgcgacgcgagccatgtgaagttcactccctgggcaaatggcaagccagctcagcgtcaaacccaatcggaatcctag

SEQ ID NO: 118215 - protein, 61 aa, Drosophila melanogaster
MTAWRAAGITYIQYSNIAARILRESLKTGLRADAAKRDASHVKFTPWANGKPAQRQTQSES

SEQ ID NO: 118216 - DNA, 174 bp, Drosophila melanogaster
  CDS (1)..(174)
atgactgcctggagagctgccggaattacctacatccaatactccaacatcgccgctcgcattttgcgcgagtccttgaagacgggactgcgtgcggatgccgccaagcgcgacgcgagccatgtgaagttcactccctgggcaaatggcaagccagctcatgaaagggcttag

SEQ ID NO: 118217 - protein, 57 aa, Drosophila melanogaster
MTAWRAAGITYIQYSNIAARILRESLKTGLRADAAKRDASHVKFTPWANGKPAHERA

SEQ ID NO: 118218 - DNA, 195 bp, Drosophila melanogaster
  CDS (1)..(195)
atgaaagcctggagagatctgggtattacctatatccagtattccaacatcgcagcccgtgtggtgcgagaggccctgcgcattgagctccgtgcagacgccgccaagcgaaacatcagccatgtgaagttcactccgtgggtgaacggaaagcctgtgccgcgcaagaaggtagaacgtgaatccgaatcttag

SEQ ID NO: 118219 - protein, 64 aa, Drosophila melanogaster
MKAWRDLGITYIQYSNIAARVVREALRIELRADAAKRNISHVKFTPWVNGKPVPRKKVERESES

SEQ ID NO: 118220 - DNA, 177 bp, Apis mellifera
  CDS (1)..(177)
atgtctgcgtggagacaagcgggattaaattacatcaattattctcaaatagctgctaaacttgttagacaagcattaaaatcagagtttcgagcagaagctttgaaacgtgatgaaacaaatataaaatttactcaatggaaagatggtaaacctactaaaactcataaattataa

SEQ ID NO: 118221 - protein, 58 aa, Apis mellifera
MSAWRQAGLNYINYSQIAAKLVRQALKSEFRAEALKRDETNIKFTQWKDGKPTKTHKL

SEQ ID NO: 118222 - DNA, 171 bp, Nasonia vitripennis
  CDS (1)..(171)
atgtcggcgtggaggcaagcaggtttgaactacatcaactactcacagatcgctgccaagcttgtacgtcaagctctgaaagcagagcttcgagttgaggctgcaaagcgtgatgaagtcaatgtcaaattcaccccgtggaaggatggaaagccagccaaaaatctgtag

SEQ ID NO: 118223 - protein, 56 aa, Nasonia vitripennis
MSAWRQAGLNYINYSQIAAKLVRQALKAELRVEAAKRDEVNVKFTPWKDGKPAKNL

SEQ ID NO: 118224 - DNA, 171 bp, Anopheles gambiae str. PEST
  CDS (1)..(171)
atggccgcatggagagctgctggattgaactacattaactactccaacattgccgcccggctgctccggaaggcgctgaagccggaactgcgggctcaggcggtccggcgcgatgactcgcacatcaagttcaccaagtggcagaacggcaaaccggaaaatgagaaatga

SEQ ID NO: 118225 - protein, 56 aa, Anopheles gambiae str. PEST
MAAWRAAGLNYINYSNIAARLLRKALKPELRAQAVRRDDSHIKFTKWQNGKPENEK

SEQ ID NO: 118226 - DNA, 180 bp, Anopheles gambiae str. PEST
  CDS (1)..(180)
atggccgcttggagagctgctggattgaattacatcaactactccaacattgccgcccgaatggtgcgaaaagcgttgaagccagcattgcgggcagatgccgctcgacgggaagaatcgcacatcaaaatgaccaagtggaaggatggaaagtcggagaagtcggctacggaggcgtag

SEQ ID NO: 118227 - protein, 59 aa, Anopheles gambiae str. PEST
MAAWRAAGLNYINYSNIAARMVRKALKPALRADAARREESHIKMTKWKDGKSEKSATEA

SEQ ID NO: 118228 - DNA, 171 bp, Anopheles gambiae str. PEST
  CDS (1)..(171)
atggctgcctggagaactgccggactgaactacatcaactattccaacattgccgcccggctgctccgtaaagcgctcaagccggagctgcgagttcaagctgcccgccgcgatgattcccacatcaagttcaccaaatggcagggtggcaagccggaaaatgaaaaatga

SEQ ID NO: 118229 - protein, 56 aa, Anopheles gambiae str. PEST
MAAWRTAGLNYINYSNIAARLLRKALKPELRVQAARRDDSHIKFTKWQGGKPENEK

SEQ ID NO: 118230 - DNA, 210 bp, Candida glabrata CBS 138
  CDS (1)..(210)
atgtctgctgttgcgaatgccagtactgcctggaggaaggccgggctcagttacagttcatttctggccattgctgccagaaccgtgcgtgagtcgttgaagaaggagttgcagacgccagctgtgatgggcagaggcaagactgatgcagcatacaccaagtatgagaagggctctccaaagtccgaccctatcccattgcaggagtaa

SEQ ID NO: 118231 - protein, 69 aa, Candida glabrata CBS 138
MSAVANASTAWRKAGLSYSSFLAIAARTVRESLKKELQTPAVMGRGKTDAAYTKYEKGSPKSDPIPLQE

SEQ ID NO: 118232 - DNA, 186 bp, Kluyveromyces lactis NRRL Y-1140
  CDS (1)..(186)
atgtccacctggagaaaagctggtttgaccttcaacaactacgtttctgttgccgctaacaccgtgcgtgctgctttgaaaccagaattgcaaacaaactctgtgttggccagatccaaatctgaagccaagttcattaagtttgaaaatggtgttgcttctgaaccagttccactaaagaaataa

SEQ ID NO: 118233 - protein, 61 aa, Kluyveromyces lactis NRRL Y-1140
MSTWRKAGLTFNNYVSVAANTVRAALKPELQTNSVLARSKSEAKFIKFENGVASEPVPLKK

SEQ ID NO: 118234 - DNA, 22 bp, Artificial sequence
  primer
atgtctgcctggaggaaagctg

SEQ ID NO: 118235 - DNA, 25 bp, Artificial sequence
  primer
ctattttgttattggagtgggttca

SEQ ID NO: 118236 - protein, 58 aa, Artificial sequence
  consensus sequence
  Variant (2)..(2): Xaa in position 2 is any amino acid
  Variant (3)..(9): Xaa in position 3 to 9 is any or no amino acid
  Variant (13)..(13): Xaa in position 13 is any amino acid
  Variant (16)..(17): Xaa in position 16 to 17 is any amino acid
  Variant (19)..(20): Xaa in position 19 to 20 is any amino acid
  Variant (22)..(23): Xaa in position 22 to 23 is any amino acid
  Variant (27)..(29): Xaa in position 27 to 29 is any amino acid
  Variant (31)..(32): Xaa in position 31 to 32 is any amino acid
  Variant (35)..(36): Xaa in position 35 to 36 is any amino acid
  Variant (38)..(40): Xaa in position 38 to 40 is any amino acid
  Variant (42)..(43): Xaa in position 42 to 43 is any amino acid
  Variant (44)..(44): Xaa in position 44 is any or no amino acid
  Variant (46)..(50): Xaa in position 46 to 50 is any amino acid
  Variant (52)..(52): Xaa in position 52 is any amino acid
  Variant (54)..(57): Xaa in position 54 to 57 is any amino acid
MXXXXXXXXAWRXAGXXYXXYXXIAAXXXRXXLKXXLXXXAXXXRXXXXXKXTXXXXG

SEQ ID NO: 118237 - protein, 39 aa, Artificial sequence
  protein pattern
  Variant (2)..(2): Xaa in position 2 is any or no amino acid
  Variant (5)..(5): Xaa in position 5 is any or no amino acid
  Variant (7)..(7): Xaa in position 7 is any or no amino acid
  Variant (9)..(9): Xaa in position 9 is Ile or Leu
  Variant (10)..(10): Xaa in position 10 is Asn, Ser or Thr
  Variant (12)..(12): Xaa in position 12 is any amino acid
  Variant (13)..(13): Xaa in position 13 is Ala, Asn, Gln or Ser
  Variant (14)..(14): Xaa in position 14 is Phe or Tyr
  Variant (15)..(15): Xaa in position 15 is any amino acid
  Variant (16)..(16): Xaa in position 16 is Ala, Asn or Gln
  Variant (17)..(17): Xaa in position 17 is Ile or Val
  Variant (20)..(21): Xaa in position 20 to 21 is any amino acid
  Variant (22)..(22): Xaa in position 22 is Ile, Leu or Val
  Variant (24)..(24): Xaa in position 24 is any amino acid
  Variant (25)..(25): Xaa in position 25 is Ala or Ser
  Variant (28)..(28): Xaa in position 28 is any amino acid
  Variant (29)..(29): Xaa in position 29 is Ala, Glu or Gly
  Variant (30)..(30): Xaa in position 30 is Phe or Leu
  Variant (31)..(31): Xaa in position 31 is Gln or Arg
  Variant (32)..(32): Xaa in position 32 is Ala, Thr or Val
  Variant (33)..(33): Xaa in position 33 is any amino acid
  Variant (34)..(34): Xaa in position 34 is Ala or Ser
  Variant (35)..(35): Xaa in position 35 is Ala, Leu or Val
  Variant (36)..(37): Xaa in position 36 to 37 is any amino acid
  Variant (38)..(38): Xaa in position 38 is Asp, Glu or Arg
  Variant (39)..(39): Xaa in position 39 is Ala, Asp, Glu, Gly or Ser
AXWRXAXGXXYXXXXXXAAXXXRXXLKXXXXXXXXXXXX

SEQ ID NO: 118238 - DNA, 708 bp, Escherichia coli
  CDS (1)..(708): transl_table=11
atgagcagtttccagttcgagcaaataggcgttattcgctcgccctataaagaaaagttcgccgttccgcgccagccaggtctggtaaaaagcgccaacggcgaactgcatctcattgctccctacaaccaggccgacgccgttcgcggcctggaagcgttcagccatttatggatccttttcgtctttcatcaaacgatggaaggcggctggcgtccgactgtgcgtccaccgcgcctcggcggtaacgccagaatgggggttttcgcaacacgctctactttccgccctaacccaattggcatgtcgctggtagagctgaaagaggttgtttgccataaagacagcgtgattctgaagctcggcagtctggatctggtcgatggtacgccggtagtggatatcaaaccgtatctcccctttgccgaatcgcttcccgatgccagtgccagctatgcgcaaagtgcgccagctgcagagatggcggtgagttttaccgcagaggtcgaaaagcagcttttgacgctggagaagcgttatccgcagttaacgctgtttatccgcgaagtactggcgcaggacccgcgcccggcctatcgtaaaggtgaggaaacgggcaaaacctatgccgtctggctacatgattttaacgttcgctggcgcgtcaccgacgcaggttttgaagtctttgcgctggaaccgcgttaa

SEQ ID NO: 118239 - protein, 235 aa, Escherichia coli
MSSFQFEQIGVIRSPYKEKFAVPRQPGLVKSANGELHLIAPYNQADAVRGLEAFSHLWILFVFHQTMEGGWRPTVRPPRLGGNARMGVFATRSTFRPNPIGMSLVELKEVVCHKDSVILKLGSLDLVDGTPVVDIKPYLPFAESLPDASASYAQSAPAAEMAVSFTAEVEKQLLTLEKRYPQLTLFIREVLAQDPRPAYRKGEETGKTYAVWLHDFNVRWRVTDAGFEVFALEPR

SEQ ID NO: 118240 - DNA, 696 bp, Vibrio cholerae O1 biovar eltor str. N16961
  CDS (1)..(696): transl_table=11
atgtatcccattgaacctattgcaattattgaaagcccataccaagaaaaatttgccgtacctcgtcaaccacgtttggtgccaagcgcgaccgcaagagtcaaattgctcggtgagtgcaactgcgcggaatccattcgtggcatagagcaatttagccatgtctggctgctatttttgttcgaccaaaacctcgccgcaggttggaaaccgaccgtacgtccacctcgtcttggtggtaatgaacgagtgggtgttttcgcttcacgagcaacttttcgccctaatggaattggcatgtcagcggtcgagttaaaaggggtaagcaaagaaggcgatcaatattatttagagctcggaagcgtcgacttggtcaatggcacaccgatcattgatatcaagccttatatcccctactccgattccattaccgacgcgcaaggtggctatgccgagcaagagccacaacgcatggcggttaccttcagtgatgcagcgcggcaaatgctccaggcacatcctgaaggtaagattcgccaagcagtgatccgtgaagtgttagcgcaagatccgcgcccagcttacaaaaaacatcgcgctgacgataagttatatgcggtgaatttgtacgattggaacgtgaaatttacggttaacgctgaagcaatcgttgtcaacgcaattgaacccttttga

SEQ ID NO: 118241 - protein, 231 aa, Vibrio cholerae O1 biovar eltor str. N16961
MYPIEPIAIIESPYQEKFAVPRQPRLVPSATARVKLLGECNCAESIRGIEQFSHVWLLFLFDQNLAAGWKPTVRPPRLGGNERVGVFASRATFRPNGIGMSAVELKGVSKEGDQYYLELGSVDLVNGTPIIDIKPYIPYSDSITDAQGGYAEQEPQRMAVTFSDAARQMLQAHPEGKIRQAVIREVLAQDPRPAYKKHRADDKLYAVNLYDWNVKFTVNAEAIVVNAIEPF

SEQ ID NO: 118242 - DNA, 741 bp, Pasteurella multocida subsp. multocida str. Pm70
  CDS (1)..(741): transl_table=11
atgtctgacttatcactccagttacacgcgattggtattattcataccccttataaagaaaaattttcggtaccgcgtcagcccaacttagtccaagatggcacagggatcctagaattactccccccttataatcaagcagaaacagtcagaggattagcacaattcagtcacctatggttgatttttcaatttgatcgagtcgctacaggaaaatggcgtccaaccgttagaccaccacgtttaggtggtaatcaacgtgtgggggtgtttgcctcccgttcaacccatagacccaatcctttaggtttatcgaaagtggagttacgccgagtggaatgtcaaaatggcaaggttctccttcatttaggggctgtagatttagtcgatggtacgccgatttttgatattaagccttatcttgcttacgctgacagtgaacctgaggcaaaatcaggttttgctcaagaaaaaccagaatgtacattgcaagtcatatttagcgaacaagcacagaacgcattacaaaaaatcgaaaaaaaacgaccgcactttaagcgctttatcacagaggtaattgcccaagatccgcgcccagcctatcaaaagatgcaatcattagaacgagtttatggtattagactacatgaatttaatattcgttggaaaatggaagcaacagaggaacagcaagcacgcattttagatatagaagaggtagaaaagaaaaagtgcgactaa

SEQ ID NO: 118243 - protein, 246 aa, Pasteurella multocida subsp. multocida str. Pm70
MSDLSLQLHAIGIIHTPYKEKFSVPRQPNLVQDGTGILELLPPYNQAETVRGLAQFSHLWLIFQFDRVATGKWRPTVRPPRLGGNQRVGVFASRSTHRPNPLGLSKVELRRVECQNGKVLLHLGAVDLVDGTPIFDIKPYLAYADSEPEAKSGFAQEKPECTLQVIFSEQAQNALQKIEKKRPHFKRFITEVIAQDPRPAYQKMQSLERVYGIRLHEFNIRWKMEATEEQQARILDIEEVEKKKCD

SEQ ID NO: 118244 - DNA, 681 bp, Neisseria meningitidis MC58
  CDS (1)..(681): transl_table=11
atgacttataccattacccccatcggcaccgcccgctcgccctacaaacagaaattcggcatcgcccgccagcccggtttggtctccgccgcaaaagcctgcatcgagctgaatcccaaattcaccgcagacagcgtgcgcgggctggaagatttcgattatgtgtggataagttttatttttcacggcgtattggatgaaggctgggcgcaaatggtgcgcccgccacggctcggcggcaaacaaaaaatgggcgtgttcgccacgcgcagcccccaccgccccaaccatctcggactctcgctcctgaaactcgaacgcatcgaaaccggcaaacccgtccgcctctattgcagcggcgcagacctgctggacggcacaccgattgtggacatcaaaccttatatcccctttgtcgaatccaaacccgatgccgcatccggtttcgtcagcggcaaacccgtagagttggaagtcgtttggcaggaaaacatcggcgcggaaaatttatctgcaaacaccaaaaaccttatcagccaaagcattgcccaagatccgcgccccgcctatcagaatattcccgaacggatttatgtgatgaatattgcagattacgaagtcagatttcaaatcgaggaaaaccgtgcaaccgttattgatctttccccaaccccgctttaa

SEQ ID NO: 118245 - protein, 226 aa, Neisseria meningitidis MC58
MTYTITPIGTARSPYKQKFGIARQPGLVSAAKACIELNPKFTADSVRGLEDFDYVWISFIFHGVLDEGWAQMVRPPRLGGKQKMGVFATRSPHRPNHLGLSLLKLERIETGKPVRLYCSGADLLDGTPIVDIKPYIPFVESKPDAASGFVSGKPVELEVVWQENIGAENLSANTKNLISQSIAQDPRPAYQNIPERIYVMNIADYEVRFQIEENRATVIDLSPTPL

SEQ ID NO: 118246 - DNA, 681 bp, Neisseria meningitidis Z2491
  CDS (1)..(681): transl_table=11
atgacttacaccatcgtccctatcgccaccgcccgatcgccctacaaacagaaattcggcatcgcccgccagcccggtttagtctccgccgcagaagtatgcatcgagctgaatcccgaatttaccgcagacagcgtgcgcgggctggaagatttcgattatgtgtggataagttttatttttcacggcgtattggatgaaggctgggcacaaatggtgcgcccgccacggctcggcggcaaacaaaaaatgggcgtattcgccacgcgcagcccccaccgccccaaccatctcggactatcactcttaaaactcaaccgcatcgaaaccggcaaacccgtccgcctttattgcagcggcgcagacctgctcgacggcacgccgattgtggacatcaagccttatatcccctttgtcgaatccaaacccgatgccgcatctggtttcgtcagcggcaaacccgtagagttggaagtcgtttggcaggaaaacatcggcgcggaaaatttatctgcaaacaccaaaaaccttatcagccaaagcattgcccaagatccgcgccccgcctatcagaatattcccgaacggatttatgtgatgaatattgcggattacgaaatcagatttcaaatcgaggaaaaccgtgcaaccgttattgatctttccccaaccccgctttaa

SEQ ID NO: 118247 - protein, 226 aa, Neisseria meningitidis Z2491
MTYTIVPIATARSPYKQKFGIARQPGLVSAAEVCIELNPEFTADSVRGLEDFDYVWISFIFHGVLDEGWAQMVRPPRLGGKQKMGVFATRSPHRPNHLGLSLLKLNRIETGKPVRLYCSGADLLDGTPIVDIKPYIPFVESKPDAASGFVSGKPVELEVVWQENIGAENLSANTKNLISQSIAQDPRPAYQNIPERIYVMNIADYEIRFQIEENRATVIDLSPTPL

SEQ ID NO: 118248 - DNA, 708 bp, Salmonella typhimurium LT2
  CDS (1)..(708): transl_table=11
atgagcagctttcagtttgaacaaatcggcgttattcgctccccctataaagaaaaattcgccgttccgcgccagcctggtctggtcaaaagcgcctgcggcgaactgcatctgatagcgccttacaaccaggccgatgccgttcgcggcctggaagcgttcagccatttgtgggtgcttttcgtttttcatcagacgatggacggcggctggcggccgacagttcgtccgccccgtcttggcggtaacgccagaatgggcgtttttgccacgcgctccacgttccgccccaatccgattggcatgtcgctcgttgcgctaaaaggtatcgagtgccggaaagagagcgtaattctgaaattaggcagtctggatctggtggatggcacgccggtggtggatattaaaccgtatttaccgtttgccgaggccttaccggacgccgccgccagctatgcgcaacaggcgccgatagctgaaatgcccgtgagttttaccgctgaggtggctcaacagcttacgacgctggaaaggcgttatccgcagctacggacatttatttgcgatgtgctggcgcaagatcctcgcccggcttatcgtaagggtgaagagacgggcaaaacctatgccgtctggctgcatgattttaacgtgcgctggcgtgtggttaactcgggatttgaagtgtttgcgctggaaccacggtaa

SEQ ID NO: 118249 - protein, 235 aa, Salmonella typhimurium LT2
MSSFQFEQIGVIRSPYKEKFAVPRQPGLVKSACGELHLIAPYNQADAVRGLEAFSHLWVLFVFHQTMDGGWRPTVRPPRLGGNARMGVFATRSTFRPNPIGMSLVALKGIECRKESVILKLGSLDLVDGTPVVDIKPYLPFAEALPDAAASYAQQAPIAEMPVSFTAEVAQQLTTLERRYPQLRTFICDVLAQDPRPAYRKGEETGKTYAVWLHDFNVRWRVVNSGFEVFALEPR

SEQ ID NO: 118250 - DNA, 1239 bp, Drosophila melanogaster
  CDS (1)..(1239)
atgcacgaggatgatctgaagagtcagttgaccatcgcgcggaacgagatcaacaatctcaggcagcaagtgcgcaacctgcagcatgtgcagcgcaaggacattgagacgataacccgcctgctgcaggacttccgctgcgaggggtgtgcgaacaacaacaaaagcgccaaggacaaggtcgccggcgagaagcaggagcaccagcaccaacagcagacgcaggaccagcagacgggccaaggtcagagcaattataccaatggtgggcactgcttgggagaggactacgcacactttcggcccataggagtgatccggacagcattcccagagaagcgggccgtgccgaggcagtcaattgtgggcagtcgcctgcggggtatcatccaactgaacgacggtgtgttcaccaatccggagcactccttggagggactagaggacttttcccatctgtggctcatctatcattttcaccgcaacaattcccaccccaaggccaaggtggcgcctccccgtcttggtggggagcgggtgggtgtgttttccacacgatctccacaccgcccgtgtcccattggtctctcgttggtggagattgagaagatcgagaacgccaccattagtttctttggtacggacatggtagacggcacacccgtgttggacattaagccctacattccacactacgatgcaccatccttgagcgttgactcaggtacgttggacgagaatcaagcagaaatgcaactaaagttcttgccccggacaggaagaacctctgttggaccgcatgagagcagcctggacttctacgactccagacaggagcctgacggagaggaatcggacctggaactgtatggagcagctggctacagcgggaacgcgggcattggagctgacgctattctgccgccacccagcgccgtgcgagtgcccaactgggtggtggccagcaatagacttagcgtgacctttaacgagcatgccgaggcgcagttaaaggagctgcaggtggagaagcagtgcatcgtggacattctggaggcggatccgcgctccgtttacttgcgcacaaaatatggctcgcaaatatttaccttccagctgcgggaggtcacggtgacgtgcaaatttgatgacaaggccggcacggtgactgtggttcaggtccggcgcaacgagaatgtccaggttaccgccctggacggcgacctgcgcagcgcctaa

SEQ ID NO: 118251 - protein, 412 aa, Drosophila melanogaster
MHEDDLKSQLTIARNEINNLRQQVRNLQHVQRKDIETITRLLQDFRCEGCANNNKSAKDKVAGEKQEHQHQQQTQDQQTGQGQSNYTNGGHCLGEDYAHFRPIGVIRTAFPEKRAVPRQSIVGSRLRGIIQLNDGVFTNPEHSLEGLEDFSHLWLIYHFHRNNSHPKAKVAPPRLGGERVGVFSTRSPHRPCPIGLSLVEIEKIENATISFFGTDMVDGTPVLDIKPYIPHYDAPSLSVDSGTLDENQAEMQLKFLPRTGRTSVGPHESSLDFYDSRQEPDGEESDLELYGAAGYSGNAGIGADAILPPPSAVRVPNWVVASNRLSVTFNEHAEAQLKELQVEKQCIVDILEADPRSVYLRTKYGSQIFTFQLREVTVTCKFDDKAGTVTVVQVRRNENVQVTALDGDLRSA

SEQ ID NO: 118252 - DNA, 735 bp, Shewanella oneidensis MR-1
  CDS (1)..(735): transl_table=11
atgacatttaccaaccaaattaccgcagtggcaacctgccgcacgccctataaacaaaaatttggcattccgagacagccaggtttggtgaaagcacgcggttatgttgagctggaaggccatgttaatcatctcgatgctgtgcgcggtatcgagcaatattcccacctttggttgctgttttgtttccatgaaaatctcgcccaaggctggaaaaccacggttcgcccgccgcgcttaggcggcaatgaaaaactcggcgtattcgccactcgttccacttttcgtcctaatggcattggccaatccgtggtcaaactccatggggtggtgcaacgcaaaggcaaagtgtgtcttgagatttcaggcatggatctcgttgatggcacaccgattatcgatattaagccctatatccccttttcagattcgattgaaggtgccgttggcggcatggcccaagaggccccgaaactgattagcgttgagttcagtgaccttgccgatgaacaaataaacacctacagcaaacaagaagcctatacggatttagccgtgcttatctgtggcgtacttgggcaagatccgcgtccggcgtacaaaaaagccaaggatgaccccaagttatatcaagtggctttgtatgatttagatatcttttggcggatggcggtcgatggggatgatcgggaatacattcaagtgctcgaactcaaaccggggaaatgcggttaa

SEQ ID NO: 118253 - protein, 244 aa, Shewanella oneidensis MR-1
MTFTNQITAVATCRTPYKQKFGIPRQPGLVKARGYVELEGHVNHLDAVRGIEQYSHLWLLFCFHENLAQGWKTTVRPPRLGGNEKLGVFATRSTFRPNGIGQSVVKLHGVVQRKGKVCLEISGMDLVDGTPIIDIKPYIPFSDSIEGAVGGMAQEAPKLISVEFSDLADEQINTYSKQEAYTDLAVLICGVLGQDPRPAYKKAKDDPKLYQVALYDLDIFWRMAVDGDDREYIQVLELKPGKCG

SEQ ID NO: 118254 - DNA, 699 bp, Pseudomonas putida KT2440
  CDS (1)..(699): transl_table=11
gtggccatgcagcatacggttgtcccggtcggcatcgtccactcctgtttcaaggaaaagttcgccattccgcgccagccgcaactggcgcctgccgcctgtggcgtactcgaactgttgccgccgttcgatcaaggtgacgcggtcgagggcctggaacaggtcagccatgtgtggctgctgttcctgttccaccaggccctggaggaaaagccgcgcctgaaagtgcggcctccgcgtctgggcggcaacaagagcatgggggtgttcgccacccgcgccacccaccggcccaacggcatcggccagtcggtggtacgcctggagggcgtggagcccgggcgcctgctgctgtccgggatcgacctgctcgacggcacgccggtgctggatatcaagccgtatgtgccctatgccgacagcatcgctggcgccagcaaccagatggccaacgcagcgccggtggcaattgccgtgcagtgggccgacaacgccttgctccaggcccgcgagcatgcgctgcgcctgagcgagccgctggtggagctaatcgagcaatgcctggcgcaggacccacggccggcctaccagataccaccgtccgagcgggtgtacggggtgaagttctgggatgtgcaagtaaggtggcattacccgcagccggacgtcatccgggtgttggaagtggtactgggctga

SEQ ID NO: 118255 - protein, 232 aa, Pseudomonas putida KT2440
MAMQHTVVPVGIVHSCFKEKFAIPRQPQLAPAACGVLELLPPFDQGDAVEGLEQVSHVWLLFLFHQALEEKPRLKVRPPRLGGNKSMGVFATRATHRPNGIGQSVVRLEGVEPGRLLLSGIDLLDGTPVLDIKPYVPYADSIAGASNQMANAAPVAIAVQWADNALLQAREHALRLSEPLVELIEQCLAQDPRPAYQIPPSERVYGVKFWDVQVRWHYPQPDVIRVLEVVLG

SEQ ID NO: 118256 - DNA, 708 bp, Escherichia coli CFT073
  CDS (1)..(708): transl_table=11
atgagcagttttcagttcgagcaaataggcgttattcgctcgccctataaagaaaaattcgccgttccgcgccagccaggtctggtaaaaagcgccaacggcgaactacatctcattgctccctacaaccaggccgacgccgttcgcggcctggaagcattcagccatttatggatccttttcgtctttcatcaaacgatggaaggcggctggcgtccgactgtgcgtccgcctcgtcttggcggtaataccagaatgggtgttttcgctacgcgctccactttccgccctaacccgattggtatgtcgctggtagagctgaaggaggttgtttgccataaagacagcgtgattctgaagctcggcagtctggatctggtcgatggtacgccggtagtggatatcaaaccgtatctcccctttgctgaatcgcttcccgatgccagtgccagctatgcgcaaagtgcgccagcggcagaaatggcggtgtgttttaccgcagaggtcgaaaagcagcttttgacgctggagaagcgttatccgcagttaacgctgtttatccgcgaagtactggcgcaggacccgcgcccggcctatcgtaaaggtgaggaaacgggcaaaacctatgccgtctggctgcatgattttaacgttcgctggcgcgtcaccgacgcaggttttgaagtctttgcgctggaaccgcgttaa

SEQ ID NO: 118257 - protein, 235 aa, Escherichia coli CFT073
MSSFQFEQIGVIRSPYKEKFAVPRQPGLVKSANGELHLIAPYNQADAVRGLEAFSHLWILFVFHQTMEGGWRPTVRPPRLGGNTRMGVFATRSTFRPNPIGMSLVELKEVVCHKDSVILKLGSLDLVDGTPVVDIKPYLPFAESLPDASASYAQSAPAAEMAVCFTAEVEKQLLTLEKRYPQLTLFIREVLAQDPRPAYRKGEETGKTYAVWLHDFNVRWRVTDAGFEVFALEPR

SEQ ID NO: 118258 - DNA, 696 bp, Vibrio vulnificus CMCP6
  CDS (1)..(696): transl_table=11
atgcactccattgatcctattggctttattgagagcccctataaagagaaattcgcggtccccagacaacctcgcttagtccctgctgcgagagcacgggtaaaactggttggcagtgccaacacgcccgagtcagtaagaggtttggcgcaattttcccacgtttggttgctgtttttgtttgatcaaaacttggccgccggttggaaacccaccgttcgcccacctcgcctaggtggcaatgagcgcatgggtgtatttgccacccgttcaacgtttcgccccaacggcattggcatgtcagcggtggaaatgaaagggataactaaacaaggcgatcaggtctatctcgatcttggcagtgtggatttggtggacgggaccccaatcattgatatcaaaccttacatcccctattccgacgcgattctcgatgccgtcggtggctacgcagagtcagaacccgagcgctcactcgtgatcttctccagtgaagcggatgcgctattggcgacacgacctaatggaacgctagagaaacaggtcattgagcaagttttggcacaagatcctcgccctgcctataagaaaaacaaaccggatgagaaagaatatgcggtaaatttgttcgatttgaacgtcaaattcattatccaagataagatagtgacggttagccgcatcgaacgcttttga

SEQ ID NO: 118259 - protein, 231 aa, Vibrio vulnificus CMCP6
MHSIDPIGFIESPYKEKFAVPRQPRLVPAARARVKLVGSANTPESVRGLAQFSHVWLLFLFDQNLAAGWKPTVRPPRLGGNERMGVFATRSTFRPNGIGMSAVEMKGITKQGDQVYLDLGSVDLVDGTPIIDIKPYIPYSDAILDAVGGYAESEPERSLVIFSSEADALLATRPNGTLEKQVIEQVLAQDPRPAYKKNKPDEKEYAVNLFDLNVKFIIQDKIVTVSRIERF

SEQ ID NO: 118260 - DNA, 720 bp, Pseudomonas syringae pv. tomato str. DC3000
  CDS (1)..(720): transl_table=11
gtgtacgtgtctgaaccggctgacaccatgagttacaacgtctcccctgtcggcttcgtgcgctcctgcttcaaggagaagttcgccatcccgcgccagccacagctggctccggccgctcgcggagtgctcgagctggtcgcgccgttcgatcagggtgaagccgtacaggggctggaacaggtcagtcatgtctggctgctgtttctgttccatctggcgctggaagacaaaccgcgtttgaaggtgcgcccgccacgcctgggcggcaatcaatcgatgggcgtatttgccactcgggcaacgcatcgccccaatggcatcggccagtccgtggtcaagctggacaaggtcgaagcaggccggctgtggttgtcgggcatcgatttgctggatggcacgccggtgctggatatcaagccttatgtgccctacgccgatgtcattgctgaggcgaccaaccaaattgccagttctgcgccggccctgataccggtgcaatggcaggacgcggcccttctacaggcccgtgaacacgcgctacgcctgagtgagcctctggtcgagctgatcgaacagtgcctggcgcaggacccgcgtccagcttatcagctgcctgcgccggaacgccgctacggtgcccggttctgggatgtggatgtgcgctggcactacccgcaagcgggcgttatttgtgtgcttgaagtgctgcgcgcctga

SEQ ID NO: 118261 - protein, 239 aa, Pseudomonas syringae pv. tomato str. DC3000
MYVSEPADTMSYNVSPVGFVRSCFKEKFAIPRQPQLAPAARGVLELVAPFDQGEAVQGLEQVSHVWLLFLFHLALEDKPRLKVRPPRLGGNQSMGVFATRATHRPNGIGQSVVKLDKVEAGRLWLSGIDLLDGTPVLDIKPYVPYADVIAEATNQIASSAPALIPVQWQDAALLQAREHALRLSEPLVELIEQCLAQDPRPAYQLPAPERRYGARFWDVDVRWHYPQAGVICVLEVLRA

SEQ ID NO: 118262 - DNA, 696 bp, Vibrio parahaemolyticus RIMD 2210633
  CDS (1)..(696): transl_table=11
atgtattcgattgagccgattggcatcattgaaaccccttacaaagagaagtttgccgtccctcgccaaccgcgcctagttccagccgctaaagcgcgaataaaactgttgggcgaggcaaatagcccagaagcggtgcgcggattagaacagttctctcacgtctggttattgtttctgtttgaccaaaatttggaggcaggatggaaaccaaccgtacggcctcctcgtttgggtggaaatgagcgtattggcgtgtttgcttcgcgctctacctttcgaccaaatggcattggaatgtcggcagtcgaagtgaaaggcatcacgaagaaaggtgatcaaatatatattgatcttggcagtgttgatttggtcgatggcacaccgattgttgacatcaaaccttatattccttactcagatgccattcctgaagcgattggcggatacgctggtgaagagcctgaaaaatcgaacgtcaccttttcgtctcaagcattggcgatgctagcaaagcgatccgatactcaatatgtacaatcggtgatcgaacaagttctggcgcaggatccacgtcctgcatacaagaagaacaaaccagataccaaggaatatgcggtaaatttgttcgatctgaacgttaagttcagtgtgaatagcaacttaataacagttacggcgattgaaagcttttga

SEQ ID NO: 118263 - protein, 231 aa, Vibrio parahaemolyticus RIMD 2210633
MYSIEPIGIIETPYKEKFAVPRQPRLVPAAKARIKLLGEANSPEAVRGLEQFSHVWLLFLFDQNLEAGWKPTVRPPRLGGNERIGVFASRSTFRPNGIGMSAVEVKGITKKGDQIYIDLGSVDLVDGTPIVDIKPYIPYSDAIPEAIGGYAGEEPEKSNVTFSSQALAMLAKRSDTQYVQSVIEQVLAQDPRPAYKKNKPDTKEYAVNLFDLNVKFSVNSNLITVTAIESF

SEQ ID NO: 118264 - DNA, 708 bp, Salmonella enterica subsp. enterica serovar Typhi Ty2
  CDS (1)..(708): transl_table=11
atgagcagctttcagtttgatcaaatcggcgttattcgctccccctataaagaaaaattcgccgttccgcgccagcctggtctggtcaaaagcgcctgcggcgaactgcatctgatagcgccttacaaccaggccgatgccgttcgcggcctggaagcgttcagccatttgtgggtgcttttcgtttttcatcagacgatggacggcggctggcggccaacagttcgtccgccccgtcttggcggtaacgccagaatgggcgtttttgccacgcgctccacgttccgccccaatccgattggcatgtcgctcgttgcgctaaaaggtatcgagtgccggaaagagagcgtaattctgaaattaggcagtctggatctggtggatggcacgccggtggtggatatcaaaccgtatttaccgtttgccgaggccttaccggacgccgccgccagctatgcgcaacaggcgccgatagctgaaatgcctgtgagttttaccgctgaagtggctcaacagcttacgacgctggaaaggcgttatccgcagctacggacatttatttgcgatgtgctggcgcaagatcctcgcccggcttatcgtaagggtgaagagacgggcaaaacctatgccgtctggctgcatgattttaacgtgcgctggcgtgtggttaacaccggatttgaagtgtttgcgctggaaccacggtaa

SEQ ID NO: 118265 - protein, 235 aa, Salmonella enterica subsp. enterica serovar Typhi Ty2
MSSFQFDQIGVIRSPYKEKFAVPRQPGLVKSACGELHLIAPYNQADAVRGLEAFSHLWVLFVFHQTMDGGWRPTVRPPRLGGNARMGVFATRSTFRPNPIGMSLVALKGIECRKESVILKLGSLDLVDGTPVVDIKPYLPFAEALPDAAASYAQQAPIAEMPVSFTAEVAQQLTTLERRYPQLRTFICDVLAQDPRPAYRKGEETGKTYAVWLHDFNVRWRVVNTGFEVFALEPR

SEQ ID NO: 118266 - DNA, 735 bp, Haemophilus ducreyi 35000HP
  CDS (1)..(735): transl_table=11
atggcgaatccacaacctctagtgttaaatccgattggtgttattgaaagcccgtatgatgaaaaattttctgtgccacgtcaacccaatttagtggctcaaggaaaaggaaaccttactttattccccccctacaattgtgcagaggcggtacgcggtttggcacaatttagtcacttatggctaatttttcaatttcatcagctccccgcacgggaatggcattcaaccgttcgcccgccacgtttaggaggtaatcaacgtattggtgtttttgcttctcgtgccactcatcgcccgaatccgatcgggttatctaaagtcgcattagaagcgatcgaaatacatcatggaaaagcacagttaaaacttggtagtgttgatttagtcaatggtacgcctattttggatatcaaaccttatattgcttacgcagacagcgaaccagaagcaatcttaggttttgctcaacataaaccaccggcgatgttaagcgtagagtttacgcaacaagcattacaagccattaatttctgtaaaaattttgcaaaatttggtataacacaaccgcttgtttttattcaacaattaatcgaacaagatcctcgccctgcttatcaacaggggaaaataacctcccgcatttatggtatgcggttggcaggctataatattcgttggcaaatatgcgaatcggatcccaataaagcgatggttattgcgattaaccactga

SEQ ID NO: 118267 - protein, 244 aa, Haemophilus ducreyi 35000HP
MANPQPLVLNPIGVIESPYDEKFSVPRQPNLVAQGKGNLTLFPPYNCAEAVRGLAQFSHLWLIFQFHQLPAREWHSTVRPPRLGGNQRIGVFASRATHRPNPIGLSKVALEAIEIHHGKAQLKLGSVDLVNGTPILDIKPYIAYADSEPEAILGFAQHKPPAMLSVEFTQQALQAINFCKNFAKFGITQPLVFIQQLIEQDPRPAYQQGKITSRIYGMRLAGYNIRWQICESDPNKAMVIAINH

SEQ ID NO: 118268 - DNA, 699 bp, Chromobacterium violaceum ATCC 12472
  CDS (1)..(699): transl_table=11
atgaactacaccttcgagccgataggcgtcatccgttcgccgtatcgcgagaaattcggcatcccgcgccagccgtcgctggtcagcgcggcccgcatgcggctggagctgtcgccgccgtacgaccacccggactgcgtgcgcggcctggctgagttttcccatgtctggatcagcttcgtgttccaccagaccatggaccggggctggcagccgctggtgcggccgccgcggctgggcggcaacgccaaggtgggcgtgttcgccagccgctccacccaccgccccaacccgatgggcctgtcgctggtggaactgcttgcggtgaacgtcgacaacggcgtcacgctggagctggccggcgccgatctgctggacggcacgccggtgctggacatcaagccctacatcccattcgtggagtcgcgtcccgaggcgtcgggcggcttcgtcgacggccctcccccgcagctgcgggtggagtggagcgaggccgcgcggcggcgcctggatcagacggacgcgcctgccggcttcgcccagctggtggagcaggtgctggcgcaggatccgcgcccggcctaccaggacgatccagaacgcgtctacggcgtgacgctgtattgctacaatgtgcgcttcggcatcgccgacggcgtcgcccgcgtgcttgaaattctgcccgcggcacaaaactaa

SEQ ID NO: 118269 - protein, 232 aa, Chromobacterium violaceum ATCC 12472
MNYTFEPIGVIRSPYREKFGIPRQPSLVSAARMRLELSPPYDHPDCVRGLAEFSHVWISFVFHQTMDRGWQPLVRPPRLGGNAKVGVFASRSTHRPNPMGLSLVELLAVNVDNGVTLELAGADLLDGTPVLDIKPYIPFVESRPEASGGFVDGPPPQLRVEWSEAARRRLDQTDAPAGFAQLVEQVLAQDPRPAYQDDPERVYGVTLYCYNVRFGIADGVARVLEILPAAQN

SEQ ID NO: 118270 - DNA, 708 bp, Photorhabdus luminescens subsp. laumondii TTO1
  CDS (1)..(708): transl_table=11
atgaccgatttccatttcacgcagataggggttatccactccccttataaagaaaaatttgccgttccccgccaacccggtcttattgaagatggtggtgggaaactggtacttcttcctccctataatcaaccggatgcagttcgtggtctggaacaatttagtcatctgtgggttattttcatcttccatcaaacaatagaaggcggctggaagccaatggtgcgtcctcctcgtttaggtggcaatgcaaaaatgggcgtattcgcaacccgttcgacttttcggcctaatccaattggcatgtctctgattgaacttaaaggaatcgaatacaggaaaggtcgagttattctggaactgggtagcctggatttagttgatggtacgccggttatcgatattaagccttatctgcctttcgctgaatgtcagccacatgcaatggcgggttttgcgcagcaagctccttctaccaatatggaagtggtattttcgcctgccgctgagcaacagctaatctcaattcaaaatatttatccgaatttacgccgttttatcagtcaagttttagcccaagatcctcgtccagcttaccggagaagagaacaggaaaatcgggaatatgctgctcatttactggattttaatgtacgctggaaaatctgtggcacattgaccgaagtagtctccatagatccccattaa

SEQ ID NO: 118271 - protein, 235 aa, Photorhabdus luminescens subsp. laumondii TTO1
MTDFHFTQIGVIHSPYKEKFAVPRQPGLIEDGGGKLVLLPPYNQPDAVRGLEQFSHLWVIFIFHQTIEGGWKPMVRPPRLGGNAKMGVFATRSTFRPNPIGMSLIELKGIEYRKGRVILELGSLDLVDGTPVIDIKPYLPFAECQPHAMAGFAQQAPSTNMEVVFSPAAEQQLISIQNIYPNLRRFISQVLAQDPRPAYRRREQENREYAAHLLDFNVRWKICGTLTEVVSIDPH

SEQ ID NO: 118272 - DNA, 696 bp, Vibrio vulnificus YJ016
  CDS (1)..(696): transl_table=11
atgcactccattgatcctattggctttattgagagcccctataaagagaaattcgcggtccccagacaacctcgcttagtccctgctgcaacggcacgggtaaaactggttggcagtgccaatacgcccgagtcagtaagaggtttggcgcaattttcccacgtttggttgctgtttttgtttgatcaaaacttggccgcgggttggaaacccaccgttcgccctcctcgcctaggtggcaatgagcgtatgggtgtatttgccacccgttcaacgtttcgccccaacggcattggcatgtcagcggtggaaatgaaagggataactaaacaaggcgatcaggtctatctcgatcttggcagtgtggatttggtggatgggacccccatcattgatatcaaaccttacatcccctattccgacgcaatttccgatgccgtcggtggctacgcagagtcagaacccgagcgctcactcgtgatcttctccagtgaagcggatgcgctattggcgacacgacccaatggaacgctagagaaacaggtcattgagcaagttttggcacaagatcctcgccctgcctataagaaaaacaaaccggatgagaaagaatatgcggtaaatttgttcgatttgaacgtcaaattcattatccaagataagatagtgacggttagccgcatcgaacgcttttga

SEQ ID NO: 118273 - protein, 231 aa, Vibrio vulnificus YJ016
MHSIDPIGFIESPYKEKFAVPRQPRLVPAATARVKLVGSANTPESVRGLAQFSHVWLLFLFDQNLAAGWKPTVRPPRLGGNERMGVFATRSTFRPNGIGMSAVEMKGITKQGDQVYLDLGSVDLVDGTPIIDIKPYIPYSDAISDAVGGYAESEPERSLVIFSSEADALLATRPNGTLEKQVIEQVLAQDPRPAYKKNKPDEKEYAVNLFDLNVKFIIQDKIVTVSRIERF

SEQ ID NO: 118274 - DNA, 708 bp, Bdellovibrio bacteriovorus HD100
  CDS (1)..(708): transl_table=11
atggaacctattggctacttggagtcttgctttaaagataaatttggaacaccgcgacagcctggacttgttaagcgggctgaagcacgtctgaaaatccgcgcggatcttcagccggaggaatctttgcaagggcttgagggcttcagtcatgtatggctgatttgggtcttccatcaaaacaaagtggcgcgcttccatgcgaaagtgcatccgccgcgtttgggtggggaaagcatggggttgtttgcgacccgcactccgcatcgtccgaatccgatcgggctgtctttggtggaactggtgcgcgtggaaaaagacggcatcgtggtcgccggagcggacctggtggatggcactccgattttggatatcaaaccttatctgcctgaggtcgaagccattcccacggcccgcacaggctggccggccgagatcgccaagaacccgatcacagtgacattcgacgacaaggccgagcaacttttacaagagtggcaggtaagaaaccctgacaaggctttgcgtgaggtgattgaagaaaccctgaagcaggatccgcgtcctgtcgtttatcgtggttttgaagagggagattccccttatagaagctcgcacgcagtccgtttgtacgacgtggatgttcatttcaaatttgaaagccccacccaggtgcgcgtcttcgatattctttttatgcataattag

SEQ ID NO: 118275 - protein, 235 aa, Bdellovibrio bacteriovorus HD100
MEPIGYLESCFKDKFGTPRQPGLVKRAEARLKIRADLQPEESLQGLEGFSHVWLIWVFHQNKVARFHAKVHPPRLGGESMGLFATRTPHRPNPIGLSLVELVRVEKDGIVVAGADLVDGTPILDIKPYLPEVEAIPTARTGWPAEIAKNPITVTFDDKAEQLLQEWQVRNPDKALREVIEETLKQDPRPVVYRGFEEGDSPYRSSHAVRLYDVDVHFKFESPTQVRVFDILFMHN

SEQ ID NO: 118276 - DNA, 750 bp, Bdellovibrio bacteriovorus HD100
  CDS (1)..(750): transl_table=11
atgaaacagctgggagatgcttttgaattttcggcaataggtgtggtgcgaactccgttcaaagacagattcggagttccgcgccagcccgggcttgcggcgcaggccaaaggggtgattaaaatcaaccccgatccggatttgaaaaccgctctgcgttcgctggaagaattcactcatatctggattgtctttgtctttcatgatcatggtggcaagggctggaaacccagcattcgtccgccacgattggggggcaaccgcaaagtcggtgttctggcttcgcgttctccgcaccgcccgaatccgatcgggctttcggcggtcgtagttgaaaagattgattttgatgccgaaggtggccctgagattcatatcggtggtgtggatcttgtggatggcacgccggtgctggatatcaaaccctacatcgcttatgcagattcaattcctcatgccagcgcgggctgggcgtctgcacctattcctcgttatccggttattttttcggatgaagctgaaaatgaaattctaaaacgtgatcctcaaggagcgcagaatttgcgtgctttgattgtggatgtgatggagcttgatcctcgtcccgcgttccaaaaacgtcaaaacccggtgaccgactcggcatcgtggggacagcgatatggcattgatgttctgggaaatgatgtgaagtatgaacttcgcgagtcggggctttatgtctatgacattcaggatctgaaaaagtaa

SEQ ID NO: 118277 - protein, 249 aa, Bdellovibrio bacteriovorus HD100
MKQLGDAFEFSAIGVVRTPFKDRFGVPRQPGLAAQAKGVIKINPDPDLKTALRSLEEFTHIWIVFVFHDHGGKGWKPSIRPPRLGGNRKVGVLASRSPHRPNPIGLSAVVVEKIDFDAEGGPEIHIGGVDLVDGTPVLDIKPYIAYADSIPHASAGWASAPIPRYPVIFSDEAENEILKRDPQGAQNLRALIVDVMELDPRPAFQKRQNPVTDSASWGQRYGIDVLGNDVKYELRESGLYVYDIQDLKK

SEQ ID NO: 118278 - DNA, 948 bp, Tribolium castaneum
  CDS (1)..(948)
atgtcatcccttacttgtgaaaaagaagagttaataaaaaatcttgaaaatcagttaggcctagcccggcgtgaaattaacaatttacgtaagcaactaaaggcgttaacgttcatacagcaaaaagaatatgacaaaatcaaaaacgttttacaaagttggcgctgtttggggtgcaaaacccaagcagagtcgccaccaattgctagtgaaaaaccaccaagtacaaacacggaaataaaaatgcaaaatattggtgttataagaacacagttccctgaaaagaggggaaccccccgacaaccaaccatttgttcagactcagtcgcgaaattatcgttaaatgatgacgtttttacgaatccggaccacacattgcagggtttgcaagacttttcacatatgtggattttgtttcatttccataagaacaaagcggctcataaaaaagcaaaagtagcccctccgcgtttgaatggtgaaagaacaggggtttttgctagtagatcacctcataggcctaatcctattggcttatcactggtaaaaatcgacaaaattgaaggaagcaatgtttatttttctggcgttgatgttgttgatgaaactccagttcttgacataaaaccatacattcctcaatatgatacaccagaagaccatgttagagtgccacactggattggcaattcgactgtgaaaactctgagagtagtttttgaagaaattgcgttagttcaattgaatgactacaaaacggatggtagggacgttaaagcagacattgaaaaagtgctgagggaggatccccggtctgtttatttaagggcgaaatggactgggcactattacacgtttcgtatgtgtaatttacaaatttgttgtaaatttgatgatgagtctcacacagtaacagttcatgaagtaacagcttgtaacgataaataa

SEQ ID NO: 118279 - protein, 315 aa, Tribolium castaneum
MSSLTCEKEELIKNLENQLGLARREINNLRKQLKALTFIQQKEYDKIKNVLQSWRCLGCKTQAESPPIASEKPPSTNTEIKMQNIGVIRTQFPEKRGTPRQPTICSDSVAKLSLNDDVFTNPDHTLQGLQDFSHMWILFHFHKNKAAHKKAKVAPPRLNGERTGVFASRSPHRPNPIGLSLVKIDKIEGSNVYFSGVDVVDETPVLDIKPYIPQYDTPEDHVRVPHWIGNSTVKTLRVVFEEIALVQLNDYKTDGRDVKADIEKVLREDPRSVYLRAKWTGHYYTFRMCNLQICCKFDDESHTVTVHEVTACNDK

SEQ ID NO: 118280 - DNA, 825 bp, Candidatus Protochlamydia amoebophila UWE25
  CDS (1)..(825): transl_table=11
atgttagacgacaaaacacaatttttcatgaagcctattggttattttcgagctgagcaaataaaaaaatatcaagttcctagacaagcgcctctttctgacagcgaagggcttattgaattacttccccaggttcaatttgaacaggcccttacaggtttggaaggatttgaaagaatatggatattatttcgatttcatttacatacccattggaaaccaaaagtactccctccaagaggagagaaaaaacaaggtgtttttgcaacgcgttctcctcatcgccctaatttaataggactttcttgcgtcaaattgaaaaagatttgcggattaaaactttatattgtcaaccatgatttgctagaaggaactcctattctagatatcaagccttatcttaactatgccgattcttttcaatgccaaaaacaggggtggttggatgaccttactgctgctgacgaggtattttctatccaatggtcatcacaagttctcgaacagctccaatatctagaaaaagagtgggattgctttctgcaagcgaagatcacattgcgtttacaagtaaatccttttccttcttccaataatcgtattaaacttattaaaggtaacaattatcaactcgcttatcaaacatggcgggtcaattattcaattgataattccatccttcttgttttttctcttatcacaggatatgacaaagaaacattaagagggaataggtcttctcgatgggaagatgttcctatacatcaagcttttatacaaagatttgggggaatgaatagctgtgatagcgaggttgcaacttaa

SEQ ID NO: 118281 - protein, 274 aa, Candidatus Protochlamydia amoebophila UWE25
MLDDKTQFFMKPIGYFRAEQIKKYQVPRQAPLSDSEGLIELLPQVQFEQALTGLEGFERIWILFRFHLHTHWKPKVLPPRGEKKQGVFATRSPHRPNLIGLSCVKLKKICGLKLYIVNHDLLEGTPILDIKPYLNYADSFQCQKQGWLDDLTAADEVFSIQWSSQVLEQLQYLEKEWDCFLQAKITLRLQVNPFPSSNNRIKLIKGNNYQLAYQTWRVNYSIDNSILLVFSLITGYDKETLRGNRSSRWEDVPIHQAFIQRFGGMNSCDSEVAT

SEQ ID NO: 118282 - DNA, 735 bp, Acinetobacter sp. ADP1
  CDS (1)..(735): transl_table=11
gtgatgatgacttctgtaaatttgccaatcatcggcatcatgcattcaccttacggtgaaaagtttggtattcctcgtcagcctaatctagtacaggtagagtcatacattgaaatgtgcgaaccatataatgatattttggcatttgaaggaatagaagcatttagtcatttatggttaatctggcagtttcatgacaataaaaatcagcaagatgatgaaagatttcgcccacaggtacgcccgccacgtttagggggaaacaagaaaattgggatttttgcgaccagaagcatgtatcgtccagcaccgattggcttatctgtcgtgcaatttaaacatattgaaaaaattgggaaaaaactgcgaatctatgtgaatggcagtgatttgttaaatggaaccccaattcttgatatcaagccttatattcagtattcagatgcgattgtttctgcacaaagtagttatgcacaagatgaacctattagaaaaagcgtgttatggacaggagtcgcttgcgagcaaagacaaaaatttttagatcagaaaaaactcacgacccagattttgaatgaacttgagcaagtattggcttttgatccgcgacctgcatatcaaaacgatgttaaccggatttataaaatgaagttcgatcaattcgatattcactttaaagtcaatgatcagaatgttgaggtagttggattttttgatcaagaaagtgaaagttaa

SEQ ID NO: 118283 - protein, 244 aa, Acinetobacter sp. ADP1
MMMTSVNLPIIGIMHSPYGEKFGIPRQPNLVQVESYIEMCEPYNDILAFEGIEAFSHLWLIWQFHDNKNQQDDERFRPQVRPPRLGGNKKIGIFATRSMYRPAPIGLSVVQFKHIEKIGKKLRIYVNGSDLLNGTPILDIKPYIQYSDAIVSAQSSYAQDEPIRKSVLWTGVACEQRQKFLDQKKLTTQILNELEQVLAFDPRPAYQNDVNRIYKMKFDQFDIHFKVNDQNVEVVGFFDQESES

SEQ ID NO: 118284 - DNA, 717 bp, Erwinia carotovora subsp. atroseptica SCRI1043
  CDS (1)..(717): transl_table=11
atgagtcaatttgttttcaatcagatcgggattatccgttcaccgtataaagaaaaatttgccattccacggcaaccgggtctgattgaagatggaggcggggaacttcagctattaccgccgtacaatcaggcggagtgtgtccgggggctggaggatttcagccatatttgggtattgttcatctttcatcaaacgatggagggcggctggcgtccgacagttcggccaccgcgtctgggaggaaacacacgcacgggcgttttcgctacgcgttccaccttccgtcccaaccctattggcatgtcattggttgaattaaaagggatccgtgcaaaaggcgatacgattacgctcgaactaggcagccttgatctagttgatggcacaccggtagtcgatatcaagccttatctaccctttgcagaaagccatcctcaggcgcaagcgggttttgcccaaatggcacccgatgccgcgatgccggtatttttttcgccgaatgcagaaaatcagatcgcagaacaccaaaagaaatatcctcagttaaaacgctttatctcacaggtattggcacaagatccgcgcccagcttaccgcaaaggggaaagtgccacgcgggaatatgccgttttactattggaattcaatgtgcgctggcgcgtatgcggggaacaaactgaagtattaagccttgacccgtcccacacgtgttaa

SEQ ID NO: 118285 - protein, 238 aa, Erwinia carotovora subsp. atroseptica SCRI1043
MSQFVFNQIGIIRSPYKEKFAIPRQPGLIEDGGGELQLLPPYNQAECVRGLEDFSHIWVLFIFHQTMEGGWRPTVRPPRLGGNTRTGVFATRSTFRPNPIGMSLVELKGIRAKGDTITLELGSLDLVDGTPVVDIKPYLPFAESHPQAQAGFAQMAPDAAMPVFFSPNAENQIAEHQKKYPQLKRFISQVLAQDPRPAYRKGESATREYAVLLLEFNVRWRVCGEQTEVLSLDPSHTC

SEQ ID NO: 118286 - DNA, 717 bp, Desulfotalea psychrophila LSv54
  CDS (1)..(717): transl_table=11
atgaagatgacaaaatttgagatagagcccattggtattgttcactcctgttttagcgaaaaatttggtattccccgtcagcccggtctggtccattcctcggtggccgagctggagctacttccgccctggaatcgtcaggaactggtggctgggctaagcgaattcacccatatctgggttcactttgtctttcataagaccattgaggctggctggcgggagtctatccggcctcctggtctgggtggaaaaaagcgggtgggggtctttgccagcagaagtccgcatcgtcctaatcacatggggatgtccgtggtgcgtctgcgggggatacgagccagcaagggcaaggtctttctgcaactttccggtattgatctcttggatggcaccccggtggtcgatataaaaccctatgtggcctatagcgatagtattcccgaggcgtcctcttcctatgcagggagctttttccctgtccgggtacgattgaggggggatgtgctctctttttgtgagaaatatcaggatgaaagtggacgtgatttggcagagctgatcagggaggtgcttgctcaggacccaaggcctgtcagtcagcggggtaaaagggatgtgtttggcgttttgctatggcaggtaaatgtacgttttcgggtggtgttggaggagggtgaggagatctttgaagtattttcctgtgttaacctataa

SEQ ID NO: 118287 - protein, 238 aa, Desulfotalea psychrophila LSv54
MKMTKFEIEPIGIVHSCFSEKFGIPRQPGLVHSSVAELELLPPWNRQELVAGLSEFTHIWVHFVFHKTIEAGWRESIRPPGLGGKKRVGVFASRSPHRPNHMGMSVVRLRGIRASKGKVFLQLSGIDLLDGTPVVDIKPYVAYSDSIPEASSSYAGSFFPVRVRLRGDVLSFCEKYQDESGRDLAELIREVLAQDPRPVSQRGKRDVFGVLLWQVNVRFRVVLEEGEEIFEVFSCVNL

SEQ ID NO: 118288 - DNA, 708 bp, Yersinia pseudotuberculosis IP 32953
  CDS (1)..(708): transl_table=11
atgagtacattctcttttaatcagatcggcgtgatccgttcaccgtataaagaaaagtttgcggtaccacggcaacccggtttggttgaggatggtggtggcgaattacagttgctggcaccttacaaccaaccagaaagcgtacgcggcttatctgacttcagccatttatgggtgatattcgttttccatcagacgatggagggtggctggcgtccaactgttcgccctccccgtctggggggaaatacacgaatgggcgtatttgcgacccgttcaacttttcgtccaaacccgataggcatgtcgctgattgagttgaaaggcgttcgttgccaaaacggtgaggtgattctggcattgggcagcctggatttagttgatggcacgcctgttattgatattaaaccttatctgcctttcgctgagagccaacctcaggcgcgcgctggttttgcgcaatctgcaccagatacagagatgcaagtttgcttttctcccgccgccgagcaacagttagctcaccaccagcagcgttatccacatcttcgccgttttatcagccaagttttagcacaagatccacgcccagcttaccgtaaagacgataatgaaagccgtgaatatgccgttttattactggaatttaatgtgcgctggcgggttattggccagcaaacagaagtgttatcactcgacccacgctaa

SEQ ID NO: 118289 - protein, 235 aa, Yersinia pseudotuberculosis IP 32953
MSTFSFNQIGVIRSPYKEKFAVPRQPGLVEDGGGELQLLAPYNQPESVRGLSDFSHLWVIFVFHQTMEGGWRPTVRPPRLGGNTRMGVFATRSTFRPNPIGMSLIELKGVRCQNGEVILALGSLDLVDGTPVIDIKPYLPFAESQPQARAGFAQSAPDTEMQVCFSPAAEQQLAHHQQRYPHLRRFISQVLAQDPRPAYRKDDNESREYAVLLLEFNVRWRVIGQQTEVLSLDPR

SEQ ID NO: 118290 - DNA, 816 bp, Mannheimia succiniciproducens MBEL55E
  CDS (1)..(816): transl_table=11
ttgcaaaaaagagaccgcacttttaagcggtgttataatgaaaggcctattctatcaatacttattacggattttaaggaaaatatgtcggatacttcgctcagccttcacccaatcgcgattattaatacgccttataaagagaaattttccgtaccgcgccagccgaatctcgttcccgacggcgttggcaccgttgaattattaccgccctttaaccaacccgaagccgtgcgcggattagaagcattcagccatttatggctgatttttcagtttgataaagttccgcagggtaaatggcaaccgaccgtcagaccgcctcgtcttggcggcaaccggcgtatcggcgtatttgcctcccgctctacccaccgcccgaatccgttaggcttatccaaagtcgaattacgtaagatagaaattagcaacggcaaggttttactgcatttagggtcggtagatttagtggacggcacgccgattttcgatattaaaccctatattgcctatgtcgatagcgagccgcaggcaaaatcaagctttgcccaggaaaaaccgcaagctaaattaaaggttgaattcactccgtcaatacaaaatatcatccagaaaatcgaacaaaaacgaccgcactttggacgctttctcactgatgtgatcgcacaggatccgcgcccggcttatcaagcgggtaagccaagcgagcgggaatacggcatcacgctgtatgaatttaatatccgttggcgaatccggcagaattccgccgatgtcgccgaagtgtttgatatagaacaaaccggcaatatttaa

SEQ ID NO: 118291 - protein, 271 aa, Mannheimia succiniciproducens MBEL55E
MQKRDRTFKRCYNERPILSILITDFKENMSDTSLSLHPIAIINTPYKEKFSVPRQPNLVPDGVGTVELLPPFNQPEAVRGLEAFSHLWLIFQFDKVPQGKWQPTVRPPRLGGNRRIGVFASRSTHRPNPLGLSKVELRKIEISNGKVLLHLGSVDLVDGTPIFDIKPYIAYVDSEPQAKSSFAQEKPQAKLKVEFTPSIQNIIQKIEQKRPHFGRFLTDVIAQDPRPAYQAGKPSEREYGITLYEFNIRWRIRQNSADVAEVFDIEQTGNI

SEQ ID NO: 118292 - DNA, 681 bp, Neisseria gonorrhoeae FA 1090
  CDS (1)..(681): transl_table=11
atgacttataccattacccccatcggcaccgcccgctcgccctacaaacagaaattcggcatcgcccgccagcccggtttggtctccgccgcagaagcctgcatcgagctgaatcccgaatttaccgcagacagcgtgcgcgggttggaagatttcgattatgtgtggataagttttatcttccacggcgtattggatgaaggttgggcgcaaatggtgcgcccgccacggctcggcggcaaacaaaaaatgggcgtgttcgccacgcgcagcccccaccgccccaaccatctcggactctctctccttaaactcgaacgcatcgaaaccggcaaacccgtccgcctctattgcagcggctcagacctgctggacggcacgccgattgtggacatcaagccttatatcccctttatcgaatccaaacccgatgccgcatccggtttcgtcagcggcaaacccgtagagttggaagtcgtttggcaggaaaacatcggcgcggaaaatttatctgcaaacaccaaaaaccttatcagccaaagcattgcccaagatccgcgccccgcctatcagaatattcccgaacggatttatgtgatgaatattgcggattacgaagtcaggtttcaaatcgaggaaaaccgcgcgacggttattaatctttccccaaccccgctttaa

SEQ ID NO: 118293 - protein, 226 aa, Neisseria gonorrhoeae FA 1090
MTYTITPIGTARSPYKQKFGIARQPGLVSAAEACIELNPEFTADSVRGLEDFDYVWISFIFHGVLDEGWAQMVRPPRLGGKQKMGVFATRSPHRPNHLGLSLLKLERIETGKPVRLYCSGSDLLDGTPIVDIKPYIPFIESKPDAASGFVSGKPVELEVVWQENIGAENLSANTKNLISQSIAQDPRPAYQNIPERIYVMNIADYEVRFQIEENRATVINLSPTPL

SEQ ID NO: 118294 - DNA, 693 bp, Pseudomonas syringae pv. syringae B728a
  CDS (1)..(693): transl_table=11
atgagctacaacgtctcccctgtcggcttcgtgcgctcctgcttcaaggagaagtttgccatcccgcgccagccacagcttgcaccggcggcacgcggcgtgctggagctggtggcaccgttcgatcagggtgaagcggttcaggggctggaacaggtcagtcacgtctggctgctgtttctgttccacctgacgctggaagacaagccacgcctgaaggtgcgcccgccgcgcctgggtggcaaccagtcgatgggcgtgttcgctacccgcgcaacccatcgccccaatggcatcggccagtcggtggtcaagctggacaaggtcgagcccgggcgactctggctgtccggcatcgacctgctggatggcacgccggtgctggacatcaagccctatgtgccctacgccgacgcaatcgccgacgcgaccaaccacatcgccagtgctgcgccagacctgataccggtgcgctggcaggaggccgcgctgcaacaggctcgtgaacacgcgttgcgcctgaacgagccgctggtcgaactgatcgagcagtgcctggcccaggacccgcgcccggcctatcagctgcccacgccggaacgtcgctatggtgctcagttctgggatctggacgtgcgctggcactacccgcaggccggcgtgatttgcgtgcttgaagtgctgctcgcctga

SEQ ID NO: 118295 - protein, 230 aa, Pseudomonas syringae pv. syringae B728a
MSYNVSPVGFVRSCFKEKFAIPRQPQLAPAARGVLELVAPFDQGEAVQGLEQVSHVWLLFLFHLTLEDKPRLKVRPPRLGGNQSMGVFATRATHRPNGIGQSVVKLDKVEPGRLWLSGIDLLDGTPVLDIKPYVPYADAIADATNHIASAAPDLIPVRWQEAALQQAREHALRLNEPLVELIEQCLAQDPRPAYQLPTPERRYGAQFWDLDVRWHYPQAGVICVLEVLLA

SEQ ID NO: 118296 - DNA, 720 bp, Haemophilus influenzae 86-028NP
  CDS (1)..(720): transl_table=11
atgaatgatttaaccttatcgcctatcgccattatccacacgccttataaagaaaaattctccgtaccacgccaacctaagttagttgaagacggagtaggcattgtagaactcttaccgccttataattcgcctgaagccgtgagaggattagaacaattcagtcatctttggttaatttttcaattcgaccaaatccaacaagggaaatggcaacccaccgtacgccctcctcggttaggcggtaatcaacgaattggagtgtttgcttcacgcgcaacgcaccgcccaaatcctcttggtttatccaaagtcgaattacgtcaagtagaatgcatcaacggtaacatttttctccatttaggtgcggtggatttagtggatggcacgcccattttcgatatcaaaccctatattgcctatgcggatagtgagccaaatgcacaatcgagctttgctcaagaaaaaccaccagtaaaactgactgttgaatttaccgagcaagccaaaagtgcggtaaaaaaacgagaagaaaaacgaccgcacttaagtcgttttattcgccaagtgctagagcaagatcctcgcccagcctatcaacaaggtaaaccgagtgatcgtatttatggaacaagtttgtacgaatttaatgtgaaatggcgaattaaagcgggtacggtaaattgtgtagaagtgattgaaatagaaaaagacaaatag

SEQ ID NO: 118297 - protein, 239 aa, Haemophilus influenzae 86-028NP
MNDLTLSPIAIIHTPYKEKFSVPRQPKLVEDGVGIVELLPPYNSPEAVRGLEQFSHLWLIFQFDQIQQGKWQPTVRPPRLGGNQRIGVFASRATHRPNPLGLSKVELRQVECINGNIFLHLGAVDLVDGTPIFDIKPYIAYADSEPNAQSSFAQEKPPVKLTVEFTEQAKSAVKKREEKRPHLSRFIRQVLEQDPRPAYQQGKPSDRIYGTSLYEFNVKWRIKAGTVNCVEVIEIEKDK

SEQ ID NO: 118298 - DNA, 696 bp, Pseudomonas fluorescens Pf-5
  CDS (1)..(696): transl_table=11
atgacctacagcgtttcccccatcggcttcgtgcgctcctgcttcaaggagaagttcgccatcccgcgccaaccgcaactggctccggccgcgcgcggggtgctggaactggtggcgcctttcgaccagggcgacgcggtgcaagggctggagcaggtcagccacgtctggctgctgttcctgtttcaccaggccctggaggacaagccgcgactcaaggtgcgcccgccgcgcctggggggcaacaagtccatgggggtcttcgccacccgtgcgacccaccgccccaatggaatcggccagtcggtggtcaagctggacaaggtcgaggccaaccgcctgtggatctccggcatcgacctgctggacggtacgccgatcctcgatatcaagccctacgtgccctacgccgacatcattgccacggcgagcaatgagatcgccagcgccgcgccgcagattattccggtgcagtggcaggacaatgccctgcaacaggctcagatccacgctcagcggctccaggagcccctggtggagctgatcgagcagtgcctggctcaggatccgcgtccggcctaccaggtgcccacggccgagcgtgagtacggcgcccagttctgggatctggacgtgcgctggcattacccagagcccggggtgatccgggtgttggaagtggtcccggcggactga

SEQ ID NO: 118299 - protein, 231 aa, Pseudomonas fluorescens Pf-5
MTYSVSPIGFVRSCFKEKFAIPRQPQLAPAARGVLELVAPFDQGDAVQGLEQVSHVWLLFLFHQALEDKPRLKVRPPRLGGNKSMGVFATRATHRPNGIGQSVVKLDKVEANRLWISGIDLLDGTPILDIKPYVPYADIIATASNEIASAAPQIIPVQWQDNALQQAQIHAQRLQEPLVELIEQCLAQDPRPAYQVPTAEREYGAQFWDLDVRWHYPEPGVIRVLEVVPAD

SEQ ID NO: 118300 - DNA, 843 bp, Psychrobacter arcticus 273-4
  CDS (1)..(843): transl_table=11
atgtcctgtcaggatgattcttctttgagtaatcatatagcaccgattatcggctaccatcatgcgccgctttcacaaaaatttggcgcaccaagacagccaaacctggttgctttgactagtgttattgagatgattgcgccttatgatacgccagcggcatttatcggtctggaggattttagccatatttgggtcagctggcagttccatcacaactatttgtataaagacaagcaggctaataaagcggatagcagctttcgtgcacaagtgcgaccgccacgcttgggtggcaatcagaagataggcgtgtttgccagtcgtagtatgtatcgaccttcagcgcttgggttgtctgtggttaagctggaacatattgagattatagaagggcgagtgttactcatcatcagtggtgctgatatgatagatggcacgccagttatcgatatcaagccctatgtggcttatagtgatgtattacatgaggcacaaagcggttttgcgccctctgcgccgcatttgttggctgtgactgtcactgaatttgcctatgagcagtttgttcaaatgatagacaatcaacgtattcataatgaagcagaaaaaaccgctcaaaatgaaaaagcaacggtaaaagtggtcattcataaaatgcagaaacagttgcttatgcctgatctcgataatattaaagcgttgatagcacaagacccacgtcctgcctatcgccgtacggagatacatatgctatttgttatgcgctataagtctgttgatgtgagttttcaattgatagattcaggtgagctacagataacggctgtcgtcacaatatag

SEQ ID NO: 118301 - protein, 280 aa, Psychrobacter arcticus 273-4
MSCQDDSSLSNHIAPIIGYHHAPLSQKFGAPRQPNLVALTSVIEMIAPYDTPAAFIGLEDFSHIWVSWQFHHNYLYKDKQANKADSSFRAQVRPPRLGGNQKIGVFASRSMYRPSALGLSVVKLEHIEIIEGRVLLIISGADMIDGTPVIDIKPYVAYSDVLHEAQSGFAPSAPHLLAVTVTEFAYEQFVQMIDNQRIHNEAEKTAQNEKATVKVVIHKMQKQLLMPDLDNIKALIAQDPRPAYRRTEIHMLFVMRYKSVDVSFQLIDSGELQITAVVTI

SEQ ID NO: 118302 - DNA, 747 bp, Colwellia psychrerythraea 34H
  CDS (1)..(747): transl_table=11
atgtcaaacacatgcgaaaccactcatgatgcacaaagctttaaatttgatgccattggcgtcattgagtcgccctatcaagagaagtttgccatacctcgtcagccaaatttagtcagtgcggcaaaaggtaaggtagtgctacttggtgacgctaacaatcatgagttagttcgtgatattgaacaatttagtcacctatggttactctttgtctttcatggcacgcaagaacaaggatggaagcctttggtacgcccgcctcgacttggcggtaatgtaaaaacaggtgtactggcaacccgttcaacttttcggccaaacccaattggcatgtccgtagtgaaactcgataaggttacgacagaaaaaaagcaaactattttacatatctctggtttagatttattaaatggcacacctattatcgatataaagccttatgtgccctattctgacgcgattattgatgccgatgcaggttttgcacaagagcaacctgatgccgctttatccgttgtatttagtgagcaaatgcaagctgacctgataaaatatcaacaacgtgatagtgaattaggattattaatagagcaagtattaaaacaagatcctcgaccagcctataaacgcggtaaaactgatgataaagtttatggcatgagtttatatgacttaaatatccaatggcaattgatcaccttagataccgtattagtgctaaacattactcaagtcaccaagtga

SEQ ID NO: 118303 - protein, 248 aa, Colwellia psychrerythraea 34H
MSNTCETTHDAQSFKFDAIGVIESPYQEKFAIPRQPNLVSAAKGKVVLLGDANNHELVRDIEQFSHLWLLFVFHGTQEQGWKPLVRPPRLGGNVKTGVLATRSTFRPNPIGMSVVKLDKVTTEKKQTILHISGLDLLNGTPIIDIKPYVPYSDAIIDADAGFAQEQPDAALSVVFSEQMQADLIKYQQRDSELGLLIEQVLKQDPRPAYKRGKTDDKVYGMSLYDLNIQWQLITLDTVLVLNITQVTK

SEQ ID NO: 118304 - DNA, 693 bp, Pseudomonas syringae pv. phaseolicola 1448A
  CDS (1)..(693): transl_table=11
atgagttacaacgtctcccctgtcggcttcgtacgctcctgtttcaaggagaaattcgccatcccccgccagccacagctggccccggcagcacgtggagtgctggagctggtggcgcctttcgatcagggtgaggctgttcaagggctggaagcggtcagtcatgtctggctgctgtttctgttccatatggcgctggaagacaagccgcgcctgaaggttcgccctccgcgtctgggcggcaaccagtcgatgggggtatttgccacgcgcgcgacgcatcgccccaatggcatcggccagtcggtggtcaggctggacaaagtcgaagccggtcgcctgtggctgtccggcatcgacttgctggatggcacaccagtgctggacatcaagccatacgtaccctacgccgatgcaatcgccgaggcgaccaaccacatcgccagcgctgcgccggccctgataccggtgcagtggcaggacgccgccctgctgcaggctcgcgaacacgcactacgcctgagtgagccgctggtcgagctgatcgagcaatgcctggcccaggacccgcgcccggcctatcagctaccgacgccggaacgccgctacggcgctcaattctgggatctggacgtacgctggcactacccgcagaccggtgtgatttgcgtgcttgaagtcctgctggcctga

SEQ ID NO: 118305 - protein, 230 aa, Pseudomonas syringae pv. phaseolicola 1448A
MSYNVSPVGFVRSCFKEKFAIPRQPQLAPAARGVLELVAPFDQGEAVQGLEAVSHVWLLFLFHMALEDKPRLKVRPPRLGGNQSMGVFATRATHRPNGIGQSVVRLDKVEAGRLWLSGIDLLDGTPVLDIKPYVPYADAIAEATNHIASAAPALIPVQWQDAALLQAREHALRLSEPLVELIEQCLAQDPRPAYQLPTPERRYGAQFWDLDVRWHYPQTGVICVLEVLLA

SEQ ID NO: 118306 - DNA, 708 bp, Pseudomonas fluorescens PfO-1
  CDS (1)..(708): transl_table=11
atgcaaaccatgacttacagcgtctcccccatcggcttcgtccgctcctgcttcaaggagaagttcgccatcccgcgccagccgcaactggcccccgccgcccgtggcgtgctggagctggtggcgccgttcgatcagggcgatgcggtgcaggggctggagcaggtcagtcatgtctggctgctgttcctgttccatcaggcgctggaagacaagccgcgcctcaaggtccgccctccgcgcctcggtggcaacaaatccatgggcgtgttcgccacccgcgccacgcaccggccgaacggcatcggtcagtcggtggtgaagctggacaaggtcgaggccaatcgcctgctcatctccggtatcgacctgctggacggcacgccgattctcgacatcaaaccctacgtgccctacgccgacatcatcactgacgcttccaacagcatcgccagtgccgcgccgcacctgatcgacgtgcagtggacggacgcggcgctgcaacaggcgcagacgcacgctcagcgcctggccgagccgctggtcgagctgatcgagcaatgcctggcccaggatccgcgcccggcgtatcagacgccaatgccagagcgcgaatacggcgcgcagttctgggatctggatgtgcgctggcattacccgacgcccgaacagatccgcgtcctggaagtcatccccgccgctgactga

SEQ ID NO: 118307 - protein, 235 aa, Pseudomonas fluorescens PfO-1
MQTMTYSVSPIGFVRSCFKEKFAIPRQPQLAPAARGVLELVAPFDQGDAVQGLEQVSHVWLLFLFHQALEDKPRLKVRPPRLGGNKSMGVFATRATHRPNGIGQSVVKLDKVEANRLLISGIDLLDGTPILDIKPYVPYADIITDASNSIASAAPHLIDVQWTDAALQQAQTHAQRLAEPLVELIEQCLAQDPRPAYQTPMPEREYGAQFWDLDVRWHYPTPEQIRVLEVIPAAD

SEQ ID NO: 118308 - DNA, 702 bp, Desulfitobacterium hafniense Y51
  CDS (1)..(702): transl_table=11
atgtccaaagaactaaacatcatcgcccgcattcgtacggattttccgaccaagttcggaattccccggcaaagcggcctgattgatgaccttaaagcagccgtcgtcttcgagccggaataccgcaatgccgacgctctgcgggggttggaagggttttcccatatctggctcatttgggagttctccgccgccctccgggacacctggtcgcccacggtgcgtccgccgcggctgggggggaacaaacgcatgggtgtctttgccacccgctcccccttccggcctaaccctctgggactctcttccgtccgcctggacagtattgaagtcgatccggagctggggccgattctccatgtatcaggagccgatctcctgaatcagactcccatcttcgatattaagccctaccttccttatacggactgtcacccggaggcgacagggggattcatcgagcctctcgccgaccatgaattggtggtggatttccctgaacaatggctgaaccgcattccgccacagcgacgccaagccctggtaagggtactggcccatgatcccaggccctcctatcaaaaggatccccaacggatttacggcctcgaattcgccggattggagataaagtttacggtgctggataaggtgctgaccgtgtgtgaggtgaaacaaaccggaactcatcctgttccttaa

SEQ ID NO: 118309 - protein, 233 aa, Desulfitobacterium hafniense Y51
MSKELNIIARIRTDFPTKFGIPRQSGLIDDLKAAVVFEPEYRNADALRGLEGFSHIWLIWEFSAALRDTWSPTVRPPRLGGNKRMGVFATRSPFRPNPLGLSSVRLDSIEVDPELGPILHVSGADLLNQTPIFDIKPYLPYTDCHPEATGGFIEPLADHELVVDFPEQWLNRIPPQRRQALVRVLAHDPRPSYQKDPQRIYGLEFAGLEIKFTVLDKVLTVCEVKQTGTHPVP

SEQ ID NO: 118310 - DNA, 702 bp, Saccharophagus degradans 2-40
  CDS (1)..(702): transl_table=11
atgcaatttaccctcaacgccataggcaaaattcacacgtgttataagcaaaagtttggtattccacgccaagcggggcttagccccagtgcagaagcgcgcatagagattttcgccccctacaaccggatagaagcctttgaggagctaaagcagtcttcccatatttgggtgcattttgtgtttcacgagaaccgccgtacggagtggaaacccaaggttaaggcccctcgtcttggcggcaataaaaccattggcgtatttgccactcgctcgccggttaggcctaaccctattgggctatcggcagtgcgactagagacgatagagcattcgagtaaggggctatttttagtaatacgcggcggcgactttttagatggcaccccagttgtagatataaaaccttacgtgccctattgcgataaaatagacaacgcaaccaatggcttcgctgcagatgcccccgcaacctatgccgtacagtttgatgaagaaacactaagtaaaattcgcgcgatatctatcgccaatttagagccgctaattatagaaacattgcagcttaaccccgccccacaataccaaacagccgataccagtaaaacttacgccttgcgcctgttcgactacgatatccactggcaattggcttcggtaaatgccattcgggtaacgggcattactcaagcaaccatatga

SEQ ID NO: 118311 - protein, 233 aa, Saccharophagus degradans 2-40
MQFTLNAIGKIHTCYKQKFGIPRQAGLSPSAEARIEIFAPYNRIEAFEELKQSSHIWVHFVFHENRRTEWKPKVKAPRLGGNKTIGVFATRSPVRPNPIGLSAVRLETIEHSSKGLFLVIRGGDFLDGTPVVDIKPYVPYCDKIDNATNGFAADAPATYAVQFDEETLSKIRAISIANLEPLIIETLQLNPAPQYQTADTSKTYALRLFDYDIHWQLASVNAIRVTGITQATI

SEQ ID NO: 118312 - DNA, 723 bp, Haemophilus somnus 129PT
  CDS (1)..(723): transl_table=11
atgtctaaatttttacttcatcttacgccgattgcaatcattcatacgccgtataaagaaaaattttccgtccctcggcaagcgaatttagttcaagacgggacaggtattgtagagttgcttccgccgtttaattgtccggaggctgtacgtggactggagcagttttctcatttgtggttaatttttcaatttgacaacgtgccgacaggtaaatggcaacctacagtacgacctccccgtttaggaggtaatgagcgtattggtgtttttgcttccagagcaacgcatcgcccaaatcctttggggttatctaaagtggaacttcgtgaagttgaatataaaaacggaaagattttgttacatctcggttcagtcgatttgattgacggtacaccaattttagatattaaaccttatattgcgtatgcggataatgaaccctgtgcaagatcgggatttgcccaagaaaagcccgagcaggaattgcgagtggaatttagtcctgaggtgcaaatagtattagcaaaattagagaaaaaacgaccgcacttaagccgttttattcgagaggttattcagcaagatcctcgacctgcctatcagaaaggaaaaaatttgcataaaatttatggtatggcactgtatgaatttaatgttcgttggagaattaaacatgatgatgttacagtggcggaagtgattgagattcagcatgtttga

SEQ ID NO: 118313 - protein, 240 aa, Haemophilus somnus 129PT
MSKFLLHLTPIAIIHTPYKEKFSVPRQANLVQDGTGIVELLPPFNCPEAVRGLEQFSHLWLIFQFDNVPTGKWQPTVRPPRLGGNERIGVFASRATHRPNPLGLSKVELREVEYKNGKILLHLGSVDLIDGTPILDIKPYIAYADNEPCARSGFAQEKPEQELRVEFSPEVQIVLAKLEKKRPHLSRFIREVIQQDPRPAYQKGKNLHKIYGMALYEFNVRWRIKHDDVTVAEVIEIQHV

SEQ ID NO: 118314 - DNA, 735 bp, Shewanella sp. MR-7
  CDS (1)..(735): transl_table=11
atgacatttaccaaccagattaccgctgtcgccacttgccgtactccctataaacaaaaatttggcattccacggcagcccggtttggtggaggcgcgcggttatgttgagctggagccccatgtcaatcatctcgatgccgtgcgcggtatcgagcaatattcccacctttggttgttgttttgtttccatgagaatctcgcccaagggtggaaaacgacggtacgcccgccccgtttaggcggcaatgaaaaactcggcgtattcgcgactcgctcgacctttcgcccgaatggcataggtcaatccgtggtcaaactccatagggtggtgcaacataaaggcaaagtgtgcctagagatttcgggcatggaccttgtcgatggcacgcccattatcgatattaagccctatattccgttctcggattcgattgaaggtgccgtcggcggtatcgcgcaagaagcaccaaaacttatcagcgtggtgttttccgaactcgccgcaacccagattgatgcttacagcaagcaggacgcctataccgatttagccgtactcatccacggcgtgctggggcaagacccccgccctgcctataaaaaagccaaagatgaccccaaattatatcaagtggctttgtatgatttagatatcttttggcggatggaggtcgatgaggatgagcgggaatacattcaggtattagaactcaaaccggggaaatgtggctaa

SEQ ID NO: 118315 - protein, 244 aa, Shewanella sp. MR-7
MTFTNQITAVATCRTPYKQKFGIPRQPGLVEARGYVELEPHVNHLDAVRGIEQYSHLWLLFCFHENLAQGWKTTVRPPRLGGNEKLGVFATRSTFRPNGIGQSVVKLHRVVQHKGKVCLEISGMDLVDGTPIIDIKPYIPFSDSIEGAVGGIAQEAPKLISVVFSELAATQIDAYSKQDAYTDLAVLIHGVLGQDPRPAYKKAKDDPKLYQVALYDLDIFWRMEVDEDEREYIQVLELKPGKCG

SEQ ID NO: 118316 - DNA, 726 bp, Alkalilimnicola ehrlichei MLHE-1
  CDS (1)..(726): transl_table=11
atgactgagccatgcacggagagccccctgtcacccatcggccgggtgcgtacccccttcacccagcgcttcgggattccccgccagggcacgctgctggacgccatccccgggtatctcgaactcgatcccccctacgaccgggccgaggcctggcagggcatcgaggccttcagccatctctggttgctgacctggttccacgccggcaagggccgcggcgggctcaccgtgcgcccaccgcgcttgggcggcaaccgtcgcctcggggtgttcgccacccgcgccccctatcggccgaatccggtggggctcagtctggtgcgactggcggcggtggacctgtccggggcgcgcgcctcaattcaggtacgggggcccgatctgctggacggcaccccgctgctcgacgtgaagccctatgtgccctattgcgatgcctgtccggacgccaccggcggctttgccggcagggccccccagccggccctgtcggtgcgctggctggcgacggcgcgcagcgaggcggagatggccgaacgccgccacccagggctggtggcgttgatcgaggcggtactggccgccgacccgcgcccggcctatcagcgcgacacccgacgccgctacgcagtacgcctctacgacctggatatccattgggaagccgagccgggtctggccgaggtggtggggctccgccctgcggatgtggaccgaatgtga

SEQ ID NO: 118317 - protein, 241 aa, Alkalilimnicola ehrlichei MLHE-1
MTEPCTESPLSPIGRVRTPFTQRFGIPRQGTLLDAIPGYLELDPPYDRAEAWQGIEAFSHLWLLTWFHAGKGRGGLTVRPPRLGGNRRLGVFATRAPYRPNPVGLSLVRLAAVDLSGARASIQVRGPDLLDGTPLLDVKPYVPYCDACPDATGGFAGRAPQPALSVRWLATARSEAEMAERRHPGLVALIEAVLAADPRPAYQRDTRRRYAVRLYDLDIHWEAEPGLAEVVGLRPADVDRM

SEQ ID NO: 118318 - DNA, 696 bp, Pseudomonas aeruginosa UCBPP-PA14
  CDS (1)..(696): transl_table=11
atgacccacagcgtttctcccatcggctacatccgctcctgcttcatggagaagttcgccatcccgcgccagccgctgctcgcgccggcggcgcgggggaccctggaactgctgccgccgttcgaccaggtggaagcgctggaaggcctggagcaggtcagccatgtctggctgctgttcctcttccaccaggccctggaagacaagccgcgactgaaggtgcgcccgccgcgcctgggcggcaaccgctcgctgggagtcttcgccacccgcgccacccatcggccgaacggcatcggccagtcggtggtgcgcctggagggcttcgaagcggggcgcctgtggctgtccggaatcgacctgctcgacggcaccccggtactcgatatcaagccctacgtaccctacgccgacgccgtggccgacgcccgcaacgccatcgccgacgcgccgccgccgggcatcgccgtggagtggagcgagcaggcgcggcgccaggcccatgagcacggccagcggttgcggcagccggtggccgagctgatcgagcaatgcctggcccaggacccgcgtccggcctaccagaagccggagcccgggcgccgctacggggtgcgcctgtgggacctcgacgtgcattggcactacccgcgcccggacctgatccgcgtgctggacgtcgcccgcggcgactga

SEQ ID NO: 118319 - protein, 231 aa, Pseudomonas aeruginosa UCBPP-PA14
MTHSVSPIGYIRSCFMEKFAIPRQPLLAPAARGTLELLPPFDQVEALEGLEQVSHVWLLFLFHQALEDKPRLKVRPPRLGGNRSLGVFATRATHRPNGIGQSVVRLEGFEAGRLWLSGIDLLDGTPVLDIKPYVPYADAVADARNAIADAPPPGIAVEWSEQARRQAHEHGQRLRQPVAELIEQCLAQDPRPAYQKPEPGRRYGVRLWDLDVHWHYPRPDLIRVLDVARGD

SEQ ID NO: 118320 - DNA, 735 bp, Shewanella sp. ANA-3
  CDS (1)..(735): transl_table=11
atgacatttaccaaccaaattaccgctgtggccacctgccgtaccccctacaaacaaaaatttggcattccaaggcaacctggtttggtggaagcacgcggttatgttgagctggaaggccatatcaatcatctcgacgccgtgcgtggcatcgagcaatattcccacctttggctgctgttttgtttccatgaaaatctcgcccaaggctggaaaaccaccgtacgcccaccgcgtttaggcggtaatgaaaaactcggtgtattcgcaacccgctcgacttttcgcccaaacggcattggccaatccgtggtaaaactccaccgagtggtgcaacgtaaaggcaaagtatgcctggagatttcaggcatggatcttgtcgatggcacgccgattatcgatataaagccctatattcccttctcagattcgattgaaggtgccgtcggcggtatcgctcaagaagcgcctaagctgattagcgtggttttttccgagctcgcggcaacgcagattaacgcctatagcaaacaggacgcttatactgatttggccgaacttatccgcggcgtactcggacaagaccctcgccctgcctataaaaaagccaaggatgatcccaagctatatcaagtggctttgtatgacttagatatcttttggcggatggcggttgatgaggatgatcgggaatatattcaagtgctcgaactcaaaccggggaaatgtggctaa

SEQ ID NO: 118321 - protein, 244 aa, Shewanella sp. ANA-3
MTFTNQITAVATCRTPYKQKFGIPRQPGLVEARGYVELEGHINHLDAVRGIEQYSHLWLLFCFHENLAQGWKTTVRPPRLGGNEKLGVFATRSTFRPNGIGQSVVKLHRVVQRKGKVCLEISGMDLVDGTPIIDIKPYIPFSDSIEGAVGGIAQEAPKLISVVFSELAATQINAYSKQDAYTDLAELIRGVLGQDPRPAYKKAKDDPKLYQVALYDLDIFWRMAVDEDDREYIQVLELKPGKCG

SEQ ID NO: 118322 - DNA, 681 bp, Neisseria meningitidis FAM18
  CDS (1)..(681): transl_table=11
atgacttataccattacccccatcggcaccgcccgatcgccctacaaacagaaattcggcatcgcccgccagcccggtttagtctccgccgcagaagtatgcatcgagctgaatcccgaatttaccgcagacagcgtgcgcgggctggaagatttcgattatgtgtggataagttttatttttcacggcgtattggatgaaggctgggcacaaatggtgcgcccaccacggctcggcggcaaacaaaaaatgggcgtattcgccacgcgcagcccccaccgccccaaccatctcggactatcactcttaaaactcaaccgcatcgaaaccggcaaacccgtccgcctttattgcagcggcgcagacctgctcgacggcacgccgattgtggacatcaagccttatatcccctttgtcgaatccaaacccgatgccgcatctggtttcgtcagcggcaaacccgtagagttggaagtcgtttggcaggaaaacatcggcgcggaaaatttatctgcaaacaccaaaaaccttatcagccaaagcattgcccaagatccgcgccccgcctatcagaatattcccgaacggatttatgtgatgaatattgcggattacgaaatcagatttcaaatcgaggaaaaccgtgcaaccgttattgatctttccccaaccccgctttaa

SEQ ID NO: 118323 - protein, 226 aa, Neisseria meningitidis FAM18
MTYTITPIGTARSPYKQKFGIARQPGLVSAAEVCIELNPEFTADSVRGLEDFDYVWISFIFHGVLDEGWAQMVRPPRLGGKQKMGVFATRSPHRPNHLGLSLLKLNRIETGKPVRLYCSGADLLDGTPIVDIKPYIPFVESKPDAASGFVSGKPVELEVVWQENIGAENLSANTKNLISQSIAQDPRPAYQNIPERIYVMNIADYEIRFQIEENRATVIDLSPTPL

SEQ ID NO: 118324 - DNA, 723 bp, Haemophilus somnus 2336
  CDS (1)..(723): transl_table=11
atgtctaaatttttacttcatcttacgccgattgcaatcattcatacgccgtataaagaaaaattttccgtccctcggcaagcgaatttagttcaagacgggacaggtattgtggagttgcttccgccgtttaattgtccggaggctgtacgtggactggagcagttttctcatttgtggttaatttttcaatttgacaacgtgccgacaggtaaatggcaacctacagtacgacctccccgtttaggaggtaataagcgtattggtgtttttgcttccagatcgacacatcgccctaatcctttggggttatctaaagtggaacttcgtgaagttgaatataaaaacggaaagattttgttacatctcggttcagtcgatttgattgacggtacaccaattttagatattaaaccttatattgcctatgcggataatgaacctaatgcaagatcgggatttgcccaagaaaagccaaagcaggaattgcgagtggaatttagtcctgaggtgcaggcaacactggaaaaactggaaaaaaaacgaccgcacttgaagcgttttattcgagaagttattcagcaagatcccagacctgcctatcagaaaggaaagtgttttcataaaatttatggcattgcactgtatgaatttaatattcgttggagaattaaaaatgatgattttacagtggcggaagtgatcgaaattcagaatatttaa

SEQ ID NO: 118325 - protein, 240 aa, Haemophilus somnus 2336
MSKFLLHLTPIAIIHTPYKEKFSVPRQANLVQDGTGIVELLPPFNCPEAVRGLEQFSHLWLIFQFDNVPTGKWQPTVRPPRLGGNKRIGVFASRSTHRPNPLGLSKVELREVEYKNGKILLHLGSVDLIDGTPILDIKPYIAYADNEPNARSGFAQEKPKQELRVEFSPEVQATLEKLEKKRPHLKRFIREVIQQDPRPAYQKGKCFHKIYGIALYEFNIRWRIKNDDFTVAEVIEIQNI

SEQ ID NO: 118326 - DNA, 756 bp, Actinobacillus pleuropneumoniae serovar 1 str. 4074
  CDS (1)..(756): transl_table=11
atgagtttaccacaattaaccctaaatcctatcgggattatccatagcccttatgatgaaaagttctcggtgcctcgccagccgaatttggtgaaagaaggcaaaggcatattaaaactgcttccgccttataattcgccggatgcggtacgaggtatcgagcaattcagtcatttatggctgattttccaatttcatcagattcccgaacgtgaatggcatgctacggtgcgcccgcctcgtttaggcggaaatgaacgtatcggcgtttttgccagccgagcgacccatcgtccgaatccgatcggtttatccaaagtagcgttggaaagtgttgaggtaagaaacggagaagtcttgctaaaactaggtagtgtggatttggtgaacggtacgccgattttagatatcaagccttatattgcgtatgcagacagcgaacctaatgcccgttccggttttgcgcaaacccaacctccggcaaaacttgaagtggaattttcggagcaagcgttacaagcggtcgaattttgccgaaattttgcaacattcggtattgagcaaccgcttacttttattcgtcatgtgattgaacaagaccctcgccccgcttatcagcaaggtaaggcgacagaacgtatctacggcatgaatctggccggatacaacattcgttggcaaatttgcacgaataacgtcaataaagccatcgtactggatattgaaaatgaacttaatcgggaaatatcgttctaa

SEQ ID NO: 118327 - protein, 251 aa, Actinobacillus pleuropneumoniae serovar 1 str. 4074
MSLPQLTLNPIGIIHSPYDEKFSVPRQPNLVKEGKGILKLLPPYNSPDAVRGIEQFSHLWLIFQFHQIPEREWHATVRPPRLGGNERIGVFASRATHRPNPIGLSKVALESVEVRNGEVLLKLGSVDLVNGTPILDIKPYIAYADSEPNARSGFAQTQPPAKLEVEFSEQALQAVEFCRNFATFGIEQPLTFIRHVIEQDPRPAYQQGKATERIYGMNLAGYNIRWQICTNNVNKAIVLDIENELNREISF

SEQ ID NO: 118328 - DNA, 720 bp, Haemophilus influenzae R2846
  CDS (1)..(720): transl_table=11
atgaatgatttaaccttatcgcctatcgccattatccacacgccttataaagaaaaattctccgtaccacgccaacctaatttagttgaagacggagtaggcattgtagagctcttaccgccttataattcgcctgaagccgtgagaggattagaacaattcagccacctttggttaatttttcagttcgaccaaatccaacaaggaaaatggcaacccaccgtacgccctccacggttaggcggtaatcaacgcgttggcgtgtttgcttcgcgtgcaacacaccgcccaaatcctcttggtttatccaaagttaaattacatcaagtagaatgcatcaacggtaacgtttttctccatttaggtgcggtggatttagtggatggcacgcccattttcgatatcaaaccctatattgcctatgcggatagtgagccaaatgcgcaatcgagctttgcccaagaaaaaccaccagtaaaactgactgttgaatttaccgagcaagtcaaaagtgcggtaaaaaaacgagaagaaaaacgaccgcacttaagtcgttttattcgccaagtgctagagcaagatccgcgtccagcctatcaacaaggtaaaccgagtaatcgtatttatggaatgagtttgtatgaatttaatgtgaaatggcgaattaaagcgggtacgcttgattgtgtagaagtaattgaaatagaaaaagacaaatag

SEQ ID NO: 118329 - protein, 239 aa, Haemophilus influenzae R2846
MNDLTLSPIAIIHTPYKEKFSVPRQPNLVEDGVGIVELLPPYNSPEAVRGLEQFSHLWLIFQFDQIQQGKWQPTVRPPRLGGNQRVGVFASRATHRPNPLGLSKVKLHQVECINGNVFLHLGAVDLVDGTPIFDIKPYIAYADSEPNAQSSFAQEKPPVKLTVEFTEQVKSAVKKREEKRPHLSRFIRQVLEQDPRPAYQQGKPSNRIYGMSLYEFNVKWRIKAGTLDCVEVIEIEKDK

SEQ ID NO: 118330 - DNA, 720 bp, Haemophilus influenzae R2866
  CDS (1)..(720): transl_table=11
atgaatgatttaaccttatcgcctatcgccattatccacacgccttataaagaaaaattctccgtaccacgccaacctaatttagttgaagacggagtaggcattgtagaactcttaccgccttataattcgcctgaagccgtgagaggattggaacaattcagtcatctttggttaatttttcagttcgaccaaatccaacaaggaaaatggcaacccaccgtacgccctcctcggttaggcggtaatcaacgagttggtgtatttgcttcacgtgcaacgcaccgcccaaatcctcttggtttatccaaagtcgaattacgtcaagtagaatgcatcaacggtaacatttttctccatttaggtgcggtggatttagtggatggcacgcccattttcgatatcaaaccctatattgcctatgcggatagtgagccaaatgcacaatcgagctttgcccaagaaaaaccaccagcgaaactgactgttgaatttaccgagcaagtcaaaagtgcggtaaaaaaacgagaagaaaaacgaccgcacttaagtcgttttattcgccaagtgctagagcaagatcctcgcccagcctatcaacaaggtaaaccgagtgatcgtatttatggtatgagtttgtatgaatttaatgtgaaatggcgaattaaagcgggtacggtaaattgtgtagaagtgattgaaatagaaaaagacaaatag

SEQ ID NO: 118331 - protein, 239 aa, Haemophilus influenzae R2866
MNDLTLSPIAIIHTPYKEKFSVPRQPNLVEDGVGIVELLPPYNSPEAVRGLEQFSHLWLIFQFDQIQQGKWQPTVRPPRLGGNQRVGVFASRATHRPNPLGLSKVELRQVECINGNIFLHLGAVDLVDGTPIFDIKPYIAYADSEPNAQSSFAQEKPPAKLTVEFTEQVKSAVKKREEKRPHLSRFIRQVLEQDPRPAYQQGKPSDRIYGMSLYEFNVKWRIKAGTVNCVEVIEIEKDK

SEQ ID NO: 118332 - DNA, 714 bp, Pseudoalteromonas tunicata D2
  CDS (1)..(714): transl_table=11
atgcagcactatcaaatcgaaccgattggttatatccaatctccctacaaacaaaagtttgctattcctcgccaaccgagactgatccccgaagcaaaagcaaaactgatttttaatcctacttttaatcgtgaagagtttgttcgtggtttagatgaatttagccatgtttggctgttatttcggtttcatgaaactgctgataaaggctggtcagcactggtgcgcccaccccgtttaggtggcaatgaaaaaaaaggcgtctttgctacgcgcgcaacctttagaccgaacgccattggcatgagtgctgtaaaactagacggcataaactacaaaaatggtcaattatcgcttgagctatcagggattgacctgcttgatggcacgccaatcatcgatattaagccttatttaccttactcagacagtttacctgatgcactcggtggctttgccgatgatcgtcctgaaacagaacttacggttgaatttacgccacaagccattgctttttgtcaagcgcaaagcgcgtttcccgaattacagggctttattagcagtgtcttaaaacaagatcctcgccctgcgtataaaaaaaccaaagaaggcattcaacaatacggtatgacgctgcattgcttcaacataaaatggcaaattgaaggcaattgcaatatcgtattagaaattaccaagcaaagcgctcgttaa

SEQ ID NO: 118333 - protein, 237 aa, Pseudoalteromonas tunicata D2
MQHYQIEPIGYIQSPYKQKFAIPRQPRLIPEAKAKLIFNPTFNREEFVRGLDEFSHVWLLFRFHETADKGWSALVRPPRLGGNEKKGVFATRATFRPNAIGMSAVKLDGINYKNGQLSLELSGIDLLDGTPIIDIKPYLPYSDSLPDALGGFADDRPETELTVEFTPQAIAFCQAQSAFPELQGFISSVLKQDPRPAYKKTKEGIQQYGMTLHCFNIKWQIEGNCNIVLEITKQSAR

SEQ ID NO: 118334 - DNA, 702 bp, Photobacterium sp. SKA34
  CDS (1)..(702): transl_table=11
atgtcttataacatcgaacctatcggcattatccactccccttataaagaaaagtttgctgttcctcggcagccaggattggtgccgagtgcgcgttctgaaattgttttgcaaggtgctgcaaattcaatggaagcggtaagaggcttagagcaatttagtcatttgtggttattatttttatttgatcagaatttagaagccggatggcgctcaaccgttagaccgcctcgattgggtggaaatgaacgtattggtgtgtttgccagccgtgccacattccgcccaaatgggattggtatgtcagcggtcgaattaaaaggggttcgtcatgaaaacggcaatgtgatcattgaacttggtggtgtcgatttagttaatggcaccccaattgttgatataaagccttatatcccttattccgatagtttatcccaagcacaaggcggctttgcttcaagcacaccggatctaatgccagtgtgttttagcgaaacagcgctcaaccaactaccatcaaaaaacaaagcctattaccaaacagtgatcagcgaagtattatctcaagatcctcgccctgcttataggaaaggtaaacccgatcctaaacaatatgcagtacatttgtttgattttaatgttcacttctcaataactgaacaacaaataaccgttaatcagatcgagaaagttaatcaatag

SEQ ID NO: 118335 - protein, 233 aa, Photobacterium sp. SKA34
MSYNIEPIGIIHSPYKEKFAVPRQPGLVPSARSEIVLQGAANSMEAVRGLEQFSHLWLLFLFDQNLEAGWRSTVRPPRLGGNERIGVFASRATFRPNGIGMSAVELKGVRHENGNVIIELGGVDLVNGTPIVDIKPYIPYSDSLSQAQGGFASSTPDLMPVCFSETALNQLPSKNKAYYQTVISEVLSQDPRPAYRKGKPDPKQYAVHLFDFNVHFSITEQQITVNQIEKVNQ

SEQ ID NO: 118336 - DNA, 714 bp, Oceanospirillum sp. MED92
  CDS (1)..(714): transl_table=11
atgaacaactcgttccaatttaatgcaattgccactattcaaagcccttataaagaaaaatttggtattccccggcaaccaggcctggctaaaagcctgaactcccggatagttttcctaccagaatacacacgaccagaaattgtcagaggtctggaaggttgtagccatatatgggtgttgtttatttttagtgaatgcattgataaaggctggaccccaacagtaagacctccccggctcggaggtaataagcgtatgggggttttctctacacgttcacctttccggcccaaccccatagggctttcacccgttgaacttatcagcattgaatcaggcaatgggaaacttgagctcgtcatatcaggtgcggatttacttgacggaacacctatcgtcgatattaagccgtacctaccctattcggaccagataccagaggctgtatttgagttagctaccgaaataaccaccttggatcgggacgttttctattcagaacaagccctgcaagcgatcgccaggtccgaagaaaagttcaaccaacccgtaaggcagcagatcaacgagcttctcaattgcgatcctcgccctgcctataaaaaggacgatgaagaaaaaatttatggagtacgtctgtatgatatgaatattcggttcagtatctctgcaactgatattcgtgttttacaaattgagcaagtcgactaa

SEQ ID NO: 118337 - protein, 237 aa, Oceanospirillum sp. MED92
MNNSFQFNAIATIQSPYKEKFGIPRQPGLAKSLNSRIVFLPEYTRPEIVRGLEGCSHIWVLFIFSECIDKGWTPTVRPPRLGGNKRMGVFSTRSPFRPNPIGLSPVELISIESGNGKLELVISGADLLDGTPIVDIKPYLPYSDQIPEAVFELATEITTLDRDVFYSEQALQAIARSEEKFNQPVRQQINELLNCDPRPAYKKDDEEKIYGVRLYDMNIRFSISATDIRVLQIEQVD

SEQ ID NO: 118338 - DNA, 702 bp, Oceanobacter sp. RED65
  CDS (1)..(702): transl_table=11
atgaaaatcgaattacaacccattggctatattaacagcccctaccacgagaagttcgctacgccccgccaacccggattggtgtcacaagcacaaggctatgttgagctcgtgtcaccatacaatcaggccgattcggtagccggattagaaacatgctcacatatttggatagagtttgtgtttcacgaagtaatgaaccaagggtggaaacccaaagtaagaccaccgcgcttgggcggcaatgaaaaaatgggcgtattcgccacacgctcgactcatcgtcccaatcccattggcctatctgtcgtaaaactcgatcgtattgatatcaataacggcgtgaggttatggatcagcggattggacttaatcgacggcacgccggttgtcgatatcaaaccctatgtgccctatagcgattgcttgcctgatgctcaatatccctttgctcaagacaagccgcctgctattgatgttatatttagccaagcctgcgaaacgcggttgaataatcaaccacagctaaaaacgtttttattacaagtactagagcaagatcctagacctgcgtttcataagtttgaccaagaacgcgaatacggcgcggcattgatgcaacacaatgtaaagtggcgttatcaaaaagatgactcgggcaatatttctctatacgttgaatctattacgccgcttgcctga

SEQ ID NO: 118339 - protein, 233 aa, Oceanobacter sp. RED65
MKIELQPIGYINSPYHEKFATPRQPGLVSQAQGYVELVSPYNQADSVAGLETCSHIWIEFVFHEVMNQGWKPKVRPPRLGGNEKMGVFATRSTHRPNPIGLSVVKLDRIDINNGVRLWISGLDLIDGTPVVDIKPYVPYSDCLPDAQYPFAQDKPPAIDVIFSQACETRLNNQPQLKTFLLQVLEQDPRPAFHKFDQEREYGAALMQHNVKWRYQKDDSGNISLYVESITPLA

SEQ ID NO: 118340 - DNA, 702 bp, Desulfitobacterium hafniense DCB-2
  CDS (1)..(702): transl_table=11
atgtccaaagaactaaacatcatcgcccgcattcgcacggattttccgaccaagtttggaattccccggcaaagcggcctgattgatgacctgaaagcagcggtcgtcttcgagccggaataccgcaatgccgacgctctgcggggtttggaagggttttcccatatctggctcatctgggagttttccgccgccctgcgtgacacctggtcgcccacggtgcgcccgccgcggctgggggggaacaaacgcatgggtgtctttgccacccgctcccccttccggcctaaccccctgggactctcttccgtccgcctggacagtattgaacttgatccggagctggggccgattctccatgtatcaggagccgatctcctggatcagacgcccatcttcgatattaagccctaccttccttatacggactgtcacccggaggcgacagggggattcatcgagcctctcgtcgaccatgaattggtggtggatttccctgaacaatggctgaacagcattccgccccagcggcgccaagccctggtaagggtactggcccatgatcccaggccctcctatcaaaaggacccccaacggatttacggcctcgaattcgccggattcgaaataaagtttacggtgctggataaggtgctgaccgtgtgtgaggtgaaacaaaccggaactcatcctgttccttaa

SEQ ID NO: 118341 - protein, 233 aa, Desulfitobacterium hafniense DCB-2
MSKELNIIARIRTDFPTKFGIPRQSGLIDDLKAAVVFEPEYRNADALRGLEGFSHIWLIWEFSAALRDTWSPTVRPPRLGGNKRMGVFATRSPFRPNPLGLSSVRLDSIELDPELGPILHVSGADLLDQTPIFDIKPYLPYTDCHPEATGGFIEPLVDHELVVDFPEQWLNSIPPQRRQALVRVLAHDPRPSYQKDPQRIYGLEFAGFEIKFTVLDKVLTVCEVKQTGTHPVP

SEQ ID NO: 118342 - DNA, 705 bp, Vibrio sp. Ex25
  CDS (1)..(705): transl_table=11
atgtccaccatgtattccattgaacccatcggcgtcattgagacaccgtacaaagaaaagtttgcagtaccgcgccagcctcgcttagtaccaacagcgaaagcacgcgtaaaactgttaggcgcagcgaatagccctgaagcagtgcgtgggctagaacagttctctcacgtttggctgttatttttgtttgatcaaaatctggaagcaggttggaagccaaccgtccgtccaccacgactgggcggcaatgaacgaataggtgtctttgcctcacgctcgactttccgcccaaacggaatcggaatgtcagccgttgaagtaaacggagtcactaagcaaggcgatcaaatctatcttgatttaggcagcgttgatctcgttgatgggacaccgattgtagatattaagccttatatcccctattcggattctatttcggaagcacaaggcggatacgcagaccaagaaccagaaaagtcacaagtcaccttttctactcaagcattagcaacgatagaaaatcgatccgatactgactatgtaagatcagtcattgaacaagttctggcccaagatcctcgtcctgcatacaagaaaagcaagccggacgacaaagaatatgcggtaaatttgttcgacttgaacgtaaagttcacagcaacaagcaacttaataacggttaccgctattgaaagcttttga

SEQ ID NO: 118343 - protein, 234 aa, Vibrio sp. Ex25
MSTMYSIEPIGVIETPYKEKFAVPRQPRLVPTAKARVKLLGAANSPEAVRGLEQFSHVWLLFLFDQNLEAGWKPTVRPPRLGGNERIGVFASRSTFRPNGIGMSAVEVNGVTKQGDQIYLDLGSVDLVDGTPIVDIKPYIPYSDSISEAQGGYADQEPEKSQVTFSTQALATIENRSDTDYVRSVIEQVLAQDPRPAYKKSKPDDKEYAVNLFDLNVKFTATSNLITVTAIESF

SEQ ID NO: 118344 - DNA, 705 bp, Alteromonadales bacterium TW-7
  CDS (1)..(705): transl_table=11
atgagcgactacagcatttcggccgttggccacatacaatctccttataaacaaaagtttgccataccaagacaacctcgtttagtacctgaagccaaagcaaaacttatttttgcgcctgattttaaccgcgaagaatttgtacgcggtattgatgaatttacccacatttggttattgtttcgctttcatgaaaccgcagataaaggctactcgcccatggtacgccctcctcgcttaggcggtaatgaacgcaaaggtgtatttgctactcgtgctacttttagaccaaatgccattggtatgagtgcagtaaagcttgagggtatagaatataaaaatggccaactcagtttattacttgccggaatagacctgcttgatggtacgcccatcattgatataaaaccctacttgccttattcagatgccatgcttgacgcaagtgctggctttgcagatacacgcccagaaacacaaatgagcgtagagtttacccccgaagtgactttattcattgagcaacaaactcaataccctgatttattaaactttattagtaatgttttaaaacaagatccacgccctgcttacaaaaaacaaaaagacggcgagcagagctatggaatgacattgtatgattacaatatacgctggcaagttaatggcgagcacaacctagtaacaagtatagaaaaaagctaa

SEQ ID NO: 118345 - protein, 234 aa, Alteromonadales bacterium TW-7
MSDYSISAVGHIQSPYKQKFAIPRQPRLVPEAKAKLIFAPDFNREEFVRGIDEFTHIWLLFRFHETADKGYSPMVRPPRLGGNERKGVFATRATFRPNAIGMSAVKLEGIEYKNGQLSLLLAGIDLLDGTPIIDIKPYLPYSDAMLDASAGFADTRPETQMSVEFTPEVTLFIEQQTQYPDLLNFISNVLKQDPRPAYKKQKDGEQSYGMTLYDYNIRWQVNGEHNLVTSIEKS

SEQ ID NO: 118346 - DNA, 1050 bp, Ostreococcus tauri
  CDS (1)..(1050)
atggcgcgtcaacgcggcgtcgatcgacgagacggcgtcctcgcatttgtcatcgccgcgctcgctatcatccacacgcgcatcgtcacgaaacttcgcaatgcgctcgatgaacatgagcgagagaagcgacggctccagagcatcctgcgcgtgcgggacgcgccgcgcgcgcacggtgacggcctgttcgaaccaataggtgtcgcgcgatcgtcgttcagtcgacgaaacgggacgccacgccaaggcggggctttggttccgctcgcgaggtgtgagatcaagctcgaggcgaagctcccgcgagcgctcttggagggcctggaggagtactcgcacgcgtgggtgatttacgtctttcacgccaacacgaatctgacgggaacgagagcaggaggggcggcaaaggggaaggtttcggtgccacgactcgacggtggacgcgtcggggcgctggcgacgcgaacgccgcacaggccggtgccggtgggactttcggtgggaactgttgagcgtgtggacaccgagcgaggcgtcgtggttttgggggggatggatttggtcgatggcacgcccgttttggatattaagccgtacgtgccattttgcgattctatcgacggtgcgaaggcgccgaactgggtcgggagggaggcggttggaaaggatgagccgctgaaaattgagcgcgttgatttcgccgagcgggcatccgcgccgctctcaagctcgttcgttcggagctcgtcggcaaaagctttatattcgggggtcgatgcgttcaaatcattcgtcaaggaggtattgtcgtacgacattcgatcgattcgcgagcgcaacgcgccgccagagaagcgaaaattcgatacgtatcgagtcatcctctgcgatgtcgaggtcgagtatacaatcaccgatcgcgtggttgaggtcataggcgccacggctattcctcatgaagttttcgacgatttcgaacgcgcgaaagccgagattgaggcgcgagaggcgcttggtgagcttccgaagagaagggcagcaaagtag

SEQ ID NO: 118347 - protein, 349 aa, Ostreococcus tauri
MARQRGVDRRDGVLAFVIAALAIIHTRIVTKLRNALDEHEREKRRLQSILRVRDAPRAHGDGLFEPIGVARSSFSRRNGTPRQGGALVPLARCEIKLEAKLPRALLEGLEEYSHAWVIYVFHANTNLTGTRAGGAAKGKVSVPRLDGGRVGALATRTPHRPVPVGLSVGTVERVDTERGVVVLGGMDLVDGTPVLDIKPYVPFCDSIDGAKAPNWVGREAVGKDEPLKIERVDFAERASAPLSSSFVRSSSAKALYSGVDAFKSFVKEVLSYDIRSIRERNAPPEKRKFDTYRVILCDVEVEYTITDRVVEVIGATAIPHEVFDDFERAKAEIEAREALGELPKRRAAK

SEQ ID NO: 118348 - DNA, 1062 bp, Ostreococcus tauri
  CDS (1)..(1062)
atgtggttcgcgttcgacgccgtcgcgccctcgatcgcgctgtgcgtcgtcgccgcgatcgcgtacgtcctgggcgcgcggtcgacgcgcgcgacggcgctagcgcgggcgcgcgcgagcgagcgcgcgggacggacgcgcgcggagaaacgtttgcgagaggtctcgttagagctcgagcgcgctcggaggtgcgcgcgacggacgagggaggacgcgcggacgggatcgagcgatgcgtcgtacgacgcgcgtccgatagggacgttcgcgtcggcgttcgatcgtcgaacggggacgccgcgtcaggggaacgtcgtgccgctcgcgcgaggacgagtcgagctcgagcgcgagtgggtctcgggcgcggcgctggatgggttagaggagttcacgcactgttggttgatttacgtatttcacgcgaacacggatctgggaaggaaaggggtgggagaggtcgtggacgatgggcgcggacgcgggcagcggcggacgacggctcgggcgaagatacgcgtgccgagactaaacggagagaagcgagggtgtctggcgacgcgaacgcctcatcggccgtgtaacagttgcccgattggtctcagtttggtggagatccttcgcgtgcgcgggacgtcgctggacgtggcgggggcggatttggttgacgggacgccgatattagacatcaagccgtacgttccatacagcgattgtattccgagcgcgcgagcaccgaactgggtaggaaacgccctggaagatggcgatggcccactgaccgtggacgaggtaagtttcacggctgttggcgaggcggcaatccgggcggcttggcacgcgcgcgaaaagtcgtcgatgtacgaaagtgccgacgagttcattgcgtttgtcactcaagtactgagccgggacattcgatcatatcatcaacgcttgaaagcttgcagtaatagccagcgtgaagtcgactggcgcgtcagtctcgatggtattgtcgtaatttacagacaagcgggtaaagcaattgaagtcacgggagtcggagaatccacatga

SEQ ID NO: 118349 - protein, 353 aa, Ostreococcus tauri
MWFAFDAVAPSIALCVVAAIAYVLGARSTRATALARARASERAGRTRAEKRLREVSLELERARRCARRTREDARTGSSDASYDARPIGTFASAFDRRTGTPRQGNVVPLARGRVELEREWVSGAALDGLEEFTHCWLIYVFHANTDLGRKGVGEVVDDGRGRGQRRTTARAKIRVPRLNGEKRGCLATRTPHRPCNSCPIGLSLVEILRVRGTSLDVAGADLVDGTPILDIKPYVPYSDCIPSARAPNWVGNALEDGDGPLTVDEVSFTAVGEAAIRAAWHAREKSSMYESADEFIAFVTQVLSRDIRSYHQRLKACSNSQREVDWRVSLDGIVVIYRQAGKAIEVTGVGEST

SEQ ID NO: 118350 - DNA, 720 bp, Haemophilus influenzae
  CDS (1)..(720): transl_table=11
atgaatgatttaactttatcgcctgtcgccattatccacacaccttataaagaaaaattctccgtaccacgccaacctaatttagttgaagacggagtaggcattgtagagctcttaccgccgtataattcgcctgaaaccgtacgaggattggaacaattcagtcacctttggttaatttttcagttcgaccaaatccaacaaggaaaatggcaacccaccgtacgccctccgcggttaggcggtaatcaacgcgttggcgtgtttgcttcacgcgcaacgcaccgcccaaatcctctcggtttatccaaagtcaaattacgtcaagtagaatgcatcaatggtaacgtttttctccatttaggtgcggtggatttagtggatggcacgcccattttcgatatcaaaccctatattgcctatgcggatagtgagccaaatgcgcaatcaagctttgcccaagaaaaaccaccagcaaaactaacagttgaatttaccgaacaagccaaaagtgcggtaaaaaaacgagaagaaaaacgaccgcacttaagtcgtttcattcgccaagtgctagagcaagatccgcgcccagcctatcaacaaggtaaaccgagtgatcgtatttatggaacgagtttgtacgaatttaatgtgaaatggcgaattaaagcgagtacgcttgattgtgtagaagtaattgaaatagaaaaagacaaatag

SEQ ID NO: 118351 - protein, 239 aa, Haemophilus influenzae
MNDLTLSPVAIIHTPYKEKFSVPRQPNLVEDGVGIVELLPPYNSPETVRGLEQFSHLWLIFQFDQIQQGKWQPTVRPPRLGGNQRVGVFASRATHRPNPLGLSKVKLRQVECINGNVFLHLGAVDLVDGTPIFDIKPYIAYADSEPNAQSSFAQEKPPAKLTVEFTEQAKSAVKKREEKRPHLSRFIRQVLEQDPRPAYQQGKPSDRIYGTSLYEFNVKWRIKASTLDCVEVIEIEKDK

SEQ ID NO: 118352 - DNA, 693 bp, Pseudomonas putida
  CDS (1)..(693): transl_table=11
atgcagcatacggttaccccgatcggcatcatccgctcctgtttcaaggagaagttcgccatcccgcgccagccgcaactggcgcccgccgcacgcggtgtgctcgagctgctgccgccgttcgaccagggcgatgcggtcgaggggctggaacaggtcagccatgtctggctgctgttcctgttccaccaggcactggaagacaaacctcgcctgaaggtgcggccaccgcgcctgggtggcaacaagagcatgggtgtgttcgccacccgcgccactcaccggcccaatggcatcggccagtcggtggtgcgcctggaaggcgtggagccagggcgcctgttgctgtctggtatcgacctgctcgacggtacgccggtgctggacatcaaaccgtatgtgccgtacgccgatagcatccctggcgccagcaaccagatggccagccaagcgcctgccgcgatcgccgtgcagtggggcgacaacgccctgccccaggcccgcgaacatgcactgcgcctgggtgaaccgctggtggagctgatcgagcagtgcctggcgcaggacccacggccggcctaccaggtgccaccggccgagcgggtgtatggggtgaagttctgggatgtgcaggtaaggtggcattacccgcagccggacgtgatccgggtgctggaggtggtgaaagattga

SEQ ID NO: 118353 - protein, 230 aa, Pseudomonas putida
MQHTVTPIGIIRSCFKEKFAIPRQPQLAPAARGVLELLPPFDQGDAVEGLEQVSHVWLLFLFHQALEDKPRLKVRPPRLGGNKSMGVFATRATHRPNGIGQSVVRLEGVEPGRLLLSGIDLLDGTPVLDIKPYVPYADSIPGASNQMASQAPAAIAVQWGDNALPQAREHALRLGEPLVELIEQCLAQDPRPAYQVPPAERVYGVKFWDVQVRWHYPQPDVIRVLEVVKD

SEQ ID NO: 118354 - DNA, 696 bp, Pseudomonas aeruginosa
  CDS (1)..(696): transl_table=11
atgacccacagcgtttctcccatcggctacatccgctcctgcttcatggagaagttcgccatcccgcgccagccgctgctcgcgccggcggcgcgggggaccctggaactgctgccgccgttcgaccaggtggaagcgctggaaggcctggagcaggtcagccatgtctggctgctgttcctcttccaccaggccctggaagacaagccgcgactgaaggtgcgcccgccgcgcctgggcggcaaccgctcgctgggagtcttcgccacccgcgccacccatcggccgaacggcatcggccagtcggtggtgcgcctggagggcttcgaagcggggcgcctgtggctgtccggaatcgacctgctcgacggcaccccggtactcgatatcaagccctacgtaccctacgccgacgccgtggccgacgcccgcaacggcatcgccgacgcgccgccgccgggcatcgccgtggagtggagcgagcaggcgcggcgccaggcccatgagcacggccagcggttgcggcagccggtggccgagctgatcgagcaatgcctggcgcaggacccacgcccggcctaccagaagccagagcccgggcgccgctacggggtgcgcctgtgggacctcgacgtgcattggcactacccgcgcccggacctgatccgcgtgctggacgtcgccggcggcgattga

SEQ ID NO: 118355 - protein, 231 aa, Pseudomonas aeruginosa
MTHSVSPIGYIRSCFMEKFAIPRQPLLAPAARGTLELLPPFDQVEALEGLEQVSHVWLLFLFHQALEDKPRLKVRPPRLGGNRSLGVFATRATHRPNGIGQSVVRLEGFEAGRLWLSGIDLLDGTPVLDIKPYVPYADAVADARNGIADAPPPGIAVEWSEQARRQAHEHGQRLRQPVAELIEQCLAQDPRPAYQKPEPGRRYGVRLWDLDVHWHYPRPDLIRVLDVAGGD

SEQ ID NO: 118356 - DNA, 720 bp, Haemophilus influenzae
  CDS (1)..(720): transl_table=11
atgaatgatttaaccttatcgcctatcgccattatccacacaccttataaagaaaaattctccgtaccacgccaacctaatttagttgaagacggtgtaggcattgtagaactcttaccgccttataattcgcctgaagccgtgagaggattggaacaattcagtcatctttggttaatttttcagttcgaccaaatccaacaaggaaaatggcaacccaccgtacgcccacctcggttaggcggtaatcaacgagttggtgtatttgcttcacgcgcaacgcaccgcccaaatcctcttggtttatccaaagtcgaattacgtcaagtagaatgcatcaacggtaacatttttctccatttaggtgcggtggatttagtggatggcacgcccattttcgatatcaaaccctatattgcctatgcggatagtgagccaaatgcgcaatcgagctttgcccaagaaaaactaccagtaaaactgactgttgaatttaccgagcaagccaaaagtgcggtaaaaaaacgagaagaaaaacgaccgcacttaagtcgttttattcgccaagtgctagagcaagatcctcgcccagcctatcaacaaggtaaaccgagtgatcgtatttatggtatgagtttgtatgaatttaatgtgaaatggcgaattaaagcgggtacggtaaattgtgtagaagtgattgaaatagaaaaagacaaatag

SEQ ID NO: 118357 - protein, 239 aa, Haemophilus influenzae
MNDLTLSPIAIIHTPYKEKFSVPRQPNLVEDGVGIVELLPPYNSPEAVRGLEQFSHLWLIFQFDQIQQGKWQPTVRPPRLGGNQRVGVFASRATHRPNPLGLSKVELRQVECINGNIFLHLGAVDLVDGTPIFDIKPYIAYADSEPNAQSSFAQEKLPVKLTVEFTEQAKSAVKKREEKRPHLSRFIRQVLEQDPRPAYQQGKPSDRIYGMSLYEFNVKWRIKAGTVNCVEVIEIEKDK

SEQ ID NO: 118358 - DNA, 1185 bp, Glycine max
  CDS (1)..(1185)
atgcgcggcaacatttgggaaacaaaatggttgacagtgagcataaccctaacactcaccgccgtttccatctctgcgtacgtattaaagagaaaatggaatcatctgaactccaaaattgaggagcttgaggcatctctcaagtctttctcagacaattgcgcctccgaaagacaaggccgaattagagctcaacaggccttgagaaaagaagtaacacagtcgcaacctaattctcaaaagcttaacctcacttcttatcccatgatgccaattggtgtcgtccactcgtgcttctccaccaggaacgggacgccgaggcaaccgttactcgtcccacttgctagggcgtgtttggttttcaacacaactcgcgttccaccggcgtctctggagggtttggaggaatattctcattgctggattctctatgtgtttcatttaaatacggatctcgataagctctggaagcacccgtctaaatcagggttcaaggccaaggtgagggttccaagactgaagggtggaagaaagggagtgtttgccacacgatccccacatcgtccatgccccattggcctcacagttgcaaaggtagaggctgtacagggaaatatgattttgctctctggtgtggatctggttgatggaactcctgtgctcgatatcaagccttacctaccatattgtgacaacatccaagaagctacagtaccaaattggttgatggaggataacttgctttctgtagcttctgttagcttttcggagcacttcacttcagcactcaaaaatatctggataatggtggaaaagaagtcactttatgcatcaccaggcgagctccaaagcttgataaagcaggttctttcatgggatattcggtcattgagccagcgaaatcggccacatgatactctacttaagaaagaaaacgatgaactattaggtaatactgccgatgtagatgagcaccaagatgaaacaactttagcccatgaaagagagcagaatgctttaaattccaatgaaataatttatcacctgattttggagggacttgatgtctcttacagaattgatcatgatggttatgttattgtagaaaagatatcaacttctgatgtccaggacaataagcctaatttctgtaattacttgacatggaaagacaagctgcagtga

SEQ ID NO: 118359 - protein, 394 aa, Glycine max
MRGNIWETKWLTVSITLTLTAVSISAYVLKRKWNHLNSKIEELEASLKSFSDNCASERQGRIRAQQALRKEVTQSQPNSQKLNLTSYPMMPIGVVHSCFSTRNGTPRQPLLVPLARACLVFNTTRVPPASLEGLEEYSHCWILYVFHLNTDLDKLWKHPSKSGFKAKVRVPRLKGGRKGVFATRSPHRPCPIGLTVAKVEAVQGNMILLSGVDLVDGTPVLDIKPYLPYCDNIQEATVPNWLMEDNLLSVASVSFSEHFTSALKNIWIMVEKKSLYASPGELQSLIKQVLSWDIRSLSQRNRPHDTLLKKENDELLGNTADVDEHQDETTLAHEREQNALNSNEIIYHLILEGLDVSYRIDHDGYVIVEKISTSDVQDNKPNFCNYLTWKDKLQ

SEQ ID NO: 118360 - DNA, 1185 bp, Glycine max
  CDS (1)..(1185)
atgcgcggcaacatttgggaaacaaaatggttgacagtgagcataaccctaacactcaccgccgtttccatctctgcgtacgtattaaagagaaaatggaatcatctgaactccaaaattgaggagcttgaggcatctctcaagtctttctcagacaattgcgcctccgaaagacaaggccgaattagagctcaacaggccttgagaaaagaagtaacacagtcgcaacctaattctcaaaagcttaacctcacttcttatcccatgatgccaattggtgtcgtccactcgtgcttctccaccaggaacgggacgccgaggcaaccgttactcgtcccacttgctagggcgtgtttggttttcaacacaactcgcgttccaccggcgtctctggagggtttggaggaatattctcattgctggattctctatgtgtttcatttaaatacggatctcgataagctctggaagcacccgtctaaatcagggttcaaggccaaggtgagggttccaagactgaagggtggaagaaagggagtgtttgccacacgatccccacatcgtccatgccccattggcctcacagttgcaaaggtagaggctgtacagggaaatatgattttgctctctggtgtggatctggttgatggaactcctgtgctcgatatcaagccttacctaccatattgtgacaacatccaagaagctacagtaccaaattggttgatggaggataacttgctttctgtagcttctgttagcttttcggagcactttacttcagcactcgaaaatatctggataatggtggaaaagaagtcactttatgcatcaccaggcgagctccaaagcttgataaagcaggttctttcatgggatattcggtcattgagccagcgaaatcggccacatgatactctacttaagaaagaaaacgatgaactattaggtaatactgccgatgtagatgagcaccaagatgaaacaactttagcccatgaaagagagcagaatgctttaaattccaatgaaataatttatcacctgattttggagggacttgatgtctcttacagaattgatcatgatggttatgttattgtagaaaagatatcaacttctgatgtccaggacaataagcctaatttctgtaattacttgacatggaaagacaagctgcagtga

SEQ ID NO: 118361 - protein, 394 aa, Glycine max
MRGNIWETKWLTVSITLTLTAVSISAYVLKRKWNHLNSKIEELEASLKSFSDNCASERQGRIRAQQALRKEVTQSQPNSQKLNLTSYPMMPIGVVHSCFSTRNGTPRQPLLVPLARACLVFNTTRVPPASLEGLEEYSHCWILYVFHLNTDLDKLWKHPSKSGFKAKVRVPRLKGGRKGVFATRSPHRPCPIGLTVAKVEAVQGNMILLSGVDLVDGTPVLDIKPYLPYCDNIQEATVPNWLMEDNLLSVASVSFSEHFTSALENIWIMVEKKSLYASPGELQSLIKQVLSWDIRSLSQRNRPHDTLLKKENDELLGNTADVDEHQDETTLAHEREQNALNSNEIIYHLILEGLDVSYRIDHDGYVIVEKISTSDVQDNKPNFCNYLTWKDKLQ

SEQ ID NO: 118362 - DNA, 1164 bp, Zea mays
  CDS (1)..(1164)
atggcgccgccgcgaagcctcgccggcgccgccatagctgccacagccgcagccatcatcctctcatgcttgttctacaggcgcaaatgcgctcgtctggccgcgcgggtccgcgagttggaggcgtcactggcggtcactgcagagaaggccgccgccgagcgccgcggcagagtgcgggcccagcagtcactgagggctctgagtcagctggagcctggttccgacgaagcgaggccgaccaaggccgccgcctcagcatcttacccgctggtgccgattggtactgtcgagtcctgcttctccactaggaacggtacaccaaggcagcctttggtagttacattagccagggcaactttggtgcttgatccagcccgagtcccagcagcagcgctggaggggctagctagttactcacattgctggatcctttatgtttttcatctgaacactgatcttgataaactgtggaaagatcctgctaggtctaagctaaaagcaaaggtaagggtaccgagattgaaagggggcaagatgggggttttggcaactagatcgccacatcggcccaatccaatcggactcagcgtagcaaaggtggaggcggtgaatggacatactcttttgctttctggagtagatttggttgatggcacgccagtccttgatattaaaccatacctgccatattctgacagtgttaaaggtgcagctgttcccagttggttagaggttgacggtgcgttagcggtggagtcagtccatttttccgaacacttcatttctgcgctctccacctgctggatgcatgtacagcagatgtcgctgtatgcttcagcagacgagttccaggatctgatcaagcaggccctttcctgggacatcaggtcgatatcacagcggaaccgtccccatcaagtgagcgtggaagctgatgccaacggccactgtggcgaagacactgatgatgaccaccaccacagggacacaggtcgctacggtgtggtttaccacttacatcttgaaggcatcgatgtgtcgtataggatcgatcagggctccaacattttcgtcgaggacgccacccttcttccagacgccgtccagaaacggcatggttatttggcgtggagggacaaacttggcagcagcgttttgtag

SEQ ID NO: 118363 - protein, 387 aa, Zea mays
MAPPRSLAGAAIAATAAAIILSCLFYRRKCARLAARVRELEASLAVTAEKAAAERRGRVRAQQSLRALSQLEPGSDEARPTKAAASASYPLVPIGTVESCFSTRNGTPRQPLVVTLARATLVLDPARVPAAALEGLASYSHCWILYVFHLNTDLDKLWKDPARSKLKAKVRVPRLKGGKMGVLATRSPHRPNPIGLSVAKVEAVNGHTLLLSGVDLVDGTPVLDIKPYLPYSDSVKGAAVPSWLEVDGALAVESVHFSEHFISALSTCWMHVQQMSLYASADEFQDLIKQALSWDIRSISQRNRPHQVSVEADANGHCGEDTDDDHHHRDTGRYGVVYHLHLEGIDVSYRIDQGSNIFVEDATLLPDAVQKRHGYLAWRDKLGSSVL

SEQ ID NO: 118364 - DNA, 23 bp, Artificial sequence
  primer
atgagcagtttccagttcgagca

SEQ ID NO: 118365 - DNA, 22 bp, Artificial sequence
  primer
ttaacgcggttccagcgcaaag

SEQ ID NO: 118366 - protein, 382 aa, Artificial sequence
  consensus sequence
  Variant (2)..(10): Xaa in position 2 to 10 is any amino acid
  Variant (13)..(14): Xaa in position 13 to 14 is any amino acid
  Variant (19)..(19): Xaa in position 19 is any amino acid
  Variant (20)..(20): Xaa in position 20 is any or no amino acid
  Variant (22)..(29): Xaa in position 22 to 29 is any amino acid
  Variant (30)..(30): Xaa in position 30 is any or no amino acid
  Variant (32)..(41): Xaa in position 32 to 41 is any amino acid
  Variant (42)..(44): Xaa in position 42 to 44 is any or no amino acid
  Variant (48)..(49): Xaa in position 48 to 49 is any amino acid
  Variant (52)..(52): Xaa in position 52 is any amino acid
  Variant (54)..(55): Xaa in position 54 to 55 is any amino acid
  Variant (57)..(57): Xaa in position 57 is any amino acid
  Variant (59)..(67): Xaa in position 59 to 67 is any amino acid
  Variant (68)..(89): Xaa in position 68 to 89 is any or no amino acid
  Variant (98)..(100): Xaa in position 98 to 100 is any amino acid
  Variant (101)..(101): Xaa in position 101 is any or no amino acid
  Variant (106)..(106): Xaa in position 106 is any amino acid
  Variant (108)..(110): Xaa in position 108 to 110 is any amino acid
  Variant (114)..(115): Xaa in position 114 to 115 is any amino acid
  Variant (117)..(117): Xaa in position 117 is any amino acid
  Variant (119)..(119): Xaa in position 119 is any amino acid
  Variant (121)..(121): Xaa in position 121 is any amino acid
  Variant (123)..(129): Xaa in position 123 to 129 is any amino acid
  Variant (130)..(134): Xaa in position 130 to 134 is any or no amino acid
  Variant (136)..(140): Xaa in position 136 to 140 is any amino acid
  Variant (143)..(143): Xaa in position 143 is any amino acid
  Variant (148)..(149): Xaa in position 148 to 149 is any amino acid
  Variant (155)..(162): Xaa in position 155 to 162 is any amino acid
  Variant (163)..(236): Xaa in position 163 to 236 is any or no amino acid
  Variant (238)..(243): Xaa in position 238 to 243 is any amino acid
  Variant (244)..(252): Xaa in position 244 to 252 is any or no amino acid
  Variant (254)..(257): Xaa in position 254 to 257 is any amino acid
  Variant (258)..(258): Xaa in position 258 is any or no amino acid
  Variant (260)..(276): Xaa in position 260 to 276 is any amino acid
  Variant (277)..(311): Xaa in position 277 to 311 is any or no amino acid
  Variant (313)..(315): Xaa in position 313 to 315 is any amino acid
  Variant (317)..(318): Xaa in position 317 to 318 is any amino acid
  Variant (323)..(323): Xaa in position 323 is any amino acid
  Variant (325)..(331): Xaa in position 325 to 331 is any amino acid
  Variant (332)..(333): Xaa in position 332 to 333 is any or no amino acid
  Variant (335)..(352): Xaa in position 335 to 352 is any amino acid
  Variant (353)..(381): Xaa in position 353 to 381 is any or no amino acid
IXXXXXXXXXKFXXPRQPXXLXXXXXXXXXLXXXXXXXXXXXXXGLEXXSHXWXXFXFXXXXXXXXXXXXXXXXXXXXXXXXXXXXXXXVRPPRLGGXXXXGVFAXRXXXRPNXXGXSXVXLXXXXXXXXXXXXLXXXXXDLXDGTPXXDIKPYXXXXXXXXXXXXXXXXXXXXXXXXXXXXXXXXXXXXXXXXXXXXXXXXXXXXXXXXXXXXXXXXXXXXXXXXXXXXXXXXXXAXXXXXXXXXXXXXXXPXXXXXVXXXXXXXXXXXXXXXXXXXXXXXXXXXXXXXXXXXXXXXXXXXXXXXXXXXXIXXXLXXDPRPXYXXXXXXXXXYXXXXXXXXXXXXXXXXXXXXXXXXXXXXXXXXXXXXXXXXXXXXXXXV

SEQ ID NO: 118367 - protein, 21 aa, Artificial sequence
  protein pattern
  Variant (5)..(5): Xaa in position 5 is Ser or Thr
  Variant (7)..(7): Xaa in position 7 is Ala or Ser
  Variant (8)..(8): Xaa in position 8 is Pro or Thr
  Variant (9)..(9): Xaa in position 9 is any amino acid
  Variant (13)..(13): Xaa in position 13 is any amino acid
  Variant (14)..(14): Xaa in position 14 is Ile, Leu, Met or Val
  Variant (16)..(16): Xaa in position 16 is any amino acid
  Variant (18)..(18): Xaa in position 18 is any amino acid
  Variant (19)..(19): Xaa in position 19 is Ile, Leu or Val
  Variant (20)..(20): Xaa in position 20 is any amino acid
  Variant (21)..(21): Xaa in position 21 is Ile, Leu, Met or Val
GVFAXRXXXRPNXXGXSXXXX

SEQ ID NO: 118368 - protein, 27 aa, Artificial sequence
  protein pattern
  Variant (2)..(2): Xaa in position 2 is any amino acid
  Variant (3)..(3): Xaa in position 3 is any or no amino acid
  Variant (6)..(6): Xaa in position 6 is Ile, Leu or Val
  Variant (8)..(8): Xaa in position 8 is Gly or Gln
  Variant (11)..(11): Xaa in position 11 is Ile, Leu or Val
  Variant (12)..(12): Xaa in position 12 is Phe, Ile, Leu or Val
  Variant (14)..(14): Xaa in position 14 is Ile or Val
  Variant (18)..(18): Xaa in position 18 is Ile, Leu or Val
  Variant (19)..(19): Xaa in position 19 is Ala or Pro
  Variant (20)..(21): Xaa in position 20 to 21 is any amino acid
  Variant (22)..(22): Xaa in position 22 is Asp or Glu
  Variant (23)..(26): Xaa in position 23 to 26 is any amino acid
GXXDLXDXTPXXDXKPYXXXXXXXXXA

SEQ ID NO: 118369 - protein, 20 aa, Artificial sequence
  protein pattern
  Variant (2)..(2): Xaa in position 2 is Ala or Gly
  Variant (3)..(5): Xaa in position 3 to 5 is any amino acid
  Variant (6)..(6): Xaa in position 6 is Ser or Thr
  Variant (7)..(7): Xaa in position 7 is any amino acid
  Variant (8)..(8): Xaa in position 8 is Phe or Tyr
  Variant (9)..(10): Xaa in position 9 to 10 is any amino acid
  Variant (11)..(11): Xaa in position 11 is Lys or Arg
  Variant (12)..(12): Xaa in position 12 is any amino acid
  Variant (13)..(13): Xaa in position 13 is Ala, Gly or Ser
  Variant (14)..(14): Xaa in position 14 is any amino acid
  Variant (15)..(15): Xaa in position 15 is Ala or Pro
  Variant (18)..(18): Xaa in position 18 is Ala, Gly, Pro or Ser
  Variant (19)..(19): Xaa in position 19 is any amino acid
  Variant (20)..(20): Xaa in position 20 is Ile, Leu or Val
IXXXXXXXXXXXXXXRQXXX

SEQ ID NO: 118370 - protein, 8 aa, Artificial sequence
  protein pattern
VRPPRLGG

SEQ ID NO: 118371 - DNA, 735 bp, Escherichia coli
  CDS (1)..(735): transl_table=11
atgaattttgaaggaaaaatcgcactggtaaccggtgcaagccgcggaattggccgcgcaattgctgaaacgctcgcagcccgtggcgcgaaagttattggcactgcgaccagtgaaaatggcgctcaggcgatcagtgattatttaggtgccaacggcaaaggtctgatgttgaatgtgaccgacccggcatctatcgaatctgttctggaaaaaattcgcgcagaatttggtgaagtggatatcctggtcaataatgccggtatcactcgtgataacctgttaatgcgaatgaaagatgaagagtggaacgatattatcgaaaccaacctttcatctgttttccgtctgtcaaaagcggtaatgcgcgctatgatgaaaaagcgtcatggtcgtattatcactatcggttctgtggttggtaccatgggaaatggcggtcaggccaactacgctgcggcgaaagcgggcttgatcggcttcagtaaatcactggcgcgcgaagttgcgtcacgcggtattactgtaaacgttgttgctccgggctttattgaaacggacatgacacgtgcgctgagcgatgaccagcgtgcgggtatcctggcgcaggttcctgcgggtcgcctcggcggcgcacaggaaatcgccaacgcggttgcattcctggcatccgacgaagcagcttacatcacgggtgaaactttgcatgtgaacggcgggatgtacatggtctaa

SEQ ID NO: 118372 - protein, 244 aa, Escherichia coli
MNFEGKIALVTGASRGIGRAIAETLAARGAKVIGTATSENGAQAISDYLGANGKGLMLNVTDPASIESVLEKIRAEFGEVDILVNNAGITRDNLLMRMKDEEWNDIIETNLSSVFRLSKAVMRAMMKKRHGRIITIGSVVGTMGNGGQANYAAAKAGLIGFSKSLAREVASRGITVNVVAPGFIETDMTRALSDDQRAGILAQVPAGRLGGAQEIANAVAFLASDEAAYITGETLHVNGGMYMV

SEQ ID NO: 118373 - DNA, 729 bp, Haemophilus influenzae
  CDS (1)..(729): transl_table=11
atgcaaggtaaaattgctttagtgacaggatctacccgtggtatcggtcgtgcgattgcagaagaacttagttcaaaaggtgcatttgtaattggtacagcaacctctgaaaagggtgcagaggcgatctcggcttatttaggggataaaggtaaaggtttagttttaaacgtaacggataaagaatctatcgaaaccttacttgaacaaattaaaaatgattttggcgatattgatattctcgtgaataacgcaggtattactcgcgataatttattgatgcgtatgaaagatgaggaatggtttgatattatgcaaactaacttaacttcggtgtatcatctttctaaagccatgttacgttcaatgatgaaaaaacgttttggtcgtatcatcaatattggttcagtggttggttcaacgggtaatccaggacaaactaactattgtgcggcaaaagcgggtgtggttggtttttctaaatctttagcgaaagaagtagctgcacgtggtattactgtaaatgtggttgctcctggttttattgcaacagatatgacagaagtgcttacggatgaacaaaaagcggggatcttatctaatgttccagctggacgtttaggcgaagcaaaagacatagctaaagccgttgctttcttagcttctgatgatgcaggttatatcacgggaacaacgttacacgtgaatggtggcttatacttaagctaa

SEQ ID NO: 118374 - protein, 242 aa, Haemophilus influenzae
MQGKIALVTGSTRGIGRAIAEELSSKGAFVIGTATSEKGAEAISAYLGDKGKGLVLNVTDKESIETLLEQIKNDFGDIDILVNNAGITRDNLLMRMKDEEWFDIMQTNLTSVYHLSKAMLRSMMKKRFGRIINIGSVVGSTGNPGQTNYCAAKAGVVGFSKSLAKEVAARGITVNVVAPGFIATDMTEVLTDEQKAGILSNVPAGRLGEAKDIAKAVAFLASDDAGYITGTTLHVNGGLYLS

SEQ ID NO: 118375 - DNA, 735 bp, Photobacterium profundum SS9
  CDS (1)..(735): transl_table=11
atgagcctggaaggtaaagttgctctagttacgggtgcaagccgtggtattggtcgtgcaattgctgaaattttggttgagcgtggcgcaactgttattggcactgcaacgtctgaaagcggcgcagaagcaattagcgcatatttaggtgataaaggtaaaggtttagccctgaacgtgacttcacctgattccattgctgatacactaaagcagattaaagatcagttcggcgatattgatattttggtaaacaatgcgggtattactcgtgataacttgctaatgcgtatgaaagatgacgaatggcaagatattatggatactaacctaacatctgttttccgtctttctaaagcagtgctacgtgccatgatgaaaaaacgcaatggtcgtatcatcagcattggctctgttgtcggaatgatgggtaatgcaggtcagactaactatgcagcggcgaaggctggtttgattggtttcactaaatctctggcgcgtgaagtggcatctcgtggtattaccgtgaatgcggtagcaccaggttttattgaaacagatatgacaaaagccctgaatgatgagcaacgtgctgctacactagcaaatgttcctgctggtcgtttaggtgatccgcgtgaaattgcagcagcagttgcttttttagcttcagaagatgctgcttatgtaaccggtgaaacgttacatgttaacggcggcatgtacatgatttaa

SEQ ID NO: 118376 - protein, 244 aa, Photobacterium profundum SS9
MSLEGKVALVTGASRGIGRAIAEILVERGATVIGTATSESGAEAISAYLGDKGKGLALNVTSPDSIADTLKQIKDQFGDIDILVNNAGITRDNLLMRMKDDEWQDIMDTNLTSVFRLSKAVLRAMMKKRNGRIISIGSVVGMMGNAGQTNYAAAKAGLIGFTKSLAREVASRGITVNAVAPGFIETDMTKALNDEQRAATLANVPAGRLGDPREIAAAVAFLASEDAAYVTGETLHVNGGMYMI

SEQ ID NO: 118377 - DNA, 726 bp, Actinobacillus pleuropneumoniae serovar 1 str. 4074
  CDS (1)..(726): transl_table=11
atgcaaggtaaaatcgcattagttacgggtgcaactcgtggtattggtaaagctatcgcagaagaattagcggcaaaaggtgcaaccgtgattggtacggcaacatcggaaaaaggtgcggaaagcatttccgcatacttaggcgaacacggtaaaggtttagtattaaacgtaacggatgcagactctattgaagcggtattagcacaaatcaaagcggatttcggcgatatcgatattttagtaaacaacgcaggtattacccgtgacggtttattaatgcgtatgaaagaagacgattggttcgatatcattcaaaccaacttaacttccgtatatcgtttatctaaagcggtactgcgtccgatgatgaaaaaaggcggccgaatcgttactatcggttcggttgtcggctcaatgggtaaccctggtcaaaccaactactgtgcggcaaaagccggtttagtcggtttttccaaatcattagccaaagaagtggcttctcgcggtattacggtaaacgtggttgctccgggctttatcgcaaccgatatgacggacgaattaaacgaagatcaaaaacaagcgatcttaagccaaattccggtcggtcagttaggctctgcacaagatattgcgaaagcggtcgcattcttagccagtgatgatgcaaaatacatcaccggcgaaactatccacgtaaacggtggtttatatatgaactaa

SEQ ID NO: 118378 - protein, 241 aa, Actinobacillus pleuropneumoniae serovar 1 str. 4074
MQGKIALVTGATRGIGKAIAEELAAKGATVIGTATSEKGAESISAYLGEHGKGLVLNVTDADSIEAVLAQIKADFGDIDILVNNAGITRDGLLMRMKEDDWFDIIQTNLTSVYRLSKAVLRPMMKKGGRIVTIGSVVGSMGNPGQTNYCAAKAGLVGFSKSLAKEVASRGITVNVVAPGFIATDMTDELNEDQKQAILSQIPVGQLGSAQDIAKAVAFLASDDAKYITGETIHVNGGLYMN

SEQ ID NO: 118379 - DNA, 735 bp, Vibrio harveyi
  CDS (1)..(735): transl_table=11
atgaatctagaaggtaagatcgctctagtgacaggcgcaagccgtggcattggtcgtgcgattgctgaacttcttgttgaacgcggtgcaacggtaatcggtactgcgacttctgaaggcggcgcagcggcgatcagtgagtacctaggtgaaaacggtaaaggtctagcacttaacgtaactgacgttgagtctatcgaagcaacactaaaaaccatcaatgatgagtgtggtgcaatcgatattctagtaaacaacgctggtatcacgcgcgataacttgctaatgcgtatgaaagatgacgagtggaacgacatcatcaatacaaacctaacgccaatctaccgcatgtctaaagcggttctacgtggcatgatgaaaaaacgcgctggtcgcatcatcaacgtaggttctgttgttggtactatgggtaacgctggtcaaacaaactatgcagcagcaaaagcgggtgtgattggtttcactaaatcaatggctcgtgaagtggcttctcgtggtgtaacagtgaacacggttgctccaggtttcatcgaaactgacatgactaaggcgctaaatgacgaccaacgtgcagcaacgttgtcgaacgtgccagcaggtcgtctaggtgaccctcgtgaaattgcatcagcagttgtattccttgcttcacctgaagcggcttacattactggtgaaactttgcatgtaaatggtggcatgtacatggtttaa

SEQ ID NO: 118380 - protein, 244 aa, Vibrio harveyi
MNLEGKIALVTGASRGIGRAIAELLVERGATVIGTATSEGGAAAISEYLGENGKGLALNVTDVESIEATLKTINDECGAIDILVNNAGITRDNLLMRMKDDEWNDIINTNLTPIYRMSKAVLRGMMKKRAGRIINVGSVVGTMGNAGQTNYAAAKAGVIGFTKSMAREVASRGVTVNTVAPGFIETDMTKALNDDQRAATLSNVPAGRLGDPREIASAVVFLASPEAAYITGETLHVNGGMYMV

SEQ ID NO: 118381 - DNA, 747 bp, Proteus mirabilis
  CDS (1)..(747): transl_table=11
ctgagggatctcatgggatttgacggaaaaatagcgctagttactggtgcaagccgtggtattggccgtgcgattgcagaaaagctaatagcatgtggtgctaccgtaattggtacagcaacgagtgaaaacggtgctaaagcgatcagcgaatatttaggcaatagaggtaaaggttttgtgttaaacgtcacagaaactgactctattgaaaaatttttagctgatgtgcgcgcggaatttggcgaaattgatattttggtcaataatgcaggtattactcgtgataacctgttgatgcgcatgaaagatgatgagtggcaagatatcattgacactaatctttcatcagtcttccgtctgtctaaagcagttatgcgtgctatgatgaaaaaacgttatggtcgcataattactattggttcagtagttggaaccatgggtaatgctggacaggcaaactacgcggcagcaaaagcgggtgtgattggttttagtaaatcattagcacgcgaagttgcttcccgtggcattacggtaaatgttgttgctcctggctttatcgaaactgatatgaccagagcgttaacagaagaccaaagagccggtattttatctcaagtgccagctaaccgtttaggtaatgccaaagagattgccagtgctgtagctttcttagcttctgatgaagcaggctatatcacgggtgaaacattgcatgtcaatggcggcatgtacatggtctaa

SEQ ID NO: 118382 - protein, 248 aa, Proteus mirabilis
LRDLMGFDGKIALVTGASRGIGRAIAEKLIACGATVIGTATSENGAKAISEYLGNRGKGFVLNVTETDSIEKFLADVRAEFGEIDILVNNAGITRDNLLMRMKDDEWQDIIDTNLSSVFRLSKAVMRAMMKKRYGRIITIGSVVGTMGNAGQANYAAAKAGVIGFSKSLAREVASRGITVNVVAPGFIETDMTRALTEDQRAGILSQVPANRLGNAKEIASAVAFLASDEAGYITGETLHVNGGMYMV

SEQ ID NO: 118383 - DNA, 1326 bp, Zea mays
  CDS (157)..(1113)
gcgcggagcttccaaagcccccgtcccccaatagactcctccccatccgtgctctgctccgtcacggctcaaatactccgcctgcatctccaaagcacactgctccctctggcttcccgcctcctcttcggctccttcgcgtcccgacgccccctcatggccaccgccgccgccaccgcagcagcagcagcagtctcctccccggctgcgcgtggagcagccggggccgccgccgcctcccgccgggggttcgtcacgtttggtggaggcgccgcccgcttctctcccacgctgcggtccggccgtgggttctctggtgtgcaaacccatgttgctgctgttgaacaagcagttgtaaaagatgctaccaagctggaagctccagttgttgttgttacaggtgcatctagagggattggtaaggcaactgctctagcccttggaaaagcaggatgcaaggttctggtaaactatgcccggtcctcgaaagaggctgaagaggtctccaaagagattgaagcatctggtggtgaggctatcaccttcggaggagatgtttcaaaagaagctgatgtagagtctatgatgaaagcagctctagataaatggggaacaatagatgtgctggtaaataatgcagggattacacgagacacattgttgatgaggatgaagaaatctcagtggcaagacgtaattgatctgaatcttactggcgtcttcctttgtacacaggctgcaacaaaagtaatgatgaaaaagagaaagggaaaaattatcaacattgcatctgtagttggtcttactggcaatgttggccaagctaattatagcgcagccaaggctggagtgattggtttcacaaaaacagttgccagggagtatgcaagcagaaatatcaatgtgaatgctattgcaccagggttcattgcatctgatatgactgccgaacttggagaagagcttgagaagaaaatcttgtcaaccattccgttagggagatatggccaaccagaggaagttgcagggttggtcgagttcctggcccttaaccccgcagctagctatatgactggacaggtgcttacaattgacggagggatggtaatgtaagatttgagttagcttgatgcacttctacttttgctgagcatttaatgttgaacacccttgttgtgcacgggcgattttggacaacaaattagtgttgtctctttctttgtaatactctctggtaataaatctagcatgtggaatggaagttgaaatctgggttttcgtgtaaaaaaaaaaaaaaaaaaaaaaaaaaaaaaaaaaaaaaaaaaa

SEQ ID NO: 118384 - protein, 318 aa, Zea mays; identical to SEQ ID NO: 59745

SEQ ID NO: 118385 - DNA, 1286 bp, Zea mays
  CDS (115)..(1053)
ccacaccaaacgtgccaaacccccaacgccatcctctataaacggcttcctcgcgggctccccctccccctccccgactcctccccatcgcccatcgccgccctccgatccttcatggccgctgccacagccgccgccgccgcgctcgcctccccggcgggcctctccacatcgctggcgcgccgcggcctcgtcagcttcgcacccgcgctccgccccggccctgaccgcagctctcgcgccgtcgccctcctcggtgtacgaactcatgtcacggctgttgatcaagccattgtaaaaggtgatacaaagttggaaggtcctgtggttgttgttactggtgcttccagggggattggaaaagccactgcattggctcttggaaaagcaggctgcaaggtcttggtgaattatgctcgatcttcaaaggaggctgaagaagtctccaaggagattgaagcatctggaggccaggccattacctttggaggagatgtttccaaagaggctgatgttgaatctatgataaaagtggctgttgatacatggggaacgattgatgtactagtaaataatgcaggaatcacacgggacacattgttgatgagaatgaagaaatcacagtggcaagatgcgattgatttgaatcttacaggcgttttcctttgcacgcaggctgcaacaaaagtaatgatgaagaagaaaaagggaagaattatcaatatagcatcggttgttggtcttactggtaatgctggacaagctaattatgctgctgccaaggctggggttattgggttcacaaaaacagttgctagggagtatgccagcagaaatattaatgcaaacgttatcgctcctggatttattgcttcagatatgactgctgaacttggtgaagagttagagaagaaaattctgtcaactattcctttagggcgctatggtcggccagaggatgtagcaggcctggtggaattcttagccctcagccctgctgcaagctacatcactggacaggtcctcaccatcgatggaggaatggtaatgtaaggcttcgaatctgtgccgctggcctctaatgtgtcgcagaaaaaaaatgtaattcagttttttgagtgtcatttttaaggggtggtttcttttgtccgcagcggtttgtggtatagtacagtttgtttcgaagggagagttgatactagaaatttgcacacgtatagttagcttaatttctttgcgattggccgattgctccaaaaaaaaaaaaaaaaaaaaaaaaaaaaaaa

SEQ ID NO: 118386 - protein, 312 aa, Zea mays
MAAATAAAAALASPAGLSTSLARRGLVSFAPALRPGPDRSSRAVALLGVRTHVTAVDQAIVKGDTKLEGPVVVVTGASRGIGKATALALGKAGCKVLVNYARSSKEAEEVSKEIEASGGQAITFGGDVSKEADVESMIKVAVDTWGTIDVLVNNAGITRDTLLMRMKKSQWQDAIDLNLTGVFLCTQAATKVMMKKKKGRIINIASVVGLTGNAGQANYAAAKAGVIGFTKTVAREYASRNINANVIAPGFIASDMTAELGEELEKKILSTIPLGRYGRPEDVAGLVEFLALSPAASYITGQVLTIDGGMVM

SEQ ID NO: 118387 - DNA, 1398 bp, Glycine max
  CDS (122)..(1084)
cccaaagcactaatctaacaaacgcaatttaaaaaccgcaacaaactttctctcttgcgttcacacttattctctggcttcttcttccattttcgcttctcgtagcgttttcggaacagttatggcttccattgccggatccaactgcgtcgctctccgaaccgccaacttcggcgcctccggtaaccggaaaatcggccagatccgccaatggtctccgattctcacgaatctccgtcccgtttccggtcttcgtcaccgatcgaatactccgtttagctcctccggtgtgagagcacaggttgctactctggaggaagcaggaaccggagcaactcagaaagtggaagcgccggttgcagtggtgaccggagcttccagaggcattggcaaagcgattgcactgtcattaggtaaagcaggttgcaaggttctggtcaactatgcaaggtcatccaaggaagctgaggaggtttccaaggagattgaggagtttggtggtcaagctcttacatttggtggagatgtttctaacgaggctgatgtggagtctatgattaaaactgcagttgatgcttggggaacagttgatgtattaataaacaatgcaggaataacaagagatggtttattaatgagaatgaagaaatctcaatggcaggatgttattgatctaaatctcactggtgtttttctttgcacacaggctgctgctaagattatgatgaagaaaaagaagggaaggatcgtcaatattgcatcagttgttggtttggttggcaatgttggacaagccaattatagtgctgcaaaagcaggagtaattggcctgacaaaaactgttgcgaaggaatatgctagtagaaacatcactgttaatgcagttgctccagggtttattgcatctgacatgactgccaagctaggacaagacattgagaaaaagattttggagacaatcccattaggaagatatggccaaccagaggaagttgctggactggttgaattcttggctcttaatcaagctgccagttacatcactgggcaggttttcaccattgatggaggtatggtgatgtaaattagcaatccttttaccttgcaacatgagcttttgcacttttaaactacttctgtacggtgatagtttgttctttgctgagttttgtttaagctagttttaccctgtgatttatcgtagaatattagttgaaatgcaattcagtcacttttggcactagctctgaattgcttactgatgaaatgcaatgtgtccagcatcttgtaccattttggtttttatggtcatgtcagcagaataggcataattcttatatgcaattcagtcacttttggcactaaaaaaaaaaaaaaaaaaaaaaaaaaaaaaaaaaa

SEQ ID NO: 118388 - protein, 320 aa, Glycine max; identical to SEQ ID NO: 40614

SEQ ID NO: 118389 - DNA, 738 bp, Bradyrhizobium sp. ORS278
  CDS (1)..(738): transl_table=11
atgttcgatctgagtggcaggaccgcgctggtcaccggcgcgaccggcggcatcggcaatgcgattgccaaggccttgcatgcccagggggcgaccgttgccgtgtccggcacccggcgcgaggtgctcgagaccttggcggccgagctgggcagtcgcgtccacgtgctgccctgcaacctgtcggatgccgccgaggtcgaggcgctggtgccggctgcggagcaggcgatgggacaggtcgacattctcgtcgccaacgcgggaatcacccgggacaacctgttcgtgcagctgcgcgacgaggattgggacgaggtcatcaaggtcaacctcaccgcgaccttccgcctgtcgcgcgccgccaccaagctgatgatgcgcaagcgcttcggccgcatcatcgcgatcacctcgatcgtcggcgtgaccggcaatccggggcagggcaattacaccgcgtcgaaggccggcatcatcggcatgatcaagacgctcggcgccgaatatgccaagcgcggcgtcaccgccaattgcatcgcaccgggcttcatcaagacgccgatgacggatgcgctcaacgacaagcagcgcgagagcatcctggcgaaggtgccggcggcgcgtctgggcacccccgaggacattgctgcagctgcggtgtacctcgcctccaacgaggccgcctacgtcactggacagaccatccacgtcaatggcggcatggccatgatctag

SEQ ID NO: 118390 - protein, 245 aa, Bradyrhizobium sp. ORS278
MFDLSGRTALVTGATGGIGNAIAKALHAQGATVAVSGTRREVLETLAAELGSRVHVLPCNLSDAAEVEALVPAAEQAMGQVDILVANAGITRDNLFVQLRDEDWDEVIKVNLTATFRLSRAATKLMMRKRFGRIIAITSIVGVTGNPGQGNYTASKAGIIGMIKTLGAEYAKRGVTANCIAPGFIKTPMTDALNDKQRESILAKVPAARLGTPEDIAAAAVYLASNEAAYVTGQTIHVNGGMAMI

SEQ ID NO: 118391 - DNA, 735 bp, Dichelobacter nodosus VCS1703A
  CDS (1)..(735): transl_table=11
atgattgaacttcatattgcattggttactggtgccaacggtggtatcggtaccgcgattactgacaccctcgcagcaaatggttatttagtcatcggaaccgccatttcagaagaaggcgccgccgatattacaaaacgtctgcaacaaaatggttatcaagggcgcggcattgttttagacgtaaccgatcccgaatctgtagaaagcgcgatgactttaatcaaagctcaatacggcagcatttccgtgctggttaataacgcgggcatcaccaaagataatttgctcattcgcatgaaagaagaagaatgggagcaagtgattaatacgaatctcaccagcattttccgcatgagtaaagccgtggtcaaagatatgatgaaatctcgttacggtcgcattattaatattgcttctgtagtcggcgtgatgggtaatgctgggcaaactaattacggcgcctccaaagccggactcatcggatttgccaaatcattagcgcgggaaatcggttcacgcggaattacggtaaataatatcgcacctggatttatcaatacgccgatgactcaaaatctcccagaagcgcaaaaaaaattaatgttagatgccattccgttgggcagatttggtgaagcacaagaagttgccgatgccgtattatttttagcaaaatccagctatatcactggagaaactttacatgtcaatggcggcatgtacatgatttaa

SEQ ID NO: 118392 - protein, 244 aa, Dichelobacter nodosus VCS1703A
MIELHIALVTGANGGIGTAITDTLAANGYLVIGTAISEEGAADITKRLQQNGYQGRGIVLDVTDPESVESAMTLIKAQYGSISVLVNNAGITKDNLLIRMKEEEWEQVINTNLTSIFRMSKAVVKDMMKSRYGRIINIASVVGVMGNAGQTNYGASKAGLIGFAKSLAREIGSRGITVNNIAPGFINTPMTQNLPEAQKKLMLDAIPLGRFGEAQEVADAVLFLAKSSYITGETLHVNGGMYMI

SEQ ID NO: 118393 - DNA, 753 bp, Dehalococcoides sp. BAV1
  CDS (1)..(753): transl_table=11
atgggtaacatgcttggtttaaatggcaaagtagccctgattaccggctccggcaggggcataggcaaagccatagctttgcggttcgccgaagcaggggcaaaagtggtagtaaacagtctgtctcccaatggtgaagaaacggcctctcagatacgttctcaggacggacaggccatattcgttcaggctgatgtaagccaaagtagcggggtagaagcccttttcaaagccagccaggaagcctttggcggagtggatatactggtaaacaatgccggcataacccgtgaccagttgaccatgcgtctgtccgaagaagactgggacagtgtaatacaaaccaacttaaagagtgtttttttgtgttccaaggccgccctccgccagatgctgaaaaaccgctggggacggataataaacctcagttccatagtcggtctgaagggcaacccggggcaggctaattatgccgccgccaaagccggcattctgggattcagctattctttggctaaagaagtggccagccgcaatattactgtcaattccatagcacccggttttatagaaaccgatatgaccgcagccctgtctgacgaacaaagacaggctataacagcccgaatacccatgcaaaaacttggcacagtggaagatatagccgcctgtgcattatacttggcacaagaagatgccaaatacattaccggacaggtaatttgcctggacggcggtatgtctataatataa

SEQ ID NO: 118394 - protein, 250 aa, Dehalococcoides sp. BAV1
MGNMLGLNGKVALITGSGRGIGKAIALRFAEAGAKVVVNSLSPNGEETASQIRSQDGQAIFVQADVSQSSGVEALFKASQEAFGGVDILVNNAGITRDQLTMRLSEEDWDSVIQTNLKSVFLCSKAALRQMLKNRWGRIINLSSIVGLKGNPGQANYAAAKAGILGFSYSLAKEVASRNITVNSIAPGFIETDMTAALSDEQRQAITARIPMQKLGTVEDIAACALYLAQEDAKYITGQVICLDGGMSII

SEQ ID NO: 118395 - DNA, 765 bp, Bombyx mori; identical to SEQ ID NO: 59376
  CDS (1)..(765)

SEQ ID NO: 118396 - protein, 254 aa, Bombyx mori; identical to SEQ ID NO: 59377

SEQ ID NO: 118397 - DNA, 768 bp, Bombyx mori; identical to SEQ ID NO: 40385
  CDS (1)..(768)

SEQ ID NO: 118398 - protein, 255 aa, Bombyx mori; identical to SEQ ID NO: 40386

SEQ ID NO: 118399 - DNA, 735 bp, Bombyx mori
  CDS (1)..(735)
atggataaatattttgaaggaaaaagaatacttgttactggtggttgtcaagggataggtcgtggattagtcttagaactttggagactgggtgcgaatgttgttactgtttcaaataatgctgaaaacttaaacaaactcaaagaggaatatccatccattgaaatagtgtacgttgatcttcgaaattggaataaaacaagagaagtcattgatgctcttggagtttttgatggccttgtcaataatgccggtattgctataatcgaaccttttttggaatgcaaaaaagaaagcctaaatgaaacctttgatgtaaatgttaatgccgttattaatgtgagtcaagtggtagcgaaaaaaatgatagaaaacaaaagaaaaggttccatcgtaaatatttcatcgcaagcttctaaggcagctctaaaggatcacgtagcatattgtgcctcaaaaggtgctctagacgcactaaccagggttatggccctagaactgggacctttgggcatacgaattaatacagttaaccctactgtcattatgactgaaatgggtagaaaagtttgggcggaaccatcaaaatcaaaggaaatgttatctaaaatacctcttggaagattcggtgaggtggaggaagtggttaatgcggtaatattcctgctttgtgacagtgctagtttaatttctggagtacaattaccaattgacggagggtttttggcaacataa

SEQ ID NO: 118400 - protein, 244 aa, Bombyx mori
MDKYFEGKRILVTGGCQGIGRGLVLELWRLGANVVTVSNNAENLNKLKEEYPSIEIVYVDLRNWNKTREVIDALGVFDGLVNNAGIAIIEPFLECKKESLNETFDVNVNAVINVSQVVAKKMIENKRKGSIVNISSQASKAALKDHVAYCASKGALDALTRVMALELGPLGIRINTVNPTVIMTEMGRKVWAEPSKSKEMLSKIPLGRFGEVEEVVNAVIFLLCDSASLISGVQLPIDGGFLAT

SEQ ID NO: 118401 - DNA, 966 bp, Oryza sativa (japonica cultivar-group)
  CDS (1)..(966)
atggggaccatcaccgccgccaaagcagccgcggcggcggccgtcttccagtctccgtgctcccctgcgcctgcggccagcttccccgcccgcagcgtccggccggatcgccgccgcgccgtctcgctctcagtctcaggtgtaagaactcatgttgcagctgttgaacaagcagtggtacaagatgctattgcacagtcagaggctccagttgttgttgttacaggtgcttccaggggaattgggaaagccattgcattggcttttggaaaagccggctgcaaggtcttagtgaattatgctcggtcttcaacagatgctgaagaagtctgcaaagagattgaaggatttggtggtcaggcaattaccttccgaggagatgtttctaatgaagccgatgtggattctatgattaaagcagctgttgatacatggggtacaattgatgtacttgtaaacaatgcaggaatcacacgggatacattgttgctgagaatgaagaaatctcagtggcaagatgtagttgatcttaatcttacgggcgtattcctttgcacacaggctgcgacaaaagtaatgatgaagaagaaaaagggaagagttatcaacatagcatcagttgttggccttactggcaatcttggccaagttaattatgctgctgccaaggctgcagttattgggttaacaaaaacaactgctagggaatttgcaagcagaaatattacagtgaatgctgttgctcctggatttatttcatcagatatgacctcccaacttggggaggagattgagaagaaaaatctgataactattcccttagggagatatggtgaaccagaggaagttgctgatctggttgagttcttagcacttagccctggtggaagctacatcactgggcaggtctcatactctcgtgtcaccatacaggtcctcactattgatggaggaatggtaatgtaa

SEQ ID NO: 118402 - protein, 321 aa, Oryza sativa (japonica cultivar-group)
MGTITAAKAAAAAAVFQSPCSPAPAASFPARSVRPDRRRAVSLSVSGVRTHVAAVEQAVVQDAIAQSEAPVVVVTGASRGIGKAIALAFGKAGCKVLVNYARSSTDAEEVCKEIEGFGGQAITFRGDVSNEADVDSMIKAAVDTWGTIDVLVNNAGITRDTLLLRMKKSQWQDVVDLNLTGVFLCTQAATKVMMKKKKGRVINIASVVGLTGNLGQVNYAAAKAAVIGLTKTTAREFASRNITVNAVAPGFISSDMTSQLGEEIEKKNLITIPLGRYGEPEEVADLVEFLALSPGGSYITGQVSYSRVTIQVLTIDGGMVM

SEQ ID NO: 118403 - DNA, 810 bp, Oryza sativa (japonica cultivar-group)
  CDS (1)..(810)
atggccgaggcggtcgcaagcggcgcagcggggagatggaccctccgcggcaagacggccctcgtcaccggcggcacccgcggcatcgggcatgcggtggtggacgagctggcggcgctgggggcggccgtgcacacctgctccaggaaggaggccgagctgggcgagcgcctcagggagtgggagggcaagggcttccgcgtcaccggctcagtctgcgacgtctccgtgcgggagcagcgggaacgcatgctccgcgaggtcgccggcctctacggtggcaagctcgacatcctcgtgaacaacgtgggaacaaacttttcaaaacaaaccactgaatactctgcagatgattactcgttcataatggccaccaatcttgaatctgcgtatcatctgtgccaacttgctcatcctcttctcaaatcatctgggtcaggaagcgttgtcttcatatcgtcagtctctggagtggtggctgtaagttctggctctgtctatgcgatgacaaaaggtgccatgaaccagctggccaagaacctggcatgtgagtgggcgaaagacaatataagaaccaattctgttgcaccatggtacatgaagacttcacttgtggaagatgaattggcaaggaaggacttcgctgacagcgtcgtgcgtcgaacagcgctgaagcgcgtgggagaaccagaagaggtgtcatcgctggtcgcgttcctgtgcatgcccggcgcttcctacatcaccggccagacgatctcggtcgacggcggcatgaccataaacggactgtatccaactcaggactag

SEQ ID NO: 118404 - protein, 269 aa, Oryza sativa (japonica cultivar-group)
MAEAVASGAAGRWTLRGKTALVTGGTRGIGHAVVDELAALGAAVHTCSRKEAELGERLREWEGKGFRVTGSVCDVSVREQRERMLREVAGLYGGKLDILVNNVGTNFSKQTTEYSADDYSFIMATNLESAYHLCQLAHPLLKSSGSGSVVFISSVSGVVAVSSGSVYAMTKGAMNQLAKNLACEWAKDNIRTNSVAPWYMKTSLVEDELARKDFADSVVRRTALKRVGEPEEVSSLVAFLCMPGASYITGQTISVDGGMTINGLYPTQD

SEQ ID NO: 118405 - DNA, 828 bp, Oryza sativa (japonica cultivar-group)
  CDS (1)..(828)
atggcgggtagcagctacggcgacgttcatgagtctgcaagaaagttggtgggcaaggtggcgctgatcaccggcggcgcgagcggcatcggggagtgcacggcgcggctgttcgtgaagcacggggcgcaagtcgtggtcgccgacatccaggacgaggcgggggcgcgactgtgcgccgagctcgggagcgccaccgccagctacgtgcggtgcgacgtgacgagcgaggacgacgtcgcggccgcggtggaccacgccgtggcgaggtacgggaagctggacgtcatgttcaacaacgccgggatcggcggcgcggcgtgccacagcatcctggagagcaccaaggccgactttgaccgcgtgctggccgtgaacctgacgggcccgttcctgggcacgaagcacgcggcgcgggtgatggtggccgcggggcgcggcgggtgcatcatcgggacggcgagcctcgcgtcggcggtggccggcacggcgtcgcacgcgtacacgtgcgccaagcgcgcgctggtggggctgacggagaacgcggcggcggagctgggccgccacgggatccgcgtcaactgcgtgtcgcccgccgcggcggcgacgccgctggccacggggtacgtgggcctggagggggaggcgttcgaggccgccatggaggccgtggccaacctcaagggcgtgcgcctccgcgtggaggacatcgccgccgccgtgctgttcctcgccagcgacgacgcgcgctacgtcagcggccacaacctgctcatcgacggcggctgctccatcgtcaacccgtcctttggcatcttcaaggactga

SEQ ID NO: 118406 - protein, 275 aa, Oryza sativa (japonica cultivar-group)
MAGSSYGDVHESARKLVGKVALITGGASGIGECTARLFVKHGAQVVVADIQDEAGARLCAELGSATASYVRCDVTSEDDVAAAVDHAVARYGKLDVMFNNAGIGGAACHSILESTKADFDRVLAVNLTGPFLGTKHAARVMVAAGRGGCIIGTASLASAVAGTASHAYTCAKRALVGLTENAAAELGRHGIRVNCVSPAAAATPLATGYVGLEGEAFEAAMEAVANLKGVRLRVEDIAAAVLFLASDDARYVSGHNLLIDGGCSIVNPSFGIFKD

SEQ ID NO: 118407 - DNA, 915 bp, Oryza sativa (japonica cultivar-group)
  CDS (1)..(915)
atggcctccgccgcatactacgccgggctcgtcgccggcacgccacctccgccgtgtcgccctggccggctccggcggtgtcagccgccggccaataacctcgtctcatcaggtagaagaagccatcaagcaattagggtcaccaatggagtgaacatggatggccgggcaaagcttgcagccccagttgcagtggtcactggagcatctagagggattggaagagccatcgctgtggctcttggcaaagcagggtgcaaggtgattgtgaactatgccaagtcaggtatggaagctgaagaagtgtgcagagagattgaggagtccgggggcaccgcgatcaccttctctgctgacgtctccatcgaagccgaggtcgaatccatgatgagagccgcaattgacacttggggaacactagacgtgctggtgaacaatgcagggatcacaagagacgcactgctgatgcggatgaagcggacacagtggcaggaggtcgtcgacgtcaacctcaccggcgtctacctctgcgctcaggctgcggcgggggtgatgatgatgaagaagaagggaaggatcatcaacatcacctcggtttccgggatcatcggcaacattgggcaggccaactactgcgctgccaaggccggggtgatcggtctgaccaaagccatggccagggagtacggcagcagaaacatcaatgtgaacgccgttgctcctggctgggtgacctccaacatgaccgcaaaactaggcgacaatgtcgaacagaaggctctcgagacgataccgttaggacggtttggcaaaccagaagagatagccggtctggtggagttcctggccgtccatcctgctgcaagctacatcactgggcaggtgctgccggttgatggtggcctgtcaatttga

SEQ ID NO: 118408 - protein, 304 aa, Oryza sativa (japonica cultivar-group)
MASAAYYAGLVAGTPPPPCRPGRLRRCQPPANNLVSSGRRSHQAIRVTNGVNMDGRAKLAAPVAVVTGASRGIGRAIAVALGKAGCKVIVNYAKSGMEAEEVCREIEESGGTAITFSADVSIEAEVESMMRAAIDTWGTLDVLVNNAGITRDALLMRMKRTQWQEVVDVNLTGVYLCAQAAAGVMMMKKKGRIINITSVSGIIGNIGQANYCAAKAGVIGLTKAMAREYGSRNINVNAVAPGWVTSNMTAKLGDNVEQKALETIPLGRFGKPEEIAGLVEFLAVHPAASYITGQVLPVDGGLSI

SEQ ID NO: 118409 - DNA, 774 bp, Arabidopsis thaliana
  CDS (1)..(774)
atgtcgggactcagattggatggcaaaatcgcaataataacaggcggagctagcgggattggagccgaagcggttaggctgttcacggaccacggagctaaggtggtcatcgttgactttcaagaagaacttggtcaaaacgttgccgtttctgtcgggaaagacaaagcaagtttttaccgttgcgatgttacaaacgaaaaggaggtagaaaacgccgttaagttcaccgtcgaaaagtacgggaagcttgacgttctctttagtaacgccggcgttatggaacagccgggaagctttctcgacttgaatctggaacagtttgaccgaaccatggcggtcaacgttcgtggtgcggctgcgtttatcaaacacgctgcacgagccatggtggagaaaggcacgcgtgggtcaatcgtatgtacgaccagcgtcgcgtcggagatcggtggtccaggacctcacgcgtacacggcgtctaagcacgctcttctcgggctggttaaatcggcttgtggcgggctagggaagtacgggattagagtcaacggcgttgcaccatacgcggtggcgacggcgataaatagccgtgacgaggaaacggtgaggatggtggaggaatatagcgcagccacggggattctcaaaggtgtggtgcttaaggctcgccatgtggcagaggcggctttgtttctggcttcggatgattcggcttacgttagcggtcagaatctggctgttgacgggggttatagcgtcgttaagcccatttga

SEQ ID NO: 118410 - protein, 257 aa, Arabidopsis thaliana
MSGLRLDGKIAIITGGASGIGAEAVRLFTDHGAKVVIVDFQEELGQNVAVSVGKDKASFYRCDVTNEKEVENAVKFTVEKYGKLDVLFSNAGVMEQPGSFLDLNLEQFDRTMAVNVRGAAAFIKHAARAMVEKGTRGSIVCTTSVASEIGGPGPHAYTASKHALLGLVKSACGGLGKYGIRVNGVAPYAVATAINSRDEETVRMVEEYSAATGILKGVVLKARHVAEAALFLASDDSAYVSGQNLAVDGGYSVVKPI

SEQ ID NO: 118411 - DNA, 795 bp, Arabidopsis thaliana; identical to SEQ ID NO: 59418
  CDS (1)..(795)

SEQ ID NO: 118412 - protein, 264 aa, Arabidopsis thaliana; identical to SEQ ID NO: 59419

SEQ ID NO: 118413 - DNA, 744 bp, Helicobacter pylori J99
  CDS (1)..(744): transl_table=11
atgcaattcacagggaaaaatgttcttattactggagcttctaaaggcattggggccgaaatcgccaaaactctcgcttctatggggctgaaagtttggatcaattaccgcagtaatgctgaagtggctgacgctttgaaaaatgggcttgaagaaaaaggctataaagcggctgtcattaaatttgatgcggcttctgaaagcgattttgttgaagcgatacaaaccattgtccaaagcgatgggggtttgtcttacttggtgaataacgccggtgtggtacgcgataaattagcgatcaaaatgaaaacagaagattttcaccatgtcatagaaaataaccttacttcagcttttataggttgcagagaggctttaaaagtgatgagcaagagtcgttttgggagcgtggttaatgtcgcttctatcattggtgaaagaggcaatatggggcagacaaactactcagcgagtaagggggggatgattgcgatgagcaagtcctttgcttatgagggagctttaaggaatattcgtttcaactctgtaacgccaggctttatagaaaccgacatgaacgctaatttgaaagacgaactcaaagcggattacgttaaaaacattcctttaaacaggctagggtctgctaaggaagtggcagaagcggtagcgtttcttttgagtgatcactctagttacatcactggagagactctcaaagtcaatggcgggctttatatgtag

SEQ ID NO: 118414 - protein, 247 aa, Helicobacter pylori J99
MQFTGKNVLITGASKGIGAEIAKTLASMGLKVWINYRSNAEVADALKNGLEEKGYKAAVIKFDAASESDFVEAIQTIVQSDGGLSYLVNNAGVVRDKLAIKMKTEDFHHVIENNLTSAFIGCREALKVMSKSRFGSVVNVASIIGERGNMGQTNYSASKGGMIAMSKSFAYEGALRNIRFNSVTPGFIETDMNANLKDELKADYVKNIPLNRLGSAKEVAEAVAFLLSDHSSYITGETLKVNGGLYM

SEQ ID NO: 118415 - DNA, 729 bp, Pasteurella multocida subsp. multocida str. Pm70
  CDS (1)..(729): transl_table=11
atgcagggtaaaattgcattagtaacaggcgcaacgcgtggtattggtcgtgcgattgcagaagaattaagtgcaaaaggcgcatttgttatcggtacagcaacgtctgaaaaaggcgcagaaagtatttctgcctatttaggcgagaaaggtaaagggcttgtgctgaacgtgtctgatcttgcctcgattgaaacaacgctagagaaaatcaaagcagatttcggtgagattgatattttagtcaataatgcaggcattacacgtgataatctgttaatgcgtatgaaagatgaagaatggtttgatatcatgcaaactaatttaacttcggtgtatcacttatcaaaagccatgttgcgttctatgatgaaaaagcgttttggtcgcattattacgattggttcagtagtcggatcgatgggtaatcctggtcaaactaactattgtgctgcaaaagcaggcttgattggttttagtaaagcgcttgcaaaagaagtggcttcgcgtggtattactgtgaatgtagtagcgcctggttttatcgcaaccgatatgacagatgtgttaacagaagagcaaaaagccggtattttatctcaagttccagcagggcgtttaggtgatccaaaagatattgccaaagcggtcgcctttttagcttcggatgatgcgggttatattacaggtactacattacatgtgaatggtgggatgtataccaactaa

SEQ ID NO: 118416 - protein, 242 aa, Pasteurella multocida subsp. multocida str. Pm70
MQGKIALVTGATRGIGRAIAEELSAKGAFVIGTATSEKGAESISAYLGEKGKGLVLNVSDLASIETTLEKIKADFGEIDILVNNAGITRDNLLMRMKDEEWFDIMQTNLTSVYHLSKAMLRSMMKKRFGRIITIGSVVGSMGNPGQTNYCAAKAGLIGFSKALAKEVASRGITVNVVAPGFIATDMTDVLTEEQKAGILSQVPAGRLGDPKDIAKAVAFLASDDAGYITGTTLHVNGGMYTN

SEQ ID NO: 118417 - DNA, 732 bp, Lactococcus lactis subsp. lactis Il1403
  CDS (1)..(732): transl_table=11
atggaaattaaaaataaaaatgtctttgtgactggttcaacacgtggaattggtaaagcaattgcgcttcaatttgctaaagcgggttctaatctaattattaatggtcgttcagcaatttcagaagaattattagctgaatttacagcctatggtgttaaagcagttggtatttctggtgatatttcaaaatcagaagatgcaaaacaaatggttgcagaagcgattgaaactcttggttcagtagatattttggtaaacaatgcaggaattactcgtgatggtttatctttgaagatgtcagaagaagattttgagtctgttcttaaaatcaacttgactggggctttcaatatgacacaggctgttttgaaaccgatgaccagagctcgttctggagcaattattaatatctcatcagttgttggacttatgggaaatgctgggcaagcaaattatgccgcttcaaaagcaggacttattggtttgacaaaatcaattgctagagaagttgcggcacgaaatgttcgtgtcaatgctgtggctccaggatttattgaatcagatatgactgaagttctttctgataaagttaaagatgcaatgaaggggcaaattccaatgaaacgttttggaatgcctgaagaaattgcaacagcaactcaattcttggctgaacaagaatatatgactggacaagtacttaccattgatggtggagtttcaatgtaa

SEQ ID NO: 118418 - protein, 243 aa, Lactococcus lactis subsp. lactis Il1403
MEIKNKNVFVTGSTRGIGKAIALQFAKAGSNLIINGRSAISEELLAEFTAYGVKAVGISGDISKSEDAKQMVAEAIETLGSVDILVNNAGITRDGLSLKMSEEDFESVLKINLTGAFNMTQAVLKPMTRARSGAIINISSVVGLMGNAGQANYAASKAGLIGLTKSIAREVAARNVRVNAVAPGFIESDMTEVLSDKVKDAMKGQIPMKRFGMPEEIATATQFLAEQEYMTGQVLTIDGGVSM

SEQ ID NO: 118419 - DNA, 747 bp, Neisseria meningitidis MC58
  CDS (1)..(747): transl_table=11
atgagcacacaagatttaaacggcaaaatcgctttggtaacaggcgcatcgcgcggtatcggtgcagcaattgccgacacgctggcggcagccggtgccaaagtcatcggtacggcgaccagtgagagcggtgcggcggcgattagcgagcggttggcgcaatggggcggcgaaggccgcgtattaaattccgccgaacctgaaaccatcgaaagcctgattgccgacatcgaaaaagcgttcggcaaactcgatattctggtcaacaacgccggcatcacccgcgacaacctcctgatgcgcatgaaagaagaagagtgggacgacatcatgcaggtcaacctcaaatccgtgttccgcgcttctaaagccgttttgcgcggtatgatgaaacaacgttccggccgcatcatcaacatcacatccgtcgtcggcgtgatgggcaatgccggtcaaaccaactatgccgcggcaaaagcaggcttaatcggtttctccaaatccatggcgcgcgaagtcggcagccggggcattaccgtcaactgcgtcgcccctggctttatcgataccgacatgacacgcgccctgccggaagaaacccgccaaacctttaccgcccaaaccgccttgggcagattcggcgacgcgcaagacatcgccgatgcggttctgttcctcgcttccgaccaagcaaaatacatcaccggccaaacgctgcacgtcaacggcggtatgctgatgccttaa

SEQ ID NO: 118420 - protein, 248 aa, Neisseria meningitidis MC58
MSTQDLNGKIALVTGASRGIGAAIADTLAAAGAKVIGTATSESGAAAISERLAQWGGEGRVLNSAEPETIESLIADIEKAFGKLDILVNNAGITRDNLLMRMKEEEWDDIMQVNLKSVFRASKAVLRGMMKQRSGRIINITSVVGVMGNAGQTNYAAAKAGLIGFSKSMAREVGSRGITVNCVAPGFIDTDMTRALPEETRQTFTAQTALGRFGDAQDIADAVLFLASDQAKYITGQTLHVNGGMLMP

SEQ ID NO: 118421 - DNA, 744 bp, Campylobacter jejuni subsp. jejuni NCTC 11168
  CDS (1)..(744): transl_table=11
atgaaatttagtggaaaaaatgttttaattactggagcaagtaagggaataggtgcttctatcgcaaaaactttggcaggttttgggcttaaagtttggatcaattatcgttcaaaacctgaacttgcagatgctttaaaagatgaaattattgcaagtggtggtgttgctgctgtgattaaatttgatgcaagcaaagaagatgagtttgaaaacggcgtaaaaactatagttgagagtgatggagagttaagttatcttgtaaataacgcaggcgttacaaatgataaacttgctttaagaatgaaattagaggactttagtggcgttgtggatacgaatttaagctcagcttttttaggttgtagagaagctttaaaaaccatgagtaaaaaacgctttggtgctgttgtaaatatcgcttctattgtcggagaaatgggcaatgctgggcaagtaaattattctgctagtaagggtggaatgatagctatgactaaatcttttgctaaagaaggagcaagtagaaatttacgctttaattgcgtaactccaggttttataaaaagcgatatgactgaagttttaagcaatgaaatcaaacaaacctatcaagataatatccctttaaaacgctttgcagagcctgaagaagtagctaattgtgtagcgtttttacttagtgattatgcctcttatgtgacaggcgatgtgcttaagatcaatggtggtttatatatgtaa

SEQ ID NO: 118422 - protein, 247 aa, Campylobacter jejuni subsp. jejuni NCTC 11168
MKFSGKNVLITGASKGIGASIAKTLAGFGLKVWINYRSKPELADALKDEIIASGGVAAVIKFDASKEDEFENGVKTIVESDGELSYLVNNAGVTNDKLALRMKLEDFSGVVDTNLSSAFLGCREALKTMSKKRFGAVVNIASIVGEMGNAGQVNYSASKGGMIAMTKSFAKEGASRNLRFNCVTPGFIKSDMTEVLSNEIKQTYQDNIPLKRFAEPEEVANCVAFLLSDYASYVTGDVLKINGGLYM

SEQ ID NO: 118423 - DNA, 756 bp, Escherichia coli O157:H7 EDL933
  CDS (1)..(756): transl_table=11
atgtacaaatataatgatttaaatgaaaaaaccgtactggtgacaggagccagtggtgatattggactgggtatttgcgaaaaatatctggagcagaactgcgatgtttatgcgctctataaatccaacgacgtgcaattaacggcgctgaaagcaagccatcctgcaggcgataaactgcatattgtgcagtgcgatcttgcctgcccccagagcgtgagcgcattgtgcgaacagatagagcgccaagctggcaagattgatgtgctggtaaataacgcgggcatcgttaaagacagcctgtttgcctcgatgagttatgaggatttcacccaggttatcgaaaccaacatgttcagcattttccgtctgacgaaagacgcgctgatgctgcttcgtgcggcagaaaatcccgccattattaacgttgcctctattgcagcgctgatcccaagcgtcggtcaggcgaattacagcgcgtcaaaaggggcgatcctaggcttcacccgcacgctggcagcagaaatggcaccctggggcgtgcgcgtcaacgcggtcgcaccgggaatgattgaatcgaaaatggtgaaaaaagtatcccgcgcagtggtccgtgcggtaaccagtaccatcccgttacgccgtctgggtaaatgtgaagaagtggcgaacaccatcgtcttcttaagttcctctgcctccagctacattgtcggccagaccatcgttatcgatggcggcctggtcatgcggtga

SEQ ID NO: 118424 - protein, 251 aa, Escherichia coli O157:H7 EDL933
MYKYNDLNEKTVLVTGASGDIGLGICEKYLEQNCDVYALYKSNDVQLTALKASHPAGDKLHIVQCDLACPQSVSALCEQIERQAGKIDVLVNNAGIVKDSLFASMSYEDFTQVIETNMFSIFRLTKDALMLLRAAENPAIINVASIAALIPSVGQANYSASKGAILGFTRTLAAEMAPWGVRVNAVAPGMIESKMVKKVSRAVVRAVTSTIPLRRLGKCEEVANTIVFLSSSASSYIVGQTIVIDGGLVMR

SEQ ID NO: 118425 - DNA, 732 bp, Escherichia coli O157:H7 EDL933
  CDS (1)..(732): transl_table=11
atgagtcgttcagttctggttactggtgccagcaaaggcattggtcgcgccatcgcctgccaactggcggcagacggctttaacattggcgttcactatcaccgtgacgccacaggcgctcaggaaacgctgaatgccattgtcgccaatgggggtaacgggcgtttgctcagtttcgacgtcgcaaaccgcgaacagtgtcgggaagtgctggagcacgaaatcgcgcaacacggtgcctggtacggcgtggtcagtaacgccgggatcgcccgcgatgccgcttttccggctttaagcgatgacgactgggatgcggtgatccacaccaacctcgacagtttctacaacgtcattcagccgtgcattatgccgatgatcggcgcacgccagggtgggcgcatcatcacgctatcctcggtttccggcgtaatgggcaatcgcggccaggtgaattacagcgctgccaaagccggaattatcggcgcaacaaaagcgctggctatcgaactcgcgaagcgcaaaatcaccgtcaactgcatcgcgccggggcttattgataccgggatgatcgaaatggaagagagcgccctgaaagaggcaatgtcgatgatccccatgaaacgcatgggccaggcggaagaagttgccgggcttgccagctatttaatgtctgatattgcgggttacgtcacccgccaggttatttccatcaacggagggatgttatga

SEQ ID NO: 118426 - protein, 243 aa, Escherichia coli O157:H7 EDL933
MSRSVLVTGASKGIGRAIACQLAADGFNIGVHYHRDATGAQETLNAIVANGGNGRLLSFDVANREQCREVLEHEIAQHGAWYGVVSNAGIARDAAFPALSDDDWDAVIHTNLDSFYNVIQPCIMPMIGARQGGRIITLSSVSGVMGNRGQVNYSAAKAGIIGATKALAIELAKRKITVNCIAPGLIDTGMIEMEESALKEAMSMIPMKRMGQAEEVAGLASYLMSDIAGYVTRQVISINGGML

SEQ ID NO: 118427 - DNA, 765 bp, Deinococcus radiodurans R1
  CDS (1)..(765): transl_table=11
atgacccacaacgaaatttctcccgctcccgcccgcgtcgccctcgttactggttcgagccggggtctgggccgggccatggccctgcgactcgcccaggacggcttcacggtggccgttcactatggccggggagaagccgaggcgcagcaggtcgccgcagacatccgggcggcgggcggcgcggcgcaggtctttggtgccgacctctcgcagcccgccaacgccggaacactcgtcgaggacgtgatcgccgcgctgggccgcctcgacgtgctggtgaacaacgccggcattacccgcgacggcctcgccattcgcatgaaggacgaggactgggacgccgtgctgcaaaccaacctgtcgagcgccttcgccgcctgccgcgccgccctcaagcacatgatgaagaatcgcagcgggcgcatcgtcaacgtttcgagcgtggtcgccctcgccgggaaccccggtcaggccaactacgtggcgagcaaggcgggcctcatcggcctgacccgcgccctcgccaaggaatacggcgggcgcggcatcaccgtcaacgcgattgcgccgggctttatcgagtcggacatgaccgcgaagctgcctgaggacactaaaaagcagtatcaggcgaatattccgctggcccgcttcgggcagcccgaagaagtcgccgcgctggtcgcctttctcgcctcggagggcgccgggtacatcactgggcagaccatcggggtggacggcggtatgaacccgaattga

SEQ ID NO: 118428 - protein, 254 aa, Deinococcus radiodurans R1
MTHNEISPAPARVALVTGSSRGLGRAMALRLAQDGFTVAVHYGRGEAEAQQVAADIRAAGGAAQVFGADLSQPANAGTLVEDVIAALGRLDVLVNNAGITRDGLAIRMKDEDWDAVLQTNLSSAFAACRAALKHMMKNRSGRIVNVSSVVALAGNPGQANYVASKAGLIGLTRALAKEYGGRGITVNAIAPGFIESDMTAKLPEDTKKQYQANIPLARFGQPEEVAALVAFLASEGAGYITGQTIGVDGGMNPN

SEQ ID NO: 118429 - DNA, 750 bp, Clostridium acetobutylicum ATCC 824
  CDS (1)..(750): transl_table=11
atggaaaagttattatccggtaaggttgctgtagttacaggtgcaggaagaggacttggaagagcaatagcattgaaattagcagctgaaggagctaaccttgttgtaaattatagaagtagtgaagctgaaactcaaaagcttataaaggaaattgaagagttaggttcaaaggctgtagcagtaaaagcagatataagtaaatacgatgaagcagaaactattataaaaaaggctttggatgaatatggaactgttgatatattagttaacaatgcaggaataacaaaggataaccttttgttaagaatgaaggaagaagattttgatagtgtaattaatgtaaacctaaaaggagcatttaactgtataaagcatacaagtcgtgtgatgcttaagaaaaaaagtggtaaaataataaatatatcatctgttataggattaataggaaatgcaggtcaagtaaattatgctgctgcaaaggcaggaattataggtatgacaaaatcagtagctaaagaacttgcaagtagaggaattacagttaatgctgtagcccctggaatcataaaaagcgatatgacagatgcacttacagataagcaaagagaaagtatagtggcagcagtaccacttaataaagtaggagaggcagaagatgttgctaatcttgttctatttttagcttcagatctttcttcttatataacaggtcaagttataaatgtagatggcggaatggtaatgtaa

SEQ ID NO: 118430 - protein, 249 aa, Clostridium acetobutylicum ATCC 824
MEKLLSGKVAVVTGAGRGLGRAIALKLAAEGANLVVNYRSSEAETQKLIKEIEELGSKAVAVKADISKYDEAETIIKKALDEYGTVDILVNNAGITKDNLLLRMKEEDFDSVINVNLKGAFNCIKHTSRVMLKKKSGKIINISSVIGLIGNAGQVNYAAAKAGIIGMTKSVAKELASRGITVNAVAPGIIKSDMTDALTDKQRESIVAAVPLNKVGEAEDVANLVLFLASDLSSYITGQVINVDGGMVM

SEQ ID NO: 118431 - DNA, 738 bp, Agrobacterium tumefaciens str. C58
  CDS (1)..(738): transl_table=11
atgttagatttaacaggccgcaaagccctcgtaaccggcgcgaccggcggcattggtgaggaaatcgcccgccttctgcacaagcagggcgcaaccgtcggcctgcacggcacgcgcgttgaaaagctcgaggctctggcggcggaacttggcgaccgcgtcaagattttcccggctaaccttgccgaccgcgccgaggtcaaggctctcggcgaaaaggccgaagccgagctggaaggcgtcgacattctcgtcaacaatgccggcatcaccaaggacggcctcttcgtgcgcatgagcgacgaggactgggacaacgtcatcgaggtgaacctgacggcgatgttccgcctgacacgtgaactgacgcatccgatgatgcgccgccgtttcggccgtatcatcaacatcacctccatcgtcggcgtcaccggcaaccccggccaggccaattattgcgcctccaaggccggcatgatcggtttttcgaagtcgttggcgcaggaaatcgccacccgcaacgtcacggtcaactgcgtggcaccgggcttcatcgaaagcgcgatgaccggcaagctgaacgacaagcagaaagacgccattatgggcgccattcccatgaagcgcatgggcaccggcgccgaggttgcgtcggccgttctttatctggcttccaatgaggcagcctacatgaccggccagaccctgcacgtcaacggcggcatggcgatgatctga
